United States Patent Application Publication US 2017/0009304 A1 - sequence listing, part 39

SEQ ID NO: 818659 - DNA, 100 bp, Homo sapiens
tttaagccttggaaatggaggaaaaagaagaccagcgacaaatttagagaaacctcggcagaaaggcctaaagaatgtatttgacgaagcaatattggct

SEQ ID NO: 818660 - DNA, 98 bp, Homo sapiens
gctcatgggcacggctcgggacgccacccgctgccccgacgagtcggaactataccgagatccgggagaagctccgctcgaggctgaccaggcggaaa

SEQ ID NO: 818661 - DNA, 100 bp, Homo sapiens
ccatggctgccccgtgtttgctgcggcaaggacgagccggggcgctgaagcatgttggcagataaattgaacatgactccagaagaagctgaaaggtgga

SEQ ID NO: 818662 - DNA, 98 bp, Homo sapiens
gcgtcgggttctgttggagtgcgttcggtgtgccgtgggtccgcgctgcttccacccaacttcctgttaggtggtccgtactgagaagaacagtttga

SEQ ID NO: 818663 - DNA, 100 bp, Homo sapiens
cggcgatggtaggcgtccctggagcggccgccttccagcgtgtcgtgaaaactacccctaaaagccaaaatgggaaaggaaaagactcatatcaacattg

SEQ ID NO: 818664 - DNA, 98 bp, Homo sapiens
ttgaatctaaggaacttgttaaatctgttcgtgccttacttgatatggattgtattgactgggctcccaagagcgaccgcattgtcacttgtggggca

SEQ ID NO: 818665 - DNA, 100 bp, Homo sapiens
tctggtgtaccaggcgaagctggccgagcaggctgagcgatacgacgattgaagatggatacgtgacaatcccagggaccgctgcactgacttcatttcc

SEQ ID NO: 818666 - DNA, 100 bp, Homo sapiens
taatatggtgcttatgttgtctaattaacaaagaaccacagaattctggacaatcaaaacttaactcctggatacagcccccaggctccgctcttgccag

SEQ ID NO: 818667 - DNA, 100 bp, Homo sapiens
gcggacccagctgtcaggcaagaatttcgctaaggagtttgtgatcagtgatcggaaggagctggaggaagatttcatcaagagcgagctgaagaaggcg

SEQ ID NO: 818668 - DNA, 98 bp, Homo sapiens
gaaccacccttctactttctgtctctaggaatttcactactctagagctccagagattatattggggttgccattttgtgaagccatagacatgtggt

SEQ ID NO: 818669 - DNA, 98 bp, Homo sapiens
cctggagaggttaaagagacccgttcagagtcctacagtggcaggagatcatgcacgccctgaagatgacctggcacgtgcactgctttacctgtgct

SEQ ID NO: 818670 - DNA, 145 bp, Homo sapiens
gtcaggagttcattgcaaatctgcaaggggtaaatgagggtgttgatttctccaaggatctgctgaaacgtggggtagagcagcggctgccatgctcttctgtggcttcatcatcctggtgatctgtttcatcctctccttcttc

SEQ ID NO: 818671 - DNA, 100 bp, Homo sapiens
aatgggaagaacaatgtgccaaggctgaaattatcctacaaagaccaagctccacgaagatctctgtgagaagaggacggctgccacccttgccacccac

SEQ ID NO: 818672 - DNA, 102 bp, Homo sapiens
ccctggtaatgatctccaccctgacctggaggagccatcctctctaggggtgtaaggactcatatctgggataacatactgttacaattcaacaagaagaag

SEQ ID NO: 818673 - DNA, 98 bp, Homo sapiens
aaggggctctttttgaacattcagtggagacaccccttgtcagagccgacccgtttcaagaccttagaaaccaggttgttgcaagaggtcttctttca

SEQ ID NO: 818674 - DNA, 100 bp, Homo sapiens
ggcgctggtctttggcctctttgccctcttcaggatatggaactaacactcctagctccactgtctcaaaattccatcttctaaaccaaaactcattgct

SEQ ID NO: 818675 - DNA, 100 bp, Homo sapiens
ctggacttcatgcttagatacatgtataacaagtttccagagtgtggattctttggcatgtatgacaaaattcttctctttcgccatgacatgaactcag

SEQ ID NO: 818676 - DNA, 100 bp, Homo sapiens
accccgcgtgcgccttgctcgcccgcagccccgagaccgcagagttcggaatccagcattaagaagaaatttctcaagaggaaaggaaagaccgacagtc

SEQ ID NO: 818677 - DNA, 99 bp, Homo sapiens
tacctttgatctaagggttcagcctttcaatgtgacacaaggaaagtattctacagggtttcctatcgctgaagtgttcacgctgaagcccctggagtt

SEQ ID NO: 818678 - DNA, 100 bp, Homo sapiens
atatactttggttacctatgtacctgttaccactttcaaaaaccagcatctcagacatgtcgaaaaagatgttttgatccctaaaataatgagagaaaag

SEQ ID NO: 818679 - DNA, 100 bp, Homo sapiens
ccagcactcaaagatgccatgttggaactcaatgcttcaaatgacaggttgctgatcagctctgtgccaagtatagcaaggaatatggcaagctatgtag

SEQ ID NO: 818680 - DNA, 98 bp, Homo sapiens
ggtattgggagatccacagctaagacgccaggacccactggaagcctagaaatggttatcaatactctggctgaccatcatcatcgtgggactgactt

SEQ ID NO: 818681 - DNA, 100 bp, Homo sapiens
cattattcgaagacacagaagttgggcaagtcaaatgttgtgaacttgaatggaagctagcagaagttggagcaatacagactgatttggaagaaaaccc

SEQ ID NO: 818682 - DNA, 98 bp, Homo sapiens
gaggaggcgcggaaccatggccgatgggggcgagggcgaagacgagatccagttcctgcgaacttcagcagataagcagagagccctagaagaaacca

SEQ ID NO: 818683 - DNA, 100 bp, Homo sapiens
gaactggcttcgggaattttaccaggaacatcatcttcagcgggctatttcagcacagcaggtgtatggcgagaagagggataatatggttataccggtc

SEQ ID NO: 818684 - DNA, 100 bp, Homo sapiens
tgtacagatcattcctggtgctaagcatggaaacatccaagtcagctgtgtggagtgttctaaccaacaaggaagaacaccacacttcccaccagactcg

SEQ ID NO: 818685 - DNA, 99 bp, Homo sapiens
ccaggccgcgctcttcgagaagaacaaggacagagcgggatgccaccagcttgtccaaagggaagttccaggagctcctggtgggcatcgttgtggaga

SEQ ID NO: 818686 - DNA, 99 bp, Homo sapiens
tttgattcttttgaaccaggaatgtttcctcctactcctctttcacctgccaggttcaacatccggaggggtttccaggtatataagcaggtgtgcgcc

SEQ ID NO: 818687 - DNA, 100 bp, Homo sapiens
gagaagatattggccgacaaggaagtgaagaaggcgcatcactcccagctgcgcaaagcttgcgaggtggcgttaggaatgctgtctctgcaatttgaga

SEQ ID NO: 818688 - DNA, 100 bp, Homo sapiens
ctcagtaatgcagccacctgttgcctatccagaagaaaatacactactcatcaaggaagaaccagcactgttgcaagaattcaattccgtcttcctgatg

SEQ ID NO: 818689 - DNA, 100 bp, Homo sapiens
ttatgggatacagctggacaagaagattatgacagattacgccccctatcctatccgcaaacagttccattacagcttatagaaagtgttgaatgccgag

SEQ ID NO: 818690 - DNA, 98 bp, Homo sapiens
tctgttgttgcctccatgcgccaatccaaaccgaaagccagaaggccctgagcctgtgcaattatttcgagagtcaaaatgtggatttccgaggcaag

SEQ ID NO: 818691 - DNA, 100 bp, Homo sapiens
gaaatagatgagcctcccttgagaaaaaaaggtcagaagacatgtcttcatctacatggcatctttccttacctctatgtgccatacgatggttatggac

SEQ ID NO: 818692 - DNA, 98 bp, Homo sapiens
tccatcatgttttccaggctgatctcaaactcccacggtcaagcgatctgctggcctcggcctctcaaggaaacctctctgaggtctggtcagattcc

SEQ ID NO: 818693 - DNA, 100 bp, Homo sapiens
acattttcgaaaaactggacagagtgtatacatgcacctgaaaagacatgtgcgagagctagaacgagtaaatctgtctgcagcccagacactgagagcc

SEQ ID NO: 818694 - DNA, 100 bp, Homo sapiens
atggaactttaccagcacctggaatctaaggagtggtttgtgcagctctattaccacgggaagacggagtttcactgttgttgcccaggctggagtgcag

SEQ ID NO: 818695 - DNA, 136 bp, Homo sapiens
catatatcatgttctggctggttttaacatcgagttgcccaccttacattgccatgagcagcatcgatgattataaggctcagcctctgaggaaagaacctgaaataatcactgtgaccctaaaaaagcagaatgg

SEQ ID NO: 818696 - DNA, 98 bp, Homo sapiens
cgtgcctcatggatccaaattaaagttgcgacaaccaccagttaagcgtttgagacttcgtggtgattggtcagatactggacccagagcaaggccgg

SEQ ID NO: 818697 - DNA, 98 bp, Homo sapiens
ctataaaggggtccaccctcacatcgtggagatggacaggagacctggaatcattgttgaattggcagagggggtcgatttgggaggaaaggtgtggc

SEQ ID NO: 818698 - DNA, 148 bp, Homo sapiens
aggggaagatgaacacagtcatcgctgcactgagccgggacacgattaacaggtggtccgcaggcctgaccagcagataaaggataggttacagttacgggtgctcttgcgtcgggaagacgtcgtcctggggaggcctatgaccccc

SEQ ID NO: 818699 - DNA, 100 bp, Homo sapiens
ctctcagaagagtgagagagagctattagagattgtgaagaagaatttcgatctccgccctggggtcattgtcagagcgtgggaaaacactggtgcagaa

SEQ ID NO: 818700 - DNA, 100 bp, Homo sapiens
atggaggagatcggcctcagcccccgcaaggatggcctttcctaccagatatcagctgaacctctttgcgaggatgtgtctggaccgccaatacctggcc

SEQ ID NO: 818701 - DNA, 100 bp, Homo sapiens
tgtcttcgtttcagggagagcttatggatggagaccaaacatccagatctggagtgccggcacagacttaattcagtgcacaaatgagatgaatgtgaac

SEQ ID NO: 818702 - DNA, 98 bp, Homo sapiens
tcacactgtacttccagggagacaccgattataagaagagaaactcagcgctggggaagaaggaggatgcagcattcaaggttctatcttggaagcag

SEQ ID NO: 818703 - DNA, 98 bp, Homo sapiens
cctgagctgcaagttggaattgatataatgaagactagttttccagacacagataatgtacaagtggatagagcccaaaatctgccgggaggatctca

SEQ ID NO: 818704 - DNA, 100 bp, Homo sapiens
gaagaggaggaggaggaggggcggagggagacgcccgaggacagggaggtgcgtctgcagctggcgcggaagaggaggagatgttaaagtaacccatctt

SEQ ID NO: 818705 - DNA, 100 bp, Homo sapiens
ttgaaaatcagcagcagatgttggttgccaaggaggacaaagacactgattctaccaaagagcctctggatgaccttttccccaatgatgaagacgaccc

SEQ ID NO: 818706 - DNA, 100 bp, Homo sapiens
cgtggcaaccaaagacgggcgcctatcagtacacaataaggatgaagttggtatgtggcttcattctggaacctcggctgttgattcaacagagaaaggg

SEQ ID NO: 818707 - DNA, 100 bp, Homo sapiens
gcagtgaccctgatgatggatgccaccaatatgccagctgtcaaagccatcatatatcagtatatggaagaggtgccaaatcaatcattcaggagtttcc

SEQ ID NO: 818708 - DNA, 98 bp, Homo sapiens
tgaaaattgttaccaacaacttgaaatccctggaggcccaggcggacaagtactgccactatgttgctgggctggtcggaattggcctttcccgtctt

SEQ ID NO: 818709 - DNA, 98 bp, Homo sapiens
tcggtgcagggctccaccccgtcgcctcgacaggaagccagttgagggaagttctccatgaatgtacgtcacaatgatgatgaccgaccaaatccctc

SEQ ID NO: 818710 - DNA, 100 bp, Homo sapiens
gcgaagccttgggtttctttcttaaaggactgatttttagaactccacatttgagagctggaagtcgagtgtgctactcaactcaggagatttggagaca

SEQ ID NO: 818711 - DNA, 99 bp, Homo sapiens
tcttcctgcacacagccacgatttgcaaagggacggaagaagtctatagtggctgtggagcccaggagtcttattcaaggagcctttcaaggctgctca

SEQ ID NO: 818712 - DNA, 98 bp, Homo sapiens
cggagcttctcagaagacagagggttttcttttgaggtcatagaccttagcaacaatgctctgattaccatcctaccaatgatgatcatagctctaga

SEQ ID NO: 818713 - DNA, 98 bp, Homo sapiens
ctctgcctctcgggaatatccctccacgttgccctcaaagccctgcattccagagctgagatctgtatctgtggacctgaatgttgatccctcgcttc

SEQ ID NO: 818714 - DNA, 100 bp, Homo sapiens
actggacctaaatggcgcagcatgactttgctccagcctggcttaatttccctactccaccatcatcaacaaagacttcagattttcctgtccttgatcc

SEQ ID NO: 818715 - DNA, 100 bp, Homo sapiens
gtatccgggaggtcaacgaggtcatccagcaattttgactggagcacccgttggacttggaaatcctagctctctaggggtgggtcaacagtctgccccc

SEQ ID NO: 818716 - DNA, 100 bp, Homo sapiens
cgcgtttgtcaagttttctactcttacaaaggaactgtccacactgctgaaaaatctgaaaaatatgtcgtaactgcaagtgtggccaagaagagcatga

SEQ ID NO: 818717 - DNA, 98 bp, Homo sapiens
gaaaaattcaagaagttgaaaaacgcttttcacgtcacctggagagatgcacaggcatagaatgtcaagctaaccaggcgtccgctacttcagaagag

SEQ ID NO: 818718 - DNA, 100 bp, Homo sapiens
tacttgttgaagctgctcagaaagggtctggagaagaagggggctgtgacaggtggggaagaggttttgcagacattgggtacagaaacttaccggccta

SEQ ID NO: 818719 - DNA, 98 bp, Homo sapiens
ggcactgcggctcagaggctgggctctggggtctacatcacacgcggccagctgatgaactgccacctgtgtgcaggggtgaagcataaggtcttgct

SEQ ID NO: 818720 - DNA, 99 bp, Homo sapiens
gggaataaaactccaagaagccaggtgttcaaggtttgattactcaggagttggaagttcagatggtaactcagaggaaagcacactggggaaatggag

SEQ ID NO: 818721 - DNA, 100 bp, Homo sapiens
tggggtctgagcattccttgctgattaggagcaagttcagatcagatttggacttaaagccaccactaaaatcaattggaagcaatttctaacatcattt

SEQ ID NO: 818722 - DNA, 100 bp, Homo sapiens
cacatcaggtgatggataggagcaaccctgtaaaaccagccttagactatttttcaaacagccagtcctgctcctataattgtcaacacagatactttgg

SEQ ID NO: 818723 - DNA, 100 bp, Homo sapiens
ctgaacctatagatattcaaacctggatccttggatacaggaaaccaacagtcacacatgtacattacagagttttatggacgaggagccccctacaatg

SEQ ID NO: 818724 - DNA, 100 bp, Homo sapiens
agctgactgacgtcatccttgaagccgaccagaatgatagccagtccctggagctggtgcacaggttccagtgtacacttgactgtgaagtggctgtgag

SEQ ID NO: 818725 - DNA, 99 bp, Homo sapiens
aggcgtataatctctttgcagtgaacggcattctcttcaatcatgagagtcccagaagagatgaaatcccggacgtctacatcgtggagcgcctcttct

SEQ ID NO: 818726 - DNA, 133 bp, Homo sapiens
gatcaccagaaactagaacgtgaggctcggatatgtcgacttctgaaacatccaaacatcggttcttcctcaagttcttcctcaaatgcaaccagaactgcctgaagaatgcggggaatcccagagacatgcg

SEQ ID NO: 818727 - DNA, 100 bp, Homo sapiens
gagggaggtgcccctgcgttgtaccatccgcctgtgggacacctaccaggccttgctgtctctaaccctgatctgatctcctgccttgagcaaataaaag

SEQ ID NO: 818728 - DNA, 99 bp, Homo sapiens
gagaacactattgccaccaaatccattgaggaatacctcaagttggtgggacaacagtatcttcatgacgcactggaatactaagaagtttcagcagtg

SEQ ID NO: 818729 - DNA, 100 bp, Homo sapiens
agcagagagaatctgctacaactgctgactgatgatgaagcctggaatggattcgtggctgctgctgaactgcccagattctcaagtccaaagatttaac

SEQ ID NO: 818730 - DNA, 100 bp, Homo sapiens
agattgaattagatctaaaagccacccaggccttggtcctagcacccactcgagaattggctcagcagctggacccacaaaccgtggagaccaagaactg

SEQ ID NO: 818731 - DNA, 99 bp, Homo sapiens
aaggatacagctatgcaaatatagaacactaaagtgttacatgacagatgtatgagaggaggcctaccagaaactggccagcgagaccctggaggagct

SEQ ID NO: 818732 - DNA, 100 bp, Homo sapiens
gggacagaattggacgaaagtttcaaggagtttgggaaaaaccgcgaagtcatggggctctgtcgggaaggatccaaggagctggttctgctggttggac

SEQ ID NO: 818733 - DNA, 100 bp, Homo sapiens
ggctgtgcagctgctggaggactataagcatgggaccctgcgcccgggggtcaccaatgaacagcccatcaccacgggaggggtcacttaccgggagcag

SEQ ID NO: 818734 - DNA, 98 bp, Homo sapiens
agtgtatgctgctgcagatgggaccctggaaacgtctccagatgtggtgatggctctactaccgatccagctccaggtcccacaggggctcttcttcc

SEQ ID NO: 818735 - DNA, 137 bp, Homo sapiens
gaagggactgccagaggtggaggggaggattttgaggacacttgtggagagctcgaattccagaatgatgaaattgtgttaaaaagatcaagtggcatgagcagccttttggggaaaattggtgccaagaagcagaa

SEQ ID NO: 818736 - DNA, 98 bp, Homo sapiens
gaagaacaaagaaaacagttacaggacatagcaactctggctgatcaaagaagagcagcccatgatgaacatgctgatgaggctgcaggaggcagcca

SEQ ID NO: 818737 - DNA, 99 bp, Homo sapiens
ttatgatactcgagtatatatctgggatccacataatggagacattctgatggaatttggctgctgctgctgcactacaaggccagcgcggaagtgcag

SEQ ID NO: 818738 - DNA, 98 bp, Homo sapiens
cagtgtcagctgtacagccacactaactgtgacagaaatggtggagtcaatgaagaaagtagcagggatggatgtggagctgacagttgaagaaagaa

SEQ ID NO: 818739 - DNA, 98 bp, Homo sapiens
aaacctcagcctggaggccattcagctgtgcgaccgggacgatgaagggcgccctaatggagatcatccagctcgccagcctcgactcggacccctgg

SEQ ID NO: 818740 - DNA, 100 bp, Homo sapiens
atttggatgggatggaccatcttggaggctactcacagcccttaagttgttatgtctggaagctgagaaattgtgcgtataacccgtatatagagataat

SEQ ID NO: 818741 - DNA, 100 bp, Homo sapiens
gtgatcactggtttcgtggcctgaccaaggacctccaagacacatcatctcagagttggagcacctgacgtttgtcaacacggatgtgggccgctgccgg

SEQ ID NO: 818742 - DNA, 100 bp, Homo sapiens
ctgcatcctacagagccatggatgttggcaagtctttacaatggcagtgtgtgtgtttggaatcatgaaacacagggcaagtgtccagagaatggctggg

SEQ ID NO: 818743 - DNA, 99 bp, Homo sapiens
actattaaacttctcaatgaaactagagacatgttggaaaggtttctgaaggtttgtggatccgaattagtacgccttgaattgtcttgcagccacttt

SEQ ID NO: 818744 - DNA, 99 bp, Homo sapiens
ccggctgggcaaatactacgtcaaggagaggtctaagcattggggctttccagctctcacagaaccttcagcatccccagctgccggtcttggcatctt

SEQ ID NO: 818745 - DNA, 98 bp, Homo sapiens
aggagatggatgagaggaggcggcagaacattgcttatgaatatctgtgccacttagaggaagccaaaagaatgaagaaggagccccacaggaaggaa

SEQ ID NO: 818746 - DNA, 98 bp, Homo sapiens
tccatccatttcgtggttcacccgctgccgggcaccgaggaccagctcaatgacagtctacaaataagaaacctcgaaaatctccaggtgagaagagc

SEQ ID NO: 818747 - DNA, 100 bp, Homo sapiens
atcactcccagctgcgcaaagcttgcgaggtggcgttaggagcccacatgaacgcagctgtgacctttgctaactgtgcgctgggccgcgtgccctggag

SEQ ID NO: 818748 - DNA, 100 bp, Homo sapiens
gtgaatatcctgacatgtgacaatgaaattgaattgaagaaaattgcacgtaatcacccaaatgccaagcattacagcagaagttctggtggtgacctct

SEQ ID NO: 818749 - DNA, 100 bp, Homo sapiens
cttcttcaagcagcccaccttctgcagccactgcaccgacttcatctgggtatctcccagagccccagctggtgtggccaggccccaggagtaggatggg

SEQ ID NO: 818750 - DNA, 99 bp, Homo sapiens
tacaaaagactcagagactatataagtagcttaaagatgacaccttgcattccctatttagaaatgcatcttctgcagacaccgggttaagagggtctc

SEQ ID NO: 818751 - DNA, 100 bp, Homo sapiens
caggtgtttgtccacggagaaagcctgcagctatctgcatcatattggtgcatttactgatccgatacagattacatttcttgccagagagtgttgctgt

SEQ ID NO: 818752 - DNA, 98 bp, Homo sapiens
tggggaagctgctaacccgacccggattggcgctgaggtggcccgtggggcaggagaccccatcttcagaaccaatggaggaagaggaagatgacgac

SEQ ID NO: 818753 - DNA, 100 bp, Homo sapiens
agccattatttatgtcatcaagaagaatgacgatgacatgcacatgatggtgtccaagccagaacagtgggtaaagccaatggctgtagcaggagccaat

SEQ ID NO: 818754 - DNA, 101 bp, Homo sapiens
gagactatgcagtgcttgctgctgaacctgagctgcaagttggaattgatataatgaagactagttttccaggaccacgttatgtggtacaaataggtgac

SEQ ID NO: 818755 - DNA, 98 bp, Homo sapiens
aaccacaacatggccccacccagtgactggtccccatcctgggtcatgtggctggaattaccacgacacgaagatcgattgagaagttattagaatgg

SEQ ID NO: 818756 - DNA, 98 bp, Homo sapiens
gaaattgaatccagttgtgggtgcagtctacagtcccgaattctatgcagtcatgttgtcataggaacaactggagaagaataaagtggacacgaaaa

SEQ ID NO: 818757 - DNA, 100 bp, Homo sapiens
ccagtttggctgaaaataaaagaaaaccagaactgatggctctatttgcagtctttcagacaacattcttcttaacattgctgtccttgaggacttacca

SEQ ID NO: 818758 - DNA, 99 bp, Homo sapiens
gtgcacccagaggaccaggcggcgacttaattcagtgcacaaatgagatgaatgtgaacatcccacagttggcagacagtttatttgaaagaactacta

SEQ ID NO: 818759 - DNA, 101 bp, Homo sapiens
atgccgtcggagaagaccttcaagcagcgccgcaccttcgcacatgattaagtaccggtacatcccgttcacacatgggaagagaaggtacagaggcaagg

SEQ ID NO: 818760 - DNA, 98 bp, Homo sapiens
aagccattgcccactgctgccgcccagtgttagttttgattcatcatggataatctgtcatcagaagaaattcaacagagagctcaccagattactga

SEQ ID NO: 818761 - DNA, 98 bp, Homo sapiens
agagggagtgcgtggaggagctgtgcagccgcgaggaggcgcgggaggtgttcgagaacgaccccgagacgatgtttgagacggaggcagatgagaag

SEQ ID NO: 818762 - DNA, 98 bp, Homo sapiens
agtggcctacgagataattctattaaggttcgatacaagaggctgttttcctagcgtggcttgctgcctttggtaagaacatgtcgtccatcttgcca

SEQ ID NO: 818763 - DNA, 100 bp, Homo sapiens
tccggcaggtcgtgctccacacaccccggccctgcagccagcccagggatgccctgagccagactttgtgctccatcagttgaagagtaggatgaagaaa

SEQ ID NO: 818764 - DNA, 100 bp, Homo sapiens
ggaaaaaactccagagctcccagaaccttcagtgaaagtaaaagaaccttcagtacaagaggctacttctactaggtggttatccaaatgccaacccagt

SEQ ID NO: 818765 - DNA, 100 bp, Homo sapiens
ctagagactgactgccatgtgctcagaaagaaggcatggcaagactgtggaatgaggatattttttgaatcagaaaatcgtgaagtcgatagaaatgaag

SEQ ID NO: 818766 - DNA, 99 bp, Homo sapiens
atgaaatcacagcttcagatcactgatggaatcttgctctgtcacccaggctggagcacagtggcgcgttctcggctcattgcaacctccacctcctgg

SEQ ID NO: 818767 - DNA, 98 bp, Homo sapiens
ctgctttgcacagctttgccacaaagcccagtctgtgtctcaaatcaaccacaagctggagatagaagcagatttgggatatcctggaggtaaagcaa

SEQ ID NO: 818768 - DNA, 100 bp, Homo sapiens
aggaggtggaccagaacttttggaactagtgccggcggctctccaccccccagggtatgttggagctagaggctgagcatgaccaggacctgagtaaaca

SEQ ID NO: 818769 - DNA, 100 bp, Homo sapiens
tgcgctggccctcaaccatcagtccctgctttaagctgaagacctaactgcagcatgtctgtatttggagatggggcctctacagaagtcattaaggtta

SEQ ID NO: 818770 - DNA, 50 bp, Homo sapiens
catggagtccatcttccacgagaaattactgtaaaatggggaaaggagaa

SEQ ID NO: 818771 - DNA, 100 bp, Homo sapiens
taatcagggggagagcattacacatggacagtcattttgtttactcattcagccctgttgcaggtcccaataaactcttcataaggttgacagaagcacc

SEQ ID NO: 818772 - DNA, 99 bp, Homo sapiens
aagaatacacagtggccaccagcaggatcataaaatacatgatctgggtcagcaatctgaagatggtcttacggagcctagtagagtactcccaggatg

SEQ ID NO: 818773 - DNA, 100 bp, Homo sapiens
tgggatagtgaagcttcttgtccaaaacagatgcatgaagaagcagaggctgtgttggcaacaccaccaaagcaacctatagttgatacatctgctgaat

SEQ ID NO: 818774 - DNA, 100 bp, Homo sapiens
gaagcggggagacggctcagtaccagaatatgcttctgaaagttctgctgaagacagtgagcaggaagatgagagaggtgctcaagacatggataataat

SEQ ID NO: 818775 - DNA, 100 bp, Homo sapiens
gcaaagtgctatcaaggaaccacgctctcgtctggtttgatcacaagacgggcaagatggagcagctatcagatgaagaaattgatcatggtgctgaaga

SEQ ID NO: 818776 - DNA, 100 bp, Homo sapiens
atgtcacaaccacatgattgggattgggccagtcttaaatatctacccatggaataaagagctgtatttgatcagccaaggacccttgtcatccattaga

SEQ ID NO: 818777 - DNA, 100 bp, Homo sapiens
cgtactggctggatgcgttcctcaagcccagcctcgccaggactaccttaagggactgagtatcattgggagagaagacacggttcaatgtgtagacctt

SEQ ID NO: 818778 - DNA, 100 bp, Homo sapiens
ttgcacatccttcgaaaagctgccaagttgaaaatggacgagtaatcgcctgctttgattcattgaaaacttgggaagatccccatgaaaaagataagag

SEQ ID NO: 818779 - DNA, 100 bp, Homo sapiens
tagccaattctggaaccaaacccaagactacgtgaagcagccgacacgagtcgttgttcataaaacagcttttgaaagttgagagcacacccctggagaa

SEQ ID NO: 818780 - DNA, 98 bp, Homo sapiens
gaaaacctggagtgatgtggctgaataccgcatgatctgaagactgcactggtggctgcgagttcgtgggctggaaaagaaagcacattaaaaagatc

SEQ ID NO: 818781 - DNA, 98 bp, Homo sapiens
tactgcggccgcccggctcttgggaaccaaggatgaagcctgctgggagcgtgaatgacatggccctggatgccttcgacttggaccggatgaagcag

SEQ ID NO: 818782 - DNA, 99 bp, Homo sapiens
gggccctgagcctcctgcaacacctgcggcctcactgggacccccaggaggtgaccctgcagtgtcgatacaccctgcaatacacctacccatatgcat

SEQ ID NO: 818783 - DNA, 100 bp, Homo sapiens
gacaaagttgaaaacaaagtgctggacactttccttcctcacgtggaatgtgggacgatcactctgattggggcaaccactgaaaacccttccttccagg

SEQ ID NO: 818784 - DNA, 100 bp, Homo sapiens
gtttgctgctgcagccacgcaacagcagacagcttctaaaactgaatatcctgatgttgcttggccattgagatttcgcatcctgcatgaaattgccctt

SEQ ID NO: 818785 - DNA, 100 bp, Homo sapiens
ggcgctgcggggccgcgggggtcggcaggtgacaaacattaccaccccagctgtgcacgatgcagcagatgcaaccagatgttcacagaaggagaggaaa

SEQ ID NO: 818786 - DNA, 98 bp, Homo sapiens
acaaagaaaacagttacaggacatagcaactctggctgatcaaagaagagcagcccatgatagttatgaccagagtgcattacaggcggttcagctgg

SEQ ID NO: 818787 - DNA, 99 bp, Homo sapiens
tggtgagcgcagccactcaggctggtcctgggggtggggctgtaggggaaagtgctaaagccgctgaggccatcatgcagaagggggatacaaacataa

SEQ ID NO: 818788 - DNA, 98 bp, Homo sapiens
gcggaggaggcggccctggcgcggggaagcagtgggaaaatcgcaaggaagccgggctccagcccccttttggacatcgttggcggccggaaggcgag

SEQ ID NO: 818789 - DNA, 98 bp, Homo sapiens
ctagccctaccggactacgagtatctggtcctgatcacccgagaggatgacttcaacaacaggctgaacaaccgcgccagtttcaagggctgcacggc

SEQ ID NO: 818790 - DNA, 100 bp, Homo sapiens
gtccaccaggccctgaagggcttcacgaccaaaggtgtcacctcagtctctcagatcttccacagcccaggactcagaattcatgattgaagaaatgcag

SEQ ID NO: 818791 - DNA, 100 bp, Homo sapiens
gggtcccgcgcgagctttcccgggataagtagctttagcgatcgggagacagccgggcgctgcaaggtgctggagaatctggtaaaagcaccattgtgaa

SEQ ID NO: 818792 - DNA, 100 bp, Homo sapiens
ttacagactgcagtgaaaaggacctagattttctacacagtgttttccaggatcagcatcttcacacactactagatagacggggttttgccatgctgcc

SEQ ID NO: 818793 - DNA, 100 bp, Homo sapiens
cagtggtggcggctcttcaccaaggctgttttggagtcagcggaagatcaccaaggccagggagtggttccaccgcactgtgaagattgactcggacctg

SEQ ID NO: 818794 - DNA, 98 bp, Homo sapiens
cggagctcccccaagagccggaaaggttaaagccgagccagccaaaatagaagctttccgagcttcactttccaagctaggggatgtctatgtcaatg

SEQ ID NO: 818795 - DNA, 100 bp, Homo sapiens
gaaagacgagggagaaatgttttgtttgactccagtgttaagagaagaaatgaggacatatcagtatcggttctcatgaacagcgagaagaagtgtgaag

SEQ ID NO: 818796 - DNA, 133 bp, Homo sapiens
attttgtggaattcgtgaaacttgtccgtgccaaatttcctgaacacaccattatgcttacgaggaaatatttcagtaaaagcagttaaaaaagaagtagaaaagaaactccgatgtcttcttgctgatttac

SEQ ID NO: 818797 - DNA, 100 bp, Homo sapiens
aggtacaagctcaggattctccgaatgaagttaaggtcccttgcccatccggagaggctgcattgcgtcagattactgataaagctcgtgaatttggagc

SEQ ID NO: 818798 - DNA, 98 bp, Homo sapiens
gatgggccatcgtccagtgctcgtgctcagctggatccagacccctttgtgcggcacaccttctggaccttggccttcgggggtgtcttcatgatgct

SEQ ID NO: 818799 - DNA, 100 bp, Homo sapiens
tttttcagactccttggaaattaaggaatgcaattctgccaccatgatggaagtgaacagagtatctgtcaggcaagagctgctgtgatggtttatgatg

SEQ ID NO: 818800 - DNA, 100 bp, Homo sapiens
atttacttgttggggccctcttgataaaaagagatgtggggggattctcgacctgctaacagaactggaccttttcgattgtaaaccatggctgtgtgga

SEQ ID NO: 818801 - DNA, 98 bp, Homo sapiens
ggcctttggacttgttttgtgggaagtggccaggcggatggtgagcaatggactcaggacacccctgcacggcggccgaccctgacagctgcttcacg

SEQ ID NO: 818802 - DNA, 98 bp, Homo sapiens
aaatgtggccagattgcagggagtatcaaatatgagaaagctaggccatctgaataactttactaagatgttgatggcatggacctgggcaaaaaggt

SEQ ID NO: 818803 - DNA, 101 bp, Homo sapiens
attgaagatgacgggagctacttccaaattaaccaagttccccacgtgtgaaagtcaagaatctgattgaaagcatgcaaataaatgggtcagtgttgaag

SEQ ID NO: 818804 - DNA, 100 bp, Homo sapiens
tgaccatatgttgacctgctcattatctccaaagatagacttaccagaggaaggaactgcaggagctgcagaatctttacaaacagaacagtacacatac

SEQ ID NO: 818805 - DNA, 75 bp, Homo sapiens
catcgtggtggtcggatttcaccacaagaagggctgccagatccagtttgctgaccagaagcaagaattcaacaa

SEQ ID NO: 818806 - DNA, 100 bp, Homo sapiens
gacgctggagaacctggcacttatgtcctccctggtgcaaccagaacaaatcggactgcttctaccagacatactcatcaggggtggatgcggtgaggga

SEQ ID NO: 818807 - DNA, 98 bp, Homo sapiens
tcgctccggagccgctgcacatttcggctctagaccaagatagaacagcccttcagaaagtgaagaagtctgtaaaagcaatatataattctggtcaa

SEQ ID NO: 818808 - DNA, 99 bp, Homo sapiens
atctctggtgcatgctgatgacgaaaaacctcttgcaggagaactctcttgtagctcaccctgtctgaaaacatactggaaaggaattcaaggaaatgt

SEQ ID NO: 818809 - DNA, 100 bp, Homo sapiens
gatatttgcctttagtgcactcttctccttcacagtaaagtggctgagtacaggggctcaggtccaggtggcaggggatatgctacccaactcaactgag

SEQ ID NO: 818810 - DNA, 98 bp, Homo sapiens
tgctcctggtgaattcggtaaccatagaccaaaagactgcttttggcttctggatgccctcctccagtacacatcgtatggggtgacaccgcctagcc

SEQ ID NO: 818811 - DNA, 99 bp, Homo sapiens
caggaccttcagagcaccagttagacaaggagagccaggaggagctgggccccaacctcatccaaaagcacagccatgaccatgcagttcatcagccac

SEQ ID NO: 818812 - DNA, 98 bp, Homo sapiens
gaaaatcaaatggcatccggggatttctgctcacctggagaagggatggaaatacttcaacaagctggattatcaccgaggcctcttggtggaccgtc

SEQ ID NO: 818813 - DNA, 126 bp, Homo sapiens
cggggctgcagctgcaggggctgagctggctgggcaagcgcgggccgcggaggaggtctcagggcctcgaaaaagcccaagacagcagaagcagacacctccagtgaactagcaaagaaaagcaaa

SEQ ID NO: 818814 - DNA, 98 bp, Homo sapiens
ttggtcttctgatagcaactttaatgtgatgtggccgtcttgtatatcatcttggtttgcctttttccttcctaactttcccatatgtagaagaagcc

SEQ ID NO: 818815 - DNA, 98 bp, Homo sapiens
cgaggatgccatggtgttctggatcaacaaggcggcgggaatcaaggcacctccacctctttatgccagccgtgatgggattcgttgccactacaaca

SEQ ID NO: 818816 - DNA, 100 bp, Homo sapiens
acctcgcttacctgcatgctggggctatcaacagcaggacgcccatgaattcatgcgctaccttttggaccacctacacttggaacttcagggcggtttc

SEQ ID NO: 818817 - DNA, 100 bp, Homo sapiens
actacttgcgtcatggacagctcattgtaaatgatggcattaatttattgggcaatactgaacactgcgcagcttgcagaggtctcctggcagccctcat

SEQ ID NO: 818818 - DNA, 98 bp, Homo sapiens
tttcttcgaggtggagtcggagctgggacgatggtcctggtgctgcccaggaacccacgtggctcacagatgtcccagctgccatggaattcattgct

SEQ ID NO: 818819 - DNA, 100 bp, Homo sapiens
ggtgtttggacttcaacttagcatggctagaattgtggcagatatctacctagcatctcagtacacatcctatgccataagtggtcccacagtacaaggt

SEQ ID NO: 818820 - DNA, 98 bp, Homo sapiens
cagtacgccacctactattacccccagtatctgcaagccaagatttgtgaagctgggaatcatttcatcaatgtaatgttgtctcatcccaatcacac

SEQ ID NO: 818821 - DNA, 98 bp, Homo sapiens
accctcctcagtcacaacgcatgcaacaaggttcagattcagaacaagaaagtggacatctctaaggtctcctccaagtgtgggtctaaggctaacat

SEQ ID NO: 818822 - DNA, 100 bp, Homo sapiens
attcattgaggaccagtcaattctaaacttttcagatacaccacctccaccgccacctgtggaagaaccagtctttgatgagtctcccccacctcctcct

SEQ ID NO: 818823 - DNA, 100 bp, Homo sapiens
tgtcttctcctgataatgtaaattgccgcgatacccaaggcagacattcaacacctttacatttagcaggtggtgtttgaccgcttaaaaggcatggccc

SEQ ID NO: 818824 - DNA, 99 bp, Homo sapiens
gaagtggtgatttcacaacttcatcataaacaagtgttgaaaatgttaaaggctgtgctgaagaagagccgagagggaggaaagggaggcaagaaggaa

SEQ ID NO: 818825 - DNA, 100 bp, Homo sapiens
ccttcttcaaaagcttggaaagcaacctttgattcagtgacctttgacgatgtggctgtggacttcacccaggaggagtggactttactggactcaactc

SEQ ID NO: 818826 - DNA, 100 bp, Homo sapiens
tttacattcctgagatttccaatctcgtggacattcaggaagactacctcatgtggttcttgcatcaagcagggatggaatggcaaaactctattcagaa

SEQ ID NO: 818827 - DNA, 98 bp, Homo sapiens
aggatcattaacctcactagtgttttgagtctccaggaagaaattaatgagcagggacatgagggagtcagtgacctttgaggatgtggctgtttact

SEQ ID NO: 818828 - DNA, 98 bp, Homo sapiens
agaggatatgtagcgaggaggaacgcgctaaggcaaagcacctggctgaccggttccctgatgtgttacctgcttctgctactgatccaaactgcaga

SEQ ID NO: 818829 - DNA, 100 bp, Homo sapiens
agaaagataggcggccatggtccaaccttgaagataggaaaacatttgatgtaattgtgatagatccaccatggcagaacaaatcagttaaaagaagtaa

SEQ ID NO: 818830 - DNA, 50 bp, Homo sapiens
ggtagctggtgatttgcataagggcaaactctttgattctacaatagctg

SEQ ID NO: 818831 - DNA, 100 bp, Homo sapiens
gccctcatggggaaaatctccccggtgactttcagggaacgtgtgaaagaagaattgtggggaaaaaaaagcaagcataaccaaagatcatcagcagtga

SEQ ID NO: 818832 - DNA, 100 bp, Homo sapiens
gtccaagtggcacaaattctgggtccgttgtccatcacaaacaagacattgatttatatattgggactgcagcaattggtgctgaaaattcagaaaaaat

SEQ ID NO: 818833 - DNA, 98 bp, Homo sapiens
cactcctggaactgtacacctattggaacccttaagatccctttcagctccctgcaaaaacagaaccaataaaagaacgagcagttcaaccagcaccc

SEQ ID NO: 818834 - DNA, 101 bp, Homo sapiens
ctgggtttgagtccagcagtgctttagaatctggccaacctatttgtggaaatggaatggtagaacaaggtgaagaatgtgattgtggctatagtgaccag

SEQ ID NO: 818835 - DNA, 98 bp, Homo sapiens
taaacacatgaggaaacagcttgatcgtctgggcctgtgtttcagctgggataggcctgagaatttgcttttagctagcaaatccaagggagcagctg

SEQ ID NO: 818836 - DNA, 98 bp, Homo sapiens
ccctatggcgtccgcctcgacccaaccggcggccttgagcgctgagcaagcaaaggtcccacaggatcacatgttgaatggtgtaaacagcttatagc

SEQ ID NO: 818837 - DNA, 100 bp, Homo sapiens
gacaccgtcccagctgaagagagatggacacatactggattcaaagagatatgccgttattggagcagatctccgagacctgtctgaactggaagagaag

SEQ ID NO: 818838 - DNA, 100 bp, Homo sapiens
gaaaagaatgtcagtgattgttcgcactccatctggaaagttacgactctactgcaaaggagctgctgtattcatcaccaaagaaaaaacttacaccaat

SEQ ID NO: 818839 - DNA, 100 bp, Homo sapiens
ctctgtgtagtgtgtggtgacaaagccaccgggtatcactaccgctgtatcacgtgtgaaggctgcaagcatctggaatcaagagacccatggcatctga

SEQ ID NO: 818840 - DNA, 100 bp, Homo sapiens
tgaatgccgagttgggcagtatgtggtcgacctgacttcttttgagcagttggcactacccgtcttgaggaatgtgaaggaaatactcatgaccagccag

SEQ ID NO: 818841 - DNA, 101 bp, Homo sapiens
ttccaatggagcacattttatatgcaactacggaccaggccaagtcattgttggataagcgagatggtagtacaattgtcagacagcttgactgatcttct

SEQ ID NO: 818842 - DNA, 98 bp, Homo sapiens
acaaaaaagccaaggagcgggagaaatcatctttggacaaaagaaagcaagaccccgagtggaagggaatcccaggatttcctggaaaccgaggatta

SEQ ID NO: 818843 - DNA, 98 bp, Homo sapiens
ctccaggctgagcacttatcaccagatgccagctaccgatttattattaacgacagagaagtctctgacagcgagcgcccgggggctggagaaggcca

SEQ ID NO: 818844 - DNA, 100 bp, Homo sapiens
aaaaagttgaaaacaagaccgtccaagagcctcaagggagcagtatagcatcaagttctagaggaattgggagccattgcaaatctgagggtcaggagga

SEQ ID NO: 818845 - DNA, 99 bp, Homo sapiens
agcaacactggtccctgttgccccaccaatatgccagctctggacatcctgagcccaagtcccccacactcagtgcagtgatgagtgcggaagtgaagg

SEQ ID NO: 818846 - DNA, 100 bp, Homo sapiens
ctaccaggcaaacctcccaagtcccgagtactcctgaagccggccaagttctcttcagatactagagtaaaaggatggtttcttctggacaattatatac

SEQ ID NO: 818847 - DNA, 100 bp, Homo sapiens
cgctgcattaggggcttcctgaggaagcgcgggcggacgacagaggatgccgaaccactccacggtcttgcgagtggctggttccctgcagaagagcaca

SEQ ID NO: 818848 - DNA, 100 bp, Homo sapiens
tgccttctaactatgtggaaaggaaaaacagtgctcggaaagcatctattgtgaaaaacctaaaggataccttagtgggcctttggagtgacgctgtggg

SEQ ID NO: 818849 - DNA, 99 bp, Homo sapiens
gtctgctgaactgtctcagccccggggactccatctgctgcttctaagtgcacacaagactctacgctcagagtcaagatctccactgaagttggcatc

SEQ ID NO: 818850 - DNA, 98 bp, Homo sapiens
gagtcgctcccgccgggcgagcatggggcgcctggcctcgaggccgctgctgctggcgctcctgtcgttggtgacaaagctgcaggtgagcaaatcga

SEQ ID NO: 818851 - DNA, 98 bp, Homo sapiens
aacctcagctttacaaaccctgaatttataactgaagctaaagttgcagacaagatccagctcatcaataatatgctggacaaagtcaatgagatgat

SEQ ID NO: 818852 - DNA, 98 bp, Homo sapiens
gactgccataacattcccaaagcaccttctagccaccatggcaacctcatctgaagaagttttgctgattgtaaagaaagtgcgtcaaaagaagcagg

SEQ ID NO: 818853 - DNA, 98 bp, Homo sapiens
aaggtccaggagtacccgaccctcaagatctttctctggaatcaaaggactccagctgaaagttaacctccaacccaatgataactactttttctatg

SEQ ID NO: 818854 - DNA, 100 bp, Homo sapiens
caatggctcagcgggctctgaacacagcatcaatggcaggaggtttcctgttgagcagtctgagctatcagctgaagaaagtccagaaaaattaggaacc

SEQ ID NO: 818855 - DNA, 100 bp, Homo sapiens
tctcctggtccaaggacacctacagccccgacgaacatttctgggtgacactcaacaggattcccggagtccaacctataccttctcagggaggcaaact

SEQ ID NO: 818856 - DNA, 100 bp, Homo sapiens
agcccccaaggattctgggggaggcctcaggctcagtttatgaacctcttaaaagcattaatcttccaagacctgataatgaaactctctgggataagtt

SEQ ID NO: 818857 - DNA, 100 bp, Homo sapiens
tgtccttcatgcagtctctcattggcttctttgagactgaaatggcaggagaatacttatctctggcgcacatcactatatttggctgcctctgccagtg

SEQ ID NO: 818858 - DNA, 99 bp, Homo sapiens
caggatcaaagtgtgactgcagtggcataaaaggggaaaaggcactaaccaggctgtatctggacaaggccaccttaatatggaatggaaatgctgttt

SEQ ID NO: 818859 - DNA, 98 bp, Homo sapiens
gatggaatgggagaatgctcttcaattcctgacaaaattatgggcagactgtttgctgacgaaggactctcgttggggagatagagattcagaaggca

SEQ ID NO: 818860 - DNA, 99 bp, Homo sapiens
gaaatgcgtgcactgcgtccctctagaggctagagtaccgtggcacaatctcagctcattgcaacctctgcttcctgggctcaagcactctgcccacct

SEQ ID NO: 818861 - DNA, 120 bp, Homo sapiens
cagtaaatttctgaatcgtcatgatttagatttgatttgtcgagctcatcagaaaaatccagttacactcttaaaggaattgtcagtgataaagtctcgatatcaaactttgtatgcccg

SEQ ID NO: 818862 - DNA, 100 bp, Homo sapiens
cagcattttttccagaacacaaaagaatcatgtgagggccaaccggggaaggtggagcagatgagcacacacaggagccgtctcctcaccgccgcccctc

SEQ ID NO: 818863 - DNA, 100 bp, Homo sapiens
ccgcttacttgcaatcaagggttcaggtgcaagcagatgctgactcagcctgttccattaagttgcgctacaagtcagacctgatcggcatgaagggcat

SEQ ID NO: 818864 - DNA, 98 bp, Homo sapiens
cgtccgcgccggccccacagctctgcgtccgggattatcgagattgcagcctgtcactccacacacacgtctgcggccaagacgcagggtgggcacgt

SEQ ID NO: 818865 - DNA, 133 bp, Homo sapiens
tggagagagaagtttgctttattgatattgcctgcgatgaaattccagagcgctactacaaagaatctgagcattagtgccagcagtagttcccaagggctgtctcagccatccacccagacgactcagtatc

SEQ ID NO: 818866 - DNA, 101 bp, Homo sapiens
aggggctccgggtcttccagagcgtgaagatcaagatcggagcaggccgggctctcgccatgggtcactgtcgcctctgccacgggaagttttcctcgaga

SEQ ID NO: 818867 - DNA, 100 bp, Homo sapiens
atcgatgctgagcggcaggctgcagctgcagcctgccagctgttcaaggtgacagagttagtccttgataattgcctgtgtgtcaatggggaaattgaag

SEQ ID NO: 818868 - DNA, 98 bp, Homo sapiens
gcagttctacaaggcgagccagaattcaattcgccacaatctctctctgaatcgttatttcatcaaagtgccgcgttcccaggaagaaccaggcaaag

SEQ ID NO: 818869 - DNA, 98 bp, Homo sapiens
tggcctatgagccggtccagaggccctccttccgagccgtcattcgtgacctcaatagcctcatctcttcagagaagtgattcagccagacgtgatgg

SEQ ID NO: 818870 - DNA, 100 bp, Homo sapiens
ccttaatcaggaagataacaccaacctggccagagttttgaccaaccacatccacactggccatcactcttccatggctgaccggttccctgatgtgtta

SEQ ID NO: 818871 - DNA, 100 bp, Homo sapiens
aggaacagaaaaccaaacaccacatgttgtctcttagaagtgggagctgaacggtgcgtctaatgctagtgttggcacctgttatgtgcattctctctgg

SEQ ID NO: 818872 - DNA, 100 bp, Homo sapiens
aggaacagaaaaccaaacaccacatgttgtctcttagaagtgggagctgaacggtgctggagaatctggtaaaagcaccattgtgaagcagatgaggatc

SEQ ID NO: 818873 - DNA, 98 bp, Homo sapiens
agctgaacattactcttccagaagagctgccgggccgcaagtacagccctgggtacaacaccgaggtgggagacaagtggatctggctgaagtgaacg

SEQ ID NO: 818874 - DNA, 100 bp, Homo sapiens
cagccctgagctccagttgcagttctccaatgatatctacagcacctatcacttgttccctccaagacaactgaatgacgatgatgcttttgagcctgtg

SEQ ID NO: 818875 - DNA, 100 bp, Homo sapiens
gggttgaagagggtgctccgttccttacagacacatcatctcagagttggagcacctgacgtttgtcaacacggatgtgggccgctgccgggcatggctg

SEQ ID NO: 818876 - DNA, 99 bp, Homo sapiens
tggaggggaggattttgaggacacttgtggagagctcgaattccagaatgatgaaattgtggcatatctggaatctgaagttgctatatctgaggagtt

SEQ ID NO: 818877 - DNA, 99 bp, Homo sapiens
ctacaacttggagaatggaaaagaaccattgaagcttgagagaaaagcccccaaaagcagctattcagattccaactccacagagtgaccagagagagg

SEQ ID NO: 818878 - DNA, 100 bp, Homo sapiens
tcttaggtgaaaaggatgatacaccagttcatttctgtgacaagtgtggattgcctattaaaatctatgggagaatgttgatgctgatgtaacagttata

SEQ ID NO: 818879 - DNA, 100 bp, Homo sapiens
ttgaaaatggaagagtaattgcctgctttgattccctaaagctcaaatctaatccaagtgaaaatgaagaaaaggaagcacagtctcaacttataaaatc

SEQ ID NO: 818880 - DNA, 98 bp, Homo sapiens
gaaggcgggcggcagaggcgatcaggtgtggatgtggaagcagccaagcgggcagaagaggaattgctccttcatgacacgaggtgctggctgaatgg

SEQ ID NO: 818881 - DNA, 100 bp, Homo sapiens
gaggactacagagccggtgatatgatctgtcctgaatgtggcttggttgtaggccagtacgggatccctgaaccatggaattttccttttcggaggagct

SEQ ID NO: 818882 - DNA, 99 bp, Homo sapiens
ctggtattgctgtggagacggtgacagattctagccgctactttgtaatccggatccaggatggtactggatctcacttgcttatctgaagaagattgt

SEQ ID NO: 818883 - DNA, 98 bp, Homo sapiens
ggccctgtgactgcagccatggccacaggcttagctgttaacgggaaagcctcctccagctggtgatctcgggtcccgtgcagcagtcgcctcacgcc

SEQ ID NO: 818884 - DNA, 100 bp, Homo sapiens
aatgttgagtctaccaaaaagaatgaaccgcttgcttcttatttaggagtgtatctcgcagtcagcagtgaaaacaaagttcgaacagcacactatcaga

SEQ ID NO: 818885 - DNA, 128 bp, Homo sapiens
tgaaatgaagcggcttgaagaaaaacatgaagctttacttaaggaaaaagagcttaacagagcgttccaaaaagaggactctccagctactttttattgcatcagtatgcagtggtttagagaatggg

SEQ ID NO: 818886 - DNA, 100 bp, Homo sapiens
ctggttctggggctgggattggaactgtgtttgggagcctcatcattggttatgccaggcaaatctgagtagcctccaagaggcacacaagcagaggatg

SEQ ID NO: 818887 - DNA, 98 bp, Homo sapiens
aactcagcatccatccatcagtggcgcgagtccaggaaggtcatgggagccagcaccgctctttgaccttgccatgcttgccttagatagtccagaga

SEQ ID NO: 818888 - DNA, 98 bp, Homo sapiens
gagagtgtggaaagactcacaggcgtgagcatctcccagactgattcttccagaccagagtttgatgccagcagcttcggccatccaaacagaggatg

SEQ ID NO: 818889 - DNA, 98 bp, Homo sapiens
ttttccttcctaggagaaatcgaggagctgcggctctaccccccggaatttgaaaaatgtgtgagtgctaaggaagctttggagactgatctttataa

SEQ ID NO: 818890 - DNA, 99 bp, Homo sapiens
tgctctgcggggccgtggcgctcggctgcgcgctgctcctcgccctcaagttcacctgcaggtcactcctggaagcaaggcggctctagctaatttatg

SEQ ID NO: 818891 - DNA, 100 bp, Homo sapiens
agcctcagcttcacctccatgggcatcaacatgactgattcttgctattccaaatcctcttccacgttgacagcccttcagatatttcaacactcctctc

SEQ ID NO: 818892 - DNA, 100 bp, Homo sapiens
cgcagctccacgcagcaagacccgcgccgccgggacccccaggacgacgtgtacctggacatcaccgggtgatcagcccatgacctaaacctccagacaa

SEQ ID NO: 818893 - DNA, 99 bp, Homo sapiens
catttcaaggacttgctgctgcacgaatctgcacattcattgcaaccttcttctggtgatgaaatatctactaatgtatctgtccagctttacaatgga

SEQ ID NO: 818894 - DNA, 114 bp, Homo sapiens
ggatatcacctttgccactgacattgcagagctgtgggctgtgttccacaagttcaaagctcccagggttgctagagctccttgtagaatatttccgacgatgcctgattgaga

SEQ ID NO: 818895 - DNA, 100 bp, Homo sapiens
cggggagatctgatcaaattgttctgtatcatcactgtcgagggagcagcactggatccagacaagttggatggcttgaggactggtactaaaaggaaac

SEQ ID NO: 818896 - DNA, 99 bp, Homo sapiens
tgcaattcataatggagctactgtactggctattggaaggaggagattctgaagataaggagtcaaagacaccagctttggtatttgaatatatcaata

SEQ ID NO: 818897 - DNA, 100 bp, Homo sapiens
tcatcccatgaagtcctccagccattgctaaggttgctccttgagggcaggacagttcttatggctttatccgttgcgtaagcacagagaggtctgcgag

SEQ ID NO: 818898 - DNA, 99 bp, Homo sapiens
aaggagagtaaagtcagcatgagcaaaaactccaaactcctctccaccagcgccaagagggtttctttcggagaagtattcaacaaaacatccagtaca

SEQ ID NO: 818899 - DNA, 100 bp, Homo sapiens
gtcggcagactggtgacttcacttttgagtgcaactgccttccagtggaggtgaagacagaaagcaagagaagtgtcactccccattccggatcatcccc

SEQ ID NO: 818900 - DNA, 110 bp, Homo sapiens
gaaaaagctgaaccaggcccttttggatcttcatgccctgggttctgcccgcacggacccccatataaggaagcagtggattggaaagctgatggcttgtgtatgatgat

SEQ ID NO: 818901 - DNA, 100 bp, Homo sapiens
ggagaatctgcaactcatcataatcctgggtgataaaagaaaatgtggctgaagttacccgaagttcagcttgcagtgtaattcagaagagttaagacca

SEQ ID NO: 818902 - DNA, 100 bp, Homo sapiens
cagtgctgaagcctttaaatgcagcatctgcgatgtgaggaaaggcacctccaccagaaagaagacatagctcatccagcaagccgcctttggccgttcc

SEQ ID NO: 818903 - DNA, 100 bp, Homo sapiens
gcttctcgctcaacaacaactcaccaaacatcagatattctgagaacgccgtgaggattgagccaaaagatcacccctgacctgctacctcggccgcccc

SEQ ID NO: 818904 - DNA, 98 bp, Homo sapiens
aaacttgggccaaaggacagttagaagacagtagggtctccaactgaattccttgaagagaaaatggcctaccaggaatacccaaatagccagaactg

SEQ ID NO: 818905 - DNA, 98 bp, Homo sapiens
cggcccttgtggagtctcccgtcactcaggacatcatctgcgacgtggggatctccctgatggctcggagatcccgctccctcctattctgctcggca

SEQ ID NO: 818906 - DNA, 100 bp, Homo sapiens
aacatcaaccgcaagaagcgcatcccggacacccgcgtccactgctgcctctacttcatccccgccaccggccactcgatgcatcccaaccttaccaagg

SEQ ID NO: 818907 - DNA, 106 bp, Homo sapiens
catcaccgacctcatcagtgagctgtccctgctggaggagcgcttccgggaagaaggagagacgaccatcttgcaactagaaaaagatttgcgcacccaagtggaa

SEQ ID NO: 818908 - DNA, 100 bp, Homo sapiens
ccaggtgacagcaatcagctggcctggtttgatactgacctgtaaatcatcctttaggttgctccttgagggcaggacagttcttatggctttatccgtt

SEQ ID NO: 818909 - DNA, 98 bp, Homo sapiens
gcacaataccaggcttcctccttccaggaatcattgagagtacttagtgttggatgaagctgataggatgctggatatgggatttgaacctcagatac

SEQ ID NO: 818910 - DNA, 99 bp, Homo sapiens
acctgccaacaggccttgcggcacctttggtgtcaagctagggatgcggtccattcccattgccactgcttgcaccatttaccataagttcttttgcga

SEQ ID NO: 818911 - DNA, 100 bp, Homo sapiens
agatatgttaaagctctagcagaggaaaataagaacacagtggatgtcgagaacggtgcttctatggcaggatatgatgttgtaaattttgatgacatag

SEQ ID NO: 818912 - DNA, 100 bp, Homo sapiens
ataaaaagaagtgttaagaattgcctttgggactctgaaggctgaaggcatggaagaggagatggttcgtgttacgcagtggccgtttaactggagatcc

SEQ ID NO: 818913 - DNA, 100 bp, Homo sapiens
ttatgacctttgtgaactgttcagaactggaggtcaggttcctgacacaaactacatatttatgactgctggagttaataccaccgacaaagagatggag

SEQ ID NO: 818914 - DNA, 100 bp, Homo sapiens
gatgtattttgatgatgctcatgtcaaggaggagtggacgcttctcttgtgagccagctggaggtcttacctctttgactgaaccacccaagggacctgg

SEQ ID NO: 818915 - DNA, 98 bp, Homo sapiens
agcgggcagtgtcggaggccagcggggccggaagcggcggcgcagtccattggaaatgctaaaacaaccaggaatgataatagcagccgttttgggaa

SEQ ID NO: 818916 - DNA, 98 bp, Homo sapiens
gttcatcgaggagggcacattccttttcacctcagagtcggtcggggaaggccacccagaagtgagttgctgaatgagcttatggacagtgcaaaagt

SEQ ID NO: 818917 - DNA, 100 bp, Homo sapiens
agctgctgccgccccttgggctaaaagttgattatggaagattcccacaagagtaccacgtcagagacagcacctcaacctggttcagcagttcagggag

SEQ ID NO: 818918 - DNA, 100 bp, Homo sapiens
ccacgacgtccaggactatgcagacactgttcgcggtgggtggcttcgacggcctgaggcgcctgcacagcgtggagcgctacgaccccttctccaacac

SEQ ID NO: 818919 - DNA, 99 bp, Homo sapiens
tgccgaggagctgaaggccttcagagtccttggggtgattgacaagtcccagaaatcctggatagaaagcactttgaccaagagggaatgtgtatatat

SEQ ID NO: 818920 - DNA, 100 bp, Homo sapiens
tggagaaggcattaatgagatgttccaggaaagcagatggtggagctgaatatgccacttaccagactaaatcaaccactccagcagagcagagaggctg

SEQ ID NO: 818921 - DNA, 98 bp, Homo sapiens
aatgggaagccaagtgccatcttcaaaatttcaggtcttaaatctggtttcaagtgccccatttgctccaagtctgtggcttctgacgagatggaaat

SEQ ID NO: 818922 - DNA, 123 bp, Homo sapiens
acaatcggatgacagaactctgcttccagcgctgtgtgcccagcttgcaccaccgagctctggacgctgaggagatgctgtctttgcaggtgccatgcctacaatggcaagcatcaagctgtc

SEQ ID NO: 818923 - DNA, 99 bp, Homo sapiens
tcccgaagccccctgcaggaactctacaacccaatccaggagtggcaaaattctattcagaagaatgcaggccttgcttttatcgaacttgtcaatgaa

SEQ ID NO: 818924 - DNA, 74 bp, Homo sapiens
caaactctgtgcctcaacaaccatttctaagtggttgtcaccactgggatggaacaactagattttgaaacagg

SEQ ID NO: 818925 - DNA, 100 bp, Homo sapiens
attctggaactgggagaagatggctttaaagaatacacttcaagtgaaaggaaagcaagccaggatggatatttacgacactcaaaccttgggggttgtg

SEQ ID NO: 818926 - DNA, 100 bp, Homo sapiens
ggcacagcgtttcttgcaagaatgggaggtcccgcggcagtgctggtggccatggttcccgtagccagaaggagttgcccacagagcccccctacacagc

SEQ ID NO: 818927 - DNA, 100 bp, Homo sapiens
catgaagccttctcaccaagggtacccacaccggaatttccaggaagaaatagagtttcttaatgcaattttcccaagtttggtgcacctcgatttggag

SEQ ID NO: 818928 - DNA, 100 bp, Homo sapiens
ctgaatcgagctgagagggcttccccggttctcctgggaaccccatcggccccctgccagcacacacctgagcagattgtaaaccatggctgtgtggata

SEQ ID NO: 818929 - DNA, 100 bp, Homo sapiens
ttcagacagttttggggtggtctttctcaggtcaccattctccaaaagactatccaggctgtaggtgaatgtgagcagagtgaatcttcagctttcaaag

SEQ ID NO: 818930 - DNA, 98 bp, Homo sapiens
ccgtcggtcgccgccatgacagcgagcgaggcggagaaacctctgtagaggagcaggatgcaaccgacaggctgtggccggacagctgctgcccagca

SEQ ID NO: 818931 - DNA, 98 bp, Homo sapiens
agcatcccaggacctaccagaatctgcaatttttccagctagtcaaattacgaaagcttggacttagtgataatgaaattcagcggctccctccagaa

SEQ ID NO: 818932 - DNA, 98 bp, Homo sapiens
cactttttattaatttgatcagtgatccttcacgttggggtcatgtgaaggtggtgcgctacttagtcaaagaagtcaatcagtttccatcagattct

SEQ ID NO: 818933 - DNA, 99 bp, Homo sapiens
aggaaagtgttggataaaggaaaacctgaagatgtgatgccatctgttaagggggcccaggtggaaattgaaaccaatcagttacaagatggctcgtta

SEQ ID NO: 818934 - DNA, 100 bp, Homo sapiens
aaaggcaaagaggggagtgcactgagccatgtacgcaaaataatatggccgcgtggaaagtgtcaaaattcttcccaagaggggatctgaaggaggagtg

SEQ ID NO: 818935 - DNA, 100 bp, Homo sapiens
tcctaaacagacaggctacggatggatatgtcaggaatgtgattcttcatcttccaagaatatcgataacttgatgaccccagaaggagttggccttacc

SEQ ID NO: 818936 - DNA, 100 bp, Homo sapiens
ttataaagaaggttgaaaggagcagggaaaagatccagaagcatgttagttcgacatcatcatcttttcttgaacttttcctccgcaaccatgtctgaca

SEQ ID NO: 818937 - DNA, 100 bp, Homo sapiens
gtctgcttacagattcactctgggctcagttgctggagacttgtctttggacaaaattgagaagaactcataaacttggcttcctcgcttctgctcctca

SEQ ID NO: 818938 - DNA, 100 bp, Homo sapiens
tatcaatgcgaatgatcctgaagcctcaaagtttcatgattcatgcccaagcacaaaacaacccatttaaagaagatgctcggccttaaaggaaatggcg

SEQ ID NO: 818939 - DNA, 100 bp, Homo sapiens
ggagccggagggcgggaggaacatgacatcgcggagagttgtggaaagtaaaaatgtagccctaccaaaaggaactattgtactggcttctccaggctgg

SEQ ID NO: 818940 - DNA, 98 bp, Homo sapiens
cagaagaagttgggcaagcccggtttatacagaagcagatggaacattttcaagcattggacacatttccaccatgctaatggcattttaaatatatt

SEQ ID NO: 818941 - DNA, 100 bp, Homo sapiens
ctcattctcatatttcaccaataaagatatctcccggggccaattcagcatctctacctggccatcctaacaaggtgatttgtgaaagggtgagacttca

SEQ ID NO: 818942 - DNA, 100 bp, Homo sapiens
cgtgctaaagtgtctcaagcactgtttgcaaaggttgcagcaaccaaaagccagatttgggccaggcttagtcatctattggtatggatttatccaggag

SEQ ID NO: 818943 - DNA, 100 bp, Homo sapiens
agccagaaaagactgctgctccctcgccgtcactgttgtataaatgtaaattcgaaccaccattatttcacccgaatgtgtacccttcggggacagtgtg

SEQ ID NO: 818944 - DNA, 50 bp, Homo sapiens
ggtgctggaggacttcccaacggcacaccttgggcccaccccacctccac

SEQ ID NO: 818945 - DNA, 100 bp, Homo sapiens
cgagactacggtgtgctgttagaaggttctggtcttgcactaaggtctgtgtatgatgaccaaccaaatgcgcacaagaagtttatggaaaagttagatg

SEQ ID NO: 818946 - DNA, 100 bp, Homo sapiens
atttgaaccatgtttggattgaagccgcctctgtattacttaccagatgagcagcaccagcagtaagagggctccgaccacggcaacccagaggctgaag

SEQ ID NO: 818947 - DNA, 98 bp, Homo sapiens
ccatcaaccgccagatcaacctggagctctacgcctcctacgtttacctgtccatggcccggaggctgtttgatgtcctgcacgagcccttcttgaaa

SEQ ID NO: 818948 - DNA, 100 bp, Homo sapiens
atcagatgtctaacgataaggagcggtttgccagcacaatgacagatttcctcaaggaccaccatctcagatgggttcacctatggggagtagaacaggt

SEQ ID NO: 818949 - DNA, 100 bp, Homo sapiens
gccgagccgagggccaccccctggtcctctgccctcgcgccccgctagggccaggtgcagctaaatcaagtccagcagctaaaccaggatccacaccttc

SEQ ID NO: 818950 - DNA, 99 bp, Homo sapiens
tgaaaaggaagaaaaagaagaagaggaaagagagtggggtagcaggagacccttggaaggagggagagagaaacccctcctcgttttgcccagcatggc

SEQ ID NO: 818951 - DNA, 100 bp, Homo sapiens
ttaaccagagaaggtgaaacgatcatcgagctaaaatatcgtgttgcaaaagcccaggatggtgcagccatggaaatgcagccattgaagagtgaagaag

SEQ ID NO: 818952 - DNA, 151 bp, Homo sapiens
acaaacccaccgcaagtcgccacctaccacagagccatcaaaatcacagtggatgggccccgagaacctcgaaggatttgcttcctaaggagaagaacttggaaactctgttgaccttggcttttctagaaatagataaagccttttcgag

SEQ ID NO: 818953 - DNA, 100 bp, Homo sapiens
cgagctgcatcgcgcgcccgaagggcaactgcctgccttcaactactgagatgatgaggaacgtggagctggccccggaagtggatgtcggcaccctgga

SEQ ID NO: 818954 - DNA, 99 bp, Homo sapiens
ctgcgtgggccggccgggagggcctcgggggactgactggttatcaatactctggctgaccatcatcatcgtgggactgactttggtggaagtccttgg

SEQ ID NO: 818955 - DNA, 98 bp, Homo sapiens
tccagaggcagccggactcgtgcgagccttcctgtggtgaggtcaaccaaccagacgaaagaaagatctctgggctttcatgagaaggacaagaagcc

SEQ ID NO: 818956 - DNA, 100 bp, Homo sapiens
aaggccgagtacctctgccggataggtgacaaactatctctgaagggcacaaatcagaaggcaccatgcctcctaataaagaggccagcggtctcagtag

SEQ ID NO: 818957 - DNA, 100 bp, Homo sapiens
aggcaacgtgttggaccttccggagcttctcagaagacagagggttttcttttgagtttaattgcctacacggaacaatatgtggaatatgaccctttga

SEQ ID NO: 818958 - DNA, 98 bp, Homo sapiens
aggaagaggcactgctgagggggcgcgaggggaacggaggccagagctgcggtgaaatccctaagggctctgccatgtactccagccttgtgaccctt

SEQ ID NO: 818959 - DNA, 100 bp, Homo sapiens
gatggtgcgggcaactacagcgtcaatggcaactgcgagtggctcatcgagggtgtagagcagaccaaacagtgcaaggaggagcccaaggaggagaagg

SEQ ID NO: 818960 - DNA, 100 bp, Homo sapiens
acagaggatgcacttgtccaatcctcaatcctgagtgaagatgaagctggatgtagctcagttgatgaagaaagttacaagactctgaagcagcaggaag

SEQ ID NO: 818961 - DNA, 98 bp, Homo sapiens
gcatttaaccagcatggctacttcatattttggaaagcagtttttaagacaaaaaaagttgcctttgacaacactggctcagtgtctgatggaggggt

SEQ ID NO: 818962 - DNA, 98 bp, Homo sapiens
cacaactatgatttctgcctgtgtctcaagatgcgtgcaaaaggaaactagcagagttgttcacatcatggattttcaacgagggaaaaacttgagat

SEQ ID NO: 818963 - DNA, 100 bp, Homo sapiens
acccgatgaatgtgggaagactgaggcattgcttcagagtttggagttcgaggttatccaacaattaagctgtaagttgagtgttgtatgtttatatgtg

SEQ ID NO: 818964 - DNA, 100 bp, Homo sapiens
gaagggccgcacgagcgaggacccccaccagccagcgctcccgtgggtggaagcgtccgacctccgatcatgaacgggcccctgcacccgcggcccctgg

SEQ ID NO: 818965 - DNA, 100 bp, Homo sapiens
tgaatctgcttacagatgcatgcttcaagggctcaatcaagacatcacagatgtgtgtttttcccctgagaaagaccacagctccaagtctgcgacctca

SEQ ID NO: 818966 - DNA, 98 bp, Homo sapiens
ttttgctaactttgcacatttcaacagtcatgcagatttacttacagcctcgaagatggagttccacgatcaacaggaattgactccctctacagctg

SEQ ID NO: 818967 - DNA, 74 bp, Homo sapiens
ccgcttctcagaggacgccttcaacaccaccttcatctccaccatcgagatttaccgcattgtttctcagaagc

SEQ ID NO: 818968 - DNA, 98 bp, Homo sapiens
aggtgaaagtgaatttctctgatagagtcttcaaagctgtttctgacatctgtaagacttttagtaacccaggtttttctgccttttatgtgccattt

SEQ ID NO: 818969 - DNA, 98 bp, Homo sapiens
tccgctcgttctgtgcgttctcctgtcccagccaccagtggtaaaaacagagatggtaacaatttctgatgcctcacaaaggacagaaatctccacca

SEQ ID NO: 818970 - DNA, 100 bp, Homo sapiens
gatcttctccagattggcagaaagttgatataggtggacttttttacaggctcctctggcccagcctgagtcccccaccgcctcagctggagatgagccc

SEQ ID NO: 818971 - DNA, 100 bp, Homo sapiens
ctcgagaatgtgtccgtggcgctcgagttcctggaccgtgagagcatcaagctcgtgtccatcggttttactgcaatcacagcaaccaaccccatttggc

SEQ ID NO: 818972 - DNA, 98 bp, Homo sapiens
aagaaatcattgtacagaatggaaaagtaattggtgtaaaatctgaaggagaaacagcaccagttgcccttgaagcagaaaacagaggtgaaatgaaa

SEQ ID NO: 818973 - DNA, 98 bp, Homo sapiens
tgactcctacttcctctgtatagagcaactgttgaactcagctgcctgtaggtgtagaagacatcgtggccataatgattcctgagccaaaagggaag

SEQ ID NO: 818974 - DNA, 100 bp, Homo sapiens
tggcaaagttggagaaaaccatcgatgacctagaagctgtccttccctcatgagaagctactgcttatgtccacagaccaggaggagctgtcacgctggt

SEQ ID NO: 818975 - DNA, 98 bp, Homo sapiens
ttcagctgtttttgcaagaaaacgctgtatttcacaaaccccagcccttccagttccagccttgtgacagtgatactttgaggaaacgtgtgaagctt

SEQ ID NO: 818976 - DNA, 98 bp, Homo sapiens
atgctactggggccacgtcttctgggaccagagttcctatcagactgagattgggcagaccctggacctcctcacagccccccagggcaatgtggatc

SEQ ID NO: 818977 - DNA, 100 bp, Homo sapiens
cggcgttggcggggcgggggacagtagttgtagacgcccgcccctgcctcagagaagcaagctgagaaaatggtggcttatctccaagacagtgcactag

SEQ ID NO: 818978 - DNA, 100 bp, Homo sapiens
caccactcaaaactgtaatactaaatgtgttaccataccaagccgcctgtcttggttagatggctctggattaggattctcactggaataccccaccatt

SEQ ID NO: 818979 - DNA, 100 bp, Homo sapiens
tgcagtgtgattttctttccccctttaacttagaggaacgaggattatacagaaatttgaagcacgcttaaaaaggcctcttaagagccttgatggtgct

SEQ ID NO: 818980 - DNA, 98 bp, Homo sapiens
gtaaatgcagttcactggcaacctgtgttttacaaaggagtacaagcgcaagctagccagagtttccctggtgcgcaaagaactcaggtcccggatcc

SEQ ID NO: 818981 - DNA, 98 bp, Homo sapiens
cgggcacggcggaggcagcggagccctgggccatcggggaatcacttgcaaggtccacacaagtccgcctatgtactctctggatcgaatatttgctg

SEQ ID NO: 818982 - DNA, 100 bp, Homo sapiens
gaatattatatgacaccacgagacttcctcttctcagtgatgtttgagcaaatggaacacccttctcaggtgcagccagagagacactagcccactgatg

SEQ ID NO: 818983 - DNA, 98 bp, Homo sapiens
tgttttaaaagttaggcaagatctggtcaaagctaatcttccagtaccaacaattgcagcaatagatggactcgctttaggtggtggtcttgaactgg

SEQ ID NO: 818984 - DNA, 99 bp, Homo sapiens
aaaaatcaagtcactcagttgaaggagcaagtacctggtttcacaccacgcctggcaatattacaggttcctatctgacccacgaagccagtggcttgg

SEQ ID NO: 818985 - DNA, 100 bp, Homo sapiens
ccccgggctgttgccccctacaaatacgcctccagtgtccgcagccctcatcctgccatacagcctctgcagggaaatccctaagtcagccaacccctcc

SEQ ID NO: 818986 - DNA, 100 bp, Homo sapiens
cagctgacatgtcgagatcactcagaccctcgccaaacttttttatataagcttagtaacaaagcaggagggccaaacatgtgggctattacctctgaag

SEQ ID NO: 818987 - DNA, 100 bp, Homo sapiens
ctattgttttgccagcgggagcacttcatcaggatcataagtttttactgccagtattgagaaattcgtggaagaaatgtcagcaggaagtaaaaattca

SEQ ID NO: 818988 - DNA, 98 bp, Homo sapiens
atttcaagcaggaacataaactccatgttctggatgtgaagagattgaattcagccaactcatcttcaaagaagacttcctccatgacagctactttg

SEQ ID NO: 818989 - DNA, 98 bp, Homo sapiens
gcccaccccggtgccttgctctggaagggaggcaggacacaatgtgtgagagaagtctgtcccattctctcctgtccccagcaccttagtcacatacc

SEQ ID NO: 818990 - DNA, 75 bp, Homo sapiens
tgtcagaaacacaaagcagcccaaccaaaggagtgcagacatcctcagcaccatcggctatgacaacattatcca

SEQ ID NO: 818991 - DNA, 100 bp, Homo sapiens
gcgtgtttctcactcctgtcatgcccatctagttcccagcgcactgcccacctggctttgggccatgtgaaactttctgactttggtctttgcacaggac

SEQ ID NO: 818992 - DNA, 100 bp, Homo sapiens
gtgctgggaagcaggagccccaggacagaggagagcaaagcagacagtccacccccatcctacccaacacagcagatgatgtgcgaggtgatgccgacca

SEQ ID NO: 818993 - DNA, 98 bp, Homo sapiens
cccggcccggattatagtctctcgccacagcggcctcggcctccccttggattcagacgccgattcgcccagagttgctggagaatgtaaccctaatc

SEQ ID NO: 818994 - DNA, 98 bp, Homo sapiens
gtcctctcttctccttgccatcctcggtgagatgcagacattggaaggaaaagttcactggagcaaaggagtgaatgtcgttccttttctagaactca

SEQ ID NO: 818995 - DNA, 98 bp, Homo sapiens
gcagctgggccagcccattcaacagccatctggccctggtgaggtgaagaaaaagcttgtggtgaaggggggcaaaaaaaagaagcaagttctgaagt

SEQ ID NO: 818996 - DNA, 100 bp, Homo sapiens
agtgtctgatcttaggggaacaaatagaattaaacaaccaccatgtcgagcaaaaaggcaaagaccaagaccaccaagaagcgccctcagcgtgcaacat

SEQ ID NO: 818997 - DNA, 98 bp, Homo sapiens
ctactggaaacaaatcccacccacggtggacggcatgcttgggggtgggagagcccatcaccatccccaagctggagcacccaacccagcaagacatc

SEQ ID NO: 818998 - DNA, 98 bp, Homo sapiens
cggcaccgctgtgcaccatggcccgggccctgtgccgcctcccgcggcgcggcctctggctgctcctggacgagctgtacgctcagaaactgaagtac

SEQ ID NO: 818999 - DNA, 98 bp, Homo sapiens
tggaggccatcaggggccttgataacacagagtttcaaggtcaaaatgcagatcttcgtgaaaacccttaccggcaagaccatcacccttgaggtgga

SEQ ID NO: 819000 - DNA, 100 bp, Homo sapiens
tgtgctcctgaccaggccaggggagggtggcactggctctcctggtccagctctcaggacaagaacaaagtgtgctggagcggcctattgccaattcatg

SEQ ID NO: 819001 - DNA, 100 bp, Homo sapiens
taccgagcacaaactccacgaagccaacgcccagatccgagagactgaggtcatcgacccccaggacctcctagaaggccgatacttctccggagcccta

SEQ ID NO: 819002 - DNA, 144 bp, Homo sapiens
tccaggtacctgttccgatgctgctactgctgtttctggtgtcttgacaaatacctgctccatctcaaccaggctcaagcacggacatcagtgaggactgggagaaagactttgacttggacatgactgaagaggaggtgcaga

SEQ ID NO: 819003 - DNA, 98 bp, Homo sapiens
catttctgggtgacactcaacaggattcccggaatagccaggccagaagaaggaaggcctgtggtgagtgggacaggaaatgacatcaccaccccacc

SEQ ID NO: 819004 - DNA, 100 bp, Homo sapiens
gaattcagaaggatatcgacgtcgtgatccagaagtccagagctgaggactgcctgtttgcaggatgagttagatgaactccgtgctgagatggaagaga

SEQ ID NO: 819005 - DNA, 100 bp, Homo sapiens
ccttcttggacgcctttcagaaagtggctgacatggccaccaacacacgtgctcactgaaaactgaagctaatttggaagttttgaagtcaattcctagt

SEQ ID NO: 819006 - DNA, 100 bp, Homo sapiens
ctcttgccaaagtgtcccttttaaaagggctgaaaacacagttaaatcactttcaaagttaaaagactattaagaacacaagatggggactcctgcttct

SEQ ID NO: 819007 - DNA, 100 bp, Homo sapiens
ctcagggatggagccctctggcggaagccatcagctatggagataggcagatgactgacagctctgacaactctgatttggaagatgacatcatcttatc

SEQ ID NO: 819008 - DNA, 98 bp, Homo sapiens
cagaccattcactactatgagcagatcacgctcaagtccatggcggccttacataggaagtccttctaaagagctgcctgccagctgcccttccccag

SEQ ID NO: 819009 - DNA, 100 bp, Homo sapiens
aggataaggagatcatagcagagtacgatactcaggtcaaagacttcaggcccgcatagctcataggatacaagaactggaaaatctgcctggctctttg

SEQ ID NO: 819010 - DNA, 129 bp, Homo sapiens
ggaaaataatccagagatttccacagaaggactgggatgatacaccttttccacagggaattgagttgtgtctcatagttgggggaggaccctgtggcttgcgcactgccattgaacttgcctacctgg

SEQ ID NO: 819011 - DNA, 100 bp, Homo sapiens
gctcctcagtcaacagctacagccaattttgctaactttgcacatttcaacagtcatgcagagcgagatgcgagaacacttttggctaaaaatctccctt

SEQ ID NO: 819012 - DNA, 100 bp, Homo sapiens
agattgattgctgctgctacttctgtatgtgttatgaatgtgatgaaaaattatcaacgcattgtaataagaaggttttggctcagatagttgattttct

SEQ ID NO: 819013 - DNA, 98 bp, Homo sapiens
gaggcctacttgcagcatattacctatcaggagaggagctgtcacaagatgaaggtagaggcacattatacaaatacagacctgaagaagtagatatt

SEQ ID NO: 819014 - DNA, 98 bp, Homo sapiens
gaagtgaagattgtcagcaaaggaagagatggaaaccgaaacttcattgccccttcaatgtgggaatccagccagaccctattcttggacagcatcag

SEQ ID NO: 819015 - DNA, 100 bp, Homo sapiens
cctggtgcggagccagcctgggtctcagccccgcgtacggcctttcacgagtcttcaagccttcagagcactacaaacaccactggtttcccgaaaagcc

SEQ ID NO: 819016 - DNA, 98 bp, Homo sapiens
taaaagtcaagtaatcaatgaaatgcagaaaaaagatcacaagcaactctggatgggattgcaaaatggtgtgactgaagaaatatcaaatgtttcct

SEQ ID NO: 819017 - DNA, 100 bp, Homo sapiens
cttagaggtgtacgagaagccggtacaggtgccctgcggacacgttttccaaggcaggaaaggtaaagagacaaagaaagtgccttgtacagatgcaaac

SEQ ID NO: 819018 - DNA, 100 bp, Homo sapiens
acctctgcaccctgctagaaaatgccatacaggacactgtgagggaacaagaccagagtttcacgtcataccctaatgatcccagcaagataatgtcctg

SEQ ID NO: 819019 - DNA, 124 bp, Homo sapiens
ccgggagctgggcgttggggtctctatctgggagctgggccagggcctggactacttctacgacctgctctagggatgcccgctgtctgtagccccggcatggtgcccgtggccctgcccccgg

SEQ ID NO: 819020 - DNA, 98 bp, Homo sapiens
caagttcatgaccacattcagtcagctccgaggctatggagttactagtagagaaagcaatcagcagtgcttctagccctcagagccctggggatgca

SEQ ID NO: 819021 - DNA, 100 bp, Homo sapiens
ggcctacgccagtgccctggcccagaacatgcggcacacctacctaagccccttcaccatcgtcacgcccaacattgatgcaccagcaaggaatactgaa

SEQ ID NO: 819022 - DNA, 100 bp, Homo sapiens
attttccaagtactgtaaattcctgtgcagaaggcatcgtcgtcttccggacagactatggtcagtgaggaggacatgtaccgtgctgcagatgaaatag

SEQ ID NO: 819023 - DNA, 99 bp, Homo sapiens
tgctacgtgtccctggcattttaggtgtcggttgggtagtttgccaaggcacgagtaacaagctcacgcagttgggcacttttgaagatcattttctca

SEQ ID NO: 819024 - DNA, 100 bp, Homo sapiens
atggtgacttctacgaaaaagccctggtggagctgaaggttgcaggctctggttttgggaaaaaaagcaaagacatgtccacagagcgggacttcttcat

SEQ ID NO: 819025 - DNA, 100 bp, Homo sapiens
tagctgctaaaaccacctttgtcaccagaatgaatgaagtgcttcagatttaaataagatgtgaactttgtccccataaggatggagctttaaaaagaac

SEQ ID NO: 819026 - DNA, 100 bp, Homo sapiens
ctgactcaggatcaggtgcgggaggttaagcggcacatcaccgtgcgcctggactggggtaatgaactgctgtgattgcacctgccatcttatgcagaaa

SEQ ID NO: 819027 - DNA, 98 bp, Homo sapiens
tttggatggtctcatctacttgctattggcattatactttgacaaaattttaccctgtccttatcttgcttccctgccattggacagctctctacttt

SEQ ID NO: 819028 - DNA, 100 bp, Homo sapiens
ccctggagagaggagagaaaatgtccactggacctctgtccaggataacttagaagatgatgatgtggaaatgaaaaatggtataacccagggagacaaa

SEQ ID NO: 819029 - DNA, 100 bp, Homo sapiens
tatgcttggcagcagaaggatttggcaacagactttgtttcttggagtccacttccaattccaagcttggatcctagcatgactatacattgtgacatgg

SEQ ID NO: 819030 - DNA, 99 bp, Homo sapiens
cacgcacgcggtgcagggtaacatggcggatgcggaagccctgaaacatgtatctgatgacatgaagactcacaagaaccctgccctgaaggctcagag

SEQ ID NO: 819031 - DNA, 100 bp, Homo sapiens
attcttcaggtccacagtctggatggatgaaacaagaggaggaaacatctggacagggcccgatgagagaaagggaaagttaaggatgctggagcagaac

SEQ ID NO: 819032 - DNA, 99 bp, Homo sapiens
tagcttcatgttcctggtgtttgacctcagatggtgaggcagcaggctgcactatcaacaatagcctatccaacatccagtggcttcgaaagatgagtt

SEQ ID NO: 819033 - DNA, 99 bp, Homo sapiens
gagataaattcccggaaccgcgattcggcgtgtcagtggttagcaggaagaagatgagccttaagtctgaacgccgaggaattcatgtggatcaatcgg

SEQ ID NO: 819034 - DNA, 99 bp, Homo sapiens
aagaagcagcaccttatctcagctccctggggataagtccaaagcctttgatttccttagtgaagaagttttgcggcctccaggtggtggatccaattt

SEQ ID NO: 819035 - DNA, 100 bp, Homo sapiens
tattaaatttaaatagattagtaactggcatagacaactatgggcagatgcgtttagcccagcccctgctggtaaccaaggtcctcctccaatgatgggt

SEQ ID NO: 819036 - DNA, 100 bp, Homo sapiens
ctcatctttctacagactacggtttgagctcagatatcgggctgaacggtcaaagacattcacaacatggatggagtctactcttcatcttgtgttgaga

SEQ ID NO: 819037 - DNA, 100 bp, Homo sapiens
cagaccaggagcttatcaagatacaattgaataatcaaagggtggagcctggacaaaatgtttacttgtctggttgtttacattcagagctctatcaata

SEQ ID NO: 819038 - DNA, 100 bp, Homo sapiens
accattgattttggcaactcagaagcagttcaattacacacacatctgtgctggagcatctgccttcggaaaggacttgtcttacaaggaccggcactgg

SEQ ID NO: 819039 - DNA, 98 bp, Homo sapiens
agacatttcggtttcgcctgaaattaagaagcagggactaaaaacagcccttgtagaaagagatgatttctcatcagggaccagcagcagaagcacta

SEQ ID NO: 819040 - DNA, 100 bp, Homo sapiens
ggtgtattcccttaaaaagacggacagcccatcgtgtgaactatagagtttgtggacagatttatattggtggattctccacagttttcctcgtgcgtac

SEQ ID NO: 819041 - DNA, 98 bp, Homo sapiens
tcgaaccccgggacacgcaggaacggctccagcatcaagatccgtctgacagccccctggccactgttctaggtgctgttgttctactaaacaaggaa

SEQ ID NO: 819042 - DNA, 98 bp, Homo sapiens
aacttgcctacgtcagtaacagccaccaaggaatcccgttctgcttccagaagtggaagtgctcacggatcggggaaatctgcaaggcatacccctgc

SEQ ID NO: 819043 - DNA, 100 bp, Homo sapiens
ggtgtgaggacgagcgcttcctgaagcagttctgtgtatccaacattaatcagaaggtgaagtttcaggatggaagatgctaattctgaaaagagtataa

SEQ ID NO: 819044 - DNA, 98 bp, Homo sapiens
gaacctcaagcttttcaggcatcctcatataattaaactgctcaagaccacctttaatcctacaatctcagtctctaccttgttcatcacctcgagat

SEQ ID NO: 819045 - DNA, 98 bp, Homo sapiens
tagccagagccaaagaagccttgcagggctttgggaacgatcactgcagtgcctgtcacgggtcctcaggtcagctccttgcagaggttggccgggca

SEQ ID NO: 819046 - DNA, 98 bp, Homo sapiens
ggaggaagaagcagaaatggaaattgacagaattctctttgaaattacagcaggatgggaagcacaaaatgcaagaggaaaatgttaaactaaaaaag

SEQ ID NO: 819047 - DNA, 100 bp, Homo sapiens
atcgccctggccgacaagcacgcaaggtttggtaaaggctccagtgtggtggcctatgaaggacaatcctggcacgactactgcttccactgcaaaaaat

SEQ ID NO: 819048 - DNA, 100 bp, Homo sapiens
ccgccgccgccgcctcggccgaccagggacctgcccgcctgcggctgctccggccagagactgctgctactttgaaacgtacgatagaggccctgatgga

SEQ ID NO: 819049 - DNA, 125 bp, Homo sapiens
ccattctctaaaccagaaatagcactgacagaagccctgaggcttttggctgatgaggattgaacaacaccgatggacttcaggaacttgcctgtgggggcttaatttattgcttgggagttgtg

SEQ ID NO: 819050 - DNA, 100 bp, Homo sapiens
cgggatgctgtgaacgagtgtgatattactgaatattgtactggagactctggtcaggatggagctatgacattgaagagaggaaggttccaaaacccaa

SEQ ID NO: 819051 - DNA, 99 bp, Homo sapiens
ggggattctcgacctgctaacagaactggaccttttcgatgtcccagctagtggaatgtatttcatgacatatgaatggctgaaaaatatcttcactcc

SEQ ID NO: 819052 - DNA, 98 bp, Homo sapiens
gcagaatttcaaaatttctgcattcacggagaatgcaaatatatagagcacctggaagcagtaacatgcaagatacaacttcagtattaaaggaggaa

SEQ ID NO: 819053 - DNA, 99 bp, Homo sapiens
ggataccaagtctcccaacaacagagacaggtagacacagcatcatctctacccataaaagatggcattctgcaagactgagaagatgcccacctccat

SEQ ID NO: 819054 - DNA, 100 bp, Homo sapiens
gaaccagcctccacatccttccacccacccaggattcaggtcattgattacaacggggaacgcacgctggatggttttaagaaattcctggagagcggtg

SEQ ID NO: 819055 - DNA, 99 bp, Homo sapiens
ccttaactatgctttatcaggtgaagaaagttgtgacttctcaccaggagatttggtttgggccaagatggagggttacccctggtggccttgtctggt

SEQ ID NO: 819056 - DNA, 100 bp, Homo sapiens
gccagtgggacgtctgagactttctccttcaagtacttggcagatcactctcttagcagttcaaaagaatgctgaaccgggagctgacacacctctcaga

SEQ ID NO: 819057 - DNA, 99 bp, Homo sapiens
ccagagggagaagcagctagaaccagtaccatgcaggatgaaacattaaattcttccgttcagagtattagtggttttagtgaagaagtcttatattac

SEQ ID NO: 819058 - DNA, 51 bp, Homo sapiens
tgctgatgagagctataacttaatgcctaaaatgaccaatgtgtgatttca

SEQ ID NO: 819059 - DNA, 100 bp, Homo sapiens
cggccctggtgttgctgctgtcctccttctccggaggcaagtgaggcctatctggttggcctttttgaagacaccaacctgtgtgctatccatgccaaac

SEQ ID NO: 819060 - DNA, 98 bp, Homo sapiens
ttcttaacagcaattgctttgaacatctcatacgactgctacagaactgcaagaactcccccactggaaaggattctgaaagaaatgaagtcagccct

SEQ ID NO: 819061 - DNA, 100 bp, Homo sapiens
ttaagaaaggcataaagttttttcaaaggcttataaatagtaaaagcctacgatttgggcacacgtgtttcacgttgacaggtttgcttgggacgctagt

SEQ ID NO: 819062 - DNA, 99 bp, Homo sapiens
tccttcatatgatccatcttagtgaagaattaggatacaggtctttgatttgcgtcagtgtcatcgacagatgcagcagcaggcggctactgcacaagc

SEQ ID NO: 819063 - DNA, 99 bp, Homo sapiens
gccgccgccgttttcgcctgcagctgctcaccggggctaagtgatggatcttgtactccgtgttgcagattactatttttttacaccatacgtgtatcc

SEQ ID NO: 819064 - DNA, 100 bp, Homo sapiens
ctggaccgttccattccggattatcgtcccaccaaaatgccgggtctaagttgtagattttatcaacacaaatttcctgaggtggaagatgtagtgatgg

SEQ ID NO: 819065 - DNA, 100 bp, Homo sapiens
atggcccagaagaaccttcaagaggccaaagaacagtttgagagacaggtttttaacgcctaccaggctggggtaggagcactcaaactctccatgaagg

SEQ ID NO: 819066 - DNA, 100 bp, Homo sapiens
cttagacattgtatacgagaaggagggcaagatgttccaagcaacaaggatgtcacatctctagattggaataatggatgcactgagctgattatgaatt

SEQ ID NO: 819067 - DNA, 100 bp, Homo sapiens
tttcgtccaggacagtatgtggatgtcacagccaaaacgtctggctctgggagaggagtggacagcagctggttgagatacatccccatctggagacagg

SEQ ID NO: 819068 - DNA, 99 bp, Homo sapiens
tcatattgtacttgcgagtgagacccggctggaggaatgttttaattcttcggaaataccaagtggtctctgccacggacacagtcattccctctttaa

SEQ ID NO: 819069 - DNA, 100 bp, Homo sapiens
actgaactgtgtcaacttatttgtgatgccttacaattatccagtccttcttcccctcttaggtgtggaaaaagaagctctcggcggccgtggaggtggg

SEQ ID NO: 819070 - DNA, 100 bp, Homo sapiens
tggagaagaaggccttgactacggaggggttgccagaatgatcaagttgacgacaggaaaggaagccgcactcagttatggcttctacggctgccactgt

SEQ ID NO: 819071 - DNA, 100 bp, Homo sapiens
cgctctaaactgcccttgaaatgaagctggacttggaggctgtgggtgagcgtggaggatgctcagatgcacaccgtcaccatctggctcacagtgcgcc

SEQ ID NO: 819072 - DNA, 100 bp, Homo sapiens
ggggcatgtggcaaaacacacagctgaggctgtattcatcaccaaagaaaaaacttacaccaatgcagaaatcggttagtccattagtttggtgcaggca

SEQ ID NO: 819073 - DNA, 98 bp, Homo sapiens
taatatctgattgggacaacattcagacccatttccagtcatgattttagaaagagcgttttcgctacgtaaagcacattcgataaaggatatggaaa

SEQ ID NO: 819074 - DNA, 100 bp, Homo sapiens
aggcccctttggaacctaaggagccctgccgaggagctgaaggccttcagagtccttggggtgattgacaaggttccagagagattcctggaagttgctc

SEQ ID NO: 819075 - DNA, 99 bp, Homo sapiens
gtactgcacatactgcacggccttggctggactctgcgggactatgtccgaggatacatccttcaggttgtttgcattcgctccacttggaatgctctc

SEQ ID NO: 819076 - DNA, 100 bp, Homo sapiens
ggggggaagtgactgggcggtgccggcgccggagacgatgccgttgatgttgagaaagagaaggaaacccacagttacctcagcaaagaggagatcaaag

SEQ ID NO: 819077 - DNA, 100 bp, Homo sapiens
aacgcagagacaaaagaaacgggccccgactgcttggatcctagcatgactatacattgtgacatggtcattacatatggattagaccaactggagaatt

SEQ ID NO: 819078 - DNA, 98 bp, Homo sapiens
cagaaaaggggtgaaagagaagattgcaactttgagtcagacctgtaggcctgatagactgattaaaccacaggcctgtgatacttgggctgtgatcc

SEQ ID NO: 819079 - DNA, 108 bp, Homo sapiens
ttgccctggggttaacactccagtgggatgaacagacaaaccccacaagcactgcatacggacgccaagagtgccgaggatgaggctccttccagacacttgggaaag

SEQ ID NO: 819080 - DNA, 100 bp, Homo sapiens
atgaaagggaagctggcatcactgagaaggttgttttcgagcagacaaaggtcatcgcagcttcctctgcaaaaatgggcctggttgaaacaaaattggc

SEQ ID NO: 819081 - DNA, 98 bp, Homo sapiens
atgaccctagccagactcagggatcaaagagcaaacagattcagtggcctgcattggactagcccgagccaagtcagttcccacaaagacctactcaa

SEQ ID NO: 819082 - DNA, 100 bp, Homo sapiens
caccaagcctgatcaagctactccagcagccttggtattacagggtcttcatgcactctgtcaagctgaggatcatgaattttctaaaactgaggaacta

SEQ ID NO: 819083 - DNA, 100 bp, Homo sapiens
catggctacttcatattttggaaagcagtttttaagacaagaattgaatgatctggcacgggaccctccagcacagtgttcagcaggtcctgttggagat

SEQ ID NO: 819084 - DNA, 100 bp, Homo sapiens
ctaatgcagtcactaaaacagccggcccaattgcaagtgcacagaaacaacctgcggggaaaggtgttgaaagcagcaggggcctagaagacattaaacc

SEQ ID NO: 819085 - DNA, 99 bp, Homo sapiens
ttaaatgatgtattttgtgatcgcagcgatgaaagatatggaagaaagtagcagtgttgccatgttggtgccagatattggggaacaggaagctatact

SEQ ID NO: 819086 - DNA, 100 bp, Homo sapiens
gaaagttattgaacggctgggccagagcgtggttgctgaccagttgaaaggtggagccttttgccagcttgaccgaggccgtgcggagctcagttccccg

SEQ ID NO: 819087 - DNA, 100 bp, Homo sapiens
aagatggtgctgtcccagagacaacgagatgaacttgaacacctacctcttcatgatgcaagcccaaggcattctgatccgggacaacgtgagaacaatc

SEQ ID NO: 819088 - DNA, 100 bp, Homo sapiens
tggttttggaacagtttcagctggcatggtactggatatagtacagattcccagaagttgtgcatgagttcctgtgaggagagttggcatcttggaaatc

SEQ ID NO: 819089 - DNA, 100 bp, Homo sapiens
cctgcatgagtatgacatgaccaagatgcccgagtgctacttctactccaagttcgggaaggtgctgagctactggtgcttcagtcccggccacagcatg

SEQ ID NO: 819090 - DNA, 98 bp, Homo sapiens
aaaaacaagaattacagcagccaacctatgttgccctgagttacataaataggcttggtggcatgcatgtttagtcccagctacacagcagggaggct

SEQ ID NO: 819091 - DNA, 98 bp, Homo sapiens
gggtcccggctgccctgtggcctcgctcctcggaggctctttccaacaactgatcctgtgggtactttgctccaagttccagaacagatctctgctca

SEQ ID NO: 819092 - DNA, 98 bp, Homo sapiens
aggtgttcactttttacacactcgtgatgtagttcatcttgatttgaagcctacttggaggagatccagtcggtccgtcgccataccaacagcatgct

SEQ ID NO: 819093 - DNA, 100 bp, Homo sapiens
gacaacaccgagtatgagaaaagtgtcattgttgcagcaaaaaagtcagcagtctcaccttccacctttaatacaagcatacctaccaatgctgtcagtg

SEQ ID NO: 819094 - DNA, 99 bp, Homo sapiens
ttaaacaattggataatatcttggctgctgtacatgacgtgcttaatgaaaggggtagtaaaaagaatcattcctgcagtagcttccacaaatgcagtc

SEQ ID NO: 819095 - DNA, 100 bp, Homo sapiens
gaccccttcaagttctagtcatggtgattgaattactcagatatgaagatcatcatctaggttttgtgtaaaaggccctggatattttaagtggccattt

SEQ ID NO: 819096 - DNA, 98 bp, Homo sapiens
ctcgcaaagcgtcgagatcccgggcgggggcaccgagggctaccacgttctgcgggaataatcaagctgggaaggtggaaccctctccccctcagtta

SEQ ID NO: 819097 - DNA, 100 bp, Homo sapiens
ggaatcttctcagaatggcaaacagtatatcatttcagaggagattacccgtgaggcagccgagagcgacccacccgcccactcgcagctccgaagcagc

SEQ ID NO: 819098 - DNA, 99 bp, Homo sapiens
tgccagcgactccatctacacgaaaggcaccccggagattgctttctggggaagggaggacatgtatgcccaggactctatagagctactaacaacatc

SEQ ID NO: 819099 - DNA, 100 bp, Homo sapiens
cagtttgggcacctgcagcgacctacccactacaatacctcttgggactgggctcgatttgagtagagatgaggtttctccatgttggtcaggctggtct

SEQ ID NO: 819100 - DNA, 100 bp, Homo sapiens
gtccttcccccaagaccaggcgccagggcgagggtggctttgcaaaatgttacgagatgacagatttgacaaataacaaagtctacgccgcaaaaattat

SEQ ID NO: 819101 - DNA, 100 bp, Homo sapiens
ccgactcctgattatgtatggcgcggatctcaacatcaagaactgtggtccttgcactgggaatcaacagagtttggcacacagcaggctgtgggatgct

SEQ ID NO: 819102 - DNA, 100 bp, Homo sapiens
ctgaacaacaaaatgaagaagaaaagaatgagaattctaaaagtttagaagaggaggaaaaatttgaccctccaagacagtcaattccagcatcttgcag

SEQ ID NO: 819103 - DNA, 51 bp, Homo sapiens
aagccaatcccaggaggaaaaacgattattcagagctgggagagcttcccc

SEQ ID NO: 819104 - DNA, 100 bp, Homo sapiens
atcgacatggccctgagtgaatacccagaaaatttcatatacttggagatgaagttcaacttttttcacttgatgaagaatttgattatgacaatgtgat

SEQ ID NO: 819105 - DNA, 100 bp, Homo sapiens
gtcctctcgatataagaaggaatcaaagtcaggccttgtgaaaccaggagtatgctgctgctgttccgctttgcgtcctcgctacaaacgcctggtggac

SEQ ID NO: 819106 - DNA, 99 bp, Homo sapiens
agcctcacaagtagctgggattacagaatgcccaggaaaaccatgggctggctgtgcccaccccctcggttccagatgattttgcagacaaagaagtga

SEQ ID NO: 819107 - DNA, 98 bp, Homo sapiens
ctcacttggccaatcatgatgaactaatttccaagattgatgaactcccagagggcgctgtgaagcctccagcaaacaagtatcctatcttctttttt

SEQ ID NO: 819108 - DNA, 98 bp, Homo sapiens
ggtccgaaggcatcaagtatcggaagaatgaggtgttcttggacgtcatcgagtctgtcaacctcttgtttggcaatgaggagcagcagctggcgtgg

SEQ ID NO: 819109 - DNA, 98 bp, Homo sapiens
catgacaaccaggcaatgctggatagataccgaattcttatcacaaaggtgtaggaattggcgtggtccatgctgggtatgagagacgcctggcccat

SEQ ID NO: 819110 - DNA, 98 bp, Homo sapiens
ccgcgagttcctgcgcggctgcggggcttccctgcggctggagatgctgagaaaaactcttaaagagtctgatagtgaagaactggaaataacacagg

SEQ ID NO: 819111 - DNA, 100 bp, Homo sapiens
ttttacttggcagaatgtgggaagtggcacatgtttcaggcaaccccattccagctgccattgaagaaatgcgcggtggtgggaaatggtgggattctga

SEQ ID NO: 819112 - DNA, 100 bp, Homo sapiens
ctgcccagagctcctggaccaatgcatcttcccaccaccttaaaccactgatcttccacatgacctacgacctggccagcgccgtggtgcgcatcgtgaa

SEQ ID NO: 819113 - DNA, 100 bp, Homo sapiens
gtgtgggagcgggagctgcggaaaggtgaatctggattgggaaagtcgacattaatcaactcattattcctcacagatttgtattctccagagtatccag

SEQ ID NO: 819114 - DNA, 115 bp, Homo sapiens
ggaaacatggcactgttgcctatcagaagtcaattcaaaggacctgcccccagagagagcgacatcattgtccacgtggaaccacaaggatttatgaaaattctggggtgttttg

SEQ ID NO: 819115 - DNA, 100 bp, Homo sapiens
gataagcacaaagtcaagagacagcgattggacagaatttgtgaaggttttgttccaactctgggtggcacagagttcagagttcttcagacggttagcc

SEQ ID NO: 819116 - DNA, 100 bp, Homo sapiens
tcatgctggtggctctacccagaattcaattaaagtggctcaggaaggatctgagtctctccctgcggagacagccctgaagaactcctgtaacgtcaag

SEQ ID NO: 819117 - DNA, 99 bp, Homo sapiens
ttgcttagaggagtatttcctgaactgtgtgggtagggcgaactttctgaccaagtatacaactacccagagggcctaggagaagtgctgtatagagag

SEQ ID NO: 819118 - DNA, 100 bp, Homo sapiens
agcagatcaagaaatccagctcaattcctccaactcctctgccaaccaatgatgttgatgtgtatttcgagacctctgcagatgataatgagcatgctcg

SEQ ID NO: 819119 - DNA, 98 bp, Homo sapiens
agaaacccaggaaatcgagactcatgactcccagagaggatggcatctagaaggccatttgtgtaggaccagaaaacatgcagataatgtatccagct

SEQ ID NO: 819120 - DNA, 98 bp, Homo sapiens
tcagtcaaggcactcagctcaaatacacacacctgttgccattatagagctggaattaggcaaatatggacaggagctgggaatcccaagtgcaaaat

SEQ ID NO: 819121 - DNA, 98 bp, Homo sapiens
gccgtgcaacgcggagtggagctcagccaggggcagccggctctggtgctcccagaagaggggcatatgatattttcctgaatgcaaaagagcaaaac

SEQ ID NO: 819122 - DNA, 99 bp, Homo sapiens
ctgaggcgtttgttgcagctacctgcacttctagatttcaaaaggtgatgacctatcaacagccattctcaaacagaagaaccgtcccaatcggttaat

SEQ ID NO: 819123 - DNA, 100 bp, Homo sapiens
agaagctcctatgcacgggacagcatgatgattgaagaactccttgtgccatccaaagagcagggaagtttggttggcttagtggattatccagatgatg

SEQ ID NO: 819124 - DNA, 100 bp, Homo sapiens
ggagaacaaggcgtgatcctaatgtcacagaaatgagccgtcagactgctacagcattacctaccggtacctcgaagtgtccaccatcccagagggtgcc

SEQ ID NO: 819125 - DNA, 100 bp, Homo sapiens
ctgcgcaaggaggagactcgacaacatgtcacccgcgctccaagacctgtcgcaacccgtatgaatgacccatattaaatcgcccttggtgaaagaaaat

SEQ ID NO: 819126 - DNA, 99 bp, Homo sapiens
ttttgttcctgaaaatcaccagttccgtgctccattatgtcgtgtgcttccccggggcccagatcattgatctgatgatgctggtcatcgatgtgacca

SEQ ID NO: 819127 - DNA, 98 bp, Homo sapiens
gcagaacctcacggccggaagtggaccacccaagatttcctggttcaagaatggcctggacctgggagaagacgcccgcttccgcatgttcagcaagc

SEQ ID NO: 819128 - DNA, 100 bp, Homo sapiens
gaaagtagtattcattggaaagagactccaagaaaatactcgaagacatcaaaagctggattcgaggagccagcccctgggcaacaaagtggaaatggag

SEQ ID NO: 819129 - DNA, 98 bp, Homo sapiens
tgtattccaccacctccgccagttaagaggaaaaaggcattttttactgtctacagaaacttattgtaattcatttttcctcactccagtagtaagaa

SEQ ID NO: 819130 - DNA, 98 bp, Homo sapiens
cgcggggaggacatggccgcgcacaggccggtggaatgggtccaggccgtggtcagccgcttcgacgagcagattgctgacttgacctctgaccttgc

SEQ ID NO: 819131 - DNA, 98 bp, Homo sapiens
cgtgggcagcaacgatcgagtccagggagtgatcagccagctggaagacacctgcaaaactatcgaggaggttgtggctcactggattgctgaaagcc

SEQ ID NO: 819132 - DNA, 100 bp, Homo sapiens
tacgtgctcacggtcaacgagcggggcaaccactgcgagtactgcttcaccagggtgtgctgggtgcatcatgtaactggcatgtgggtgtaccctttcc

SEQ ID NO: 819133 - DNA, 98 bp, Homo sapiens
accaatacactgaggccctggcccagagggacaagcgatatgagtctcatccagtctgtgctgatctgcaggccaaaattcttcagtgttaccgtgag

SEQ ID NO: 819134 - DNA, 100 bp, Homo sapiens
gaactgtgcccattacttctgcctggactgcattgtcgaatggtccaagagcgggaacagcttccacgtgttcgaccagggccagtttgccaaggaggtg

SEQ ID NO: 819135 - DNA, 99 bp, Homo sapiens
gaaacacagtttgaagttgtcctggagtaaagatggagaagcctttgaaattaatggcacagaagatggcagggagaagttggcagtggcccgactaca

SEQ ID NO: 819136 - DNA, 98 bp, Homo sapiens
gacttggtggatggacggcattccccacccatggtcagaagtgtggctgccatccaccccagcctggagatccccactgtccagaccaaaacgaagaa

SEQ ID NO: 819137 - DNA, 100 bp, Homo sapiens
tctgtcttgcattcctggacctatgcaggtgaaacctaaacatttgtcttgcattggagtctgttcttttttgctggctgctagaatagttgaagaagac

SEQ ID NO: 819138 - DNA, 100 bp, Homo sapiens
caacattctgagaagagtcaacagtgcccctttgatcaatggacttgggctgctctttggcgtaaattgcaatcgattagggatcgtttctcagaatcaa

SEQ ID NO: 819139 - DNA, 98 bp, Homo sapiens
ttctggactaatgatgatccagcttatatcaaaggtgggtggatccttaggaaagcctggaagatttacaataaatgctatctggacatcaatgccct

SEQ ID NO: 819140 - DNA, 100 bp, Homo sapiens
aggacctccctgccctgtataccgagggaacagtctgttctctggggaggcagtaaggggccgtggagctggcctcggcctcggcatcgggagaggctgg

SEQ ID NO: 819141 - DNA, 100 bp, Homo sapiens
ggttaaccacgtctcgtccacgacctccctaggtcacggtctagatcacattctcgatccagaggaaggcgatactctcgctcacgcagcaggagcaggg

SEQ ID NO: 819142 - DNA, 100 bp, Homo sapiens
ttcagccttaccaagcaacaagtgaaattgaggtcacaccttcagtccttcgagcaagagcgtccgtggccactgaactgcgctgccagtgcttgcagac

SEQ ID NO: 819143 - DNA, 99 bp, Homo sapiens
ggggggctgaaatccatcttcatcctaccgctccgcccagtgatcagcagctggactgtgccttggacctaatgaggcgcctgcctccccagcaaatcg

SEQ ID NO: 819144 - DNA, 109 bp, Homo sapiens
atatggaaaatggaagaaagctaggaatagagttcatttcagaagatacaatgttgaatggcccttcaggttttaaaatcaaagatgggaaaatcggagaaaattgccc

SEQ ID NO: 819145 - DNA, 99 bp, Homo sapiens
gagaagaggaggatgcggctcgtggtggatggcatggggcgctttggcagatccaagagctcctgtctccccaggagccccccaggcctcccgaggcag

SEQ ID NO: 819146 - DNA, 99 bp, Homo sapiens
ttgatatggtggaggacacagaagatccgttataaagaagagtttaaaaagtccaaggataagtgtacatttgtgactgacagtcctatgctaaaccat

SEQ ID NO: 819147 - DNA, 101 bp, Homo sapiens
ttgcctggaatcccatttgtttggggttggtagaaggtgttattgggaaaattcaacttcattcagttgtacacagaagaaagcccatatgaggacacagc

SEQ ID NO: 819148 - DNA, 100 bp, Homo sapiens
gagcctgggaggccggccggtgccagcacctttcggcttctgagacggcggcagcagcggcattcaggtttttcttcccccagtccctcagctgctgctg

SEQ ID NO: 819149 - DNA, 100 bp, Homo sapiens
aaactaataataataattccagcttctacacagctttgtgtccctggtgatgttggaacattaatgatggaacatggccaaacttcagtcatgatcctga

SEQ ID NO: 819150 - DNA, 100 bp, Homo sapiens
cgggaggaggcggcggcggcggctgaagccgacgtagcttctctgaacagacgcatccagctggttgaggaagagttggatcgtgcccaggagcgtctgg

SEQ ID NO: 819151 - DNA, 99 bp, Homo sapiens
gagcactctgcccctttctcctgggaaacaaagtgggtaattccagaattgattggccataccattgtcactgtattactgctcatgtcattgcactgg

SEQ ID NO: 819152 - DNA, 100 bp, Homo sapiens
taggggggatagatgcaaaacccttttagagaaacccaaactcttcttcattcaggaaatattaggaagctgtgattttcaaagctaattatgaaaacat

SEQ ID NO: 819153 - DNA, 98 bp, Homo sapiens
cgtggggaagaatgaaaaaaccaaaattatcgccaagattcagcaagatgtgaacctgaagatgccccggaacaaccagctgctgcacttcgccttcc

SEQ ID NO: 819154 - DNA, 98 bp, Homo sapiens
tggccgtgaggaggttgggggccctcgcggaggccgagaggcttaaggaggtttgagcacaaaatgaacataattagggaaaataaggatctggcatg

SEQ ID NO: 819155 - DNA, 98 bp, Homo sapiens
aatcagacagaacagttaatcctcaatttaagcctgatctaacccctagaaacagattgtaaaccatggctgtgtggatacaagctcagcagctccaa

SEQ ID NO: 819156 - DNA, 99 bp, Homo sapiens
gggtcggttctgcagcgctgtatcgtgtcgccggcagggaggcatagcgcctctctgatcttcctgcatggctcagatgctgcagtctgaagagacttc

SEQ ID NO: 819157 - DNA, 98 bp, Homo sapiens
acatttaaaagtgcagtttttggatgattcccagaagatttttgtggttgattgaacagagtatctgccaagcccgggcttccgtgatggtctacgat

SEQ ID NO: 819158 - DNA, 99 bp, Homo sapiens
ttcggcctagactgcgaggaggctctaattgagaaattgcacgatctgattttctggagagatgtgaagaagactgggtttgtctttggcaccacgctg

SEQ ID NO: 819159 - DNA, 113 bp, Homo sapiens
gcaattgcaaaggaaaagcatggctacaatgtggaacagatgtgttcagagcaacattgttttgttgacacaagcatttagaagaaagtttgtgattcctgactttatgtctt

SEQ ID NO: 819160 - DNA, 99 bp, Homo sapiens
ggggacagacgtaaacgtgttcaataccatccttaccaccagaagctatccacaacttcgcagagactgcaaaattcaaaatggggctcaaggtattcg

SEQ ID NO: 819161 - DNA, 100 bp, Homo sapiens
tcaaacaaccaaccctgatttcctgcttctccttttcatgagtgttcctgtggtctctgcacctcctttctataacgaaggaggcccaacttcattcaat

SEQ ID NO: 819162 - DNA, 100 bp, Homo sapiens
gtattcaccacaggaatcatgactcctggagaacggatcaagtgcttattacaggctcagaaaaaatgtctgaatcagacttcccccatttctgctccca

SEQ ID NO: 819163 - DNA, 100 bp, Homo sapiens
cagtcctgcagagccctctcttcagtcagattctgagccttcagacttctgtacagcagctgaaagaccaggaggagtatttgaagacttctgagcggag

SEQ ID NO: 819164 - DNA, 100 bp, Homo sapiens
actgtcatggtgctggtgggagtgtagcagtgaggaagaccagagttcgccctcgtcgccgtcttggttttgggtgtgaggaactacagtgtccccatag

SEQ ID NO: 819165 - DNA, 98 bp, Homo sapiens
gacgaggacgacgaggaggaggaggaggaggaaaaagatggggcattctcttctcccaccctcgggactttaccccagtgtgcaccacagagcttggc

SEQ ID NO: 819166 - DNA, 100 bp, Homo sapiens
ctccagtaggagggaacgacagccagggccaggttcttgatggccagtctcagcatctcttccaacagaaccagaggagatttcaagtgatgaagaggag

SEQ ID NO: 819167 - DNA, 100 bp, Homo sapiens
tgtgtggcgatggtcttcctgctggggctcatgtttgaggtattggtttgccttaaaaaggggttaccatgcagcttttaaatatgacagcaatactagt

SEQ ID NO: 819168 - DNA, 98 bp, Homo sapiens
ttggcagcagaaggatttggcaacagactttgtttcttggagtccacttccaattccaagggtgctggaaatgtaaacaagaatagactgttcattcc

SEQ ID NO: 819169 - DNA, 100 bp, Homo sapiens
ccgagttgaactgaagaaacgagtggatgactatgtcagaagacatttgagttccatatccagactctcaaaccatgttttgggatcatccaaacattcc

SEQ ID NO: 819170 - DNA, 100 bp, Homo sapiens
tgtgataagcaatatcagaaacatcaggaatttgataaccatatcaactcctatgatcatgcacacaagcagaaatggtggagtcaatgaagaaagtagc

SEQ ID NO: 819171 - DNA, 98 bp, Homo sapiens
cacctacagccccgacgaacatttctgggtgacactcaacaggattcccggaaccaaagaggttgttgtaaatgtggatgatgatggagtcatttcat

SEQ ID NO: 819172 - DNA, 98 bp, Homo sapiens
ttgaaagaatgaggaaataccagatgactggtgtagaggaagtaacacagtgagtccattcttgcacaccgagaaaatatgcgacagatgataagaag

SEQ ID NO: 819173 - DNA, 99 bp, Homo sapiens
tcgagaggaaccaggacatgagccggcagtacgagcagatgcataaggagctgacagacaagctcgagatcctctggaccttctccatctacctggagt

SEQ ID NO: 819174 - DNA, 100 bp, Homo sapiens
ggagctcgcctgctgccctcttgcgcgcgggaagcagcaccaagttcacggccaacgccttggcactaggatgtccaggatgttaccgttcctgctgctg

SEQ ID NO: 819175 - DNA, 101 bp, Homo sapiens
accaaaagctgtgagaacaactacacgttacgctattcgttgtggtccaaaacagtttacctcttatctaacaggagaccaagacacattccaccccagtg

SEQ ID NO: 819176 - DNA, 153 bp, Homo sapiens
ccaccatgtaccctggcattgccgacaggatgcagaaggagatcactgccctggcacccagcacaatgaagatcaaggacatatccaatgatgatgatgacatgcaccctgcagcagccgggatggcagacggggtccacctcctagggttct

SEQ ID NO: 819177 - DNA, 99 bp, Homo sapiens
gctggggagcagttgggaatcaggtctggaatactcctaaccaagaagttgcccaggatgagaacaagttgagcagtgccaacggccatgaagaacgta

SEQ ID NO: 819178 - DNA, 98 bp, Homo sapiens
cctggaggtctccactctggtcagcaagtatccagacatcaggttcgggtctggcggtacttgaagggcaaagacctggtggcccgggagagcctgct

SEQ ID NO: 819179 - DNA, 100 bp, Homo sapiens
catggatgacttgcttgggtaaggacatgaagacagttcctgtcataccttttaaagcagatataatttctacagtagaatttaatcattctggagaatt

SEQ ID NO: 819180 - DNA, 100 bp, Homo sapiens
ccttgtcactggagtgcaagaagaaattcccacctgtcaaagagggtgaaggttgccgaactgtccccctggctggacatgtggggtttgacagcttgcc

SEQ ID NO: 819181 - DNA, 99 bp, Homo sapiens
ttaaaccacatggctatctaaagagccgcagattcttatacatcgtcaatctagatgcccctttcgaaggtcaccgaaagatctctcgccagagcaaat

SEQ ID NO: 819182 - DNA, 145 bp, Homo sapiens
tgaaataagcaacagtgagaagcatgtgacttttgaaaaccatcgcatagtctcacctaaaaatagtgttaaaatgagcaacttctttaaccagaactgaccttgaagacaaatggctaaaataaaacatttgctgaattcactg

SEQ ID NO: 819183 - DNA, 137 bp, Homo sapiens
ggagcggattcagctaatgatgatggtcaaagaaaagatgatcacaattgaggaagcacttgctagggctggaatcgatggagaaagcatcggcaactgtcctttctctcagcgcctcttcatgatcctctggctga

SEQ ID NO: 819184 - DNA, 98 bp, Homo sapiens
tgtggcaggagccgaaggagcccaatggtctgatcgtgctgtatgaagtgagttatcggcgatatggtgatgaggaagaagttctaaaggattttgaa

SEQ ID NO: 819185 - DNA, 100 bp, Homo sapiens
atcattgggagaaatccccactcctccaagaaccaacccccaaattggctgggacaggatctgtctggctccattgatgacctccccacgggaacggaag

SEQ ID NO: 819186 - DNA, 100 bp, Homo sapiens
agatgatatgtgggagcacatcgcaactttcaatgctttagatggctctcaaataatccccaaagtcacagaaataatacctaaatatggcagtataaat

SEQ ID NO: 819187 - DNA, 100 bp, Homo sapiens
ttcctctgtatagagcaactgttgaactcagctgcctgtagctaaaagatggcggcaaggcagcccaggcaaatgtaagaataggcgatgtggttctcag

SEQ ID NO: 819188 - DNA, 98 bp, Homo sapiens
cggaagtgcctctccgacagcagatccaggctcggagctccagacgctgggacaggccgccatggcatcagatgaaggcaaactttttgttggagggc

SEQ ID NO: 819189 - DNA, 100 bp, Homo sapiens
gtggttcccacaaagagtataagcgagggaagtcgtgcacgaacaccaagctccagaacctgggtatcaacccagcaaacattggcttcagtaccctgac

SEQ ID NO: 819190 - DNA, 100 bp, Homo sapiens
cgtgattgcgttacaagctttgtctccttcgacttggagtctttgtccaggacgagcttcttcgagacaccttcacttccctgggctatgaagtccagaa

SEQ ID NO: 819191 - DNA, 117 bp, Homo sapiens
cgcgccgcccgcccgccggggccccgctgtccgccgcccgccgccgctggagctagaggaagaaatgttggctatttggcgatgagaggtggtgaacagtgaccatactggtataca

SEQ ID NO: 819192 - DNA, 98 bp, Homo sapiens
gtagaagttcaccaagtgggaaaggacactctagatgagcagcagctgctcagggctgagcagggtcctggtggccgtggctacagccctggtgtctg

SEQ ID NO: 819193 - DNA, 98 bp, Homo sapiens
caaacctggcaaggatggtgcagattttggcagattatggctttgtccccacccagcactgatgatattataaaattattcagagctgggagagcttc

SEQ ID NO: 819194 - DNA, 100 bp, Homo sapiens
gaggaaaaccgaggagtacgatactcagtgctgcactagctgtgaggataatgccccagccaccagctactgtgtggagtgctcggagcctctgtgtgag

SEQ ID NO: 819195 - DNA, 99 bp, Homo sapiens
acctctccaccctcagtgacccggtgcagctagaagtccatatcggtgaaaattgagctaccaacacaactccatgagaaacaccatattttgttttct

SEQ ID NO: 819196 - DNA, 100 bp, Homo sapiens
tctctgtgccaccagagagtttcgtgtgcgatgcccagcctacagagtctgagaaggaaatttataatcaggtgaatgtagtattaaaagatgcagaagg

SEQ ID NO: 819197 - DNA, 100 bp, Homo sapiens
aattctacaataaaagtgaagatggtgatacaccagatatgaaatgtgacgatatgctaacacggtcacctttgtcccggtgtccaaggtgagcgggcag

SEQ ID NO: 819198 - DNA, 100 bp, Homo sapiens
tctccttccagaagctgaagctgacaaacaaccacctggacccctttggccatcggggatctgatgagcttctttcttctggcatcattaacggaccttt

SEQ ID NO: 819199 - DNA, 100 bp, Homo sapiens
tgccgcacagctactactggagcgcgccggctccctatctgggaaacaaacctgaaaggatttcaggggagcagtatggaattcattctgatgtctggag

SEQ ID NO: 819200 - DNA, 100 bp, Homo sapiens
agcctagcacctcttatactgattaggcctggaaaatccccagagaggagtcacgtctcttcggagccctacgagcccatctccccaccccaggttccgg

SEQ ID NO: 819201 - DNA, 100 bp, Homo sapiens
agtgttgcctcttcgtgccatacggttttttgttgagaatctcaaccatgatgcaattgtagttcgaaagcttatcacaccacatgggctttttatccta

SEQ ID NO: 819202 - DNA, 100 bp, Homo sapiens
cggggcagctggacgagctggagaaggccatcaccacgcagaacgtcaacaccaagtgcatcaccatccccagggggacttgatctcatcttcatgccag

SEQ ID NO: 819203 - DNA, 98 bp, Homo sapiens
ttgccagccttcaaatcaccaactgtgggaaccaactgcctcttattgccttgacgtgaacttatgaattcaacaggtgaagatttacaacttgataa

SEQ ID NO: 819204 - DNA, 100 bp, Homo sapiens
tcagccagaagggctacgccagcggcgtcgagaggaccatcctgggtgctggccctgtgctggagcttctgcagctactctgatcaacatccgcaatgcc

SEQ ID NO: 819205 - DNA, 98 bp, Homo sapiens
agagagacagagcgcggacgccgcaggaggcagtgcctggaccccagctgcccaggagagagatgctgcaatttgtcagtaatcaagtgggagagttc

SEQ ID NO: 819206 - DNA, 119 bp, Homo sapiens
gaaaagagagctcaggcccaagtggagtttgcagacataggctgtggctatggtggcctgttaggtgaacacacagtgttcatcccctcaggaggacacagcttttgaggtaccatctt

SEQ ID NO: 819207 - DNA, 100 bp, Homo sapiens
aggaggaggacgatgacgaggaggaaaaggcccctgtgacctatttcacagagatgatgagagccctgggataccctcgacatatttctatggaaaattt

SEQ ID NO: 819208 - DNA, 100 bp, Homo sapiens
atggctttctcgcttttcatctttttggatggctgcttgtcgcaatattgtcttcttcgctttagacaagtcccagcacacctggaaagttctgcaaggc

SEQ ID NO: 819209 - DNA, 100 bp, Homo sapiens
ctcagttccaagctgacctcagcaacctgcacttgaaccggcactgtgagaagagtaatggaactgctggtccatctgaataaacgtataaaaagccgcc

SEQ ID NO: 819210 - DNA, 125 bp, Homo sapiens
tccgggccgcgctgcccgcgctcctgctgccgttgctgggcctcgccgctgctgccgtcgcggctccagggcccacaacggcagtgtcctacatgtcggtgaaatgtgtggatgcccgtaagaac

SEQ ID NO: 819211 - DNA, 98 bp, Homo sapiens
cgcggaggaagcccccaccgaggccccccggcaccgcgcctgctgccgggttgcgctccgtgcacctcttgcgggtgaagatggagctggaaaaacaa

SEQ ID NO: 819212 - DNA, 100 bp, Homo sapiens
caatcaaagatcagccagcgtgatgaaaatggggagcttcggttattgtcatccattgtggaagaggagcgcctggaccatgctgctgagcgcctactgg

SEQ ID NO: 819213 - DNA, 116 bp, Homo sapiens
gattcagtttgcatctctccctcctttaaacagcttctccgggtctcagcatggcaaaagaaggggaacgtggcccagaaacactgggttggaccttcgaatttggtcaagtgcaa

SEQ ID NO: 819214 - DNA, 99 bp, Homo sapiens
gcgtcgccgttactccgaggagataccagtcggtagaggtttgcaggcctttcagatatatccatctcacaagacatccccgtagaaggagaaatcacc

SEQ ID NO: 819215 - DNA, 100 bp, Homo sapiens
gaagaacaagaagtaggcattgaccccttgtccagttactctaacaagtctggaggatgcacaggaacaaacgagggaatatgcctcctatggaacatga

SEQ ID NO: 819216 - DNA, 100 bp, Homo sapiens
agccatcagccctactccggaaatttcttcagagactcctggatagaagacaactgttagttttgtggcttactgctgctccacccagtgtctgcagact

SEQ ID NO: 819217 - DNA, 100 bp, Homo sapiens
cgagcgccgagccgggcgcgcagcgacggagctggggccggcctgggaccatgggcggtcatttcttcagatagctccccagctgtggaaaatgagcatc

SEQ ID NO: 819218 - DNA, 100 bp, Homo sapiens
agaggttgagcaagaactggcctgtcaaaatgaccattctagtgctctccagcgtggggtagagcagcggctgccatgctcttctgtggcttcatcatcc

SEQ ID NO: 819219 - DNA, 100 bp, Homo sapiens
ggaaaactcctgaggagattcgcaagaccttcaatatcaaaaatgactttactgaagaggaggaagcccagcaattctgtggtgttcttggtcacacatt

SEQ ID NO: 819220 - DNA, 99 bp, Homo sapiens
caagctgaagacatcaagaagatcttcgagttcaaagagaccctcggaacgcctatgaaaggaggttccctacatgtcctttgattccgatgttcgtgg

SEQ ID NO: 819221 - DNA, 100 bp, Homo sapiens
gagaagctgtggcagcagctcagaagaggacgccaaacaggcaggactcgtgaaattgtgatgccttctaggaactacaccccatacacaagagtcctgg

SEQ ID NO: 819222 - DNA, 100 bp, Homo sapiens
ggagtcctactgtggagtatattagtgctcatcctcatatcctgtttatgctcctcaaaggaatgtttcatccatttgtggaccaaaagatggagttggt

SEQ ID NO: 819223 - DNA, 99 bp, Homo sapiens
gcatggtgatccttcgggacaagattcgcttctatgaggtaaacggagttccctctcgaagtccaagattagttgcttctggggatgactctgtggata

SEQ ID NO: 819224 - DNA, 99 bp, Homo sapiens
cgaggggcttcataccagctgaagagcgacaagccgctggcagccgcggatctcaccgccgctcaggtattccactgaactgaagaaactctactgcca

SEQ ID NO: 819225 - DNA, 100 bp, Homo sapiens
tcctggataaagttactgacttcctcttcctgttgggcaaacttctgatcgttggtagtgtggttctcctggcagggctgggggacaccgaggcccagca

SEQ ID NO: 819226 - DNA, 99 bp, Homo sapiens
gcttgggcagcccgcgggcgcctcaggttcttatagagactgctaagaagctaggactccggtgccactcaaaggggacaatggtcacaatcgagggac

SEQ ID NO: 819227 - DNA, 100 bp, Homo sapiens
agcactgtgtggcttccagaagccaatatctactcttgacaaccgaaccatcgtcatcacctctcatccaggagcatggggaagtgattgactgtgtgca

SEQ ID NO: 819228 - DNA, 100 bp, Homo sapiens
cctacttctataaagtcatccagggaaaatggtatcatcggaggcaagctgtaaaagaattacatagtacattgatacgtcttttaaatgaattgctgcc

SEQ ID NO: 819229 - DNA, 99 bp, Homo sapiens
tacactgaacagagccatgaagaacttggagagagcttaatgattaagagagagttggcaaaagattctgaattacgatcacaaagttgggagagattt

SEQ ID NO: 819230 - DNA, 100 bp, Homo sapiens
ggcattcatcattttctaatcatcagcatttacatgacagaaatcacctatgtttacagcgacagggagcttcactattcagaatgtttttccacagtct

SEQ ID NO: 819231 - DNA, 99 bp, Homo sapiens
cgagggaagtgcacgagcctgctgcagctctatgatgcctccaacagcgagtggcagctggggaagaccaaggacttgacccaatgaaagaagcatatg

SEQ ID NO: 819232 - DNA, 100 bp, Homo sapiens
gccctctatgcacaggctccatttggtggctttaaaatgtcaggaaatggcagagaactgtaagaatgattgatgttggctgatattggagtgctcattc

SEQ ID NO: 819233 - DNA, 98 bp, Homo sapiens
cactcttctccttcacagtaaagtggctggcacttcaggtggcaagacagctccttcttcagcagcaacagcagcagcaagttagtggattaaaatct

SEQ ID NO: 819234 - DNA, 99 bp, Homo sapiens
tcgtgagggggtgacgggttaagattcggagagagaggtgctagtggctggacttgacctggaaaggcagcagaacaaggacggccccctgagcacacc

SEQ ID NO: 819235 - DNA, 98 bp, Homo sapiens
ttcataccgtagtagcatcaaacaatgggtcagtgttctcgatacctgggagagaggatttttcatgttaccaacacaaagaaatgataaaggtttga

SEQ ID NO: 819236 - DNA, 100 bp, Homo sapiens
agttctggaacgggactttgcagaaatgtgtgcagactacatggcatctaccataggggtcagggatgttggaagctggagtagacaggattatttctca

SEQ ID NO: 819237 - DNA, 100 bp, Homo sapiens
aagatctttagtccgagtatgtgaaattcaagcaactttgcgagagcaaaggttcatgaatgctgtgttctttctgctgccaaaatttcatggagtgttg

SEQ ID NO: 819238 - DNA, 98 bp, Homo sapiens
aagttggagaaatttcacagtacatcatccaaaagaggagtccatgatggaggcagaggtaaacttggagaggtcatcatcagatttgaaatatttaa

SEQ ID NO: 819239 - DNA, 98 bp, Homo sapiens
ttgtaccaggttacagcagctggacatattagttctggtgttgtttgggaggtgaaaccaaagcagaaatggaagccatttagtcaaaagcagataat

SEQ ID NO: 819240 - DNA, 99 bp, Homo sapiens
gcagaaaggcttcactacccttatcccggagagctgacaatgatgaatctcagttatccggtgttggctcctgctgcttactatgaccaaactggtgcc

SEQ ID NO: 819241 - DNA, 98 bp, Homo sapiens
tggatctattaaagggagcattccgatcatctgaggaacagcaggtttccatgggtgaactatcaagatggcaacctcaacatttcaattccagtgtt

SEQ ID NO: 819242 - DNA, 100 bp, Homo sapiens
ggtcattgtcatcgtggggcatgtggcaaaacacacagctgaggctggcaaacattcagcagcacaccctctcaagattgtttacttgcctttgctcctg

SEQ ID NO: 819243 - DNA, 99 bp, Homo sapiens
ccggccggagctgggtctggagacgccgtggcagcctgaacggagtgtgcgacggattgggaggtcctggctataagtcaccatggcacagcaagctgc

SEQ ID NO: 819244 - DNA, 100 bp, Homo sapiens
tattggtctcctgctcctagagttgcctgacctggtaccccagctggggacactctaccagttaatggaaagcagagtcaaaacttttcagaaactttca

SEQ ID NO: 819245 - DNA, 100 bp, Homo sapiens
tatctgattatggctatcatctcagaggaaatgaggtcgagcccagtgacaccatcgagaacgtcaaagcaaagatccaggacaaggaaggcattcctcc

SEQ ID NO: 819246 - DNA, 100 bp, Homo sapiens
aaaaatgagacttctagcaaagattatttgccttatgttatgggctatttgtgtagcagaagcttgtaggcattcggattcctgatcatgcttttatgca

SEQ ID NO: 819247 - DNA, 50 bp, Homo sapiens
aacccgaggacgaaaacttgtatgagaagtttgaaatgcttactggtaca

SEQ ID NO: 819248 - DNA, 99 bp, Homo sapiens
gtgaaaacaaagtcttgcagtggcgtggctcatccaaaatacttgagttgtattgcaatcagctgttttttcctagctgccaagactgttgaggaagat

SEQ ID NO: 819249 - DNA, 98 bp, Homo sapiens
ggttcagttggcaaaccagatatatgacttggtcatccacttttgactgtcatccatggaagagctcttattaaaagcctcagactttcgggacctat

SEQ ID NO: 819250 - DNA, 124 bp, Homo sapiens
gtgaccaagattaccaaccaccccagcaacaaggtcaagagcgacccgcagaaggcggtggaccagccgcgccaggtgctggatagtttactagtccagtatggagtggtggagagctgtgagc

SEQ ID NO: 819251 - DNA, 100 bp, Homo sapiens
taaagaagctgctcgactagcaaaggaaaaatcacaagagaagatggaacttaccagtacaccttcacaggcccatgaagcttcccatcaccaacagcag

SEQ ID NO: 819252 - DNA, 50 bp, Homo sapiens
cggcggtggaggaggaggaagaggtgatggcaggagagctggctgacaaa

SEQ ID NO: 819253 - DNA, 100 bp, Homo sapiens
ggaaatgatggaggaggcaaatggacaaattgccccagaaaacgggacacagacccccagcccgcccagctggagtgcaatggcatgatctcggctcact

SEQ ID NO: 819254 - DNA, 100 bp, Homo sapiens
gcatcacaatataatattaggggtgttacgtataggctcactcaaggtagtaagcattaataatgtctttcatctttgagtggatctacaatggcttcag

SEQ ID NO: 819255 - DNA, 143 bp, Homo sapiens
actgcggcgcgctgctggacgaagagctctcctccttcttcctcaactatctcgctgacacgcagggccatgaagcccccaggaggagaatcgagcaatctttttggaagtccagaagaagctactccttccagcaggcctaa

SEQ ID NO: 819256 - DNA, 99 bp, Homo sapiens
tgggcgtaggaccctccgagccaggaatgttgaaaacccccagtcccagccgagacccaggtgaattcccccgtctccctgaccccaatgtggtcttcc

SEQ ID NO: 819257 - DNA, 100 bp, Homo sapiens
tcaaatggtattctcacgggatcccgaggctgaagaaatagaagctgaatatgctgcattagacaaacgagaggtatggaaaagttgaggccactcgcat

SEQ ID NO: 819258 - DNA, 100 bp, Homo sapiens
ggcactctgtgcaggtgcagtactacaacaagggtcggcactcttcaccctcccgagccctgcccgtctcggccccatgcccccaccagtcagccccggg

SEQ ID NO: 819259 - DNA, 100 bp, Homo sapiens
gtggtccacagtagttacgacgagattgaaggaggtggcttattggaccctatcagatttggatatgtccttcatatttgattggatttacagtggtttc

SEQ ID NO: 819260 - DNA, 141 bp, Homo sapiens
aaaaaaagacctgctttgccctgggaaatagtaaccctgccaaatacatcagcttgtaggagacagaggaatgggtaccacagaccatgtcatcgtcctggcgtccacgaaccgagctgacattttggacggtgctctgat

SEQ ID NO: 819261 - DNA, 100 bp, Homo sapiens
agacatcggcctctgcaggcttgccgaagaagggagaacacagatatgtagaactcttcttgaattctacagcaggagcaagcggtggtgcttatggtag

SEQ ID NO: 819262 - DNA, 99 bp, Homo sapiens
acgttccaagtgggacagatactggagatcctcaaagtaagcccctcggtgactgggctgctggcaccatggacccagatcctatgaatgcactccaga

SEQ ID NO: 819263 - DNA, 100 bp, Homo sapiens
gtttaataatgatagaatgaagaccacaataaaagagacctctacttagctcagcaattcttaccttatgctatctgtgagcagcagttgataatgtgca

SEQ ID NO: 819264 - DNA, 99 bp, Homo sapiens
gcgagatccgcatgaaggagctggagcggcagcagaaggagggatcttacctcttagcagcttcaaatgattttgcaagccgaatctggactgtggatg

SEQ ID NO: 819265 - DNA, 100 bp, Homo sapiens
cactttccagccttgtttttcagcagctttgaggaaaagtatagacctagaggatcaagacataatgggagcatttttagacaagccaaagatggaaaag

SEQ ID NO: 819266 - DNA, 100 bp, Homo sapiens
cggagagcttcagccaagttttagaggttatcaatagtctggctgtctatcgtcatcgtgagactgactttggtgtaggagttcgagaccaccctggcca

SEQ ID NO: 819267 - DNA, 100 bp, Homo sapiens
gagtgtcacatggattgttttaaagcaacctataaacatcagctctcaacaggattcgctaaatattgtaatggatcaaggagatacacctacactagag

SEQ ID NO: 819268 - DNA, 99 bp, Homo sapiens
cttaactaaaagcactcccacgtctacaatggagtcgagtctagaattcacacagagccacctagtttgcctatctggggcgcctggctcacgaggttg

SEQ ID NO: 819269 - DNA, 99 bp, Homo sapiens
gaggatcagtatggcatgcccctggccatcttcacaaagatatggatcagaaactttcgaagttggtagaagagctcacaacttcaggagaaccccgac

SEQ ID NO: 819270 - DNA, 99 bp, Homo sapiens
acccatatgccaacccacctaactacggaaaacctgatcccaaaattattgaaaacactcgaaggcactgcagtgacaatacacatccctgccagtctg

SEQ ID NO: 819271 - DNA, 98 bp, Homo sapiens
tgcactcttctccttcacagtaaagtggctgggctgaagcagtgcctactcgacagaaccggtcatcgtacaaagaaatgccacgtgactcaaaggca

SEQ ID NO: 819272 - DNA, 98 bp, Homo sapiens
attgttggcctttcaggaagagtgcttaagacacatttgccagcaaagtggcagccacccaggaccagtatgcagacgcctccataggtaacgtcacg

SEQ ID NO: 819273 - DNA, 100 bp, Homo sapiens
agactgtggcgcaactggtcttggtagcggaggcacccgaatgctgcccgggtgaggtaaacctctttgtgctgctctctgtggtttgtgtcctcttaaa

SEQ ID NO: 819274 - DNA, 100 bp, Homo sapiens
gggggcgagggcgaagacgagatccagttcctgcgaactgtaaacctagcctttaagcaacctggaaagaggctagaacaccaaggaattagaattgaat

SEQ ID NO: 819275 - DNA, 98 bp, Homo sapiens
aagggcctcagcctgcaacacataggccggccccacagcggcattgggtatttgaagtataccatacaactgttttgaaaatccagcgtggacaatgg

SEQ ID NO: 819276 - DNA, 98 bp, Homo sapiens
tggtgggaaacgtcctagtcaggaagaggacacacagagtattggtcctaaagtccagagacagagcactaattagatccctggtggtaactaatgag

SEQ ID NO: 819277 - DNA, 100 bp, Homo sapiens
tgggggacaggaggctgcggggcctcagtgtggaatttgtaaaggccagcttggagatgcagtgagtgggacggatgttaggattcgaaatggtctcctg

SEQ ID NO: 819278 - DNA, 100 bp, Homo sapiens
gcacttttgaagatggcaagaagtttgattcaagggtgtccgcaatgttgccagtgtctgtctgcagattggctacccaactgttgcatcagtaccccat

SEQ ID NO: 819279 - DNA, 100 bp, Homo sapiens
gaacaacgtttccagctgggaattatggatgatgctgcagagtgctttgttgaaaactaagcatggggaagagctgcaaggtggtcgtgtgtggccaggc

SEQ ID NO: 819280 - DNA, 98 bp, Homo sapiens
cccttctactttctgtctctaggaatttcactactctagcttcgatgtttttgaagcaggcatttgaaggagaataccctaaattattacgtctttat

SEQ ID NO: 819281 - DNA, 100 bp, Homo sapiens
tggcggaggccgagaagcgagtcaaggcctcccactccttcctccgagggctgtttggactggagttccatagactttctgaagaaaacactttgttgaa

SEQ ID NO: 819282 - DNA, 98 bp, Homo sapiens
ccattggcaagctacaataatggggccaagcaacatcagaattgcctgagaactgcaatgaacaatctgacaaatgtgaagctggccaaaagtcggaa

SEQ ID NO: 819283 - DNA, 99 bp, Homo sapiens
tggtacctcggggttctctcctgcccccaagctgggtgatgatgaccaaacggaccaaagacatgggcaagttcagttctgtcaccgtgtctaccattg

SEQ ID NO: 819284 - DNA, 98 bp, Homo sapiens
ggtgtatcttgagaactggctgccagtctcctatgtcccctattatctcccctgcccagagatcttgaagagagaatggattctgcaagaccatgtct

SEQ ID NO: 819285 - DNA, 98 bp, Homo sapiens
taaggtccagctggtcaccgacagggatcacttcatccgaaccctcagcctcaagccgctgctcttcggagcggaccctgaggaaaccattctcaacg

SEQ ID NO: 819286 - DNA, 100 bp, Homo sapiens
agaagatcatcgagcatttcaaacggatgtacagttacccagcacgtgtacctcctcctcctcctattgctcgggctgtagtgccctcgaaacgtcagcg

SEQ ID NO: 819287 - DNA, 100 bp, Homo sapiens
tacgcgagatgttcaccatccatgcctacgtgggcttcaccatggacaagctggtgcagaacattgcgcggcagtgatgattcctgcgtattccaagaac

SEQ ID NO: 819288 - DNA, 100 bp, Homo sapiens
aaagcttgaaacggagttacaagaggctaccaaagaattccagagccattggaacatccgttaatcagcagcccttcctttttttccaaacatgcaaata

SEQ ID NO: 819289 - DNA, 98 bp, Homo sapiens
ataattcagtgtgacaattgtggcattacagtccatgaagctggtgaatgcatatgtgatgacaagccgagagccccctttaaacactgcagcttgca

SEQ ID NO: 819290 - DNA, 100 bp, Homo sapiens
tggaatctatgggattttcagctcgatacaatttcacacctgctattgacctgaaaagtggttctggaaaagtgtaccaaggccctgcaaaaggtgctgc

SEQ ID NO: 819291 - DNA, 98 bp, Homo sapiens
tcatcaggccatacactcctgtcaccagtgatgaggatcaaggctatgtggatcttgtcatcaaggctgaagaagagcaaacatgcccagtgccccag

SEQ ID NO: 819292 - DNA, 100 bp, Homo sapiens
aattatgatctacctaccaatcgtgaaaactatattcacagtgccaaagagatggatgagactgttgctgagttcatcaagaggaccatcttgaaaatcc

SEQ ID NO: 819293 - DNA, 98 bp, Homo sapiens
cgggcttctccctgatgacaagcttaccctcttctgcgagggctctgcttcaaaaacaacgaccacctcaggtaggaatatatccaagcctgactcct

SEQ ID NO: 819294 - DNA, 50 bp, Homo sapiens
gcggcacagaggtgcttctgccagccacagcctggcagctctgatcagga

SEQ ID NO: 819295 - DNA, 98 bp, Homo sapiens
ggctgcagtgggacatcccgggggaagggatatcattttcaatgcccaatacccagaactgcctcccgattttatctttggagaagatgctgaattcc

SEQ ID NO: 819296 - DNA, 100 bp, Homo sapiens
agcttgtgatgatgccaaacaaggggtggcactgaatcaacaagacaagcaactcaattgattaatgctttgatcaaggatccagacaaagaaattgatg

SEQ ID NO: 819297 - DNA, 98 bp, Homo sapiens
ttttctttactctggggtcccggctgccctgtggcctcgctcctcggagggccggaccagaatatggccaagggatgaaccctattagccgcctggcg

SEQ ID NO: 819298 - DNA, 98 bp, Homo sapiens
aatttcaagcaggaacataaactccatgttctgtttctcaagtcaaagaaggccctgtcctagcaactagttcaggagctggtgtttttaagatggga

SEQ ID NO: 819299 - DNA, 98 bp, Homo sapiens
gaatcaattttgcatgagaggattgaacaagagattgagatggaaatgaaaggtcgtttaggccaattgggtttgaaagaaggatttccatctgctgt

SEQ ID NO: 819300 - DNA, 100 bp, Homo sapiens
attgaagcaaattgaaggcacaggaatatccatgtcggcttgtagagagattgcagcctactctgtgtatgatgaagacattgggtactgtcaagggcag

SEQ ID NO: 819301 - DNA, 98 bp, Homo sapiens
ccactcgaacagatgtgagcgagaaagccgttgcctccagcaccacttctaatggcaacagcattattgagaaaagcccttacagaagagtgtggccg

SEQ ID NO: 819302 - DNA, 98 bp, Homo sapiens
tatgttctccaagaaccacctaaaggaaacacacgtgtgattaagcagtcatcattacaaaaatttcaagaggaaatggatacagttatgaaggatcc

SEQ ID NO: 819303 - DNA, 98 bp, Homo sapiens
gccggcaagcgagtgctcattgcagcccacgggaacagcctgcggggcattgtcaagcacctggaagggcacttcaggcaaccggggcctccaggggg

SEQ ID NO: 819304 - DNA, 100 bp, Homo sapiens
tctgaagaattgtggctcagttttcttggaaactacttttgccctcaaattggctgtagccacacggatataagaaagtcagatcttatccaggatgaag

SEQ ID NO: 819305 - DNA, 98 bp, Homo sapiens
tggttaaggaacaggaggaaaccattcagagaaatacccacctcggaaagacttggtccgagctgtgtccatccagacgggctacctcatccagagca

SEQ ID NO: 819306 - DNA, 100 bp, Homo sapiens
gcaagattgagcaagcacagcggtggattgataatcccacagtggatgaccgtggagtcgagacgagttgtactgctgtcacaggaaatggacgctggat

SEQ ID NO: 819307 - DNA, 99 bp, Homo sapiens
gcctccaactgtgactgccgcgcatgggactacggcatccgcgccggcctcgtccagaacgtggtcagcaagagaatatgccttctgcatcctgtgata

SEQ ID NO: 819308 - DNA, 98 bp, Homo sapiens
gctgagccggcgcggggtcggcgctgggctggaggcggcggagcgcgagagcttcgagcggactcaggaaacccagaagttctgtgaacaagtccatg

SEQ ID NO: 819309 - DNA, 98 bp, Homo sapiens
tgatgagagagaaacatcctgaaaaattcaacagcaggtatgccattgcattggccttaagggaaaagcagcgtgtaatatttaccagcccaattaag

SEQ ID NO: 819310 - DNA, 98 bp, Homo sapiens
gaaaagccaggattcggtgctggaccctgcagagcgtgctgtggtcagagtcgctgtgatgcagcttggtttaacgaatcttggttaagccgaattaa

SEQ ID NO: 819311 - DNA, 98 bp, Homo sapiens
cccaatcccaaacgggtgctggatcaggtgctgaatccggctgcctcctcggcagcctagggcctaggcccgggccaccatggcgctgcctccaggcc

SEQ ID NO: 819312 - DNA, 98 bp, Homo sapiens
gagccaagccagatgcagattccaaaagaaacgaaaagagtagttgaacagctacggaagaacctgatagtaaagcaagaacaaccggacaagttcca

SEQ ID NO: 819313 - DNA, 100 bp, Homo sapiens
gcagaaatcagccactttgccaagcaccacagtggaactctctagcctcctggttcggaatgtcaactatgagatcccctcactgaagaagcagattgcc

SEQ ID NO: 819314 - DNA, 98 bp, Homo sapiens
gcggtggcgagaggtgcggcgaaggaggcagaggcacttatgcttgtcaggagtccccggcgtgcagtggagcctcgctgggggaaatgacagcttgg

SEQ ID NO: 819315 - DNA, 98 bp, Homo sapiens
cgtcgttgctgccgggattttggaggccggggccgcgctgagggcgcccagctgaacatcgatatattgaactcttcttgaattctactcctggaggc

SEQ ID NO: 819316 - DNA, 98 bp, Homo sapiens
agatcggcggagaccctcgaagtgcgcaaacttgacactcaccctgaccgcactattcctgatcagagaactccagttgcttcaacacacagtatcag

SEQ ID NO: 819317 - DNA, 100 bp, Homo sapiens
agcaatcaagtgaacagaagaaaaaacaaattgaagcactccaaggagagcttaaaattgctgttttacagaaggaagccttatcagttgtgagtgagga

SEQ ID NO: 819318 - DNA, 99 bp, Homo sapiens
aggaagaggaagaagaggaagaggacgagccttcaggagccaccacaagatccaccaccagatcagaggctcagaggaacgaatgatcacacactttga

SEQ ID NO: 819319 - DNA, 100 bp, Homo sapiens
tgcatccacttgcacaacccaaggcagaagatgacacttgggagcctggagagctggaggtgtttcagaaagatggggaacgaaaaattcagagtcgaca

SEQ ID NO: 819320 - DNA, 100 bp, Homo sapiens
gttgatataggtggacttttttacagctcaccagaacaagctagaagaaatgatcaatgagctagcagtggcgatgacagctgtaaagcacgaacaggaa

SEQ ID NO: 819321 - DNA, 98 bp, Homo sapiens
acaggcatcccctgagcgcctgctgggataaacgaagaggctggggacactgagaggacccagtcggcattggcactgagcagagcccggtccaccaa

SEQ ID NO: 819322 - DNA, 100 bp, Homo sapiens
ggaactttcttccaagataatgtccagtttggaagatgaaggcttttctgcaacttcagttcatttatgcagaaggaaatatttgagcagccagagtctg

SEQ ID NO: 819323 - DNA, 100 bp, Homo sapiens
agcctgccggaaggctccctcggtcgcgagtatctccgtttcctggatgtgaacagctctctttacgagaaaaggaagatcctggctggtcagcatgagg

SEQ ID NO: 819324 - DNA, 100 bp, Homo sapiens
cgaagagctgccgcgacgcccggcccgcagggcaggtattactcagcacagaaattcaggagacacagacaagttcttccacgatgtcgtacagacgaga

SEQ ID NO: 819325 - DNA, 100 bp, Homo sapiens
cggccagccaaagctttccccctcctctgatgattaaacaggaacccagagattttgcatatgactcagaacatcagcactggaatggccatagctggaa

SEQ ID NO: 819326 - DNA, 100 bp, Homo sapiens
atgggttacatgcccaagaggggacttgatgttaacaaatgtgagattgccagcttctctgggtgctgctctgggccaccgtgttgggcttgctctgcca

SEQ ID NO: 819327 - DNA, 100 bp, Homo sapiens
cgatgtcagggctgcgcctctctgcagcaggtattcacttacaagcagagcacaattacccaccagaaggtgactgctatgcaccccacgaacgaggagg

SEQ ID NO: 819328 - DNA, 100 bp, Homo sapiens
cggaaatcttgatcagccagatctttattacgagtactacccgcacgtgtaccctgggcgcagggtatgcaccaggacacaacagggtatgcctgccttc

SEQ ID NO: 819329 - DNA, 100 bp, Homo sapiens
agatgattcagatgaagaagaggacttttttctgtgcccctgcccaacacccttcccctccctaagagggagactatacaacagagctccagcctaactt

SEQ ID NO: 819330 - DNA, 100 bp, Homo sapiens
cgcgggcgagcggctgtgtggatgtcggcgaagccgcgggcgaggtacaagggatttaaaggcaactgttccatgaccttcattgatcagtttaaagcac

SEQ ID NO: 819331 - DNA, 98 bp, Homo sapiens
gcaactacacacaagaagcatccttaggagctctgcagaacctcacggccggaagtggaccacagagtgacaaagacctcgatgatgccttggataaa

SEQ ID NO: 819332 - DNA, 98 bp, Homo sapiens
gtctttggccagaatgagtacctacgctatcaggaggccctgagtgagctggccactgcattcctggattttgtgaagggggatttaaaatccatgag

SEQ ID NO: 819333 - DNA, 100 bp, Homo sapiens
gctctctctccagtccttgctgaagagactttccgttacatgatgaacaacgtgggaatgtcgtatgagtatcctgaatactttttggatgttcctgact

SEQ ID NO: 819334 - DNA, 100 bp, Homo sapiens
acagaagagggagaagtggctgctctgcgcctcacggccagatcccagagaattcggtcaacagtggatgaaaaagaacaaaaacaacttcttatggatt

SEQ ID NO: 819335 - DNA, 99 bp, Homo sapiens
cttcctgtcgctgacggcgactgcgggaggccagcgtcgtctcggagatgcagccaagaaagccatcagtaaattgacaaccaggacagtaaagaaggg

SEQ ID NO: 819336 - DNA, 100 bp, Homo sapiens
ggaaatgtagcttaatgacctccttgtcctggagtctcccttaatacaggaagagcgtgttgtgaatcacatggcagcaaaaattattgaaaatgtctgt

SEQ ID NO: 819337 - DNA, 100 bp, Homo sapiens
tgtgaaaaaattcaaagtcgaatatcatgctggtggctctacccagaattcaattaaagtggctcaggctgagtatgagtttatcagctctggtctctac

SEQ ID NO: 819338 - DNA, 100 bp, Homo sapiens
gctattttgctttaaccgatgacagtaagcgtctgattcttttccgtacaaaaccatggcaatgtctgagtgtcaggcctgcagataaaacagctaatga

SEQ ID NO: 819339 - DNA, 98 bp, Homo sapiens
gatgggaagaagtggcagacttatcgaggaaattccactggaaccttaatgggttccaagcttgaactacccttgtggctggcaaaaggactttttga

SEQ ID NO: 819340 - DNA, 98 bp, Homo sapiens
gccgccaagagtgagcgagcggacccgcgatggaggagttttcttagacaccatccttccccgtcaagatgacaatggcgtcaggccaaccattggcc

SEQ ID NO: 819341 - DNA, 100 bp, Homo sapiens
atctggaggcagtatcacctaacgaatgaactgacagatacacgtgcaaaattccacgtactttttcttttctttgtgtctgcaatgttcttcatcagcg

SEQ ID NO: 819342 - DNA, 100 bp, Homo sapiens
aaggtcagtgtgcttgcttggagatcaggacgcaaaggattaaagcaaggagagccaatcatgactggcaaaacacagaccagcaacgtcaccaataaga

SEQ ID NO: 819343 - DNA, 100 bp, Homo sapiens
acaacatctagcagaaacaggcagcaacatgaatgatcttaaggagttgctggagaaatctttacatagggtgttggtccaggcagccagctccaatccc

SEQ ID NO: 819344 - DNA, 98 bp, Homo sapiens
aaaaaataaaaacaagaattccttgctgattggactttcaactggtctgtttgatgcaaacaacccaaagagactttggctatgaaaggattaacact

SEQ ID NO: 819345 - DNA, 100 bp, Homo sapiens
tgttggatctacactttctcaagcactgtgatcttcaaatatgttcctcctgctgatcaagagaagctttttatccagaagttacgtcagtgttgcgtcc

SEQ ID NO: 819346 - DNA, 99 bp, Homo sapiens
ttgccctggctggagtgcagtagcatgatcatggctcaccgcagtctcgactttcctgggctcagcatcttaaatgttatcccttgacttctggcttcc

SEQ ID NO: 819347 - DNA, 139 bp, Homo sapiens
gaacctaaggagccctgccgaggagctgaaggccttcagagtccttggggtgattgacaagttcaacagatgcattacctctcagctcatcaagtggtttagcaatttccgtgagttttactacattcagatggagaag

SEQ ID NO: 819348 - DNA, 100 bp, Homo sapiens
agagtcttttccaaatgatcttcagttcaatattctaatgagatttacagttgatcagacccagacaccaagcttaaagttattttaccaagaaaatggt

SEQ ID NO: 819349 - DNA, 100 bp, Homo sapiens
cgcggaaaccgatctgcccgttgtgtttgtgaaacagagaaagataggcggccatggtccaaccttgaaggtctccctgagtctttgaggacacagcctc

SEQ ID NO: 819350 - DNA, 98 bp, Homo sapiens
gcgagggacctcgcagggagccatccgataaacacccgccgggcagcagaggtctggatggatgaatacaaaaatttctattatgcagcagtgccttc

SEQ ID NO: 819351 - DNA, 99 bp, Homo sapiens
ggggagcggcgttggaggccaccgtttccaggtattagaaaactactcggatgctccaatgacaccaaaacagattctgcaggtcatagaggcagaagg

SEQ ID NO: 819352 - DNA, 100 bp, Homo sapiens
gcctactcgcccgccaccctgcgctgccgccgctctgaggagttaaaggtcgacttatcaaaggatctccctcactggaacaagcttaaagcagatgaga

SEQ ID NO: 819353 - DNA, 98 bp, Homo sapiens
cccgagatctccttggaagcagaacccatagaactcgtggaaactggcatagaatgtcaagctaaccaggcgtccgctacttcagaagagtgtactgt

SEQ ID NO: 819354 - DNA, 100 bp, Homo sapiens
cgcaaggagagtttgtccgattcccgagacctggacggctcctacgaccagctcacgggttaaccccaaagattggctttccttggagtgaaatcaggaa

SEQ ID NO: 819355 - DNA, 100 bp, Homo sapiens
acaagctcagcttcaggagtttggtcaaagcaaccgaaaaggagagtttcctggtaccactctgattgtggactgcaatgtaacagacaccaaggataat

SEQ ID NO: 819356 - DNA, 100 bp, Homo sapiens
gccacagaaataaaggagggacaacaatctgggacagccaatgaatttccctgtttgccaaagcaagtggcttggatcctggccacaagcaaggttttca

SEQ ID NO: 819357 - DNA, 100 bp, Homo sapiens
cagcagcttccaagagaaccaatggaatggagaagctttacgtcctgagtcaaggacaatgtgtgtaccggggaaaagtctgcaatcttgtgccatattt

SEQ ID NO: 819358 - DNA, 100 bp, Homo sapiens
aggcaaggacagaggttcaggatcttcctctccctcgggacccaaggccacaaaggagagctccgtggagagaaggaggagcctgatctggttagtgcaa

SEQ ID NO: 819359 - DNA, 100 bp, Homo sapiens
acagcagcacccgagcaaaccccagcaagatgcggaggctgcctcggcggagcagaggaaccacacgctgatcatggaatactcccccagttgcaagagg

SEQ ID NO: 819360 - DNA, 100 bp, Homo sapiens
ctcccccttcacctgaacttacctcagaagaaaacaaaatcccagatgctgacaaagctggaatccagatgccagatattcggagcattttctgcaggaa

SEQ ID NO: 819361 - DNA, 100 bp, Homo sapiens
ggtcgcggacctgggctctgtgcgttgggaaagggaagtggagatgttcctcctgctgatcaagagaagctttttatccagaagttacgtcagtgttgcg

SEQ ID NO: 819362 - DNA, 100 bp, Homo sapiens
gagatgacacgtgcgtggggtgttgggccataggaaaaggatacagagtagagtttcatgaacctgaaacttggtggaaatttgatcctgaagaattaga

SEQ ID NO: 819363 - DNA, 100 bp, Homo sapiens
ggctgtagatggtgtggctcctcgagcaaaaatgaaccagcagcgtgggaggcgttttagggccttgggaactccaagacagaatggcccgaggcctgga

SEQ ID NO: 819364 - DNA, 100 bp, Homo sapiens
tatttgcctttagtgcactcttctccttcacagtaaagtggctggtaacagcttgcctgattgctgtggccaaaacagatggtgaagttcaagtacgcag

SEQ ID NO: 819365 - DNA, 100 bp, Homo sapiens
cgggtttccaccccggcgggagctgtcaggttggctccgccaaagggttaccttccagttcaacatttaccttggaagaggggaccatctacttgaccgc

SEQ ID NO: 819366 - DNA, 100 bp, Homo sapiens
gagagtacatagattggaaatggctattgcatttcactcaaatgctgaaaaggtacaggcaattaaacttctggtaaggtggctgttgggtatgaaaaac

SEQ ID NO: 819367 - DNA, 98 bp, Homo sapiens
tggagaagaagcagcgcaagtttgaccaggttttaatataactgcaggagttgatgaagaaacaggatttgtttatggaggaaatcgtttcaattgtg

SEQ ID NO: 819368 - DNA, 100 bp, Homo sapiens
gttgaagtgtggtcatccaatggaacagaaaattattcaaagacatttacaacacagcttgtggatatgggggcaaagtagggacggggtttcaccatgt

SEQ ID NO: 819369 - DNA, 98 bp, Homo sapiens
gaggtggcggtgctggtgcagcgggttgtgaaggacatcactaacgccttcaggaggaacccacacatgtgtgatgaatgcagactctgctaccattt

SEQ ID NO: 819370 - DNA, 98 bp, Homo sapiens
tccataggctgctgcaggcgccgcacaagacaaaactgtgtggagttttatcctatattcataattacattgtggatggctgggtggtatttcaacca

SEQ ID NO: 819371 - DNA, 99 bp, Homo sapiens
ccaaacaagctcgaaatctcatcactgatatttgcacagaacagtgtacccttagtgaccaggaatctaggtaaaaatggcttatctaacagtagcatt

SEQ ID NO: 819372 - DNA, 100 bp, Homo sapiens
cgcacaagtgacaggagcgctgctgcagagtgagagtgggactgcgccagttgtatcacggactgattcaccgagcccaaccgtactcaactcacatatt

SEQ ID NO: 819373 - DNA, 141 bp, Homo sapiens
gggcgtccgctcctcagcggatgtggcagccccgagccatggctctcgccgtccgagtcgtttattgggcagcaggatgggtgtggaagcagtgatggcacttttggaggggaccccagataccccagcctgtgtagtgag

SEQ ID NO: 819374 - DNA, 98 bp, Homo sapiens
cagaggaagagctgaggaccctggaaaatgagctggatgagctggaccctgatcatactcatgtacccagacttatacctttaataacaagcaattgc

SEQ ID NO: 819375 - DNA, 99 bp, Homo sapiens
aggagaccaaccgcaccctccgagacctcctgagggaacagcactgcaaagagccaccatgttcagccagcagcagcagcagcagctccagcaacagca

SEQ ID NO: 819376 - DNA, 98 bp, Homo sapiens
tcaccacccctatccagacggctgcccttcaagtaccacaattgaaagcatgtagtgaagaacaagaagacagagaatgtttgaaccaagctattact

SEQ ID NO: 819377 - DNA, 98 bp, Homo sapiens
gtggactgtccggggccgggctcaggagcagagacctgcgaccgcatcaagcagtccgccagcggaaccaagcggcgcgtgttcatcatcgagaccat

SEQ ID NO: 819378 - DNA, 100 bp, Homo sapiens
tgctagaggaatgggacgtgaagcgcttgcagacgcactgctacaaggtccatgaccgtgctggagaatctggtaaaagcaccattgtgaagcagatgag

SEQ ID NO: 819379 - DNA, 132 bp, Homo sapiens
ataaattcaaggatgatccagttggaccttttggacaggaaagtgtaacatcagttacagaattgataaaggaagctggcaaacaagatccagagctggcttatatcagtagcaatttcataactggacatg

SEQ ID NO: 819380 - DNA, 99 bp, Homo sapiens
ctggattcggcatgtcctctgaaaactcgggaatttgtcactgaaatggtgacaggagggggcagtacccaaaggaaacgctacgaaagaatacatgga

SEQ ID NO: 819381 - DNA, 99 bp, Homo sapiens
gctggggtagggaggccgactgagcaggagtcgtccgcttatagtggaggctgctaggagccggtcagagggacctcagcagccatgtcgaagccccat

SEQ ID NO: 819382 - DNA, 100 bp, Homo sapiens
cccacacaacgagaagctcctgtccctcaagtatgaggattttttatcaagcagaaatgcatcgaacaacgagaatcaagatcactgagctaaatcccca

SEQ ID NO: 819383 - DNA, 100 bp, Homo sapiens
cggccctcaccgccctcaccacccctatccagacggctgcccttcaagtaccagtttatgatgataaagactacaggagaattcggtttgtaggtcgtca

SEQ ID NO: 819384 - DNA, 100 bp, Homo sapiens
tggccttctacgttgtgaaaatgaaagcagagtgagggcactcactgccatcctgtggaagccaccatcatctctggcccaagcttctgtagtagctccc

SEQ ID NO: 819385 - DNA, 100 bp, Homo sapiens
ggaggaggaggaggaggaagaggaggagaaggagatacaactcgtcaacgaatcaaattcagtgatgacagagtatgcaagagtcaccttctcaactgtt

SEQ ID NO: 819386 - DNA, 100 bp, Homo sapiens
ccttcgcccccaagactgcgactctaaacggactcatgtactttgtcagtgtcgagtccagtcctttgttgctgttgctgttgctgttgctgttgctgtt

SEQ ID NO: 819387 - DNA, 100 bp, Homo sapiens
gagcggttgcggcggcctgggctgctgactgcgcacttggaatagtagcaggcggcggcggcggaacgccaggcagagagctattgcttaccttttccca

SEQ ID NO: 819388 - DNA, 100 bp, Homo sapiens
aatgaacccaaactacacagaatttaaattccctcaaattaaggcacatccttggactaaggtgtctggagtagatttgcagaatgcctcacacagcgaa

SEQ ID NO: 819389 - DNA, 98 bp, Homo sapiens
tgttgaaaccagcctcaagtttcacctatcctcactgatccgtggacttctgtatgatcagagtggtggatatgttcttggctttaaaatagatcctg

SEQ ID NO: 819390 - DNA, 98 bp, Homo sapiens
gagtttgtaccaggccaagccttttgctcacatacaggccccttcacagatgtagtcactacaaatcttaaattgcgaaatccatcggatagaaaagt

SEQ ID NO: 819391 - DNA, 99 bp, Homo sapiens
tttgtgttttgtgatggaatatgttaatgggggcgaggttatgaatactgatggcactgggagacgagtactagtggaagacaaaattcctcacatatt

SEQ ID NO: 819392 - DNA, 100 bp, Homo sapiens
tggacgccgagatggagttcaattgcgagatttgggtgaacagtccccatacagccagcggctactacaccatctatgatagcgagactcttcaagctga

SEQ ID NO: 819393 - DNA, 74 bp, Homo sapiens
tgatttgctgtcagccatgaacggatggatgtgatgcctgctagccaaaaggttggtcgcattatgtttcagct

SEQ ID NO: 819394 - DNA, 100 bp, Homo sapiens
tttcacagcactctgggcgaaaattggatgtgaaaatgaagccagaccgaggccaagtcatcaaggcatgggacattggggtggctaccatgaagaaagg

SEQ ID NO: 819395 - DNA, 132 bp, Homo sapiens
cgccaaacaaaagaggacagcacttccggtcacgccatcgttgctgccttcttcgtcaagccttcaaatgtttatctggtgtgactgtattatgccctcagagagtactgtatgttgcccaggctggcctcg

SEQ ID NO: 819396 - DNA, 101 bp, Homo sapiens
gagcaagatagtctgggactttcaaatcttcagaagagccaaatccaggggaagtagcaggcttgcaatcttcaggcaatgaatcgctccctggctaatgt

SEQ ID NO: 819397 - DNA, 100 bp, Homo sapiens
tgatgaaagctatactccaagcaagatctcagtcagagtaggaaataattttcacaaccttcaagaaattcgggccctggagagtgaatttgtttcctgc

SEQ ID NO: 819398 - DNA, 100 bp, Homo sapiens
acgaaactcgtacctgcggctaagagcagaactgtttgaggcgaagagatgctggtttgttgaatcagttgcaagagcttgacaagcagataagtgacct

SEQ ID NO: 819399 - DNA, 100 bp, Homo sapiens
acttggttgctttcattgtgggagagatgaagaacctgagtcaggacgtaaatggaaccctgatttggtgcttccagatgtgagttatcaggtggaatcc

SEQ ID NO: 819400 - DNA, 98 bp, Homo sapiens
tattgtaggcctagcccctgcctttgaaaacaaggaaaggctgtgggtgagcgtggaggatgctcagatgcacaccgtcaccatctggctcacagtgc

SEQ ID NO: 819401 - DNA, 98 bp, Homo sapiens
gctgatggtggacgccgtggtctatggcatcctcacgtggtacattgaggctgtgcacccagccttccccccaatgcctgtgccccctgcgggctttg

SEQ ID NO: 819402 - DNA, 100 bp, Homo sapiens
ctcccgagacatcttccctgtgggctggtgttccttgactggagacaacctgcagcctcctggcaccaaagatgtaggtgcaaaaaactacagacatctc

SEQ ID NO: 819403 - DNA, 100 bp, Homo sapiens
atcctgaccacagagtccatcatgaagaagagtgagttcctctgctgccaggacagcttcctgcagcaatactggagtaaccgcttcctaaaccattttg

SEQ ID NO: 819404 - DNA, 99 bp, Homo sapiens
gatgaagaaggcttggaacccattggaaatgtccatccagttgggagctatgagtcctctgaaatgaacagcataaacttcctcaacaatttccaaact

SEQ ID NO: 819405 - DNA, 99 bp, Homo sapiens
agctagaagaaaaggtgtacttgcaagaaacctcaggacttgagtaacagcaacatgggtgaagagggaacagaaatctttgccccctgactttggaaa

SEQ ID NO: 819406 - DNA, 98 bp, Homo sapiens
accatttcttttggcccttgtggtctgttctgtagtcagcacaaatctgaagatggtgtcaaagagaaattctggagtcatgctatactgaaaagaca

SEQ ID NO: 819407 - DNA, 98 bp, Homo sapiens
tattgaagagttctgcaatctcttatgatgtaatcagcgcgatttcacttcctgaatttcgatgaattctaagacatgggcaagatcgggttgtaaga

SEQ ID NO: 819408 - DNA, 98 bp, Homo sapiens
cgagatgtctcgctccgtggccttagctgtgctcgcgctactctctctttctggcctggaggctatccagcaccaaagagaaccctgtacagtaagaa

SEQ ID NO: 819409 - DNA, 100 bp, Homo sapiens
gaacagtgtacccttagtgaccagtatggaagaatgtgaagctctttgcactaggatggcaatcatggtcaatggaaggttcaggtgccttggcagtgtc

SEQ ID NO: 819410 - DNA, 100 bp, Homo sapiens
ccgatgggttgtccgactgggagcagaggaagccttgaggacctactcacagataggaattgaagttgttctaccatctccagagggaacgctgcttcct

SEQ ID NO: 819411 - DNA, 100 bp, Homo sapiens
caactccaaactgttgagactgcttttaaaaggaaccttagtcttttaaagttttgattacgaagatgcaggctaccagactgcagaacttgtaaaaatg

SEQ ID NO: 819412 - DNA, 98 bp, Homo sapiens
agtggcaattaatggaaatggacccaccaaggcccggattgcatttctacaaggcgaaagaaaaggtcaagagaacctgaagaaggacttagtaagaa

SEQ ID NO: 819413 - DNA, 98 bp, Homo sapiens
cgcacgcggggctgctgcccaagggtccaaattccaagcctgtagtgtccttcattgctggtttaactgctcctcctgggagaagaatgggtcatgcc

SEQ ID NO: 819414 - DNA, 100 bp, Homo sapiens
agaaaccttgctaaggctattgctacggtccaaggatcttataaaggaagctatccttgacaatgactttatgaagaacttggagctgtcgcagatccag

SEQ ID NO: 819415 - DNA, 100 bp, Homo sapiens
aagaacatttccaagatgatgtctttaatgaaaagggatggaactacattcttgagtcagagcaccataacatggtgtgggaagtgaagacaaatcagat

SEQ ID NO: 819416 - DNA, 99 bp, Homo sapiens
agatcccccttctctgtgtcccgtttgagaaaaaggactttgtaggactggacacagacagcaggcaaaaactgattattccaagtggaagttgccctg

SEQ ID NO: 819417 - DNA, 100 bp, Homo sapiens
cccaggccgccccgcccaacccctcctcccagtgctgaagtcccaaggagccgccctgcaggagcaagccagagccaaaacgcaaacgccccctgtgtcg

SEQ ID NO: 819418 - DNA, 99 bp, Homo sapiens
atcctagcccctttccttactggatcctcaaaccagaagaaaacctgaatctctgagtgtgtaatgctgtgtcatggagctaaaatcggatttttccaa

SEQ ID NO: 819419 - DNA, 99 bp, Homo sapiens
gagagtgtcaaggacgaagaggagtttttccagacaactttgtactcccaccacccccagggtttaaagccaatttgtctctcttgaggaggcctggag

SEQ ID NO: 819420 - DNA, 98 bp, Homo sapiens
ccgggacctcctggaagccaaaaatgggaaatctgcttcgccactgaaggtactctgcaccccagaaggaatacgacttcagtgtttcatgaagtatt

SEQ ID NO: 819421 - DNA, 114 bp, Homo sapiens
cacacccagcaccgagaagcaatactttgggagttaacagtgcaaagatgaacctagtgggcaggaaactgcatatcttctggtttacatgaagatggagtgctaatggaaatg

SEQ ID NO: 819422 - DNA, 100 bp, Homo sapiens
aaggaagaaaaaggaagccccttaaatgccgcaccctacggcatcgaaagtggtctaccatcacggcaacagtgcgacgggcggccattacactacagac

SEQ ID NO: 819423 - DNA, 100 bp, Homo sapiens
gccgtgttaacgaacagcctgaaaaatccccctccgtgctaactgttccagaatgctcacctagtcatttcaagtgccgctcaggacagtgtgttctggc

SEQ ID NO: 819424 - DNA, 100 bp, Homo sapiens
gaaaaggcagcagccacctgcctggcagtttgcacacctgtaaactgaagctgcaggaggaccggcgacagcaaggttgtccttctattcaggccactct

SEQ ID NO: 819425 - DNA, 98 bp, Homo sapiens
gtagctttcagcagagtaactcaagtgggacttacggtccacagatgagccagtatggaccacaagttcttcgtgccatgaaggaggacagtgaaaaa

SEQ ID NO: 819426 - DNA, 98 bp, Homo sapiens
tgctttctgtcgtggcaatgttttgaaactggcaaaatcagttgaaatggatgcagtcagaactgaatgttgaagaagtggtaaatgacaggagctgg

SEQ ID NO: 819427 - DNA, 100 bp, Homo sapiens
atcatagaggcaagtgggggaggagcgttccttgtcctccctctgcacaaggtgacagtatgttgactgctgtctctgtggccagagattgtggaatgat

SEQ ID NO: 819428 - DNA, 100 bp, Homo sapiens
gaagaatttcgatctccgccctggggtcattgtcagcacctgttcttcccggagcctatcagcaaagccattcccaaggctatggctacatgcaccagac

SEQ ID NO: 819429 - DNA, 100 bp, Homo sapiens
tgctcagagtctcaatgaacttgttgctgatcatctgggctgtgatccacaaacccggttctttgtccctcctaatatcaaacagtggattgccttgctg

SEQ ID NO: 819430 - DNA, 100 bp, Homo sapiens
ttaattcttccactgatatctcaaaaggtgatctggacaaaggaacaggtatctcaggatgaaatctttgacatggtaaaaccaaaggatcctttgaaaa

SEQ ID NO: 819431 - DNA, 100 bp, Homo sapiens
atcaagtggaccaggaaattgctttgaagttgggttgtctagaaatacgatccagacatttaatgtggatgcaccatgccagaccgtggaagatttaacg

SEQ ID NO: 819432 - DNA, 100 bp, Homo sapiens
gactctgggctggcagaggtgacatccctgtcatatgaaggaagatgctcctttctctgaaggttattgacagtcaagctacaacttcaagcagaagaga

SEQ ID NO: 819433 - DNA, 98 bp, Homo sapiens
aagcaggtccattacctgactggttctggtcagcatgtcctcaagcacaatatcagtgtcccctttttcttaaggtcggcaccatgcgccctgcagcc

SEQ ID NO: 819434 - DNA, 100 bp, Homo sapiens
catctttgaaaccaagttcttgtctcagattgagaggaactgtttgtggagaccattgcaaaagatgcctactgttgcgctcagcagggaaaaaggaaaa

SEQ ID NO: 819435 - DNA, 98 bp, Homo sapiens
ccagttcatcttcaccccaggctcagagaggatgaagcctgctgggagcgtgaatgacatggccctggatgccttcgacttggaccggatgaagcagg

SEQ ID NO: 819436 - DNA, 98 bp, Homo sapiens
gctgctggacgacagcgagtacacctgcaccatccaggttgccaacttggcctgttccatctcaaataatgaagaaggtgtaaagcttgttcgaatgt

SEQ ID NO: 819437 - DNA, 100 bp, Homo sapiens
agacacagttccatggatcagaaggcagacaagcagcttttcagatgcaaatgacaatgcagatcttcgtgaagactctgactggtaagaccatcaccct

SEQ ID NO: 819438 - DNA, 99 bp, Homo sapiens
aggctttctgctaaggatgtattgtggcttttgtttggattgcagcatgcagaattacagagaaatctgacagaatattttgtggctgtggatgttaac

SEQ ID NO: 819439 - DNA, 100 bp, Homo sapiens
caggtgcacgcttatctttatctgtggcatgcaactgatttgctgctgcttccaggagaagtggagcaggatgtaagcaccagcattccttcctgtatcc

SEQ ID NO: 819440 - DNA, 100 bp, Homo sapiens
ctgactccaggttatcatggattcccagcgcgggacagccaggtttattaatgcccggagaagaatagtgcagcccatgatagaccagtccaaccgagca

SEQ ID NO: 819441 - DNA, 99 bp, Homo sapiens
ttcacacatggagagatgcaagaccagtccatttggggaaatccttcggatggtgaactcattagaagtatggcacagtcacaagggtgggtgaaaaga

SEQ ID NO: 819442 - DNA, 100 bp, Homo sapiens
tggttgacgttgcaaaggcgcttaatcggcctccaacgtcttcagcgcctgctcctggtcatcactaaccagatttacttggagtacatgtgaaagaaaa

SEQ ID NO: 819443 - DNA, 100 bp, Homo sapiens
acagcctacctggacctgctccgcctgatccgggctgatgtggagaatctcaacagtcagaatgaagctgagctccgacgccagtttgaggagcgacagc

SEQ ID NO: 819444 - DNA, 100 bp, Homo sapiens
ccagttggtgaagagacttacagatgcagacccgggaagaaggtaaggccttactccggcaaatcctacagcttcggaaccaaggcgagactcctaccac

SEQ ID NO: 819445 - DNA, 100 bp, Homo sapiens
atgctgctcaccatcagtgaatttaagcccacatatcaggaccgagtggccccgccaggtgtggtacatggacggctatcacaacaaccgcttcgtacgt

SEQ ID NO: 819446 - DNA, 100 bp, Homo sapiens
gacaccttgattcattggctggattaaagaagtcctttttgcaggcagaattggggcttgttgatggacaagaactggcggttgctgatgtcaccacccc

SEQ ID NO: 819447 - DNA, 100 bp, Homo sapiens
gcccaacgaggcgctggtggtttcaggtcgcaatggaagaagagatcgccgcgctggtcattgacaatggctccggcatgtgcaaagctggttttgctgg

SEQ ID NO: 819448 - DNA, 100 bp, Homo sapiens
ctacttcattcagaagatcaggtacacaaatgcacgcgacaggaaccagctgtcaaagctcgaaaaacagcagcagaggaaagaaaagaccagagctaag

SEQ ID NO: 819449 - DNA, 136 bp, Homo sapiens
tgacatcaagaggaagcggaaaccagtggccacagcatctttgtctagccccagtgcagattctgaaggaagatttccattaggtaatttgtttaatcagtgcaagcgaaattaagggaaaatggatgtagaaaat

SEQ ID NO: 819450 - DNA, 100 bp, Homo sapiens
agcgggcagaggagctcaagactcaggccaatgactacttcaaaggcctccggtgtggctgtctctgatggtgtcatcaaggtgttcaacgacatgaagg

SEQ ID NO: 819451 - DNA, 100 bp, Homo sapiens
ccgcggagcagtagccgccgtgggagggagccatgaagcattacgagttttcggctttgtgagaaaccttaccatcaaacacgatggccagcaacgttac

SEQ ID NO: 819452 - DNA, 98 bp, Homo sapiens
ctgccataccaacttcagcaccaaggccatgcgggaggagaatggtctgaagtagagtcagcgatgacggcttcatagccattaagctcacagcactg

SEQ ID NO: 819453 - DNA, 100 bp, Homo sapiens
agctgagctgcgattcaaacccaggcaatggacctcatcatgaccgttgctgtacttacaatgaaaacaacttggtggatggtgtgtattgtctcccaat

SEQ ID NO: 819454 - DNA, 99 bp, Homo sapiens
atccttttccacggtgtgttctatgccgggggctttgccattgtgtattacctcattcaaagaaaatgtttataggaggccttagctgggacactacaa

SEQ ID NO: 819455 - DNA, 100 bp, Homo sapiens
atccattattgggaaatgtcaagacgaaatctcacaaaactgtcccttatcttcagtcacatgctggcagaaatcaaagcaatctttcccaatggtcaat

SEQ ID NO: 819456 - DNA, 120 bp, Homo sapiens
attcaggtgaaggtgcgggacacctacctggatacacaggtggtgggacagacaggtgtcatccgcagtgtcacgggcaccttctctttcatcatcgaaacctggagagaggagttagga

SEQ ID NO: 819457 - DNA, 100 bp, Homo sapiens
caggaaaaagaggaaagtggactgtccggggccgggctcaggagcagagaaactggcgatggaatatgagaggagccctctggaaagaaaaggacagacc

SEQ ID NO: 819458 - DNA, 100 bp, Homo sapiens
actatatacagcgtttcctatatactggctctcagattggaagtcagttgaccagatataccatctggcatctccagcctcccctccaaactacatgtat

SEQ ID NO: 819459 - DNA, 100 bp, Homo sapiens
agatctttttcagtgttcttggaggtgtggggtgtgagaacttgatcagtttgtgtcagccaccttgttctctaaaggtgctggagaatctggtaaaagc

SEQ ID NO: 819460 - DNA, 98 bp, Homo sapiens
cccctctgcccactatgcccactctcaccagcctcccatcttccaccgacaagccgtcgggtattgcgcagcgatgcacggccatcaagtaccacttt

SEQ ID NO: 819461 - DNA, 100 bp, Homo sapiens
gcttggagataaagttgctttttactgctccgggaagcagtttgttcgctatataaacatgttgataaacgacacgacgtttttgctcgatgaaagtctg

SEQ ID NO: 819462 - DNA, 100 bp, Homo sapiens
ctcctgacagtgttaatggaagtgaaccaagcattcctcagccttcatctcgaaattctgcctcagcaacaacccctctaagtggaaactcatccagacg

SEQ ID NO: 819463 - DNA, 100 bp, Homo sapiens
actggtctcagatgcatcaacgtttgctcactgatctattattttcaatagaaacagatatacagatgtggagaagaaattgcatctgatggtctcaagg

SEQ ID NO: 819464 - DNA, 99 bp, Homo sapiens
tgcgggcccgctccgacgcggaaggacacctcctacctgttcatcactggccctgatgttgtgaagtctgtcaccaatgaggatgttacccaggaggag

SEQ ID NO: 819465 - DNA, 98 bp, Homo sapiens
cctcaagaagtaccatggctggatcgtgcagaagatcttccagggcgagtgaacgtgaaaaatgaagaaattgatgaaatgatcaaggaggctccggg

SEQ ID NO: 819466 - DNA, 51 bp, Homo sapiens
gcggggaccgctgtgctctcgatccagagacaatggccccgatgggatgga

SEQ ID NO: 819467 - DNA, 100 bp, Homo sapiens
ttctcctgcctcagcctcccgagtaggtggagcagatgttcgccctgacacccatggacctggcggggaacatcgactacaagtcactgtgctacatcat

SEQ ID NO: 819468 - DNA, 100 bp, Homo sapiens
tgaagactattttggagggcatagatccggccaagcatcagagaaatccaagaccagtgacttatcaattccatccaaatttagattattacaaagcacg

SEQ ID NO: 819469 - DNA, 100 bp, Homo sapiens
atgtccgatacatagaacaaacacatactaaattggagcactctgtgtgtgcaaatggacacagcattgttggttttgccatgtactattttacctatga

SEQ ID NO: 819470 - DNA, 98 bp, Homo sapiens
gtgatggaggctctacagaggacggctgtgtcgcagcctctcgggatgacaccactctgaatgcactgaacacaattacctggctggtgtttgcttgt

SEQ ID NO: 819471 - DNA, 100 bp, Homo sapiens
cttctacaaacccatttcagaccaatgccagaggagcaacagtcaaagtatgatgaacttaaaaaatcagaaaagggaagtaaacagcaacataaagttc

SEQ ID NO: 819472 - DNA, 98 bp, Homo sapiens
agggtcaccatgggggaggactctccagtggctatgttcagctggtatttggacaacaccccaacagagcagccgccccgtggtgcctcctttgatcc

SEQ ID NO: 819473 - DNA, 99 bp, Homo sapiens
gctgacctccagctggagtatctggacctgtacctgatgcactggccttatgcctttgaaggtatgaaggttattgaaaaccgggccttaaaagatgaa

SEQ ID NO: 819474 - DNA, 100 bp, Homo sapiens
gagggagagaaccagcacttctgggacgcacagagaccgtgaagattccaagttcaggagaactcgaccgccaatggagatcttcgtggatgatgagacg

SEQ ID NO: 819475 - DNA, 100 bp, Homo sapiens
ctaagaggaagtgtgtgcttgccgaagacaatggtctcaatttggcctttaccatcgcccatgagctgggccacaaagaaaccctaaagcaggcagcagc

SEQ ID NO: 819476 - DNA, 100 bp, Homo sapiens
agtccctaatttctgctgctatagaaccagctgttgaaggaggatgttcccatcttggtcagtcctatgcggatagagatgtctggaagccagaaccatg

SEQ ID NO: 819477 - DNA, 100 bp, Homo sapiens
caggctttacttttgtggtagaccgtctaagagaagaattagactttcttgtacctaaggctggattcttctgtccaatttgttccctcttctactcagg

SEQ ID NO: 819478 - DNA, 100 bp, Homo sapiens
ctttccctgaaatccgacactactgattctagtcaaggaagctcataaaatggtgagagaagcaaatatcaagcaggcaacagcagaaaaacagctaaaa

SEQ ID NO: 819479 - DNA, 98 bp, Homo sapiens
gcagctggctggcttcagtggaccattgtgcggtctgaaagtagaagtggatatggagaaaattgcagctgagattgcacaggcagaggaacaggccc

SEQ ID NO: 819480 - DNA, 124 bp, Homo sapiens
cccacgtcccccaaagaagaagtatcagaaagcagggctgtattctgacgtttacaaaactacagagctcactcagtaacttgatggattttgtgaagaaaacaggcatttgcgcttcaaagtg

SEQ ID NO: 819481 - DNA, 100 bp, Homo sapiens
gaaccactggaaagtgaggaattttgaagtacaccgtggtgacattgtatcattggtctcctcttttgacttggactatgactttcaacgggactattat

SEQ ID NO: 819482 - DNA, 100 bp, Homo sapiens
ctgtagggagcatagctgctacactgaagatgaagcaaggcccaatgacccaggcggtctcattgttcatgaaggagctgcagtttacagagtgtttaag

SEQ ID NO: 819483 - DNA, 122 bp, Homo sapiens
ctctgatcgccgggaacccttgccgctgctgtcctgcgaccccaagcagcccacgacccttcctcagggcaccatcaacatgaaccagtgcacagatgtggtggatggggagggccgcacgg

SEQ ID NO: 819484 - DNA, 99 bp, Homo sapiens
gctttcaaagataattcgcagtgatgtgaaactggcctcccaagccctgataaatggtcctagaacaattggagattcatacgcacacaaagaacctca

SEQ ID NO: 819485 - DNA, 98 bp, Homo sapiens
aggggcagattctggctgccttttaatttcgtccttcacctgatatctgtgccagagaatgctttggagtttaacccttctgccaatccagaggcaag

SEQ ID NO: 819486 - DNA, 100 bp, Homo sapiens
atgttgaagttgttaaatttttgctggaagcctgcaaagtaaaccctttccccaaggacaggaagtgtttggattgtgagctatttcagaactgttctca

SEQ ID NO: 819487 - DNA, 100 bp, Homo sapiens
ttcattcagatgtggtggaatatgccaaggaaaaactggagagcttcatcaaaaatagtgatagctttgataaatcctgaacaactacctccagtttgag

SEQ ID NO: 819488 - DNA, 100 bp, Homo sapiens
aaaagcttcaggattcttaacgaagccaagaagttagcaaatgatgtaaaagatagaatgagtccatttaagtcccaggacggtggaaactagctagtag

SEQ ID NO: 819489 - DNA, 98 bp, Homo sapiens
ctgacaagtacaaccttaaacccatccccctcaaacgtcagaggttcctacagtgtggggtcttgcagccagcctgccctcactcctaatgattcatt

SEQ ID NO: 819490 - DNA, 51 bp, Homo sapiens
ctaccgcaactctcagttcgagagtaaagagagtgtgacgcaggaaaggag

SEQ ID NO: 819491 - DNA, 99 bp, Homo sapiens
ttcaaggcaagaccgaattcagaaggatatcgacgtcgtgatccagaagtccagagctgaggactgcctgtttgcaggagaattgaagaactgaatcag

SEQ ID NO: 819492 - DNA, 100 bp, Homo sapiens
ttatccagcacctggaggatacctgctaccttattgtacctggaaggctcggctcttgtgtttgaggacatcttcagattgattgcgttctactgtgtca

SEQ ID NO: 819493 - DNA, 99 bp, Homo sapiens
cgggaccatgttcaccagcaccggctccagtgggctctgattgtggataatatgcctgtaacgtggtgttacgatgttgaagatggtcagaggttctgt

SEQ ID NO: 819494 - DNA, 100 bp, Homo sapiens
tctggatctcagcttcttccccaggaacatcaacaggtgctgggactctggtgcccccaaccctgggcatcctcaggctttgaggagaatacacaggatt

SEQ ID NO: 819495 - DNA, 133 bp, Homo sapiens
ttggttacagtcaaaaccccagcgtttgcagaatctgtcacagagggagatgtcaggtgggagaaagaatgtcgttcatgagctaagaataaccaatcaggtaatctacttgaatccaccaattgaagagtgc

SEQ ID NO: 819496 - DNA, 100 bp, Homo sapiens
ctgatttctgcagctctgtgtgaagcaccgacagtaaatggttcacggccgacatcatgtccataggggtgaattgtacacagatcacagcaacagagtg

SEQ ID NO: 819497 - DNA, 100 bp, Homo sapiens
gaaactcatgtgaaaacaaagcatgccaatcttttagacattccattggaagaatcgggaccagtattcacatctgctaagtgatcattttctgccatac

SEQ ID NO: 819498 - DNA, 98 bp, Homo sapiens
acaaaggggacactctgaagattattgagcggctggaccacctggagaatgtcatcaagcagcacattcaaggtgaaattattttggcccttcatcaa

SEQ ID NO: 819499 - DNA, 100 bp, Homo sapiens
cgcggagcccggcttccgacgtgcagcctggcagtgcagtggcaatttctcagcaagacctggtacacatggctattcagattgcctgtggaatgagcta

SEQ ID NO: 819500 - DNA, 100 bp, Homo sapiens
aatatgtttatgggagtacttttattttttctcacattttatcatacagggaattgatccattttccttagattctcttgcaaaacatggaatagtagct

SEQ ID NO: 819501 - DNA, 98 bp, Homo sapiens
tggtctcatgtctcctgggataattccaccaacaggcagtgctgagccctctcatagccatcgcactgaaaatatcccagattcatgagagaactggc

SEQ ID NO: 819502 - DNA, 122 bp, Homo sapiens
tacgagcgacaggagttcatctacccggagaagcaggagccctactcggcaggatgttaaagtctttagtgaagatgggacaagcaaagtggtggagattctagcagacatgacagccagag

SEQ ID NO: 819503 - DNA, 100 bp, Homo sapiens
tgggctgttgttgcggttgttttccttctctccgtgcaacgctgttttttgctccactcaagcctgttagaatcaccatggaatacagctccagtgggaa

SEQ ID NO: 819504 - DNA, 100 bp, Homo sapiens
tgagtttctgaaggccatacaagatggaacaatagttttaatgggaacatacgatgatggagcaaccaagctgaacatgaactaaatctggcaagaaaaa

SEQ ID NO: 819505 - DNA, 99 bp, Homo sapiens
gaagacagcacattcaccaacatttctcttgcagatgacataggcccagattgccttcctgcagggagaaaggaagggccaagaaaatttgaagaagga

SEQ ID NO: 819506 - DNA, 98 bp, Homo sapiens
tgggataccttctcacttggaaattaatactaactttcttcaaagctgcatcatcacaggaaaactccgcagaggacctcctcaggttaacatctaag

SEQ ID NO: 819507 - DNA, 98 bp, Homo sapiens
gcgcgccgccctctcgtcccactttccagatgagcccattattgaagagccaagccgcctccaggagtcagtgatggaggccagcagaacaaacatag

SEQ ID NO: 819508 - DNA, 98 bp, Homo sapiens
agaccagagttcgccctcgtcgccgtcttggttttggtggctgaatccacagaggagcctgctggttctaatcggggacagtatcctgaggattcctc

SEQ ID NO: 819509 - DNA, 98 bp, Homo sapiens
atgtctctcctctatgaatgtgtgaacaccgtgattgcagaaacaccaagggacccacgacaggcctgccccgcatcgcagggcatgctgcgagccat

SEQ ID NO: 819510 - DNA, 100 bp, Homo sapiens
aagagggagtcaccactggacctccaaggaagccacgtgcagacatctacaaccttcgatctcctgacgaatgaaccaactagccctagcattgatcatg

SEQ ID NO: 819511 - DNA, 98 bp, Homo sapiens
ccaccacgcactgggtcgtcacggaggacgggaaaatccagcagcaggagtgcatcatcgacgaggactgtgggcccagcatgtactgccagtttgcc

SEQ ID NO: 819512 - DNA, 100 bp, Homo sapiens
gctcagaaaggaacatactctcaaaatatttacttatatcaattcctggacacagagcaggactctggactgtcttcacactaggtggtgtgggcagcaa

SEQ ID NO: 819513 - DNA, 100 bp, Homo sapiens
tcaggtcaatgcttgggaccatacattgattgagaatggtgagatggtctatgttaacaatgaatgggcaaccagtgttggggaaggagggagctttgga

SEQ ID NO: 819514 - DNA, 99 bp, Homo sapiens
agagatgtgatgttggagaactacagaaacctcgtctccctggaaacgatggaaagaactttctaaggaagacttatctcctgcctttgatcattcacc

SEQ ID NO: 819515 - DNA, 100 bp, Homo sapiens
tcggagctgcgcgcggaaccgtgctgccccgccccgctccacccgtgaggcgagtaaccagctcataaatcacatcgaacagtttttggatactaatgaa

SEQ ID NO: 819516 - DNA, 100 bp, Homo sapiens
gaaaccaagttaatcgaaaagttctcaattttgaacaagctatcaaggaagtggccagggatcaaacccaccgaagtcaccatccaaaacaagattcttc

SEQ ID NO: 819517 - DNA, 98 bp, Homo sapiens
cagcctaatccaaagactgtggaacttttaagtggagtggtggatcagaccaaagatggcataccctgtaaaaagtgtgtggtggttggtaatggagg

SEQ ID NO: 819518 - DNA, 100 bp, Homo sapiens
ctgccgtggccgcccggctgccgggagccgacagcttcgcgccgggcacgtgtggttctcaaatataggcattctgatgggaacttgtgtgttaaagtaa

SEQ ID NO: 819519 - DNA, 127 bp, Homo sapiens
ttcagcatgctcggacgggaccctgaagctcaacacagcagcctccacggaaggtatcatcatcatgatgacgctgtgtgaccaggtggatatttatgagttcctcccatccaagcgcaagactgac

SEQ ID NO: 819520 - DNA, 100 bp, Homo sapiens
cgaccttgagctccaggagttcgtctcttacgtctgcggaagtgcagctgcctcagttcttagcgcaggcaggggaaatggaaggtgatgcagtcgaagc

SEQ ID NO: 819521 - DNA, 100 bp, Homo sapiens
atctcaactaggagaatcagagctttttgcaagttctggatcattttcattacagagctctataccagtctgggtatgttgagtcgatgggatgatagcc

SEQ ID NO: 819522 - DNA, 98 bp, Homo sapiens
tttacactcaactaattggcatcatcacacaaaagagcagtggctcaggcagcagtgtagcagatgagagagtggattatgttgttgttgaccaacag

SEQ ID NO: 819523 - DNA, 100 bp, Homo sapiens
tttgcattggtttggctttggctacacagcactggttgtttctggtgggatcgttggctatgtaaaaacaggaaaccacacctctagctgaaaaccaaga

SEQ ID NO: 819524 - DNA, 100 bp, Homo sapiens
ctccgggcggcgcgaagcgctggtggcgggcccgggctgcggcgtgtgcgcgcccgccagctgctccggagatacgtatcctaagaaatccggtaaccaa

SEQ ID NO: 819525 - DNA, 99 bp, Homo sapiens
ccatattgaaagaagctgagagagaggtacaacttggccaagtagaaatcaaatgccccatcacagagtgttttgaattcttggaagaaacaactgttg

SEQ ID NO: 819526 - DNA, 90 bp, Homo sapiens
gggccacaggccacgcggccacgcagtccgagcgggagccgagccgggcggggcgagggcagctccgacagggtctcgctgtgtcaccca

SEQ ID NO: 819527 - DNA, 100 bp, Homo sapiens
ggaaatgaagtataataccaagaaagccccacttggtggaagtttagctgatgctataagtgaaaactacagaatcatgagttactttaaagaagcagag

SEQ ID NO: 819528 - DNA, 100 bp, Homo sapiens
ttgatgagcaattatcaggtaccagctttgacagatccaaatgcttctgctgcccagcaggctgttctccagcagcacatcaatagtctaacatactcac

SEQ ID NO: 819529 - DNA, 100 bp, Homo sapiens
attttgtcagcttgtcgtcaagggtgccactgcggtgcacattcagcttataatggaacggctgctgagaaggatcaaccggacagtgattgggatgaac

SEQ ID NO: 819530 - DNA, 98 bp, Homo sapiens
gtgatcatttcattgagatcaacctgaatgaccaggtgtaaagtgcaagagtaatatgctatgactgagttctggacacagctgggcaggaggaattc

SEQ ID NO: 819531 - DNA, 100 bp, Homo sapiens
tgacccaggcctgctcggccctcacaggatttttggggacatcaggacagaacgtgagtgacattttccgatacagcagcatggaggatcacttggagat

SEQ ID NO: 819532 - DNA, 100 bp, Homo sapiens
tgcagataatatgtacagaaacatgatcattgacagagagaaccagtgcgtcattatcaggtactctgtggatatccccttggacaaaactgtcgtcaat

SEQ ID NO: 819533 - DNA, 100 bp, Homo sapiens
ggagatcgtctctctcatcgaggcccaaaccgccaagttatttctcaaactctgaggctgcggagttcacacattgaaatctgtcatctttttcagagag

SEQ ID NO: 819534 - DNA, 98 bp, Homo sapiens
ttgcaaggtggcaaggagcagaagcagcccttacaagttgcaaagttgccattgccccaaatggagccttacagttggcaagtccaggcacagatgga

SEQ ID NO: 819535 - DNA, 100 bp, Homo sapiens
ttcggcgaagctttacgttcatgtaaacagcatgacgtgaggccgtggatgcaggcattaagctgtaaaatttggccgaatgtcaaaaaagcagagagac

SEQ ID NO: 819536 - DNA, 99 bp, Homo sapiens
agcctgtgaaggacactgacattcaggaaaacaatgaagagtcgttatatggaactctatgaccttaatagagacttgctaaatggatataaaattcgc

SEQ ID NO: 819537 - DNA, 99 bp, Homo sapiens
ttcttaaattgatttcaagtttgaacaagagtcaaggaaacttttcttttgagctactgacagcttaactcctgtgaacaaaatttggagcatatttgt

SEQ ID NO: 819538 - DNA, 100 bp, Homo sapiens
gctgagattgactccttgaccagcatcttggctgaccttgagtgcagctccccctataagcctcggcctccacagttgagccccatatgggggttggcag

SEQ ID NO: 819539 - DNA, 100 bp, Homo sapiens
cctttcaggacggaacccccagaaacaggcccggacctcctcctctaccacccccaatcgaaaggccagaagcggactcctagaagaggggagcagcaag

SEQ ID NO: 819540 - DNA, 100 bp, Homo sapiens
ccctttggccgcagtagtatagagctgaccaagatgctatgtgagatcttgaaagtgggcgagttgcctcttgaatgtcgtctctcaactagccaaacgg

SEQ ID NO: 819541 - DNA, 99 bp, Homo sapiens
acaagaacaacatcactgcacaaggctttcaggatatagctgttgctatggaaaagtgcggccgggtgtgtggcaacattacttcatgatgcagccatg

SEQ ID NO: 819542 - DNA, 98 bp, Homo sapiens
ttttggcattgacatttaattttagggtcctttatatagaagggagagtaggtagtggtagcagagaattttgatgaaatagtgaataatgaaaataa

SEQ ID NO: 819543 - DNA, 98 bp, Homo sapiens
attttggccagtgaactcagcttttttttaaaaaaaattaattgtggtaaaatacagggaatgacagaggaagaggaagacaaacttctggcactgaa

SEQ ID NO: 819544 - DNA, 99 bp, Homo sapiens
tctcacaagatgaaatgttgacgcccctggggagattggacaagtatgctgcaagtgagaacatatttaacagtgctgaagctgctgaaagatggcaga

SEQ ID NO: 819545 - DNA, 116 bp, Homo sapiens
tccctttgctgctgccatgtatcagaacgaacttttcaacctccagaaacagaacaccatggagctgatgcagcagaatgggattggttatgtgttaaatgccagcaatacctgtc

SEQ ID NO: 819546 - DNA, 98 bp, Homo sapiens
gaccataacccccgacagcgccatggcccagattctgccaattcgttttcaggagcatctccagacaaaacttgccaatggcacttccagtatgattg

SEQ ID NO: 819547 - DNA, 100 bp, Homo sapiens
gtccagggcactgtctttgcccgcatggcccctgagcagaagacagagctggtgtgcgagctacagaagcttcagggcatcttcctggataccattgtcc

SEQ ID NO: 819548 - DNA, 100 bp, Homo sapiens
gagcctttctaaggagaccacccgttataatcatcccaagcccaacttgctgtatcagaagtttgtgaaggaaaatgagcgtaccaaggatctaatcatt

SEQ ID NO: 819549 - DNA, 98 bp, Homo sapiens
cgggccgggctgcgcccgcttcttgcaggttcgtgctggccgtgggcagcgccgtctttgatgccatgttcaacgggggaatggccacaacatccacg

SEQ ID NO: 819550 - DNA, 100 bp, Homo sapiens
tgctggacgacccctcacagagctcctagatccttgaagtgtgaacttcagcagctgagagctgtcgatattcaaccagcatgccttggactttattgtg

SEQ ID NO: 819551 - DNA, 98 bp, Homo sapiens
tcacatgtaattcagaaattagggacaggaaagaccacagcaagattctttcattcgtctcctcctagcctgggggaccaggctcgaactgaccctgg

SEQ ID NO: 819552 - DNA, 98 bp, Homo sapiens
ctgactcctacttcctctgtatagagcaactgttgaactcagctgcctgtagcctatttgatggctttgcagatggactaggagttgctgaagctatt

SEQ ID NO: 819553 - DNA, 100 bp, Homo sapiens
gcggtggcgctcaagtaccagcagcaccaggagtccctctccgcccagttacaagatcaggcctttgtgacactaaccacaaacgatgcctacgccaaag

SEQ ID NO: 819554 - DNA, 98 bp, Homo sapiens
aggctacttctgcggcctaaagaagaatagaaagagcccttgtggtatcagtggctcctcagggaggcaggtaagaatgattgatgttggctgatatt

SEQ ID NO: 819555 - DNA, 98 bp, Homo sapiens
ggcggggaggaaagctgctcggagaggtgggagccaggtcactcctggaagcaaggcggctctagctaatttatgtattggagatgtaatcacagcca

SEQ ID NO: 819556 - DNA, 100 bp, Homo sapiens
cgcggcggttcctgtccttacagttgcgctgcccagggaccgatgttgcgcgaggaaaatgcgggacgcccagctgccttcctatttcaaggaaagacgc

SEQ ID NO: 819557 - DNA, 98 bp, Homo sapiens
caactgtgaccccagaaaatgggacaactaatggatacaaatcaggattcactcagacaggtgcaactgccaaaagaactggcgtaagaggcaacaga

SEQ ID NO: 819558 - DNA, 100 bp, Homo sapiens
acgaggcaagtgtagtctctcacagcctggaccctctgtcagcagtccacatagcagctcttgaagtcctattggctggataattttgcaaaagattctg

SEQ ID NO: 819559 - DNA, 100 bp, Homo sapiens
ctggtggatccagacatgatcaaagccatcaaccagggcaactatggcctcttcacctccaactccttctccgtgattgaggacgatgcatttgcgggcc

SEQ ID NO: 819560 - DNA, 100 bp, Homo sapiens
ggccaacaaactgatagactggttaattgcacagaaaaatccagttacactcttaaaggaattgtcagtgataaagtctcgatatcaaactttgtatgcc

SEQ ID NO: 819561 - DNA, 100 bp, Homo sapiens
tgctactgctatggccgtggcattggggagtggcattgccaacctttacagacctatccaacacatggattaattgatgtatgttgagtttatggagctg

SEQ ID NO: 819562 - DNA, 98 bp, Homo sapiens
tggagaagctgaggacacacagggtgagagtgattttccagtgattgctttggcctgtacaaccagagaacaggattcttcccttctttttggccacc

SEQ ID NO: 819563 - DNA, 99 bp, Homo sapiens
tcctgcgaatgctgctgcagagctcggaggggcgctgtgtgtacatcacccccatggaggccctggcagagcaggccataggaaaaggatacagagtag

SEQ ID NO: 819564 - DNA, 100 bp, Homo sapiens
cagggtatccaagtatttgatcctggggagtctgattcagatgacaactgtacagatgtcactgtatgctattgcggcagcacctcccgagatgtgttat

SEQ ID NO: 819565 - DNA, 100 bp, Homo sapiens
aattggcagagcttgacccaggcactagcatgaaaacagccctggaagtctgccctggcgcctgcactgagactaatccaggtcactttagggaaactgc

SEQ ID NO: 819566 - DNA, 100 bp, Homo sapiens
actttgtgcccttcaatgtttggaaaagctatatggagataaatggaattcttttaccatcttattaattcactctgattttattgtcaagatatccgag

SEQ ID NO: 819567 - DNA, 100 bp, Homo sapiens
ccgggagcgcgcggatgtcggtgttcctggggccaggaaggatatggagtaatagtactaaatcccaatgaaaactatattgaagtagaaaagccgaaga

SEQ ID NO: 819568 - DNA, 100 bp, Homo sapiens
gtggacagcctcatcacccggctgctggaggctgcagcaaaaaattattcctgatcaggaccaactgatggcaatagcactagagtgcatctatacctgt

SEQ ID NO: 819569 - DNA, 100 bp, Homo sapiens
tctctagaggaggaagcctgcagccttaagattggctgcaatgccgtcagctgggcccctgctgttgtacctggaagcctcatagaccacccatcggggc

SEQ ID NO: 819570 - DNA, 99 bp, Homo sapiens
acagccaacctccaggtttcagtggcagttctcagcccagaagaatcagtgcggtttctgtggcagagcgagttgcatttgaaagaggagaagagcctg

SEQ ID NO: 819571 - DNA, 100 bp, Homo sapiens
actcctgtaaatttgagtgtggtccaggagagcctcagattattttttgtagaagtgaagctgcacatcaaggagtaattacctggaatccccctcaaag

SEQ ID NO: 819572 - DNA, 98 bp, Homo sapiens
tggagctgcccggagttccgctcctgcgggcttagcaggaaagggtgcctaagccgagcctcttgaagccattcttacagatgatgaaccagaccacg

SEQ ID NO: 819573 - DNA, 99 bp, Homo sapiens
cgagagtgaacgattcaacccgggggagctcagccccagcatgagaccagatgtaagctctcctccatccagctcctcaacagcaacaacaggaccacc

SEQ ID NO: 819574 - DNA, 100 bp, Homo sapiens
gcctcagtttgtgcaggacaccgacatggaacagggactcactggggatctttgcagattatcctgtggaaggaaaatgcctaaagtcaaaagaagccgg

SEQ ID NO: 819575 - DNA, 100 bp, Homo sapiens
gcttgcttatggcatctatgtcatccaccaggcattgacctgtctgagtgtctgcagtacccagacttcagtgttgttgttctttataaaaaagtcatca

SEQ ID NO: 819576 - DNA, 98 bp, Homo sapiens
agcgaaagggtttaaccctcatcctagccgcttcatggacttggatgaactgcagaatcaggtgaaagaattcttagccaaagccaaagaagattttc

SEQ ID NO: 819577 - DNA, 99 bp, Homo sapiens
cgggacttcgttaaatcagtgcttcggggcacttagcacagcgcctggcgcaagataggggagtgtatacatcaccacaccagctgtccaggaattagg

SEQ ID NO: 819578 - DNA, 98 bp, Homo sapiens
ttaatcatttcagagaagaacactgaactttgaaaaaaatgttggaagccattggtacatcaggaacgtctctatcaagaatacaatttcagcaaggc

SEQ ID NO: 819579 - DNA, 98 bp, Homo sapiens
cagtggattgaaagccaagcatggtttacctcgtgtgtagccttttttaatatccttaatgagttaaatgactatgcaggacagcgagaagttgtagc

SEQ ID NO: 819580 - DNA, 100 bp, Homo sapiens
aactacatcaccgctctgcaggctgttcctcctcggacaggggcaagtgtccgagtggtgaatcagctacttacagagatggatggtctggaagcacgcc

SEQ ID NO: 819581 - DNA, 146 bp, Homo sapiens
gcacaagagctcttctctgttcgacatggcccaattcgagcggctagaatcttgcctgctccacagtttgctgtgaaaaagggctcctatgacatggtgtcgactctgatcaaacataacactagcctagaccagccctgtgtcaa

SEQ ID NO: 819582 - DNA, 100 bp, Homo sapiens
cagcttgaggcagctgagaaacagattaaacatttagagattgaaaagaatgctgaaagtagcaaggatccttgtgaggatatttctcgtatccagaaaa

SEQ ID NO: 819583 - DNA, 100 bp, Homo sapiens
cttggaaatggctgcaggttcagagagttttgggatggtggttgataactaagacaaagtgctgaagaaatgatagaagttgcaaagagacgttagtgta

SEQ ID NO: 819584 - DNA, 98 bp, Homo sapiens
gcccgggctccagttccctctccagcgcggccgcgaggccccggcgccgcccggaactgcagcgggtggcatttttctgaagttgttcattaagactt

SEQ ID NO: 819585 - DNA, 100 bp, Homo sapiens
tttttatggtgtttaatctaatacacttaagctgcagtcccaaaattaggggacataagcagctctatgaccaatagcacagctgccagtagacccccgg

SEQ ID NO: 819586 - DNA, 98 bp, Homo sapiens
ttaccttagatgcaagtgatgatggaatcttggccaaaatcgtgagtcgagtgtgcccatttcttatagatccttcttcccaagctacagagtggtta

SEQ ID NO: 819587 - DNA, 98 bp, Homo sapiens
gctggacgcctctgggcaatcttaccctcctgggaactgagagagtgtgtggctgtgacctggcacaagggggcttcttcataaagaacggagagtat

SEQ ID NO: 819588 - DNA, 99 bp, Homo sapiens
ggaacgccgagtcggctgccgtggctgtgctgagggtggcggccggatagcctggtgtgtccgtttctctggtgaatccccagccatccaatggccact

SEQ ID NO: 819589 - DNA, 100 bp, Homo sapiens
tgtctcctgttttctaggtggaaagaatctgatgagccttttaggcctgttcagatgacattccagactctccatctagcccgaaagttgcccttcttcc

SEQ ID NO: 819590 - DNA, 103 bp, Homo sapiens
aggcatcagatgccagctctgaaaaactcttcaacactgttattgtaaacaaagagattatgcatgatgtgataaagaaggtcaagaagaagggggaatggaa

SEQ ID NO: 819591 - DNA, 100 bp, Homo sapiens
gggagatgctgacagcacagaatcgagccatgtccattggagcccgttcccaatcagctcgtacttacttggagagacatatgtctgaatttatggagtg

SEQ ID NO: 819592 - DNA, 100 bp, Homo sapiens
aatgatgatggaaatgaagtataataccaagaaagccccacttgttattctaggcaaatcacactatgtattgtatgggctggtggctgccatgcagccc

SEQ ID NO: 819593 - DNA, 100 bp, Homo sapiens
agaatcggatcagagttcccaggggctcaagttacaatcgttcctgacaaagatgatgataagccaatggacacgtcagtgttatctgaagaaggaggag

SEQ ID NO: 819594 - DNA, 140 bp, Homo sapiens
gagctgaccctaggcctccaccctggcaggaatcccaatttgcctccacttagtgagcggaagaatgggtttggttttcagataggagttaggtatgagaacaagaagagagaaaacttggcgctgaccctgttatagtg

SEQ ID NO: 819595 - DNA, 100 bp, Homo sapiens
gaagtatttggctgaggagttttcaatcccagttgggcccgaaggcatcctgcagaacggggctgtggacgacagtgtagccaagaccagccagttgttg

SEQ ID NO: 819596 - DNA, 100 bp, Homo sapiens
ccgcgtcccgctcgctgggagagaggtacctctccttttccctctccctttccctaaggctcagctggaagctcagaaagccacgcaggacttccagagg

SEQ ID NO: 819597 - DNA, 100 bp, Homo sapiens
ggggagtctgaggccaatgtcagagaaatctttgacaagaagaagatagtggtgagctggcaaagccaaagattggttttccagagacaacagaagagga

SEQ ID NO: 819598 - DNA, 144 bp, Homo sapiens
acaacacttcaccctctcgcctcgggtctcgggggccgctctgggatcccggccaccagcaattgtccggtaatctgtaagtcagatgctccaacaggggatgttcttcttgatgaagctctgaagcatgttaaggaaactcag

SEQ ID NO: 819599 - DNA, 99 bp, Homo sapiens
gagctcagcaacatcgctatgcaggtgcggaagctggtgggcactcagcaccctctgcttaccacagccagaccctggaagctgtcctgaatttcaaat

SEQ ID NO: 819600 - DNA, 99 bp, Homo sapiens
gaaggacttcgactgctgttgtctctccctgcagccttgccacgatcctgttgtcacgactacgcccaagcaaggtttgatgcctatttccaccagaag

SEQ ID NO: 819601 - DNA, 100 bp, Homo sapiens
ctcagctcgcccggtttctcggcgaatgacagcacagatcactgtgtccactactatgatcttcgtaacactaaacagccaatcatggtattcaaaggac

SEQ ID NO: 819602 - DNA, 99 bp, Homo sapiens
agaaaatcattcaagtggccaagacctctgctgcacaggtttttcttcccccagtccctcagctgctgctgctgctcaggaggtcagatctgccactga

SEQ ID NO: 819603 - DNA, 100 bp, Homo sapiens
acacacaatgagctggaaaagaatcggatgtacagttacccagcacgtgtacctcctcctcctcctattgctcgggctgtagtgccctcgaaacgtcagc

SEQ ID NO: 819604 - DNA, 98 bp, Homo sapiens
tatggaaactggtaattctgctgccactcataaactcttctgcagctccatcaagtatgatggtgaaggatgaatatgtgcatgactttgagggacag

SEQ ID NO: 819605 - DNA, 100 bp, Homo sapiens
ctcagaactggctttcaaggactttgatgttggcgatggttagccatcatccacccatttctgcctgtcactgtgaatcaaagaattttgtgttttggca

SEQ ID NO: 819606 - DNA, 100 bp, Homo sapiens
tgcagcaaagagacaagtcctaaatgccgactcagtggaacaatcttttgttggattgaaacagctaatcgtagatataatctgtggtgatcacctgttg

SEQ ID NO: 819607 - DNA, 100 bp, Homo sapiens
aaacttcgctctgttacaactggctcaggcagctgtccaaggacctgttggtacagatttcaaacccttaaatagtacccctgcaacaactacagaaccc

SEQ ID NO: 819608 - DNA, 100 bp, Homo sapiens
tggacatctgctgccggaaggggtcccgaagccccctgcaggaactctacaacccaatccagaccctggaggaggagctatttgggaacaatgaggagag

SEQ ID NO: 819609 - DNA, 100 bp, Homo sapiens
actgggggaccggatcatcaatgccttctttccagaggggcagaggggatgatcagcgaaatccggaccgcatttgaggaggccctgggacagctggttt

SEQ ID NO: 819610 - DNA, 100 bp, Homo sapiens
tgattttcgcagggaaggagctgaggaatgactggactgtgcaggtgagaggccctccagctgcaggggcatttaaagaaagaccaaccaagcccacagc

SEQ ID NO: 819611 - DNA, 98 bp, Homo sapiens
agataaaaaggagacccctcttccgctcctgttttatactgcttccatatttacagacacattcagctaacgtattttagcaggtggagtgaggttga

SEQ ID NO: 819612 - DNA, 100 bp, Homo sapiens
aagaagatccttcaaaattaaaagaggagcagcatggcatttcagtcactggtttgcagagtccagatacaaaagttttgcagtactatttcaatctagg

SEQ ID NO: 819613 - DNA, 100 bp, Homo sapiens
tctcctttttaattgcgggtgatgacagcactatagtgcaggtgttggaagtgaaagtgtggcaaaggagcagagaactttgacaagttcttcacacgag

SEQ ID NO: 819614 - DNA, 112 bp, Homo sapiens
tcaaactaagaccaaggtcaattgaagtagaaaatgactttctgccggtagaaaagaacaaaatccagtctcatagcagaggagaatataatgtttacagcaccttccagag

SEQ ID NO: 819615 - DNA, 100 bp, Homo sapiens
ctccaggatctgtcggcagctgctgttctgagtctattgcgtctgcagacatggatttcaaccagctggaggcattcttgactgctcaaaccaaaaagca

SEQ ID NO: 819616 - DNA, 98 bp, Homo sapiens
gcgcgggagagctcggggcgcctggatgtaaatgaagaccctggagaagatgtggccctcctctctgttagttttgaggacactgaagccacccaggt

SEQ ID NO: 819617 - DNA, 101 bp, Homo sapiens
gaggagttccgcccctttctggcaaagatgagggggattcttaagagcctccattatggcatgctgaatttaccaaagaagaattggttcagaagctcagt

SEQ ID NO: 819618 - DNA, 100 bp, Homo sapiens
ttcgtgcccatcctgcaccgggacctcaagtccagcaacatgtgtggacctgagctgtaatgagctaagtgaagtcacattaccagaaaacctgcctccc

SEQ ID NO: 819619 - DNA, 98 bp, Homo sapiens
tgaggctctgaaacaccaaggctatgacacaaagtcggacatctggaggttgtggctcactggattgctgaaagccgcattgccattgagaagatccg

SEQ ID NO: 819620 - DNA, 98 bp, Homo sapiens
agttaactctgagaagtcgtcctcttcagaaaggctattttggcattctgctggatatatgttcgtaaataccaaagtcggcgggaaagtgaagttgt

SEQ ID NO: 819621 - DNA, 137 bp, Homo sapiens
ccacaaggggcttcggatcttctgcagtgaagatgagcagagccgcacctgctggctggctgccttccgcctcttcaagtgttatagttttgccgctggactcttccctcccttcccccaccccatcaggatgatat

SEQ ID NO: 819622 - DNA, 100 bp, Homo sapiens
gctgcttgaatgtctgccgaaatgttcaagtttaccaaaagagaggcaccgctggaacactaatgagccctgggcgctgcctatggcacagccaagagcg

SEQ ID NO: 819623 - DNA, 100 bp, Homo sapiens
gaaaggacctctagtttatcctgcaactccagtcaatatcccacttaaatcattccaggttgacatcatggacatatgtgagtccatcctggagaggaag

SEQ ID NO: 819624 - DNA, 98 bp, Homo sapiens
ttctttggcatcactgcagctagtaatttgccttctggattctcgtattaaccgttggcttattagctgttgttgtatacctatacactgtggtggca

SEQ ID NO: 819625 - DNA, 100 bp, Homo sapiens
tgccgcaccaggctcatcctgtccatcgtgtgcctgatgatcacgcagctggctggcttcagtggaccaagcttccttctcctacatctgcttgctgctg

SEQ ID NO: 819626 - DNA, 98 bp, Homo sapiens
ggacaattccatttggggaccagagatggacggtcactcagcctatggaggtgattgaagcctccgatgttgtcctagaggtgttggatgccagagat

SEQ ID NO: 819627 - DNA, 98 bp, Homo sapiens
catgaccgacctcaccctgtcgcgggaactaagcgtcttgtagaaggaactattaatccaggagaaacctgtttaatcattgaagatgttgtcaccag

SEQ ID NO: 819628 - DNA, 98 bp, Homo sapiens
tgaaagacccagtgcaaagacatcaccatgaacactagcacctcagagtttgaagaccccttagttggtgaagatacagaacgtgccaactctatggg

SEQ ID NO: 819629 - DNA, 98 bp, Homo sapiens
agtcactgtcctggtacaaggatgaggagcatcccagccatcactcttccacctgctccttagagaagggaagatgagtgagtcgagctcgaagtcca

SEQ ID NO: 819630 - DNA, 99 bp, Homo sapiens
aggggtctgcatggtggtggtgctattcctcatgatcacagcctctacatatgcaataaggtgcggtggctactaaagttcgaaggcacgatatgcgtg

SEQ ID NO: 819631 - DNA, 99 bp, Homo sapiens
gacggagagagcacgagcccatcagagagaaaattcatgaaccctttcaacatgcctaatctgtatcagaagttggagagtgatcccaggacaaggaca

SEQ ID NO: 819632 - DNA, 100 bp, Homo sapiens
cattggtctgcaggacatcactttagatgatggttgcatcataaatacaaaggactgaagttataaaagagaaaagagaagtttgctgctaaaatgaatc

SEQ ID NO: 819633 - DNA, 99 bp, Homo sapiens
tcactgcaggagctgcagaccatcagtctattatcctcccagtccacaacgctgaaccgtggctggacgaatgtttgaggtctgttttgcaacaggact

SEQ ID NO: 819634 - DNA, 98 bp, Homo sapiens
tgacacatcagcatttgtttcccttagccagcccgagcaagtaaagattgggcgcaaaccagaagaagagggtgtggaagataacgggctggaggaaa

SEQ ID NO: 819635 - DNA, 100 bp, Homo sapiens
cgagggcttggaatctcgagcgggaaaagagccaaactttgtgtcatcttatgacatcggaaattttacctacttctttttccgagaaaatgcagtagag

SEQ ID NO: 819636 - DNA, 98 bp, Homo sapiens
gcagagctgaagaagcccctgaccattgaagaggtggcccccgccccgtcgggcctcacgagatccgtgattctaactgcaactatgaggcctttatg

SEQ ID NO: 819637 - DNA, 98 bp, Homo sapiens
tgaagaaagctgctgatggggctgctgagactgtgaatgaaagctggaatgccttagcaaccccatcagataagctgtttttctggaattccaaatct

SEQ ID NO: 819638 - DNA, 100 bp, Homo sapiens
catacagagattgaaatgttccttagaaaggagcagcagtttcctagaggaagttctggcttctggactgcacagccgaagcaaggagagctctcaagtc

SEQ ID NO: 819639 - DNA, 100 bp, Homo sapiens
agaaatattaaaagtttgtcagatatccagattgtacaggttgcttgtggttactatcattcacttgcactttctaaagatgggagcttgcctgattgtc

SEQ ID NO: 819640 - DNA, 98 bp, Homo sapiens
gccacttgcttgggatcctttatcctggtcatcttctatttccaaaatccagtccttctgtggaacttctgaacatcttttattagtggaaatatttt

SEQ ID NO: 819641 - DNA, 100 bp, Homo sapiens
gggccagagttccaggggctctgggagtggctgccagcaaaagcggcgccaggaaattgaacaaaaacttgaagttcaggcagaagaagagagaaagcag

SEQ ID NO: 819642 - DNA, 100 bp, Homo sapiens
gcctcagttgatcttccagcctcaccggattcccccactctttcctcagaagcagctagcgctgaacacagcccagtttgcaaagagtctagccatgctt

SEQ ID NO: 819643 - DNA, 100 bp, Homo sapiens
ttcagatgggatctttccggatcaatccagatggcagccagtcagtggtggaggagtatacggaggagatagaacgtttaaaacgagatcttgctgcagc

SEQ ID NO: 819644 - DNA, 98 bp, Homo sapiens
ggcggagctgtgcgagagcctcctcacttgggtttttcgttggaatatacgttgcacatttatggcgattctgagtgtgagggcagacttctgccagg

SEQ ID NO: 819645 - DNA, 98 bp, Homo sapiens
acagctaaagaagggcctcgaaagcgggacggtgctgatccagtttgaggatgtggacaagtggtcctttgacgtcttttccctcaatgaggccagtg

SEQ ID NO: 819646 - DNA, 100 bp, Homo sapiens
gaaagaattgctcactggaaggatcataggtggcactcatgtctcactgccccactcagcactgtctccaagcaaagaaaaaacgtcatcagctgtgtca

SEQ ID NO: 819647 - DNA, 100 bp, Homo sapiens
tcatctgtagcattcaagacttcaaactgcctcaagtactacagccttccagcagccttcccagacccacagatcacacccagggaaaactaataaagcc

SEQ ID NO: 819648 - DNA, 100 bp, Homo sapiens
tcctccagttaccaccctcctccctagcataaatatcatggtacagtcaccagaaaaagcttacagttcctcacagcctgttatttcggcacaagagcag

SEQ ID NO: 819649 - DNA, 99 bp, Homo sapiens
tcaggacccagcgggggcagcgcgatgaggcgggtgaccctgttcctgaacggcagccccaagaacggaaagcgacaaggtgctggggcaaccaatgga

SEQ ID NO: 819650 - DNA, 100 bp, Homo sapiens
gccatacaagatggaacaatagttttaatgggaacatacgatgatggagcaaccaacttattcagctgattctgaatcatcttacactaccagacctgtg

SEQ ID NO: 819651 - DNA, 99 bp, Homo sapiens
tatgacaagaccaaggtcaacaaggacaacaatgagatcgtggacaagatcatgggcaaaggacagatccagcttgctcacttccgacagagaaaaaca

SEQ ID NO: 819652 - DNA, 98 bp, Homo sapiens
cagaagtgtcttggagccaactagaggcagggtcatccttgcccttgtcctcccctttcatccctatgtggaaaacgtttctctgcaggtggatattg

SEQ ID NO: 819653 - DNA, 117 bp, Homo sapiens
ggagagagagggaaggacggggcctggcccccgggactccctgtgccttgcttggagctgacgccgacggcctgtttctggaccagtacagagccagccttgttgatgcaataaaga

SEQ ID NO: 819654 - DNA, 99 bp, Homo sapiens
tcgagactggaggctgagtgctaaactgtgtggggcgcggatgggatccagctgttagtcgggtaggcataggtagcacaggcggagtgcagcggaggc

SEQ ID NO: 819655 - DNA, 127 bp, Homo sapiens
agaaggagacttccactttgcaggtggaacagaatggggactatggtaggggcagtgaacaaggggagaagaattgccttcagctccacgtcgttactgaaaatggcccccagcgctgaggagagga

SEQ ID NO: 819656 - DNA, 142 bp, Homo sapiens
ccatctgctggcaaggctaagattagaacagctcataggagagtcatgattttgaatcacccagataaaggggctttgttatgcacctaaagccatattggaagctccagaagaaagagcaccccccggaagtcagcaggga

SEQ ID NO: 819657 - DNA, 100 bp, Homo sapiens
ctcatcaacaccaccgacagatgctgcagggaagtcaacatttgtgaatatccttaaacaattgtgtgaagattgggaagtggttcctgaacctgttgcc

SEQ ID NO: 819658 - DNA, 99 bp, Homo sapiens
acacgatgagaagtccttaaagggaatgtgaaaaaacttggagacacatacccaagtatctcaaatgcccggaatgcagagctccggctgcgatggggc

SEQ ID NO: 819659 - DNA, 100 bp, Homo sapiens
aaacagatcatccgcaaacacgcgcagaccttcgttgccctctgtgccacaggtatcactcctccttgcttcaatctctttgccctcttcgatgctcagg

SEQ ID NO: 819660 - DNA, 98 bp, Homo sapiens
gcgattggacagaatttgtgaagaacatacatatgatagttgagaaagacacatattctgatcatgaagaaataaacacaagttaaatatgactaagc

SEQ ID NO: 819661 - DNA, 99 bp, Homo sapiens
gagctggaaaacatcgtggccaacacggtcttgctgaaagccagggaagagactctccaacatgtgccttctgaccatacaaatgaaacttccaacagt

SEQ ID NO: 819662 - DNA, 100 bp, Homo sapiens
gacattgaagattctgattcttgtcactttaattacttgagaatttataatggaattggagtcagcagaactgaaatagaataccctgaagatgtagctc

SEQ ID NO: 819663 - DNA, 100 bp, Homo sapiens
tcaacaggttacatttggccaaaatcggactccctctcgtggcattatccttcagtggggctattggactgacttttcttatgctgggatgtgccttaga

SEQ ID NO: 819664 - DNA, 99 bp, Homo sapiens
gcgacgctatggcgcactggagtaccctgttcctggcatgatggtcattgtcctccagagcagtgatggaggaaataccagcccaggaagcagcagggt

SEQ ID NO: 819665 - DNA, 100 bp, Homo sapiens
catggatggctctcaagacagccctatctttatgtatgcccctgagttcaagttcatgccaccaccgacttatactgagacttcacagagaatgcagttg

SEQ ID NO: 819666 - DNA, 100 bp, Homo sapiens
cctgtttgaacagcatcacacacctacctttaaccacagagataatcattcaggtcttcgtgagctaaggccaaacaaacaaaaaacacttgctttgatg

SEQ ID NO: 819667 - DNA, 100 bp, Homo sapiens
cgccctctgccaggccgcacgctccatcagcaccttccttggcactctgctgcaagctttcttcctggtggcagatgacatcatggattcatcccttacc

SEQ ID NO: 819668 - DNA, 100 bp, Homo sapiens
cccggacacgtcctgtactgagctgtaagaagcggaggcttgttcgacccaacagcatcgttcctctttccaagaagggtttggaatcacttgctaggag

SEQ ID NO: 819669 - DNA, 100 bp, Homo sapiens
atttctctctttgggaggaggaagggacaccgagggaccaaagggcggctgcagccacaggtccgcacggaaaaccaggagctccaagactgccgcacac

SEQ ID NO: 819670 - DNA, 100 bp, Homo sapiens
cagatcatgatgtttaagaacatgacgccgtcacccttcctgcgattctacttaggtgtcgaagcaggccaaggagtttctggagtacgtgtacgaagag

SEQ ID NO: 819671 - DNA, 98 bp, Homo sapiens
ttttagcagcactagtattgcccaagctgactatggccttgaacacttgcatcaacctgatcctgcaattggagtccatcttatggatagatacacat

SEQ ID NO: 819672 - DNA, 100 bp, Homo sapiens
tcattaaacccatcgacaagaaggcacctgagaagtttcaggagtctctaaagaagctgaagaacgaggagcaggaagctgagaagctaacagcttttat

SEQ ID NO: 819673 - DNA, 100 bp, Homo sapiens
ctgatctcaccaccctggtggcctttccctccagctctgtctatcctaccaaggctacccacctttctgttctgagacccctcaagagacatataagaag

SEQ ID NO: 819674 - DNA, 98 bp, Homo sapiens
ccggcaagtcgcctgagtacatcagctcccacatggactccaacgacagcctctacgggggagactccaagttcctggcagaaaacaacaagctgtgt

SEQ ID NO: 819675 - DNA, 99 bp, Homo sapiens
gccagtatgaatctctgcccgcaacacatatcagggccatgaagcccccaggaggagaatcgagcaatctttttggaagtccagaagaagctactcctt

SEQ ID NO: 819676 - DNA, 99 bp, Homo sapiens
gaatttgccaagaggaatgttaagttgattgccctttcaatagacagtgttgaggaccatcttgcctggagcaagcacaggagaaaacgacgctccaca

SEQ ID NO: 819677 - DNA, 100 bp, Homo sapiens
cacaatatctgtgtcgttcttggcagaaattatattttccagcccgtgtctgcaggctgcgctacatggtgaagcagttggagaatggggagataaacat

SEQ ID NO: 819678 - DNA, 100 bp, Homo sapiens
caacattacagaccggtggatcctgtccttcatgcagtctctcattggcttctttgagactgaaatggcagaattacggatccagatcaggagatttgag

SEQ ID NO: 819679 - DNA, 100 bp, Homo sapiens
tctgaaggacttactgaaagatatgaatcagagttcattggccaaggagtgccccctttcacaggaaccctgcctacgccatgaggacaggcccaggcta

SEQ ID NO: 819680 - DNA, 99 bp, Homo sapiens
ttttggggattccactctccagtgtaatgattattgacaacaggatagtaatgatgacactgaagatgtttcactgtttgatgcggaagaggagacgac

SEQ ID NO: 819681 - DNA, 100 bp, Homo sapiens
aaagaggattgcaatctgtcagaacgtggttccagaaattttaaggaagaacattaaccaggtggtatttgttggaaatttcttgagaattaatacgatc

SEQ ID NO: 819682 - DNA, 100 bp, Homo sapiens
tgcaagttgatgcctcctccacctccacccccgggaccaatgaagaaggataaggaccaggattctattactggtgcccccaggatacaattctttgcca

SEQ ID NO: 819683 - DNA, 100 bp, Homo sapiens
ggattgatgtgcaacaagtgtctttggttataaattatgatctacctaccaatcgtgaaaactatattcacagaaagggtacactcgccagcagttttgc

SEQ ID NO: 819684 - DNA, 99 bp, Homo sapiens
ttggaggtccagacacaagaagaggattggaaccagttccgatacagcacaatgaaccttctgataacttaagagagattctccaaaatgtggccagat

SEQ ID NO: 819685 - DNA, 98 bp, Homo sapiens
ccaaacagggccagaagctggagatgatgctggagcagaagttagcgcttctctctcggctgaacacccaaacccaggagttcggtatcctggcacca

SEQ ID NO: 819686 - DNA, 98 bp, Homo sapiens
ggactcctacgacaacttcagtgggcatcgagatgacggcatggagggacctgaaggagaagaaggagaaggtggaggagaaggcaagccggaaagag

SEQ ID NO: 819687 - DNA, 98 bp, Homo sapiens
gctactgttgggagcgtcagtacagtgcacacttcttcctggagatagaagggtttgaacccaaccccacagttgccaagacctctcctcctgtcttc

SEQ ID NO: 819688 - DNA, 100 bp, Homo sapiens
gcttacatgaaccacatcatggtctctgtctccccgcctgaagagcacgccatgcccattgggagaatagcagtagagacgggggttcaccatgttagcc

SEQ ID NO: 819689 - DNA, 100 bp, Homo sapiens
ttctgcgctacctcttcaccttcctcaaccatgctgccgtggtcaacgccattggcctgtacatgcgccaccttggggtgcggaccaagagtggagacaa

SEQ ID NO: 819690 - DNA, 100 bp, Homo sapiens
caggatgattctgattttcaaggcggcttacagggagaacacagttggcctccaccgtttctgccccacagaaaacgtagcaaagatcaaccgagaggtg

SEQ ID NO: 819691 - DNA, 148 bp, Homo sapiens
actttgtaatcgtttggttgtagttgaacttaacaacaggactagcagagacttagccgaacagtgtgtaaagttgagccccatatgggggttggcaggcagcagagaggcccctttcaaggtgttcgggtaaagaactcagtgaagg

SEQ ID NO: 819692 - DNA, 98 bp, Homo sapiens
acggcctatgacagcagtgccgactggttctccctgggctgcatgcttttcaaacttctgagaggtggaaatttaatggagccaccatttcagaacca

SEQ ID NO: 819693 - DNA, 98 bp, Homo sapiens
aagtcagcccaggcagacctccagttgggacccctgattttagcaggatggcccaatggaatcagctacagcagcttgacacacggtacctggagcag

SEQ ID NO: 819694 - DNA, 100 bp, Homo sapiens
ggaggtgtttcacaagtagcaaatgagatgaaccatcttcctgcacacagccaaagtctgcaaagatatgcctgaatattcagtcacaaatgaattttgt

SEQ ID NO: 819695 - DNA, 98 bp, Homo sapiens
ggaccgagcgagcgaccgacgcgccacccgccgacgcctcagccgcttggggcccgcacggaccctctacttcaggggaaatttgcagtggtgagaaa

SEQ ID NO: 819696 - DNA, 99 bp, Homo sapiens
aagacgatctgcacttcgcattttggcattgacatttaattttagggtcctttatatagaagggagagtaggaatttgcaggtgaagacacttctgatt

SEQ ID NO: 819697 - DNA, 98 bp, Homo sapiens
aagtttctgtcttaactgcagtaaatccacaagaggtagaacggttaatccaagaacgaggctgggagttcatgtggaatgagcgcctaggatacatt

SEQ ID NO: 819698 - DNA, 98 bp, Homo sapiens
tcctccaagaccgtgctggtctttctcaacctcatcttctggcttcttctcagcctgttgataaccatgttagcccatcttccttcttgggccagaca

SEQ ID NO: 819699 - DNA, 100 bp, Homo sapiens
ggaagacgcgctcctgcgccgggttcaggataagtttgaggtgctgaattacacaagcattcctatctttctcccggaagtcaccattggagctcatcag

SEQ ID NO: 819700 - DNA, 99 bp, Homo sapiens
gcaaagcaggggtccttgtaccatgagatgggtgagtccacctgtaggtggaagagccagtccagagaggagggccaggcatccacctggcctgaccca

SEQ ID NO: 819701 - DNA, 98 bp, Homo sapiens
tggagtctcctttggtatccgcaaactctacatgaaaagtctgttaaaaatctttgcgagctgcctgagaactggacagacacgcgggagacgctgct

SEQ ID NO: 819702 - DNA, 98 bp, Homo sapiens
cagatcaacgaacctggacattgaggagctcaaggcccgatgagagaaagggaaagttaaggatgctggagcagaacaatggatttctctttctcttt

SEQ ID NO: 819703 - DNA, 100 bp, Homo sapiens
gcaccgctaggccgtccccgaccttgcctgaacaagccttgcaccagggaacgtctaaatcttcctctctccccgcctatggcaggaccaccctgagccg

SEQ ID NO: 819704 - DNA, 51 bp, Homo sapiens
aagagaacaagacgtgtgaagactcagggtggcatggagaaatcgttgtca

SEQ ID NO: 819705 - DNA, 100 bp, Homo sapiens
gtgctcgccacccctcaggtctcagactccatgaggggttactggggaggaccagcgtttctgcgcaagttgtttcatctaggtatgagttaaggatggc

SEQ ID NO: 819706 - DNA, 100 bp, Homo sapiens
ttggactcacactgctgtctctgtatatgttctgtgagaacctgtgtgcagacacattagaaaaggattggaacaaggtaatttgaaaaaggctttagtg

SEQ ID NO: 819707 - DNA, 100 bp, Homo sapiens
aaatattccacactacctacagtgaaatagcatggatttcatccattatgctggctgttatgtacgcaggagtaagagatgctaaaaaccttgtacctat

SEQ ID NO: 819708 - DNA, 98 bp, Homo sapiens
aagtacatatgatttcagctgcaatggcagatcggtttgggcttggccagccaggaagaatacctggttctgtgaatgccatgagagttctgagcaca

SEQ ID NO: 819709 - DNA, 98 bp, Homo sapiens
catcaatgtaatgttgtctcatcccaatcacacagcaaaattctgtggcatctctggaatactacctgagaatttttgtgtgccatgtcgaagaaacg

SEQ ID NO: 819710 - DNA, 99 bp, Homo sapiens
atcggacatgatcctcatcttttatacactcttagtgctgtccagagctgtgttaaaagtgaccactcgtgctcgccatgtgctccaatcataggagaa

SEQ ID NO: 819711 - DNA, 98 bp, Homo sapiens
atgacctgtcaggagttcattgcaaatctgcaaggggtaaatgagggtgttgatttctccaaggatctgctgaaagagtacaaaatttcaagctttga

SEQ ID NO: 819712 - DNA, 100 bp, Homo sapiens
agtcacccaagtgcattgcctttggaaacgagtagctgctgctggtggtgacaatgtcaaataacggcctagacattcaagacaaacccccagcccctcc

SEQ ID NO: 819713 - DNA, 99 bp, Homo sapiens
gatactgtgcaattcttaatgctgtgaactacatctcaacagtactagcagattgggctgacaatgttgctttccttaaagtttcccatgtctcaatgg

SEQ ID NO: 819714 - DNA, 50 bp, Homo sapiens
ccaaaaggtcaaggttcacaagacggttgatgatgaagcgccggccgtgt

SEQ ID NO: 819715 - DNA, 98 bp, Homo sapiens
tcaacatgcctctgacaatctctagtgaggctttcgagctacccttggatgattgtgaagtgattgaaactgcagcagcgtccgaagtgattaaatat

SEQ ID NO: 819716 - DNA, 129 bp, Homo sapiens
tggaggcccggggggcccagctcccgtagggagccgtgggcgctcggtgcccgggccgggcagggaacttaggctgcggaactatgtcccggaggatgaggacctgaagaagaggagggtgccccaggc

SEQ ID NO: 819717 - DNA, 99 bp, Homo sapiens
tctcaggcgatccagataagaggaaatgagagccgggttttctgacttccaactcattagggaccaggacaatcatatcctgattcagcccttcctcca

SEQ ID NO: 819718 - DNA, 100 bp, Homo sapiens
agaaactatatttgtcgtacaaagctggcagacagataccctcagtttctcttcagcaacgggtagcagaattggaaaaaattaatgcagaatttttacg

SEQ ID NO: 819719 - DNA, 99 bp, Homo sapiens
tggactgcaacctggctgtacagctcctcaagtgcaacaagtcccacttccgaaaccacaagtttgccgatgaagagagaagggcacagttacctaagt

SEQ ID NO: 819720 - DNA, 99 bp, Homo sapiens
ccggcccccacctttcctcaggagtcatttctgttccgcacaggcctgctgaactgggtgctttatatagggaatatattattcgagtgcaaagaggaa

SEQ ID NO: 819721 - DNA, 100 bp, Homo sapiens
agaaccatgatggtcaattgccatgcacacttctggaacatccagtcatggataaaaatgagctggttcagaaggccaaactggccgagcaggctgagcg

SEQ ID NO: 819722 - DNA, 100 bp, Homo sapiens
tttttatttattctaatgagaaatgtattcatggttccaggttctgccggagacttccatttggcctcaatgtgaaattaaagtagaaaatcacatctac

SEQ ID NO: 819723 - DNA, 98 bp, Homo sapiens
cgtgaccgaggcgctgcagagcagttctttctacaacttcaacaggctgcactggaggtgtttgcagagaataatactctgagtaaattgcagctagg

SEQ ID NO: 819724 - DNA, 98 bp, Homo sapiens
cggccgcagcagcagcggcagtcacaggcacatcagcaaagaggcccagaggcagagctacacaaccatggaatccaaattaattcctgttctgtgcg

SEQ ID NO: 819725 - DNA, 100 bp, Homo sapiens
gcattgcagttgcgtgttgttcagaaaggttagaggatgcattgggctcagtgaaaattcatgaaactaagtcaccagccttcagcaatctgagcaaaga

SEQ ID NO: 819726 - DNA, 99 bp, Homo sapiens
gaagcacctggagacgatagagtgatacattctgatcttgcagaagaaagaggactcaaaattacttacaaatacactggaaaagggattacagagcca

SEQ ID NO: 819727 - DNA, 100 bp, Homo sapiens
ttggccgccagttcttctgcagccgaaggcggcatacttttttgatgcaccagagatggaccatctcccaacaactacagctactccaaaccaaacagtt

SEQ ID NO: 819728 - DNA, 100 bp, Homo sapiens
cagcatctggccaagtgtctggatgaacgacagcatgcacaaaggaatgtgggggagagaagtcctgaccagcttctggtagatgaattgagagatgcag

SEQ ID NO: 819729 - DNA, 100 bp, Homo sapiens
cttcgccctctccagccaggtacctaggcggggtttcaccatgttgcccagactggtcttgaactcctgagcttaagcaatccacctgcctcggcctccc

SEQ ID NO: 819730 - DNA, 100 bp, Homo sapiens
gaatgggaagccaagtgccatcttcaaaatttcaggtcttaaatctgacaagttggatggcttgaggactggtactaaaaggaaacgtgactgggaggcc

SEQ ID NO: 819731 - DNA, 101 bp, Homo sapiens
gtcctggagcacttccacaagtatatggggattccgcagatccggcagctttccgaaaggtcccccccgcctccagccagcctgtgcagacttgctgcctg

SEQ ID NO: 819732 - DNA, 98 bp, Homo sapiens
gagcccgcagaacctccacagtcaagaggacgatcagtcgcatcgaatacattcattcaaagaacttcatccaccgggatgtgaagccagacaacttc

SEQ ID NO: 819733 - DNA, 100 bp, Homo sapiens
ctttcctctatcataagtcgccaaaaacaaatggggcaggaaattgggaatgaattggatgaacaaaatggtggaatgaatcttacttgttgaatatctt

SEQ ID NO: 819734 - DNA, 100 bp, Homo sapiens
ctggtacgccacgagacccaaacccctgaagccgccatgcgacctctccatgcagtcagtggaagtggcgagcctcccactgaggatcatcttctgcaga

SEQ ID NO: 819735 - DNA, 125 bp, Homo sapiens
tgggcaaagttgctgccaaattatctgagactggataagatgaccttcagtgtgctgctcaaaaacagggtggttctcttcccaaagtggaagccaaattcatcaattatgtgaagaattgcttc

SEQ ID NO: 819736 - DNA, 100 bp, Homo sapiens
cctatagtgacacagcattctaaagtgaatgactccaacgaattaggtggtctgactaccagtggctctgcagagtccaaacccctgatacctcttcaaa

SEQ ID NO: 819737 - DNA, 99 bp, Homo sapiens
acatcctccaggcaatgagatttaccgcaagggcaccatctccttctttgagattgatggacgtaagaacaaggcttgtggaatatacccgtgctgatg

SEQ ID NO: 819738 - DNA, 100 bp, Homo sapiens
gtttgtagccctcgtccagacgccccaaacaaacagtttattttcttgaaaaggctccaggcttcggcttggaaaatcccaccgccaaaattgagcccag

SEQ ID NO: 819739 - DNA, 98 bp, Homo sapiens
tagaattgctttatttgcggaggaataaattacgttttctaccagaatttccttcttgtagtctattgaagggggaggtgaccatccactacaacaag

SEQ ID NO: 819740 - DNA, 100 bp, Homo sapiens
cctccaggaagaaattgttctattgctggttgggggacggttgtatatcaaggtcggattgtttgtgctgaacgaactgtcctcttgcttcagaagcccc

SEQ ID NO: 819741 - DNA, 101 bp, Homo sapiens
gaagtgtcttggcaagttatggcaatgtgatcgtcatcacagtcaactatcgacttggagtactcggaatgtttacccttgcggaagttgcatcacttaat

SEQ ID NO: 819742 - DNA, 100 bp, Homo sapiens
caagcattttcatgaaacaaccccaaataaaggaagtggaaccacttcaggctgcaaggtgtgactgttgtaaatctcaaggaactcttaaagagcgagt

SEQ ID NO: 819743 - DNA, 99 bp, Homo sapiens
ggccatacccaataaccaggtgcttggcaaaatcgagcgggccattggttggatttggtctagggagtcccagaaagaagtagaaaaagagagagaagc

SEQ ID NO: 819744 - DNA, 100 bp, Homo sapiens
atcaagaccggcgtggtgaagcggtggcatttttctgaagttgttcattaagacttcccagcattcctacagatataaataggtaagtaaatgaaatcac

SEQ ID NO: 819745 - DNA, 110 bp, Homo sapiens
ctttttcaagggagctgataaagaacttcttcccaaaatggcctctacagctttacgttccagtccaataatgagaaaaaaagtatctttaaatacgtatacacctgcaa

SEQ ID NO: 819746 - DNA, 99 bp, Homo sapiens
cccgaaccagacccctcagcaggctccggtgacgcctaggaaagaaaggaggcctagcatgttcgagaaggaggcagcctgagggagagggaaaagcgg

SEQ ID NO: 819747 - DNA, 100 bp, Homo sapiens
gattccaagtaactcttatttgtcctcctgcatatgcccaagaggattgggagtggaatggacaccagcagaagcaccacagttattcctgtagagatta

SEQ ID NO: 819748 - DNA, 100 bp, Homo sapiens
attttctactgtccctgcgcgaggatctaagcattgaagaacagtcagagtgtgctcaggatttctaccacaatgtggccgaaaggatgcaaactcgtgg

SEQ ID NO: 819749 - DNA, 122 bp, Homo sapiens
tccggagaagacaagggcatcgccgcctcagccgccgccgccgccgttttcgcctgcagctgctcaccggtatccgttacagcactgatgtgagtgtagatgaagtaaaagctttggcttct

SEQ ID NO: 819750 - DNA, 100 bp, Homo sapiens
tggggaacaagtgtgacctggaggacgaacgtgttgtgcctgctgaggatggccggaggctcgccgacgaccttgaccaagatcactccatggatgaaat

SEQ ID NO: 819751 - DNA, 100 bp, Homo sapiens
aagatgagcaggaatgttttgctacaaatggaggaggaggaggacgacgacgatggggatatcgagttgctggagaatgtaaccctaatccataaaccag

SEQ ID NO: 819752 - DNA, 98 bp, Homo sapiens
tgaaagaattcaggaagtagcagatgagctgcagaaaatgccaatctgagctagaaagtatccaggaagttctgggagattaccgagcctgccatgga

SEQ ID NO: 819753 - DNA, 100 bp, Homo sapiens
ttgaagagtttcattaccaaacaaaagaagaccaggagatcctgcatagccttcacagagagtccagttgccaaggtgaccaagtcagccatcggggtgc

SEQ ID NO: 819754 - DNA, 137 bp, Homo sapiens
caaaactgaaagaagtggatgatgtgcttggtggagcagctgcctgggagaatgttgactctactgcagcgcatggatttaggagaatgtaccaaaatccacgacttggccctccgagcagattatgagattgcaag

SEQ ID NO: 819755 - DNA, 100 bp, Homo sapiens
agaggacataccacctccaggatcaggatgcagagaacatacatatgatagttgagaaagacacatattctgatcatgaagaaataaacacaagttaaat

SEQ ID NO: 819756 - DNA, 98 bp, Homo sapiens
aaagttaacatctttgatatggctggacatcccttcttctatgagattcaggaagctgggtttgaaattctaacaaatgaagagagaaccatgacaga

SEQ ID NO: 819757 - DNA, 100 bp, Homo sapiens
gagcagctgcatcttttgttgttttaatgagtggggaaaattctgccaaaccaacgcagctttgggaagtttcaccagtgatcattaaagaatgggcagc

SEQ ID NO: 819758 - DNA, 100 bp, Homo sapiens
tctgctggtcgtagagaggagtaaagtcacacccaaaggtcagtgggaccatgtacaacactggaagacacgtatcccttcgcctggacaaggagcactt

SEQ ID NO: 819759 - DNA, 100 bp, Homo sapiens
acccaagcggatcgaaggttctgaggaaagatggaattcttgttagcaactctctggcagcctttgcttacattagagaactggtcatgctgctggagtg

SEQ ID NO: 819760 - DNA, 100 bp, Homo sapiens
caggtcttcaggaacctccgtgatcgatttggcattgatgaccaagattacttggcagagatctggctccacaaggaggcccagaaggagggctggagca

SEQ ID NO: 819761 - DNA, 100 bp, Homo sapiens
gagatacagtggcaatcaggttctcttttgttttcggctttgtgagaaaccttaccatcaaacacgatggccagcaacgttaccaacaagacagatcctc

SEQ ID NO: 819762 - DNA, 98 bp, Homo sapiens
acacctctagtggacccctcagtatatggatacggagtacaaaaacggcccttggatgatggagatgaccacctaagaaaggaggaacagaaaagtac

SEQ ID NO: 819763 - DNA, 100 bp, Homo sapiens
ccggcgctgacggactgggggcgccgcccgcgcccgggaccgacccctctgctcgcggccgcgcctttgagttggcccgccacaataaactgttgcagca

SEQ ID NO: 819764 - DNA, 123 bp, Homo sapiens
taagaccaagtcctcgctggactgctcagggtgccagacctcatcacacatcgttcatgtacatgatcgccggactctgcatgctgaagctctaccagaagcggcacccggacatcaacgcca

SEQ ID NO: 819765 - DNA, 100 bp, Homo sapiens
atgatgactggaaactctctaaagatgagtctagtggcaataccagtgtatgtgaaacatagtatcagctttaaggagaacagttcttgcggcagatttg

SEQ ID NO: 819766 - DNA, 98 bp, Homo sapiens
tcagttccttgtggagccggagctgggcgcggattcgccgaggcaccgaggcactcagaggagctgtgtagatgccacaaccttcctgtacttcagct

SEQ ID NO: 819767 - DNA, 100 bp, Homo sapiens
taacccagaaaatgatagaatgagaatgaagtatggaaatcttacaggctggtgttaaaggaacttcggaatcccttaaaggtgtgaaacgcaaaaagat

SEQ ID NO: 819768 - DNA, 100 bp, Homo sapiens
ggagagactaaatctagttatattgcaggacacagcattgttggttttgccatgtactattttacctatgacccgtggattggcaagttattgtatcttg

SEQ ID NO: 819769 - DNA, 99 bp, Homo sapiens
acagcccctactgaagtagaagtgatggatgaaaccaagattggtccaaaggaagattttttccattgtttgaaatgtaacttatgcctagctatgaat

SEQ ID NO: 819770 - DNA, 99 bp, Homo sapiens
ctgtcttaatactgcaaacaaatcatagtggaactaaggggaacttaatttactgaattctgcttggtcagaatcgtgatggcattgtgttcagcactg

SEQ ID NO: 819771 - DNA, 99 bp, Homo sapiens
acactatttagtattcttgaaggagagcttgaagcaagggaccttgttatagaagccttaaagggaggtgttgtagcaggaaatgtggctcatattctg

SEQ ID NO: 819772 - DNA, 100 bp, Homo sapiens
aatggggaaattatagacatcttcaagccagtgcgcaagcttactccatctggaagcatttctcttatcaaatcaatgcatttaattaaaaaccctgtga

SEQ ID NO: 819773 - DNA, 100 bp, Homo sapiens
ggggctgggagattctgcagagcttcagccgattcacacgggatgccgaggaatgtgacagggctgggagtgtggccacctgccaggccgtcatgcgtgc

SEQ ID NO: 819774 - DNA, 98 bp, Homo sapiens
tgacgtcatccttgaagccgaccagaatgatagccagtccctggagctggtgcacaggttccagttacgatatcagaagtgcttggtagccaggccgc

SEQ ID NO: 819775 - DNA, 98 bp, Homo sapiens
ttccaatgagtatggcagtgtcagctgtacagccacactaactgtgacaggtcagtcaccacgaacaggggcactcggcatgctgccccagcactgga

SEQ ID NO: 819776 - DNA, 99 bp, Homo sapiens
ttggaaatacttacactgtttcaataaaatcaagaactttaccttttgaccagttggtccagagggcagctgaagagaaacataaagaattctttgttt

SEQ ID NO: 819777 - DNA, 100 bp, Homo sapiens
cctgaagttacatttagagactgaaatcactgcaccttaaaaacaaaagattgagctgcactgtattcctcttatcacacagactttcagccaccacaat

SEQ ID NO: 819778 - DNA, 100 bp, Homo sapiens
ctcccgagtggctgggattacaggtcccaggtgtgacaccttcagcaggtctcagggaagatggcagccctaggggacattcaggagtccccttctgtcc

SEQ ID NO: 819779 - DNA, 100 bp, Homo sapiens
aagtacaaccgcttcgagaagcgccacaagaacatgtctgtacacctgtccccctgcttcaggaatgggtcttccagatgctatcgcgacagaacaatta

SEQ ID NO: 819780 - DNA, 100 bp, Homo sapiens
attgtcattctcagcatgataattgcattgattgtcacagcaagggaagatggagagttggaagaaggtgaattggaagatgatggggcagaggagaccc

SEQ ID NO: 819781 - DNA, 100 bp, Homo sapiens
aatcaacaaagcctttgaactgatgcattctggaaagaggagttaaagttcctcgtaattttcgcttgttggaagaacttgaagaaggacaaaaaggagt

SEQ ID NO: 819782 - DNA, 100 bp, Homo sapiens
cgagaacgaagtaggccgtctcgctctgggtctccaggcccgcgaccgtccgccagtcgtcccgagagacgtctcccacaacctgctccgggcgctggac

SEQ ID NO: 819783 - DNA, 98 bp, Homo sapiens
cgagcctcttctgataactcaggatttacttgaaatgaaaggagattccaacctacttcaggaccagagtaatgcggagaagcacgcagatggaatga

SEQ ID NO: 819784 - DNA, 100 bp, Homo sapiens
tcttcatattggcgatcctgttgtacatcagactgcgggttcgggctgaatactgccagcatgagactgctctgcagggcaatgtcttctctaacaagca

SEQ ID NO: 819785 - DNA, 100 bp, Homo sapiens
gatctggccaacaagacgcacccgtccatcttcgggatcttcgacgggcacgggggagagtgtcctgaatgacagctcatctacacagagtgaaactcca

SEQ ID NO: 819786 - DNA, 100 bp, Homo sapiens
gccaagtgcaggggccagaagacaaagtcaattccattggtggacttgctttgtgaagagacagttcatgaacaagagtctttcaggacctggacagtga

SEQ ID NO: 819787 - DNA, 100 bp, Homo sapiens
aacttattcctgtccggagacagcctaagggttcaaaccttgtactactcagctgatcacaagctgcttgatgggaacctactagatggacaggctgagg

SEQ ID NO: 819788 - DNA, 98 bp, Homo sapiens
tgttcatcaatgcctccaagaatttcaacctcaacatcacctgggctgccagtttctcagggaacagagttcagaggcagcagaaactggagttagtg

SEQ ID NO: 819789 - DNA, 100 bp, Homo sapiens
ttctgggaggaagcggcgagcgctggggtgggcccgggcaactacagcttctcctaccagctcgaacgcaaacatgcagatctttgtgaagaccctcact

SEQ ID NO: 819790 - DNA, 99 bp, Homo sapiens
aaaaggcgaagagcgatggaagaacaactgaaaagtgatgaggaactggcaagaaagctaagcattgatattcacccacaacacaagatcagaccccaa

SEQ ID NO: 819791 - DNA, 98 bp, Homo sapiens
cgctccaccaccatgtccggcttctccaacacggaggaggagcagacgctcaaccagcttctggtagaaatggatgatcctaagtgtgaacgtgaagt

SEQ ID NO: 819792 - DNA, 100 bp, Homo sapiens
aaggtgctaatccagtggaaatcaggagagggctacttctacaagtccgaacagccagtccagcaaaatgaacagcattgtctaccagaagcagttccag

SEQ ID NO: 819793 - DNA, 120 bp, Homo sapiens
gtcaagatgttccaggcacataaggaggcgattagagaggccaggaccgactgtgattcctccaccacctcactctgctccttccctgttgccaatgtctcgctgactaagggtggacgt

SEQ ID NO: 819794 - DNA, 100 bp, Homo sapiens
ccagaaaacggcgaggaagctgtggctctggttgaggatgtacagagagctcctggacaacaggtgcagcggaactgctgcctgacgctctgcaacttca

SEQ ID NO: 819795 - DNA, 100 bp, Homo sapiens
agttcctcaaccgcttttctacagtttgtgaggagaatgaagtccctgaggtgaagaaagaggagactttgctggatctggactttgatcctttcaagcc

SEQ ID NO: 819796 - DNA, 100 bp, Homo sapiens
tggagggcagatccttatcgccgacctcagggggtgatttcccagtacctacaatctacccatgctcccacacacagcgactataccatgaccttgctgg

SEQ ID NO: 819797 - DNA, 114 bp, Homo sapiens
aagaatttgctcgcatgcttacagagcttctctttgaattacatgtggcggccacacctgacaaactcaataaggtacttgatgaagaagcagaagtttttatagtcaaaatgt

SEQ ID NO: 819798 - DNA, 98 bp, Homo sapiens
catagctattcctgttgatggtgatgaagacagggtgaagttgaacaaattgctatgatgaaaccaaaaggccagactgaacacgatgagggtatgct

SEQ ID NO: 819799 - DNA, 98 bp, Homo sapiens
gggatcaacaggacctcagctcacagtgcatcaccgaccaccacaagtgcatactgatgattacatggaagccctggccaggctccacctcacggtga

SEQ ID NO: 819800 - DNA, 100 bp, Homo sapiens
taagaaaggaaatcaaaccgaaaatgtgtatatagttgatcatggccttgccaggttggtgacagtatattgtgagcatggtcataaagctgccaaaatc

SEQ ID NO: 819801 - DNA, 100 bp, Homo sapiens
tataagcccaggaagccgtcttcgaactcaggagaagcaagacactaagggcgactaccagaaagcgctgctgtacctgtgtggtggagatgactgaagc

SEQ ID NO: 819802 - DNA, 100 bp, Homo sapiens
gctgaatatgctgcattagacaaacgagagggccaatattggaagccatcagaacctcccaatcctaccaatgaaagatacacacttcaccagaattggg

SEQ ID NO: 819803 - DNA, 100 bp, Homo sapiens
tccgatgcaccctttttgtcagattatcaggatgaggaattcccttcttcaagttctgctaccagtgtggccgctccatcggggtccgcctcttgccctg

SEQ ID NO: 819804 - DNA, 99 bp, Homo sapiens
tgtgaccgatttaaactgcacataccatatgctggagagacattaaagtatgacgtccggttgtttgccttcgtgcgcttcaccaccggggatgccatg

SEQ ID NO: 819805 - DNA, 100 bp, Homo sapiens
gtgtacgtgcttggaaagacgtttcttctcttggcaagagagctctgcatcaatgcgccggccatagatcgcttgacaatatcttattgtcggagtagtg

SEQ ID NO: 819806 - DNA, 100 bp, Homo sapiens
cttgagcaagaaaaacttgaactcagtagaaaacttcaagactgcttttcaggaagccttggacgctgcaggtgataaacttgtagtagttgacttctca

SEQ ID NO: 819807 - DNA, 127 bp, Homo sapiens
agtctgcggaggaggagctgcagcaagcgggagaccaggagctcctccaccaggccaaagacttcggcagtgaaaactccaaagcttaacattctaaccactctagggagggaggatgggaggaaga

SEQ ID NO: 819808 - DNA, 100 bp, Homo sapiens
tgtcgtcaccacaaatccagtgaacaacgatggcattttgaaaacagcaaagagccagacccagggccctccagattaccccaggtttgtggagtctgtg

SEQ ID NO: 819809 - DNA, 100 bp, Homo sapiens
atgtcaaacacatcctttgtcatccagcactttgctgataaggactgctctacatctggcctctgccaatgggaattcagaagtagtaaaactcctgctg

SEQ ID NO: 819810 - DNA, 99 bp, Homo sapiens
cctgcctcagcctccccagtagctgggattacaggtgaagctagaggaaccagacctcatcagcccaacatcaaagacaccatcggaacagcagcgccc

SEQ ID NO: 819811 - DNA, 100 bp, Homo sapiens
gagctcagctttgaacagttccatctcttctataaaaaacttatgtttgaacagcaaaaatcggatattatcaactcactggtaacaacagtattcatgc

SEQ ID NO: 819812 - DNA, 98 bp, Homo sapiens
tgcacgtcggccccagccctgaggagccggaccgatgtggaaactgctgcccgccgcgggcccggcaggagcatgcttgagagttcaaaccggcttga

SEQ ID NO: 819813 - DNA, 100 bp, Homo sapiens
caaattccgaagcaatcttcctgctaaggccattggacacagaatccgagtggttgtacatcctggagacctgaagaattctgttgaagtcgcactgaac

SEQ ID NO: 819814 - DNA, 100 bp, Homo sapiens
ctttactcagctgagtgtgccacacaggtagccctggacggcattcagtgttttggtggaggtcctgattgccataagcagcctcacgtctccgctgctg

SEQ ID NO: 819815 - DNA, 129 bp, Homo sapiens
aggcgtttagagaaaatggcagacgatattgatattgaagcaatgcttgaggctccttacaagaagctggagaccatggccaaaatggaggtgaaaacctcacttctggacaatatgattggagttggg

SEQ ID NO: 819816 - DNA, 100 bp, Homo sapiens
gagctctacgcctcctacgtttacctgtccatgctcctgaattcagaccacagatccacagccacagtccagatatgtagcggttctgtaaaccttaagg

SEQ ID NO: 819817 - DNA, 98 bp, Homo sapiens
agagccagtcgggccaagagaagaggcggtggaggacacgacgcgcttaaaggggctgatggagttatgagaacaatgaacacagaaaaactcctaaa

SEQ ID NO: 819818 - DNA, 98 bp, Homo sapiens
aagatctccattcctgaggaggagaagttcagttctgcaagcaagtatgctgctctctctgttgatggtgaagatgaaaatgagggagaagattatgc

SEQ ID NO: 819819 - DNA, 100 bp, Homo sapiens
aaacagaggattttagtctatatgcttgtgcttctccaaaaacacccatccaggcagggggatatgctgtgttggagtagaagaacatcatgctgttgac

SEQ ID NO: 819820 - DNA, 98 bp, Homo sapiens
gggcctcggcttttggtggggagataaaatccattgctgctaagtactccggttcccagcttctgcaaaaggctctatcaaagaaagcaagagatgga

SEQ ID NO: 819821 - DNA, 100 bp, Homo sapiens
cactgaaagttgtaagctgcgaggtcttcatcacaggtttcagtgttgactggtgggctcttggagtgctcatgtttgagatgatggcaggaaggtctcc

SEQ ID NO: 819822 - DNA, 98 bp, Homo sapiens
tctccatcgtgaccaaggagaagggtcctgaatctgtgcctccttcccttcttaaagtagtgatgaaacccatagcaactgttggagaaagctaccaa

SEQ ID NO: 819823 - DNA, 98 bp, Homo sapiens
ttatttttgtggcaggcatctgtgggatctgtaatagaaatcaagctctattgccaagattggctcagatcctttaaaactggtacgtgatgctatgg

SEQ ID NO: 819824 - DNA, 100 bp, Homo sapiens
ggaagaagaggaagaggattatgaagatgacaaggatgatgatattagtgatactttctctgaaccagccatcgacgagtacaagccccaggatgctacc

SEQ ID NO: 819825 - DNA, 99 bp, Homo sapiens
ttgtcttcatgattcagctgatgctcttctggagcaatagtcgtggcagtgctgctgaatttgcagtttttcacatcatgaccaggattctggaagcta

SEQ ID NO: 819826 - DNA, 100 bp, Homo sapiens
gcaattggctgagaaactccttcctgcctttaacacacctactgggattccttgggcaatggtgaatttgaaaagtattggtaaaggttttcaaggtgtc

SEQ ID NO: 819827 - DNA, 99 bp, Homo sapiens
gtgtgccagcaacagagctgggtccgggtgtacggattggcagcagtagcactgattaatgctgcaatccagaagggtgttgctgagaagactgttttg

SEQ ID NO: 819828 - DNA, 100 bp, Homo sapiens
ctgagctttaagtgcaatgtttcaaatacattttcgagtctggcactaaagctttatcttcaagccaggatgaagggagactgggcaagactcttacgcc

SEQ ID NO: 819829 - DNA, 99 bp, Homo sapiens
gcggagcgtctgggatgcgctgggagcctaggatccccgacaggctaaagaacgtgccaatggaatggagcttgatgggcgtaggatcagagttgattt

SEQ ID NO: 819830 - DNA, 98 bp, Homo sapiens
aagactccacctcctggtgaagaaagcaaacaggaacttaggctgcggaactatgtcccggaggatgaggacctgaagaagaggagggtgccccaggc

SEQ ID NO: 819831 - DNA, 100 bp, Homo sapiens
gaagttatgaagatgcaaagcctgagagatggaaactactatgcatgtaaacaaatgaagcagcgctttgaaagggcatccgcttcgatcctgaaattcc

SEQ ID NO: 819832 - DNA, 100 bp, Homo sapiens
ccttactaaccacgaccatcaaatccgtgtcggagtccttacaggttgctatcaagatcatagataagacccagctggatgaagaaaacttgaagaagat

SEQ ID NO: 819833 - DNA, 99 bp, Homo sapiens
cagaagaagctgatacctgggggagataatgtaactgtgtgcaaggataacaggctgcagttcatggagctcgtttcaaagggcaagatctaaaactgg

SEQ ID NO: 819834 - DNA, 98 bp, Homo sapiens
attttccatatggatcatttccctatgttgctagaccagtacactggcaacctggtcatacaggctggtgagattggagagatgaaggatggagtccc

SEQ ID NO: 819835 - DNA, 119 bp, Homo sapiens
agcaatcgtgagaccgtctagtataagacagagcacgaaaggcatttttactgctgatctgggacatgagcgatgatgagaccatctgagatggccccgctgtggggctgacttctccc

SEQ ID NO: 819836 - DNA, 116 bp, Homo sapiens
atggcctcccaccattccaagcggagaggccgggcgtcttctgagagtcagtactatactggcaattgctggagaagattttgcaattgttgcttctgatactcgattgagtgaag

SEQ ID NO: 819837 - DNA, 95 bp, Homo sapiens
actccacttctatggtgagagagaggagtgcatcaaagattactcccaggtttgacagaattgtcttcgcagttttaccgacttagaagaacttg

SEQ ID NO: 819838 - DNA, 100 bp, Homo sapiens
ggctccaagacctcatcaacaattaaggctttatcctgtggataaacgcagagtgaacgagtttggggagtcctacgaggagaaggccacgcgggcgccc

SEQ ID NO: 819839 - DNA, 100 bp, Homo sapiens
caaagtcaaggtccccctgcagaacatacatatgatagttgagaaagacacatattctgatcatgaagaaataaacacaagttaaatatgactaagcaga

SEQ ID NO: 819840 - DNA, 100 bp, Homo sapiens
cacagtgcagcgctccgtgtttgcatcggtggacaaggtgccagcaacagggagctgccaccaccgtgtactgtgctgctgtcccagaactggagggtct

SEQ ID NO: 819841 - DNA, 109 bp, Homo sapiens
ggccctgcgccctggggcttcaggctctcagggggcatagacttcaaccagcctttggtcatcaccaggccacagcgtcctgtgtttactcatgaaaatattcaaggtg

SEQ ID NO: 819842 - DNA, 98 bp, Homo sapiens
tggtgcagcgggttgtgaaggacatcactaacgccttcaggaggaacccacacatctgatccccctgtgatctcggaagagaaagggccctgttaccg

SEQ ID NO: 819843 - DNA, 99 bp, Homo sapiens
tcagggtctcctcatcgagtagatgttataggaaggactagatcatggtcacccagtgtccctcctccacaaaggtattttcaaccaccaggaacttgg

SEQ ID NO: 819844 - DNA, 100 bp, Homo sapiens
tcctctgccaggcccagctgctggtctatgagaatgagcttcctgcctgacacagctcacttcaagaagtgcacaatgtcagaacgtggaattaagtggg

SEQ ID NO: 819845 - DNA, 100 bp, Homo sapiens
aggaggaaatgcagctttaattggacagaaatttgcagccaactcagatttaaaggaagaagaatttggtgttgatgattcttattctgaacaaggagca

SEQ ID NO: 819846 - DNA, 98 bp, Homo sapiens
tattccactggattgggaaagaccatggcagggaagtgttcgccagttactacatgaaaagataagagatgcttatactcacccacaatttgtgaccg

SEQ ID NO: 819847 - DNA, 100 bp, Homo sapiens
cgagtcagccgacccactactcagagtgagtgaccttggagttcgcagtatgtgcagtgcgtggccgggtgtttgcagctgatgctccgggtcaatgagt

SEQ ID NO: 819848 - DNA, 98 bp, Homo sapiens
cgagcccagagctccgatccctgcgcgggctcgagagctcgccccgaacgggggtcttcctcctccgccgttgacagtggtctggaactgaaagtgat

SEQ ID NO: 819849 - DNA, 98 bp, Homo sapiens
gccgggttagggcagacgctgtgctcgctggcaccccgaacgggttgcttcccccgctgcgagaggctggaccgcacagcatccccgtccacgagcag

SEQ ID NO: 819850 - DNA, 100 bp, Homo sapiens
tagatgcacaaagaaagcgcctttctccaggctcaaaagagtatcagtttgcgtgtgaacttggacatgggcaaagcggtgtatggatggatgatgatga

SEQ ID NO: 819851 - DNA, 100 bp, Homo sapiens
gaggtggagcaggccctgactccagttgagccccatatgggggttggcaggcagcagagaggcccctttcaaggtgttcgggtaaagaactcagtgaagg

SEQ ID NO: 819852 - DNA, 99 bp, Homo sapiens
ggagctatcggcgccgcggcaagagccaggtgaaaggtgtagcagtcactcggcctacacccacagcatcgaccttgtgaacccagcgacctgactgcc

SEQ ID NO: 819853 - DNA, 99 bp, Homo sapiens
caggagaagccgcccaaagaactgcttaaagaaagtggttattgtacaggtcatgaaccagattccctggagttcagtactgtaggaggatgggtatct

SEQ ID NO: 819854 - DNA, 100 bp, Homo sapiens
cctttctcatatccactgccaaagggaccatattccatccaaagaagtgcatttgatcgctgtgctaccttgtcacagtccgggggcgcttttcccattg

SEQ ID NO: 819855 - DNA, 101 bp, Homo sapiens
ctcaagatgtgccactctgactggaagagtggtgaatactggattgatcctaaccaaggatctgttgaagatgcaatcaaagtttactgcaacatggaaac

SEQ ID NO: 819856 - DNA, 99 bp, Homo sapiens
ctgcggtcacttaagttttccgtgtgcgggttgcaaggagcgtgcgtgcgtctggtcttctacattaagtccattgagccacagaaagtatcgacatta

SEQ ID NO: 819857 - DNA, 100 bp, Homo sapiens
tgcttctggcccctgtttaccactgtctccattactttgaacttttgaaggtttttcgttggaatatacgttgcacatttatggcgattctgagtgtgag

SEQ ID NO: 819858 - DNA, 100 bp, Homo sapiens
acaaatgggcgcatgacgatggagagcagggaaatggactgctatctccgtcgcctcaaacaggagctggtctgtttatgatggtgaagaacatggacgt

SEQ ID NO: 819859 - DNA, 100 bp, Homo sapiens
agttcacatccatgtgaaaggccagccaccagttcaggagcacttgggagtgatctaggaggaatgccccccacgccgcaggccgcgcagctcgctggac

SEQ ID NO: 819860 - DNA, 99 bp, Homo sapiens
gccaagggctccacacaccaagaccaaggatgaccagtgtcccagtgaaggaacgagtgaaggtgtctcagaactggagactggggcgctgccgagagg

SEQ ID NO: 819861 - DNA, 100 bp, Homo sapiens
ggccaggtgccacccttagtcactaccaacttcctggtgaaagaccaaggtccctggtgctgaaccgcctgcgtccagttgccagcgggggtgggaaagc

SEQ ID NO: 819862 - DNA, 100 bp, Homo sapiens
gtcggccggggccgcttcaccacttacgaaatcagggtcaaggaaagaccaagaagtgcagtggaacagctctgtttggctgaaagtactcgaccaagga

SEQ ID NO: 819863 - DNA, 100 bp, Homo sapiens
catttggcacagaagtgctgccaggagaaactaagttgctgaacgggccattctcctgagcagtgacggccagaacctggtcaccggaggggacaatggg

SEQ ID NO: 819864 - DNA, 98 bp, Homo sapiens
gtggtgattccagtgactggggatagtgaaggtgctacggtgcaggcgtggcggtgtttactggcgccttgatctatgccattcacgccgaggagatc

SEQ ID NO: 819865 - DNA, 99 bp, Homo sapiens
tttttggacctgaaacagaaattctggaacacctatatgccaactgggtacatggaaaactcagtctcctacagcgcaattgaagacgttcagctgctg

SEQ ID NO: 819866 - DNA, 99 bp, Homo sapiens
ctaatgaagtcaacgggtccagcatgacaggatggaagtacaagtgtcagcacctatatcttaaatctgacccaggccttgaaagacaacaagagtccc

SEQ ID NO: 819867 - DNA, 100 bp, Homo sapiens
agtacctgcccagaggggcccactcgctgtcccagtgagaaggctgagctctggaacaacgtatttgtgtcctctgtcaacagttgaaccaaattctgct

SEQ ID NO: 819868 - DNA, 100 bp, Homo sapiens
cccgtggccccttcctgctgctggacgtgatgcagtcaatggaagcccagatacgaacctaaactttcaaaacctgtcagtgattgggttccgaatcctc

SEQ ID NO: 819869 - DNA, 99 bp, Homo sapiens
taagggaagcttcagatacaggccagccaattgtgttttcacagcctgaaagtgatgaggttgaactcccaccacctgatcttggaccaagttctgcac

SEQ ID NO: 819870 - DNA, 100 bp, Homo sapiens
gcacttaaaactggagataaaatacttgagcctttgcaaaatgttagcacagtgctgcagaagcctaatcctctctataatcagaatacagatatggtcc

SEQ ID NO: 819871 - DNA, 100 bp, Homo sapiens
gttggatagactcatgcaacaattacaagatctggaggaatgcagggcggcaccttcctacttctgcccagccacagccctcccctcacagttgagcacc

SEQ ID NO: 819872 - DNA, 100 bp, Homo sapiens
ctactctggggcttcctgctccagctggttgatgataattagaagcatgctttccactgaacttcccgacaacatttgttatgcagaatgtctctgagtg

SEQ ID NO: 819873 - DNA, 100 bp, Homo sapiens
cagaacctgcgcagtgtcatccaggaggtgaaattcgatgctactgtgatgctgcccactgtgtagccactggttatatgtgtaaatctgagctcagcgc

SEQ ID NO: 819874 - DNA, 100 bp, Homo sapiens
ctactggacctcgttcagcagtcatgtaactataagcagcttcggaaaggagccaatgagggaatgtctgatcacagatacggggatggtggctctactt

SEQ ID NO: 819875 - DNA, 100 bp, Homo sapiens
gaactggaaaagaataaaaagggaaacttataagccatggtataaagaatttcagggattcagccccattgacaaaccttcagattctctcagtataggg

SEQ ID NO: 819876 - DNA, 100 bp, Homo sapiens
ggaagaaaatatagcagatatggaaggtgcactcaagggggccaggccaaccaccccacagcagccgtggtgacggagaagcagcagatgctggagcagc

SEQ ID NO: 819877 - DNA, 99 bp, Homo sapiens
ccggcttattgaacacatcagaatccacacaggcaacttcagttcatttatgcagaaggaaatatttgagcagccagagtctgtcgtgaacacaatgag

SEQ ID NO: 819878 - DNA, 100 bp, Homo sapiens
aactacgaacccctggacgggagagtctgccggcggagaatataaggatgctgttcgcatcatggcaaaagacttggtgcgcacccggcgctatgtgcgc

SEQ ID NO: 819879 - DNA, 98 bp, Homo sapiens
ccaggagcagttgctggtgctgctgaagtccctagggaaccaccaattcttcccaggcagcacacttctgcttttgttccttcatcaggacgaattta

SEQ ID NO: 819880 - DNA, 143 bp, Homo sapiens
agcaatgaaatcctgctttcttttcctcagaactactatattcagtggctaaatggctccctgattcatggtgaatctggattgggaaagtcgacattaatcaactcattattcctcacagatttgtattctccagagtatcc

SEQ ID NO: 819881 - DNA, 100 bp, Homo sapiens
gaacacccagcagtcccaggataaaagggcagaaggggaatgacagaggaagaggaagacaaacttctggcactgaaagacttcatgatgaaatctaata

SEQ ID NO: 819882 - DNA, 99 bp, Homo sapiens
actgctgcatctgcaacaacagcagttaatgtccatcagtgtgttggcagtttctgcttggatgagggactacctaaataatgttctcactttaactgc

SEQ ID NO: 819883 - DNA, 100 bp, Homo sapiens
gagcggcagcgggaccccagcgcgggcggcggcggctgggcgggagccccagaggttcaagggcagcaggaaagacgagatcctgggcatcgccaacaac

SEQ ID NO: 819884 - DNA, 99 bp, Homo sapiens
gaagagagaaagcagtgaacagattcatcttcccttctatatctgaaaggataagcaggctgtgctttccagagtccaggggcaagttcatcctactct

SEQ ID NO: 819885 - DNA, 100 bp, Homo sapiens
aggatacagaaggctggaggaaacgtcaggaatgcaccatatgtcctcatctgaaagtctctgcaggatggtctgactcacgcgagtggttttgagataa

SEQ ID NO: 819886 - DNA, 99 bp, Homo sapiens
ccagctgccggtcttggcatcttcgaagtaaggagaggggccctcctcgccaaagacagcctagagaggacggcaatgaagaagataaagaaaatcaag

SEQ ID NO: 819887 - DNA, 100 bp, Homo sapiens
gtgggccggacctgggagtggcaggtggcggccaaagccctggagatgggcgtgtttggcgcatatttcaacgtgctcatcaacctgagggacatcacag

SEQ ID NO: 819888 - DNA, 100 bp, Homo sapiens
acactggaacacacaccagccgcgttcctatatgatagtggactcttcagatcacgaccctggagaaaaagccagacttcagctgcctacaatgaaggag

SEQ ID NO: 819889 - DNA, 99 bp, Homo sapiens
ccgccgccgcggtttgtcgccagaaggaagatggcggatctggaggagcagttgtctgatgaagagaagggtggctttgcaaaatgttacgagatgaca

SEQ ID NO: 819890 - DNA, 100 bp, Homo sapiens
aacagtggcagcgcgacctggccagctgccgcgactgggaggagcgccggaacgccgaggcccagtctccatgcagtaaacagacccagcagaacctgcc

SEQ ID NO: 819891 - DNA, 107 bp, Homo sapiens
gcatggaagagcaggatgagaagcccccagagcccccgaaggcctgtgcacagatgtgccaggtgcagagattaaggagttatctgcaaagagggctattaatgaag

SEQ ID NO: 819892 - DNA, 109 bp, Homo sapiens
ggcccggcagtgctgcaaccgctacagcagccgcaggaagcagctcaccttccaccggttggtgttcgaggaagagacattgttgttcttggtgtggagaagaagtcag

SEQ ID NO: 819893 - DNA, 100 bp, Homo sapiens
cgagttcgaggagaggcaatcaggatacgaaccatgaagatgcgtcaacaagaacatcatcaagaaggtgatcgggcagaagtttgtgtacaagtttgtc

SEQ ID NO: 819894 - DNA, 98 bp, Homo sapiens
caagcgcaccctgagcttctccctgcggtcaagcagaggcgtgttcctgggacttggcttgagtggcgtcgtgcccaccatgcactttactatcgctg

SEQ ID NO: 819895 - DNA, 100 bp, Homo sapiens
aagtcctagagtccaataaaatcgctgcctcccagctgtttggatcacagagaggcatctctgccggccttgccacaaccgtgagaaggccaagggcctg

SEQ ID NO: 819896 - DNA, 98 bp, Homo sapiens
agcagagcttccaggacatcaagcccatgcgggaccagatcatccgcgtgaagcggttgggtatctacagccattggttgctgttcaggtcagctttg

SEQ ID NO: 819897 - DNA, 99 bp, Homo sapiens
ggaaacaaactttcacagactgaaggagactataattaaatgcgatatggtacccaaactggattataattccaggttaccgagttggttgttattact

SEQ ID NO: 819898 - DNA, 99 bp, Homo sapiens
cctgaggtgcggagtttcgtgagtttttactgactcgaggtactccaaagattcaggtttactcacgtcatccagcagagaatggaaagtcaaatttcc

SEQ ID NO: 819899 - DNA, 98 bp, Homo sapiens
ccaggaggacgactgggaccgggacctgctgctggacccggcctgggagaagcagcagcgcaagtggtccttacaccagattaatttatcttgaaatg

SEQ ID NO: 819900 - DNA, 100 bp, Homo sapiens
gctgcgggaaatcgggctgaagcgactgagtccgcgatggagatgtccagctcgccgctgtccaagaaacgtcgcgtgtccgggcctgatccaaagccgg

SEQ ID NO: 819901 - DNA, 100 bp, Homo sapiens
gtggactacgagttggcgcccaagtccagaatccgcgcgcaccgcggaatgtatcctgtcaggtataatgtcagtgaatggcaagaaagttcttcatatg

SEQ ID NO: 819902 - DNA, 98 bp, Homo sapiens
cctacttgcctaaatgaggaatgtctttcctaccatctaaaatacgaaggtttctggctggagaggtgagagacttcagaggctgccctttcttttca

SEQ ID NO: 819903 - DNA, 100 bp, Homo sapiens
acagagggccgagaaggacaggatcagatccagtataaaatactcacgcagaaggaagatgattgtgacgagattcagtgccagttagcgattccagtat

SEQ ID NO: 819904 - DNA, 100 bp, Homo sapiens
atggcgagtggctggtgcccattgggcagtgcctgtgccaggcaggctacgagaaggtggaggatgcctgccagggttcttctgtgtggcagttcagaat

SEQ ID NO: 819905 - DNA, 98 bp, Homo sapiens
gacttcaaactcgtctttggcgaggacggggcgccggcgccgccgcccccgggctcgcggcctgcagaggccattaactgtttgatgcgagcaatcga

SEQ ID NO: 819906 - DNA, 50 bp, Homo sapiens
cttgatgaagaggctttcaaagtacaggtcctgagtgagtcggatctgga

SEQ ID NO: 819907 - DNA, 99 bp, Homo sapiens
atgattccaacgccaccaattccaacctgcataagcagtactataatggatgtagacagcacaatttccagtgggcgttcaactccagcaatgatgaat

SEQ ID NO: 819908 - DNA, 100 bp, Homo sapiens
ttaaagagcctaatcaatatgttcaaactatactaaaacacctacagaatctttttgtaccaaggccctggccaacgtcaacattgggagcctcatctgc

SEQ ID NO: 819909 - DNA, 100 bp, Homo sapiens
ccctgaagcgacttttgtcaaggaaatgtctcaagtattcccatgtgttttaaaagcctgaagtcagtgagatgaaattcaacatcaagaatttgaagta

SEQ ID NO: 819910 - DNA, 100 bp, Homo sapiens
agtttacaggagagccgaccattttcagttgactttttcaggaaaatgattcagtttgaaaaggagcaacctctcctctcaggctggagcgcagtggcac

SEQ ID NO: 819911 - DNA, 100 bp, Homo sapiens
aggcgccgcggcgaggagcgagcgctgcgaggtggcggcctgagacttgtgcaccatggacaattttgctgagggagatttcactgtggcggattatgcc

SEQ ID NO: 819912 - DNA, 100 bp, Homo sapiens
atcgccgcgcagctcctggcctattacttcacggagctgaaggatgaccaggtcaaaaagaacccttaggagaaatcttgagagtggacagcaattgtga

SEQ ID NO: 819913 - DNA, 100 bp, Homo sapiens
tataagagagtagaaagccctgtgcctggtcccgtaccagtaaaatctcttcaaggaacatcctttgaaaataagatcttcttgaactggaaagaacctt

SEQ ID NO: 819914 - DNA, 100 bp, Homo sapiens
aaacgcctgccaatgctttctcatttggacccagactccagatcgggagatcatgtttgagaccttcaacaccccagccatgtacgttgctatccaggct

SEQ ID NO: 819915 - DNA, 98 bp, Homo sapiens
tctgacaaactaaagaaagacttgtgttacattcaaccctatgaaaagataaaggccaggggcttgcctgataatatatcttccgtgttgaacaaact

SEQ ID NO: 819916 - DNA, 128 bp, Homo sapiens
gctcttgtaaccacctaacaaattttgcagtactgatggcacatgtggaagttaagtcggtggtggggagcggcagctggcagagagtcaacgcccagacggctgtgagatccccgagatatgccgtg

SEQ ID NO: 819917 - DNA, 98 bp, Homo sapiens
tgtgtcctggttgagggtctccagggttctttggggcccgagaacaccttccaccatgaccacctcagcaagttcccacttaaataaaggcatcaagc

SEQ ID NO: 819918 - DNA, 98 bp, Homo sapiens
ccctctttgtcaacctcaataatgagctcactgatgtttggctgtggctccgtggcccaggttgtgctcagccggggcacccacggtggtttcctcac

SEQ ID NO: 819919 - DNA, 100 bp, Homo sapiens
tattctcctctttgatgtaataaagtcagctattagatatgagaaaaccatttcagaagcctggattaagcaaaccctcctggggcttgcccatagatgc

SEQ ID NO: 819920 - DNA, 100 bp, Homo sapiens
atttattaaatttaaatagattagtaactggcatagacaactatgggcaggaattgcattttgtgaaaaaagaacaagaattttctgcaaggatcatatc

SEQ ID NO: 819921 - DNA, 100 bp, Homo sapiens
tgaaaagaagaatccgtaagattcctggagttcctatcatgtacatttctaaccatagggaacagaaagaacagcttcaaaagatgaaagacttcgggtc

SEQ ID NO: 819922 - DNA, 99 bp, Homo sapiens
gggttttggccaaattgggcgagggcacaaaataaccacttaccccttctcaccgaggaagagcgggagaaaggcaaactgcctagttgggctagagct

SEQ ID NO: 819923 - DNA, 100 bp, Homo sapiens
gtctgttccagaccctgagctgattggttacacgcatggggagatactctggaggaagcatttgagcaatgtgcaatggccatgtttggttacatgacag

SEQ ID NO: 819924 - DNA, 100 bp, Homo sapiens
cgccctcaagagctggatttgacacatcaagggcagccaattactgagaaatgctttgaacatagtgaagaatgatttgatagcaaaagtggatgaactg

SEQ ID NO: 819925 - DNA, 100 bp, Homo sapiens
ctttgaggacacagcctcgctggaggcagtttctgatcacagattctgctggccatattctctactccaaagaggatgcaaccaaggggaaatttgcctt

SEQ ID NO: 819926 - DNA, 100 bp, Homo sapiens
ccgggggcgtcgccgctgccgtctccaagaccgcggtcgcccccatcgagagggtcaaactgctgctgcagattgaaatcatggcaggtccagaaagtga

SEQ ID NO: 819927 - DNA, 100 bp, Homo sapiens
tccttgaactgtgtatctatttcataggaaatcttacaggctggtgttaaaggaacttcggaatcccttaaaggtgtgaaacgcaaaaagatcgtagctg

SEQ ID NO: 819928 - DNA, 100 bp, Homo sapiens
agccatggagagcggcccgcgtgcggagctgggggcgggcgcacccccagatcttcttcagcagtatcgttctgctgtgtgcaaactagacagtgtgaat

SEQ ID NO: 819929 - DNA, 100 bp, Homo sapiens
actggctctgttggctgtgacatctattccatctgtgagtgactctttgacatggagagaatttcactatattcaggacccggtcagcccaaggagcagg

SEQ ID NO: 819930 - DNA, 100 bp, Homo sapiens
gtcgctggtcgtgcgacccaagcccctgcattcctgtacgggcaagaggcgcagatgttccagagattcctggagatcttactcttaagacgtgtggcag

SEQ ID NO: 819931 - DNA, 100 bp, Homo sapiens
gactagcttcttcgctaattttgacacagaaattcctttcctgctagaactttcagaatctcaggcgggtgaggaccctgctgggatctttgagcttgtg

SEQ ID NO: 819932 - DNA, 100 bp, Homo sapiens
ccaagcagtggcgaagggaatcgcaaggctcttccctgaccattttctactgtccctgcgcgagctgagtcagtgctgattctctcaaatagagcttgaa

SEQ ID NO: 819933 - DNA, 98 bp, Homo sapiens
gcggacgctggtgcggcgcggggtgagcgtcgaggaggcgcaggagactgaccgcaacggcaggagctgcagaaactggagggcagcagtggacctgt

SEQ ID NO: 819934 - DNA, 98 bp, Homo sapiens
tccaccaccagatctttctccgtggattcctctgctaagaccgctggcggggctccaatgtggctctgatgctggacgttcggtccctgggggccgta

SEQ ID NO: 819935 - DNA, 100 bp, Homo sapiens
aacacctgcggcctcactgggacccccaggaggtgaccctgcagcctgcagtgtacatcagaataaagaaccgtgcccagggtgaatatctgacagtcac

SEQ ID NO: 819936 - DNA, 100 bp, Homo sapiens
aatgtcgccttggaaacagatgaggagcctcctgatcttattggggggagtataaagaaaagaggggatctgatgataaaaaaagtagtgtgaagtccgg

SEQ ID NO: 819937 - DNA, 99 bp, Homo sapiens
acagagtaaactggtggttttcaaggcctggagagagacggagtggctgcttaatagggattgtcgatcagtcacaacaagcataccaagaagcttttg

SEQ ID NO: 819938 - DNA, 100 bp, Homo sapiens
tcctctggtaccgctgcgaagcttgttagtgtgactctggatccagatacagctcatcacgaactaattctctctgaggatcggagacaagtgactcgtg

SEQ ID NO: 819939 - DNA, 144 bp, Homo sapiens
cactacaactatgccaatttcctgaaggaccaaggtcggaacaaggaagcgatctaccactacagaacagctctcaacaaggagctgtacctccaaccagttcagttcctcctgttgccggggccccatcggttggacaacctg

SEQ ID NO: 819940 - DNA, 100 bp, Homo sapiens
ctcagtctgcggccaagactccgtcctgcaagatacaaggtctcgctgttctacctaggctgttctagaactcctaatgtcaagctatcctcctgcctcg

SEQ ID NO: 819941 - DNA, 100 bp, Homo sapiens
ttctattttccctcctcaaactgactttgcagccacggagagttacgccccatggtgtccatcctgccagcagactgattcagaatgggaggcttttgca

SEQ ID NO: 819942 - DNA, 100 bp, Homo sapiens
cctgctcacgagagaaaaaggaggaggagcaaatacgacatcctcatggagaagctttcggtcatgctgagcacacggactaaccacatagagacgctgg

SEQ ID NO: 819943 - DNA, 99 bp, Homo sapiens
gcgctggaggagcgaggcagctgtactaggactgggaacggtttgtacaatgacgacagaaacctgcttcgaattagagagaaggaaagacgcaaccag

SEQ ID NO: 819944 - DNA, 134 bp, Homo sapiens
ctcacaatctgtcttttgatgaaatcaacaaagcctttgaactgatgcattctggaaagaggtgcttgaggaatccaaagccctcgtgcgctgcaacatgaagatggagctggagcaggccaacgagagggagt

SEQ ID NO: 819945 - DNA, 100 bp, Homo sapiens
acccccgatgaagcagattcttttgagtacactggccatgaatgttctcctgggcagcgttgtgatctttgccaccttcgtgactttatgcaatgcatca

SEQ ID NO: 819946 - DNA, 100 bp, Homo sapiens
ctgcccttgaaatgaagctggacttggaggaaccacagaggacacattaataactggaagtaaaactgctgccccagtcacctcaacaggctcaacaaca

SEQ ID NO: 819947 - DNA, 100 bp, Homo sapiens
gggctccatcgagattcccctccgggacactgacgaggtcagagtggtgctgggaacaactgggccaaggggcactacacagaaggcgcggagctggtgg

SEQ ID NO: 819948 - DNA, 100 bp, Homo sapiens
agatcccatcagaggcaccccagacacaagcttggggcttccttggtcgcacccaccacctgcctgcccactggtcagccttcagggaccctgagcaccg

SEQ ID NO: 819949 - DNA, 98 bp, Homo sapiens
gaagataattacaagcggacacgggaatatatccgaagcctgaagatggttccaagtattccctatctagctctaagcgaaagacatgaggcctcagc

SEQ ID NO: 819950 - DNA, 100 bp, Homo sapiens
tgcagcagcgaaccaatcccaagaaatgtttcctgacatctttgtagcttcatgagtaatcagacatgcaaatagcccctcaggaatcaagctacactta

SEQ ID NO: 819951 - DNA, 99 bp, Homo sapiens
aagaagtcgcccatcgcagcagctcggttcgatggatgatgtactggattgtttttgctctctatactgtgattgaaacagtagccgatcaaacagttg

SEQ ID NO: 819952 - DNA, 99 bp, Homo sapiens
gaagaggtacgattccggagaatcgcgaggcagagcgggagcgcgcagccagggagatgcacttatttacatggaaccagagaaacaagtgatgtccag

SEQ ID NO: 819953 - DNA, 99 bp, Homo sapiens
ttagccgagacagacagagtaatggttgcattgaagcacttctgttaggaatttacaatttggctccggcagctgttgtgcctcccacaggtcctggaa

SEQ ID NO: 819954 - DNA, 100 bp, Homo sapiens
ctaacttgtttccctgggaatttggaggtgggttcgaaaaagcatgtggagaccccaaggcaaaaccatcctatcttatcgacaaaaacctggaatctgc

SEQ ID NO: 819955 - DNA, 129 bp, Homo sapiens
cccagccacccatcaaatcagagagaaggaatccaccttcttacgctatggcaggaatcagagatcattgatttcttcctgggggcctctctcaaggatgaggttttgaagattatgccagtgcagaag

SEQ ID NO: 819956 - DNA, 99 bp, Homo sapiens
aaaaatttccaagccagagtcatctgggtttgagaagatggtcagtggcatgtacttgggagagctggttcgactgatcctagtcaagatggccaagga

SEQ ID NO: 819957 - DNA, 121 bp, Homo sapiens
ctaatacccagggagcggaagacgcgaccaactccaggcacagcggagccggcgcggggtccacaaagtttggaaattttagcattcaggtgccaggaatgcagatgggacagccagtgcc

SEQ ID NO: 819958 - DNA, 98 bp, Homo sapiens
gcctcgcactccgcctcccccggctcagcccccggccgcggcgggacccgagagccgtcctggggaggtgtgctctgctctcaacctctgcgagtctc

SEQ ID NO: 819959 - DNA, 100 bp, Homo sapiens
cgccaccgtgcacatccgaatgggagagaagcaatactgcagagaaactgtatgactctaaccattctggaaaagtcttcaatgaacacccatttcttat

SEQ ID NO: 819960 - DNA, 100 bp, Homo sapiens
accctgcggggcagcttcagcagcaccgcggcccaggacgcccagggccagcgcatcggccacttcgagttccatggtgtgatgaatgcagactctgcta

SEQ ID NO: 819961 - DNA, 100 bp, Homo sapiens
cggtggtgctgcacagcttcacgcagctagaccccgacctgccgcgcccggagggatcgcttacacctgagacgaactacagaacagcacgtaccagagg

SEQ ID NO: 819962 - DNA, 100 bp, Homo sapiens
agctacaattgccaaacggaagtctttcattggcacaccatattggtggtttgttctggatgcagaaaccagagatctagtttctatccacacagacggg

SEQ ID NO: 819963 - DNA, 98 bp, Homo sapiens
cagcctcctggccccggcgcaggctgcccgtactgcccgtggcatgagggagccggaagagctgatgcccgaattaaacaaccaccatgtcgagcaaa

SEQ ID NO: 819964 - DNA, 100 bp, Homo sapiens
tctcctcctagtgcttcccgtctcagaggcaaactgtgctgtgattctcttgggaagaaccaatatgtttcgctttaaccatccaaaggaagccgccaag

SEQ ID NO: 819965 - DNA, 98 bp, Homo sapiens
ccccctgttcctgcagaacacagcgttgggccggagcactagcctcacggagaaggatctgaaagaagccaaggcgcggagccagcagattgcagccc

SEQ ID NO: 819966 - DNA, 100 bp, Homo sapiens
gtagtgaaactgcgtaggaacctgggaagaagaacatgttgagtcagaattgcttcatacctactcttctatcttgggaactgatattcttcttctcatt

SEQ ID NO: 819967 - DNA, 100 bp, Homo sapiens
ggcctagcacgtggaattcgcgaagctgccaaagccttagacaacctcatgatgatcctgagacttgtcttgttgctgctctgagcatctggaggaacag

SEQ ID NO: 819968 - DNA, 100 bp, Homo sapiens
tcagctgtatgtgaaaggggagctggtgggaggattggatattgtgaaggaagtccatgaagacccagggcaggccaccttgagcaccacacaccctgag

SEQ ID NO: 819969 - DNA, 98 bp, Homo sapiens
tgcagaatttttgactggagactatagtagagccgagactgtctgaagctgggcccacctgctgagggagaagtcgtccaagtcaagtggcccgatgg

SEQ ID NO: 819970 - DNA, 100 bp, Homo sapiens
accaagatgcggatccgggcctttccgacgcaggaggagggagacgcactgatgacatcgggccgctcctgcagctcgggcgcctcgcagtctccaggtg

SEQ ID NO: 819971 - DNA, 100 bp, Homo sapiens
atcagctttgactgctttatgaccatattaatgcagatgaggcgttctttgaaggactccatgaaagatgacagaagaagttattgtgatagccaagtgg

SEQ ID NO: 819972 - DNA, 100 bp, Homo sapiens
gttggaccttccggagcttctcagaagacagagggttttcttttgagtgtttgtcaggttcaactccagccatggtttcccagtggaggtcgattctgac

SEQ ID NO: 819973 - DNA, 98 bp, Homo sapiens
caaattgtgacatatgatcttctgtcagtcatttgccatcatggaactgcaagtagtcatctcgatgcactcctgaggggcttggttctgggaaaact

SEQ ID NO: 819974 - DNA, 99 bp, Homo sapiens
cagtgtttccacaatggaaccaattgttttacagtctgttccacatgatcattgtaataaggacttcctgagctaaaggagaaaaaaaatatggtggat

SEQ ID NO: 819975 - DNA, 100 bp, Homo sapiens
gcgtcgtcttctcttaaaatatctgtgacttcctccgcggagccacagtccatagaatcctcggccagcaggtcccctatgccaccaagggcaaccagtg

SEQ ID NO: 819976 - DNA, 100 bp, Homo sapiens
gtatcgtcgagaagcctatcatcgattgcttccaagtatgatcatcaggcagaagaagatcttcgcaattggatagaagaggtgacaggcatgagcattg

SEQ ID NO: 819977 - DNA, 100 bp, Homo sapiens
ctggactatggcatctatgttatcaaccagtgagaaagatcagtctaaagaaaaggagaagaaagtgaaaaaaacaattccttcctgggctaccctttct

SEQ ID NO: 819978 - DNA, 133 bp, Homo sapiens
ttgcaattcctgtgtttggaccattgagcagcagattggaaaagtgaatggtgtgcatcacattaagttaatcagctgtgttcagcgaatacttatgaacagaaggctccagcagcagtacaatcagcagcaa

SEQ ID NO: 819979 - DNA, 99 bp, Homo sapiens
agacgccaaggtaattttgacccagaggagcaatgatgtagccacctcctaaccttcccttcttgaacccccagataaacaggggtcacatgacgacag

SEQ ID NO: 819980 - DNA, 99 bp, Homo sapiens
gctgagaacagcaagcagttttggaagaggagcgctaagctgccggggaggttctctacttaaaagacaatgactactgatgaaggtgccaagaacaat

SEQ ID NO: 819981 - DNA, 100 bp, Homo sapiens
cggaactggagaaagctgaggttggttgaatctggcgatgtggaacccatggatatggagggctgactatatacaccatgttttttcctggcacatcact

SEQ ID NO: 819982 - DNA, 98 bp, Homo sapiens
atgaagcagctgcagccgcagccgcctccgaagatgggggatttctacgacccggagcacccgacccctgaagcagccatcagcagggaccctttcta

SEQ ID NO: 819983 - DNA, 100 bp, Homo sapiens
aggcactgctgagggggcgcgaggggaacggaggccagagctgcggaggccatgatggatttcttcaacgcccagatgcgcctgggggggctgacccagg

SEQ ID NO: 819984 - DNA, 100 bp, Homo sapiens
agatgatcctgtaagaatgttgcaaactgttgcaaagaaattcgacttcagtaatttgagtagtagttaccaccaccctgtgaatctgcctgcacagtac

SEQ ID NO: 819985 - DNA, 104 bp, Homo sapiens
ttccttgaactgcgggacgtgtagctgcagctgtggggtggaccatggaaacaggcatgcccaagagaatcgtaaatgcaaaaattgcttgccttgacttcagc

SEQ ID NO: 819986 - DNA, 98 bp, Homo sapiens
ctggatctgaagaagccaatttatcagaggactgcagcctatggccactttggtgctggagaatctggtaaaagcaccattgtgaagcagatgaggat

SEQ ID NO: 819987 - DNA, 100 bp, Homo sapiens
tccagagtgttactggcttacaaattggattgagatgaccggcaggaaaggccgcgtggtgtccaggcccgacgggacggtggccttcgagtcgcgggca

SEQ ID NO: 819988 - DNA, 100 bp, Homo sapiens
gacagcgccgccgccagtccaaggagcaggatgaagttcgacatgggagagacaagtgtggaatccatagcatgttccctttacatttagctgccctaaa

SEQ ID NO: 819989 - DNA, 110 bp, Homo sapiens
ttccagctggaagtaaccccttccgggagcctagatcctgtgctttactctgaagactcggtcgggattactgttcggaagaagaggatatcacatagcaccaattttac

SEQ ID NO: 819990 - DNA, 98 bp, Homo sapiens
aacaaaggcagtctgttgaggcatctggacaccacacacatcatcagtctgagacaaagcatggaggacacaagaatgggaggaaaggcggactctca

SEQ ID NO: 819991 - DNA, 100 bp, Homo sapiens
cgggaagaagcgctatgacctgtccgcgctggtccgccatgcaggaacacagcctattggatccctaggctcaatatgtcctaatagttatggaagtgtg

SEQ ID NO: 819992 - DNA, 99 bp, Homo sapiens
ccctgcacagctgcagcagttgctggagctggggagaggtgttttggaccaacaagctgccccagagcacatcagctatgtgccccagctctcaaacga

SEQ ID NO: 819993 - DNA, 100 bp, Homo sapiens
gtgcgaaaaaaggtgaaaggtattcttgtggatattgggcttgacagctgcaaggagttactgaagggattgcttggcattttgtacagaaccagttttt

SEQ ID NO: 819994 - DNA, 100 bp, Homo sapiens
cgaagcctaaattccaggaggccaagaccgaggataggtgtggccattggcgaccagatcctggacctcagcatcatcaagcacctctttactggtcctg

SEQ ID NO: 819995 - DNA, 100 bp, Homo sapiens
cggcaaaggcaagagtaacagcagcgccgtcccgtccgacagccaggcccgggagaacgcgttccttcacctcgggcagaataactttgcagaagcccac

SEQ ID NO: 819996 - DNA, 100 bp, Homo sapiens
agcatcaagctcgtgtccatcgaaatgccagacgtgaaagctgaagatgaagtggattttagagcaagttcaatttctgaagaagtggctgtagggagca

SEQ ID NO: 819997 - DNA, 100 bp, Homo sapiens
ggggcagtcccgggagaacctgcggcggccggagcgagagcagagctgacatctgataaagacatgtaccttgacaacagctccattgaagaagcttcag

SEQ ID NO: 819998 - DNA, 98 bp, Homo sapiens
cgatggtgttgtgagagatttctgcagtgaagattgctgtaaaaaatttcaggattggtactacaaggtgttacacataatattgcattacttcgaga

SEQ ID NO: 819999 - DNA, 98 bp, Homo sapiens
ttaacagacaagacacttttcagaaagacagctgctgtgacttactcgaagcctcgattggccacattttggtactacgccaaggttgagctggttcc

SEQ ID NO: 820000 - DNA, 100 bp, Homo sapiens
gaagctcaaggccgaagccgagcagaggatctaaatacaagagtggcctattgtgctcatcatcactgtaggggacctttgaaagagctgccggagaagg

SEQ ID NO: 820001 - DNA, 99 bp, Homo sapiens
ttctgtccatgtcagaaatcaaatattgaccagtggaataaggtaattgaacaactaggaacaccatgtccagaattcatgaagaaattgcaacccaca

SEQ ID NO: 820002 - DNA, 100 bp, Homo sapiens
cattcctgcttccgagttgccaggcgagaaccactgtctctgatcaacgtgcggaagaggaacgtggaatctggggaagaagagctggcgtccaagctgg

SEQ ID NO: 820003 - DNA, 98 bp, Homo sapiens
attttcttcaacaaagttgagatagtcagcatgttgcagcttaaggaaaccttggatccagctctagaacccattcttttgaaacaaatttttatcag

SEQ ID NO: 820004 - DNA, 100 bp, Homo sapiens
acccgcccgcccaaggtctctcgcgggcgggagaacggaaaactcccaacttcctggttgcagagaacacatcttagaagatgaaaaacctgaatctatc

SEQ ID NO: 820005 - DNA, 99 bp, Homo sapiens
gtgggttccgggagacccgcgggtctggctgcgagaggagtaagtccatgagtgatgtcagcgcagaagatgttcaaaacttgcgtcagctgcgttacg

SEQ ID NO: 820006 - DNA, 100 bp, Homo sapiens
catggatttcatccattatgctggctgttatgtacgcaggaggatgttgagaaagagaaggaaacccacagttacctcagcaaagaggagatcaaagaga

SEQ ID NO: 820007 - DNA, 98 bp, Homo sapiens
aagtctctttccagaggccaggctttatgggagcatgggttaccagcgacgcaccctgaactagtcagccggaagctgagtttggttcctggtgcaga

SEQ ID NO: 820008 - DNA, 100 bp, Homo sapiens
agaagcataatgacattgtggacagtgacagcgatgctgaggatcgaggaacgttgtctgtaatctatgccagcaattatgacaatgttagcagaccatg

SEQ ID NO: 820009 - DNA, 98 bp, Homo sapiens
taaaaaaaagcatcttaaagcaggctgcagatcttacacagattgtgtctgcagttcaatactgccatcagaaacggatcgtacatcgagacctcaag

SEQ ID NO: 820010 - DNA, 99 bp, Homo sapiens
ctctcaggacttccggtcgccatgatggctgtgggcggtaaacgcggttagtgcaagcatctgggccatcttcaatgaactaagcgtcttgtagaagga

SEQ ID NO: 820011 - DNA, 100 bp, Homo sapiens
cagccagaattggacccgaaaccatgcctcactgtcctaggcaagattcacagagttcaacagcgtgttacaattaagaaagctttgactctaaaatatg

SEQ ID NO: 820012 - DNA, 100 bp, Homo sapiens
catccttcgcttcatttattcagtgctctacagcatcgagctgatgtgtcctgcctctggaagctagctggggatgcttgtacctgtctgtatgctgtcg

SEQ ID NO: 820013 - DNA, 100 bp, Homo sapiens
aaagaggatgccaatgtcttcgcaagtgccatgatgcatgccttagaagtgttaaattcacaggaaacaggttaatagcaatgaacttacaaatggggta

SEQ ID NO: 820014 - DNA, 100 bp, Homo sapiens
ggacagtttctggaagttataacgctacacgaagaactaagaatattattagcacaagagcaccatactttgagggcaacggacagccaagacgtagatc

SEQ ID NO: 820015 - DNA, 99 bp, Homo sapiens
ttttaattactatggtgtagtcactggcccttctgcttcaaaaatatgcaaatttgtcccatcagatgaaaagaagaaacaaggttgtcaacgagaaaa

SEQ ID NO: 820016 - DNA, 100 bp, Homo sapiens
ctcggacgaggccgaccacagacatgagtgcagctgtgtgtccttctccatctacacggcctggggcgagcactgtgagcacctgagcatgaaactcgac

SEQ ID NO: 820017 - DNA, 100 bp, Homo sapiens
tgaagttgttcattgtttgtcaccacaaaaaggacaggaagcagttcagttctttaatgtgaccacactccagaaggagctgtatgactttgctaaggaa

SEQ ID NO: 820018 - DNA, 98 bp, Homo sapiens
ggccggagctgggtctggagacgccgtggcagcctgaacggagtgtgcgacggattgggaggaatttggataaagagagggcagtgctactacaacgc

SEQ ID NO: 820019 - DNA, 99 bp, Homo sapiens
ttcatctgagagtacttcttcaacaggatggatagaatgacagaagatgctcttcgcttgaatctgttgaagcggagcttggacccagcagatgagcga

SEQ ID NO: 820020 - DNA, 104 bp, Homo sapiens
gccgccgccgccgcggtttgtcgccagaaggaagatggcggatctggaggagcagttgtctgatgaagagaaggctttgaaatttctgaaaaccagaagaggca

SEQ ID NO: 820021 - DNA, 100 bp, Homo sapiens
gacagccttcatttctctgaacatactgccttatgggacagatcaattccatggaaaatgggagaccacctgatcctgcagactgggccgtgatggatgt

SEQ ID NO: 820022 - DNA, 98 bp, Homo sapiens
cagggccctgtctgctctgtggactcaacagtttgtggcaagacaagctcagaactgagaagctgtcaccacagggactctgtaagctcggctctgca

SEQ ID NO: 820023 - DNA, 98 bp, Homo sapiens
tgacccaatatgaatctggttccatggataaagctgccaatttcagctttagaaatacactggaaggttgctccttgagggcaggacagttcttatgg

SEQ ID NO: 820024 - DNA, 100 bp, Homo sapiens
atatttgaaagaagccatattttcagagaaaattcctgttccaagagaaaataaggcaacatcaatgaaggagagaagagccagccagaaattatccagc

SEQ ID NO: 820025 - DNA, 100 bp, Homo sapiens
gccgagttcaacatcctcctggccaccgactcctacaagcatggcacattacacttctgtggatttaaagtccttgcccctcagatcagctttgctcctg

SEQ ID NO: 820026 - DNA, 98 bp, Homo sapiens
taaactgttgcaagagaatgtgccgtcatatgaaaaagcccctgaagtcctggcccagaagccctacagcaaggctgtggattgctggtccataggtg

SEQ ID NO: 820027 - DNA, 100 bp, Homo sapiens
cagattggcagaaagttgatataggtggacttttttacaggaagagcattaagaagttggttttgaagaaccttaataatagcaatctcttttctcctgt

SEQ ID NO: 820028 - DNA, 100 bp, Homo sapiens
cggcggcggtggcatctgcggccatggcggcgactactgccaaccccgggaacacaacagtagatgagttaatgatgagactcatggctgcaatggagat

SEQ ID NO: 820029 - DNA, 98 bp, Homo sapiens
ttggttctctcattctgggcttttaccagaaggcatagaccggaacatgaacattttgcagtactgcccctcttccgacatgtggacgctctttgaaa

SEQ ID NO: 820030 - DNA, 99 bp, Homo sapiens
gggactcctctccgtctccctggaccgctgtgtaggcacctgagttaacggacgctaagcggggtaggggaagaagaagtgatttcctctgaagatatt

SEQ ID NO: 820031 - DNA, 98 bp, Homo sapiens
gaaagcacgggacactggctggtggaagatcatgttcgaatatgggaagttttaaagacagaggagattatgatgcatcattatcacagaagaaattc

SEQ ID NO: 820032 - DNA, 100 bp, Homo sapiens
accccttcttgccatcgccccagacatggggaacgcggcgaccgccaagaaaggcagcgaggtggagagcgatcaatgtccgagttaccaccatggatgc

SEQ ID NO: 820033 - DNA, 100 bp, Homo sapiens
cctgagaagatgtctgaatttttatggccttctcattcagctgctgctccgcatcctggaccccgcatatcccgaacacatcatctcagagttggagcac

SEQ ID NO: 820034 - DNA, 50 bp, Homo sapiens
cctcctgcgccggccttgcctcggaagctgaaacctatcaacactcttca

SEQ ID NO: 820035 - DNA, 99 bp, Homo sapiens
tcactgccggcgtctacgagtcagccaaagtcttgaacgttgagctttctcttaagtgtgccaagctgccatccaactttcttgagcattttttctcat

SEQ ID NO: 820036 - DNA, 75 bp, Homo sapiens
ttaatcctcaatttaagcctgatctaacccctagaaacaggtctattgaatgatggaactgtgggtatttttagg

SEQ ID NO: 820037 - DNA, 98 bp, Homo sapiens
atccgtgacacctggactctttcaggttctgaatttgggagcctctggtggagcaagtaattgggattcctacagtgaccatttcaccattgaaacct

SEQ ID NO: 820038 - DNA, 100 bp, Homo sapiens
aaacattatcgattatgtgccaaacattttgagacctctatgatctgtagaactagaactcttcttgaagactaatgctcagttgacaattcgttgcagg

SEQ ID NO: 820039 - DNA, 100 bp, Homo sapiens
ggcaccggaggctccgaggctcctgcgctcccgcgccgcgctcccctcgcccgcccgggccgccaggacttgtcttacaaggaccggcactggcatgaag

SEQ ID NO: 820040 - DNA, 100 bp, Homo sapiens
tccgtggagaaggccaacaaccccggggtgcgagaggtggtgtgcatgacactcctggaaaacagactatgtcttcagcagtggtgcagttatatgcagc

SEQ ID NO: 820041 - DNA, 99 bp, Homo sapiens
ctttatctactgggcggctgagctagagactgccggtgccttcatgggcaggactaggccgaaaactccccagcttttccttccctccatgagaaagaa

SEQ ID NO: 820042 - DNA, 100 bp, Homo sapiens
cggtgcctgagcccgtgcctgtcttcagatcttcacagcacagttcctgggaaggtggagccaccagcctctccctgggccatgaaatgacaagcattgg

SEQ ID NO: 820043 - DNA, 100 bp, Homo sapiens
ttggatcttgtaatgaaggatagaccaactcatgtagtattcaagaatactgattcttgctcacttgtggcatctgggctactcaccagaagatatcatt

SEQ ID NO: 820044 - DNA, 98 bp, Homo sapiens
cacaagaagaaaggcacagtgtccatggtgaataatggcagtgatcaacatggatctcaggaatcactctgcatgatgaacctgtcgactgggcggca

SEQ ID NO: 820045 - DNA, 100 bp, Homo sapiens
aacgaacagcatgtaaaggaaagattgccatatcaggacccgtgccagccccaacaaacttaaagattactgaagtaacatcagagggtttcagagggac

SEQ ID NO: 820046 - DNA, 100 bp, Homo sapiens
tggagagtgacatgcagttggatggcggtgactgcgtgggctatctgaagcagtgccggaagagaagggacatgttcagtgacgagcaactgaaggtaat

SEQ ID NO: 820047 - DNA, 100 bp, Homo sapiens
ggtgggggcttagcgcactggaggagcggcgggcttcagacaggattgtgcacctgtgcctgcgaaaggctgaccagaagctggtgatcatcaagcagat

SEQ ID NO: 820048 - DNA, 100 bp, Homo sapiens
ggtttcctggacccattccgactcaggtaatctgtaagtcagatgctccaacaggggatgttcttcttgatgaagctctgaagcatgttaaggaaactca

SEQ ID NO: 820049 - DNA, 101 bp, Homo sapiens
cgttgatatcggtggtaacgacggcctcagcaggcggggaagatgaaaggctctcgtggcattatccttcagtggggctattggactgacttttcttatgc

SEQ ID NO: 820050 - DNA, 100 bp, Homo sapiens
gtgctgtaaccacctcacagattccagcttcggaacaagagaccctggctattgagggcacctacattgacaagaaatgccccttcactggtaatgtgtc

SEQ ID NO: 820051 - DNA, 100 bp, Homo sapiens
cccagccctgcgtgaggccgcggagcgccagctcaatgaaagtttgctctccaaagctcggggaattgattccagctctgttaaactccggggtagttct

SEQ ID NO: 820052 - DNA, 100 bp, Homo sapiens
tctaatgcagtgtggatggagaattcaaaactgaagagtttggaaatttgccaccctcagcttcaagaccattgtggccaaggagatctgtgctgacccc

SEQ ID NO: 820053 - DNA, 100 bp, Homo sapiens
catggtgtcactgaatccaggaggagacccttctacgcctggttacccaagtgtcggctctgtgtgctccgggatggagcaggtgtgcagagggtgagaa

SEQ ID NO: 820054 - DNA, 100 bp, Homo sapiens
tgatccatcaggaggcaacaaagttcttctgctctcaattcagaatccgctttatccaattacagtggcaggtccgatcagaaaacaaagaaaagagtgc

SEQ ID NO: 820055 - DNA, 100 bp, Homo sapiens
aaatatgatgttgaaaattgtctggccaacaaggtgccagctgctgcccgtgctggtgccattgccccatgtgaagtcactgtgccagcccagaacactg

SEQ ID NO: 820056 - DNA, 100 bp, Homo sapiens
tgaagatcggccactacattctgggtgacacgctgggggtcggcaccttcggcaaagtgaaggttgctctaggtcgtaaccagcctttgaaaaaggagaa

SEQ ID NO: 820057 - DNA, 100 bp, Homo sapiens
cctcttattcagaatgtcccaacagaaacgctccagaggacaagtgctgtttgataaagtgtgtgaacacttgaacttgctagagaaagactactttggg

SEQ ID NO: 820058 - DNA, 100 bp, Homo sapiens
ctcataagacagaattaaatcagacaatacaagaactggaagagacactgaaactgaaggaagagcctggcaatcggtaccattagtggccatgcccgac

SEQ ID NO: 820059 - DNA, 100 bp, Homo sapiens
tgacatggaggatgatttcatgtgcgatgatgaggaggactacgacctgagagatggaaccatgtaaccaccacgaccaagaggccagtaaccaccagag

SEQ ID NO: 820060 - DNA, 100 bp, Homo sapiens
agcaaccaggaggcagtaaattcttcagctgctcggacagatgaagctccccaaggagctgcagatgatggtggtgctaccccagtacaggatgaacggg

SEQ ID NO: 820061 - DNA, 98 bp, Homo sapiens
gaagagtgtgtacctacagtgctgggacgctcaatgtcaattgctgcaagcttagtgagtgaagatacaaagaccaagtttttgaacaaaatgggcca

SEQ ID NO: 820062 - DNA, 100 bp, Homo sapiens
cgtggggccgcgctacaccaacctctcgtacatcggcgagggcgcctacggcatggtgtggcattcctgcatcgcatccggcagaacgtggccgactcag

SEQ ID NO: 820063 - DNA, 100 bp, Homo sapiens
ctttagtgaaatgggctaataatgctggcaaagtggaaaaatgtgcggttataactcgaaacgaactcatgctggaagaaactagaaacaccattacagt

SEQ ID NO: 820064 - DNA, 98 bp, Homo sapiens
aaggactacttcaatgttccttatcctctacctaaaattgatctcattgctattgcagactttgcagctggagttatggtacagcacctgtaaatctt

SEQ ID NO: 820065 - DNA, 99 bp, Homo sapiens
aaacatcattcacccatactgactagtttcacatctctttggtctgaaggggcgtctcgattacctgagctctctgaaggtgaagggccttgtgctggg

SEQ ID NO: 820066 - DNA, 100 bp, Homo sapiens
accgcttcctggagttcacgactctgagtgctgcacgaggtagaactaacattgaacttagagagaaattcatcctaccagagggagcatcccagggaat

SEQ ID NO: 820067 - DNA, 100 bp, Homo sapiens
ccttcctcaagcccctgctaatgctcatctgaaggacttggatgaagaaatctttgatgatgatgacttttaccaccagagtcatttgccctggctccat

SEQ ID NO: 820068 - DNA, 100 bp, Homo sapiens
ggctgcaggggccagagcgagtgcgcctcctgcccgcggaccgcggcagcccagagcagggacctggtggccttagtctttcaggtggaacggtgtgcga

SEQ ID NO: 820069 - DNA, 100 bp, Homo sapiens
acggtggtgcagcgttggggcgccagggctgcgttcccgtctcgcgtcccggactgagaagtgtactctgcctctaacctgcttgtgctgctcaatgacg

SEQ ID NO: 820070 - DNA, 100 bp, Homo sapiens
ctcacagctggatctaaattgagagaaatggagtcaaaatatttgaatggtggtacttccataagcatggcacatcttttattgagcaagtatctgtaag

SEQ ID NO: 820071 - DNA, 99 bp, Homo sapiens
accatggccctgagcatcttgactgagcagttctgcatcccaaggcctcacaagatcggcttcaccaccgaccctcggatggcccgctcctccccctac

SEQ ID NO: 820072 - DNA, 51 bp, Homo sapiens
ctcccaaggtgctgggattacaggtacgcaggccccatggagcgggcaggg

SEQ ID NO: 820073 - DNA, 100 bp, Homo sapiens
gtggctttccagttgtttgacaagagtggaaatggagaggtgacatttgacttaattcagtgcacaaatgagatgaatgtgaacatcccacagttggcag

SEQ ID NO: 820074 - DNA, 98 bp, Homo sapiens
cgtcttccccagccctgactgcaagccaagcacagatgtatctgagggcacagatggacctgcaaatgcaactggttgatcctgaagacataccagct

SEQ ID NO: 820075 - DNA, 99 bp, Homo sapiens
ctgcaaactcatcaccaggaaagacttcgaaactttgttcaccgattgcaccaatgccagaagaagctactatggaggaaactgggccagttttagctt

SEQ ID NO: 820076 - DNA, 98 bp, Homo sapiens
aatttgaaaaatgaagatgatgtagacactggactattagagcttcttcgagacaccttcacttccctgggctatgaagtccagaaattcttgcatct

SEQ ID NO: 820077 - DNA, 98 bp, Homo sapiens
ttacacactggtgctgactgcatttggtgtcgtgaaaactacccctaaaagccaaaatgggaaaggaaaagactcatatcaacattgtcgtcattgga

SEQ ID NO: 820078 - DNA, 100 bp, Homo sapiens
cctccttaccgcaggagctcctcatcgagaaacccaggtgagaattatgaagatgatgacctagtaaattctgatgaggttatgaagaaaccatgtccag

SEQ ID NO: 820079 - DNA, 99 bp, Homo sapiens
acagccccgacctttgatgagaactcagctgtccaggaacgtcaaggtcgtgggaaataaaaggcagttctacacagactgcagcaacggttgcatctg

SEQ ID NO: 820080 - DNA, 149 bp, Homo sapiens
atgacacgtacacagcaggactgagtgaagaagaacagctcgagagagcattacaagccagcctctgggaccgaggtcacatttagggcaggcaaaacataagggatatagccctcctgagagtagaaaatctaattctaaggcaccca

SEQ ID NO: 820081 - DNA, 98 bp, Homo sapiens
ccaggactcggggctctcacgctttctgctcaagtcctgtcctcttctgaccaaagagttcccgtgtcagtggctatgatgacacctcaagttatcac

SEQ ID NO: 820082 - DNA, 100 bp, Homo sapiens
tgatccagaagtccagagctgaggactgcctgtttgcagggatcatagacggtatttctatgtaaacgaacagtcgggcgagtctcagtgggagtttcca

SEQ ID NO: 820083 - DNA, 98 bp, Homo sapiens
acagtgacaccatgtcagcaaaacttcttttggggaaaaatttgagggactgtttcggacttatgatgactgtgtgacgttccagctatttaagagtt

SEQ ID NO: 820084 - DNA, 99 bp, Homo sapiens
gagaaagaaaccgcaaaaccaaaaccagatcctttcaaagtgtattctggaggtcgaatggtcacatatgaacatctccgagaggttgtgtttggcaaa

SEQ ID NO: 820085 - DNA, 100 bp, Homo sapiens
acatgcagattatatcgcatcctatggctcaaagaaagatgattatgaaggaatgcagctcatttcagaaaagcctgagacggaagctgtggtgaaggag

SEQ ID NO: 820086 - DNA, 98 bp, Homo sapiens
ttcccccaactccaaccctgctacctcgcccgggggcatcaggtttttctcccgctccagaaaaagaaaaccaattctgtgtcctcggaggaccacag

SEQ ID NO: 820087 - DNA, 100 bp, Homo sapiens
ttgcacgaggaattcttcttccattaataaatcaactcagtgatcctgattatattaatcagtatgtcatatggatggttactcactataaacaatatcc

SEQ ID NO: 820088 - DNA, 100 bp, Homo sapiens
aaaaaagaggaggaagtctatgaacccaaccctttcagtaaatacttggaagataacagcgacctcttttctgaacagatttcttataggaaagacgtgc

SEQ ID NO: 820089 - DNA, 98 bp, Homo sapiens
caaatgattaagattaacttcaagttggagtataccatgctgtgtctgttatgcggcaaagccgaagatactatcagtattctccctgatgacccccg

SEQ ID NO: 820090 - DNA, 100 bp, Homo sapiens
cggtaaccaaagtcacaaatcatcctagtaataaagtgaaatcagacccacaacgaatgaatgaacagccacgtcagacaaaacttgccaatggcacttc

SEQ ID NO: 820091 - DNA, 100 bp, Homo sapiens
ggcagccatagttcacaatgttgattctgatgacctcattagcatgggatccaacgacagtaagtacaggtatcaacttgaactgaaggatgactacatc

SEQ ID NO: 820092 - DNA, 100 bp, Homo sapiens
ctctctgtctgtgccatcgccaccaatggagccgtgcaggggggcggagcctactggcttggcaactcttgtgaaatttcatagatctcgtcgcttactg

SEQ ID NO: 820093 - DNA, 99 bp, Homo sapiens
caatatcatgcaagtgtggcaaatgattgagaggatccagaatccagatctctggaatagctaccaggcaaagaaaaaaactatggatgccaagaatgg

SEQ ID NO: 820094 - DNA, 100 bp, Homo sapiens
tgatctcctacagctggaccaagaatgaggacgagaaggagaagacgtttacaaaggacagcgacaaagacttgatggcagaaacggtggacacaagcga

SEQ ID NO: 820095 - DNA, 103 bp, Homo sapiens
ttgtggttgtggtgatagcagttgttgctggaattgttgtgctggagcaaagaatctgcagagtgttgtgcttagtaaaatgaattttgaatcttttgtaaaa

SEQ ID NO: 820096 - DNA, 100 bp, Homo sapiens
ataatgcagctgtataatgaatggtaaatgcaccggtttggattcaggcacagccccagtctgcctacagattgtggtatctgaacgggaactatttggt

SEQ ID NO: 820097 - DNA, 100 bp, Homo sapiens
caaatctgggaccagtctcggcaaatattacacttctctcctttttaatggatcgagaagtggcgttgcttgctgaaatggacaaagtgaaagctgaagc

SEQ ID NO: 820098 - DNA, 100 bp, Homo sapiens
agaagaccaatttccgagtccagaattaaatatgggtgatgttgagaaaggcaagaagatttttattatgaagtgttcccagtgccacaccgttgaaaag

SEQ ID NO: 820099 - DNA, 100 bp, Homo sapiens
ttggagaaaaagttcagtgggaagcatgtcgtctttatcgctcagttgcctgacctggtaccccagctggggacactctaccagttaatggaaagcagag

SEQ ID NO: 820100 - DNA, 100 bp, Homo sapiens
atctttttattacagaagaagattatcagggagaaaactggttgtcctggatgtttgaaaagttggtcgttgtcatggtgtgttacttcatcctatctat

SEQ ID NO: 820101 - DNA, 100 bp, Homo sapiens
ggaagtctataagctttgcaacagaattacagagtatgatgttgaagaaggcagactgcagccacttgcagcaggagatttatcagactcttcatggaag

SEQ ID NO: 820102 - DNA, 100 bp, Homo sapiens
ggccgggggcgtctttcagagcattacgctgaactagatgcagagcacgcccagaaggtcctggaaatggagcacacccagcaaatgaagctgaaggagc

SEQ ID NO: 820103 - DNA, 100 bp, Homo sapiens
tagtgtagtgtgcaagtattttcagcgagggtactgtatttatggagaccgctgcaggctccttctcctgaaaaagccgaggaggagagtgagaggcttc

SEQ ID NO: 820104 - DNA, 98 bp, Homo sapiens
tcagacacgtcggagcctgtgctggtagaggcgagaccagatattgatgatgttaagaagttcaaaccgggttacctggaagctactcttaattggtt

SEQ ID NO: 820105 - DNA, 99 bp, Homo sapiens
tgagaatggagtgggcaggaaagcagcgggactttcaggaaattccattcttcttctgacagccagacggttagagcttctccagattcatggctcacc

SEQ ID NO: 820106 - DNA, 145 bp, Homo sapiens
aactccccatcaggtcgcacagtgaaatcagaatctccaggagtaaggagaaaaagagtttccccagtgccttgtgatttggtacttgatgccgcacatgagaaaagtacagaatccagttcggggccgaaacgtgaagaaataa

SEQ ID NO: 820107 - DNA, 100 bp, Homo sapiens
tacttaggcagcgtctggaacgtgaagctcgagaagctgcagaacttgaagactattctaaggagtcattgggtagtgaagaagagagtggaaaggattg

SEQ ID NO: 820108 - DNA, 100 bp, Homo sapiens
tgaaagaattgactggtgacatgcagttgtccaaaagtgaaattttacgaactcagcttggattccttagcaccaccacagctcagccagaacagaaggc

SEQ ID NO: 820109 - DNA, 100 bp, Homo sapiens
agagaaaaagagagaaaaggagccagaaaagccggcaaaaccacttacagctgaaaagatcatcaatgctgtggtactgttgattttattgagtgccctg

SEQ ID NO: 820110 - DNA, 100 bp, Homo sapiens
ttctcgctgatcgcctaacttctactgacgaagcttggaagttgcagaaggcttgcattgatgacaatgttgatatggtgaagtttctggtagaaaatgg

SEQ ID NO: 820111 - DNA, 98 bp, Homo sapiens
gctgaggaatgactggactgtgcagatgctgcctggaaacattggccagaaagtaacactgaggcccatgtagaaaacatcaccttctatcagaatca

SEQ ID NO: 820112 - DNA, 100 bp, Homo sapiens
aagcagaagaagaaggtgtactcctttctattttaaagagccaagcctcagagaaagtgataccacaagaagccaagcatcacgccatgaagagcatgtg

SEQ ID NO: 820113 - DNA, 100 bp, Homo sapiens
cggacctttcccgctggcgcgcagcctcagctaggattacagtttaaagacaatttctgtgatcaagttgtcatttggaagattaaacccatttcacgag

SEQ ID NO: 820114 - DNA, 100 bp, Homo sapiens
ttaaagctaaagacatagttcctggtgatattgtagaaattgctgacggaatttcactcttattgcccaggctggagtgcaatggcgtgatctcggctca

SEQ ID NO: 820115 - DNA, 99 bp, Homo sapiens
gaacagtctcgttgctgcctctgtgtacgctgaggggggaggcaggatgacgcaaaacacggtgattgtgaatggagttgctatggcctctaggccatc

SEQ ID NO: 820116 - DNA, 100 bp, Homo sapiens
gccaactgtaagtctccaatacagaagaatgaaggctgcaatcacatgcagtgtgctaaggagtggcaaggaatttactatgccaaaaagaaaaacggag

SEQ ID NO: 820117 - DNA, 100 bp, Homo sapiens
agtgacagaaaaagtgagagttacagcgaaagttcaagccacattgctgtgaggaagcctgggctacatggagaagcccacatgaagaggcccatgtgga

SEQ ID NO: 820118 - DNA, 100 bp, Homo sapiens
aacgtgctgagatgaaactcagactggattcaatagtcattcaacaagactgtaaattcacctgtcacccagaatgccgcagcctgatccagttggactg

SEQ ID NO: 820119 - DNA, 98 bp, Homo sapiens
tggaacttgccctgtctcctcgcagatgagggtccaaattccaagcctgtagtgtccttcattgctggtttaactgctcctcctgggagaagaatggg

SEQ ID NO: 820120 - DNA, 98 bp, Homo sapiens
tacctaatagacctcctgatgctgtacttacagataccacctctcttaatcagttcaaatctgaacatcaatgatgtactagggaactactcattgac

SEQ ID NO: 820121 - DNA, 100 bp, Homo sapiens
ggggatcgtgagctccggcccgggcgagcgggtgcgtctgccgcagagtcggcacctgaaggacatggaggttatttcttatgagggtcatggatatccc

SEQ ID NO: 820122 - DNA, 99 bp, Homo sapiens
cccgtgcctgtcttcagatcttcacagcacagttcctgggaaggtggagccaccagcctctccttggttttaaaatcaaagatgggaaaatcggagaaa

SEQ ID NO: 820123 - DNA, 98 bp, Homo sapiens
cgacttggacatctgagctgtcactgccgaaaacaggccgcaagagagttggttgaatctggcgatgtggaacccatggatatggagggctgactata

SEQ ID NO: 820124 - DNA, 100 bp, Homo sapiens
gaggaatctgattccaagcaaaaaccaggtgctcttgatgatttcgataaagccaaaccctccccagcacccccttctaccaccacggcccctgatgctt

SEQ ID NO: 820125 - DNA, 100 bp, Homo sapiens
tgagcggcagacccggcacgcaggtgggggccggcggggtccgtggccagtcaggatggctaaaggtgaccccaagaaaccaaagggcaagatgtccgct

SEQ ID NO: 820126 - DNA, 99 bp, Homo sapiens
tccaaggaagaatttcctctgaagcaccggttatgaagacagtatggagtttccagaccatagtagacatttgctacagtgtctgagcgagcagagaca

SEQ ID NO: 820127 - DNA, 98 bp, Homo sapiens
ccatcaccaatgccacatcaggaggaacccctgagcagatcaggctgagatggaggaacctgctaaaatcgatggagatgcttctagcctcccagtag

SEQ ID NO: 820128 - DNA, 100 bp, Homo sapiens
agaccttgaacaagtctcgagagtggaaacaactctcacgtgaccaagaatatggcccaggtgaccaaagccctggacaaggccctgagcaccatggacc

SEQ ID NO: 820129 - DNA, 98 bp, Homo sapiens
tgtgtgctgcaacgtcaccagcagtaaaactgcatgatgaaacgcttacttatttgaaccaaggtgcttgaggaatccaaagccctcgtgcgctgcaa

SEQ ID NO: 820130 - DNA, 99 bp, Homo sapiens
ttctgccccagctccgtctcggcggcggcggcgtcgtctcggagatgcagccaagaaagccatcagtaaattgacaaccaggacagtaaagaagggtga

SEQ ID NO: 820131 - DNA, 98 bp, Homo sapiens
ttggtggccagcgccgcgcccggggccgtgcgctctcgggccactcggccgcaggcaatccttaggtgtcacatggccctctagtggaagggatgctc

SEQ ID NO: 820132 - DNA, 98 bp, Homo sapiens
gcactctgcgctttgagctactgggctgtgagctgaacggcattaagaaagaccctaagaagttattcgtgccaaggacagttatcattggtggtaaa

SEQ ID NO: 820133 - DNA, 100 bp, Homo sapiens
cttagtcaactacaccaacaggaatgcggcttcccccacatcagtcaggatcacactgtgaattaaccttggagagaaagtgttttaaaaagaagaatgg

SEQ ID NO: 820134 - DNA, 100 bp, Homo sapiens
ggaggcagccaagctcgtggcctgcctctgcgtgcttaacaagcacaagccctggctggagcccacctaccacggcatagtcacagagaacgacaacacc

SEQ ID NO: 820135 - DNA, 99 bp, Homo sapiens
ttcttagaagacttgactggtcttacattgctgcatcaagaaacccaagctgctgagcgtcacctgggaacttgttagaaatgcagaatcgtagtcctc

SEQ ID NO: 820136 - DNA, 50 bp, Homo sapiens
caacagagcctgatgagcatggtgtggaccactacaacgaggtgaagagc

SEQ ID NO: 820137 - DNA, 98 bp, Homo sapiens
atgttttaccaattttgaaggaaaaagttgcatacctttcagtgggtcggaagcagttcatgaggtttgagtgggcaaactacgcagctgaggccctg

SEQ ID NO: 820138 - DNA, 100 bp, Homo sapiens
gctgtattctgacgtttacaaaactacagagtattgaagcccctgggtgataatttgatggaggaaaacataaggcagtctgtaacaaactctatcaaag

SEQ ID NO: 820139 - DNA, 98 bp, Homo sapiens
gtcacaggagctgtagagaggaccccggtacatctgaaagccgggaaatgaaactggcagacctttcacttcgtatccaacaaattgaaacaactctc

SEQ ID NO: 820140 - DNA, 100 bp, Homo sapiens
ggatcaggctgactacgaggacgtgatagagatcatctcagacgaatcagtggaagaagagggcattgaggaaggtgtgcggccgcctgagcccgagcca

SEQ ID NO: 820141 - DNA, 100 bp, Homo sapiens
gagcgagcaagaaggagagcaattgaccttgaaattaaagagcgagaagctgaaaattttcatgagattaacagccatgcaacagaatggagtcccagcc

SEQ ID NO: 820142 - DNA, 101 bp, Homo sapiens
gcctctgaggcgctatggggcggtggaggagacggcttggaaaacggagagactggggagaaatgcagctgccatcttgctggatgagcagaacaagcggc

SEQ ID NO: 820143 - DNA, 50 bp, Homo sapiens
ggttaacagcccccttctcagttttcctgcatgtaaaagtcacatctgag

SEQ ID NO: 820144 - DNA, 100 bp, Homo sapiens
cctttcacttattcatctgtccagcatgactcatccccgggagtgttgaagaattcggtcaacagtggatgaaaaagaacaaaaacaacttcttatggat

SEQ ID NO: 820145 - DNA, 99 bp, Homo sapiens
cacacagctcagaacagctggatcttgctcacactctttcaagagaagcttccttgtggaatgcagtagccctctgggcctgggatattgtggttgata

SEQ ID NO: 820146 - DNA, 100 bp, Homo sapiens
ttgaatgagaaccctacttgcctaaatgaggaatgtctttcctaccatctaaaatacgaaggtttctggctgggtgaagactcgggatgaatcccgcagt

SEQ ID NO: 820147 - DNA, 100 bp, Homo sapiens
cgatgagctctcggattccttatgcagagtggccgacttgatctggtgctctcatgaaaatctacatcaggaggacctagaaaaggaaggaggcattgaa

SEQ ID NO: 820148 - DNA, 100 bp, Homo sapiens
ggatccacataatggagacattctgatggaatttgggcaccatcatgggagcagcattgctggaggactggtgaagggggctttgtctgttgctgcctct

SEQ ID NO: 820149 - DNA, 60 bp, Homo sapiens
ctctactccttctctgcctctcaggggctggcaaggtttaattgcttatggatgtcattc

SEQ ID NO: 820150 - DNA, 100 bp, Homo sapiens
atcaccccaggcatctgcttcagcaccgcctctctggtgctaagggccacggatgtccatcccctccaggtggatagatacttctcaagacatcacacag

SEQ ID NO: 820151 - DNA, 98 bp, Homo sapiens
agatctccaacgtcaacaaggccctggatttcatagccagcaaaggcgtcaaactggtgtccatcggagccgaagatcataaggcctatgggttttct

SEQ ID NO: 820152 - DNA, 100 bp, Homo sapiens
aaagagcttccggagcagcttcaggaacatgctgttgctccttgagggcaggacagttcttatggctttatccgttgcgtaagcacagagaggtctgcga

SEQ ID NO: 820153 - DNA, 100 bp, Homo sapiens
tggagagcttcatcaaaaatagtgatagctttgataacaggatgaagttaaaggaagtagatcgtacagccatgcaggcatggagccctgcccagaatca

SEQ ID NO: 820154 - DNA, 100 bp, Homo sapiens
gaatgtggtggaataagtgctagtatcggacatgatcctcatcttttatacactcttagtgctgtccaggagggagcaaaggagtttgctgctgctctca

SEQ ID NO: 820155 - DNA, 98 bp, Homo sapiens
gaccttccggagcttctcagaagacagagggttttcttttgagatccttgatgaatggtttggccggaccatcatccgctcctgcaccaaacttagct

SEQ ID NO: 820156 - DNA, 100 bp, Homo sapiens
tacaagccagcctctgggaccgagaagagaagctgaatttggacgacagccagtgggaggacatccacgttgtcaccggagcactgaagatgtttttccg

SEQ ID NO: 820157 - DNA, 131 bp, Homo sapiens
gacatctggtcccttggcattacttctatagaaatggctgaaggaaaacctccttatgctgatatacatccaatgaggaacatccagtcatggataaaaatgagctggttcagaaggccaaactggccgag

SEQ ID NO: 820158 - DNA, 100 bp, Homo sapiens
caagacctacggccacagcagcgtggaggagctcttgggagcaattccacagcccatgatgatgccatttggtcagttgcttgggggacaaacaagaagg

SEQ ID NO: 820159 - DNA, 114 bp, Homo sapiens
tgaagtgattaagaaagcagtacctgaagcacctactcctgttcctaaaaaagtggaggcaccaccagctaaaggtctcctttacagaaaggggcttggataaggaggaaagac

SEQ ID NO: 820160 - DNA, 100 bp, Homo sapiens
aagacgccaagatggcgacgagtcagtatttcgacttcgcgcagggcggcggcccgcagtacaggaatactcccccagttgcaagaggcgcaggaccgtg

SEQ ID NO: 820161 - DNA, 101 bp, Homo sapiens
cggaaccttccaccatcaagggaccgcagggccgggaagatttcgatgtcgatcattttgtgtctgactgtaggaagcgggtccagctggaagaactgaga

SEQ ID NO: 820162 - DNA, 100 bp, Homo sapiens
ctggctcgcgcctctcccaggacccgcctggctgcgagatatacttcccaagtaagaagcggaagaggagccgctggaaccaagacacaatggaacagaa

SEQ ID NO: 820163 - DNA, 98 bp, Homo sapiens
gggacatctgcttgggagagctggctttaatactctgactgtgcggtttccaacctagatgaggaaagccgatggacagtccactacactgccccgtg

SEQ ID NO: 820164 - DNA, 100 bp, Homo sapiens
atatgaacctgagccttcagtcaagaccctccagcttgcctctgtccctacctggctcgcaagctgacccttgccatccccatcatcgctgccatcctct

SEQ ID NO: 820165 - DNA, 100 bp, Homo sapiens
attccgacgtcttgaagacttccgagtagatttgcagaatgaagaagagtctggagaacctgaacaggctgcaggtgatgctcctccaccttacagcagc

SEQ ID NO: 820166 - DNA, 98 bp, Homo sapiens
gaagacctccgaaggaccatagaagaagctcattcacacagaagacccatttaatgatgaacatcaggagaggcaagaggtggaaatgttggctaaga

SEQ ID NO: 820167 - DNA, 100 bp, Homo sapiens
gactttcttccagcttctgctgtccttctttgtggagagcaaggtaaatattccggattggattgttgaccttcgccatgagttgacccacaagaaaatg

SEQ ID NO: 820168 - DNA, 100 bp, Homo sapiens
gacgtggcggcccagctgggcgagtatctggaggagacatgcacatgatggtgtccaagccagaacagtgggtaaagccaatggctgtagcaggagccaa

SEQ ID NO: 820169 - DNA, 99 bp, Homo sapiens
aaaatttggtcaaagactgggatgcttagatcaactttagctcagcaaggttcaaaccttgtactactcagctgatcacaagctgcttgatgggaacct

SEQ ID NO: 820170 - DNA, 100 bp, Homo sapiens
ttcaggaccagttggatgatgagacgttatttccatcaaaaattggaaacttggatttaactggccagaagcaggtattcaaagcagagaacaatccctg

SEQ ID NO: 820171 - DNA, 100 bp, Homo sapiens
cctcctggaggcagcacgggcgaccccccggcgcagcagcatcatcaaggcccctagcagtcttcttgatgctttggaacaacatttagcttccttggaa

SEQ ID NO: 820172 - DNA, 98 bp, Homo sapiens
aggtggaggagaagaagaccaggtgtttgaggaactgtggaagagggaaggcaagactccagggcagattgtttcagaaaagcagcttgaactgatgc

SEQ ID NO: 820173 - DNA, 100 bp, Homo sapiens
aggagaaaagacagcaatggaccgagggaggtggggaagacagggctccagctaccacaggacgggctctgggtatagccgttccagtcagggacagccg

SEQ ID NO: 820174 - DNA, 100 bp, Homo sapiens
gtcggcacagttctagagataggagcagagaacgatccaagaggagggtgttcctgaaaagccccatagtgattgagtcttcaaaaccaccgattctgag

SEQ ID NO: 820175 - DNA, 100 bp, Homo sapiens
ggtcttaatgaagaacaaagaaaacagttacaggacatagcaactctggctgatcaaagaagagcagcccatgtggggtgctgacctacggactgaacat

SEQ ID NO: 820176 - DNA, 98 bp, Homo sapiens
aagatcctggaatatataaatgtgttgtttgtggaactccattgtttaatgaatttggttccaaaatcatcttgcttaagccaattatcaaagtgttg

SEQ ID NO: 820177 - DNA, 98 bp, Homo sapiens
ctgctcctggccgcctgcatgcacagtggctttaagatcctcaactgccaaaaggcaatgggcttttgaacacttgcagcaattagaattaataaagc

SEQ ID NO: 820178 - DNA, 99 bp, Homo sapiens
acgggctgccctacctcaaggttctcaaggttacaagtgaacctgaaatgattggagctgaagttatttcagagttcttaattaatggcgaagaatcaa

SEQ ID NO: 820179 - DNA, 100 bp, Homo sapiens
gggaaaaatggaccaacttctttggcaagtggacattttactggctcaaagactgacttgcataccaaatgtgtggtggatgtggatgcaaacaaggtta

SEQ ID NO: 820180 - DNA, 99 bp, Homo sapiens
tgggtgcaaggacggcagatggcatccctgagaggtggtgactgagactagatgcgggtgcaggtaaaccccacagcccagtgtacccatgccctgttg

SEQ ID NO: 820181 - DNA, 100 bp, Homo sapiens
ttgctgtgaagttcaatgcactggaattagatgacagcgacttggcaatatttattgctgtcattattctcagtggagctcttttggaagaagaaagaaa

SEQ ID NO: 820182 - DNA, 98 bp, Homo sapiens
caggagtgtaaggaatgtgaccaagtttttcctgatttgcaaaggactgtcaccagggccagagagaactaaagttcctgtgtatgctgagataacac

SEQ ID NO: 820183 - DNA, 99 bp, Homo sapiens
ggcaacagaagaagccctttgaggagcactggaggaagcacaccctgtcctatgtggacgttggcactgggaaggtaccagctggaggatgagtctgcg

SEQ ID NO: 820184 - DNA, 98 bp, Homo sapiens
cttgcgctccgtagtggactccgcgggccttcggcagagcgcatcagcgaggaggtggggctgctgcagctccttggggaccccccgccccagcaggt

SEQ ID NO: 820185 - DNA, 128 bp, Homo sapiens
aagcttcagagttctctaaaaaaactggctgtgaataatatagctggtattgaagaggaaacgagctgcctgcaaatcagtgaatggctctcataagtacaaagggaattccaaagatgtgaaacctc

SEQ ID NO: 820186 - DNA, 98 bp, Homo sapiens
gctttgatagtcgtaccatatgcagaagtgtaaacaggaacatcgataagtagtgtaaaaacttgcacaatgaaatccgaagccaaggatggagagga

SEQ ID NO: 820187 - DNA, 98 bp, Homo sapiens
acgcacctctgtttgggggtcctcaggaactgtggaaggtgccatggacttgatcttgatcaattccctacctcttgtatctgatgctgaaacatctc

SEQ ID NO: 820188 - DNA, 100 bp, Homo sapiens
gcggatcggatcccgcagatcggagacggggcctggagattccagcaagattatggaagagcatagctacatacaaaaggagctagatttacaaaatggt

SEQ ID NO: 820189 - DNA, 98 bp, Homo sapiens
tgggggagccagggatgaacgatatcgatcagctgccatttacctgaagaacatggtgacacaatactggccagatcgagaacctccaccaggagaag

SEQ ID NO: 820190 - DNA, 99 bp, Homo sapiens
ggaaactgaggcctggagaggttaaagagacccgttcagagtcctacagtggcagacgatgacagtgagcctattttggggcaatggtttgaggagact

SEQ ID NO: 820191 - DNA, 152 bp, Homo sapiens
cgcagccacccgggagccagtcagaatccagttcccatcccgccttgagccagtcaccaatgccacaggaaagaggttctgcaaatttctgcaagaatggaaccaaaggagaagccggttcagttgctttttcaggctttgaaagaaagaga

SEQ ID NO: 820192 - DNA, 50 bp, Homo sapiens
cccgcgggacctgacagccgggtcagagggtgactatgaccagagcagga

SEQ ID NO: 820193 - DNA, 98 bp, Homo sapiens
cttttcagagacagttatcacatctgtgggagacgaagaaggcagaaggagccacgactatgagagtaaattgcaggccttgcagaagcaggttgaaa

SEQ ID NO: 820194 - DNA, 98 bp, Homo sapiens
gacagccaggcccgggagaaatgaagggcgccctaatggagatcatccagctcgccagcctcgactcggacccctgggtgctcatggtcgccgacatc

SEQ ID NO: 820195 - DNA, 98 bp, Homo sapiens
ctggacccagcacggagggacttctgcagagagagtgcgcagaaggattccgggagcacagttccgccgaggccttggtgtaccttgttgtagtgttt

SEQ ID NO: 820196 - DNA, 100 bp, Homo sapiens
ggcgaggccgggcggcgcttctgtcctcctactcggacccgcagtgataacaatccatattcctcatttggagcaactctggtgagggatgatgagaaga

SEQ ID NO: 820197 - DNA, 98 bp, Homo sapiens
gttcaatgtcatccccccagtggcccaggccacagtcaacttccggattcaccctggacagacagtccaagaggggtctctctttttggcatgtcggc

SEQ ID NO: 820198 - DNA, 98 bp, Homo sapiens
gcatccctgggctctgcggagaaggaacccgagcagcccccggccctgtggaggaagattttttatcaagcagaaatgcatcgaacaacgagaatcaa

SEQ ID NO: 820199 - DNA, 100 bp, Homo sapiens
acaaatacatcattctgcaaaaactggcaaatgtgtttgaacagcccgtagcagaacaaatagagctacaaagagccatccaggagcatcctgttgttct

SEQ ID NO: 820200 - DNA, 100 bp, Homo sapiens
cctacagcgatcccacattttatatgaccgggcagccttgataaatttgctgaagttccttatgtcaaatgagactgtacttttggccaaacacaacatt

SEQ ID NO: 820201 - DNA, 99 bp, Homo sapiens
cctcacctggtcaatgcagacggacagtacctcttctgcaggtactggaaacccacaggcacacccaagtttggtgcaagtgccaaagttgtgcatttc

SEQ ID NO: 820202 - DNA, 99 bp, Homo sapiens
cagattgctgaccaggggcttgagagctgggttctattttccctcctcaaactgactttgcagccacggagagggaactctaatgatccaggacaaaga

SEQ ID NO: 820203 - DNA, 100 bp, Homo sapiens
aaagaggccaaagatctgacagaactggttcagcggagaataacatatcttcagccaactgggtacatggaaaactcagtctcctacagcgcaattgaag

SEQ ID NO: 820204 - DNA, 100 bp, Homo sapiens
atccagttctgtgccattgacgagcttggcaccaactacccaaagtgagctcacccatggatgaggtgctagcctccttgaagcgtggtagttttcatct

SEQ ID NO: 820205 - DNA, 100 bp, Homo sapiens
gtataatcctctttgggcacagctggacgatgaccagttttcaccggaagcagatgccgccatgagcgagatgacggggaatacagcactgcttgctcag

SEQ ID NO: 820206 - DNA, 100 bp, Homo sapiens
cggcgcttcctgacgcagccgcaggtggtggcgcgcgccgtgtgcttggcttgtaatgagccagtgctgcgccgtgttgctgtggacaagtgtgcaagga

SEQ ID NO: 820207 - DNA, 98 bp, Homo sapiens
gtgctggtgtctgctgatgctgctctcggtctccacgcccctccctgctgtcacccagacccgcggtgcgacagatgtatttccactacacaaaattt

SEQ ID NO: 820208 - DNA, 100 bp, Homo sapiens
ttgtaaagtactccaaaagtttcagtgatactctgaaaacgtattttaaagatggcaagtatgactacgtggaagtcttcgatggagaaaatgaaaatgg

SEQ ID NO: 820209 - DNA, 100 bp, Homo sapiens
aagacgggatactgctcagcaaggtgttgtgaatttcccatatgatgatttccatgccattgcagtgtcaactaggcctcagttacttttcagtttgccc

SEQ ID NO: 820210 - DNA, 100 bp, Homo sapiens
tccaactttgcgacggaaatgtgtcatcgaaagccagggaatgaaagctactggttgattttaaagtgcctgggcctcacaggtttggagatgtcccaga

SEQ ID NO: 820211 - DNA, 99 bp, Homo sapiens
ttcacctgggtctgcacgccctttctggcagcctggcatcctcgctacaacctcattgttgtgggccgatacccagatcctaatttcaaaagttgtacc

SEQ ID NO: 820212 - DNA, 100 bp, Homo sapiens
aattggtgtgctgtattttgctattcatgtaagcacagtcttcacagtattgcagatttgtggtggtgacaaaccatttctggccccaaatgacttgcag

SEQ ID NO: 820213 - DNA, 99 bp, Homo sapiens
ttcctcaaataaggaaattgacacctggcgtggggttatggttttgtgaaattcacagatgaactggaacagaagcgagccctgacggagtgccaggga

SEQ ID NO: 820214 - DNA, 100 bp, Homo sapiens
atggacgtttccgggcaagagaccgactggcggagcaccgccttccggcagaagctgtgccggtggtggtgtgcacattgagccccggtatagacagttc

SEQ ID NO: 820215 - DNA, 100 bp, Homo sapiens
agataaagttgctttttactggccaagtcctgtatctgccatgtctgtggcgtccacctcaacaggctgcattcctgcctctactgtgtcttcttcggct

SEQ ID NO: 820216 - DNA, 108 bp, Homo sapiens
tctgtcaacggcaggggcaggcctagtttgactctgacagtcctcccactaagacttacagattccagtctgctgttagatgattattcatccaagttgagccccaaa

SEQ ID NO: 820217 - DNA, 98 bp, Homo sapiens
cccggcggcggcggcagcggggtccgggtccggagcgccacagttcttcacgtacggtaattttccattagaacagcatctgaaacaaattcacgagg

SEQ ID NO: 820218 - DNA, 98 bp, Homo sapiens
cgtagccaacaggtttcctcagaatggcctttacacacctcagaaatttatagataacaggatcatttcatctaagattacaccaggaagcaaggcgg

SEQ ID NO: 820219 - DNA, 130 bp, Homo sapiens
ttaatagatgacaatgatctctaccgatgggaagtccttattattggccctccagatacactttagatgatgaagtggttctgcagtgcaccgcaaccatccacaaagaacaacagaagctatgcttggc

SEQ ID NO: 820220 - DNA, 98 bp, Homo sapiens
caacagatttgattgcctccagtggagatatcatcaagtttaagctatgaagaaggacatccctcacactctgaaacagatctccttcagagacagag

SEQ ID NO: 820221 - DNA, 118 bp, Homo sapiens
agattttggtggaaagtttcattgtgtatgtagaagaccagaagtggatggagactctccactgtggtttgaatccacggggtattgatcaccctgcccatgctgaaggtattaaact

SEQ ID NO: 820222 - DNA, 100 bp, Homo sapiens
aagaaattgttcagttcttctcagaagtgtggaaggctgatgaccagatggagagagaccacagaaacccagacgagcaggcgaggcaatttttaattct

SEQ ID NO: 820223 - DNA, 99 bp, Homo sapiens
caaatgatagacattctgtcttccgaggaccctgggagcatgcttcaagccttagaagagccaaacaccagagcaccctagaaggtttaactaaaagaa

SEQ ID NO: 820224 - DNA, 98 bp, Homo sapiens
cagtatcactcgctcccttgatgatcttgaggttgtggcagcactgcctgaaggtatgagaccagattctaatctttatggttttccatgggaattgg

SEQ ID NO: 820225 - DNA, 100 bp, Homo sapiens
attggcaatccagtgccctataatgaagaagtgcagcttcattccctccctgttcgtgtggcctggacttaatgactcacttctaactgatagagtaatg

SEQ ID NO: 820226 - DNA, 131 bp, Homo sapiens
agcctgggggcctccccctatcccaacctcagcaatcagcagacacgggagtttgtggagaaggtctattatcctcccagtccacaacgctgaaccgtggctggacgaatgtttgaggtctgttttgcaac

SEQ ID NO: 820227 - DNA, 109 bp, Homo sapiens
gtcctgagcggccaggacgacgaggagcagggcctgactgcgcaggcagacatctggtccctgggcataacagctattgaacttgcaagaggggaaccacctcattccg

SEQ ID NO: 820228 - DNA, 98 bp, Homo sapiens
tgaccctttgtctgttgctgggtacctttcatttcgcactttctcctctgctgctctccagtgtctttctcgagaagcaggtggaaacatgagcattc

SEQ ID NO: 820229 - DNA, 98 bp, Homo sapiens
acgatcgagtccagggagtgatcagccagctggaagacacctgcaaaactatcgaggagaatgacatcttcctgggctgggaaaaaggagcttataag

SEQ ID NO: 820230 - DNA, 98 bp, Homo sapiens
gagcggctgtgtggatgtcggcgaagccgcgggcgagtggtctcggaaagagggtcgtggtcccgcacggatgcgcttgttgggagaaaccttggaga

SEQ ID NO: 820231 - DNA, 100 bp, Homo sapiens
acggcaggaggacccaggaaagggacatctgctcctccaaggcagagcggctcccccctttcgctccaaatgagaagatgaagcaagtgttaaagaagac

SEQ ID NO: 820232 - DNA, 100 bp, Homo sapiens
ccttagatacgcacaagccaaaacctttggggtgtcccgggagagcatcttcaacaaaatgaacagctctaacctggcctgtgtcttcgggctgaatttg

SEQ ID NO: 820233 - DNA, 100 bp, Homo sapiens
aggtgaatttccatgtcaacatagtcctggttaatttggagtggcccctggagtcagtttcctacaccatccgaggccccacccagcacgagctacagcc

SEQ ID NO: 820234 - DNA, 98 bp, Homo sapiens
ttggtcaaaagatatggcgccatatcaggcctctgcaaaggatagaaaatgaagtggaactcttaggagaacatcttccagtaggaggttttacttac

SEQ ID NO: 820235 - DNA, 98 bp, Homo sapiens
agtcattgatcccaggaaacaagagattgttgctggtctaaaattcccaggactccacagctttgcaccagataagcctggaggaatactaatgatgg

SEQ ID NO: 820236 - DNA, 100 bp, Homo sapiens
aatggaaatgagacaattgaagctcaagcagagcttacagtgcaagaaaccaccatcatgggttcgggtcccatagaccccaaagaacttctcaagggcc

SEQ ID NO: 820237 - DNA, 98 bp, Homo sapiens
cgagactctccttgcttggaattctgcccactctgcggagttagcagtcacgacctccagcacagatcactggggtgatcctgctggctgttggagtc

SEQ ID NO: 820238 - DNA, 100 bp, Homo sapiens
ttgtgagaggggatgctccatcaagcttggcagcttcagggatctgtaaaaaagagatggtatgttacttacggtcatgaactgatttggaagaacaggg

SEQ ID NO: 820239 - DNA, 100 bp, Homo sapiens
tatcaaagttcttaaggaccaacctcctaatagtgtggaaggtcttctaaatgctctcagtgcagtagtgtggttgacggtaattttgaagaagttccca

SEQ ID NO: 820240 - DNA, 99 bp, Homo sapiens
tggcatccatgaaccttgatatagttgacctgcttaaaaaggccaaggttatcctgaatacatgtctaacaattttccttgcaacgttagctgttgttt

SEQ ID NO: 820241 - DNA, 98 bp, Homo sapiens
tcggcccagtagtgacaatgcagataagtctcaggggatccagaactgcagccagtccttgctgggctgttcctgtccatgtgcctggtcacggtgct

SEQ ID NO: 820242 - DNA, 98 bp, Homo sapiens
ctgctcactatggaaatatcaatgtagccacgttgctgttaaaccgagcggctgctgtggatttcaccgcaagggtcaacggcagagacttatccaga

SEQ ID NO: 820243 - DNA, 98 bp, Homo sapiens
ttctttctgtgtctcgccctcttgcagtctgcagcttctcctgtcatcggaaatgccaggccaagagctcccagctcctccagcagccgacaggaggc

SEQ ID NO: 820244 - DNA, 98 bp, Homo sapiens
ggaaactgagggagtttccccggggagcggccaaccacgacctgacggacaccacccgggcggactgtggatattcataaggagaaagtggcacgaag

SEQ ID NO: 820245 - DNA, 98 bp, Homo sapiens
ggcgctgctctgtggggctctggccgcgcctggcctggccgggaccatggcctccggtgtggctgtctctgatggtgtcatcaaggtgttcaacgaca

SEQ ID NO: 820246 - DNA, 50 bp, Homo sapiens
cgggttcatcctacatttttgtgcaagagatggatcctgagcttgaaaaa

SEQ ID NO: 820247 - DNA, 100 bp, Homo sapiens
caggttctagaacaaagtatcctcagcttccagaggagattggaaaacttgaagataaagtggaatgtgctaataatgccctgaaagcagattgggagag

SEQ ID NO: 820248 - DNA, 98 bp, Homo sapiens
ggcgtcatcaagtcaccaagctggcaacggccaaaccaaggaggttcgagaaatggctgctactaccttaagcggtctgctacagtgtaactttctta

SEQ ID NO: 820249 - DNA, 100 bp, Homo sapiens
ttgaagatgacgggagctacttccaaattaaccaagatgaactagctcgagttctggttactctgtttgattctcggcatttactctaccaactgctctg

SEQ ID NO: 820250 - DNA, 100 bp, Homo sapiens
aacaatgaccacctggtagagaaataccgcattcttatcacaaagttttcggctttgtgagaaaccttaccatcaaacacgatggccagcaacgttacca

SEQ ID NO: 820251 - DNA, 98 bp, Homo sapiens
gctgaaaaggagcctctggaagagagggccttctcccgcttctctcctcctcctctccacgctggggggatcctgggaatgtccagaaagagaagtgt

SEQ ID NO: 820252 - DNA, 99 bp, Homo sapiens
gccggaggagtcagctgtgtgtccagaacgtgccatggagacgcttaacggtatatttgcttacttaaactaccatgttcctcgaacgagacgagaaat

SEQ ID NO: 820253 - DNA, 100 bp, Homo sapiens
tatcaatacagacattgagctcctccctgtgaactcagcattgctgcagctcgtgggtgctcagctttttaaagatgacatcaggtatctgttgacaatg

SEQ ID NO: 820254 - DNA, 100 bp, Homo sapiens
ggggaaactttggaaaagagcttggggccagggaagaccacagctgagccccagcaccagtcacctccagctctactgagatgaagaaagaaaaagaata

SEQ ID NO: 820255 - DNA, 98 bp, Homo sapiens
actccttgatgattttgaacagaacccagcaaaagtactttgactcaggagactacaacatggccaaagccaagatgaagaataagcagctgccaagt

SEQ ID NO: 820256 - DNA, 100 bp, Homo sapiens
tcaccgtcttctcgcccgacggccacctcttccaagtggagtacgcgcaggaggccgtcaagaagggctcgaccgcgatcatggaagggaagtggttgct

SEQ ID NO: 820257 - DNA, 99 bp, Homo sapiens
gtagttatggaggaggtgatggtggatataatggatttggaggtgatggctgtcatggaagttcagactttgagaccatcttactggaagttcctttta

SEQ ID NO: 820258 - DNA, 100 bp, Homo sapiens
ccctgttctcattcaggaaatctggaaaggagacttcaaagcttccatcactgggacagaaaggtcacatcgatcagacaacaacatggcaggaccccag

SEQ ID NO: 820259 - DNA, 99 bp, Homo sapiens
aagattgcgtttctcaaagtcctacagatacagaagtttacggtgagttttatcccgtgccacctccctatagcgttgctacctctcttcctacatacg

SEQ ID NO: 820260 - DNA, 101 bp, Homo sapiens
aacaagatgaagaaggaagggaagctgatcatgggcattggtcaccgagtgaagtcggtgcccctgggcgctgggattgctctagcctgtaagtataatgg

SEQ ID NO: 820261 - DNA, 100 bp, Homo sapiens
gtcagctgacaaattctatggtgtaaagttcagaaataagattgtgccttataacctgcctttgcctgggggagtggtgcctcgcatgctgataacaatt

SEQ ID NO: 820262 - DNA, 100 bp, Homo sapiens
tcgaggcggtgtcccacctgccgcccttcttcgatggaagtgcagtgttccggggctgcttccgcaggcccgacaacctttccctggccttacccgtgac

SEQ ID NO: 820263 - DNA, 100 bp, Homo sapiens
tttccatgtggacgctctttcaatggacgtgtccccgcgtgcttcttagacggactgcggtctcctaaagactagacgcttgaagcaaagctgccatccc

SEQ ID NO: 820264 - DNA, 98 bp, Homo sapiens
tggagggacaggatccggaggcgccagctcaaccaacactatgtggctgccgtgtaagagtggaactgtcgaatggtgaaaaaagaagtagaaatcgt

SEQ ID NO: 820265 - DNA, 100 bp, Homo sapiens
cagcataaaggccctatatttgcattaaaatggaataagaaaggaaatttcatcctaagtgctggagtagacaagggagaaaactggttgtcctggatgt

SEQ ID NO: 820266 - DNA, 100 bp, Homo sapiens
ggtgtggggttggtgtgattagcttcgcagtctggaaagctttaggagttcacagtgtaatatttgaagctgaagtctcaggagggagaagtggttatat

SEQ ID NO: 820267 - DNA, 98 bp, Homo sapiens
aaaagctgagatatgatgattttgaagtcatttcacatcgaagccatgatttaaatatcggcgttaagattgccatcacgaaagccaaagtggatttc

SEQ ID NO: 820268 - DNA, 100 bp, Homo sapiens
aggcctccccagccacgtgaaactagattaaaagctgctttgacccagcaacatcctccagttaccaatggtgatactgtcaaaggtcatggtagcggat

SEQ ID NO: 820269 - DNA, 98 bp, Homo sapiens
gattggcgagttatctttgaaactgtttcagaagcgaggtagaacagaatttgaaaaggagcccaggacagatgagctcacagtgcctgcactttacc

SEQ ID NO: 820270 - DNA, 100 bp, Homo sapiens
gaggaatgatccagcttattgttgcaaggagaataagcaagtgcaatgagggatgatgcagtgtgtgattgcagtcgcggacaaagtattcgatgccttc

SEQ ID NO: 820271 - DNA, 98 bp, Homo sapiens
agcaagaagtgatgatctcagatttagaagccaaaatgaagtttaatccctttgtgacttccgaccgaagcaagaatcgcaaaaggcatttcaatgca

SEQ ID NO: 820272 - DNA, 98 bp, Homo sapiens
cagctgtggaaagaagttgcaaaacactgggaagagcctaggctggatgtcttgatcaataacgcagggatcttccagtgcccttacatgaagactga

SEQ ID NO: 820273 - DNA, 98 bp, Homo sapiens
cagggccggcgcggcgatgatgaacaggttccgaaagtggctctacaaacccaagtcctgtgcctcctgattgctgagtgttcacctggaccttctga

SEQ ID NO: 820274 - DNA, 100 bp, Homo sapiens
taaactggatcctgatatggctctttgccgaaatgctagagaaatggtgtacttgaaggggaggtctggagacaagatgattcacgagaagaatattaac

SEQ ID NO: 820275 - DNA, 98 bp, Homo sapiens
ctagtcatcctttttaagctgcaaagaagcatttgcagacgttgtctcatgggtaccgcttgccaactttggaggttaacacagaaatctgcctcctg

SEQ ID NO: 820276 - DNA, 98 bp, Homo sapiens
tatggagttgtacttaaatgcagacacaaggaggaggcaaaacagattcagaatctgcagaaagcaggcactcgtacagactcaagggaggatgagat

SEQ ID NO: 820277 - DNA, 98 bp, Homo sapiens
tctgatggaagagagctctgtctggaccccaaggaaaactgggtgcagagggttgtggagaagtttttgaagagatgatgttgaatttgaagtatcat

SEQ ID NO: 820278 - DNA, 100 bp, Homo sapiens
gagctgggtaacaagccacctacacccccgctgcaccagttttcatcctggattgatatcagtaaatgccattatttagtggatttggacaccatgagag

SEQ ID NO: 820279 - DNA, 100 bp, Homo sapiens
caaatctctcattacaactcatcatttgatggtgtatggaaatgagccatcagtggcctatgtacataccacgccgggtctgccttcaggctgggaagaa

SEQ ID NO: 820280 - DNA, 100 bp, Homo sapiens
ggagattgacaatcaatgggccatcttggacgcgggtccatatggaatatttgctggtagggatgcctccagaggactggccacattttgcctagataaa

SEQ ID NO: 820281 - DNA, 98 bp, Homo sapiens
gttgccctgtctgtcgtctgccggccggcccggaccctggacaccatccagctggctttcaaggtttgggaagtattcgcacgacgagctctccatcc

SEQ ID NO: 820282 - DNA, 99 bp, Homo sapiens
tatcattgggaaggcatattccactgattacaaattgcagcagcaagaggtgctgatactcaaagaaggtttaagttgtctgatctctctataaattcc

SEQ ID NO: 820283 - DNA, 100 bp, Homo sapiens
ccttctgagttaatgtcaaatgacagcaaagcactgtgtggctgaataagcggtatatacagagcctgatggatttggtggaattccatgagaaaagccc

SEQ ID NO: 820284 - DNA, 98 bp, Homo sapiens
gctgcatatactggagatgtgtctgcacttcgaaggggtaatatagagaagactttctgggatctgaaagaagaatttcataaaatatgcatgctagc

SEQ ID NO: 820285 - DNA, 99 bp, Homo sapiens
ggagcgatgttgatctcaggaagcacaaagggaccttcctagctctgactgaaccacggaggcaactcatgcagcaattccagaaccccgacttcccac

SEQ ID NO: 820286 - DNA, 98 bp, Homo sapiens
gggcccaagcccccgtgaagatggtgtcctggatgatctccagagccgtggtcatctaacattcacaagggaatttgattcagattctcttagacatt

SEQ ID NO: 820287 - DNA, 98 bp, Homo sapiens
agcccgcggccggggacctggacaacccccctaagaagttccgtgccacggatgacatcgtgaaggttgaagtctgggatgtagtagacaaaggtgag

SEQ ID NO: 820288 - DNA, 100 bp, Homo sapiens
ctgagatccaagactgaccacatccctgctcatctcacctatgggaagctgctagctctaacagctatttagcagacatgacccacaagcagaagaagca

SEQ ID NO: 820289 - DNA, 99 bp, Homo sapiens
ggagaggaaccggtggcatcgtctcccgagcctgctcctgccgccgaggtgctggagaatctggtaaaagcaccattgtgaagcagatgaggatcctgc

SEQ ID NO: 820290 - DNA, 100 bp, Homo sapiens
atagattctcttgaccatgtgacatctgatgctgtggaacttgcaaatcgaagaaagacctgagctgtcttccttggcactgcctatggaggtgacaccc

SEQ ID NO: 820291 - DNA, 98 bp, Homo sapiens
ggggccagaggaggcagtgaaagaggccgtggagcagtttgaatcgcaagaccctgcagatggagaaggcccagagacattaagctcagcactctcta

SEQ ID NO: 820292 - DNA, 100 bp, Homo sapiens
gagctttgaagacctaagaggctagtggttcctggagctagtggttacctgaacagacaggtgctctagttcacagctataggggaacaggtggaatatt

SEQ ID NO: 820293 - DNA, 100 bp, Homo sapiens
ctctctccgctcgattttgtcaccgttatgtgggaagcgaatccactggaggagagcaggagtgttcagaagcaaatgaagatcctgcagaagaagcaag

SEQ ID NO: 820294 - DNA, 98 bp, Homo sapiens
aaattcctggaaaaagaagtccaagaagcaaaaaagggactgctaagaagataccaccaggatgtcacatgtacttcagtttgaggataaaagcagaa

SEQ ID NO: 820295 - DNA, 98 bp, Homo sapiens
gtatggcagtctggagtgaagatggacaggttgagaatgcttgcaccaagcttgtccaggcagctcagatgcttcagtcagacccttactcagtgcct

SEQ ID NO: 820296 - DNA, 100 bp, Homo sapiens
gctcctgcgcctcttctactgcactgtcctggtctgctccaaagagatctcagcgctcaccgacttctctggtggagatgaagaagagaatgatgagcca

SEQ ID NO: 820297 - DNA, 98 bp, Homo sapiens
agaatcaagttgcaatgaaccccaccaacacagtttttggtgggcaaacgcagaggcgggaacaaactagccctcaagacgggaatagtagccaagaa

SEQ ID NO: 820298 - DNA, 100 bp, Homo sapiens
tccagactgaagaccgagtctggtccattgctatcagcccattactcaggatgacactcctgtccaggacactaaaatgtgaagaacagctcattgtgcc

SEQ ID NO: 820299 - DNA, 100 bp, Homo sapiens
ggagacgccgccgccgccgcctccagggtgggcgcctttcgccgtggacgccgaccgtccgggacgagggtctgcggaagagggagctgctgaaggagct

SEQ ID NO: 820300 - DNA, 100 bp, Homo sapiens
tggagatatgcccttagttggagctttgtctatcttcttccttaggaaaccacgtttagtgggctacagatggcatggcatctaaaaccttacaatgctt

SEQ ID NO: 820301 - DNA, 98 bp, Homo sapiens
tgcaatgaaaaatttggcagataatcattgggcaaaaacttgtgagggcgaaggtcgtattgaatggtgttgtagtgaaagagtttctagccaaagcc

SEQ ID NO: 820302 - DNA, 99 bp, Homo sapiens
acaagaaattctccagagtggctagtctcaaagcgcatattatgctacatgaaaaggaagagaactctactacgatcgcgggaaccaccatgagtttgt

SEQ ID NO: 820303 - DNA, 100 bp, Homo sapiens
ccatatgctgcttgcccagcttgggaaagaggaggctgctgcaaaggaccgatcggcgggtttacccaaggtccagcctagcccctaggcaccatgtcgg

SEQ ID NO: 820304 - DNA, 100 bp, Homo sapiens
agtgtcccgtccagccgccgagcagggtgcttcaaggatgaccgcatcgtcttctggacttggatgttctccacctacttcatggagaaatgggctcccc

SEQ ID NO: 820305 - DNA, 98 bp, Homo sapiens
gagtctctgtccgggggcctggctaaggaaaccctattacctccagatgtggaagatgtcaagtttgtgatcaactatgactatccaaacagctcaga

SEQ ID NO: 820306 - DNA, 100 bp, Homo sapiens
aaacaatgctttctcctcgagaaaagattttctattacttcagcaacagtccttcaaagagcaatggtggaacaaagcggcaaaagatatcccatcaaaa

SEQ ID NO: 820307 - DNA, 100 bp, Homo sapiens
tactgtttgatgaatttaaaggaggtagaccaggaggatttcctgatcatccacatcgaggttttgaaacagatgcgtattggatagcaatgaatagttc

SEQ ID NO: 820308 - DNA, 100 bp, Homo sapiens
gtgggcgaacgagtgacattggctgacatcacagttgtctgcaccctgttgtggctctataagcagtttgctattggctccctgatggacgattacttgg

SEQ ID NO: 820309 - DNA, 98 bp, Homo sapiens
gaaggtgcacctaacaggcagccactggcaaatgagcttgtcaaggtggctttggagaaaagtctggcaactgtggagacccagaacccatctttttc

SEQ ID NO: 820310 - DNA, 100 bp, Homo sapiens
ggcgagctgagcacctgtagtcaatcacacgcagaccagagtgaactccgagcaggaacacttcctcattgtcccttttgggcttctttacagtgaagtg

SEQ ID NO: 820311 - DNA, 100 bp, Homo sapiens
aagtgctcctgcagctatcattcatccagttaagaatttgaagaagtgtgtgcacaaaggaacgagttgaagcagttaatatggctgaaggaatcattca

SEQ ID NO: 820312 - DNA, 98 bp, Homo sapiens
cctggaggagcgcatgcaacagaagtatgaggccagccgggaggacatctacaagcgggttccagagagattcctggaagttgctcagatcacattac

SEQ ID NO: 820313 - DNA, 100 bp, Homo sapiens
gtccatctgaaagccgatgtggtcatcagtgcctttggttcagttctgagtgatcctaaaggaatcacatgcagcccaactacagattcttatggaattc

SEQ ID NO: 820314 - DNA, 100 bp, Homo sapiens
gctggtggcggcggcggcggaggcgacggcagcggtcccagcggcagcagcagcggcgggaggagcctccgggcttggtaaaatgcggctgacaattccg

SEQ ID NO: 820315 - DNA, 98 bp, Homo sapiens
aatgctcctgtctgactgcactggacatgacagggaaaccagtttacactcttacatatgtgaaatcaaatacattgcccatctcgctgcagtctata

SEQ ID NO: 820316 - DNA, 100 bp, Homo sapiens
tgggcatcgccttgctggcctacgtcgcctatgttcctcctgctgatcaagagaagctttttatccagaagttacgtcagtgttgcgtcctctttgactt

SEQ ID NO: 820317 - DNA, 100 bp, Homo sapiens
gctaatgatgctatagcttctgcttgtctctatattgcctgtagacaagaaggggttcctaggacatttaaagtctggccgggaccttcaacagtatcag

SEQ ID NO: 820318 - DNA, 99 bp, Homo sapiens
aacagtgattcacaggtgtttccctctttgaatttgaccactgaaaaacacacatactatctgactgcagattctcccaatatattggaagagtggatt

SEQ ID NO: 820319 - DNA, 143 bp, Homo sapiens
cctacagaaacgttgtttggtcccgattccggaaaaggtgccaagagcttagttgaactccttgttcagcttgttggtttagatgaggagagttcagagtttatttgcagaaacacctttgaccacccataccccaccacaaa

SEQ ID NO: 820320 - DNA, 100 bp, Homo sapiens
gatcttcaggctgcaacaaggagaagagccatggaaacaggaggaagaattcccaagccaaagctttccagaaactggcgatggaatatgagaggagccc

SEQ ID NO: 820321 - DNA, 98 bp, Homo sapiens
aatgtttgaacaaactcgaagaacagctgtggaaagaagttgcaaaacactgggttgaagaagaggatgaacttgaatctggagaccaagaggatgag

SEQ ID NO: 820322 - DNA, 98 bp, Homo sapiens
gaaactgcagacatgcttcaggctcctctctttactgctgaagctttacttcgagctcatgtgtctgtatgaaagcatgtggtcaatttctgctgctc

SEQ ID NO: 820323 - DNA, 100 bp, Homo sapiens
agagaattggaagctaaagctaccaaagacgtagaaagaaatcttagcagttacagccaagttctacttctgaatctatggatcaactactaaacaaaaa

SEQ ID NO: 820324 - DNA, 100 bp, Homo sapiens
tttgtctccttcgacttggagtctttgtccaggacgatctgccgacaccccaggccatcgagccccaggccatcgtgcagcaggtcccagcccccagtcg

SEQ ID NO: 820325 - DNA, 98 bp, Homo sapiens
ggttcaagcggtggcgggagcctgtcaggtgtggaatatcaaacaaatgattaagttgacacaggaacatatagaggccctattggacaaatttggtg

SEQ ID NO: 820326 - DNA, 100 bp, Homo sapiens
gccgcccgcccgccggggccccgctgtccgccgcccgccgccgctggagctagaggctgaagccgacgtagcttctctgaacagacgcatccagctggtt

SEQ ID NO: 820327 - DNA, 101 bp, Homo sapiens
cttttttgagaaaggaaggaatatatcctgactgattatactgatgaatgttctgttggcaatccttgtggaaatggaacctgcaagaatgtgattggagg

SEQ ID NO: 820328 - DNA, 101 bp, Homo sapiens
ggaggaaacacctcaggacacggcctacaacaccaagaggagaactatgccatttttgggtcaggactggagatctcctggatggagttggattaagacag

SEQ ID NO: 820329 - DNA, 100 bp, Homo sapiens
gcataggtgctgggttcatttaccctttggtcggaacgcctacaaggagaagatgaaggagctgtcggtgctgtcgctcatctgctcctgcttctacaca

SEQ ID NO: 820330 - DNA, 100 bp, Homo sapiens
tatgatgtgtatgcgaggcggaacctgcagaggggctacacagcaaaggagctcaatgtcagctttatcaacgaaatgggcctgagtttacagtggctgt

SEQ ID NO: 820331 - DNA, 98 bp, Homo sapiens
acaactgctacatctgttggaggagccaactagcatggaagtgcaggtctgtttatgatggtgaagaacatggacgtttcatggagaagcttgaaact

SEQ ID NO: 820332 - DNA, 98 bp, Homo sapiens
cagaagggcgcctgcccgttggagacacttgtcgcccgaggagttccaggaagtgtttgggatgagcatcgaggagtttgaccgcctggccctctgga

SEQ ID NO: 820333 - DNA, 99 bp, Homo sapiens
acagactgtggtgcctacccccatcactgcttccctcagccataacagagatgcccgagtggtaaaagacatggcaacaggaaagtctaagggatatgg

SEQ ID NO: 820334 - DNA, 100 bp, Homo sapiens
atccaaacagaagcttctcagacgtgcacaccatggatctggaatgtgagcatttgatccgccatatgttggtgttagatcccaataagcgcctctccat

SEQ ID NO: 820335 - DNA, 100 bp, Homo sapiens
ttcaatgctgaggaagcccacaatattgtcaaagaggtttattccctgctgtcctgaatcttgcttctaatgctcttatcacgaccaatgcaacatgtgg

SEQ ID NO: 820336 - DNA, 98 bp, Homo sapiens
tggaccttataaattttttgagaagcatctttcaagtgtttactcatttgcctgtgaagctgtacttcacaaaaacagtagaggagccgtcaaatcca

SEQ ID NO: 820337 - DNA, 98 bp, Homo sapiens
taacatccaggccgtgcttctgcctaagaagaccgagagtcaccacaaggccaagggcaagtgatttgacagacacgatgaggcgagtggtacgacag

SEQ ID NO: 820338 - DNA, 100 bp, Homo sapiens
cgccgcaactacagccgcgaacagcacggcgtggccgcctcctgcctcgaagacctgaggagcaagggcctgccgaggaggaactgaagacgaagaacat

SEQ ID NO: 820339 - DNA, 100 bp, Homo sapiens
tgagaagtatcgtaacccccaaagagaaaaagaaatgatgcaattgtatatcagagtgtcatggagaaactccagctgggcccagagattctgcagcggg

SEQ ID NO: 820340 - DNA, 98 bp, Homo sapiens
gccgcctgccgagcctttgatgtccccaagaggtactataagatctccgtggtgctcatgtgctttgtggtccccacgctggtgccctggtacatctg

SEQ ID NO: 820341 - DNA, 98 bp, Homo sapiens
cgcagctgcccgccgagacgctgcaccagaatcaactggcagtataattgaagttctgagtaaaatagattcagaaggaggagtttcagcaaatcata

SEQ ID NO: 820342 - DNA, 100 bp, Homo sapiens
tttggagccaggtagagtgaagtcctacagagttatcaggttccagaccctgccttctcttctgaaaggtaacaaatcggaagtacccaaaactgaaaga

SEQ ID NO: 820343 - DNA, 100 bp, Homo sapiens
cacaagaaaatcaaaagaaacttttgcccttatcagtaacacctgaggtacatcaggaacgtctctatcaagaatacaatttcagcaaggctgagggcca

SEQ ID NO: 820344 - DNA, 99 bp, Homo sapiens
tttgacagagcagacttaccctgaagtagttagaatggataagttctgaacgtcgaaaagaaaagtctcgagatgcagccagatctcggcgaagtaaag

SEQ ID NO: 820345 - DNA, 100 bp, Homo sapiens
tttgctgtggcagaagaagcctacaagcagatggccagggtggttctcttcccaaagtggaagccaaattcatcaattatgtgaagaattgcttccggat

SEQ ID NO: 820346 - DNA, 113 bp, Homo sapiens
gcacctacttggagctggtgctttgcgtgctggtcagcatccggaacaacaggtactactgagcgagtgtgcttgatccagggaacggttgaagcactgaatgcagttcatgg

SEQ ID NO: 820347 - DNA, 100 bp, Homo sapiens
gcagctggctggcttcagtggaccagatgaatttcacccattcatcgaggcacttcttccacatgtccgtgcaattgcctatacttggttcaacctgcag

SEQ ID NO: 820348 - DNA, 100 bp, Homo sapiens
ttgaggcggcagtatgaccgggtttctttgatgcgacctcaggaaggagatgagtcaagaggtgttgccaaagattcacgaagataaacactacccttgt

SEQ ID NO: 820349 - DNA, 100 bp, Homo sapiens
caagaaggacaaagagatcatagccgagtatgaaagtcaagtcaaagttgataggctcaccccaaaatatgcttttggggactgatttagcacctgcata

SEQ ID NO: 820350 - DNA, 98 bp, Homo sapiens
tgctggcttggcccggcctgacaccctgctctcaggcagcaccagtggttggaaggacatgttcaattacaagaagttacttactgaagaaggacaaa

SEQ ID NO: 820351 - DNA, 100 bp, Homo sapiens
agcagaatttaattacctaaacacagcacgtaccttagaactctatggagttgaattccactatgcaagggttctcagaggcactgtgactgacttccct

SEQ ID NO: 820352 - DNA, 98 bp, Homo sapiens
ctgtcttggcacctgcaggaaacaagctcctacttccagaaaaagtgctcctgggactccaggataccagatggactcaccctgtcacccaggttgga

SEQ ID NO: 820353 - DNA, 98 bp, Homo sapiens
ggggtagtgtctgggatccagtacgagttgaatcattgttcaaataagttttcggctttgtgagaaaccttaccatcaaacacgatggccagcaacgt

SEQ ID NO: 820354 - DNA, 130 bp, Homo sapiens
cggacctgggacgcggagtcctgaagccggcggacggttttcgtacgggcggccgtgcgcgaggcgagactgatgctgctctaatgtatgatgctgtgcatgtggtgtctgtggccgttcaacagtttcc

SEQ ID NO: 820355 - DNA, 98 bp, Homo sapiens
ctggcacccgaatccggcctgccggggagaagaaatgggtgaccgttggtgacacatccctacgaatctacaaatgggtccctgtgacggagcccaag

SEQ ID NO: 820356 - DNA, 98 bp, Homo sapiens
agacgggcgcaaagattgcttgaagaaatccatgccatgaaggcattctttagtggcaggctgaaggccagagggaacatcatgctgagccagaaact

SEQ ID NO: 820357 - DNA, 98 bp, Homo sapiens
ggcgtattccacatagcaaacagccaccaaaatgccagaagagatggacaagccactgatcagcctccacctggtggacagcgatagtagccttgcca

SEQ ID NO: 820358 - DNA, 100 bp, Homo sapiens
gctacaaaagccgctcgcaagagtgcgccctctactggaggggtgaagaaacctcatcgttacaggtcaaaatgcagatcttcgtgaaaacccttaccgg

SEQ ID NO: 820359 - DNA, 100 bp, Homo sapiens
aggactgactccagtgatgacgcaggccttaaggagaaagtttcagggggctgtattaaatgtcgaggatgctgccactcggctccagcttttaaatcgc

SEQ ID NO: 820360 - DNA, 98 bp, Homo sapiens
caacctccggggccacaatagcgaggcacaccagattaatattggttattatttgacattactgtttttatatggagtagcactcactgaaagaggaa

SEQ ID NO: 820361 - DNA, 100 bp, Homo sapiens
agctgcgatctctgtggtaggcccaggagactacctaggtggagaagcgtactgggccggcggcctgcacctctacaccccattacctttccggccaggc

SEQ ID NO: 820362 - DNA, 119 bp, Homo sapiens
gaacagctccggtctacagctcccagcgtgagcgacgcagaagacgggtgatttctgcatttccatctgagctgtatcttcagagttgtctccgtctttccaagaacagaacaaaatga

SEQ ID NO: 820363 - DNA, 98 bp, Homo sapiens
cagcaggaaaacaccatcaagcagctggagcaggaatggcggcgctagatagtaaggcatcagggaagatgggaatgcgagctgtagtctattatatg

SEQ ID NO: 820364 - DNA, 100 bp, Homo sapiens
caaggacctcagcagcttggacacagcccactgcagagtttcagtcattcagtcagtaccgctgtaagactgccaagaagtcagaggaggagattgactt

SEQ ID NO: 820365 - DNA, 100 bp, Homo sapiens
agctggctctggaggacgccaaagaaggctacagacacgtcaagttcttgaggagctgactgagttgcctgtgatggtggaactagcaagtgacttcctg

SEQ ID NO: 820366 - DNA, 98 bp, Homo sapiens
ttaatgtggatgcttctgggaatttagcaaaggaagcaggccttcactatcatggaccagaacagggatggcttcattgacaagaacgatctgagaga

SEQ ID NO: 820367 - DNA, 99 bp, Homo sapiens
tcggagtggctacatcttcttttatatgcacaagactctgtgtgggggatgaaccacagtacactccattcagtatttcagaccaatcaaagcaacaac

SEQ ID NO: 820368 - DNA, 100 bp, Homo sapiens
ggtgcgcttccggatcgggggcaagcggaaggtgatgcccaagatggaccaggctgagaagaaagccaaggtcattgcaggaatgaatgctgtggaagaa

SEQ ID NO: 820369 - DNA, 149 bp, Homo sapiens
ttccggagtggggaagacctgcgtcctttttcgtttttcggatgatgccttcaatactacctttatttccaccataggtgctcagaattttgatgtcatacgactatcaacttacagaacagcctgcaaattacgatttgtacaaaaac

SEQ ID NO: 820370 - DNA, 100 bp, Homo sapiens
ctcccccgccggtggatgggagtgaaggacggaagaggccctgcggaggcggcggtgcagcgctccggtagacatagctgacattgagaatgaagagaac

SEQ ID NO: 820371 - DNA, 100 bp, Homo sapiens
gaaggatttggcaacagactttgtttcttggagtccacttccaattccaagctggaagattctttatgggtatcattaacagatcagcatgtccagctcc

SEQ ID NO: 820372 - DNA, 99 bp, Homo sapiens
ttgatcagcccttgtcaattatctgcggtgacagtgacacactccccagacccatccagtaccataacagcttgggggaaagaccatgaaaaagatgct

SEQ ID NO: 820373 - DNA, 98 bp, Homo sapiens
accgagagagtgaggagccagacgacaagcacacactatggcgctgaaacggattaataagagccgagactgtctgaagctgggcccacctgctgagg

SEQ ID NO: 820374 - DNA, 99 bp, Homo sapiens
gaaagaacatggtccagaaaacattgtaatggccatcgctggaaacaagtgcgacctctcagatattaggaaaaatcagttgctgccgtctgacaaggt

SEQ ID NO: 820375 - DNA, 99 bp, Homo sapiens
tgatgttggagaactacaggaacctgctttctctcgatgaggataacatccctccagaagatggcactacctggcagcaccatctaaacctgtatcatc

SEQ ID NO: 820376 - DNA, 101 bp, Homo sapiens
caggaccacagcggcaaggtctccaagtcccagctcaagggttccccactgaaggacttggtccagctgtctggcagggaggagagacagaagctctggcc

SEQ ID NO: 820377 - DNA, 99 bp, Homo sapiens
tggtgggggaaaagtagctccagctcaaccatctgaggaaggaccaggaaggaaaggtcacttcctcctaacccatctgctgctagagaaactaaagga

SEQ ID NO: 820378 - DNA, 98 bp, Homo sapiens
gcggttgaaggcagccctgcacgaccagctgaaccgcctcaaggtatcataatgacacattgctggatccttccctctacaagcatgagagcaagctg

SEQ ID NO: 820379 - DNA, 100 bp, Homo sapiens
tggagagaacccagaagcctacaatgaagaactgaagaagctggagttgctcagacaggaacagatggagtcggataactgttcaggaggagatgatgac

SEQ ID NO: 820380 - DNA, 100 bp, Homo sapiens
aaacgcagcaagaaattggagaacttcttgagtcgaaagaggcgacgaaatgcaggtgctccatacttgcttgcagtgcctacgtggctctggctttggg

SEQ ID NO: 820381 - DNA, 100 bp, Homo sapiens
aggatgtacaaacatccacaccaggctccactttgaggctctgatgaacattccagtgctggtgttggatgtcaatgatgatttttctgaggaagtaacc

SEQ ID NO: 820382 - DNA, 100 bp, Homo sapiens
cctgagctacagagactgaagaggactcaggagcaaatcagtaatactggatacacgtctgtttaactacgcaaaaggtaatgctggcatggcttactgg

SEQ ID NO: 820383 - DNA, 99 bp, Homo sapiens
ttcatcactgagtacatcaagggcggcacgctccggggcatcatcaagagcatggcctggacgactccaccggggggacccccctcacacctgcggccc

SEQ ID NO: 820384 - DNA, 100 bp, Homo sapiens
tctaccaacttcgccaccctgcggtggattgactacggcaaagtggccactcaggtgacatgcccccagatgaaaccagaggccgccaacattgaaaagg

SEQ ID NO: 820385 - DNA, 98 bp, Homo sapiens
ggaaggcgaggacgaggacgaggacgtcaaggagcttgaagaaatccgcaaatgtgggatgaaaaacttccgtaacatccaggttgatgaagctaatt

SEQ ID NO: 820386 - DNA, 99 bp, Homo sapiens
ggatggcttccaattttaatgacatagtgaagcaagggtacgtgaggatccggagcagacgcctcgggttgagccccatatgggggttggcaggcagca

SEQ ID NO: 820387 - DNA, 100 bp, Homo sapiens
cccaacggggaggccaacgtgaagaaatttaatccagagactgacttcactatagaacccacagttgtatcaatggttggggaaagatagtggcaacagg

SEQ ID NO: 820388 - DNA, 99 bp, Homo sapiens
cttaatatacagccagcctgtcatgagacctccaaacccctttggccctgtatcaggagcacagctctattaccaggttttaaacttcgccatgatcgt

SEQ ID NO: 820389 - DNA, 100 bp, Homo sapiens
aagatgattttacatccattattgggaaatgtcaagggcgcaaaccagaagaagagggtgtggaagataacgggctggaggaaaactctggggatggaca

SEQ ID NO: 820390 - DNA, 101 bp, Homo sapiens
ccccctgcccatttggttttgggccatttcataattctgaatcatgtctgataacggagaactggaagataagcctccagcacctcctgtgcgaatgagca

SEQ ID NO: 820391 - DNA, 99 bp, Homo sapiens
ttgtttcagctcaggccctgcaaccgaccgaccgtctgctgggctccaagtcacctgagaggcgaggtgagatgagttctggttctccgatgggtcctt

SEQ ID NO: 820392 - DNA, 100 bp, Homo sapiens
gaagatctaggtctggttctataaaaggatcgaggtatttccattgagccccatatgggggttggcaggcagcagagaggcccctttcaaggtgttcggg

SEQ ID NO: 820393 - DNA, 100 bp, Homo sapiens
ggacgagctcagccaagcagaaaagaaacatgccaaaggccaggatttgtttgatcagattgtgtaccacttggaccttgtggaaacagattactttggc

SEQ ID NO: 820394 - DNA, 100 bp, Homo sapiens
agattccatccctgaatgtagattgtgcagtgctcgactgtgaggatggagtggctgcaaacaaaaagataagaatgtgccttttgatgaaagaacttta

SEQ ID NO: 820395 - DNA, 100 bp, Homo sapiens
ttcagcgggcgccacacccacccaatatgcatgtttggggtgaggcacttgttctggactccttcacactacaggcttccttgccgaaggaggacatttc

SEQ ID NO: 820396 - DNA, 100 bp, Homo sapiens
aggtaatgtgtagttctcaatgcatcatgtcaggcagcttatgatgccaatttgtcccatggaattacatgaacgacagccttcgcaccgacgtcttcgt

SEQ ID NO: 820397 - DNA, 98 bp, Homo sapiens
agccgcctgccatgccccagccagtccccacagcataacagaatgggttgacacagtgtgggaactggatttcacagagactgagcctttggatccca

SEQ ID NO: 820398 - DNA, 100 bp, Homo sapiens
acgtggctatcccctctgacgtctcccacttccgcttccatgactggttcgttgtaaacccaacaacaaccaaaagctttgaaaagctgatgaagataaa

SEQ ID NO: 820399 - DNA, 100 bp, Homo sapiens
cgttctatggaaaacattgagctcgggctgagtgaggcccaggttgtgttgctttctgccacaatgccaactgatgtgttggaagtgaccaaaaaattca

SEQ ID NO: 820400 - DNA, 100 bp, Homo sapiens
tgttgtgtggccaacccttctggatctcagcagggatgaatgcaaaagaattcttcgaaaattggctattggatgaactcccaatgatatacagctgttg

SEQ ID NO: 820401 - DNA, 98 bp, Homo sapiens
ggagtatggacggaccctgtcccgtagtgtggagtactgcgccatgagagacgagataaatgagcctctcttctagatcaagtcatgtgacaagttct

SEQ ID NO: 820402 - DNA, 98 bp, Homo sapiens
cagcctagcattgcaaaacgatacattgatcagaaattcgtacaacagaaagaagattggcccatgcacaagctggaatgttctcccatggttgtttt

SEQ ID NO: 820403 - DNA, 100 bp, Homo sapiens
atattttggaagtgtgccagaattgctataaagagaatgtcatgaaattatcaagaattcatcatgaccaaccaatgaagcccctggatcgagcagtctt

SEQ ID NO: 820404 - DNA, 100 bp, Homo sapiens
cttctggatcctggcatggatgtatacggaggagaaaatattgaactgggaatcaagatgagggcagaagtgcagttgaccaagcaggtggtgcacagat

SEQ ID NO: 820405 - DNA, 100 bp, Homo sapiens
cttcaagtcgtttgaggaccgagttgggaccataaagtttcgacgtagattaaatatggcgactgaaaacaaagcaagagacaaagtgcttgcgcatccc

SEQ ID NO: 820406 - DNA, 99 bp, Homo sapiens
cttaacccagaagtagctgaatgtgttactccattgctgaggagtgtatggaaatttcatcgataagctaagactcttcaccaggggaggatccggtgg

SEQ ID NO: 820407 - DNA, 98 bp, Homo sapiens
actgaggacaatggacctgcctgggcatagacttccttaaggtgcgagaagatgtactaaattcattgaataacaactttcttcaaacgctaaatcaa

SEQ ID NO: 820408 - DNA, 98 bp, Homo sapiens
atcattgaagagaacatccctgaggtagtttgtgaagctataaaaaatgaaatgaatgttatgctgaaaagttctccagttgatttggtaactgctac

SEQ ID NO: 820409 - DNA, 100 bp, Homo sapiens
gcagtgcctggggtactacggctacagcaagtgacagctggagtatcagccttggaagtatatacgccaaaagaaatcttcgtggcaaatggtacacaag

SEQ ID NO: 820410 - DNA, 98 bp, Homo sapiens
gtgagttggagaatctggtccttaaggatatgtcagatggaaaatatgttgtgttcttcttttaccctcttgacttcacctttgtgtgccccacggag

SEQ ID NO: 820411 - DNA, 100 bp, Homo sapiens
aaatggatgacaatgaaatcaaaaccttcatgccgattgcatgggcagcagcttatggattggattcagcatcaaaatacatctactcatattgagagct

SEQ ID NO: 820412 - DNA, 98 bp, Homo sapiens
actgaccatagccagagaacagccctccatcttgcagcccagaagtttgtacaatgacgacagaaacctgcttcgaattagagagaaggaaagacgca

SEQ ID NO: 820413 - DNA, 100 bp, Homo sapiens
gggaccacagctcccgaaagcgacgttcggccaccggaggagcgggagccaagcaggtagtaaacctattgatggcaattttgctgactgtggaagtgac

SEQ ID NO: 820414 - DNA, 98 bp, Homo sapiens
gaatgccaagcagaaaattacctaaatgcactctttcgaaagaaagaaaatgcatccgatgcagatttatggctcctgaacagttgcactgtaaaaaa

SEQ ID NO: 820415 - DNA, 98 bp, Homo sapiens
ggcgcggcaggctgaggagaaagcggcgcgcggagaaaaatggctacaaacttcctagcacatgagaagatctggttcgacaagttcaaatatgacga

SEQ ID NO: 820416 - DNA, 100 bp, Homo sapiens
accagttctggagctactggaatagtgtgatgcctaccaacatgttatgatgcagcaagaaggctctcaccagatggtggcatctttatagtggactttt

SEQ ID NO: 820417 - DNA, 99 bp, Homo sapiens
gaagtaccgcgagcaaggagcgcggaatcggggagcgtccggagctagctggatcctctaggcagtgtctcctcccaaagacctcgttgtgacagaagt

SEQ ID NO: 820418 - DNA, 98 bp, Homo sapiens
agcaacggcatctttgatcttcagaaaacttcccttggaggggatgcaccagaagagccagagcttcagtatcagacacagcacagcagccatctgaa

SEQ ID NO: 820419 - DNA, 98 bp, Homo sapiens
ccgcgcccgggtctggccgcctggaattatagaccaatccagcaatgtggagatagcatcttttccaatctataaggtgttattctgtgcacgtggac

SEQ ID NO: 820420 - DNA, 98 bp, Homo sapiens
ctggaccctgctcagaggactctatacagggacgtgatgctggagaattataggaacctggtctccctgggttttataggatcacattgacaaaagta

SEQ ID NO: 820421 - DNA, 100 bp, Homo sapiens
tgactcatctcaacccacaacgccttcccagtcatcagctgcctccaccccagcccccaaccttcccaggagtacgagagggcctccaaagtggaccagt

SEQ ID NO: 820422 - DNA, 100 bp, Homo sapiens
agcattcttctgctgtccttgacatagatccatgatttgttccagagcttcgatgacacccctctggggacggcctccctggcccaggtccacaaggcag

SEQ ID NO: 820423 - DNA, 113 bp, Homo sapiens
ctgaatcttctgggagctgaggaaccagatatcttgaaaagctgccagaaaggtcagaagccaatgacctggccctgaggctggctcgccactacacgggacaccaggacgtg

SEQ ID NO: 820424 - DNA, 100 bp, Homo sapiens
gcagagatcaggacacttcactttgctgcctgtgcactgaggcctcagaatctgctctacccgacttaacaggagtacttgattcttcagaaaacctcca

SEQ ID NO: 820425 - DNA, 100 bp, Homo sapiens
tttctttgtatgtcaagtatcaagtggccatacaccaggatccacccgatgaatgtgggaagactgagcgccatcatgaccgggtcctataacaacttct

SEQ ID NO: 820426 - DNA, 50 bp, Homo sapiens
cggaggaactgagacgtttcgaattccagaattgcttcagattgctggaa

SEQ ID NO: 820427 - DNA, 99 bp, Homo sapiens
ttgcaagaaaatatgatttcctcataatagaagatgatccttactattttctccagtttaacaagttcccaaagagaatattacgtctgattctctcct

SEQ ID NO: 820428 - DNA, 100 bp, Homo sapiens
gaaacagatacagagatgtaagcccatcttaacagagcgttccaaaaagaggactctccagctactttttattgcatcagtatgcagtggtttagagaat

SEQ ID NO: 820429 - DNA, 100 bp, Homo sapiens
gccggagctcctggcggtgccggatcctgacggcggccttcccccgggtgtctcaatgcttgtacctactgcaaaactaaacacgccagaggaaatttgg

SEQ ID NO: 820430 - DNA, 99 bp, Homo sapiens
tgagcagtacgtgcctgatgtgttttataagttccagggtcacccccgagaggacaacaggcatctggaagtgctctctcgccactctgggtgctttac

SEQ ID NO: 820431 - DNA, 100 bp, Homo sapiens
gccagcccaaaggcgactcgacaccgtcccagctgaagagagccaggcccagacatgtccgtccttgtaagttaaaagcttccatgggagccttccttcc

SEQ ID NO: 820432 - DNA, 100 bp, Homo sapiens
ttcagtacaatgtcaccctcccagcaacagggagaccaaattttgaggaaggtggaccaacatcagtagggagaaagcatgaatttatacgctcagaaag

SEQ ID NO: 820433 - DNA, 100 bp, Homo sapiens
aacgccagttggtggaatatgagagaaccaagttccaggaaattttggaagaaactccaattttgtaccaatggctagaagcagatcgtcatggcaagag

SEQ ID NO: 820434 - DNA, 98 bp, Homo sapiens
gttccctaaatctatagaaacacctaatgtcagggcagaccccttcaaagaactaaggtgtgtggaggtcattgcaaaggaaggacaaaacctgaaag

SEQ ID NO: 820435 - DNA, 98 bp, Homo sapiens
agttaatgtgccttgttcccaaacgctgcaatgacatgatgaatctaggacgtctgcagggctttgagccaaatttgtatcctactgtggggcttcaa

SEQ ID NO: 820436 - DNA, 98 bp, Homo sapiens
caggttttaaatcaagatttaacattccaacacataaaaattatttatccaacagctcctcccaggtggatctccttacgtagcagccaaaataaatg

SEQ ID NO: 820437 - DNA, 98 bp, Homo sapiens
gaatggtcagaaaccctccataacctgaaggaatccttcaactgctttctaccaagcgttccatttgaacacgttaaaggaatcaaagagcctctggg

SEQ ID NO: 820438 - DNA, 98 bp, Homo sapiens
gattgctgctatgaccgtggggaaggatgttaggtttttcgttggaatatacgttgcacatttatggcgattctgagtgtgagggcagacttctgcca

SEQ ID NO: 820439 - DNA, 100 bp, Homo sapiens
acttggaaatcccactgaaagatttaaagagcaagctggctcggccgccccgtcggtgttcagccgcacccgcacaggtaccgagactgtctttgagaag

SEQ ID NO: 820440 - DNA, 100 bp, Homo sapiens
gattcctcctccttggtcgccgcgtccttggctggcgtggtaagcttgatgattaccaggaacgaatgaacaaaggggaaaggcttaatcaagatcagct

SEQ ID NO: 820441 - DNA, 116 bp, Homo sapiens
ggcatccttaccaaggaatctgcttttcaagtatgccaccaacagtgaagagattccagcaagattatggaagagcatagctacatacaaaaggagctagatttacaaaatggtag

SEQ ID NO: 820442 - DNA, 98 bp, Homo sapiens
tccccctttaacttagaggaacgaggattatacagaaatttgaatttccgttactatggcaatgacggcagggactacaacaacctttcctatgagca

SEQ ID NO: 820443 - DNA, 98 bp, Homo sapiens
gggacaccactgaaactgatctcaaacagcgacgagagatccgtgcaggcacagccttttacattgatcaggttgccttcttcctcatctctgcagta

SEQ ID NO: 820444 - DNA, 99 bp, Homo sapiens
caagactggtgggacccagactgacttgttcacatgtggcaaatgtaaaaagaagaattgcacttacacacagatctcttccgttccctgctggcagtt

SEQ ID NO: 820445 - DNA, 150 bp, Homo sapiens
gagcctcattgtccaggagatgaagacgagactttcaaagatggaatcacaaacggcgcacattggtatgatgtggaagatctcaggaaacaggctcgacagctggaaaatgaacttgacctgaaactagtttccttcagcaaactatgt

SEQ ID NO: 820446 - DNA, 100 bp, Homo sapiens
aagaacctccaaagagcattgaagaattcttaaagtttcaaaattggggacttcagtactagtgctaataacatccagattgataaaaccaagcctttgt

SEQ ID NO: 820447 - DNA, 100 bp, Homo sapiens
gcccggccctccttcagtttagttgaggataccacattagagccagaaggttctgagtgcaaaagtagttacaaatgctcgaagtcctggggcaaaatgc

SEQ ID NO: 820448 - DNA, 100 bp, Homo sapiens
cacaaactgatggacgatgatgccaatggtgatgtggatgtggaagaaagtgatgaggagttcgcagcacttactaaagaactcaatgtatgcagggaac

SEQ ID NO: 820449 - DNA, 100 bp, Homo sapiens
cctaccaggatccgcgctttgatgcagagtgggatcttgtgtgtgataatgcctggaaggtccatatcgctaagttctccttactggttggattaatctt

SEQ ID NO: 820450 - DNA, 100 bp, Homo sapiens
gtgagaagatttgcactacccagcaccagctgaccatgcacattcgccagtgggaatttcagattggaccttgtgaaggaatcagcatgggagatcatct

SEQ ID NO: 820451 - DNA, 100 bp, Homo sapiens
tttggacggtttctcattgatttcatggatgattcaacagccacacaaagcagcaacattttttggatgcattgggatagataaatttggggagatcctg

SEQ ID NO: 820452 - DNA, 98 bp, Homo sapiens
actgagtaccaaggaatgattgagattgtggaggaggcacttctggggcccagtagccaactggggtcttcccattgctgccatcaatgatatgaaaa

SEQ ID NO: 820453 - DNA, 98 bp, Homo sapiens
ctttatgtcctcgaagatcagaccgagagatcacaaggtttacatctggcacaaacgtagtgaactgccaattgcggagctgacagggcacacacgta

SEQ ID NO: 820454 - DNA, 100 bp, Homo sapiens
ccaggtgacccgagacggcttcaaggttattctggtacaagttaacccaggagaagcatttacaataagaagagaagatggacagtttcagtgcattaca

SEQ ID NO: 820455 - DNA, 98 bp, Homo sapiens
tgactcaagaagcagctcagaaatgccttctagctgcttctccagagaatgagctccaagccctcagtgagcctcagcccaggctgcaggcagcaggc

SEQ ID NO: 820456 - DNA, 100 bp, Homo sapiens
aggagcctctggaagagagggccttctcccgcttctctcctcctcctctccacgctggggggatcctggagccatcatcaaccactttaaccccaaaatt

SEQ ID NO: 820457 - DNA, 100 bp, Homo sapiens
agggcagactggtagcaaagcccccacgcccagccaggagcaccgccgaggactccagcacaccgagggtatggcgttgacggtggatgtggccgggcca

SEQ ID NO: 820458 - DNA, 98 bp, Homo sapiens
ccgctgccagggcttcaccagtgtgcccagccgtggtggctgtactctggggaagacaaaggcgctttggctaagctggtggaagctatcaggaccaa

SEQ ID NO: 820459 - DNA, 100 bp, Homo sapiens
tggcagattctggaaactgtacattgaagcagagacttcacagagaatgcagttgtcttgacttcaggtctgtctgttctgttggcaagtaaatgcagta

SEQ ID NO: 820460 - DNA, 100 bp, Homo sapiens
ctggggtacatcatctaaagatcctaggattgctgcaggtcagcagtctccactggaaaaaaagatcttgtaggtcccattagtccaccacagccacctt

SEQ ID NO: 820461 - DNA, 100 bp, Homo sapiens
gaacaaccctggcttcatgagcatgcaatactggagtaaccgcttcctaaaccattttgcagaaatgtaagggtgttcggttgcgtgcatgtgcgttttt

SEQ ID NO: 820462 - DNA, 100 bp, Homo sapiens
tggccacatggctaaaccctgacccatctcagaagcagaatctcctagccccacagctccgggttgacaaatggtggggtaacagaaaggaactggctac

SEQ ID NO: 820463 - DNA, 100 bp, Homo sapiens
ccagcaattcagcactacagtttgtcaactacccaactcagaatttacatagtacatgacgaagttaaggataaagcttttgaactagaactcagctggg

SEQ ID NO: 820464 - DNA, 100 bp, Homo sapiens
caacagatgaagacagatgcaccaacgaggatggacaaccggaaattttctacacattttggaattcagttactcaggcactttcttctcaatttcatat

SEQ ID NO: 820465 - DNA, 100 bp, Homo sapiens
ttttagaatttatgagacaaattcttaactctgacacaattgtgaaaattaccagtccaggcctgttcagaattgtatatatcgcagaaagacataattg

SEQ ID NO: 820466 - DNA, 100 bp, Homo sapiens
agacccggtttgctgatcgccccagggatcaggagcaagagtgagccatggagctacgtgtggggaacaagtaccgcctgggacggaagatcgggagcgg

SEQ ID NO: 820467 - DNA, 100 bp, Homo sapiens
ctcaggggaagaagctggacttcagccgtccaagccattatgcagatgtagatcctgaaaaccagaactttttacttgaatcgaatttggggaagaagaa

SEQ ID NO: 820468 - DNA, 100 bp, Homo sapiens
ggctccccaaccgggagcggctcacggcggaggacgacgcgctcaaccagatcgcgcgggagtatacagaagatgaagctaggaaaataggagtggttgg

SEQ ID NO: 820469 - DNA, 100 bp, Homo sapiens
cttcgatgatttactgaaatttgatgacctagatggaacacatgctctgatggatgcttctcagctgcttcagatattacagagtctccatcctcctttg

SEQ ID NO: 820470 - DNA, 100 bp, Homo sapiens
tgaccgagagcgtgaccgagagcgcgaatatcgtcatcgttagaagatgcctaagggtatccctgaatgatacagttttgtttgaaagactgaaaagccc

SEQ ID NO: 820471 - DNA, 99 bp, Homo sapiens
ttagacatcgagatcaatgaacctttagatgaatttacaagctagcaacatggaccacagatatactggtgactccgctctcctctggccaagctacaa

SEQ ID NO: 820472 - DNA, 100 bp, Homo sapiens
tgcatcatgatgtcaacaaccgtggctcacaagatgaaagagcacgaattgaatgatctggcacgggaccctccagcacagtgttcagcaggtcctgttg

SEQ ID NO: 820473 - DNA, 100 bp, Homo sapiens
cctggaccccagctgcccaggagagaaagctctgggtgtgcggcagtaccatgtggcctcagtcctgtgccaacgggccaaggtggcgatgagccacttt

SEQ ID NO: 820474 - DNA, 100 bp, Homo sapiens
ccacaagacaaagaatactataaagtaaaagaacctggtgaaagtcccatattctggtgaagctgaggacatactggaaacagaaaagagtaaattgcag

SEQ ID NO: 820475 - DNA, 100 bp, Homo sapiens
ctggaagaggctggggagtctgtgtccttccagctgcagatacggagagggccccattgtgctgtcccgaccccaggatggggactctccactgtccgac

SEQ ID NO: 820476 - DNA, 100 bp, Homo sapiens
tacattcaaaatggcattcagagttttatgcagacatttctcttgggaagttgtgcatctgacaggaatatagtactgtacgatatgaggcaagctactc

SEQ ID NO: 820477 - DNA, 100 bp, Homo sapiens
ctctgcctgttcttctggaatgtcttgggggttttgatcctgtcactgtggtggcaaatcttccaaaagactacatgataaccctcaaatatgtccccgg

SEQ ID NO: 820478 - DNA, 100 bp, Homo sapiens
tggattatttcagtggaactggcaatcggcccagaagaaggaatcagttacctaacggacaagggctgcaatttccctgtattgaacactgatatacaag

SEQ ID NO: 820479 - DNA, 100 bp, Homo sapiens
ggtgccaggtggcagttctagagaccgtcagcaagataacgtgaaggactggagcaaggtcgtcctggcctatgagcctgtgtgggccattggtactggc

SEQ ID NO: 820480 - DNA, 98 bp, Homo sapiens
tttgacttcttgcatgcgagggaccattgcgggaagccatatgtttttgaccgtgtattccccccaaacacgactcaagagcaagtttatcatgcatg

SEQ ID NO: 820481 - DNA, 100 bp, Homo sapiens
aagattcccgttcctgttgcaaagaaaaaggaagctcccccagctaaagctgatgaacttattagtcctaaagacattgatcctgtccagcgctatgtcc

SEQ ID NO: 820482 - DNA, 100 bp, Homo sapiens
gccccgtgcccacatcaaggagtatttctacaccagtggcaagtgctccaacccagcagtcgtagccaggctttcgaggactgactcctccaattccttg

SEQ ID NO: 820483 - DNA, 100 bp, Homo sapiens
ggacatttctgggggtagtagaatgcttgaggcctggaatttaaacctgagccactatctgaaggtccagtccaggtgcagcagcaaggagaacattctc

SEQ ID NO: 820484 - DNA, 100 bp, Homo sapiens
tcttgctcttcaaacctgctgaaaggaattcctagatctaaacaccaggactcagcccaggagagtgttattactcgagatattcatcgtacatttcccg

SEQ ID NO: 820485 - DNA, 99 bp, Homo sapiens
gactttcgctatcgatctcctcattcagctcttcaagaagcccagccccttcatcttcatcagccagcgtccctccccagagacccaagacaccatcca

SEQ ID NO: 820486 - DNA, 100 bp, Homo sapiens
aggctctgaaagaatacatcaagattctgaatctggtgatgaacttagcagcagctccactgaacagataaggccaaaactggacaagccaaggcatctg

SEQ ID NO: 820487 - DNA, 99 bp, Homo sapiens
aagccttttcaagtaaaaggtgcttggaatggttctatgaatatgcagaagcatcaagtgtacctgatttgtgaacctatcttgcttcagttggtttcc

SEQ ID NO: 820488 - DNA, 99 bp, Homo sapiens
aatgaagaacttttacaatttccactggaactgtgttcagattcacttccttctcatccttttccaccagctaaaggtaaactgtcttgagccccaccc

SEQ ID NO: 820489 - DNA, 100 bp, Homo sapiens
gaactcatctttctacagactacggtttgagctcagatatcgggctgaacggtcaaagacattcacaacatggatggccaaaaagcaaatggatttccac

SEQ ID NO: 820490 - DNA, 98 bp, Homo sapiens
tcgtgctcaccggtttctcccacatcgacctgggctacagaactggctacccttatcgataccctgctctgagagagaagtctaaaaaatacagcgat

SEQ ID NO: 820491 - DNA, 100 bp, Homo sapiens
aagactgcgttccagccccagttccccggcagcgggacccggcgaagacgcgaccgcggcgcgagtcaccatggtctcatcagaaaattgaagactccga

SEQ ID NO: 820492 - DNA, 100 bp, Homo sapiens
gcaagttcatggtcacggagaaggcagcctacatagcccttcctggatctggagagagcagctgctgctgccccaccacctgccaggcccggccactgag

SEQ ID NO: 820493 - DNA, 98 bp, Homo sapiens
gtgatcctggaaccgttgattggagatatgcccttagttggagctttgtctatcttcttccttaggaaaccagctctctatgagaacatgctggtgga

SEQ ID NO: 820494 - DNA, 99 bp, Homo sapiens
tcaaatgcaagtccaagaggaggaggaggcggaggtccaagcggaaagggaaaggtggcccagacagcgtgtatgtcagcttgcaagcatttagccaca

SEQ ID NO: 820495 - DNA, 100 bp, Homo sapiens
taagacaagtccaggcagacctttggggacaactaaagctgcgggatacaaagtcagcccaggcagacctccagattggttcgagtgagtaaaaactacc

SEQ ID NO: 820496 - DNA, 98 bp, Homo sapiens
tttttctcatggatgttcttcttcgagtatttgtagaagggatccactagttcctggactatgggaactgatgactcgcccaatgtcacagatgatgc

SEQ ID NO: 820497 - DNA, 100 bp, Homo sapiens
ttgcctgcagagcatgcccagtgtcagatgtctccagggacagtatggaaattaccagcagtgaaaaagtacttacattccagtagccagtatctattag

SEQ ID NO: 820498 - DNA, 100 bp, Homo sapiens
cttcattcccttattgataacctgtatcctgaagagaagttggactgtgttatagtagtcttcataggagaggattcaagatgaccaacgaagaacctct

SEQ ID NO: 820499 - DNA, 98 bp, Homo sapiens
aacaaaaccgagtcaacagggaagcagaggagaaccgggagccattcagaaaaggtattggaaattatgcccttgctcagcactgtttcatcaaatca

SEQ ID NO: 820500 - DNA, 98 bp, Homo sapiens
cacaaacaagccttcagaatcagatgaatggaggacctttttatagccagaatccaggttatgtgaaattacctccagagaaatttgcacctaagaaa

SEQ ID NO: 820501 - DNA, 100 bp, Homo sapiens
gatgtgatgcctgctagccaaaaggccttggggctctattttgcggaattggaatttcttagctgtgacacatccaggttacatggcatttctcacatat

SEQ ID NO: 820502 - DNA, 100 bp, Homo sapiens
gagtagggacaaaatatcttggctcacgtatttaagagcctgaatattccaggtggttcacgggggcaagtgacagccctggtttctctgaaggctggac

SEQ ID NO: 820503 - DNA, 99 bp, Homo sapiens
aagccacacagtgtccagatacgagggacagtcattttgtttactcattcagccctgttgcaggtcccaataaactcttcataaggttgacagaagcac

SEQ ID NO: 820504 - DNA, 100 bp, Homo sapiens
agttcctcaagatggagactttgactttttttctgagtttaaccagtaatgccattcagttgccaatctcaagcaaagcaaacataagccagttttaatc

SEQ ID NO: 820505 - DNA, 98 bp, Homo sapiens
gcatggcatttcagtcactggtttgcagagtccaggtaatgcacaggtgacacaaacaaagtttctccccaatgctccgaaagctctcattgttgaac

SEQ ID NO: 820506 - DNA, 99 bp, Homo sapiens
tccaaaaagaaacctagcaacaaaaagaaagctgcgttaatgtttgcaaatgcagaggaagaatttttctatgaggtcaataagcatgcgttttctgga

SEQ ID NO: 820507 - DNA, 100 bp, Homo sapiens
gctggttggggaggaccagaaatcagttttcggctttgtgagaaaccttaccatcaaacacgatggccagcaacgttaccaacaagacagatcctcgctc

SEQ ID NO: 820508 - DNA, 100 bp, Homo sapiens
cgccgcggggcagccgccgctcctccgggaaacgaggatgcagtcaatcagatggccgttactccctttccagtgccatcaagttctccatcttctattg

SEQ ID NO: 820509 - DNA, 100 bp, Homo sapiens
accttttggattacaactgttcatcctcacctatgcaaagaaagggaagctattgctgggattttgaggagagaaatctgggcccgatttctagcatttg

SEQ ID NO: 820510 - DNA, 99 bp, Homo sapiens
cggtgtcaaagccaagacataaactcaaccccttctcttccaaaagggaactctaatgatccaggacaaagaagttaccctggagtatgtatcaagcct

SEQ ID NO: 820511 - DNA, 118 bp, Homo sapiens
gtgtttgacggcaggaagaatctatacacagccatgccccttccgattgggagggacaaggccacgtgcgagcgagggtttgcagcaatggaagaaacgcaccagaagaagattgaag

SEQ ID NO: 820512 - DNA, 98 bp, Homo sapiens
gcaagactgggtcattgacgattgcattggtaactggtggagaccaaattttgaacctcctcagcattgtcttcagtgttaagaaatgtggactcctg

SEQ ID NO: 820513 - DNA, 98 bp, Homo sapiens
gaagaagtctgcctacctgtcagccgtgggcaccttcacctgggtctgcacgccctttctggtgctgaaggtcgccatcctggctgagaagtacgcgg

SEQ ID NO: 820514 - DNA, 100 bp, Homo sapiens
agatcacccaagaggaaagggacagggtaggcaccccagtgggacctgatgcagaacatcatgaatgacatgccgatctacatgtactccgtgtgcaacg

SEQ ID NO: 820515 - DNA, 100 bp, Homo sapiens
agaatatgttcctttcatgaatgttgacctgagagaacgttttgcctatccaatgcctttctggtacaacttgccaatcatactgttggtagtgaataac

SEQ ID NO: 820516 - DNA, 99 bp, Homo sapiens
ttgaagcatgtctttcagagcccggcaccacccatcttgagtatctggacactgcccatctctaagataagaacctggaaaggggactctgttggccat

SEQ ID NO: 820517 - DNA, 98 bp, Homo sapiens
cacctgtctggagcaaagaaaagagccctacaatgtgaagatacataagatcgtagccagacccccagccaactgggtacatggaaaactcagtctcc

SEQ ID NO: 820518 - DNA, 100 bp, Homo sapiens
ctaccaggagaggagggaactgcggagcggaatgctatcttctttgagaagtcaaattgtcaggatcaggaatgtatgttttcttccatctggattctag

SEQ ID NO: 820519 - DNA, 98 bp, Homo sapiens
tctacagcacccggtgctgcggctgttgccatgtccgcaccgggacgatcatcctggggacctggtacatgatgctgtctttgcaggtgccatgccta

SEQ ID NO: 820520 - DNA, 100 bp, Homo sapiens
acgtgataagaagcacctggatgagacatttgctacagcatcccacattaagtcaacgttatacttactggtggacaccagaggtgataaagcatttacc

SEQ ID NO: 820521 - DNA, 99 bp, Homo sapiens
gctccgcgccctccccagaggcatgcccaaggatgtgaccgagctctattgacctgaaaagtggttctggaaaagtgtaccaaggccctgcaaaaggtg

SEQ ID NO: 820522 - DNA, 100 bp, Homo sapiens
ggagctttcgcttaaacataaggaatgattttttctcatcaacagatgtcacatgtacttcagtttgaggataaaagcagaaaagtgaaagatgcaagca

SEQ ID NO: 820523 - DNA, 100 bp, Homo sapiens
gagaacacccccccatggaggcgaggtagagttggggtcgcagatgaggtttatataactttccaagacaaggaagttgtgcaaagcctcacagctacta

SEQ ID NO: 820524 - DNA, 99 bp, Homo sapiens
tggaacgacagccgcttcactgacctaccccctggacctggtcagagcgcggatggccgtaaccccgaaggaaatgaaagaccacagcaagattctttc

SEQ ID NO: 820525 - DNA, 100 bp, Homo sapiens
aagtggtgatccaggcaggaccaggctgcactgaagggacagagagaatgtcaccaatggcacagtgggcggcacagcagagccggggcacgaggaggtg

SEQ ID NO: 820526 - DNA, 100 bp, Homo sapiens
tcatcttggaaatgtcagctcttccgcagtgattgaagctttgataaatgaaatcttcctaagtataggtgaagtatttgactatttggttgcacatggc

SEQ ID NO: 820527 - DNA, 100 bp, Homo sapiens
cggggcgcagcgtgacggctggcatcatcattgttggagatgagatccttaaggttcttcagatagatcctgaagttacagatgaagaaataaaaaagag

SEQ ID NO: 820528 - DNA, 100 bp, Homo sapiens
tgtacctgccttgggatccggagggaggaagctgggacacccgggagtcaggaaatggattctgtttcactgaggccatctatccgatttcaaggaagcc

SEQ ID NO: 820529 - DNA, 99 bp, Homo sapiens
tttgcaaagaggaggaaggagggacttcttggcttctcccagcatagccccaggttccagcaacagatagaaatgctttaagttcactctggggaaagc

SEQ ID NO: 820530 - DNA, 100 bp, Homo sapiens
aaatgagctttgcctctgtccgcatcggcctgtatgattctgtcaaacagttctacaccaagggctctgagcgtggagctatatacctttctggaattga

SEQ ID NO: 820531 - DNA, 100 bp, Homo sapiens
catgctgtttggaaacctttaatgaaggctgatcttcagacaagttctcagcgtttaaatctttcagcctccaatgctgcagtggctgaacttaaaccgg

SEQ ID NO: 820532 - DNA, 98 bp, Homo sapiens
gcagagctagttcctctccagctcagccgcgtaggtgtctgtgggaggttatgtttatttgagacttctccatcgggatcgcctggtgtcaccaagtg

SEQ ID NO: 820533 - DNA, 100 bp, Homo sapiens
gtctggagaaacagccaaaggggactatcctctggaggctgtgcgcatgcagcacctggcacttcaggtggcaagacagctccttcttcagcagcaacag

SEQ ID NO: 820534 - DNA, 100 bp, Homo sapiens
tgcctatttccctgattgctggttttcagcgtgttcaggctctcactacaaaccttaatctcatcttagagatggataatgtgcttatggtgtaaccagg

SEQ ID NO: 820535 - DNA, 100 bp, Homo sapiens
gtgaaggaacgtatcttcgcggagactggcttcccggtgtcggagcagcggctgtggcgcggcggccgcgagcctacaacacagcagtcccctcaggatg

SEQ ID NO: 820536 - DNA, 99 bp, Homo sapiens
ttcgaacttagacttccggaaggactttggcgaggtttttggctttcacccccaaccagtgaccaaagacttgaccactcaaagtccagctccccagaa

SEQ ID NO: 820537 - DNA, 100 bp, Homo sapiens
agaagcaccagaatacgtttagcttcaaaaatgacaagttcgataaaagtgtgcagaccaaggggggacacagcgattgccacgcgccattggaatgtcc

SEQ ID NO: 820538 - DNA, 98 bp, Homo sapiens
gtaatagatgtctgacaaactaaagaaagacttgtgttacgtaaagtcagtgataaatcttttgtttgctgcatatactggagatgtgtctgcacttc

SEQ ID NO: 820539 - DNA, 99 bp, Homo sapiens
gagcgccctggcggagaagactcgaacggctcccacagccgggcgttgggggaaagatctggagcagcaaccatttgttccccagtgcagagaaagcga

SEQ ID NO: 820540 - DNA, 98 bp, Homo sapiens
cggcccgggctgtagtgccggcgccgccgcgtcttcccggtctcctttcccggccgcacaggaaactggcgatggaatatgagaggagccctctggaa

SEQ ID NO: 820541 - DNA, 100 bp, Homo sapiens
ggcattggagcaagccaagaaagaatccgaagatcagaaacgaaaaagcagagagatcttgctaagatgagaaaatgtctcagaccagaagaactgacaa

SEQ ID NO: 820542 - DNA, 99 bp, Homo sapiens
attctcaacccctacaacttattcctgtccggagacagcctaagggttgaatcaagggattctttgaatagcatagccctgaagtttgatacaacacct

SEQ ID NO: 820543 - DNA, 99 bp, Homo sapiens
ggcaagctggtgattaacaaagacctcgcggaggaagatccagacatttaatgtggatgcaccatgccagaccgtggaagatttaacgaatggggttgt

SEQ ID NO: 820544 - DNA, 100 bp, Homo sapiens
ggccatcagtagatgccagtccctcaaccttgaactttccagacgcagaactgaagatgagaagtttttgtctgaagtttttgcacaattaacagatgag

SEQ ID NO: 820545 - DNA, 100 bp, Homo sapiens
ggtgtttgcattggagaaaagcgaaggattgtggtcccgcctcacctggggtatggagaggaaggaagaggtgccgtgagcgatgtggagatgcaggaac

SEQ ID NO: 820546 - DNA, 100 bp, Homo sapiens
ggaaaacaacttcgagggcagagtgtggtcctgtattagagacgtttttgaaaaggacagctgattacgcaaatcagttttctgctcctttgattccagc

SEQ ID NO: 820547 - DNA, 100 bp, Homo sapiens
ggagctgctgcgggacgacaacgagcagctcatcacccagtacgagcgggagaaggcgctgcgcaagcacgctgaggagtctgctttacaagaacttgaa

SEQ ID NO: 820548 - DNA, 99 bp, Homo sapiens
gtgaaccttgctactctaaaattatgggttatacattggctcttcaaagacgttcacctcatcagagaaatccctgactcctttgcagtggtgtagaca

SEQ ID NO: 820549 - DNA, 100 bp, Homo sapiens
tctgaccaggaagttagtgaatctatggattttagatatctgccagatgaaaaaggggagaagcctttttcttgccctcactgcaacagagcatttgcag

SEQ ID NO: 820550 - DNA, 100 bp, Homo sapiens
actagagaaatccaataagaacttctccaaaaagattcagcaggacagagcgggatgccaccagcttgtccaaagggaagttccaggagctcctggtggg

SEQ ID NO: 820551 - DNA, 100 bp, Homo sapiens
gggcaaaaacattcaagaatgagagcgagaacacctgtcaaggaccacagaatactggccatggtgcaacttctggttttggcagtgcttttacaggaca

SEQ ID NO: 820552 - DNA, 98 bp, Homo sapiens
atatctgtgtcgttcttggcagaaattatattttccagcccgtgtctgcaggaagattcggaaagggccaggtattcccaccggtccagtcaccatcg

SEQ ID NO: 820553 - DNA, 98 bp, Homo sapiens
ttaggcgagggacgttaccgggaagttgcaggcgggaggactcttccccatccagtcacctgacagccatcatcgtctacagactgccgtggacctgg

SEQ ID NO: 820554 - DNA, 100 bp, Homo sapiens
tgaatttgcaaaacttactgtaggcagagatcctacaagaatccaggatgatgatcccagattgccagcgcaggttggaagccgcatatttggatcttca

SEQ ID NO: 820555 - DNA, 98 bp, Homo sapiens
acaaatgttagaggaggcgcgacgacgggaggacaatctcaacgacagctctcagcagctacagtcaaaccggcacgatgtccaggcaccagaaccag

SEQ ID NO: 820556 - DNA, 100 bp, Homo sapiens
gggctgggctgcagcaagccgcacctggagaagctgaccctgggcatcacgcgcatcctaggttggaagtactccatgacacacactcggagaaagtccc

SEQ ID NO: 820557 - DNA, 99 bp, Homo sapiens
caactgtgaggactaccttatgatttcctgtacagtagcagagggagctcccattattccaatttcagctcagctgaaatacaatattgaagttgtttg

SEQ ID NO: 820558 - DNA, 100 bp, Homo sapiens
ccacaaatgtacccccagtacacttactactatcctcattatctccaaaccaaggtctctaattaacagaagatggcaaagcccagccacagcagctatg

SEQ ID NO: 820559 - DNA, 141 bp, Homo sapiens
gacactggatgaagaagcgtttgttgatactgaaataagacttggtgcttttccaggacatcagaaggacagcacatgtggctttcctgcaatgggatcgtccttcaagaggacctcacaggctctccacccggactgtga

SEQ ID NO: 820560 - DNA, 99 bp, Homo sapiens
ctaacgctggccgacaacagcctggcgtccgccacggaagggatgagaccatgcagcctgcgaaaccatcctttcttgaatattttgaacaaaaagaaa

SEQ ID NO: 820561 - DNA, 98 bp, Homo sapiens
tgaaagagaagatgttcaaaagaaaacattcacaaaatgggtaaatgcacaattttctaagggactttcagttaccttgatgatgtcccatttaagac

SEQ ID NO: 820562 - DNA, 50 bp, Homo sapiens
accatgtctgcacacgattctttttcgtattcgccttttacaagtccacc

SEQ ID NO: 820563 - DNA, 98 bp, Homo sapiens
gagaccgaggaaagtgtgtgggaggcgttgacctgccccttgtcctggccccggttctgcggggagtgtctccagccctgcctgcaggtgccatcccc

SEQ ID NO: 820564 - DNA, 98 bp, Homo sapiens
agtgatccacccaccgtggcctcccaaagtgctgagattaaaggttttcaaatggaacattttgatgcatcacttagtacctatttcaaggcattgct

SEQ ID NO: 820565 - DNA, 100 bp, Homo sapiens
gcaaagtggaagaacacagcaagcaaagccttgtgtttcaagctgggaagttgaatgcctttgagaacttgatgcataaaatttgcatgactcctcactc

SEQ ID NO: 820566 - DNA, 100 bp, Homo sapiens
gagattccaaccttccagccccttttgaaaggttcaggaagatttgactgaagagaaaaaaagggaactggagcataatgctgaagagacctatggtgaa

SEQ ID NO: 820567 - DNA, 100 bp, Homo sapiens
tggtgacaactcaagagcaatcagtaccatctggcagcacacttctgcttttgttccttcatcaggacgaatttactcttttgggcttggtggtaatggg

SEQ ID NO: 820568 - DNA, 100 bp, Homo sapiens
tcgtctccggacggggccctgacacggccaccctactgcctggaggccggggagccgacgcctgtcttattgccagcagttttgaagatgactcccgtgt

SEQ ID NO: 820569 - DNA, 100 bp, Homo sapiens
ctgggcgtcgctgaagctgtgtctgcggggaggcagcggaaggcggcaggtcatcaccgagtggtcttctcacatcatccttcaggcagcaccaagagtc

SEQ ID NO: 820570 - DNA, 98 bp, Homo sapiens
caagagccctgaagtgctccgggcatttgatgtaccagacgcagaggcacgagagcatcccacggtggtacccagtatcatgcaacagatgagtgacc

SEQ ID NO: 820571 - DNA, 105 bp, Homo sapiens
gtctcgctccgtggccttagctgtgctcgcgctactctctctttctggcctggaggctatccagcgagggagccatggatttgctgcgggagctgaaggccatgc

SEQ ID NO: 820572 - DNA, 99 bp, Homo sapiens
ccgtttctggctccgggctgagcttcctggagaagaggaaggtagctacagcaagctgggtagcaggcagatccaaaggatatcatgaagtttccaggg

SEQ ID NO: 820573 - DNA, 100 bp, Homo sapiens
acaccagggaattgaatttacaagattttagtcatcttgaccacagatcagtgtactgttacccggacatacctattccttcacaagttctggttcttca

SEQ ID NO: 820574 - DNA, 100 bp, Homo sapiens
ggtcggggaggagaccatggctgactacctgctgtacaccctcaacaaacaccagcgctttgggatggacactccacagctgaccttgactgaactccgg

SEQ ID NO: 820575 - DNA, 100 bp, Homo sapiens
ggaagagttggaaaatgaaaggaatcagtatgaatggaagctaaaggccactaagtcttgtgaaaatgccattgtgtgctggaaacctggcaagatggaa

SEQ ID NO: 820576 - DNA, 98 bp, Homo sapiens
ctggtcaaaaggtcaactaaaagcattgtttctagaacatgaggactcacaccacccggcaagaactgctcactacggctccctgccccagaagtcac

SEQ ID NO: 820577 - DNA, 99 bp, Homo sapiens
cgagggcgtcgcggactctccccgcgatgatgccgaataaaagccagggatccatctttgtccggatacacgccccgtggcaggtgctggccagagagg

SEQ ID NO: 820578 - DNA, 100 bp, Homo sapiens
aaaatgtcaaaactaacagaacatcacaggactatgatcagcttccttcatgttcaggccttggatggtatactgtaaattcagcatatggagataccat

SEQ ID NO: 820579 - DNA, 100 bp, Homo sapiens
ctaaagcacatcgaggtgaatgggagcaagattggcccagacaacctgccttatgtccagatcttgaaggaaactcaagagtatacccgaaatgttgtta

SEQ ID NO: 820580 - DNA, 100 bp, Homo sapiens
gcaggcgctccaggacctgctcagcgagtacatgaataataaggtagaagatagcaccatgccgattcgtcgaactgtgaattctacccgggaaactcct

SEQ ID NO: 820581 - DNA, 100 bp, Homo sapiens
cggcagaacagaccaggcgctgtggttcacgcctgtaatcccagcactttgggaggccgaggcgggtggatcacttgagtcctcccaaaccgaaggaccc

SEQ ID NO: 820582 - DNA, 98 bp, Homo sapiens
actgcggcgagtatacatgcaaagcttccaatgagtatggcagtgtcagctgtacagccacactaactgtgacaggtgtggtggctcacgtctgtaat

SEQ ID NO: 820583 - DNA, 100 bp, Homo sapiens
caaagtgcccggacccaaaacaggaaatcttagcaaagcaatgtctcaagatggtgcttctcagttccaagaagtcattcggcaagagctagaattatct

SEQ ID NO: 820584 - DNA, 98 bp, Homo sapiens
taacgcctgaggacactgaagacatgcccgtggggcaggattcggaaatctgcctgctgaagtctggagaactgatgacgtagacaagtttggcaacg

SEQ ID NO: 820585 - DNA, 100 bp, Homo sapiens
agcagcagcggtagctgcccaaggagggccatgaagcccccaggaggagaatcgagcaatctttttggaagtccagaagaagctactccttccagcaggc

SEQ ID NO: 820586 - DNA, 50 bp, Homo sapiens
agatgcctgaccagtttgaaatcgcagccgactccacgggaacccactcc

SEQ ID NO: 820587 - DNA, 100 bp, Homo sapiens
aacccgaagcacctcccggcgccgggacgcttcttcttttaaggaagaaatctctaaacgttttaaatcacatactgaccaacttgtgttgatatttgct

SEQ ID NO: 820588 - DNA, 100 bp, Homo sapiens
gataatcattgggcaaaaacttgtgagggcgaaggtcgtattgaatggtgttgtagtgaagtttagcaactgcaatggaaaaagaaaagtacaatatgag

SEQ ID NO: 820589 - DNA, 98 bp, Homo sapiens
cagtctgaagctggaatgtgagaaactcgccagtgagaagacagagatgcagcggcattatgtcatgtgctgaaccggataaggacctggcagaaaac

SEQ ID NO: 820590 - DNA, 98 bp, Homo sapiens
cagccaccgcccaggaagcttcatggctgggcaccaggccctgactaccagcgggtcacagaaagtcgagagagccaaatgacgattgaggagaggaa

SEQ ID NO: 820591 - DNA, 98 bp, Homo sapiens
aacgcatcgatggtggaatcactgggaacatgcggcaagaggccattgaccgcttcaatgtgcatcagagacctttgccccagccagcactacttcct

SEQ ID NO: 820592 - DNA, 100 bp, Homo sapiens
aaattttccttgacctttaggtgcttttatattcatctcaaaaacaaaattctgaactcaggacttggcaaggtgataaaagaaaatgtggctgaagtta

SEQ ID NO: 820593 - DNA, 99 bp, Homo sapiens
gaagatcctggacatgaagaccgagggggtattgttgcagcatctggcagtgagactgaggatgaggacagcatggacattcccttggacctttcttca

SEQ ID NO: 820594 - DNA, 99 bp, Homo sapiens
tcgtccactcccttgacctcaggaccctacccagggttctagaaatccaggcaggcatctatcttgaagaaccgccaagacccattgctcctcctcagc

SEQ ID NO: 820595 - DNA, 98 bp, Homo sapiens
accgtcctctctgtctgtgccatcgccaccaatggagccgtgcaggggggcggagcctacttttgatacaaccaagtcggatgggcagtttaagaaga

SEQ ID NO: 820596 - DNA, 98 bp, Homo sapiens
aaggcagaactgcctgattacaggagctttaacagattctacaagggggttgctcctctctggatgagacagataccatacaccatgatgaagttcgc

SEQ ID NO: 820597 - DNA, 98 bp, Homo sapiens
gaaacaggagaacgggaagcctcctgccgagataaagccaccacgtctggatgaaatctgtaagtacagacctgagaattctgttgctaatgacactg

SEQ ID NO: 820598 - DNA, 100 bp, Homo sapiens
tggttatagccagtccacggacacttcaggctatggccagagcagctattcttcttatggccagagccagaacatgagaagcaggcagccagtacccttg

SEQ ID NO: 820599 - DNA, 98 bp, Homo sapiens
gcgagctcctcaagaatctcgtgctcaccggtttctcccacatcgacctgacgaagttatacggaagcgtctcctcattgatggagatggtgctggag

SEQ ID NO: 820600 - DNA, 98 bp, Homo sapiens
taggaccagaagcctttcgcggagaaaaggctgacatgcccgtcctatatgacaggaggaagaaggcacctacgatcaaactctggagttccgtaggg

SEQ ID NO: 820601 - DNA, 98 bp, Homo sapiens
tcctgcagaagtttgcagctcaggagttgattgagggaagacaaaggcgctttggctaagctggtggaagctatcaggaccaattacaatgacagata

SEQ ID NO: 820602 - DNA, 100 bp, Homo sapiens
tgctgtgtgttcgcatcatgatgaacgagggcaaaatcaaccaggtactggtgtggcatactcggacagagaagcccaagatgaagcaggaggagcagct

SEQ ID NO: 820603 - DNA, 99 bp, Homo sapiens
aaagaaccatctcccaaacaggatgatttggtgcttccagatgtgagttatcaggtggaatccagtgaggaggatcagtctcagactatggatcctcaa

SEQ ID NO: 820604 - DNA, 100 bp, Homo sapiens
gctgcctgagagtgctcctgaggaccccgacagctgggacagcatctttggggacattgaacgaatcatcatgcctgggtagggacggggtttcaccatg

SEQ ID NO: 820605 - DNA, 100 bp, Homo sapiens
gacgagagactcaggaactgtgagtgcgctgacttggagcctctcttcctatacctgtgcaactggaatgcttgctgattcctctgcacacttctaaggc

SEQ ID NO: 820606 - DNA, 99 bp, Homo sapiens
ccacactggctacctactcgggtcagacagccatgaagctggccagcagcgacaccatgaagcgctttctcagtgccagtgaaactgaaattgcattct

SEQ ID NO: 820607 - DNA, 100 bp, Homo sapiens
tactggatgcacgtacagaatacattcagccgtcagggttgtgagtcccggcccagcccctccacccccctgcccccccgatgcgaccatgggctctggc

SEQ ID NO: 820608 - DNA, 100 bp, Homo sapiens
gatttccaccaacattcaaggaaacaaatcaactaaaaacaaaattgccagaaaatctttcctctaaagtcaaactggaaatgggtcctgatgaatatga

SEQ ID NO: 820609 - DNA, 98 bp, Homo sapiens
gagacagcccgagggatcgagacctgaacatgtggtggtggttgcacagtcgccttttccagtttggagagacgttcccgagcgggaagaagttccgc

SEQ ID NO: 820610 - DNA, 100 bp, Homo sapiens
ctatatacctgtcagatcaaggatggtggtgtgcagcctcagtgattgccttcatgttgtggagcccatgcctgtgcgggggcctgatgtagaagcatac

SEQ ID NO: 820611 - DNA, 100 bp, Homo sapiens
cacatattagactggaaaattcttctctttttagctcgtggcacaaaatcctgatggactccacgaaaggaattgaatgatctggcacgggaccctccag

SEQ ID NO: 820612 - DNA, 98 bp, Homo sapiens
cgcccctggtcctgctgctcggggtccgcgcggcctccgcggagccagatccagacatttaatgtggatgcaccatgccagaccgtggaagatttaac

SEQ ID NO: 820613 - DNA, 100 bp, Homo sapiens
cttgtatggagagcagacggggaaaacacggccttcctgtgtgagcccaggtttggaattcacccagttgcaggccgaatgcctggtcagcttaatgtgc

SEQ ID NO: 820614 - DNA, 100 bp, Homo sapiens
ggcccccagcacgtccaccaacctgaccatgacctttaacaaccagctgaccactgtccacaaccagtgggttgccagcgttgatgtggtggagaatgaa

SEQ ID NO: 820615 - DNA, 98 bp, Homo sapiens
tgctgggcgaagcacgctactacctggtgcagggcctgattgaggactgccagctggcgctgcaggttacgaaggtgagaatctgatgaaaattctaa

SEQ ID NO: 820616 - DNA, 99 bp, Homo sapiens
gccgtgtgtgctggaaacaaaatattcatgctggatattgagctgggctcaaaatgcagagaactcaaagatattcatttcggccagtgttacaagatc

SEQ ID NO: 820617 - DNA, 100 bp, Homo sapiens
catttttgctggaacatatgccaactttgtgacaactcatcagacaaatcttcctattttcaagctgaaagaatctactgttagaagaagatacagtgac

SEQ ID NO: 820618 - DNA, 99 bp, Homo sapiens
gaactgagcccaggccacagtaccctattcacgctctgtgcttgtgccaaggtgtcgtgaaaactacccctaaaagccaaaatgggaaaggaaaagact

SEQ ID NO: 820619 - DNA, 100 bp, Homo sapiens
agggccatccagcgcttcctgcggaccggggcggccgtcaggtggaatatgtgatcaagtgtgacatgtcagctctgcagaagattctgtatcgccatat

SEQ ID NO: 820620 - DNA, 136 bp, Homo sapiens
tcagaaaacaagaccggttcctttctaatcagagaaagtgaaagccaaaaaggagaattctctctttcaggttcaatgtatctatgcctgcctacctcaatctgcaagggagtgtcagaaaggccccgcattcgcc

SEQ ID NO: 820621 - DNA, 98 bp, Homo sapiens
aggccaacgaacatgtcaaaggaggagcagcagagctggccccgggtgctcacatggagtggccaagaagaagtagtgagtcatacctctcaagtgca

SEQ ID NO: 820622 - DNA, 99 bp, Homo sapiens
acatcctgacttctgtgagctcattgcgcgggactagggaggcagctgagtatgtcccagagaaggtgaagaaagcggaaaagaaattagaagagaatc

SEQ ID NO: 820623 - DNA, 100 bp, Homo sapiens
cagggacaggtttggtcattttccccggagcctttgactggtttctggaggcattgaagttgatatcgatgtggagcacggagggaaaagaagccgcctg

SEQ ID NO: 820624 - DNA, 100 bp, Homo sapiens
tgaaagattctgtgactgcagtcgtgttcgtcgcacttggaacatcagtgccaggtagttggcaaaaaaggagaaagccactaaggtacaaaagacactg

SEQ ID NO: 820625 - DNA, 127 bp, Homo sapiens
caaaactcagtgccctcaaggctcggaagaatgtggagagttttctagaagcctgtcgaaaaatgggggtgcctgagctctggcaggctgccctgagcacgctcaaccccaaccccacggacagctg

SEQ ID NO: 820626 - DNA, 98 bp, Homo sapiens
ggcgggacgcgcacagtccctccacgcggaaagaagtaccttcgccggtcaccggctcctgcaggttcaggacctcaaggggctcggctatgagaagg

SEQ ID NO: 820627 - DNA, 98 bp, Homo sapiens
cccttaaaaagacggacagcccatcgtgtgaactatagagtttgtggacagatttatattgctgggaagttatcaattccaaaccagatgaaagaccc

SEQ ID NO: 820628 - DNA, 99 bp, Homo sapiens
gctgaattggagctcgtactgagaaaatacaaggagctggacatcgagcctgagggaggggaaaggcgcaggtgttctaagaacggaagcatctgggct

SEQ ID NO: 820629 - DNA, 98 bp, Homo sapiens
ggctttccagttgtttgacaagagtggaaatggagaggtgacatttgatgaacagactagccactttgcattgactggaaacaatggcatttacagaa

SEQ ID NO: 820630 - DNA, 100 bp, Homo sapiens
agatcgcacttcctgcagtgggcattagccacgtccagacaggtgatttggcttctgcacagttaggaggagcaccaaaccgatgggaggttttgtcagc

SEQ ID NO: 820631 - DNA, 100 bp, Homo sapiens
agcatgcttcaagccttagaagagtatcagaatggcaaagcaacttaaccttccagaaaatacagatgattggacaaaagaggatgtaaatcagtggtta

SEQ ID NO: 820632 - DNA, 99 bp, Homo sapiens
ggtgggggccacgccgcacctgcgcaacctcgccgtggccatgtgcagccgctacgacctgaaggagaagaaggagaaggtggaggagaaggcaagccg

SEQ ID NO: 820633 - DNA, 100 bp, Homo sapiens
ctttggtggagtctttagatgcactgttggcttgcgagacaaatatgtttatgtgaagaaccagctcagtgggactctacagattaaaccaggggttttc

SEQ ID NO: 820634 - DNA, 98 bp, Homo sapiens
gtcttctgattatgtggagattcactacgaaaatgggaaaccacagtactctaagatgtttcagaaagaacaagtggatcctcttcagatgaaattgc

SEQ ID NO: 820635 - DNA, 100 bp, Homo sapiens
ctgggtccatgcagccttcctcctctgcctcctcagtcttggcggagccatcgaaattcctatggatcaccccagagtcagaaggagtgagaaccctgac

SEQ ID NO: 820636 - DNA, 100 bp, Homo sapiens
ccgactacctcaacctggtgcagtgcgagacgctagagggagaacgtatttaccgggcagtcaaagatctattcctacatgagcccgaacaaatgctctg

SEQ ID NO: 820637 - DNA, 117 bp, Homo sapiens
gctcttgaggttcacagatgatacgtttgatccagaacttgcagcaacaatagctccagcggcgccatgagcaaatgaaaaagaatttggaagcacagcacaaagaattggaggaaa

SEQ ID NO: 820638 - DNA, 99 bp, Homo sapiens
ctgccctacttgtcagggaacaggaagaattcctaggggaaaggagtgttcccaggatgaaagcacagctgctgccatcttcactgttcagatggatga

SEQ ID NO: 820639 - DNA, 100 bp, Homo sapiens
catatccgggtgcggctccaccccttccacgtcatccgcatcaacaagatgttgtcctgtgctggggctgacagggcggcgactggcggcgcgatggacc

SEQ ID NO: 820640 - DNA, 99 bp, Homo sapiens
atgaaggtggtaatcctgacgaaattgaaattacctccgagggaaacaagaaaacatcaaagaggtctagcaaaggcaatgaatcgctccctggctaat

SEQ ID NO: 820641 - DNA, 98 bp, Homo sapiens
acccacaggtgcatttcacagcactctgggcgaaaattggatgtgaaaatgaagccagaccgagggtgaggaggtcctccggcagctgcagaccctgg

SEQ ID NO: 820642 - DNA, 101 bp, Homo sapiens
taacatcgcagtgctgctcgcgggtctggctagtcaggcgaagtttgcagattgcttgcacacatttagatgtggatttagtctgcataactgtaacagag

SEQ ID NO: 820643 - DNA, 100 bp, Homo sapiens
ctgatgttgctagtcctcgagtggaaagctctatgcggagtacgtctgggtcacctaggcctgcagggtttggaataccttgtagcaggacatgaggata

SEQ ID NO: 820644 - DNA, 98 bp, Homo sapiens
cagaggctggaccgcgtcatgctcagaagggtttgccaagctgctgctgcgcctcccagctctgcgttccattggcttgaaatgcctggagcacctct

SEQ ID NO: 820645 - DNA, 98 bp, Homo sapiens
gacactgttagtgtagtcattgtccctatggagaaactgaggcatggagaggctgaagtcacacaaattcacttgtcatggattagtgactggtcaga

SEQ ID NO: 820646 - DNA, 116 bp, Homo sapiens
cgttcggctactacttaataatgacaatctcctcagggaaggggcagcacaagccatcctcctcaaggtgcgagacatggtcagcagccatgtggagcgagtgtttcagatctatg

SEQ ID NO: 820647 - DNA, 100 bp, Homo sapiens
gctacgaccaacttttcgttcagtgggacttgcttcacgcagccaactcttcctgccaaataaatagagtcatcagtcatcctactcttccgatcagcat

SEQ ID NO: 820648 - DNA, 100 bp, Homo sapiens
tgtatcctgtcaagggggcaagtggataccctggggctgagaggaatcttctggagtactcttattttgaaaagctttggacagtccgccatctttctcc

SEQ ID NO: 820649 - DNA, 100 bp, Homo sapiens
aactccaggacagcatccaggcctcattggacagcattcgaggagccaccttcctcgtcacgtttggaaactcagagaaacctgaaactatgacttgtcg

SEQ ID NO: 820650 - DNA, 100 bp, Homo sapiens
gaccaagctcaaacccctccggaaggccctccctatcctgaagacattagctgagagtctggcaccttttaaaggtctgatcatcaattgtctctctggg

SEQ ID NO: 820651 - DNA, 98 bp, Homo sapiens
tttaccatgacgataagcaaccagcatttagagctgtttatgaagcactgagaaatggtcaacatatttcactggcacctattcacaagcttgaagaa

SEQ ID NO: 820652 - DNA, 100 bp, Homo sapiens
ggagtgcaagcttagagcgtctggccaagaatcagaggaagtgggcccaggctgcaagcacaaaggaagtttgctcagtctcagccgaatagtcccagca

SEQ ID NO: 820653 - DNA, 98 bp, Homo sapiens
aggattctggggtgtttctcctcctttcctccctcccagatcttctcacgatgtggtggtacagtgggagctattctgacatgtccactggaagttgt

SEQ ID NO: 820654 - DNA, 98 bp, Homo sapiens
gaccggctgccgcctgctccccggaaaagggcactcgtctccgtgggtgtggcggagcgcgcggtgcatggtgtgactgaagaaatatcaaatgtttc

SEQ ID NO: 820655 - DNA, 98 bp, Homo sapiens
cggatctcctggaagtgttggcggaggaaggtgaatgaaaactttgccattgatttgatagcagagcagcccgtgagcgaggtggagactcgggtgat

SEQ ID NO: 820656 - DNA, 98 bp, Homo sapiens
tcgggggcctcatcagaaatgttacacacggagtatcaaactctgctgccaaggttgaagctccattcataccaaagtttagaggctctggagatacc

SEQ ID NO: 820657 - DNA, 99 bp, Homo sapiens
ccgagtcctagcgcctggcctgcgcgccgctgcccgcgccacagatagttctgccccagagacaagtatgaataccacagacaacggtgtcaactgtct

SEQ ID NO: 820658 - DNA, 98 bp, Homo sapiens
aagttcttctacagccccagttatgtggacgagctgttaaaccagggcaccgaggaagagaaccaatggcagaggccacatgtgcaagcaagatggga

SEQ ID NO: 820659 - DNA, 111 bp, Homo sapiens
gatggcaagatggaccctgtagcctatcgagtcaagtatacaccacaccaccgcacaggggacaaatggaaccctaaggactctgcaatatgaataattccctagagaaca

SEQ ID NO: 820660 - DNA, 100 bp, Homo sapiens
ccttttatgatgtccttgatgttctcatcaagcccacgagtttaggtatgatctcgtgaaatcttgagagaaactgaatgacgaatgaaactattgttcc

SEQ ID NO: 820661 - DNA, 100 bp, Homo sapiens
gccagccgcaagagtcaggagaagccgcgggagatcatggacgcggcggaaagaagatggcgaattagaagatggtgaaatagacgatgcaggatttgaa

SEQ ID NO: 820662 - DNA, 100 bp, Homo sapiens
cagaattcaactgtggagttcattgcttcttcagattacatggtagctacagcaagctgggtagcaggcagatccaaaggatatcatgaagtttccaggg

SEQ ID NO: 820663 - DNA, 99 bp, Homo sapiens
gagacacagttccatggatcagaaggcagacaagcagcttttcagatgcaaatgttagtaacaggagtatgggaaggcaaatacaacttcttctgtcag

SEQ ID NO: 820664 - DNA, 98 bp, Homo sapiens
tcctttcctgcttttggtttccctggcaggggttgaactgtggagtgtgtggtattcgaaggacccaagtcattgatgatgagtcagattactttgcc

SEQ ID NO: 820665 - DNA, 100 bp, Homo sapiens
aatggaaagtttttccaaatattcatctgtacagttcccatggagaatgttgcaacaattgctgattgtgccagtgtgattgaaggagtcagtcggagcc

SEQ ID NO: 820666 - DNA, 100 bp, Homo sapiens
gcggcggggaaaatggcggacgggaaggcgggagacgagaagcctgaaaagtcgcagcgagctggagccgccggagggagaagttggcagtggcccgact

SEQ ID NO: 820667 - DNA, 100 bp, Homo sapiens
taaccacctggatttccatctggatgttgctgtgatcagtctgaaatacagcctcctcgaaagatgttgtcagacagctgtgtcaagaaagcttttccag

SEQ ID NO: 820668 - DNA, 100 bp, Homo sapiens
tgatggtcctcctcctgacgttgtaaatcaggaccccaacaataacttacaggatggccatgagctacccccaccaattgcctttgatgttgaagccccc

SEQ ID NO: 820669 - DNA, 100 bp, Homo sapiens
gcgctgcggatccagggggtcggctgccaggtacagggtccccttctgcttgttatagccccagtagtcctgtccaggttctagaagactccacctactt

SEQ ID NO: 820670 - DNA, 102 bp, Homo sapiens
agatgtaaatgtcagtggaaaggagagctaccatcactaaggccacgcccagatttcttctaccgctgcttccctgatgggctagcccattctgacttgatg

SEQ ID NO: 820671 - DNA, 98 bp, Homo sapiens
gtcactccaacctcttttcgctgttttcggctttgtgagaaaccttaccatcaaacacgatggccagcaacgttaccaacaagacagatcctcgctcc

SEQ ID NO: 820672 - DNA, 100 bp, Homo sapiens
cgcgaagagccgttagtcatgccggtgtggtggcggcggcggagactgcgggcccgtagctgggctctgcgaggtgaatatgtttacaaaccaaggaaca

SEQ ID NO: 820673 - DNA, 132 bp, Homo sapiens
acctttccaccccaaatttatcaaagaactgagagtgattgagagtggaccacactgcgccaacacagaaattatgtagctacagcaagctgggtagcaggcagatccaaaggatatcatgaagtttccagg

SEQ ID NO: 820674 - DNA, 100 bp, Homo sapiens
aaagcttccaatgagtatggcagtgtcagctgtacagccacactaactgtgacagaattgaagctatcacaagctcaggacagatgggctccttcatacg

SEQ ID NO: 820675 - DNA, 100 bp, Homo sapiens
agaaatgtgtggaatttattgaagatacagtcttaggaaaagtcctcagtgctgtgggcagtgcccagctactgatgtcccagaaattccagcagttccg

SEQ ID NO: 820676 - DNA, 99 bp, Homo sapiens
catgaaccagctggtgaagaggcactgaggcaaaaacgagccggtcggagaccatgagaaacagcgtcaaatcatcttttcatgatcccaagctgaaag

SEQ ID NO: 820677 - DNA, 98 bp, Homo sapiens
gagtcgagtctagaattcacacagagccacctagattgactggggcgactttggggtagaggcagtgtctgaggggactgactctggcatctctgccg

SEQ ID NO: 820678 - DNA, 99 bp, Homo sapiens
gaagacatgacacttacaagatggacagggatgataattgggcctccaagagaagacaactgttagttttgtggcttactgctgctccacccagtgtct

SEQ ID NO: 820679 - DNA, 100 bp, Homo sapiens
tttatttcctcccagaagacactccccagggcagaaatagcgaccatggcgaggttgtggcagcactgcctgaaggtatgagaccagattctaatcttta

SEQ ID NO: 820680 - DNA, 98 bp, Homo sapiens
agaaatgctcatctgaaattcatcacctctctggagtcttcaaactgaccaagcattgaaaagacatacaacagctgtgccagactctgcttaaacca

SEQ ID NO: 820681 - DNA, 100 bp, Homo sapiens
acggatgactcccagcccccaacgctgggccaggagatcctggaggatcatcagtaacgtgccagcagacagcttgattcgtacagagcgcccaccaaat

SEQ ID NO: 820682 - DNA, 98 bp, Homo sapiens
ttgatagtcattcgtaatcagcaggccaaagactcagagcatgacgtatcccagactttactcaaggcaacactggacagtgttgtagaagaatgtgt

SEQ ID NO: 820683 - DNA, 98 bp, Homo sapiens
aagagccaaggaagagaaacttcagcaggcgatagcaatgcacagccaatttcatgctccactatagggttgttggtacagaggaacgtattcctatt

SEQ ID NO: 820684 - DNA, 50 bp, Homo sapiens
gaatgatgtcaaaatgtgtgtggccatttccccaaaggaatgtcttgcat

SEQ ID NO: 820685 - DNA, 100 bp, Homo sapiens
cacagcacgcacaagaagctcaccgcatgtctgcagggccagcaaggggcagaggctgacaagcgctcctgctctggaactgaacccgcagtatcttcca

SEQ ID NO: 820686 - DNA, 100 bp, Homo sapiens
ttgacactatgggaacctaccatggtatgacactgaaatctgtaacgatcttggcatatacagaagggctgcatggaaaatggctgttcacagagatacg

SEQ ID NO: 820687 - DNA, 100 bp, Homo sapiens
ttcaagttcacttattgcctatgctgtattccataatatacagaaatctccagaggttcaaaccttgtactactcagctgatcacaagctgcttgatggg

SEQ ID NO: 820688 - DNA, 100 bp, Homo sapiens
agatccagttcctgcgaactagcatccacaatgggtaccccagcctcggtggtcagtgagccacccccttggcaggccccgattgaggcccggggccgca

SEQ ID NO: 820689 - DNA, 99 bp, Homo sapiens
aagaattacagactactcttgtccgtggataccaggtcaaaatgcagatcttcgtgaaaacccttaccggcaagaccatcacccttgaggtggagccca

SEQ ID NO: 820690 - DNA, 98 bp, Homo sapiens
aggaaaacgaggaaagtcccaggatgactactgtgtcaaagtgcctggtgaagaatgtgatgggatcactagcatgtctgcggagagcggccctggga

SEQ ID NO: 820691 - DNA, 98 bp, Homo sapiens
tgaacttcaagcatacatcaaggaacaccacaccacgggcctcacatggagcaaaacagagtacttcttgcaagcagagctgacaagcaacgtcttaa

SEQ ID NO: 820692 - DNA, 100 bp, Homo sapiens
ttcaccaccaaatggatttggtattggaagaatgaatctggcacatggattcagtatggagaagagccctgaatcgtgtgcacttacttgggcgagtggg

SEQ ID NO: 820693 - DNA, 98 bp, Homo sapiens
gaaacgatcccgggccaaccggaaatcttgcaaaggccggcgtgtgcagccccagtggtcccctcctgctgggacccagccatgcagactccaccttt

SEQ ID NO: 820694 - DNA, 127 bp, Homo sapiens
caaaacaaaatacatgtcagttatcaagagactcaacagatgcagatgaaggacagaccagagatttgttttatgaaaggtgcttacgaacaagtaattaagtactgtactacataccagagcaaag

SEQ ID NO: 820695 - DNA, 99 bp, Homo sapiens
aatcaagcatcgtgtgtcgatttgtccaggatcactttgaccacaacatcagccctactattgggttgggtatctacagccattggttgctgttcaggt

SEQ ID NO: 820696 - DNA, 100 bp, Homo sapiens
agaaatgttacacacggagtatcaaactctgctgccaagtgatgtcttggttcgtgtccccactgctttctggaattatgtctggaattttattcttcct

SEQ ID NO: 820697 - DNA, 100 bp, Homo sapiens
gcagcattatgcagaaactgaagaaaatgagaagccgcatggatgaaaaggtgaaaatcctatttataagagtgccgtaacaactgtggtcaatccgaag

SEQ ID NO: 820698 - DNA, 100 bp, Homo sapiens
agaaatggaaagtgttttggcccaggcatcctattttcattggtggtgatgctgtatgtcatctgggtccaggcagtggctgacatggaaagctaccgaa

SEQ ID NO: 820699 - DNA, 100 bp, Homo sapiens
acatcatccctgttcttgatgagattaagtccatggcaacaggaatgggacaacaaccagatccagcctttggtcgagtgtctagtcctcccaatgcaat

SEQ ID NO: 820700 - DNA, 100 bp, Homo sapiens
atagatactctaacgccaaggtcagctgctggtacaagtacctccttttcagctacaacatcatcttctgggccccaaggcccagaagaaatttaagcgt

SEQ ID NO: 820701 - DNA, 99 bp, Homo sapiens
agagacccaagttcccagaagcctggaaagaaaatagcctgtttcctgttttccagcacccaacataacttgtaaggattccagtggcaatgaaacaca

SEQ ID NO: 820702 - DNA, 98 bp, Homo sapiens
agcctaatccaaagactgtggaacttttaagtggagtggtggatcagaccaaagatgggtgagctcctgggtgacatggctgatcctcacggcaggct

SEQ ID NO: 820703 - DNA, 111 bp, Homo sapiens
tgtgaaacaagttaaagaattaataagtttaggggcaaatgtgaatgtgaaagattttgcaggacatggatttgattgacatactttggaggcaagatatagatcttggag

SEQ ID NO: 820704 - DNA, 100 bp, Homo sapiens
gatttgaaagacactggctctgccacttaacagccatgtaaccttgggttcccggcccccaagtcgcaactggaacagcgagacacctggggatgaggag

SEQ ID NO: 820705 - DNA, 100 bp, Homo sapiens
cacgtgacatcaagaggaagcggaaaccagtggccacagcatctttgtctagccccagtgcagaatggcaacatacttgtttaacattgaattctgtgca

SEQ ID NO: 820706 - DNA, 100 bp, Homo sapiens
aatataacctgcaacttcagcactactgtgaaagagacaatttgattggggaagaaacaaaggttcaaaccttgtactactcagctgatcacaagctgct

SEQ ID NO: 820707 - DNA, 100 bp, Homo sapiens
acatactgcatggacacagaaatctggtgactggaatccagcttaaccccaacaaccatctacaggtatctcaacagcaaccgagtcacatcaatggaac

SEQ ID NO: 820708 - DNA, 98 bp, Homo sapiens
ctgggacctggttgacaggatagggttcccagtagctgcagcagtgaaagacagtgattggctccagtgctcccagaaggatttgggctgaagccagg

SEQ ID NO: 820709 - DNA, 135 bp, Homo sapiens
tacatctctcatcatttcagcaacaaggaaataaattagtggcagagtaagggtgacttgaactgtcaagtaatccacctctggctaccatccttattcctcctcatgctcggattcaagcagctgcttcaaccc

SEQ ID NO: 820710 - DNA, 99 bp, Homo sapiens
agcatcctagtggaggacgcccctgtgggggctgttgtggttccgactataaacagtacgtgtttggcggctgggcctgggcctggtggtgtatctccg

SEQ ID NO: 820711 - DNA, 100 bp, Homo sapiens
cgagaagtccccgaccgactgccgccgccatgtctgcgcatctgcaatggatggtcgtgcggaactgctccagtttcctgatcaagaggaataagcagac

SEQ ID NO: 820712 - DNA, 98 bp, Homo sapiens
ctgtggtcactaatgtacaggcagaaaacgagaggctcaccgcagtcgtgcaggatctgaaggagggtctgcggaagagggagctgctgaaggagctg

SEQ ID NO: 820713 - DNA, 100 bp, Homo sapiens
cgagcctcgtggtgtggtgtatggccgtgggcatctcctacattagcgtctacgaccaccaagtttgctggcctagacctgaactcttcagataatcaga

SEQ ID NO: 820714 - DNA, 98 bp, Homo sapiens
ggaccttttttcatttccatttctaccttgtatgcctcaatttgctggatttaagcactgctgcactttatgaggaccagtggctgtaggacaatttc

SEQ ID NO: 820715 - DNA, 100 bp, Homo sapiens
caggttattctcgttcaagttaatccaggtgagactttcacaataagagcagaggatggaacacttcagtgcattcaagtgagacggtttaagcggaagc

SEQ ID NO: 820716 - DNA, 98 bp, Homo sapiens
attaacctggccatggaaatcgctgagaagcacctggatattcctaaaatgttggatgctgaagttgaatggatcgcagcagttaccattgctgctgg

SEQ ID NO: 820717 - DNA, 100 bp, Homo sapiens
ggcagatgagcagccctttgatctctgctttgggggccgaaggcagttctgcaagaggagctattctgatcttggaattcctcctgatcagcagagactg

SEQ ID NO: 820718 - DNA, 100 bp, Homo sapiens
acagattccaccaaaagctcaggtggctccaggatgtatttaacgtgcccttggtcatccagatgacggatgacgagaagtatctgtggaaggacctgac

SEQ ID NO: 820719 - DNA, 100 bp, Homo sapiens
ctctctatgatatgctaagaaagaatcttgtcactttagccactgctactacagattcagagcattcttcactccagaataatgagcaaccctctttggc

SEQ ID NO: 820720 - DNA, 100 bp, Homo sapiens
ccaaagctgaggtccccttgatcatgaactccataaaatccttttctgaccacgctcaatgtggaaggcttcacaggctgctcaagaagccgagatcaat

SEQ ID NO: 820721 - DNA, 98 bp, Homo sapiens
tgaccagattacgacaagcaacctaaataaagaacgtggggactgtacctcccttcagagccaacatcacttagaagtgcctgatcaactttctagcg

SEQ ID NO: 820722 - DNA, 126 bp, Homo sapiens
gttttgttttcccctcggcactaggcagcggaggagcccgaccgacccggtcatcatcagatttgaaatatttaaagtggatacaaaactatttcagcaatgcagacaattaagtgtgttgttgtg

SEQ ID NO: 820723 - DNA, 99 bp, Homo sapiens
aagaaaggcaaagaaaatgatatggaaatggaaattaaatgggttccaggtatcttgagaattacaaatgctatagaaaaatggaagaggatatttaca

SEQ ID NO: 820724 - DNA, 100 bp, Homo sapiens
ctgcccgggaccctgcgactggcagttacagaatgtctgaaggggacagtgtgggagaatccgtccatgggaaaccttcggtggtgtacagatttttcac

SEQ ID NO: 820725 - DNA, 135 bp, Homo sapiens
agaagacaacatctggagaggcatcctctctgttattttcttctttcttatcatcagtgtgttagctttccccaatgcatccaccagctgaggaacaaagtatcagaggagcatgatgttctcaggaagaaagag

SEQ ID NO: 820726 - DNA, 99 bp, Homo sapiens
gacaggaaagaaacttcctcctggaggaatacctggcattgacctctcagatcccaaacaactggcagaatttgctagatggaccacacatccccgacc

SEQ ID NO: 820727 - DNA, 100 bp, Homo sapiens
tataaatcccggttttggctgcttaaactgctggtctgccatgtgaatctggaggggcagccgttctactccaagaaggacagacccctgtgcaagaagc

SEQ ID NO: 820728 - DNA, 98 bp, Homo sapiens
aggaccaaaatcgaagcacggagaggcgccagtcggagcctcatggccttttcggctagagatgaagatggacatgctgaaaattttccccagcagca

SEQ ID NO: 820729 - DNA, 99 bp, Homo sapiens
atcacccgacgctttgtgaaccaattaaataccaagtaccgggattccttgccccagttggaatgtatcctgtcaggtataatgtcagtgaatggcaag

SEQ ID NO: 820730 - DNA, 99 bp, Homo sapiens
tcatttctgctgttccagctgtcctaattctccacctgaaaagatttcatcaggagatcgacaactgttaccaccgggcggccgagggccgcgcgccca

SEQ ID NO: 820731 - DNA, 100 bp, Homo sapiens
ccagaacccaggcccacggaggaagagccgggcagtccctggagcgggccagatatgtaactggttcatcaatgcccggcggcggcttctcccagacatg

SEQ ID NO: 820732 - DNA, 98 bp, Homo sapiens
tctttccccctttaacttagaggaacgaggattatacagaaatttgaagtccctccagctacaaggtgggcaccatggcggagaagtttgactgccac

SEQ ID NO: 820733 - DNA, 100 bp, Homo sapiens
aggagcagtagatgatgatgtagcagaagggcacacgtgtttcacgttgacaggtttgcttgggacgctagtaaccatgggcttgctgacttagccaaag

SEQ ID NO: 820734 - DNA, 98 bp, Homo sapiens
gaagctatgcttggcagcagaaggatttggcaacagactttgtttcttggagtccacttccaattccaaggctttcaccagttctcaggatgcccata

SEQ ID NO: 820735 - DNA, 100 bp, Homo sapiens
ttaacagcattggtcctgtgtcatcaataaacatgctgtatgccactgggtatggtgcaggtggcagactaggcattggagggacagagtcggtgtccac

SEQ ID NO: 820736 - DNA, 98 bp, Homo sapiens
ccgccctctgtccctcatttcagattattgccgctccgacccatagcacgctgcctactgcacacacatgagaaagtggctcatgccaaagaagaaaa

SEQ ID NO: 820737 - DNA, 98 bp, Homo sapiens
ggacattatttcggacacatctggtgacttccgcaagctgatggttgccctggcaaagggctctctaaatacgtacagattctgcgataatgtgtgga

SEQ ID NO: 820738 - DNA, 100 bp, Homo sapiens
actctccatgcagatgctcagctttatattatcagacgcgacacagcctcttgaaagtcagaatttttctcctgtggtgagagatgtaagttatgagcag

SEQ ID NO: 820739 - DNA, 106 bp, Homo sapiens
aggagcgcaggcgacaggaaaaatggcaacaggaacaggaacgtttgctccaggtgcatgaatacctcagaagtaaactctgttcactgtatgaaaatgactgcat

SEQ ID NO: 820740 - DNA, 100 bp, Homo sapiens
tgaaggttggcctgacaaattatgctgcagcatattgtactggcctgctgctggcccgcaggttgggacagaaataacccagagccctggaacaaactgg

SEQ ID NO: 820741 - DNA, 100 bp, Homo sapiens
aatttaaaacaaaacttcctaaggcagaaccctagccttccagctgccagggggcttaatgaactgcaaagttaacctgaaagagtgctttacagctgca

SEQ ID NO: 820742 - DNA, 100 bp, Homo sapiens
agaaactggagcacgccaaccggcatttgttgctcagaatacagatgttcagaaaatcattggtaaagatgtttgaagataaaggattagactgcatttt

SEQ ID NO: 820743 - DNA, 100 bp, Homo sapiens
ctgatcctccacttcagagaacagggggcttgtaactcagtattcactgcattagaaaacagtgaagatgcaattgaaattacaagcgaagaccgtttta

SEQ ID NO: 820744 - DNA, 99 bp, Homo sapiens
cgagaaagccgttgcctccagcaccacttctaatgaggcggggtttcaccatgttgcccagactggtcttgaactcctgagcttaagcaatccacctgc

SEQ ID NO: 820745 - DNA, 98 bp, Homo sapiens
tctcagatctggagcatcggctgcaggggtcagtgatggagctgcttcagaaaagagtagttgaacagctacggaagaacctgatagtaaagcaagaa

SEQ ID NO: 820746 - DNA, 100 bp, Homo sapiens
tccgggcggctgcttctttagatacggctatggagttactagtagagaaagcaatcagcagtgcttctagccctcagagccctggggatgcactgagaag

SEQ ID NO: 820747 - DNA, 98 bp, Homo sapiens
caagatgcccgagtgctacttctactccaagttcggcaagcacgaggagcggcaggacgagcatggctacatctcccggtgcttcacgcggaaataca

SEQ ID NO: 820748 - DNA, 98 bp, Homo sapiens
ttaacttttccaatgtggaatcctgggccttcattggcctgcactgcccaaagtcttggaaacttgctggatatgatgtaccgggagccagcacgatg

SEQ ID NO: 820749 - DNA, 98 bp, Homo sapiens
attcggagggtggccctggactcgttggtgctgcaggtggaagttaaacgagctgagcctcgggacagcaagagccaagcgccgggacagccaggtgc

SEQ ID NO: 820750 - DNA, 100 bp, Homo sapiens
cccggtgtggccacgagtcgggcagaggttgaaaagataattgcagttgcctgggacatttttcagccccttctttttggactaattggagcagaggtat

SEQ ID NO: 820751 - DNA, 100 bp, Homo sapiens
ttgctaaatgtagacaatggttagagaagaattttccaaatgaatttgcaaaacttactgtagggcatccgcttcgatcctgaaattccgcaaacactac

SEQ ID NO: 820752 - DNA, 98 bp, Homo sapiens
catagaaagggcagtagacgatggtgttaatactttcaaagttcttacaagggaatttgctgattcccttggaattccgtttttggaaaccagtgcta

SEQ ID NO: 820753 - DNA, 100 bp, Homo sapiens
atgttttttgaccgctttctccagtggaagtggttggaaaggtatggcggctctgaatggaggacttggcgccacaggcttgacgaatggcacggctggc

SEQ ID NO: 820754 - DNA, 100 bp, Homo sapiens
gaagcattacttccagaatacccagcgacgagtagaacagcccctctatggtttagatggcagtgctgcaaaggaggcaacggaggagcagtctgctctg

SEQ ID NO: 820755 - DNA, 100 bp, Homo sapiens
caagaactaagtaacgatctggatgcccagctcttctgggagaagaagctgagcggcctgaacgccttcgacattgctgaggagctggtcaagaccatgg

SEQ ID NO: 820756 - DNA, 98 bp, Homo sapiens
gaaacgatgaatgaagttcttgatatgtctgatgatgaagtaccttctccaggcaaattccgttcccctgcagcaccatctcctttggctcttcggca

SEQ ID NO: 820757 - DNA, 98 bp, Homo sapiens
cgcttctcatggcagcggcggtgctgatggaccgggttcaggtttctgggtgtctctggggagcccctgggccagattttcctctagactccagccca

SEQ ID NO: 820758 - DNA, 100 bp, Homo sapiens
gaacaggaccttaaggagaaggaagatactattaaacagaggacaagtgaggttcagggtttggattcaggatttgttcctagtgtccaagattttgata

SEQ ID NO: 820759 - DNA, 100 bp, Homo sapiens
acagggagccacctccgggcgcagaggcctacatcccacagagatacccagacaacaggatcgtctcgtccaagggagcgtggctgtgctgtctgcagag

SEQ ID NO: 820760 - DNA, 98 bp, Homo sapiens
ctaaccattccaaaatctctttcaggttttgcagccactcttgatgatgacaaaccttggtactccatttttcccattgacaatgaggatctggtata

SEQ ID NO: 820761 - DNA, 98 bp, Homo sapiens
caccagcaacagtggcaatgagaccagtggaagcagcaccatcggggagacaagcaatgatcagggccaaagcggtcagtgagaaggaagtggactct

SEQ ID NO: 820762 - DNA, 99 bp, Homo sapiens
caacgtggtgctgctcctcacggacgaccaggacgaagtgctcggcggcatgttgtcatttacgtgctgaagcatattgacttgaggaaaacgccttcc

SEQ ID NO: 820763 - DNA, 100 bp, Homo sapiens
cgcgggcccgctggagcccccggagccgcccgaagcgcccgcgagccgccggccgggagggatccgggtcctgaaggaacaggcctttgagagcagccag

SEQ ID NO: 820764 - DNA, 100 bp, Homo sapiens
ggagggaaaagaggatgggagagaagaaggcaaagaggatccagagaaggaccgagacatgggtgcccggcaccgcgcccgagcccactccattcagatc

SEQ ID NO: 820765 - DNA, 100 bp, Homo sapiens
tgcgcacttggaatagtagcaggcggcggcggcggaacgccaggcaggtgcggccgggtgtgtggcaacattacttcatgatgcagccatgaaccctgcg

SEQ ID NO: 820766 - DNA, 101 bp, Homo sapiens
ctggaaggggtttcggactactattctcagttgatctacaagtgtgattggtccagatagctgccttatccaactgcctcctttggaccacttcatcatgg

SEQ ID NO: 820767 - DNA, 98 bp, Homo sapiens
gcaaaggtccaaaaagactggagaaattttctgatgaacgtgctgcatatttcaggtgttatcataagcctatatatgcaaacagatttgcagtacca

SEQ ID NO: 820768 - DNA, 100 bp, Homo sapiens
tgcaggaagcgctggaaatagccagagagatggtcgagtttgagtggctgaggcagttttggtttcaaggcaatcgatacagaaagtgcactgactggtg

SEQ ID NO: 820769 - DNA, 98 bp, Homo sapiens
ggcgctggcgctgccggagctgtcgacccggcctggcgccggactagtactatactggcaattgctggagaagattttgcaattgttgcttctgatac

SEQ ID NO: 820770 - DNA, 100 bp, Homo sapiens
tacaccacttagtaaactaatgaaagcctattgtgaacgacaggtcgttccaggggtagaggaggcatgaaggatgaccgtcgggacagatactctgcgg

SEQ ID NO: 820771 - DNA, 100 bp, Homo sapiens
gctgactcagctgtctcctggccctgacttttctaagatgagaggagctgaaagaagattggcccatgcacaagctggaatgttctcccatggttgtttt

SEQ ID NO: 820772 - DNA, 100 bp, Homo sapiens
ggactcagcagcagcaactgtgggactttttgactacaattctcaacaacaggtttgtgaatcttatctcagagaggaagacaaagtttgccaaggtccc

SEQ ID NO: 820773 - DNA, 100 bp, Homo sapiens
tggcgtccaaagtcacagatgctatagtctggtatcaaaagaagtttgtgaagaaatatgggaacctttttagcttggagcttggtgacatatctgcagt

SEQ ID NO: 820774 - DNA, 100 bp, Homo sapiens
gaagaatatgaccaatatgaagaatacgaggagcgggagtatgaacgatatgaagagcatgaagaatacatcacagatctgggttggaatttgcccctga

SEQ ID NO: 820775 - DNA, 98 bp, Homo sapiens
aatggactttaattgctatggtgttgctgtcattaaagaagagattttatcgacatcgaaagtaaatttgccctaaggacccctgaagacacagctga

SEQ ID NO: 820776 - DNA, 99 bp, Homo sapiens
ttcagttgtggaattggttatgctactgtgttctcaggctccgagctctgtccagtggtgggagtattacatcccctcctctttctccagcattgccga

SEQ ID NO: 820777 - DNA, 100 bp, Homo sapiens
cgctgtctccagtgccgcagcagcagggagtttatagcatctgtggattttggtacccacggaggtgctggaaccaatcgttgaggattccaaggacaac

SEQ ID NO: 820778 - DNA, 99 bp, Homo sapiens
tggcattgaggccagtcctgacaaaatgcttcagactcaagttgcagaatataaacaactgaaagatactctgaataggattccaagccttcgaaaacc

SEQ ID NO: 820779 - DNA, 100 bp, Homo sapiens
agtgactgttctcaccttacaagacaagaattggtgctcttggaatattgctgttaccatcatttttggggggccatcttcctaatgctacacacagcct

SEQ ID NO: 820780 - DNA, 98 bp, Homo sapiens
tttggagaagctggagagggccaatagccaactgaaaagacaaaacatggacctcctagaaaaattacagatggatgatgcttggaagtataatggag

SEQ ID NO: 820781 - DNA, 100 bp, Homo sapiens
aaaagacaccttatcacccacacccacacgtgttcaatacacctcccacctgtcctcaggcatatcaaagggaacattgagtacagctgcccggccacca

SEQ ID NO: 820782 - DNA, 100 bp, Homo sapiens
gctacacaggaggacttcgacaagctgccccccaagagggacgagacggccctgcaggaggaggaggagctgcagctggccctggcgctgtcacagtcag

SEQ ID NO: 820783 - DNA, 98 bp, Homo sapiens
tctctctcttaagaaaggaaaatatcccaaggactaatctgatcgggtcttccttcatgcacttcgaggagaaattgcgcctctgaaagagaacgtga

SEQ ID NO: 820784 - DNA, 98 bp, Homo sapiens
gccacttcacacatggagagatgcaagaccagtccatttggggaaatccttcggatggtgaactcattagaatgggtaattccagaattgattggcca

SEQ ID NO: 820785 - DNA, 108 bp, Homo sapiens
cttccaatgagtatggcagtgtcagctgtacagccacactaactgtgacaggttttatggcaattggatatattccgacgaagcttgcgggttttgactggacatgtt

SEQ ID NO: 820786 - DNA, 99 bp, Homo sapiens
tgcgaagggggcaatggcctgggctgtgggtgaactccggagacggcattgactacagccagcagaagagggagaacattggggacttgatccaggaga

SEQ ID NO: 820787 - DNA, 100 bp, Homo sapiens
acatgatctcactggaccgcagcgtcaatgacttacgccaagaagagagtattcactacccacctgagactgcaagcatcatgttgatggctaggatggt

SEQ ID NO: 820788 - DNA, 98 bp, Homo sapiens
cctccactggcatcaccgacacactatgctccctccaaagccattatctccctccaaactctaaagaaggaatataaatcctatgaagccaagctccg

SEQ ID NO: 820789 - DNA, 100 bp, Homo sapiens
catgatgatcatggagtactaccggcagagcaaggccaagaagctgcaggccatgcgcgaggagcaggagatcaaagacgctggccttcagacctgatca

SEQ ID NO: 820790 - DNA, 100 bp, Homo sapiens
ttggcttattcaattatcatgttgaccacagaccttcacagtccacaggtatggctgatggcaagcattgtacttttccacatctgcctggcaaaacctt

SEQ ID NO: 820791 - DNA, 100 bp, Homo sapiens
aacctgaagaaagacagcaaacacctgaggtggtacctgatgattctggaactttctatgatcaggcagttgtcagatgtatcggcaagcagtgtaaacg

SEQ ID NO: 820792 - DNA, 99 bp, Homo sapiens
gtatgtctattacacagactttgtcatggagctcactctcctgtccctggacctcatgcaccatattcacatgttggtgattaaaaattctggccatct

SEQ ID NO: 820793 - DNA, 98 bp, Homo sapiens
agctttcaaagtcatgaacgaattaagaagggcagctgcaatgactctccgcacggtattattgtcattgcaagcactattggcagctgcagagccag

SEQ ID NO: 820794 - DNA, 98 bp, Homo sapiens
gtggcgcctccctgcgactcctggaccaccgggcgctggtctgctcccagccggctgaccggttccctgatgtgttacctgcttctgctactgatcca

SEQ ID NO: 820795 - DNA, 100 bp, Homo sapiens
tcctgggcaggctcggcagggcaggcagctccaggaggacagcacccaagaaaacctcatttggctcgctgaaggatgaagaccggattttcaccaacct

SEQ ID NO: 820796 - DNA, 99 bp, Homo sapiens
ccgagccctggaggtggggagaaaaggagagaagtttgctgaggaatgccttcaagcacaaagtgatgaatgactgccttcaagtctcaagaaaacact

SEQ ID NO: 820797 - DNA, 100 bp, Homo sapiens
acctggtcgtccggccctatacacccatctccagcgatgatgacaagggcttcgtggacctggtcatcaagcttagcagtgtctgcaaaaacgaatcttt

SEQ ID NO: 820798 - DNA, 100 bp, Homo sapiens
ccacttgaagaaaagggtgaaggaggcgaattttcagttgatagcaagtcatttcccttatttaaccgatgtgtccctcaaacacctgagtgctactccc

SEQ ID NO: 820799 - DNA, 99 bp, Homo sapiens
ttacagaatggctgcatgaacagatttaaaaatgcattaaattcatgcgacccatgggccataggaaaaggatacagagtagagtttcatgaacctgaa

SEQ ID NO: 820800 - DNA, 100 bp, Homo sapiens
tctgtgcagtggcacctgcgcgaagctggccaaagcctgcccagacggctcacctgtgcgggatggaacaaaagggcccttctagcccaatccagagctg

SEQ ID NO: 820801 - DNA, 98 bp, Homo sapiens
gcaaattcagctttgtgaaggcttcagatgtagccatggttaaagaagattgacattaagcaggctttgaacccgaaacgtactgggatcgaatgcac

SEQ ID NO: 820802 - DNA, 98 bp, Homo sapiens
tatttatccaacagctcctcccagacgcaagatggctgtcctctctaaggaatatggttttgtgcttctaactggtgctgccagctttataatggtgg

SEQ ID NO: 820803 - DNA, 100 bp, Homo sapiens
gcgaccgagggaatgatccttactaaccacgaccatcaaatccgtgtcggagtccttacagattttaccaaatgttgcaagaactctggagttcttatgg

SEQ ID NO: 820804 - DNA, 100 bp, Homo sapiens
catccttaccaatcccatttcaaaggagaagcagagccatgtggtctctctggttgtgtatggtcttcatggaagttcggggaaattaactggatctact

SEQ ID NO: 820805 - DNA, 98 bp, Homo sapiens
ggagttctcctgcatccttatggcgtgcctatgattgtaccggcagctccttaccttcctggactgattcaggaattgagtgatctacagcgcgatcc

SEQ ID NO: 820806 - DNA, 98 bp, Homo sapiens
cacacgctcggcgctgcgatccgcgcatataacgagggaagtgtaacatctcccatttttctgacatatttgctgctagagagtttaaagcccgagtg

SEQ ID NO: 820807 - DNA, 99 bp, Homo sapiens
atcatgccagctttgtcaacgggatctgggagtgacactgaacctttcagctcttggggcattggtgagtctcagtaatgcacgtctcagttccatcaa

SEQ ID NO: 820808 - DNA, 99 bp, Homo sapiens
gagaacactccgacgtcaattgaggtacaaggacaatcccttttccttaggggaaagctttggctcccgctgggatacagatgctgcctggggtatgga

SEQ ID NO: 820809 - DNA, 100 bp, Homo sapiens
agaaggcgacaggaaccagctcgggggccaactctgaggagtccactgcagcagggtaagcttgatgattaccaggaacgaatgaacaaaggggaaaggc

SEQ ID NO: 820810 - DNA, 100 bp, Homo sapiens
gaagagggagtcaccactggacctccaaggaagccacgtgcagacatctacaaccttcgatctcctgacgaagatgtggtgcaattgctgaacaaacccc

SEQ ID NO: 820811 - DNA, 99 bp, Homo sapiens
cttacaccagattaatttatcttgaaatggcgggcaactgaatcgcacacctcaatctatggaaacaaaccatcaggcctcccagaaagtatccgggat

SEQ ID NO: 820812 - DNA, 100 bp, Homo sapiens
attacctgcagagcaaggaatgtgacttccagaccaaatttgcactcagcctctctccagttccgtgatgatggtctaagcaaagacccttcgtcctgtt

SEQ ID NO: 820813 - DNA, 140 bp, Homo sapiens
gtaaaatagcagctcagcagtcagaaactgctcgcctcaccacagacgcagcacgtcaaatctgtgaggaagtttcagctgatcctactgccacactcacagcagcagaagaaagaaaggagaaggtgccaagtccacac

SEQ ID NO: 820814 - DNA, 99 bp, Homo sapiens
agtttgcagccctagtgtttgccggagccatggaatttgctgaaggttgctagaacacatcacgtccaagcagaaagctacctggtgtacaacatcatg

SEQ ID NO: 820815 - DNA, 98 bp, Homo sapiens
cggtgggacagtgcggctactcttgatcctctccggctgcttggtctacggcacagtggatggaagcacagtatatgcagagagtgtgattctgacta

SEQ ID NO: 820816 - DNA, 100 bp, Homo sapiens
agccggaatgcttattcctcacacttatccaggtgtgatgaatgcagactctgctaccattttggctgtttggatcctcctttgaaaaagtctcctaaac

SEQ ID NO: 820817 - DNA, 100 bp, Homo sapiens
gttaatttcatggtacatgagtggctatcatactggctattatatgggaagtgttcgccagttactacatgaaaagataagagatgcttatactcaccca

SEQ ID NO: 820818 - DNA, 99 bp, Homo sapiens
gatcccctcagttctgcgctgctcccgttccccctccccagagcaaggtgtcagcttcctctggtgcaaccagcaagtcttccagtatgaatcccacag

SEQ ID NO: 820819 - DNA, 100 bp, Homo sapiens
ggggaagtgatttgcctcagcttgtactgctacaagatcaagctgcagagaccattgaagctctgcatgcagcaggcctgaaagtctgggtgctcactgg

SEQ ID NO: 820820 - DNA, 100 bp, Homo sapiens
ggtccttccgaggaagctaaggccgcgttggggtgagaccctcacttcatccgatcagccactcttgatctggttttcatgtgggacacaaagctgtgac

SEQ ID NO: 820821 - DNA, 100 bp, Homo sapiens
tgtgcagttaaaaaatctgcccttttatgatgtccttgatgttctcatcaagcccacgagtttagggcaattcaagctgctggaacaagaccgagatata

SEQ ID NO: 820822 - DNA, 98 bp, Homo sapiens
aaagtgtaacatcagttacagagtaaaatgatccattctatggtagctcacttggatgctgttacaagtctagcagtagatcctaatggaatctattt

SEQ ID NO: 820823 - DNA, 100 bp, Homo sapiens
tctgggtctcagccgccaaagaccccgtccggtaggtacttccattcaaccaacccttggtgccaatggtgtgatattagacaaccagcctatagtcaaa

SEQ ID NO: 820824 - DNA, 103 bp, Homo sapiens
ttccagaggccgacgatctactatgtgatgtcagggcctgcgtgttgtcacaacttggacaaaagtaacacagaagaaccttactatgataatctacttggaa

SEQ ID NO: 820825 - DNA, 100 bp, Homo sapiens
gtgagctccggcccgggcgagcgggtgcgtctgccgcagagtcggcacctgaaggacatggagagaaagcttcttgctatctacctccaccatgatgaaa

SEQ ID NO: 820826 - DNA, 100 bp, Homo sapiens
ctggcagcctatgctcacattgtccctgtgtctagcagtttcagagatgatgtcagttcatacagactgtattgtgtcagtgcagattttaagtacattg

SEQ ID NO: 820827 - DNA, 100 bp, Homo sapiens
gattctcaccacgtactggctagacttatacttctcaaatcttaatttcctaaagtgggtgcctgatagacatcctaggactatacagaaggaaaaggcc

SEQ ID NO: 820828 - DNA, 100 bp, Homo sapiens
cgacgctttcaaagatgcactgcagagagcccggcagtgtcctgctatagactatactagacacacacttgatggtgctgcatgtcttctgaatagcaat

SEQ ID NO: 820829 - DNA, 99 bp, Homo sapiens
acggctgtgctcagggctcgcgggtgaccgaaaggatcatgaactagtgacctggaaaggttctgccacttgctgggaaaacagcaacagaaggatatt

SEQ ID NO: 820830 - DNA, 100 bp, Homo sapiens
cgcccctcctccccgccgtgcagatcatcaagctgctgctcgtcttctatgtcaagaagccactttttactactaaactgaggatccatgatacatgtgg

SEQ ID NO: 820831 - DNA, 100 bp, Homo sapiens
cttcctcttcagtcatcagtgtgttggctgaactcaacgccatgcttggggcaaccagtacagcaggaggcagtaaagaggtgaagcatattgcctggct

SEQ ID NO: 820832 - DNA, 98 bp, Homo sapiens
ggggcgccaactccaacgtgttctccatgttcgaacagacccaaatccaggaatttaaggagatctgtctcgtaactgtgtaatcaaggaactagcac

SEQ ID NO: 820833 - DNA, 99 bp, Homo sapiens
ccaagggtccttcaagtgtaaatgcaagcagggatataaaggcaatggacttcggtgttctggtggtgctagaaaagccaaatggctttagtcagagtc

SEQ ID NO: 820834 - DNA, 98 bp, Homo sapiens
attttccggccccctcgcgcctcccattgcagcctttgtgataactgcgtaggtgccatgcctctgcaactcctcctgttgctgatcctactgggccc

SEQ ID NO: 820835 - DNA, 100 bp, Homo sapiens
ttcctggagcggagcgcaggcgccgagactgacaacgcggtcccacagtttccccctttctagggtgaggatggttctacacagccacccggagttcctt

SEQ ID NO: 820836 - DNA, 100 bp, Homo sapiens
aatttgaacctagtggtaaaacagggtgatttcaagagacacgttccccacgtgtgaaagtcaagaatctgattgaaagcatgcaaataaatgggtcagt

SEQ ID NO: 820837 - DNA, 100 bp, Homo sapiens
catgaagaagaatatctatggcaatatcgaggacctggttactttccgcaccagaatctatcactgcaacatcaacagtcagggagtcatctgtctggac

SEQ ID NO: 820838 - DNA, 100 bp, Homo sapiens
ccagtaacagtgtgtggagatatccatggacaggacattggctccctggattatcaagagtttgtagttgacattgaatccaggctgaggatggaaggtg

SEQ ID NO: 820839 - DNA, 100 bp, Homo sapiens
gaatctgaagtgaaatgacatcaagagacctatcaagacctgtatccaggaaaagcagcctcgtcttacagcgtgactgcaaagaaaaagacttttgttt

SEQ ID NO: 820840 - DNA, 100 bp, Homo sapiens
gttcgtccgcggagatctctctcatctcgctcggctgcgggaaatcgggctgaagcgactgagtccgcgatggaggcatgtccagacatcctccagctcc

SEQ ID NO: 820841 - DNA, 100 bp, Homo sapiens
gaagaagaaggacgctggaaagtcggccaagaaagacaaagacccagtgaacaaatccgggggcaaggccaaaaagaagatgatgaggagtctgatgagg

SEQ ID NO: 820842 - DNA, 100 bp, Homo sapiens
acggaaggagtcacggggcgcgcatgccagggaagactacaaggctaccggctctctgaccagttccacgacatcctcattcgaaagtttgacaggcagg

SEQ ID NO: 820843 - DNA, 100 bp, Homo sapiens
aagaaacccctgcagtacttgaagatttgcataaagccaacattcgcaccgtcatggtcacaggacgactgggtttggattcagaagaggattattatac

SEQ ID NO: 820844 - DNA, 100 bp, Homo sapiens
agctttaagtgcaatgtttcaaatacattttcgagtctggcactaaagcttaacagagcgttccaaaaagaggactctccagctactttttattgcatca

SEQ ID NO: 820845 - DNA, 98 bp, Homo sapiens
tttggcgacaatgttggcctgtctgcaagcttgtgcaggcatacgtgagaaggctgttcgagagctgcttacccggcactgccagctgttggagaccc

SEQ ID NO: 820846 - DNA, 100 bp, Homo sapiens
caagatttaacctgtcatcaagacctgggattttggtgggccccgtggttatgaatgtgcttcagtttcataatgcctcctgctatggcagacatccttg

SEQ ID NO: 820847 - DNA, 99 bp, Homo sapiens
gaccttcccaacctgctgaagaccggagacgtgtacgcgcgcccaagaagggctggaaagaggaattcaaggtttattaatgccagaagaagaatagta

SEQ ID NO: 820848 - DNA, 99 bp, Homo sapiens
atgcacctagtcaagagccaccgcctgcagtggatgaggatcgcagtacggaacctgaccgattgcaggtgtttcacaagagagccatcatgccttacg

SEQ ID NO: 820849 - DNA, 100 bp, Homo sapiens
aaagtgaacttggcattttagatctaattcaagaagccagttgagggaagttctccatgaatgtacgtcacaatgatgatgaccgaccaaatccctctgg

SEQ ID NO: 820850 - DNA, 132 bp, Homo sapiens
gcgagagcagctcctcctggaaaaagcaagctgaagacatcaagaagatcttcgagttcaaagagaccctcggaacgaacaagatcactcaaggtgaaggataatctactaataccagcactttgaatgaaa

SEQ ID NO: 820851 - DNA, 100 bp, Homo sapiens
ttgccaggctgtgtgagcaggagcccgctgctcttccccactcagtttgtgaagaaatatgggaacctttttagcttggagcttggtgacatatctgcag

SEQ ID NO: 820852 - DNA, 100 bp, Homo sapiens
gagctacgcgagcgccgcgaacttggtggccagcgccgcgcccggggccgtgcgctctcgggccactcggccgcaggagcctccagaagatgatgcaaac

SEQ ID NO: 820853 - DNA, 100 bp, Homo sapiens
gctttgtctaatctctgtagagggaaaagtccacctccagaatttgcaaagagctgtaggtaaaacttgcctactgatcagttacacaaccaatgcattt

SEQ ID NO: 820854 - DNA, 100 bp, Homo sapiens
cataacgatcaggtcattgccagcggttcagaggactgcacggtcatgacagatacattgataactccatttgtgggtttaatagaccacaacttccagg

SEQ ID NO: 820855 - DNA, 100 bp, Homo sapiens
cgggctgaagcgactgagtccgcgatggagactagacgcttgaagcaaagctgccatcccagaagacgacatgctctcagcaacccccctgtatgggaac

SEQ ID NO: 820856 - DNA, 99 bp, Homo sapiens
tgaccttgattgaccttcccggccatgagagtttgaggcttcagttcttagagcggtttaagtcttcagccagttggtgatagattggtggtcatccaa

SEQ ID NO: 820857 - DNA, 99 bp, Homo sapiens
tcatgtgggaagttatgtcttatggagaaagaccttattgggacatgtcaaatcaagatgatttcttacaatctccagctacaacctgcttagcttgct

SEQ ID NO: 820858 - DNA, 98 bp, Homo sapiens
gcgcacacagttagaagagattcaacagaaggtaatgcagagccaggccgaggcccactacaaaggaagtaaacatgccaagaaggtcaaagcactag

SEQ ID NO: 820859 - DNA, 98 bp, Homo sapiens
gggcgccggcatagtacaatgaggcagccagcggatcttggccatgttcactgcccacttcccatgagatttctccagtgcccgccagacctgactgg

SEQ ID NO: 820860 - DNA, 112 bp, Homo sapiens
gcgaagaagcgacagctgctaaagtggcatcctgggattttgttgaagccacacaaagaacaaattgcagttgtttgagcaattctgtggtgttcttggtcacacatttatg

SEQ ID NO: 820861 - DNA, 100 bp, Homo sapiens
ggcttttcagcttaaatcaagatattcctgctttcaaggaacatttaagagatttcctagttcaaataaagggtcagagcacttactctaggcagatcaa

SEQ ID NO: 820862 - DNA, 99 bp, Homo sapiens
acagccagggcaggaaggtggtggtgtgcgacaacggcaccggggtgcaagaaagcctttgaggtgaaggtgtatgaaagtcatcataacagatgtttt

SEQ ID NO: 820863 - DNA, 98 bp, Homo sapiens
gcgaggagcgcactccgtggccccgatggagcggtacaaaggcagctgttgtgctgtgtatggacgtgggctttaccatgagtaactccattcctggt

SEQ ID NO: 820864 - DNA, 100 bp, Homo sapiens
aaggttgagttccgctactggggcatgcaagccaagatcgagcagttcatccatgatgtagagcagccttccaaacgcagaagggtcgagaacagcatcc

SEQ ID NO: 820865 - DNA, 98 bp, Homo sapiens
acggagctgaacctgcaccagatggcagatagcagctcctttggcatgggcgtgtggtccaagatcgggcccagcacaggcagcgtcagtgcaaactt

SEQ ID NO: 820866 - DNA, 100 bp, Homo sapiens
gaaaattgaattatgaaggacttcccataggaaagggaatgaaagctactggttgattttaaagtgcctgggcctcacaggtttggagatgtcccagaat

SEQ ID NO: 820867 - DNA, 100 bp, Homo sapiens
aggcctccccaggtgtgcttcctgtacagcctgtggaatggaagcggtgactttcaaggatgtgatagtggactttacccaggaagaatggaaacagctg

SEQ ID NO: 820868 - DNA, 100 bp, Homo sapiens
aaggaggaaccagtcactcctactagtggagggggtccaatgtcaccccaggatgatgaagcagaagagggcacgtgtggttctcaaatataggcattct

SEQ ID NO: 820869 - DNA, 100 bp, Homo sapiens
gatgctgatgaattgcagagatgtctgacacagtctggcattgctggaggatacaaacaacccatcgctacaatatgtgagcagatgaaaccctgattag

SEQ ID NO: 820870 - DNA, 100 bp, Homo sapiens
tttgcctatgcctgtgatttttctccaagagccattgaatatgttaaggtgttcctccaagaaaagctggttatattgaagacctggttttgatgctgcc

SEQ ID NO: 820871 - DNA, 99 bp, Homo sapiens
tttgcccatctgggtcaacaagcttgacatggagggctacttctacaagtccgaacagccagtccagcaaaatgaacagcattgtctaccagaagcagt

SEQ ID NO: 820872 - DNA, 100 bp, Homo sapiens
cgcgaacttggtggccagcgccgcgcccggggccgtgcgctctcgggccactcggccgcagctggagaatgctggaggagaccttaaggatggccaccac

SEQ ID NO: 820873 - DNA, 98 bp, Homo sapiens
cgagcgctgtatcaaaacaccaacattgtctttttgaccccagagggtataagtgaagaacagagatctcaggagttggctgcaatggaagaaacccg

SEQ ID NO: 820874 - DNA, 100 bp, Homo sapiens
atgaagaggtttcagggagcagcaagacaatcactgcagagataccaggattaaagcaaggagagccaatcatgactggcaaaacacagaccagcaacgt

SEQ ID NO: 820875 - DNA, 98 bp, Homo sapiens
tcacctttgccttaactttggtcttcattcaatgtgtgatcaatgctgtgtttgccaagatctcgagtaaccagctcataaatcacatcgaacagttt

SEQ ID NO: 820876 - DNA, 98 bp, Homo sapiens
ggccctgctggaccagctcatgggcacggctcgggacggagtccatagaggccactgtattctattgaagaacatgtctaacagtaacactactcaag

SEQ ID NO: 820877 - DNA, 98 bp, Homo sapiens
gggatcttttttcacatccagcccatgcggactgagcagccaaagcttgacagaggttctgatctacaatggccaactggacatcatcgtggcagctg

SEQ ID NO: 820878 - DNA, 98 bp, Homo sapiens
tgtatgtaaatgacttacctgtaaatagtggtgtaacccgaataagctgtcagactttgatagatatctcttccaaacgcatgatgaaggaggtcttg

SEQ ID NO: 820879 - DNA, 99 bp, Homo sapiens
atgcagctcctggagtcaatgcttcccagctggcgtgtatgttgtaaagagagttcttcagcttcagcgtcatcatattactctcaagatgacaactgc

SEQ ID NO: 820880 - DNA, 100 bp, Homo sapiens
attaagttggagcagggagaggagctgtggataacgggaggtgaatttccatgtcaacatagtcctgataggtgatcttcagctttgcaaactggatgaa

SEQ ID NO: 820881 - DNA, 99 bp, Homo sapiens
gggagtgcgaggaggcctcgaggtgcccagacaagcccaaggaggagctggagaaggacttcatctcccagggcccatctccttctctaagagatgcct

SEQ ID NO: 820882 - DNA, 99 bp, Homo sapiens
tcctctttggcctctattctcgccaagacaacactcgatggctggaggcctctgttgtaggcaagatcaacaaagatggaggatacctctttcccaagt

SEQ ID NO: 820883 - DNA, 98 bp, Homo sapiens
gcagacacaagagcaagcccgcacgtgtgaaggcatccactggtgtgatgaatgcagactctgctaccattttggctgtttggatcctcctttgaaaa

SEQ ID NO: 820884 - DNA, 100 bp, Homo sapiens
gatgaagaaggtgaagaagcggatgagttctttattggtgaaaacatgaatccagatggcatggttgctctattggactaccgtgaggatggtgtgaccc

SEQ ID NO: 820885 - DNA, 100 bp, Homo sapiens
ggaaagagccctgcgtggtggcgagggatgtgacaggaagacagtgccccgcacctgttcttcccggagcctatcagcaaagccattcccaaggctatgg

SEQ ID NO: 820886 - DNA, 99 bp, Homo sapiens
aatgctcgctcgtctctgagtgccagtcacccaatggtgggcaagtggctggagaaacaagaacagatccttacaataaatgaggatggatcacttggt

SEQ ID NO: 820887 - DNA, 98 bp, Homo sapiens
ttggagctttgcagctgacctacatctcgaaggatgctcgtcagaagttccgctctgttctggttgaagcaacggtgaaactggatgaactggtgaag

SEQ ID NO: 820888 - DNA, 50 bp, Homo sapiens
tttacataagaagttacctttttcagccatttcgtagagtgacgttttct

SEQ ID NO: 820889 - DNA, 100 bp, Homo sapiens
cacatatttgctcaacaaaatgatcagttacgacacgtggatcccagcgagtgaaattgaggcatctgtggaagatgctccaactcctgagaaacctagg

SEQ ID NO: 820890 - DNA, 98 bp, Homo sapiens
ggcttcttcaagcattcttagaacgcggttcaaacacaatagcaagtgctgcagctgacaaaattgtacaggtttgcagattccgccagcagcacagc

SEQ ID NO: 820891 - DNA, 100 bp, Homo sapiens
ctgtccactgccaaggagatcatccagcactttaagggctgccctgcggacctagtggtgtgtgacggggctcctgatgatcactttgggaagcagtgac

SEQ ID NO: 820892 - DNA, 100 bp, Homo sapiens
cgctacacaagtggagctccttttcctccacctaccttcccgaggtgctgataagactgtgaaaggcccagatggactgaccgcctttgaagccactgac

SEQ ID NO: 820893 - DNA, 100 bp, Homo sapiens
ggggtcataggtggaaaagacatggacttgaccccacccaatttagagttcatcattatcataaagatgaagagaatgatgctctacttggtggcccagc

SEQ ID NO: 820894 - DNA, 99 bp, Homo sapiens
aaagaatttgagcctctgctgaattggatgaaagataaagcccttaaggacaaggacatggatttgattgacatactttggaggcaagatatagatctt

SEQ ID NO: 820895 - DNA, 100 bp, Homo sapiens
aagctggaatgtgagaaactcgccagtgagaagacagagatgcagcggcattatgtcatgactacatgaggaaataattgacttttataacttcatgtcc

SEQ ID NO: 820896 - DNA, 98 bp, Homo sapiens
gatctttgaattggtggaacttgttggaaatggaacatacgggcaagtttataagattatcgaatgtctgaaagaaaacaagaagcagctaagcaccc

SEQ ID NO: 820897 - DNA, 101 bp, Homo sapiens
ccagacaccccaatatgatgacagatgtggttaaacttctctctgcggtatgcattgtaggggaagaaagcatgtatgcagaaacacatcgagtatatgct

SEQ ID NO: 820898 - DNA, 104 bp, Homo sapiens
cggggaccctgtacgtgtacatcatttacggcatgtacttctgcatgaacatctccagccagggttgggggccgtcccgctcctaaggcaggaagatggtggcc

SEQ ID NO: 820899 - DNA, 98 bp, Homo sapiens
cgagcggagaggagatgcacacggcactcgagtgtgagggtgtccttctgtgctgaacatgtccgtaggaatgccctggcacttcatgctcaaatgaa

SEQ ID NO: 820900 - DNA, 100 bp, Homo sapiens
actaggaatctatgatgctgatggtgatggagattttgatgtggatgatgccaaagttttattagggatgatagtctacttgggaatgatggcgggcgcc

SEQ ID NO: 820901 - DNA, 98 bp, Homo sapiens
cccaatgcggccgcgagaagcagcgggggggcaggcgatcgaaggaactgtggaaggtgcatcagtgaagaaatggaccaatgtgtataatcatggaa

SEQ ID NO: 820902 - DNA, 98 bp, Homo sapiens
cctggagctcctggccaggtgtcaccagcaccgcatttttggacagaaactggaggatactgttcgttatgagaagagatatgggaaccgtctggctc

SEQ ID NO: 820903 - DNA, 100 bp, Homo sapiens
atctgcaaatacgcctttctcatatccactgccaaagggaccatgaattttgaagattgcaccggtcgacaaaggacagcctatttttccctcgacaccc

SEQ ID NO: 820904 - DNA, 152 bp, Homo sapiens
aagatttcgtcataagaccgcgaccagacaggcggcgccatcttcgaacttagacttccggaaggactttggcgaggttggtgcttcccgtgctgctgttgatgctggctttgttcccaatgacatgcaagttggacagacgggaaaaatag

SEQ ID NO: 820905 - DNA, 98 bp, Homo sapiens
ctcaggtcttcagggtcttccatctggaatcaattcatttacagctttccagtttttccagcctgcaagaggaggataaatctaggaaagatgactct

SEQ ID NO: 820906 - DNA, 99 bp, Homo sapiens
ttccccttccccaccgaaccgcgcgagttcctggggaaaaccccagggcaaaacgctcagaaatggattcctgcacgaagcactagacgagatgacaac

SEQ ID NO: 820907 - DNA, 100 bp, Homo sapiens
cgcagagctgaagatcaagcgcctgagaaagaagtttgcccaaaagatggaaactactaaagttcctggggaagcaaagtagaatttcataagaacaaaa

SEQ ID NO: 820908 - DNA, 100 bp, Homo sapiens
cagctgcggagcatgtcgaccccggcccggaggaggctcatgcgggatttcaagcgatgtttggaaactggacatttggcactttggtcttcacagtcat

SEQ ID NO: 820909 - DNA, 98 bp, Homo sapiens
tcatttctccagatgccaacattgacctcacaaccgagcaaattgaagagacgttaaaatacttccgctcggggaccagttctacaaggaagccattg

SEQ ID NO: 820910 - DNA, 100 bp, Homo sapiens
gtggaagtccaagtcaaacgcagaaggactgcctcactgagcaaccaagagtgacagattgactgggatcccctcgcacatcctcaacagctccccatca

SEQ ID NO: 820911 - DNA, 100 bp, Homo sapiens
gatgacaataagctcctaactttgcccaatggagagcgcctcagtcttccacccaataacactcctatgccaccttcaccagctgtacaagtgcagggcc

SEQ ID NO: 820912 - DNA, 99 bp, Homo sapiens
gcagtggcggcgcgtaggaggcggctgagtatgcccatcgtggtttctccgaggtgaaaactcccacactgttttctacgaagctctgggaacagtcag

SEQ ID NO: 820913 - DNA, 101 bp, Homo sapiens
cgagcagatccttgcatttgtccaagtcaccaggagactaaagtccatcaaaaacatccagaaaattaccaagtctatgaaaatggtagcggcagcaaaat

SEQ ID NO: 820914 - DNA, 98 bp, Homo sapiens
cgctgctgctggccgcacgcggggctgctgcccaagatatgtttgacgacttctcagaaggcagagagtgtgtcaactgtggggctatgtccaccccg

SEQ ID NO: 820915 - DNA, 100 bp, Homo sapiens
tacgaactgaagaaggccgcctatgacatcgaggtcaacacccgccgagcacaggctgacctggcctatcagcttcaggctggagtacaatggcgtgatc

SEQ ID NO: 820916 - DNA, 98 bp, Homo sapiens
aaataaatctacaaatgttattgtagattctgggggtcttgctatcacagatgaaattttgctgagtaaggcagagtggtccaaactttttgaagctc

SEQ ID NO: 820917 - DNA, 100 bp, Homo sapiens
ccctgcctccatgtgggatgatatcaacaacgtcggactcagaagtcattgtattcaaagaagaataagcaagaaagaaaagaaggaaggaagagaggta

SEQ ID NO: 820918 - DNA, 100 bp, Homo sapiens
gggcaacgtggccttttctaccctggaaggaaggcccagcgcctataactttgacaatagccctgtgctgcagactgacttccttttggtagtactgcgt

SEQ ID NO: 820919 - DNA, 98 bp, Homo sapiens
ttctctgttcgacatggcccaattcgagcggctagaatcttgcctgctccacagtttgaggatgtaggaagaagctggtctgctgactgtcatacttg

SEQ ID NO: 820920 - DNA, 100 bp, Homo sapiens
ctgtggatggactgcgtcacgcagagcacggggatgatgagctgcaaaatgtacgactcggtgctcgccctgtccgcccaggtgaagaggaagatcctgg

SEQ ID NO: 820921 - DNA, 133 bp, Homo sapiens
tgggagccacggtgccaggaccatctacaagagccaaatcaagattgcgtttctcaaagtcctacagtgccctgcaggagtcattaaatcaaaacttcatgctgatcatcacccaccgagaagtccagcggga

SEQ ID NO: 820922 - DNA, 99 bp, Homo sapiens
gcgggcgagcggtggtttggacgccggcggagacgcgggcgaggttgaaggtttagaacagatgtggaaaaatgtttacttcagagaaaggggttgtgg

SEQ ID NO: 820923 - DNA, 98 bp, Homo sapiens
aggagagactcagctctgggatcctgggggcaattgggtttggccggaagtcgcctttgtctaacagctcctcacagccagtgaccttgcagccagtg

SEQ ID NO: 820924 - DNA, 100 bp, Homo sapiens
agaccctccctgctgagatgcgcaaattcactccccagtacaaagtaagcactatcctttgtactccctcaacgtggcctccatgtggttgaagctaggg

SEQ ID NO: 820925 - DNA, 100 bp, Homo sapiens
tttcttcagaagctggtcgccgccggcaggagcctccctattaaggaccttgccgtagacagcgcctctcccgtctaccaggctgtgattaagagccaga

SEQ ID NO: 820926 - DNA, 98 bp, Homo sapiens
cagagctcccagggcggacagcagcctcgggtgcaatcctggagccccccagtgaggttactccacaggatccgctgaacataggatgttgccacaaa

SEQ ID NO: 820927 - DNA, 98 bp, Homo sapiens
ctgcggcccgacgagctggagcgcctgtcaggctgggaggaggaggaggagagctgcgggtgcctcccaggtcaaatggaataaaaaaaatgctaact

SEQ ID NO: 820928 - DNA, 100 bp, Homo sapiens
attggcaactgcctatgcaacgctgggcatgaggagcggagcggagaatgccaaggtctctaattaacagaagatggcaaagcccagccacagcagctat

SEQ ID NO: 820929 - DNA, 99 bp, Homo sapiens
tcgcctcggcctcccaaagttctgggattacaagtcccagctggtcctgtccttcctgcaccttcatcaatgccccagaccgccctggctgtgagatgt

SEQ ID NO: 820930 - DNA, 99 bp, Homo sapiens
gaacaattagcagataaactgcggctaaagaaattacaggaagagtcagacctcgaattagcaaaggaaacttttgatcgagacatgtaagcagcatca

SEQ ID NO: 820931 - DNA, 99 bp, Homo sapiens
gaagatggcgactgaggcacagagtgaaggggaggtgccagcccgcgaatccggccggaggtgaattatgtaacctcattacgctggatgtagctcaca

SEQ ID NO: 820932 - DNA, 99 bp, Homo sapiens
agcggtggcaggggctgcaggagcaagtgaccaggagcaggactggggacaggtcaccctcgagtcctggctgattcttttcctggcagttccccttat

SEQ ID NO: 820933 - DNA, 98 bp, Homo sapiens
aaccaagccctcatcacattttgtaccgaaacctattgaaggcagcaaagtaatggagaacggccttctcttcaaagaacttctgcagactccaaatt

SEQ ID NO: 820934 - DNA, 98 bp, Homo sapiens
gccacgtgattttttcaagaagaggaatagggtgaatgaatctcatcagaaaagcagatatgcacccaatgtccagggagcgtgcaaaatttgtcaaa

SEQ ID NO: 820935 - DNA, 98 bp, Homo sapiens
cgtttggaatgaggaaaagtgaacttttcgaggcatttgacttgtttgatgttcgtgactttggaaaggaatcacatgcagcccaactacagattctt

SEQ ID NO: 820936 - DNA, 100 bp, Homo sapiens
agttctcctaagaaaaatccgctgtgggcagagaacgatgatgatttaatggtgcatgaatacctcagaagtaaactctgttcactgtatgaaaatgact

SEQ ID NO: 820937 - DNA, 99 bp, Homo sapiens
ttcctgtgaggagagttggcatcttggaaatcaaagacggttgtgatgcagttttttgatatgaggataacagggactttgaacatgtcggggatcgcc

SEQ ID NO: 820938 - DNA, 100 bp, Homo sapiens
ggaatctgtcttggaggacatcagaaggaagagaactccagagatttggaagaattacctaaaaccagttctgagacaaatagcactacctcaagggtca

SEQ ID NO: 820939 - DNA, 100 bp, Homo sapiens
tctgacatggaggatgatttcatgtgcgatgatgaggaggactacgacctggttggatccttggaacaagctatgcttgatgctcttgtaatggatagag

SEQ ID NO: 820940 - DNA, 99 bp, Homo sapiens
ctgcagaacgggagccgccacttcgaggactggaaaaacacaccttgactttagtcagatacatcactgtctgttaaaggaaaccaagcgtgaagtgga

SEQ ID NO: 820941 - DNA, 100 bp, Homo sapiens
aggccatcggggactgtgagaacctctctgagctgatcctcacggagaacctgctgatggtaaaccaagggaacatgccagggcttcagagcaccttcct

SEQ ID NO: 820942 - DNA, 98 bp, Homo sapiens
caagggcaacttcgcggtggtcaagcgggccacgcacctcgtcaccaaggccaaggtgccaagtcctgccctgccaacttcttggcagctgccgacga

SEQ ID NO: 820943 - DNA, 100 bp, Homo sapiens
gtcttcctctaggtctgaataaagaggaggaaggggaaagacaggagccagggtcaaatcaccccggacaggtgactgaaaactcctgaggcatttcctg

SEQ ID NO: 820944 - DNA, 99 bp, Homo sapiens
tctgcttggtgtggagccatgaagatatggagtctggagaacggttaccatcctcagcagcctcctctactacaccaacttcatcttcgacaccttctg

SEQ ID NO: 820945 - DNA, 98 bp, Homo sapiens
aacaagactggggctgctcccatcattgatgtggtgcgatcgcttgaggcagccctaggtgaggccaagaagcaacttcaggatgagatgctgcggcg

SEQ ID NO: 820946 - DNA, 99 bp, Homo sapiens
cggcactggctcttcagtcccttcaagagtctactcttcatcttgtgttgagacttcgtggtggtgctaagaaaaggaagaagaagtcttacaccactc

SEQ ID NO: 820947 - DNA, 100 bp, Homo sapiens
tgggtgccctgaatatggtcagctgggtacaggtttgcagattccgccagcagcacagcaagctctacagatgagtggctctttggcatttggtgctgtg

SEQ ID NO: 820948 - DNA, 106 bp, Homo sapiens
gattcaagatactttgatctctatgatcctccaccagatgtcagttgtgttgatgtagataccaacactatttctcaggtggttctcttcccaaagtggaagccaa

SEQ ID NO: 820949 - DNA, 100 bp, Homo sapiens
aggaaacttacggtgaatacttcctggccgaactaatagaggcccaagatgaagagaatcatgctgttgtgtgtgaggagtacaaaatttcaagctttga

SEQ ID NO: 820950 - DNA, 100 bp, Homo sapiens
ctgagcctcagcacctgcttgtttggaagattttaggtgatgggcaagtcagaaagtcagatggatataactgatatcaacactccaaagccaaagaaga

SEQ ID NO: 820951 - DNA, 99 bp, Homo sapiens
ttcagctggaggcgctggggagcaagactatgaggtgaactactgagttcttcattatgtctgatggagattatgattacctcatcaagtttttagctt

SEQ ID NO: 820952 - DNA, 98 bp, Homo sapiens
cgcgcgcgaagcgagcgagaaggcacggagtcgccgcggagcgcagaggccacaagaggaagctgaatgaagaggacgccgccagcgagtccagcagg

SEQ ID NO: 820953 - DNA, 100 bp, Homo sapiens
acgctgcctttgctttaaaacagtattacttgcgggaaaagcttcactctgaccatcactgtcttcacaaacccaccgcaagtcgccacctaccacagag

SEQ ID NO: 820954 - DNA, 100 bp, Homo sapiens
tgataatcacagcgggactcttggcctgtccctcacatccgatgcaccctttttgtcagattatcaggatgagggagcccagtttcctccaattgcagca

SEQ ID NO: 820955 - DNA, 98 bp, Homo sapiens
gatgaccctaattcagaaaagaagaagaagagggatactcccatgctgccaaagaacccagtgacttgattgtaaaaatttacagagcggaatcatat

SEQ ID NO: 820956 - DNA, 100 bp, Homo sapiens
cagttctgaacctgcacactccagtctaggatctccgagcaagagccatttttgaaacgttggggttgttggagtggttggattttccctggaattgagt

SEQ ID NO: 820957 - DNA, 98 bp, Homo sapiens
atcatggagccgctggggtcccttttgcctcagatactattttgaaggtggtaaagccaaaatctccagaacccgaagcaacgctgacatttccattt

SEQ ID NO: 820958 - DNA, 100 bp, Homo sapiens
ctggaagctctacgctactgccatgataataacataattcacagggatgtgaaggatcttcaagatgaagttcaaagggagaatactaatctgcaaaaac

SEQ ID NO: 820959 - DNA, 112 bp, Homo sapiens
agtcctgaccacaatggggaggacaacttcgcccgggacttcatgtaataaaagactagtggccttagtgcccatgcccagtgaccctccattcaatacccgaagagcctac

SEQ ID NO: 820960 - DNA, 98 bp, Homo sapiens
cggcatccaggacgttccctcccccgatccaagttggaattagcatcctctcgggggtccggacactgtttgtcagcggcctccctgtggacattaaa

SEQ ID NO: 820961 - DNA, 98 bp, Homo sapiens
atgcagagccccagctcctgtctggtctgtgagatgtcctcactgtttcaggagggagaagaaatgggtgaccgttggtgacacatccctacgaatct

SEQ ID NO: 820962 - DNA, 99 bp, Homo sapiens
ggctgctcccatcattgatgtggtgcgatcggagaacctccatttctaccagaatcctttgaccgaattcttctggatgcaccctgtagtggaatggga

SEQ ID NO: 820963 - DNA, 100 bp, Homo sapiens
cgcgcagcccgcccgcccggcgaccagcaagtggagcggaggcggagggacaagatcaacaactggatcgtccagctttcgaaaatcattccagactgta

SEQ ID NO: 820964 - DNA, 100 bp, Homo sapiens
tcagacaaaagatattccaggtagcccaagagctatcaggggaagatatgcatcagttccatcgagccattactacagttgctgtgatgttcaacttccc

SEQ ID NO: 820965 - DNA, 98 bp, Homo sapiens
tcaagccaacaacagtgacggaatgcctccatacatacaagcttaccattgttcagaagcaaacagtttgcagtaaaaagaagatttagtgactttct

SEQ ID NO: 820966 - DNA, 100 bp, Homo sapiens
cccctgcccttcactcatggaagtcttcaggtgaagatggttctggtaaaacaaccctcatgactaaactacaaggagctgagcatggcaaaaaaggaag

SEQ ID NO: 820967 - DNA, 100 bp, Homo sapiens
acctttgatcccctgacctgcattaccttgatctattaatgagatgaagcggttggaagaaatgtcaaatatgtttcagagctctggagtccagcaccac

SEQ ID NO: 820968 - DNA, 98 bp, Homo sapiens
cctgaccagcggtcagagccttctgatcattccaggcactcgccgcagcagccaagcaatggcaggctgaccggttccctgatgtgttacctgcttct

SEQ ID NO: 820969 - DNA, 100 bp, Homo sapiens
tgtgtgggacgtgggtggccaggacaagatccggcccctgtggcgccactacttccagaacacacaaggtcctagagctcctgaaggtggcctggaagag

SEQ ID NO: 820970 - DNA, 100 bp, Homo sapiens
cttttttcattgttccactggacgctcatcagagggaagatctttttcctcaattggttcagattcagaacaagaaagtggacatctctaaggtctcctc

SEQ ID NO: 820971 - DNA, 98 bp, Homo sapiens
tcggagtttgagccccggaggcagagcggctgccatgatcgaccttcagaagatgcccttggggaagctgagcaaaaggcagatccaggccgcatact

SEQ ID NO: 820972 - DNA, 100 bp, Homo sapiens
tgcatttcacagcactctgggcgaaaattggatgtgaaaatgaagccagaccgaggttttgcaaaaggcatcaaattaaatcaagttcaaatattccctg

SEQ ID NO: 820973 - DNA, 98 bp, Homo sapiens
catctgatgctctctctccagtccttgctgaagagactttccgttacatgattggtgacaaagttcctgctgatataaggttaacttccatcaaatct

SEQ ID NO: 820974 - DNA, 100 bp, Homo sapiens
aaggcaaatgagcccaaccacgtggagctgggacgtaaggatgacgcaaaagttcacaagatgttccttgaccatactgaagttccacctggtgccaagc

SEQ ID NO: 820975 - DNA, 100 bp, Homo sapiens
gtgcttggtgtcgtttttccttgagctgaacgtcttgcaacagtggccgcacgcataggtgagaagccttataagtgctcatgggagggatgtgagtggc

SEQ ID NO: 820976 - DNA, 98 bp, Homo sapiens
gatgataatgttttcagcagcaatttgccctcagagcattccccgtcggagccctttctagagaaaccagtgccggatatgactcaggttagtggacc

SEQ ID NO: 820977 - DNA, 100 bp, Homo sapiens
ttcaggggacccctgtgcaagaacggatctccctctccgtttgaaggatgacctctaggaagaaagtgttgctgaaggttatcatcctgggagattctgg

SEQ ID NO: 820978 - DNA, 100 bp, Homo sapiens
atcagaaaatcaagtaaaggaacccaacagagatctcttctgttctccactgctaggagtatgctgctgctgttccgctttgcgtcctcgctacaaacgc

SEQ ID NO: 820979 - DNA, 100 bp, Homo sapiens
cgggattaatagactatgattggtgtgaagatgatttatcaacaggtgctgctactccccgaacatcacagaccaaacctggaccacccaaaaagccgaa

SEQ ID NO: 820980 - DNA, 100 bp, Homo sapiens
tttggaagagttcgtgaaagctttctgcccagagctcctggaccaatgcatcttcccaccaccttaaaccactgatcatgatcagaagcatcttcctgtt

SEQ ID NO: 820981 - DNA, 100 bp, Homo sapiens
agtaacagtacttgggatcccccagttccaaagtgtcttaaaggtgatgatgaacagtctacacagatggctgcaagttgggaagatgataaagttacag

SEQ ID NO: 820982 - DNA, 99 bp, Homo sapiens
gcgtgccctacttcaaggataagggtgacagcaacagctcggcgggctggaagagagcgaaatgtcatcagtgcagtcacaacaggagcagttgtccca

SEQ ID NO: 820983 - DNA, 100 bp, Homo sapiens
agagattggttattgccagggccagtcatttcttgctgctgtgctccttctccatgtggagacgattggggatgcttacatggtggtatctggcctccca

SEQ ID NO: 820984 - DNA, 100 bp, Homo sapiens
cggccaggaaccacccgttaaggtatttctgggaaaagccagcttctgtttgcactggtcttcacaactcgttacctggatctttttacttcatttattt

SEQ ID NO: 820985 - DNA, 100 bp, Homo sapiens
ctttatttattaatacatctaatcatggggtatttacttaccagaggcatttcatccttcatgaagccattcaggattttgaattgcatatgagtgcttg

SEQ ID NO: 820986 - DNA, 100 bp, Homo sapiens
aggcgggcgcgcacccgctcgagtcccactaccggtccccgggcggcggctacgagcccaagaaagaacctaaaggcagacccagaagagctttttacaa

SEQ ID NO: 820987 - DNA, 100 bp, Homo sapiens
gccctcacaggacacctcaggacccattctgcattgatctggtagccttgctccagaagcctgttcctcacagtcaagcctcagaagccaactcctttga

SEQ ID NO: 820988 - DNA, 99 bp, Homo sapiens
ggacctctaccgagatgtgatgttggagaactacaggaacatggtcttgctggatggtttccacggtgatgtgtacctaacagtgaagctgctgctgcc

SEQ ID NO: 820989 - DNA, 100 bp, Homo sapiens
atcacccagaagggctatgaaaagaaaaggtccaaactcctatctccttacagcccgcagacacaagcaggtagcatctaaaggaactggtttaaatcct

SEQ ID NO: 820990 - DNA, 98 bp, Homo sapiens
aaccaccacaactccaggaaggaaaccaaggggcagacccaaaaaactggatttccaaaactcagattctgaataaaagccaatggcagatatgggtc

SEQ ID NO: 820991 - DNA, 100 bp, Homo sapiens
cgtcccccccaacacctgagccaggtgaagggccccgtaaattggaaggatgcacaagttccaaggttacgtttcaaaactgggagtgatttttccatgt

SEQ ID NO: 820992 - DNA, 99 bp, Homo sapiens
ggactgttacctacacatgcatcggattggttagccttcattgagccccctgaggaaggaggagtcagtggttttctccatgcttttattgctgaagtg

SEQ ID NO: 820993 - DNA, 100 bp, Homo sapiens
gccttgtactgggatgtgatgctggagaattatggaaatgtgacctccctagccttgcaaaataccctactaaataaatcattttagacatggagtgcag

SEQ ID NO: 820994 - DNA, 100 bp, Homo sapiens
tccctttggagtagcattattatttggaggagttgatgagaaaggaccccagctctttaggttggtctcagccttgtgatgtttggagcataggttgcat

SEQ ID NO: 820995 - DNA, 100 bp, Homo sapiens
tccatggagaacaagcccctgtatcagatgcggctgctgtcggaggcttttgtcatcaaagatgagaactggactgatgaccaactgcttggttttaaac

SEQ ID NO: 820996 - DNA, 99 bp, Homo sapiens
tgggctggaacgcgccggaatctgaggtgtgagtagagcctgggggagagtggatccaggtgaagggggcagagggatcgcttacacctgagacgaact

SEQ ID NO: 820997 - DNA, 98 bp, Homo sapiens
agaactttgctaacttccggggaaaagtaagactttgaccccgacgcaggcttcagtgattgccgcggatcagaagcctgagcactttggctcgagac

SEQ ID NO: 820998 - DNA, 98 bp, Homo sapiens
tccataaaatactcattcccctctcagaatgtatgacaacatgtccacaatggtgtacataaaggaagacaagttggagaagcttacacaggatgaaa

SEQ ID NO: 820999 - DNA, 100 bp, Homo sapiens
cgggagaaacaacaactgctacatctgttggaggagccaactagcatggaagtgcagcacaccacacaaatgagtgatgaggaagaggatgatgatggct

SEQ ID NO: 821000 - DNA, 98 bp, Homo sapiens
gcattctcctggccattgcccttctggaaggaggcaacaccaccatccagctccatcaagtatgatggtgaaggatgaatatgtgcatgactttgagg

SEQ ID NO: 821001 - DNA, 99 bp, Homo sapiens
gcaggcagcatggaccacggttgctgggcggatggggagcgtctatggtcaggtgaggctccaggttgggctctatgctgtgtaccttctggactggct

SEQ ID NO: 821002 - DNA, 100 bp, Homo sapiens
ggactcctcactgtcagcagcttctgtctccagcattgcaaagccctgatccagaccaaggcatccgtgtcattctggaccttactcccaactaccgggg

SEQ ID NO: 821003 - DNA, 100 bp, Homo sapiens
ttgatactttaggtgaaggagcttttggaaaagttgtggagtgcatcgatcataaagcgttgatacccaaagatcagtattactgtggtgttctctattt

SEQ ID NO: 821004 - DNA, 100 bp, Homo sapiens
tacgcttcccaaaccagttcagaagccacccaaaagtaatgttaacaataacccagatttccattttgacagtgccagcagaggaaccaggaacttttgc

SEQ ID NO: 821005 - DNA, 100 bp, Homo sapiens
gggaggacagcacggccgaggctgcccagaggcgcctcctccacaccccccgccgcagcagcaccggcgacaggtacatgtcccagagcaagcacacgga

SEQ ID NO: 821006 - DNA, 100 bp, Homo sapiens
cggtgctcttcatcaccttcgtggtcgtctggtcctactacgcgtacgtggtggagctctgcgtgtgttgcagagaacacatcttagaagatgaaaaacc

SEQ ID NO: 821007 - DNA, 98 bp, Homo sapiens
gacgtcttagacagtcgtggttcctgtgatctgtgtcctctttgcagaagaaatgctgctcatggattctcccttattcaggtggacaacacaaaggt

SEQ ID NO: 821008 - DNA, 100 bp, Homo sapiens
ctggaatcgcccaagtccctctactcgcgagtgccggtggtggtgtgcacattgagccccggtatagacagttcccccagctgaccagatcccaggtgtt

SEQ ID NO: 821009 - DNA, 100 bp, Homo sapiens
gtgcatgaagccgcagcaattggcaatgcagcagcagctggcaaacagcttcttcccagatacagagtactcctgattgtgacatcacattcatcccctg

SEQ ID NO: 821010 - DNA, 100 bp, Homo sapiens
tttggtgtggacatctgctgccggaaggggtcccgaagccccctgcaggaactctacaacccaatccagattgcattctcacaacacaatacaatcatgg

SEQ ID NO: 821011 - DNA, 98 bp, Homo sapiens
cgaaagggaccgaaatggagagcaaagggaccagttactctccacaagaaaattcacacaaccacagtgctcttcatagttcaaattcacattcttct

SEQ ID NO: 821012 - DNA, 99 bp, Homo sapiens
gaaacagtgctgaagcctttaaatgcagcatctgcgatgtgaggaaaggcacctccaccaggagatgtttcacaaagcagaagaattattttctaaaac

SEQ ID NO: 821013 - DNA, 99 bp, Homo sapiens
agtttgaagatggagagaaaattgtggtccagggagagcctggggacgacttttacatcatcacggagatggcccactgcgtgaccttggttcagctgt

SEQ ID NO: 821014 - DNA, 100 bp, Homo sapiens
ggtccggggcttgccctggtcttgctcggccgatgaagtgcagaggtttttttctgctttgcatgttcaactgtcgttcgagcctatgtgctgctactaa

SEQ ID NO: 821015 - DNA, 98 bp, Homo sapiens
gacgaccggtggctgtggcgacatgtcgacctgacgctctacacggctggacgtaaagaaagaagtgatgcactcaattctgcaatagataaaatgac

SEQ ID NO: 821016 - DNA, 100 bp, Homo sapiens
ctgtgatccaccatgaagcagaatctaaagttggccctcacattgggcgttactgtggacagaaaacaccaggtcgaatccgatcctcatcgggcattct

SEQ ID NO: 821017 - DNA, 100 bp, Homo sapiens
atgggccggttttatgagtgggaaccatttgcagaagatacagtacctggactccatgaacggggaggatctgcttctgacaggggaggtgagctggcgc

SEQ ID NO: 821018 - DNA, 98 bp, Homo sapiens
tcgatctccgccctggggtcattgtcaggcattgaatgccccagaggagcccgaaacctcccaggcttggtgcaggaaggagagcccttcagcgagga

SEQ ID NO: 821019 - DNA, 100 bp, Homo sapiens
ccacccatgtaccagctctataagcggacgtttcctgtgctgcttcgacttgcgtgtgatgttgatcagttaccagatgtatgctactcatggtgggtcc

SEQ ID NO: 821020 - DNA, 100 bp, Homo sapiens
taccggccgtggaagcggccaccgactactgtcagcagctgtgccagatggatagctcccagttgatccattgtcgggagcttgtggcacatcacctttc

SEQ ID NO: 821021 - DNA, 100 bp, Homo sapiens
gggactgccagaggtggaggggaggattttgaggacacttgtggagagctcgaattccagaatgatgaaattgtgacagaactgtaccgctctctttttg

SEQ ID NO: 821022 - DNA, 100 bp, Homo sapiens
aaaggaatgatagctggggttcttttgacctgagggctgctattgtatatcacactaaaggaagtgtttggattgtgagctatttcagaactgttctcag

SEQ ID NO: 821023 - DNA, 100 bp, Homo sapiens
ggacatcgtgtccctgtacgcggagggctcggtcaacggcttcatcagcaccttggggtccactggctattctgaggtgatagttgtcgttggaggatgt

SEQ ID NO: 821024 - DNA, 100 bp, Homo sapiens
agccttcctgatttctgcagctctgtgtgaagttgactatattgtggagtatgactatgatgctgtacatgatgatgaattaactattcgagttggagaa

SEQ ID NO: 821025 - DNA, 115 bp, Homo sapiens
ctggctctgctgctgccgccggcgaaggaggaggcgttgccgggttatcctacctacaaagaaaaagtaaagaaaaggcctggaggccgcccagaagtgatctacaactatgtcc

SEQ ID NO: 821026 - DNA, 109 bp, Homo sapiens
tggactggcccccttgagcctgtcccaagccctggtgccaggtgtccatccccgtgctgaggcaatggtggcttgctatccgggaaatggaacaggttatgttcgccac

SEQ ID NO: 821027 - DNA, 100 bp, Homo sapiens
ctgactatgactctttgaggacactgagtcaccatgctagcactgtgcagggtaaagcaccttcacctcgtgctgcccatgcctgtgcaactgtcggaaa

SEQ ID NO: 821028 - DNA, 99 bp, Homo sapiens
gaaaaagaagtccaagaagcaaaaaagggactgctaagaagataccaccaggaaggaaaagctgatgcgatgctctcagtgccgcgtcgccaaatactg

SEQ ID NO: 821029 - DNA, 100 bp, Homo sapiens
ctgtttggtgccattgtatcagcaactgatccagttgctgatagtccaactccaccgccaccacctccaccagatgacattcccatgtttgatgactctc

SEQ ID NO: 821030 - DNA, 98 bp, Homo sapiens
tgttctttgaagctgatggccctaaacagatgaaggttcaacttttagatacaaagagacaactggatacagagacaaatcttcatcttaacacaaaa

SEQ ID NO: 821031 - DNA, 50 bp, Homo sapiens
ttggcaacgcgacacagagccagccatgaggacggcaccgtgaggttctg

SEQ ID NO: 821032 - DNA, 101 bp, Homo sapiens
gtgaccgtgtgtcagaacaatcttgaatcatgaagctactaaccagagccggctctttctcgcattttgaagcattggctaatcgagctgctacaactggc

SEQ ID NO: 821033 - DNA, 98 bp, Homo sapiens
tatacagaaccagatgctgcagaggaagaagccattagatggtggagaaaggaaacccttttccaaagagaaatgaagaagaaaactgtatgtaccct

SEQ ID NO: 821034 - DNA, 100 bp, Homo sapiens
catcccttacaagcgagaagaatcactaggcaaatgcctgttggcatctacctacctagcaagacttgaacccagtgacttgattgtaaaaatttacaga

SEQ ID NO: 821035 - DNA, 99 bp, Homo sapiens
ttacccttggacatccagattttctattgtgccagacctgacgaagagccttttgtgaaggcctgagacctgggaggaagctggagaaaagatgccctc

SEQ ID NO: 821036 - DNA, 100 bp, Homo sapiens
ttggcattgacatttaattttagggtcctttatatagaagggagagtagactgaaacaacctcgagccaggaagatgttagatgaaggagtaatagttgc

SEQ ID NO: 821037 - DNA, 100 bp, Homo sapiens
ttccttggagtgaaatcaggaacatctctttcaatgacaaaaagtttgtcattaaacccatcgacaagaaggcacctgaaatggtgttcacactggccct

SEQ ID NO: 821038 - DNA, 100 bp, Homo sapiens
gtgcttcccgggagcaagctggtggactggctgctggctcaggataaaatggaccagttgctacagatgctgcaaagtacagaccccagtgatgatcagc

SEQ ID NO: 821039 - DNA, 99 bp, Homo sapiens
gagtatcaaatatgagaaagctaggccatctgaataactttactaaggtgaaagaaaagatgttgtcccggttaagagtagtttccaccacttgtactt

SEQ ID NO: 821040 - DNA, 100 bp, Homo sapiens
tgaaacattaaattcttccgttcagagtattaggagagaagcctcatcagtgccaagtctgtgggaagaccttctctcagagtggaagcaggaatgtgca

SEQ ID NO: 821041 - DNA, 100 bp, Homo sapiens
gtcctgctcggctgcctcctggcctcgctcctgttctcaggacaagcagattcaaccctatgaaaagataaaggccaggggcttgcctgataatatatct

SEQ ID NO: 821042 - DNA, 100 bp, Homo sapiens
actccgcaaacgaaaaagaacgacatgatgcaatcttcaggaaagtaagagggccaaatagttgcatcacatgtatctaatccgagagtctcatgcttct

SEQ ID NO: 821043 - DNA, 98 bp, Homo sapiens
gaacactgaatcaacatgggcaatgagaacagcacctcggacaaccagtgccggtggtggtgtgcacattgagccccggtatagacagttcccccagc

SEQ ID NO: 821044 - DNA, 100 bp, Homo sapiens
gtggagaaggagttggaccagtcaacatctccctcaggattctctctcggaccaggagggctacctgagcagctccagcagcagccacagtggctcagac

SEQ ID NO: 821045 - DNA, 98 bp, Homo sapiens
ggccacggtggataacgacaagaaaaacaatcgcttcaatgatgggaaggtggatcccgccgggaggtactttgctgtgggctcgggatgagtttgaa

SEQ ID NO: 821046 - DNA, 100 bp, Homo sapiens
cgatgagatgagaattcagaaggatctgggcctccaggatagattgttctcctctgaaagtgacaacagcctgtacttcacctacagtggccagcccaac

SEQ ID NO: 821047 - DNA, 134 bp, Homo sapiens
tcagcagcatcagacacatgatccgcaagaacaagtaccgccccgacctgcgcatgactagacgcttgaagcaaagctgccatcccagaagacgacatgctctcagcaacccccctgtatgggaacgttcacag

SEQ ID NO: 821048 - DNA, 100 bp, Homo sapiens
agatccactgctgtgcgtgcacacatactcacacagatatggagtttggacctccaacagttaatgataaactaatgagattttttgatcactgtgagaa

SEQ ID NO: 821049 - DNA, 100 bp, Homo sapiens
ccgggaccgacccctctgctcgcggccgcgcctttgagggatatgggattagaactgtttagaacccatattattagtgataaaatggttcagagtaaaa

SEQ ID NO: 821050 - DNA, 100 bp, Homo sapiens
gttccagagaacgttcgagatctcgtgggtcgaaatcaagaacattaaccaggtggtatttgttggaaatttcttgagaattaatacgatcgccatgcgg

SEQ ID NO: 821051 - DNA, 99 bp, Homo sapiens
gctgcatcttgtatagtgacctgggcttgccaaaggagctcactctctgggtggacccatgtgaggtgtgctgtcgtgtactaatggtcacttgatgtg

SEQ ID NO: 821052 - DNA, 99 bp, Homo sapiens
tctacttgaaaaattaagtgaattgatttggttggaatgctcttttaccgatgctttaacatacagccactagagttcctggaataactattgctacag

SEQ ID NO: 821053 - DNA, 98 bp, Homo sapiens
agaggatggggacaatccagaggtgggagaagctcgggaagtctttgacttacctgttgtaaaggggaagaagatgctgcatacaggatggaatatcc

SEQ ID NO: 821054 - DNA, 100 bp, Homo sapiens
gaagcatgtgtcttccccagctctgcagccacatactatccgtttgttcaggaaccaccagtgacagagccaggaatagttgctgaacaccccaggcctg

SEQ ID NO: 821055 - DNA, 100 bp, Homo sapiens
ctgctgaccccagccggcgccgagggcttggaatctcgagcgggaaaaggaaaagaatacttgagatccatttgtaaggaaagaaaaggaagcaacaaca

SEQ ID NO: 821056 - DNA, 100 bp, Homo sapiens
ggaaggacatgaaaaggcagatccttcccagtttgaacttttaaaagtattagggcagggatcatttggaaaggacctgaaggagaagaaggagaaggtg

SEQ ID NO: 821057 - DNA, 100 bp, Homo sapiens
cccaagtagctgggactccaagtgggtgccactacagccagtatttgaaccagaccatacaggatgatgcatccacaggggagcgttctctgaacaggga

SEQ ID NO: 821058 - DNA, 100 bp, Homo sapiens
atggtggtggatgcggccaactccaatgggcctttccagcccgtggtccttctccatattcgagagttatggtgaatggttgcatggatttgaaaaaaag

SEQ ID NO: 821059 - DNA, 100 bp, Homo sapiens
ctctcagcttcggagaatggagtcttccatcaatcatatctcacagagcagtcaagagaccagcccctgcaaaaagcagtgatcattctgaggaggacag

SEQ ID NO: 821060 - DNA, 100 bp, Homo sapiens
gcggctgtgcgggctgcgtagcggtgctgggtcgggccgacgtgccacccacccggagccggtggatctaggatccggcttccaacatgtggcagctctg

SEQ ID NO: 821061 - DNA, 100 bp, Homo sapiens
caggaatccttcaactgctttctaccaagcgttccatttgaacacgttaaaggaatcaaagagcctctgggataggggccaccttatcttagttccagaa

SEQ ID NO: 821062 - DNA, 100 bp, Homo sapiens
attgatcgaatgaaagagaaagcaatgagtgggctaaagtgaaacattcagcatccctgtctggtatgccttctcgaattacagaggatcatgtgattca

SEQ ID NO: 821063 - DNA, 100 bp, Homo sapiens
tccttcttagaagacttgactggtcttacattgctgcatcaagaaacccaagctgctgaggtggcaagtgggatgatactggtcatggctttctttctca

SEQ ID NO: 821064 - DNA, 100 bp, Homo sapiens
agaaggtgaccaagttcatgctgtgtgctggacgctggacagggggcaaaagcacctgctcgagtccggcagcgtcttctcttgagggagcaatttggag

SEQ ID NO: 821065 - DNA, 100 bp, Homo sapiens
tgaggccacagttaaagctgcactgggaagacttcgatgtgttcacaaagggggagaacgtcagtccacgactactccagtggttttggcggcaagtatg

SEQ ID NO: 821066 - DNA, 99 bp, Homo sapiens
ttacggcaataaagcaaagaaacaaaagacaactctgcttttccagaaactgtgccaggatcacggtgattcacatagtttatatgttgccccatctct

SEQ ID NO: 821067 - DNA, 121 bp, Homo sapiens
agcttgatgagccaagtgtcgtaccggcatctcgtgctgctccacggcgtgtgcatggctggagacagtcacgacccccaggagacctggaggactgaatgctgctgcccccaaggaggag

SEQ ID NO: 821068 - DNA, 111 bp, Homo sapiens
atgatccggaccctgagactcccctaaaggccagaaaggtggctgggagcccgagccccacacctgccgggcagcaggtgctggacgtcgacagctgcctggactcatccg

SEQ ID NO: 821069 - DNA, 100 bp, Homo sapiens
agagtccttggaacaagcaactggctattgaaaaggtggtttgtgatggggccaccacgctccggaactgggattcacatcgaccctctgggaaccagtg

SEQ ID NO: 821070 - DNA, 98 bp, Homo sapiens
ggactatggcatcaaacagcctcttcagcacagtgacaccatgtcagcaaaacttcttttggggcttcatccctccacccctcatcttcggggctggc

SEQ ID NO: 821071 - DNA, 100 bp, Homo sapiens
ttggatatggagcctttggtgttgtctgcttggtgctaacagtggtttgcacatcatcatctttgatgaaattgatgccatctgcaagcagagagggagc

SEQ ID NO: 821072 - DNA, 99 bp, Homo sapiens
tgcttacggttttgagaagccttccgctattcagcagagagctattattccctgtattaaagaaagcatccctggagaacagcctggaggagaccaaag

SEQ ID NO: 821073 - DNA, 98 bp, Homo sapiens
gagcagaggaagcacattgatgcggccatggttttggaagagtgtgcccaggtcctcgaggccacacgggttaatcgaagaaagagcgcactggcttt

SEQ ID NO: 821074 - DNA, 98 bp, Homo sapiens
accgctgccgcccagcacgtccaggtgctttacaaggccaagtacggtccaatgtggatgtcctacttagggcctcagatgcacgtgaacctggccag

SEQ ID NO: 821075 - DNA, 109 bp, Homo sapiens
ggaatggcaagcgcagcaacaacagagagcacgtgcctgacatttaccccggtaactgctgggcatttaaaggctcccaggggtacctggtggtgaggctctccatgat

SEQ ID NO: 821076 - DNA, 100 bp, Homo sapiens
gaaatgcctggaccctgcccagcagaatttgtatagagatgtgatgttggagaactacagaaacctggtctccctagaaaaaagcttggccagaccacaa

SEQ ID NO: 821077 - DNA, 98 bp, Homo sapiens
ttcggggacctgaagaagatgaacaagcgccaggtgtcctcatgacttctcttgtggaccatgtccgtgatcttttttgcctgcgtggtacgggtaag

SEQ ID NO: 821078 - DNA, 99 bp, Homo sapiens
tctgcgtgagtgtggtctacgagctgtttctcatctttatactcttccagctgctggagccagttctgcttctcggcaaggagcgatttgctggtgtag

SEQ ID NO: 821079 - DNA, 98 bp, Homo sapiens
caacggtgtttgctctgagcactatgactagctctgtccaggtggtgtggaccctgcaagatcctggggccgaggttagagaagatggtggccaagca

SEQ ID NO: 821080 - DNA, 99 bp, Homo sapiens
atggacacgctactttagctaaggcatgaccagcaatgaacagtagtaagatgccttcaattaagttgcagagttctgatggagagatatttgaagttg

SEQ ID NO: 821081 - DNA, 100 bp, Homo sapiens
gccctgagcaatagcacgaggcctgttgtctaccaagtgcagtttaaatacttcaaggttactgactttttatgatgtttggtggctatgagactataga

SEQ ID NO: 821082 - DNA, 99 bp, Homo sapiens
aagaaagaaaatggcttgtgctgagttttcttttcatgtaccaagtcttgaagagcttgctggaggagttcatgatcaagtgttgcccacaccaaatgc

SEQ ID NO: 821083 - DNA, 100 bp, Homo sapiens
cgcagcgcccccaggctcatgtcccaggcaaagcgaaggctggagctaggagaaagcggtcatcagtacctctcagatggtttaaaaacccccaagggca

SEQ ID NO: 821084 - DNA, 98 bp, Homo sapiens
ggaggctcaacggcagaagcttcaccacaaaagcgaaatgggcacaccacagattcactttataggaacagcttcagcttcagtgatgaaaaactgaa

SEQ ID NO: 821085 - DNA, 100 bp, Homo sapiens
cccgagtggagggcaaacctgtgaacccacccgagagcaacaaagcaggcgactacagccacgtgaaggcccagcagcaaagaaacctggataacatcgt

SEQ ID NO: 821086 - DNA, 134 bp, Homo sapiens
tcgtccactccacctggacctgccccatggaggtgctgcgggatcacctcctcggcgtgagcgacagcggcaaaatctgcttggctttgaggaagagtggcagtactgcctcactgcataagggatgggatcag

SEQ ID NO: 821087 - DNA, 100 bp, Homo sapiens
ctgggggtcctctctgagtcaaatccagtggtgggttttattgactacattgtgcacccattgtgggagacctgggcggaccttgtccacccagatgccc

SEQ ID NO: 821088 - DNA, 98 bp, Homo sapiens
cccagagggccggaaggaaagccaagaactcatagtgcagacagatgaagaccgcaatggacctcatcatgaccgttgctgtacttacaatgaaaaca

SEQ ID NO: 821089 - DNA, 98 bp, Homo sapiens
cctcgcgggatggcagctgctgatttgtcccatggacgcaaagtaccacatgcagcgctgcattgactctggcctctgggtccccaactctaaggcca

SEQ ID NO: 821090 - DNA, 100 bp, Homo sapiens
gcgccgctctccgagctcgatccgctgctcgcacgggagccagctgggtggcttcattccagcgctccaatagtcatgacaaagtaaggagaatagttgc

SEQ ID NO: 821091 - DNA, 98 bp, Homo sapiens
atctcttcaagtacatcataatcggcgacacagtccacaagaatcggaatgtcagttaatgctattcgcaagcagagtacagatgaggaagttacatc

SEQ ID NO: 821092 - DNA, 98 bp, Homo sapiens
tgtcgctggagcacaaaagagtctccgcggtggaggtctgcgttgctcttgcttttcctcgctggggtgtacgaatataaaaaggcttctgcagaacc

SEQ ID NO: 821093 - DNA, 100 bp, Homo sapiens
ccgggtggttcgcgctccttctgaattggcagcgaggtcgcggcaggttcgagaaactggcgatggaatatgagaggagccctctggaaagaaaaggaca

SEQ ID NO: 821094 - DNA, 100 bp, Homo sapiens
tggagcctcatctcatcttacaggagcagactaggttatacattggctcttcaaagacgttcacctcatcagagaaatccctgactcctttgcagtggtg

SEQ ID NO: 821095 - DNA, 99 bp, Homo sapiens
gcgagactccgtgggcgtaggaccctccgagccaggttaagtctttcgagaaggaaaggcagacagagaagcgtgtgctggagactgaacttgtggacc

SEQ ID NO: 821096 - DNA, 101 bp, Homo sapiens
caaaaaacctgttgtcatcatgggatgaagtgatacacattgctgatcagctcagacacctggaagtccttaatgtcaggcggtctggaaacaagtcctct

SEQ ID NO: 821097 - DNA, 99 bp, Homo sapiens
ggggcccaggccgggagccgaccggcacagcagggggacagccgcgccgctgctgcttttccgaagaggtgacttcgaccgagctctccagtggagacc

SEQ ID NO: 821098 - DNA, 98 bp, Homo sapiens
aatcctatagaccagtgtaataccctgaatcccgattcttacagaagcagagattgatgctcaccttgttgctctagcagagagagactaaacattgt

SEQ ID NO: 821099 - DNA, 98 bp, Homo sapiens
gaagtggctttgggtcacgaggcttcacggaggaggtggctgtttgagatggagaacgtttttactgtgtcatcagatcctcatccctctcctgcagc

SEQ ID NO: 821100 - DNA, 99 bp, Homo sapiens
cttcccgtccgctgtcctctgctgccagtcccctgccccgggcaaagcccatctggtccgccgagcaggtatatttgaaggctcccatgattctgaatg

SEQ ID NO: 821101 - DNA, 98 bp, Homo sapiens
gagaccgggcggccacagtccgcagggatgaacctcgagttgctgggtttattgttggccaaaaccaggctttgattgaaccaggatgaatgcgggtg

SEQ ID NO: 821102 - DNA, 99 bp, Homo sapiens
gtggaactagtcggacaaagccctcgcgtcggacccttgccagaactttggtcgcattatgtttcagctcttctcagacatatgtccaaaaacatgcaa

SEQ ID NO: 821103 - DNA, 100 bp, Homo sapiens
tcttcaaaagaaatatccatctctggccaatagaaatggaacaaagtatcttgctaggactctaaacagttggaaaatggatataccttatttgattatg

SEQ ID NO: 821104 - DNA, 100 bp, Homo sapiens
ggcgggggcggcccctccttgggcctgcggctctctacgtccctgcggagcagccggatcaatctccccatccagacctactctgccctcaacttccgag

SEQ ID NO: 821105 - DNA, 100 bp, Homo sapiens
gaaacagcgaaggatacagcctgtgcacatcctgacttctgtgagctcattgcgcgggactagggaggcttttaaggataccggaaaaacacccgtggag

SEQ ID NO: 821106 - DNA, 99 bp, Homo sapiens
tcgaattccagaatgatgaaattgtatgttgctatcggagctccacaagaagatgacttgcaaggtgctatttatatttacaatggccgtgcagatggg

SEQ ID NO: 821107 - DNA, 99 bp, Homo sapiens
ctagggctggagcctctccagcctcccgcgaagaaatgggacgtcggtcatcagatactgaagaagaaagcagaagcaagagaaaaaagaaacaccgta

SEQ ID NO: 821108 - DNA, 98 bp, Homo sapiens
cttccggagccatgtcagaaggagtggacttgattgatatatatgctgacgaggagttcaaccagatcacttcagcatcggtgaggttggtctctcaa

SEQ ID NO: 821109 - DNA, 100 bp, Homo sapiens
cgcggagacccagtcgctacgggagcagccagatgggatcttgtgtgtgataatgcctggaaggtccatatcgctaagttctccttactggttggattaa

SEQ ID NO: 821110 - DNA, 100 bp, Homo sapiens
agtagttaaccaatttgccagacattatcagactggacagggcgccaatgcttcggcattagagaaagagattggtccagaacagtttccggtcaatgag

SEQ ID NO: 821111 - DNA, 99 bp, Homo sapiens
ctcttcaggagcacagcagctgaagttcagcagtttcttgcagaacataaattattaggaaacattaaaaatgtggccaagacagctaacaaggaccac

SEQ ID NO: 821112 - DNA, 100 bp, Homo sapiens
gctgacctcagagtcctttttggcatctaacctcctgtggataagggctcagaatagcaccattgctgggttgaaaggaggagcaggaggtactgatgga

SEQ ID NO: 821113 - DNA, 99 bp, Homo sapiens
cgagagatggtcaggtctggagctcgaccgggccaggttctacatggtcagctattatgagcggaatcacagaatagcagttggagctcgccatggttc

SEQ ID NO: 821114 - DNA, 107 bp, Homo sapiens
aacatggccgagcttactatgaattccgagaggaggcttaccacagccggaaccagaagctccaggaagaaaaacataaaagcataactgaggcacttaggagacag

SEQ ID NO: 821115 - DNA, 100 bp, Homo sapiens
ctgaaattcagagaggggaagtgatttgcctcagcttgtactagtatggtgtttgcgaaaacttgcggaagctggagatcacaggcgtgtcttgtcggga

SEQ ID NO: 821116 - DNA, 98 bp, Homo sapiens
tgcttcctccatcctggtattttttggagcttccatcctggttcttccaaagtgcccggacccaaaacaggaaattcgaaatcagagcaaagcctctg

SEQ ID NO: 821117 - DNA, 100 bp, Homo sapiens
gctctggactggatatttctacctcggccccaggttctctgcagatgcagtaccagcagagcatgcaggtggacgtattggtgaccacagctggcggcgt

SEQ ID NO: 821118 - DNA, 100 bp, Homo sapiens
gattaatccagttttaccagacttccaaaaagatgatttcaaggggatgtttaatactgaaatttctgaataaattggcagaagaacgcagacagaagaa

SEQ ID NO: 821119 - DNA, 147 bp, Homo sapiens
acggggaccaacacgcagcagccgctgccgccgccgcgggagccgctgcccgaactcccggcccgaactccaggatgctgacctgttggatgttgaaagcaaacactttgaagacctggagttccagcagcttgaacatgagagccg

SEQ ID NO: 821120 - DNA, 100 bp, Homo sapiens
ttttcttctattgaaactttggcatttacctttggaaatatagctctcgatgttctgaagtatgaggaagttgacatggattcattagccaaggctgttc

SEQ ID NO: 821121 - DNA, 98 bp, Homo sapiens
tgtcactcacttacacagtattgggaaatctgtgaaagggatgtgtttggccaaatgggagagtggttacaacacacgagctacaaactacaatgctg

SEQ ID NO: 821122 - DNA, 100 bp, Homo sapiens
cagaggtcagagagagacagctcacgttccgggacccagatgatgtggtaccagttggccaaagaagagcctggtgttggtgcatgtgctttggactagc

SEQ ID NO: 821123 - DNA, 100 bp, Homo sapiens
aaggatttgccagtggagtagaacagattattcttggagctggaccagtacttgaggagggtgcatctgcccggaagactcagactcctgcagcccagcc

SEQ ID NO: 821124 - DNA, 100 bp, Homo sapiens
agtggaggggtgaatcagtatgttgtgcaagaggtactgtccatcaaacatcttccaccacagcttagaggttccacttccaaacatgagttccaggccg

SEQ ID NO: 821125 - DNA, 98 bp, Homo sapiens
ccagagtctgaccgcctcccgcggaggggtggccgccgccgaccgagcggaccctgaggaaaccattctcaacgcattcaaagtgtttgaccctgaag

SEQ ID NO: 821126 - DNA, 100 bp, Homo sapiens
aaaggatcctgtagaaattcaaaccctagtgaataaagccaagagagaccttggagtaattcgtcgacagggaaaggtggcccagacagcgtgtatgtca

SEQ ID NO: 821127 - DNA, 98 bp, Homo sapiens
gaaggttccaagggccacaagaagataagttggccctaccctcaggacttaaccaccaccatgtcgagcaaaagaacaaagaccaagaccaagaagcg

SEQ ID NO: 821128 - DNA, 98 bp, Homo sapiens
gtcaaccaaccagacgaaagaaagatctctggttggacagtgtcacatccctgatccaagcagccaaaaatttaatgaatgctgtagtgcaaacagtg

SEQ ID NO: 821129 - DNA, 100 bp, Homo sapiens
ctgagaccctccagcgctgcctggaggagaatcaagagctccgaggacatgatccacatcgcggacaccaaggtcgccaggcgttatggggatttcttca

SEQ ID NO: 821130 - DNA, 98 bp, Homo sapiens
aataatagtcttaatgaactgatgaaactaaagccacctgctaatattgctcagccagtagcaacagcagctacactgctcagcacgcaggcatgtga

SEQ ID NO: 821131 - DNA, 100 bp, Homo sapiens
agctccaatcttgaagaaagaatgcaaagtccccagaatcttcatggccagcaagatgtgcacctggtggacatatggaatgtcatagaagcattgcggg

SEQ ID NO: 821132 - DNA, 100 bp, Homo sapiens
tcagaagttattcgaggctgccaagtaaaccaagactactttgcatctgtaaatgcaccttcaaacccaccaagggaaaagtccggcatttacagaaggc

SEQ ID NO: 821133 - DNA, 100 bp, Homo sapiens
ataaaaactgctggaggatcaagaagggcttcgtgcccaacatgcagagagtattatgagggaggccgaggacttcatgctccggacagagaaacggcgc

SEQ ID NO: 821134 - DNA, 100 bp, Homo sapiens
ctcactcctttctggatctctcattggactcaagccagcatggctcacaccacaaaggttaacggcagtgcctcagaagaggtgtggtggaaaggtcttc

SEQ ID NO: 821135 - DNA, 98 bp, Homo sapiens
gaagaatgaacattgtattgagaacaatatagatttgcagggaaagaccatgtttgtagatttattggctgtgggaggaatgatcgattcaactatgt

SEQ ID NO: 821136 - DNA, 98 bp, Homo sapiens
cctgctgttcctgccatcacgagatggaattcctccttatcgtgtgggcagtaagaaacagctccagagagaaatgcatcgcagtgtgaaggccaatg

SEQ ID NO: 821137 - DNA, 98 bp, Homo sapiens
cgtgaaccacatgcccagcacgggaaatgagtggcttatactctcctgtcagtgaggatagcacagtgcctcaatttgaagctccttctccatcacac

SEQ ID NO: 821138 - DNA, 98 bp, Homo sapiens
actggaacagattcctctgtggaagccagggagaagaggaggtacagaggtgcagttccatggtacaccataaatcttgacttaccaccctacaaaag

SEQ ID NO: 821139 - DNA, 100 bp, Homo sapiens
aaagctctccttcaggataaggacgtaattgccatcaatcaggaccccttgggcaagcaagggtaccagcttagacagagctgtgtgttacacaccaacc

SEQ ID NO: 821140 - DNA, 100 bp, Homo sapiens
gaaataatggaaatcaatgaaaaactcgcagaagctgaaagtgaagctgccatgaaagagattgaatccattgtcaaagatggagtcttgctctgtcacc

SEQ ID NO: 821141 - DNA, 98 bp, Homo sapiens
atgccaatgggcggccagatgcgctccaactaccgtgaatgtaacacatcgtccagtaactcaggtgaccacaagactccctgtaccaagagctcctg

SEQ ID NO: 821142 - DNA, 100 bp, Homo sapiens
tgaacattggctcaggggttagcatcttagcagtatattccaaagataattacaaacgggtcacaggtactagattggagcttattttagcagcatatta

SEQ ID NO: 821143 - DNA, 99 bp, Homo sapiens
tggcaacctgcctcttcttgccctgcaccaatcagtgcaaacactactgcatctgtacatcatggcagcctagtatcagaaggccaggcgagactgcaa

SEQ ID NO: 821144 - DNA, 99 bp, Homo sapiens
tccaggcgggcctcccgtttctggctccgggctgagcttcctggagaagaggaagttttcggctttgtgagaaaccttaccatcaaacacgatggccag

SEQ ID NO: 821145 - DNA, 98 bp, Homo sapiens
ttgctggagagaagagaatgcctgaagacttggatgaaaatatggattacaggttgatgtgggagggttgccacaccatttggaggttttgaaaaagc

SEQ ID NO: 821146 - DNA, 124 bp, Homo sapiens
ccggggccgggacgccatgtccatggaggaccccttctttgtggtgaaagggaactatccaagatcacgatgccagttatatttaatgagcctctgagcttcctacagcgcctaactgaataca

SEQ ID NO: 821147 - DNA, 101 bp, Homo sapiens
acaattccaagacagggattgaccagctcgtggtgacgcctatttctcaggtcagtttaggggctggtgcaaaggatgagttgcacattgttgaagcagag

SEQ ID NO: 821148 - DNA, 100 bp, Homo sapiens
cttttgtgtattttgagagaatagatgactcaaaggaggaaaatccttgtaaatgatggtgacgcttcaaaagccagactggaactgagggaagagaatc

SEQ ID NO: 821149 - DNA, 100 bp, Homo sapiens
ccagatccgctgatctagtgcttctcgaaaaaaaccttcaggcggcccatggctgacagcagatcccaggtacagagggcacgctatgaggcagctaact

SEQ ID NO: 821150 - DNA, 100 bp, Homo sapiens
tgggaagagaggactggaaatggaaggatgggagggggtgcactatagccatctggagctgagccctggggagccagtgcaggagggggaccctcatttc

SEQ ID NO: 821151 - DNA, 51 bp, Homo sapiens
ctccatctgggccatggatggatgtcctaaacgatgctatatttgatgaag

SEQ ID NO: 821152 - DNA, 98 bp, Homo sapiens
gacaagataatgaaagaattggatgaagagactgacatcaatttgccctatcttacaatggattcttctggacccaagcatttgaatatgaagttgac

SEQ ID NO: 821153 - DNA, 129 bp, Homo sapiens
gctggaggagctccccagctggtggctggagcgaccccttgttctttggtggcgctggggacaaggaccacatgtgcagtgtcaaaagtcgcctgtggaagctgctatccccagccaggctggccaggc

SEQ ID NO: 821154 - DNA, 98 bp, Homo sapiens
tttaaagctgagctgcgaggaaaatggcggcgggaggccttcatggtgaaacacctcttggagtatacccaggcaacagagtctaacctgcagtacag

SEQ ID NO: 821155 - DNA, 130 bp, Homo sapiens
tcagattcaagtaagaccattcaacgcattgaagactaagaatatgagaaacctgaatccagaagtgatgagctactcctgggtcatgagaaggcccctgccttcagagactatgtggctgtggcacgag

SEQ ID NO: 821156 - DNA, 100 bp, Homo sapiens
ttgaaatctaatgaaccgaaactttgggcctgtcaactacttggtcccagaattcccgatcccagcataggagaagctcctgctccagacatgaagatcg

SEQ ID NO: 821157 - DNA, 100 bp, Homo sapiens
tgtatgcactacctcctcctccccagttctactcaagccttattgaagagataggaactcttggttgggataagtttatcttgcagattatggactttcc

SEQ ID NO: 821158 - DNA, 100 bp, Homo sapiens
aatttctaagtgatgaagaaaacttgaaactgtttgggaaatgcaacaatccaaatggccatgggcacaattataaaggcatcaagcatgatggaaccat

SEQ ID NO: 821159 - DNA, 50 bp, Homo sapiens
gacggaatgcctccatacatagatggggtcttgccaggtcttggccaggc

SEQ ID NO: 821160 - DNA, 99 bp, Homo sapiens
ggaacccttcgctggcgggagcgcggttcggggccgcagaggaaatttccagaactctttgcacagttcaagtccttcctgggggtaaaagagctgtcc

SEQ ID NO: 821161 - DNA, 100 bp, Homo sapiens
ctcctgtgctctccattactggaacagattcctctgtggaagccagggagaagaggagccacagcgtcctgtgtttactcatgaaaatattcaaggtggg

SEQ ID NO: 821162 - DNA, 99 bp, Homo sapiens
gaatttgctagtaacgtcatggaggatgaacgacagtatgagcccagaggacctggtcggcccttgtaccaaagaagaatctcatctagctcagttcaa

SEQ ID NO: 821163 - DNA, 100 bp, Homo sapiens
agatgaagttgaaggactaaaacgcttaatgacagagctctaagcgaaagacatgaggcctcagcctgaaatgaggttgttttgaggtcatctgatttct

SEQ ID NO: 821164 - DNA, 98 bp, Homo sapiens
gccggtcaccggctcctgcagggttctgccggagacttccatttggcctcaatgtgaaattaaagtagaaaatcacatctacatgcatgttgctatca

SEQ ID NO: 821165 - DNA, 100 bp, Homo sapiens
cttttggatggatttcctggtcgaggccacaaagacagatgttactgtggttaggtttccagtactacagtgcaaccattctgcagatgtctggtgttga

SEQ ID NO: 821166 - DNA, 100 bp, Homo sapiens
tcccagtcggtggaggtataaataactacatgtaaaattaatgcagttcccggtggcgtgggcgtcaagtgtccgctgacagaacaaggcaagcagttgg

SEQ ID NO: 821167 - DNA, 100 bp, Homo sapiens
gccgctgccgccctgagtcactgcctgcgcagctccggccgcctggctccccatactagtcgccgctcctgagtattggtgttccattgcttactttgaa

SEQ ID NO: 821168 - DNA, 98 bp, Homo sapiens
ggctattacttggatatcagcctatacaaggaagtgactgactccaggacagcacaggaaagtatgcctcagactcctcccttttcagcaatgtttga

SEQ ID NO: 821169 - DNA, 99 bp, Homo sapiens
tcagctctcaaaatgtgggactgcgggaagctgcccttcacattttctggtggtcagtctgaccaaggatacgggtctaaggatgaacttataaaggat

SEQ ID NO: 821170 - DNA, 98 bp, Homo sapiens
atcgatgtgagcaacccgcaaacggtgggggtcggccggggccgcttcaccacttacgaaatcagggtcaagcagcagcagttgcaagctcagcatct

SEQ ID NO: 821171 - DNA, 98 bp, Homo sapiens
ttgagcccatcaacgtggaaggaagttgctgcccaatgtgtccaggcagagatcctacaagaatccaggatgatgatcccagattgccagcgcaggtt

SEQ ID NO: 821172 - DNA, 100 bp, Homo sapiens
ttgtgaattttgtgaggagctctacccagaggaactgctgattgaccatcagtaaattgttgaagactacttcacaatttccacttcctctggctgttgg

SEQ ID NO: 821173 - DNA, 100 bp, Homo sapiens
ggccagggcctggactacttctacgacctgctctagggtaagatgatcatgcaggataaactggagaaggagcggaatgatgctaagaacgcagtggagg

SEQ ID NO: 821174 - DNA, 100 bp, Homo sapiens
agttcactcatgtttgcacccgcggtgatgcgtgcttttcgcaagaacaagactctcggctatggagtccccatgttggctgatcagctgaccgaagaac

SEQ ID NO: 821175 - DNA, 100 bp, Homo sapiens
tccagagctacaaaagtttttccagaaatgcttcggttacccacagtctttcgccagatgagaccggtgtccagggtactggctcctcatctcactcggg

SEQ ID NO: 821176 - DNA, 98 bp, Homo sapiens
aaagagttcaagaaagccctgggagccaactgcatctttctcaacatcacaaacagtgagctcttcattctggttcaagttctttcttcaaagagtca

SEQ ID NO: 821177 - DNA, 100 bp, Homo sapiens
cttggaatcttggacctcatccaggttagctcccagcgatgccagatgggatcagcacagccctgcctctgctgctaattgttcctctaaagtaatcgcc

SEQ ID NO: 821178 - DNA, 101 bp, Homo sapiens
caactagtaaaatgcttaaagcaggcataagagtcagctctggctgctggtgctgatattagttgtaagtggcctctctgctggaatgagtataattccaa

SEQ ID NO: 821179 - DNA, 98 bp, Homo sapiens
gcccacacacaggtgaatttaaaggagcagccctggtgtcacctatcagtaaaaggtattcgatggtctcagatgcagaaacagaaagcattttcatg

SEQ ID NO: 821180 - DNA, 100 bp, Homo sapiens
ttggaaagtcaggaccgcgacggcagcagagcagctcttctcaaccatctgtgagtccaggggaaccgtctccaccatccatccatccaggaaaatcaga

SEQ ID NO: 821181 - DNA, 100 bp, Homo sapiens
tggctcggacccacggagccggcagcccagcactccggttgtttttcaccattcagaacattgcctgaagcaggtccaccatgccgttagtaacgaggaa

SEQ ID NO: 821182 - DNA, 99 bp, Homo sapiens
tttgactgtgtatactctacaatctaagaaggatttcagcaaatttggagcaggagatgtacagtcttactacgtctttgtgagctcatggatgatgaa

SEQ ID NO: 821183 - DNA, 98 bp, Homo sapiens
attaaatatgactttcatgaaatatgtggattccaatctctgttgcttcatcccaggaaaggtaattaataatgcttgtgctactcaagccatagtga

SEQ ID NO: 821184 - DNA, 100 bp, Homo sapiens
cacagccccgacctttgatgagaactcagctgtccaggctcggacatcatcatgcagctggacgacgtggttagcagtactgtgactgggccacgtgtgg

SEQ ID NO: 821185 - DNA, 98 bp, Homo sapiens
tgttctggaaatctagaattaatggagctgccctttgaaatcacagttgaaaactttggtgcaacagaagtgaaagagctggttctaaatggtgcaga

SEQ ID NO: 821186 - DNA, 100 bp, Homo sapiens
gataccaccagcaacttctaatggatcctcttccaaaaccacaaacttgcctacgtcagtaacagccaccaagggaccaggtggagataattgaatcatg

SEQ ID NO: 821187 - DNA, 100 bp, Homo sapiens
ctcctctcccgcgggcaccgaggactccgctcctgcccagaacccttaggagaaatcttgagagtggacagcaattgtgaagatcgccagagagttctgt

SEQ ID NO: 821188 - DNA, 100 bp, Homo sapiens
ttcagagcctgaaaaaaatagtcaatagtgctcagactggtagcttcaaacagctcacagttaaggttaatccctatatcctgaagaagaacatgatcct

SEQ ID NO: 821189 - DNA, 100 bp, Homo sapiens
cgcaaacgagtgaagcagctgagtgatgggcagcccccaccacccgcccaggccagccccagcagcaacagcagcacagaaatctccaaattggacatcc

SEQ ID NO: 821190 - DNA, 99 bp, Homo sapiens
taatgccatgctcatggcaaaagggaagctgaaaccaactcagaatgcttctgagaaggtgcaaggaaccatcttcccagctcccaatttcaatcccat

SEQ ID NO: 821191 - DNA, 120 bp, Homo sapiens
ctgatattgaagaggaagaactgaccagagctgatcccgagcagcgtcatgtacccctggccacaacacacagtgatcttgttctaagagcaacaaagctgggaattccttatagagtta

SEQ ID NO: 821192 - DNA, 100 bp, Homo sapiens
tctcaaagtcatgaacttcacaattcaaatgccagatgttaatgtaagctgggatggagagggcccaaagcaactgccatttattgacatttcagtggct

SEQ ID NO: 821193 - DNA, 100 bp, Homo sapiens
actccctggagttttgcaatgcagtcatacagataacgaaggaggcccaacttcattcaataaggagcctgacggatttatcccagacggtagaacaaaa

SEQ ID NO: 821194 - DNA, 99 bp, Homo sapiens
aagaagtcgcactcggccaacgacagcgaggagttcttccgggaggacgacggtggaggacgactgggtttggattcagaagaggattattatacacca

SEQ ID NO: 821195 - DNA, 100 bp, Homo sapiens
tcaatgtctgcatgaacgccaagcaccacaaggaaaagccaggccccgaggacaagttgcatgagcagatttggcagcaatattttgcagcaaaagatac

SEQ ID NO: 821196 - DNA, 100 bp, Homo sapiens
tcagcacaagcaccacagttaccacgaaaaaaggacaaacgagacttccctagaattgtggccttgtttcctaaagatgtggaccgtctgagaaggatgt

SEQ ID NO: 821197 - DNA, 100 bp, Homo sapiens
gagggtgccctcaatgagcacatgaccagcttagcttctgtcctaaagaaaatggacccaagtggggtcaaagtgctggaaacagcagaggacatccagg

SEQ ID NO: 821198 - DNA, 98 bp, Homo sapiens
gaagaagcacctagaagaataagagatgtgattaatgtattccaccacctccgccagttaagaggaaaaagcctatgtgcttcccaagctgtatgtga

SEQ ID NO: 821199 - DNA, 99 bp, Homo sapiens
tgtgagtggcgatcacgagaacaataaggatcctggtgaacatggacgacaacattgtgaagcattactccaatgaggacaccttccagctgcagattg

SEQ ID NO: 821200 - DNA, 100 bp, Homo sapiens
ggcaagggcgagatcctggcgagcctgcaggatggcgcggccgagtccccgtacggccacccggcgggtggtgtgtgatgagaacggctctaagggttat

SEQ ID NO: 821201 - DNA, 98 bp, Homo sapiens
agacggtaagagggagaccaaagttatcaaggaaatggtatagcaatactggagtaaccgcttcctaaaccattttgcagaaatgtaagggtgttcgg

SEQ ID NO: 821202 - DNA, 100 bp, Homo sapiens
cgacgggcgggtgaagatcggacactacgtgctgggcgacacgctgggcgtcggcaccttcggcaaagtgaagagttttgaagtacaggaagaaggttat

SEQ ID NO: 821203 - DNA, 98 bp, Homo sapiens
aacttaatacagcaagaaagaccatcaagtttaccagcagaaggagaagacagcctgaagaagatgcagctgatggagcttgcgattctgaatggcac

SEQ ID NO: 821204 - DNA, 98 bp, Homo sapiens
ggacactttgttattggagaaacatgcagattatatcgcatcctatggctcaaagaaagatgattatactaaaagaacatattgctgataagaagaaa

SEQ ID NO: 821205 - DNA, 99 bp, Homo sapiens
ttcccccttctgaaagaagaattttcaacagttttcttcatactgcattaaaggttttagaaatactacataggactcttcaggcagctgaattgattg

SEQ ID NO: 821206 - DNA, 100 bp, Homo sapiens
tttttaaaaagaactgttgagttttatcattttcgttaagtgaccgtgcgcagcgctgtaactttgatgcggatgaaattaaaaggctaggaaagagatt

SEQ ID NO: 821207 - DNA, 100 bp, Homo sapiens
gccagtgatttacaatagagcaagattgtagggaatggaagtgaacagcagctgcaaaaagagctagcagatgtactgatggatcctccaatggacgacc

SEQ ID NO: 821208 - DNA, 98 bp, Homo sapiens
taaatggggttgtagcatagaagatgtggactacaatggaaaccttccagacttaattcagtgcacaaatgagatgaatgtgaacatcccacagttgg

SEQ ID NO: 821209 - DNA, 98 bp, Homo sapiens
atccgggtgtccctgtacctgcagctgctgcagctgctgcacagaaattaatgcgaacagacagacttgaggacatggtccggcgaggagagatcatc

SEQ ID NO: 821210 - DNA, 100 bp, Homo sapiens
ctgctctccatggagagagtaactctgtccttattatcggaccccgaggatcaggaaaaactatggatctaagagaggaatgtgtgaagttgaaaacaag

SEQ ID NO: 821211 - DNA, 128 bp, Homo sapiens
agaccaccttcgcctggcacaccgaggacatggacctgtacagcatcaactacctgcactttggggagcctaagtcctgatgcaaccttaaaatcagtgacaagaaacattccaaacaagcaacagtc

SEQ ID NO: 821212 - DNA, 100 bp, Homo sapiens
ccccaccgaggccccccggcaccgcgcctgctgccgggttgcgctccgtgcacctcttgcggctatactgacttctgttgaaaccattcaaagctaaaga

SEQ ID NO: 821213 - DNA, 98 bp, Homo sapiens
ggccgaggaagaagccctcaggggcaattctgacccatgggtggtcaaggtgaagccccatgacaaggatgccaaaatgaaataccaggagtgcaaca

SEQ ID NO: 821214 - DNA, 100 bp, Homo sapiens
gcagccgccccgtctgagaagaaacatctgtatggattatttcactataatcctatgatgcttggacttgaatcacttccagatcccacagacacctggg

SEQ ID NO: 821215 - DNA, 100 bp, Homo sapiens
taatcattttgtcaagaaggtttggttcttccttcatcctagctataaaccaaatgaccttgtggaagttagttcactagagaaaaaatccttattgcga

SEQ ID NO: 821216 - DNA, 98 bp, Homo sapiens
gaaagattagaagatgacctgcagatcaaggaaaaagaactgacagaactaaggaatatatttgggcaaccactgagaaaacggaaccgaatagtcaa

SEQ ID NO: 821217 - DNA, 99 bp, Homo sapiens
taagggggaaatgaaggaacttctgcacaaggagctgcccagctttgtgggggccaggagtggtggctcacacctgtaatcccagctctgggaggccaa

SEQ ID NO: 821218 - DNA, 98 bp, Homo sapiens
ggcagattctggaaactgtacattgaagcagagcgcttctctgaagtagctttggaaagtagagaagaaaatccagtttgcttcttggagaacactgg

SEQ ID NO: 821219 - DNA, 100 bp, Homo sapiens
actcagggaagagactcacatgctttgcccactgatgatattgtcctaatggcacaaacgctggaaaagatattcctacagaaggttgcatcaatgccac

SEQ ID NO: 821220 - DNA, 145 bp, Homo sapiens
ttgattcattacggccttcatcttgatgccactaagctgctacttcaagctttggccatcaatagctctgaggctgcagtactttgcacggggcctgcaagtttatatcagacaacttcgcttagctctccagggtaaaacgggt

SEQ ID NO: 821221 - DNA, 100 bp, Homo sapiens
taaaccaagcactctagatgccctcaactatgctctccgctgtgtccacagcgttcaaggtggtattggaatgctatgtaagaaaggacttggtctacac

SEQ ID NO: 821222 - DNA, 100 bp, Homo sapiens
tgcaagttggtcgggggccccaccgccccaggcagcggccacaccatccagctctttcgacgtgtagcagcagctttgccgggaatggaaagcacacagg

SEQ ID NO: 821223 - DNA, 98 bp, Homo sapiens
gcccctgatccggttcttggtgcccctgggcatcaccaacatagccatcgacttcggggagcagccttccttgaatccagaagctggcaaacagcatc

SEQ ID NO: 821224 - DNA, 51 bp, Homo sapiens
cctggtgatgcctgccatggcccccaatgggttccgagtctgaggaagaca

SEQ ID NO: 821225 - DNA, 98 bp, Homo sapiens
gcgagcgccgcgaacttggtggccagcgccgcgcccggggccgtgcgctctcgggccactcggccgcagtggactcccgaaaaattgaccaggaaggg

SEQ ID NO: 821226 - DNA, 100 bp, Homo sapiens
ctgaatgggcagctgatggttggagttgatgtcagtggggccagcttgcccgctacaccaaggaaggcttcctgcacttgggtgccctggggaccaccac

SEQ ID NO: 821227 - DNA, 100 bp, Homo sapiens
ccccaacccatgggtgtcagggttatctgtggacattgcaagaatacttttctggttggactccatgaaagaattgcacaaaacaaatcgacagcagcat

SEQ ID NO: 821228 - DNA, 100 bp, Homo sapiens
acgcggcctacgtgaacaacctgaacgtcaccgaggagaagtaccaggaggcgttggccaagggtctctaattaacagaagatggcaaagcccagccaca

SEQ ID NO: 821229 - DNA, 98 bp, Homo sapiens
tcaaacatgtcacaagagtcggacaagaactgaaattaccattcacttttttaagtggacatattcatgaattgaggattcatgtaccatggacaaaa

SEQ ID NO: 821230 - DNA, 99 bp, Homo sapiens
ttttctccgcagaatttctgaaggtgttcattccatctctcttcctttctcatgttttggctttggggctagggtatctcttaaatattccaggaccaa

SEQ ID NO: 821231 - DNA, 98 bp, Homo sapiens
gggccaccatgggggcccagctcagcacgtgtccaccaaaggagacagggctgggagcgctgcccggggcccaggtcctccctaatgacagcatgcac

SEQ ID NO: 821232 - DNA, 99 bp, Homo sapiens
agatgacaaccatagcccagtgccaatgcatcttctgtactctgcttgaaattttgacaaacttggcaaatgaagccaacatatcaactcttcttcgag

SEQ ID NO: 821233 - DNA, 100 bp, Homo sapiens
gtcatctttgtggcaactggagaaggcaaggcagctgttctgaagattgctctggaagcagccaaagcactggatgacaagaactgctgggaaaagctgg

SEQ ID NO: 821234 - DNA, 98 bp, Homo sapiens
gtgagcctggcccgacagcccaaggctgatggccgtgtgttgctcgtgtgggcgctcgtccacaaacactccgtggctgagaggcagcggatccaggc

SEQ ID NO: 821235 - DNA, 100 bp, Homo sapiens
ggcaaaagcacaaggattctcgctgtgacagagacaacaccgagtatgagaagctttaatgactgatgaaacaatatccaatgtgccaatccttatcttg

SEQ ID NO: 821236 - DNA, 100 bp, Homo sapiens
agtgccattaacgagctggcgaagatgggcgacccggatctcctggaagtgttggcggaggaagattcacagtctgagaatgaggcttcaccagtaaaac

SEQ ID NO: 821237 - DNA, 51 bp, Homo sapiens
agctgtggtcctgggtaccatgggccaaagaggtgctgaaaaaatatttgg

SEQ ID NO: 821238 - DNA, 100 bp, Homo sapiens
gcagggcgaagtggttacaagtacagactctggagccagactgcctgggtttgaattgtgcggtttcagatgctgtgagagaagtaaggaaatattcctc

SEQ ID NO: 821239 - DNA, 100 bp, Homo sapiens
aatgccagagtcatcgccggccaaccacttggggcctttggctactttgaggtcacacatgacattaccaaatactccaaggcaaaggtatttgagcata

SEQ ID NO: 821240 - DNA, 100 bp, Homo sapiens
ccatgtgtctaaagagtgtaaagagtgcttcagcgaagagtcctgcgtctccatccctgaagtggagggctacgtggtcgtccttcagcctgacgccccc

SEQ ID NO: 821241 - DNA, 100 bp, Homo sapiens
ggaagatcattttattgacattgctgaagtggagacaggcgttcctgttttaaatcctgccttggtccctcacctggcacaaggacaagtgctactggtg

SEQ ID NO: 821242 - DNA, 98 bp, Homo sapiens
tttttctaactatttcaagatgatatttattcaccaaacaaggtgagttgctacagtggctggagagacgacatctgctccatgggctggtggccgac

SEQ ID NO: 821243 - DNA, 100 bp, Homo sapiens
aagccagcatggctcacaccacaaaggttaacggcagtgcctcaggtgtctgacttccagcaactgctggcctgtgccagggtgcaagctgagcactgga

SEQ ID NO: 821244 - DNA, 99 bp, Homo sapiens
agtcattttactgtcaagacatttcttcggcattctgcaacagttgctgatagtccaactccaccgccaccacctccaccagatgacattcccatgttt

SEQ ID NO: 821245 - DNA, 100 bp, Homo sapiens
cagctatatgggaacaacatacagtgacgcttcacaggtgcctgatttgagatggggtcccaggtctcggtggaatcgggagctctgcacgtggtgattg

SEQ ID NO: 821246 - DNA, 99 bp, Homo sapiens
gcgccctggccctctcgctgttgctggtctctggctccctcctcccagggccaggcgccgctcagaacgatacactctgtgcagttttagagagagaca

SEQ ID NO: 821247 - DNA, 100 bp, Homo sapiens
tgttttgcctgaatacatgatttaaacaagagatttccacagaagcatgcagcagattggaataaatatgatgaccgattgatgaaagcagcagaaaggg

SEQ ID NO: 821248 - DNA, 100 bp, Homo sapiens
gtcacatctaggagcatctacccatggacagacatgtcttcccatggaggtctcttttattcaaaaccttgtattttgtgtggaaagagtttaccgtgtg

SEQ ID NO: 821249 - DNA, 100 bp, Homo sapiens
ttacgaaaatttgtgcaacacatcaagattgagccccatatgggggttggcaggcagcagagaggcccctttcaaggtgttcgggtaaagaactcagtga

SEQ ID NO: 821250 - DNA, 100 bp, Homo sapiens
aaaaatgctaacaacagcttcacggttgaaatcaaggaagcaggtggtactactacaagtaataatccggaagaagcaactttgcagaatcttcttgctc

SEQ ID NO: 821251 - DNA, 100 bp, Homo sapiens
cagcagagacctccgcctggcacacagggaatgctggagcaatacttaaatagaggaggcctaccagaaactggccagcgagaccctggaggagctggac

SEQ ID NO: 821252 - DNA, 100 bp, Homo sapiens
gagcagtatggtttacagaatgtggatggagagagcgcatacatgttttaaccgtctggatctgcctccctacccatccttttccatgctttatgaaaaa

SEQ ID NO: 821253 - DNA, 98 bp, Homo sapiens
tgagttcgcagaggctgaccaagacttcagtgatgagaatcgcacctaccaggcttccagcccggatgagatgagctttgatccaaaccttctccaca

SEQ ID NO: 821254 - DNA, 100 bp, Homo sapiens
gaagtcttatgccctcccaatgttcagcctcacaggcctacaacaaatccaaacacttctaaatttgctcagaaatatggaggtgctgagaagtgttcca

SEQ ID NO: 821255 - DNA, 100 bp, Homo sapiens
ttacttactgcccttggcaaaatagaacctgtctttattcccttggtgttagcctttcgctactgggctaaggtttttcgttggaatatacgttgcacat

SEQ ID NO: 821256 - DNA, 100 bp, Homo sapiens
atccgtcatgaagttaccaggctaacatcagagaacatggaaaatttccagaccaaccaattcacatcgtgtatgttccttctcacctccatcatatgct

SEQ ID NO: 821257 - DNA, 100 bp, Homo sapiens
ccgcttctacctggtgtttgagaagatgcggggagaaaatggactacttctgtgcctccactgtcatcctacactcaatctacctgtgctgcgtcaggtg

SEQ ID NO: 821258 - DNA, 98 bp, Homo sapiens
taatatgtcatctgaatgaattgctagtactggttccaggcgaaccctgactatcaaatgagtggagatgacacccagcatatccagcaattctatga

SEQ ID NO: 821259 - DNA, 98 bp, Homo sapiens
caaaacttcggacatagaggccaaccaacctttggagttgcagaaagagaacagtccccggagaggtggcagtttcctctgtgatcaaaaagacggca

SEQ ID NO: 821260 - DNA, 100 bp, Homo sapiens
ttcgccgccgcgcacaaccgcacgtgcagattggaggtggacacaaaggaagaggcagccagacagctacttcagcgtcctcaacgcattcatcgacagg

SEQ ID NO: 821261 - DNA, 99 bp, Homo sapiens
cgggatttacgtggagatcaagcgcagcgatgaaccttctgataacttaagagagattctccaaaatgtggccagattgcagggagtatcaaatatgag

SEQ ID NO: 821262 - DNA, 100 bp, Homo sapiens
ctgaaacggggggagagaacaatgataaagaagaagaagagaagaaagatgaaacttcgagctcctctggtaccacgaaaggcagtggtagaaaagccag

SEQ ID NO: 821263 - DNA, 98 bp, Homo sapiens
cggggcaacagaagaagatggggttccttccaaagtgcagcgctgtgcagtggttaagaatagacccaccagcatttcgtgggatggtcttgattcag

SEQ ID NO: 821264 - DNA, 100 bp, Homo sapiens
ttcttccccgcgccctgcggggctgtccaacgccttccagctccggctcccgctgcctgcaccatgtccgccagagagcttttcatcctactataaagga

SEQ ID NO: 821265 - DNA, 117 bp, Homo sapiens
gggggctgcgagcacaggcccggggctgatcgtaatcggagtgaagtcaccctgctgagaaatgaagtggcacagctgaaacagcttcttctggctcataaagattgccctgtaacc

SEQ ID NO: 821266 - DNA, 98 bp, Homo sapiens
aacctcctctggcccccggaaaacctaaccatgaagacttgaacttaatacagcaagaaagaccatcaagtttaccactaaaagatggcggcaaggca

SEQ ID NO: 821267 - DNA, 98 bp, Homo sapiens
atcctgagtcttctgtgaggtccatgggggcaattaagttggaatatgcaaggttggttaagttggcccaagaagacaccccaccagaaaccgattat

SEQ ID NO: 821268 - DNA, 100 bp, Homo sapiens
tgcacaggagagctgctaaaaattactgcggtgaacagggttggattagtagaatctaaaatccgtgtacttgttggaaacttggaacggaatgaattta

SEQ ID NO: 821269 - DNA, 100 bp, Homo sapiens
gttcccagaagtcagaatccaagatgatacacagtgtaaggaaaggccaagatgacaatggccccggacgtcagactagagtatctggaggaagttgcct

SEQ ID NO: 821270 - DNA, 100 bp, Homo sapiens
ctcgatccgcccacagacctcaaattcaaaggctgtggaaaatctctgttctcacaaagtctccccaatgctctacaagcaactgcgtcaggcctgtgaa

SEQ ID NO: 821271 - DNA, 99 bp, Homo sapiens
ggggatgtggacgaaggggccgacctcctaggtattgttgcagcatctggcagtgagactgaggatgaggacagcatggacattcccttggacctttct

SEQ ID NO: 821272 - DNA, 100 bp, Homo sapiens
aatggaggggagtgcttcatggtgaaagacctttcaaacccctcgagatacttgtgcaatgttgtcatgactggatcttacaataatttcttcagaatgt

SEQ ID NO: 821273 - DNA, 99 bp, Homo sapiens
ctgcctcagcctcccgggtagctgggactacagtgctgaccatgctgccttgaacagcattgtgtcgttacaggcttcagtgtcatttgaggacgtgac

SEQ ID NO: 821274 - DNA, 98 bp, Homo sapiens
tcccatgcaaaccaatgagggagaagtatcggaagaaagcagttccaaggtcaaaatgcagatcttcgtgaaaacccttaccggcaagaccatcaccc

SEQ ID NO: 821275 - DNA, 100 bp, Homo sapiens
agtggcagaagattttaattagagacgagttgtactgctgtcacaggaaatggacgctggattacaagcatggcagctcaggcagcagaagttgcaggaa

SEQ ID NO: 821276 - DNA, 124 bp, Homo sapiens
tgaagccgagctcatcagtgatgaggcccaggccgacctggcgctgcggaggttctgtttacagaggaagatgtgaaattctacctcgcagaactggcccttgctttggatcatctgcaccaat

SEQ ID NO: 821277 - DNA, 113 bp, Homo sapiens
tggaaggtgaagattgtatctggaagatccacgtgggagaagagaaacggatcttcttagatatccagttatactttcctccaaatacaatcctgttcaccatggaagacatt

SEQ ID NO: 821278 - DNA, 98 bp, Homo sapiens
gcagatctggatcatcaaagacagtaacaaatgtggcaattattttggatctatcacctgtcatcataactggcttctgcttgtcatccacacaacac

SEQ ID NO: 821279 - DNA, 100 bp, Homo sapiens
aaagctgcagcccccgtagagaagtaacagtgtatcatgtatgccactgattccaggggacactcccctgctttcctccaacctcagaatggaaatagtc

SEQ ID NO: 821280 - DNA, 100 bp, Homo sapiens
gaagcacatcgaccggcgacagcagccaggagtcatgagcgacagcggcgagcagaactacggcgagcggatcctgtttgaccaaactcagagatcaatt

SEQ ID NO: 821281 - DNA, 99 bp, Homo sapiens
aaggccaacaagccgggggatgttgttagagccaaaaacgggaagaccatccagggccatgctatgatagtggaagcttatccaaaataatagatccag

SEQ ID NO: 821282 - DNA, 98 bp, Homo sapiens
gtgccaggaggcgattaatgctacttgcaaaggcgtgtcctactgcacagggtaaagcccacagcttgaagccaagcataaaggagaagctggcaggc

SEQ ID NO: 821283 - DNA, 98 bp, Homo sapiens
cctccatcaggaccccagatgtctgacagccctgtgtgacaccaagataagtaacgtgtgtgtgtgcaggccacagcagcatgcccttggtgtagtca

SEQ ID NO: 821284 - DNA, 98 bp, Homo sapiens
tgttgttgccggagctgagaccgggcggccacagtccgcagggatgaacctcgagttgctggaatctacctgttactcgtattttggacaatcttatg

SEQ ID NO: 821285 - DNA, 98 bp, Homo sapiens
tatataattggcagtgatattgagctaatgatcaactggtgagactgcagtcagtgcttttgagattgacaagatgtacacccccttgttcttcgcca

SEQ ID NO: 821286 - DNA, 100 bp, Homo sapiens
tccggagagctcaagctcatcgacttcggttcgggtgcgctgctcaaggacacggtctacaccgacttcgacggaacagatggagtcggataactgttca

SEQ ID NO: 821287 - DNA, 100 bp, Homo sapiens
aatgcagtttacattaaccttcgacaggatttcttacaatctccagctacaacctgcttagcttgctactcagtacgtgaattaggatgcaggcaacaca

SEQ ID NO: 821288 - DNA, 99 bp, Homo sapiens
tttcaactctagaggaaaaaattgaaagagaaaaggaattagcagaagacattatgtcagtgactcgccataatcacctcaaggacttcatgctggtgg

SEQ ID NO: 821289 - DNA, 98 bp, Homo sapiens
agacgagatccagttcctgcgaactgtgaagatggagctggaaaaacaagcttaataagaaaaattcagggaatagaggagtataagaaaggaagagg

SEQ ID NO: 821290 - DNA, 100 bp, Homo sapiens
gaaacttctattgcaacagttcaggttttaaaatcaaagatgggaaaatcggagaaaattgcccttccccatggccagcttgttcatggtatacacttgt

SEQ ID NO: 821291 - DNA, 100 bp, Homo sapiens
ggtgcggcctcaccatacaggaacagggcagacgttagcgtgagtgatcactctcaatcccgggttttgggatttgagattgacgcggtgaactctgtcc

SEQ ID NO: 821292 - DNA, 100 bp, Homo sapiens
gtcgtcgctacctcctcggacagctcaggtacctgacaatgatgagcagtttgtaccagactatcaggctgaaagttgtaagtatagtatgactcatctc

SEQ ID NO: 821293 - DNA, 100 bp, Homo sapiens
tccaaagcacacatgaactcagtgctcatggggatgaagaaccagctcgtgcacgatctgattttctggagagatgtgaagaagactgggtttgtctttg

SEQ ID NO: 821294 - DNA, 99 bp, Homo sapiens
tgaaaacaactactctctgagcagctgttcgaatcatctgatatttatactgaatgagttactctcctggacttctagggatctcagccgtggctgagg

SEQ ID NO: 821295 - DNA, 100 bp, Homo sapiens
cacctgtgatagatgtgaggcctgaagtctcccacatacccacggcagatgcaacgcacagcggtgaccaatggtcatattgaacattccagatacctat

SEQ ID NO: 821296 - DNA, 100 bp, Homo sapiens
ctgcccagaaagcagttaacagtgccaccggtgttccaactgtttaaattgaagtctgagcgggaattggacaagataaaggggctgaagctagaagagc

SEQ ID NO: 821297 - DNA, 100 bp, Homo sapiens
ttcgatccaaaccacctatctgcacactccccaagaaacgtaaatattttcaccacgatcgattagactgggatgaacacagttctgccggcagatatgt

SEQ ID NO: 821298 - DNA, 100 bp, Homo sapiens
tgcagctgcttttggacttcatgctagatgtccttctgatgccttatggtaggagagaagtttgctgaggaatgccttcaagcacaaagtgatgaatgac

SEQ ID NO: 821299 - DNA, 100 bp, Homo sapiens
cgtgtggcacgacacaaaaatcaggtctacaaggaagtcttcacgaggagcagtgagaactcagcgtcgtcgacgttctaagtctcctgtccttcatcct

SEQ ID NO: 821300 - DNA, 98 bp, Homo sapiens
ccgaaccaaccgagtcggatcctgaccctaaaacctatgcacgatctgattttctggagagatgtgaagaagactgggtttgtctttggcaccacgct

SEQ ID NO: 821301 - DNA, 100 bp, Homo sapiens
agattcatgcccgaaaccaaaatgaaataatttttgggctgaatgatggatactatggtgctccatttgaacataagggcccactggaaaatgacttggt

SEQ ID NO: 821302 - DNA, 100 bp, Homo sapiens
atcaaacagttacagttattgaaagagaggatgggttagatggagaaacggaggaagaaagggaagattttgatactagcattgagagcaaagacacaga

SEQ ID NO: 821303 - DNA, 98 bp, Homo sapiens
gggacttgggcgcttacctgcgacagcgggtagcacaggcctttcgggagggagagaatacccaggcctaatgggattgtttgaaaaacgtcgcttca

SEQ ID NO: 821304 - DNA, 98 bp, Homo sapiens
ggacttgtgggggagaatgaggatgaaaacgtggagcttccattgtctaggcctcctgacaaggtgatccgggcgggccccgcaggaattttatcccc

SEQ ID NO: 821305 - DNA, 98 bp, Homo sapiens
actgcatttttgcctttgagactcccgaaatatttaggcctgaaggaattctcagtcaaagagcattcctctgaatattgatttgctgaatagcccag

SEQ ID NO: 821306 - DNA, 100 bp, Homo sapiens
attccgctcatggagcgcatcgcctgggaaatcgctgagagagtctgccgagtggtcaacctgcggactttgttcaagtctctgtcttcaacgctggagt

SEQ ID NO: 821307 - DNA, 98 bp, Homo sapiens
tgaccccaccattgaagactcctacctgaaacatacggagattgacaatcaatgggccatcttggacgccgctcctgacatcactggccataaacgga

SEQ ID NO: 821308 - DNA, 99 bp, Homo sapiens
gatccttcccagtttgagctgctgaaggttttaggacaaggatcctatggaaaggagccatgtgttcacatgtcatgtggaccagtatttaactgtgga

SEQ ID NO: 821309 - DNA, 51 bp, Homo sapiens
accgggacctcctggaagccaaaaatgtcctcactaggctcatcgacttct

SEQ ID NO: 821310 - DNA, 99 bp, Homo sapiens
atgatttaaacaagagatttccacagaaggagccaacttctggccttgggatcattctggacagtgtgtgtggaatgtttccccaccttctctccccac

SEQ ID NO: 821311 - DNA, 122 bp, Homo sapiens
cgaagatgaacagggttcctggggcatcgacgatctccatatttcattgcaaggctgaccggttccctgatgtgttacctgcttctgctactgatccaaactgcagaacttctcattcatcc

SEQ ID NO: 821312 - DNA, 99 bp, Homo sapiens
gcagatctcccatccgtcgtaaaagatccaggtcttctgaacgaggcagatcacccaaacgtctgacagatttggacatgctggtgtctacacagcaga

SEQ ID NO: 821313 - DNA, 100 bp, Homo sapiens
ccccccagatctcctgtgtgcccagaagacctgaatttttcacagacaacctatgggacacactcccttgctcatggcaggaagcattggatggactgaa

SEQ ID NO: 821314 - DNA, 100 bp, Homo sapiens
ttcctggacccattccgactcagaggctcacaggacacctgcatgcccaaggcactccaccgtatgtgatcaacctggatccagcagtacatgaagttcc

SEQ ID NO: 821315 - DNA, 100 bp, Homo sapiens
gcggctggagcaccagggcatcaagatcgagttcatcgggcagatcgttcaaatctgaacatcaatgatgtactagggaactactcattgactcttgttg

SEQ ID NO: 821316 - DNA, 99 bp, Homo sapiens
ccttactgtggacttggcttcgcgctctggtgtctctgcagagacctcatccttcaacagctgaatcaaaggctccaacaccaaagtttgacttattag

SEQ ID NO: 821317 - DNA, 100 bp, Homo sapiens
tcttcagctcgccatggatcccaactgctcctgcgccgccggcaatggtggcttgctatccgggaaatggaacaggttatgttcgccacgtggacaaccc

SEQ ID NO: 821318 - DNA, 100 bp, Homo sapiens
acttgaagtcactgatgaccttgagaaagtttgcaatgaagtagtcgacacctgtttgtataaggtttctgtggatcccttctgaagttctatctgaaaa

SEQ ID NO: 821319 - DNA, 98 bp, Homo sapiens
cataagagctgaaacttcagagcaagttttcattgggcaaaatgggcatcttcacaactatttcacagtgactcttggaattcctgcttggtgttctt

SEQ ID NO: 821320 - DNA, 100 bp, Homo sapiens
acagcagcagtaaaggaactattcggctatgtgacatgagggcatctgccctctgtgatagacattctaaatgaggagagacttcagcatgcaaaccttc

SEQ ID NO: 821321 - DNA, 100 bp, Homo sapiens
atccacacccaagtccgctcatcaccctggagactcagcccatctgccaagcagcctatcagaatgactttggacaagtgtggcggtgggtgaaagaaga

SEQ ID NO: 821322 - DNA, 98 bp, Homo sapiens
gagaagatcatcgagcatttcaaacgtgcgaccaagaccagtgcattcagagcaccaaattcgttttgcaggctgcagccacgcccctgctgcagagc

SEQ ID NO: 821323 - DNA, 100 bp, Homo sapiens
gtcggcccaggtcggcgggaaccccctgaaccggaatgagttctggttctccgatgggtccttatcagataagtccaagtgcgcagatcctggcctgatg

SEQ ID NO: 821324 - DNA, 99 bp, Homo sapiens
gtgggggtgtgcaaacccgagagaactggggaagtcccacctggccatcgtgcagaaggtaaacaacgagggtgagggtgaccccttctacgaggtcct

SEQ ID NO: 821325 - DNA, 100 bp, Homo sapiens
ctgtgcaccgaggtccgtgtggccaacgagctcaacgccaggcgccgctcctttacagggtgctgttggcccaaaggttgccctgaagccccccatccag

SEQ ID NO: 821326 - DNA, 99 bp, Homo sapiens
tttattagccagttctacaaggaatcattgatgaaagttatgccttatgttgatatactttttggaaatgagacaggttaatcatctcattttagtgga

SEQ ID NO: 821327 - DNA, 113 bp, Homo sapiens
gcggcggtacgcaaggctggagccgcagcgggagcccccggtgctccatacttgcttgcagtgcctacgtggctctggctttgggtgataacctcatggctttgaatcatgca

SEQ ID NO: 821328 - DNA, 100 bp, Homo sapiens
gaaattaccaactgctttcctttccctcagcacacagaggatgatgctgactttgatgaaggtttaccgacaagactgtgaaactttcgggatggtggtg

SEQ ID NO: 821329 - DNA, 51 bp, Homo sapiens
cagcccgagcccatcaaggtgtacggacagaccagagtgaactccgagcag

SEQ ID NO: 821330 - DNA, 99 bp, Homo sapiens
ctcggcgcccggcggggactgcagacaagttggatggcttgaggactggtactaaaaggaaacgtgactgggaggccattgccagcagaatggaggatt

SEQ ID NO: 821331 - DNA, 98 bp, Homo sapiens
ctcgggggtcggcgtccaggctcggagcgcggcacggagacggcggcagcgctggactaggtggcagattgaagccttcagctgactgtggccctttt

SEQ ID NO: 821332 - DNA, 100 bp, Homo sapiens
gggagtcatcatgagcgatgttaccattgtgaaagaaggttgggttcagaagagggcagatataatttctacagtagaatttaatcattctggagaatta

SEQ ID NO: 821333 - DNA, 99 bp, Homo sapiens
aaaaaccacaggctaatgttccttcagctctgccatcactccctgccgggtcaggaaacagtttgctagatgatgctaaggcccgcttaagaaagtatg

SEQ ID NO: 821334 - DNA, 100 bp, Homo sapiens
gaaggaaccaattccggacacataacaagcagcagtgaggacaccaaagctggagcagagtgaagccaagtgtgaggaggccttgaagacgcagaaggtg

SEQ ID NO: 821335 - DNA, 100 bp, Homo sapiens
tacagacctatgggactggaaggttctcaaggagaagattgcaaatgtgcagactagggaaatgaagtacaatgttgaccagaattgatgtaggtatctt

SEQ ID NO: 821336 - DNA, 99 bp, Homo sapiens
agaggacgccttcaacaccaccttcatctccaccatcggtgaaaggtgtagcagtcactcggcctacacccacagcatcgaccttgtgaacccagcgac

SEQ ID NO: 821337 - DNA, 100 bp, Homo sapiens
cccaggaactcacagagtggattccggccgaatacatcaagcaatggtaacatctttaaatgaagataatgaaagtgtaactgttgaatggatagaaaat

SEQ ID NO: 821338 - DNA, 100 bp, Homo sapiens
gtctcagagtacatttccacaacattcctggggttccccactgaaggacttggtccagctgtctggcagggaggagagacagaagctctggcccgcctgg

SEQ ID NO: 821339 - DNA, 100 bp, Homo sapiens
cgcgtcccgctcgctgggagagaggtttattcttcagtccaaggaagcaattcacagtcagctgttagagaagcagaaaatagcagaagaaaaaattaaa

SEQ ID NO: 821340 - DNA, 98 bp, Homo sapiens
ggagtctttggctggctatgcagacatctttctggtcagcgccaacggcaatgtcctgcgcagcgagatcgtgggctccatcaagatgcgagtcttcc

SEQ ID NO: 821341 - DNA, 100 bp, Homo sapiens
ccccgtccgattatgtctcggatcgaatccctcacgcgggcgcggatcgaccggagcagagagctggcgagcaagcggggttcggcttctcctatggcag

SEQ ID NO: 821342 - DNA, 100 bp, Homo sapiens
gattggtgccgcaatacaggaggagttagggtacaactgccagactggaggagtcatagctgagatcctgcgaggggcgcagatctctctgctttggtac

SEQ ID NO: 821343 - DNA, 99 bp, Homo sapiens
atgcttgttggaattggtgacaaaatcagaggcatactttataggccccagaggagatttgggcagcactgggaatcctggagaaccaggactgcgtgg

SEQ ID NO: 821344 - DNA, 99 bp, Homo sapiens
cgagtgcagtttcgatggaaaatgaaggtgaaaaaccatttcgctgtgatgaatgtggtatgagattcatacaaaaatatcatatggaaaggcataaga

SEQ ID NO: 821345 - DNA, 100 bp, Homo sapiens
gatcactgccctggcacccagcacaatgaagatcaagagctgtaggtaaaacttgcctactgatcagttacacaaccaatgcatttcctggagaatatat

SEQ ID NO: 821346 - DNA, 98 bp, Homo sapiens
cctgatgcctgcaaagagtttcaagatgcaggtgaacagggtttggattcaggatttgttcctagtgtccaagattttgataagaaacttacagaagc

SEQ ID NO: 821347 - DNA, 100 bp, Homo sapiens
tcaagcctgggctcaagaatctgaaccttatcttcattgtgctggagacaggctggagtgcagtggcgcgatctcggctcactgcaagctccgcctcccg

SEQ ID NO: 821348 - DNA, 100 bp, Homo sapiens
aatggagctgcagggaattgtgccggaggttctgaagaagatcgtaacaacttatgacatgggggcttgtacatgacagctggaatagcctccagttgag

SEQ ID NO: 821349 - DNA, 98 bp, Homo sapiens
tccatcagccgccggaggacacccatgaagctaatgaagacggtgatgactgtcttaggaaacatgccctgaactgtcacagaatgaaaccagcgctc

SEQ ID NO: 821350 - DNA, 100 bp, Homo sapiens
ctggagatgctgcctacgtgtgatttggccgatcagcataacattaaattccactatgcgtttgcactgaatagggatcgatttgcttagtggtataata

SEQ ID NO: 821351 - DNA, 98 bp, Homo sapiens
tgttaccggaacggcggcgacaagggtgttcccgaactagagtgggccaaccaactcaaacttgaagacatgaaatccccaaggagaaccactttgtg

SEQ ID NO: 821352 - DNA, 100 bp, Homo sapiens
ccggagtcagaaccctccgcagagtaaaggtccttttggaataaatcatgggattgagcttcattcagatgtggtggaatatgccaaggaaaaactggag

SEQ ID NO: 821353 - DNA, 98 bp, Homo sapiens
agacatcaacttttggatccaagctggagtgcctggtatcatattttatcaggaattccttggtgctccttttctcactgtatttatatatctttttg

SEQ ID NO: 821354 - DNA, 100 bp, Homo sapiens
tgcgcagacagagctattccagcaccagcagagcatccgtacccttccgaagagcagaagaaacagttagcgcaagacacaggacttacaattctccaag

SEQ ID NO: 821355 - DNA, 98 bp, Homo sapiens
taagcaacatatcttgctacgaaacaatggcagatgaatcattgcccagaagagagcctgtgacactgccacctgtgtgactcatcggctggcaggct

SEQ ID NO: 821356 - DNA, 98 bp, Homo sapiens
agtatgctacgggacccttctcagattccagatggagttctagcaaatcaggtctatcagcatccgtacccttccgaagagcagaagaaacagttagc

SEQ ID NO: 821357 - DNA, 100 bp, Homo sapiens
tggcatccagattatccactgcatgcttagatgagtacgaagatgatgaagcagggcagaaagagcggaaacgagaagatgcaattacacaacagaacac

SEQ ID NO: 821358 - DNA, 100 bp, Homo sapiens
ccagataccagcacatgcagcccatctgctgacattgggactactactgagaatttcttcaggttgaattacctagaagtttgtcactgacttgtgttcc

SEQ ID NO: 821359 - DNA, 100 bp, Homo sapiens
tgggaagttgtagaagacattactcaagaggagagagttcttctcttacagtttgttacgggcaggttttaaaatcaaagatgggaaaatcggagaaaat

SEQ ID NO: 821360 - DNA, 99 bp, Homo sapiens
agggtcggactcccggggccatggccggaatgcagtaccctcagcagcaggcttatgtacagaagtacgtcgtgaagaattatttctactattacctat

SEQ ID NO: 821361 - DNA, 100 bp, Homo sapiens
caacctttaatgttgagtctaccaaaaagaatgaaccgcttgcttcttatttagcccaggccattcagcccacctgtaacttccaacaccagcccacctc

SEQ ID NO: 821362 - DNA, 98 bp, Homo sapiens
aaacagctcgtacaccttctagccgtgatcccaaatttgaagtcatcgaaaaaccccaggcctgaagaaataaagtaaaattaatctggtaatttgtc

SEQ ID NO: 821363 - DNA, 100 bp, Homo sapiens
ggatgttgacgaagatcttatctgccctatttgcagtggagtcttggaggagccagtacagattgtccgtgtggagcccttggtgaccatgggccaggtg

SEQ ID NO: 821364 - DNA, 100 bp, Homo sapiens
ctgacaacatgctcttggataaacatggacatctaaaattagcagattttggcacgtgtatgaagatggatgaacctacaacacagcagtcccctcagga

SEQ ID NO: 821365 - DNA, 100 bp, Homo sapiens
gcctcccgagtagctgggcttacagaccttcactgcctggtgtaactcccacctaaggaaagccggcacccagattgagaacatcgaggaagacttcagg

SEQ ID NO: 821366 - DNA, 98 bp, Homo sapiens
atcatccggcaccgagagagcacccccaaggaatcagagatcattgatttcttcctgggggcctctctcaaggatgaggttttgaagattatgccagt

SEQ ID NO: 821367 - DNA, 98 bp, Homo sapiens
gccctcttcactcgctgccaagggctacagaagtgtgcatcccaaccttccttctgacaagtcccaggatgtaacagtccctcccaagcctgtctcgc

SEQ ID NO: 821368 - DNA, 100 bp, Homo sapiens
ttcgtctcggaaaccccgcctcttacagtcacgagggcttgccgtgatggaggtggccccctccttctccagtgtcctgaaggactgcgctgttattgag

SEQ ID NO: 821369 - DNA, 100 bp, Homo sapiens
gattttaaagtgaatgcccaattcttagaggttctgagatgcagtaaaatcgctggtgtgaaagtagcagaaattacagagctaatattgaaagctttgg

SEQ ID NO: 821370 - DNA, 98 bp, Homo sapiens
gaaaccctaacgtatctcaatcaaggtgaacctgccgctgctcaccctgagccagcccctgctgttgggcatcgcccgaaatgagaccagtgctggcc

SEQ ID NO: 821371 - DNA, 142 bp, Homo sapiens
tcaggttgctgcatggacacatggacgagtgtctcactgtcccttcaggagaacatggtgaagagcagcggaggactacaaagctgatgaagacccagcattattccagtcagtcaagaccaagagaggccctttgggaccc

SEQ ID NO: 821372 - DNA, 100 bp, Homo sapiens
ctcacctgaaacagttgacagtgtgattatgggcaatgtcctgcaggaggcaagtgaggcctatctggttggcctttttgaagacaccaacctgtgtgct

SEQ ID NO: 821373 - DNA, 100 bp, Homo sapiens
aattagcaagcaaatatttacatgttggttatattgtgccaccagctccagaaaagagtatagtaggtgatgtacagttcattgattatgaatattctgg

SEQ ID NO: 821374 - DNA, 98 bp, Homo sapiens
gtgtgggcaaggcctggggcccacactgtgagaaatgtccccttccaggcacagggaagaatcccactgatgcataccttgatgccatgatgaatgag

SEQ ID NO: 821375 - DNA, 98 bp, Homo sapiens
gcgcccccgggagcgggcgcccagagttcacagccatgaatgaaccacagtgcttctacaacgagtccattgccttcttttataaccgaagtggaaag

SEQ ID NO: 821376 - DNA, 113 bp, Homo sapiens
tgacttcttctatgtcttccccctctatgcagccaaagaagatgcagatggacggggaattctggcctgggattcagtattgctggggggacagataatccccacattggaga

SEQ ID NO: 821377 - DNA, 121 bp, Homo sapiens
aaacttgtcggctttcaagacatggagtgtgtgccttgtggagaccctcctcctccttacgaaccgcactttaatggagaatcatcctcatttgcaccaactgataatgcgtctgtcacgg

SEQ ID NO: 821378 - DNA, 99 bp, Homo sapiens
gcgcctctcccaggacccgcctggctgcgagatataatcagcatgattcttcagaggctcttcaggttctcctctgtcattcggtcagccgtctcagtc

SEQ ID NO: 821379 - DNA, 100 bp, Homo sapiens
cgctgcgtctacatcctggacccctggttcgccggctcctccaatgtgggcatcaacaggtggcggcgcagtgagcctgcaggccgacctcactcgtggc

SEQ ID NO: 821380 - DNA, 100 bp, Homo sapiens
ggcttatctctaggatccataagcaacctgttggagagcaaggccgatgggatcgaggtttcctacaatgcctgcggcgtcctctcccacatcatgtttg

SEQ ID NO: 821381 - DNA, 99 bp, Homo sapiens
agcactggccggcggttctcggagcacaaactctgcgcggacgacgaatgcagcaccatcataatgtgaagaagccgaagcagcctgtgaagaggcgct

SEQ ID NO: 821382 - DNA, 100 bp, Homo sapiens
ggaacacagcagagggtgtgtaataaaatacagtactatactggcaattgctggagaagattttgcaattgttgcttctgatactcgattgagtgaaggg

SEQ ID NO: 821383 - DNA, 103 bp, Homo sapiens
ttagaaatggcagccggcttcaagcagatgacttcctccaggactatactttattgatcaacatccttcataggtacatggaaaacttggggatttcacaata

SEQ ID NO: 821384 - DNA, 100 bp, Homo sapiens
ttggtttcgggatctcggtgctgcagacggcgagacctcctgcacagtcaggatggctaaaggtgaccccaagaaaccaaagggcaagatgtccgcttat

SEQ ID NO: 821385 - DNA, 100 bp, Homo sapiens
aaaaaatcccaaggtctgcaaagtaagactttgaccccgacgcaggcttcagtgattgccgcggatcagaagcctgagcactttggctcgagacaattaa

SEQ ID NO: 821386 - DNA, 98 bp, Homo sapiens
cggacctcggacgaggtgggggtggtgctttctggagacacgccctgagagtcatggagttacgactggctgcctggggaggtgggctgctcatgtcc

SEQ ID NO: 821387 - DNA, 100 bp, Homo sapiens
gctgctgctgaccctggccttcaaccccgagccgctggtgctacagggaacaacctatcttcagcactcgagctcatgtcttccaaattgacccaaacac

SEQ ID NO: 821388 - DNA, 100 bp, Homo sapiens
ggccgaggattccgacttccccatccacaacctgccctacggcgtcttctcgaccagaggcgacaatactctggagcagtgcaatgtgtgttccaagccc

SEQ ID NO: 821389 - DNA, 100 bp, Homo sapiens
gggcgggcagggccgggctccgcaggagtatgctgtgaactgccatgtgatcacctgggagaggattatcagccactttgatatttttgcatttggacat

SEQ ID NO: 821390 - DNA, 98 bp, Homo sapiens
agaagggagtttgctaaatttgaaaaggagaaaatgaatgccaaatgggacacgaatgattacggacctgaagccaaagaacaagatgcgctagtgga

SEQ ID NO: 821391 - DNA, 100 bp, Homo sapiens
tggggaggccattggctctatggaaaacactggaaacatggtagaatggtgcttacctcaagatattgaccttgaaggtgttgagttcaagtctatggcc

SEQ ID NO: 821392 - DNA, 100 bp, Homo sapiens
gagagaaaagcccccaaaagcagctattcagtggaagagaaagccaatacccacctcctcttgggcatgtgcttagacgcctgtgctcgctaccttctgt

SEQ ID NO: 821393 - DNA, 99 bp, Homo sapiens
aacatttgcagagaattggaggaagccgattacacctcaacaagaaggcaactgacaaacagccttatagcaagctcccaggtgtctctcttctgaaac

SEQ ID NO: 821394 - DNA, 100 bp, Homo sapiens
actggctattggaaggaggagattctgaagataaggaggcagtagaagatggtgaaagaaacaacttactacgatgttttgggggtcaaacccaatgcta

SEQ ID NO: 821395 - DNA, 100 bp, Homo sapiens
gcctccggagctcgcccaagccgcgtccccagagagcgccctgagagaacagggtggccgcttggtccagcagctgctcagccaggaactgagatcttta

SEQ ID NO: 821396 - DNA, 51 bp, Homo sapiens
cgcgtacccccgtagcggaaaaacgctgaccccgcactacatctacccacc

SEQ ID NO: 821397 - DNA, 136 bp, Homo sapiens
gcggcctgggctgctgactgcgcacttggaatagtagcaggcggcggcggcggaacgccaggcagatacaaatacttggaacagttggcagctgaggagcacgagaaggagctgagaagccggagtgtgagccggg

SEQ ID NO: 821398 - DNA, 100 bp, Homo sapiens
caatggaggaaacagctatatgggaacaacatacagtgacgcttcacaggggcacacgtgtttcacgttgacaggtttgcttgggacgctagtaaccatg

SEQ ID NO: 821399 - DNA, 100 bp, Homo sapiens
ctcagaaagctgctgctgagtgctactagtggagagaaaggggtgcgcatcaaggagatatgggacacagcaggacaggaacggttccagtctctcggtg

SEQ ID NO: 821400 - DNA, 98 bp, Homo sapiens
aaaattgatctggaacagttccgccaggtggataagattgtggaccagctgcagcagttaatgcaggtgtatgacttggctgcccttcgggattattg

SEQ ID NO: 821401 - DNA, 99 bp, Homo sapiens
agggtttccgcaatgcccctgttggctattcacgaaaagcagcagctctagagttcttaaaccgctttgaagaagccaagcgaacctatgaggagggct

SEQ ID NO: 821402 - DNA, 98 bp, Homo sapiens
caaggaagaaattgatattttgatgaacaatattgaacgctatcttaagtactattactcagtgagaatctttcctggacaagaacctgctaatgtct

SEQ ID NO: 821403 - DNA, 100 bp, Homo sapiens
gtctctgctcttcagtacaatcctgctgcagttcatggagctcgtttcaaagggcaagatctaaaactggcatggaataaaccagtaactaatatttcag

SEQ ID NO: 821404 - DNA, 98 bp, Homo sapiens
tcgaaactaggagaaataagaatggctgtagaggaacttcagtctataataaagagatgtgctgagggtaaaaagctgggattggtaggctgggtcca

SEQ ID NO: 821405 - DNA, 99 bp, Homo sapiens
taggattgaaacatccaatgtcatctgggtgggagaagatgtcaaccggacactagaaggtggaaggaaacctcttcattatgcagcagattgtgggca

SEQ ID NO: 821406 - DNA, 98 bp, Homo sapiens
gtttttctccctgatgaacatggtaatttgacgactgctcttcctcctgttgtctcgaacccaatttatgacaaccacttcccaagtaagaagcggaa

SEQ ID NO: 821407 - DNA, 99 bp, Homo sapiens
cccagaagaagttcgtcttcccctccaacatggtcttgccacttgcctagtgaggcttttccgaacctggaaggagacgtctagaaatcccaactttgc

SEQ ID NO: 821408 - DNA, 100 bp, Homo sapiens
tggaatttttaattcgtcagaacacattcagactgacagaagcacattttttgaactcattgttatgaaacaaatgaagatgtttactgtgaagtttcag

SEQ ID NO: 821409 - DNA, 98 bp, Homo sapiens
tgccttcgccactgctcagcgtctgcacatccctacaatggctaaaacagcaatggagctaatgtcaaaccccgaaattccacaccacctagtttggc

SEQ ID NO: 821410 - DNA, 100 bp, Homo sapiens
ggacagacacttcgggaacccgaggcggaccgggcgacgagttgacggactggacaaagcttctatagcaaactcagatggccccacagcaggttcccaa

SEQ ID NO: 821411 - DNA, 99 bp, Homo sapiens
taacgtgaacgcggaccaggagcactattcctgatcagagaactccagttgcttcaacacacagtatcagtagtgcagccaccccagatcgaatccgct

SEQ ID NO: 821412 - DNA, 100 bp, Homo sapiens
cttaaagacctctttggacccgaaattgtaagcttccagaggagattggaaaacttgaagataaagtggaatgtgctaataatgccctgaaagcagattg

SEQ ID NO: 821413 - DNA, 100 bp, Homo sapiens
aaaatgtccttaaagcaattgagcaggctgatctactgcaggaggtgttttcacagtcctgtgtttggtatggagagtgtggaattgcatatggggacaa

SEQ ID NO: 821414 - DNA, 100 bp, Homo sapiens
ctcatttgaggagtgggaacaggcttcggcgaacacaaaggtgcagattcactttataggaacagcttcagcttcagtgatgaaaaactgaattctccaa

SEQ ID NO: 821415 - DNA, 100 bp, Homo sapiens
caccatccagtgcttgacctacacaccacctctagccaactacctgctctccaaggagcatgctcgcagcttgggagctggtgaggtggccaacttcgct

SEQ ID NO: 821416 - DNA, 100 bp, Homo sapiens
atttttgatgtcctaccaaacttcttctatcacagcaaccaagtagtgaggatggcagctctggagggtcgggaacttctggcttctgctccaactggat

SEQ ID NO: 821417 - DNA, 99 bp, Homo sapiens
taaaggtcactttccgaagatggctgaatgtgcgcatttccattatgagaatgttgagttcggcagcatacagaacggccggtttgtgggcgatgctga

SEQ ID NO: 821418 - DNA, 98 bp, Homo sapiens
cagaaggggacagccgtggagacggagggcagcggcagccggcatcctccctgggcgagagctcttccaccaaagccacctaagccaatgacttcagc

SEQ ID NO: 821419 - DNA, 75 bp, Homo sapiens
cacgcgcagccccggcctctcggcctctgccggagaaacagcaatggctgccatccggaagaaactggtgattgt

SEQ ID NO: 821420 - DNA, 98 bp, Homo sapiens
tattactgtggaagtacctacaacttcagttttcggctttgtgagaaaccttaccatcaaacacgatggccagcaacgttaccaacaagacagatcct

SEQ ID NO: 821421 - DNA, 100 bp, Homo sapiens
ccatggctcactatgtgcctgatatcatgccaattgaatctgttattgcaagtcaagctacaacttcaagcagaagagagaggagttgtgtctatcaaag

SEQ ID NO: 821422 - DNA, 98 bp, Homo sapiens
gtccttttggatttctttttaataatgtgtgacccttcacctttgatcccctgacctgcattaccttgatggaaatcctgtatgaatgtggaagccat

SEQ ID NO: 821423 - DNA, 98 bp, Homo sapiens
aaaatctcaaggaaaagtattgcaagcaacagtagtcgctgttggatcgggttctaaaggaaaggttccagatgtggaatctcgtgaagacttaatta

SEQ ID NO: 821424 - DNA, 100 bp, Homo sapiens
aaggccctgagtcaaagaagatgcctcgaactaaacaaattcatcccagaaatctaagagtcaaaccggcacgatgtccaggcaccagaaccagaacacc

SEQ ID NO: 821425 - DNA, 100 bp, Homo sapiens
tagaccctgcccaacagaatttatatagagatgtgatgttggagaactacagaaacctcgtctccctggagattcgtcagcgaactgcagctcaaagaaa

SEQ ID NO: 821426 - DNA, 98 bp, Homo sapiens
aaggctcgcaattttgagagagttttgggaaagagaccctgaaatatggcgtctggcctgcttgaaagtttggggcagaagctgtattaaacttgttc

SEQ ID NO: 821427 - DNA, 100 bp, Homo sapiens
gggacagatggcctacatcaagctggaggacaggacgtcaggggcctttacaacaactaaacggacaggcattccagccccacgggaattttcagtaact

SEQ ID NO: 821428 - DNA, 100 bp, Homo sapiens
aaccaaggcagttggtggaaatgagacagagtctcactcccatcgcccagacttgagtgtagtgatgtgatcactgctcactgcagtctcagccttccag

SEQ ID NO: 821429 - DNA, 99 bp, Homo sapiens
aagacgcagcctggccgcgctctcccaggtttttaccttaaataactaattactggccatatttgggaagtgttgaaaaaaagcagacaatctgaggat

SEQ ID NO: 821430 - DNA, 100 bp, Homo sapiens
aatacctctctttggatgcaatggaaaagtggattatctcttgcctgggaccagtggcagggaccccggaacctgaaggtgctgacaaagatgacctgct

SEQ ID NO: 821431 - DNA, 100 bp, Homo sapiens
tccagccgcctccactgtagggacatcgaacctcaaagggtgtccgcaatgttgccagtgtctgtctgcagattggctacccaactgttgcatcagtacc

SEQ ID NO: 821432 - DNA, 100 bp, Homo sapiens
ggccaaccttcaggaggaggaggaagttttattcagtgtatgggtctggtcaaagagcttttgatctattcaatccaaacttcaagtctacctgtcaacg

SEQ ID NO: 821433 - DNA, 98 bp, Homo sapiens
gcagccttcctgatttctgcagctctgtgtgaaggatcaactcactatcctgaaggtccattctcccaagaagaggggacagaaagacagatctattt

SEQ ID NO: 821434 - DNA, 98 bp, Homo sapiens
atttgtctgtttgatatcaccaaactggaggatgcctatgtattccctggggatggcgcatcacacaccaaaggtcagcccaagactaccccgtcggt

SEQ ID NO: 821435 - DNA, 98 bp, Homo sapiens
aaagcctggaggctccgacttcctcatgaagagactccagaaaggggaacagcaatgggcacttgcattgcaacatatctcaagacatctgactgtga

SEQ ID NO: 821436 - DNA, 100 bp, Homo sapiens
tttcgatctccgccctggggtcattgtcaggtattgatgaagatgaccctactgctgatgataccagtgctgctgtaactgaagaaatgccaccccttga

SEQ ID NO: 821437 - DNA, 100 bp, Homo sapiens
agtgatgagaatcgcacctaccaggcttccagcccggatgagatggagttttaacattgaatgcggagaacactaattatgcctatcaagttccaaactt

SEQ ID NO: 821438 - DNA, 51 bp, Homo sapiens
tgcgacatcccagagagcttccagaatgatcacagtcgtgttaaactgcaa

SEQ ID NO: 821439 - DNA, 100 bp, Homo sapiens
ccacatagctccccccagcctcgcgatggccgaggaagaagccctcaggggcaattctgacccatggatataattgaccctgcaatcctgcgcccgggcc

SEQ ID NO: 821440 - DNA, 98 bp, Homo sapiens
cgaagaagatcgaaaattaaacctcagactgcttttcaggaagccttggacgctgcaggtgataaacttgtagtagttgacttctcagccacgtggtg

SEQ ID NO: 821441 - DNA, 98 bp, Homo sapiens
cttctttaacttatcgtggaaataaaacagctgttttgcagattggactacaaggaacgaatgcaggaatttgggaactgagctgtgcaagtgctgaa

SEQ ID NO: 821442 - DNA, 100 bp, Homo sapiens
atttcgaaaattctatgagcgaggtgacttcccaattgcccttgagcatgattcgaaaggaaacaaaatcgcctggaagacccttctcaggtgcagccag

SEQ ID NO: 821443 - DNA, 100 bp, Homo sapiens
aggacctactcacagataggaattgaaggttctcccatgggcaggtggtctctctggatgagctgcgccccttccaggacccagacctgagctccctgca

SEQ ID NO: 821444 - DNA, 100 bp, Homo sapiens
ccattgggcagtgcctgtgccaggcaggctacgagaaggtggaggatgcctgccaggcatttttgaaacgttggggttgttggagtggttggattttccc

SEQ ID NO: 821445 - DNA, 98 bp, Homo sapiens
ccgactcagtggaacaatcttttgttggattgaaacagctaatcgccaacatagccgaggtagaggtctccatccctgccaagctgcacaactccctc

SEQ ID NO: 821446 - DNA, 100 bp, Homo sapiens
tagagcaacttcagatttctatgacagaactaaagcgggcaaagttagaccttccagaacctggaatggaaactgaaagtggaaatcaggaaaaggtaat

SEQ ID NO: 821447 - DNA, 100 bp, Homo sapiens
cgcaacagcttccggcgtgacgcagtagaaaaggtggcgtggctggcgattcgtgttcgtgagggccttttctggtccggaccctatttgtcagtggcct

SEQ ID NO: 821448 - DNA, 98 bp, Homo sapiens
gggcagcctgcagaggctgcgttttatccaagtatgaagatcagattactattttcactgactacctagaagaatatccagatacagatgagctggta

SEQ ID NO: 821449 - DNA, 99 bp, Homo sapiens
cgcgctccctggcaccgttggcccccggagggtcgggcccagttgcggcgagcgggaattgaatgatctggcacgggaccctccagcacagtgttcagc

SEQ ID NO: 821450 - DNA, 100 bp, Homo sapiens
tacgagtccaagggcatcaaggctcacttcaacctggatgagagtggcgtgctcagtctagacaggtctattgcgtctgcagacatggatttcaaccagc

SEQ ID NO: 821451 - DNA, 99 bp, Homo sapiens
gcgcttctgcatctgtgggccgaggttatattcccaaataactttgaaacaggaaatggaggaaatgtgcagggacatcttcccctgatgccaatgtct

SEQ ID NO: 821452 - DNA, 100 bp, Homo sapiens
gatctgagctcagacctgccaatttaccagagataattgataacaccctgtaacagctgattgccgaacaagcaaccggaaaagcttaataggcaatggg

SEQ ID NO: 821453 - DNA, 74 bp, Homo sapiens
cgtcccgctggatctgacccgagatgcctaccttaatgcctctgaaacaaccactctgagcccttctggaagcg

SEQ ID NO: 821454 - DNA, 100 bp, Homo sapiens
cttgtcacagaagaaaactagtatataaaaataaacaaaaagtccttgaagctttacagttaatttaggaagggcctgtcccagtcggctttaccctatc

SEQ ID NO: 821455 - DNA, 99 bp, Homo sapiens
agaatgcctatgaccggcgtcgagaatttcaactgatctcgaatacctgatgcatgcaaaacagcagctagtaaccacagctaaacgttgggattcttc

SEQ ID NO: 821456 - DNA, 98 bp, Homo sapiens
ccaccactctcattagtgagaatggtcatgctgccgacaccctgacggccacgaacttccgagtggggacgtaccaaggccagttcaccaacggcatg

SEQ ID NO: 821457 - DNA, 99 bp, Homo sapiens
gcacttcggtcacgaaaactggacaaatatcctgtggagcacccagacaaattcctgaagtttggcatgacaccttccaagggagttctgttctatgga

SEQ ID NO: 821458 - DNA, 100 bp, Homo sapiens
atgctggatagataccgaattcttatcacaaagaatttacatagtacatgacgaagttaaggataaagcttttgaactagaactcagctgggttggtgaa

SEQ ID NO: 821459 - DNA, 100 bp, Homo sapiens
acggcccggatgagtacgataccgaagcgggctgtgtgccccttctccacccagagcctctaaagagagcaatcactacacttatggctgggattttgcg

SEQ ID NO: 821460 - DNA, 99 bp, Homo sapiens
agaaaccaggctgcccaaaagtttaccacgcagactgtctcaatctgaccaagcgaccagcagtctcaggatgcaggaatcaagaccatcactatgctg

SEQ ID NO: 821461 - DNA, 98 bp, Homo sapiens
tcttccggccaacttccattgaacttcccagcactcgaaagggaccgaaatggagagcaaagcacttctggggcccagtagccaactggggtcttccc

SEQ ID NO: 821462 - DNA, 98 bp, Homo sapiens
ttccccacgtggccgcgaagaccgggaaggatgccatcctgttaactgatgcttttgacttcaccgatcagtgtttaaattcagcacttggctgttat

SEQ ID NO: 821463 - DNA, 100 bp, Homo sapiens
ggaacactgaagggcaggtcgtccccgaccttctatgaggattgcccagctcaagtctgcgctcctcagaccaccggcaggtgaacagcctgatgcagac

SEQ ID NO: 821464 - DNA, 100 bp, Homo sapiens
tttttatggacaacgaccacaggaatctggaattttattaaacatggtagctacagcaagctgggtagcaggcagatccaaaggatatcatgaagtttcc

SEQ ID NO: 821465 - DNA, 99 bp, Homo sapiens
caagatggctgcgctgttgctgaggtggctttctttcagatgcaggctggtacagtgatgctgagaaagtttttctgtcctgccttcagttgtgtactc

SEQ ID NO: 821466 - DNA, 100 bp, Homo sapiens
gacgaacccacccgactacctgacggaggccgagctcatcacgctcatggagaagcatggcatcgctgacatcggcgacctcctggagcagttagtagag

SEQ ID NO: 821467 - DNA, 100 bp, Homo sapiens
ctcccacaccttcgtccccatcttgggcattcatgggggcgcatctatgatcatggctgacaagcaaaagctggcaggctgacagaggcggcctcaggac

SEQ ID NO: 821468 - DNA, 98 bp, Homo sapiens
aagaagacgggacaacccgaggagctggtgtcctgttctgactgtggccgctcaggtgattatcctgaaccatccaggccaaataagcgccggctatg

SEQ ID NO: 821469 - DNA, 98 bp, Homo sapiens
agactcctggagatcgacccgtacttgaagccctacgccgtggacttccagcgcaggttgcataccctgtcctgagggcgcggcacggagtgcatgcg

SEQ ID NO: 821470 - DNA, 100 bp, Homo sapiens
cctgctgagctctgattcaagtgcctgcctctgccccttggtgggctgaagcttcatggaggtgagagccactttggaaaaggtgagaaagcgaatgtat

SEQ ID NO: 821471 - DNA, 100 bp, Homo sapiens
ccgacctcgtcccggcccctgcagtccggatactcacgccagaaggtgaatcacaagcctttgagaacagcctgagccttcagccctcacagatgcccag

SEQ ID NO: 821472 - DNA, 98 bp, Homo sapiens
gacaactcttctgggagtgctgttctgctttaataagcgagaccttttggaggagctcttcctgtgccttaatgactatgaaacagtgtcttgtcctt

SEQ ID NO: 821473 - DNA, 50 bp, Homo sapiens
gaccttgaacaaggcaaatatggttttggccctcgggaccaaggatcacg

SEQ ID NO: 821474 - DNA, 100 bp, Homo sapiens
aagctcagaactgagaagctgtcaccacagtatgtaaaatggaccaatgacaagagtctcggtggcatcgagggctgcctgtcaaagctcaaagcagcag

SEQ ID NO: 821475 - DNA, 98 bp, Homo sapiens
gacatgatcacccgccgctccttgggctacgcgtatgtgaacttccagcagccggcggacggagaacgaagtgaaactcctggtagaacggatgatgg

SEQ ID NO: 821476 - DNA, 98 bp, Homo sapiens
agtcgcgaagtcgggaccatcgtcgtgaggatcgtgtgcattacaggagtcctccacttgccactgggcactggtgaggtggattgatgatgaatctt

SEQ ID NO: 821477 - DNA, 100 bp, Homo sapiens
gcgactcatgagagcgcggccggaggacaggagtcattgcagttttcagtagaggtgtacttctgagaagtggcttcttgggtcttcatgcagccatgga

SEQ ID NO: 821478 - DNA, 98 bp, Homo sapiens
gatttggatgaatatacccttagaaaaaatgtggcagtatttgatgttgaaacccggcatgtgtttatcggtgaccactcaggccaagtaacaatcct

SEQ ID NO: 821479 - DNA, 100 bp, Homo sapiens
ggacacctgaatcatttattgtggttgaggaagctgaaagttactgtggcccatgtcctaaaaactggatatgttacaaaaataactgctaccaattttt

SEQ ID NO: 821480 - DNA, 100 bp, Homo sapiens
atttgaagcgcttcaaaggaccggacccagagaagaggaaaactctaccggtgcaggaaactcaagagtatacccgaaatgttgttagatattgccttga

SEQ ID NO: 821481 - DNA, 100 bp, Homo sapiens
tttactgcatcagtgatggaggacagagtgcgctttgaaatatcagtgatgtataatgaatctgacctgcatacactcgtgaaatcaagataatattttc

SEQ ID NO: 821482 - DNA, 100 bp, Homo sapiens
tgcgtggtccaccatcggtgacctcaccgcctcggttcgccctcagccgccccgagcgctcagggaatccgggaactactggatgttgctaaacaggaca

SEQ ID NO: 821483 - DNA, 100 bp, Homo sapiens
cactacaacaggaaaatcatattatagatggagtaaagggggccgaaggccagagaccaggatttggctacggaggcagagcgtccgactataaatcggc

SEQ ID NO: 821484 - DNA, 99 bp, Homo sapiens
atgagccgggcctggcggacgcggcgccatcgcagtcagacggaatcagtccccaatgcctggaaattcctcattggattactgtgttttaaacagaat

SEQ ID NO: 821485 - DNA, 139 bp, Homo sapiens
gtgaaagctttctgcccagagctcctggaccaatgcatcttcccaccaccttaaaccactgtgccggtggtggtgtgcacattgagccccggtatagacagttcccccagctgaccagatcccaggtgttccagagcga

SEQ ID NO: 821486 - DNA, 98 bp, Homo sapiens
ggcctattggctgaagaagctggagagcagacgaggtgctattcgagtgctagtggtggaacgggaccacacgatatctatcatcatcaactcttctg

SEQ ID NO: 821487 - DNA, 98 bp, Homo sapiens
cttcttcccacgctgctactgcctgggggctgaggatgacaaaaaagccttcatagcaaggtgtccctgccttcactgtgctccaacctgaaggtccc

SEQ ID NO: 821488 - DNA, 98 bp, Homo sapiens
aggcctgtccctgagcgctgcccgctacgcgctgttgcggctggaggaggggcctcctcacaccaagaactggcggtttgacttctccgtgacagtgt

SEQ ID NO: 821489 - DNA, 99 bp, Homo sapiens
tgatcgccggcagtgctggggccgcgccacttccgcaaacaggtgcagaggatgttaaacgtctgaatgaaaaacttaaagaaagcaatacaacaaagg

SEQ ID NO: 821490 - DNA, 100 bp, Homo sapiens
tatagtaaaaatacgcagtacagtcccaggtcctgtccctgctatcagtggggcactgaagaaagcaggactgagtcttaaggacatggatttggtagag

SEQ ID NO: 821491 - DNA, 100 bp, Homo sapiens
gaactacagggccgccgccacgcaggtctcagcatcagaggagcccaggaggaggaccctcccgatccccagctaatgagactggacaatatgcttttgg

SEQ ID NO: 821492 - DNA, 100 bp, Homo sapiens
ggtcagtgcgcacgttgtaatcagctgaggccatgtcaggagacggagccacggagcagagtgaagatagtccaagtcctaagagacagcgcctctctca

SEQ ID NO: 821493 - DNA, 100 bp, Homo sapiens
acactttgagacgcaggaagcagctgaaagagctattgaaaaaatgaatggaatgctcctaaatgatcgcaaagtgagcttcaggatggttcgtactaag

SEQ ID NO: 821494 - DNA, 98 bp, Homo sapiens
tctcagcctctcaaactgctgggattacagtacttcctcgcgtattgctaaaggaggagttgaccacaccaaaatgagtctacatggtgctagtgggg

SEQ ID NO: 821495 - DNA, 100 bp, Homo sapiens
tgttccaacactacttagctttccaagggtggcccagttgaaatccttcccttcctctaccttggaagtgcctaccatgcatccaagtgcgagttcctcg

SEQ ID NO: 821496 - DNA, 100 bp, Homo sapiens
tggacagaaaggcgacaaaggtgatcctggtatttcaagcattggtcttccaggtcttcctggtccaaagcctgattacatcaaccccagagccgtgcag

SEQ ID NO: 821497 - DNA, 98 bp, Homo sapiens
cgagctgctgcggcgccgcaactttaaagtcatgatctaccagggttgagttccagaataaattctacagcgggaccggtttcaagttcttacccttc

SEQ ID NO: 821498 - DNA, 99 bp, Homo sapiens
aaagccgaagagatgaggcggcagcagaagctaaagcaggccaagtgctagtgcttggaaacaagagagatcttcctaatgccttggatgagaaacagc

SEQ ID NO: 821499 - DNA, 98 bp, Homo sapiens
gcagctgcaaggagggcggcgggactgcactcgagtgtccagacctgctcgatggacactcatgaggaccatgatacttccactgagaatacagacga

SEQ ID NO: 821500 - DNA, 100 bp, Homo sapiens
aagtggtgcagtgaccaatcagaaataatatccaatcagtacaacaatgagccttcaaacatatttgagggctgatcccttatccaacatggttctaacc

SEQ ID NO: 821501 - DNA, 98 bp, Homo sapiens
gaaggtctctggagacatcttcagcaggctccatgacaattcaaaaggtgaagggattgctgtcacgtcttctcaaagttcctgtgtcagaccttctg

SEQ ID NO: 821502 - DNA, 100 bp, Homo sapiens
gatgatccactgaatattgaagctgcagaacatcatttgcgggacaagggattgtcaatgaggcagatcagattccgatttgacgggcaaccaatcaatg

SEQ ID NO: 821503 - DNA, 99 bp, Homo sapiens
gcggagctgacggtggaggttcgcggctctaacggggctttctacaagtcccatgaagctgaggtcttgaagcagctggctgagaaacgagagcacgag

SEQ ID NO: 821504 - DNA, 116 bp, Homo sapiens
tcagttatattccatctactgtctttttcttcaatgggcagcatatgaaagtggattatggtgagctgaagagacgcctgaaagctgagaagaaagtagcagagaaggaggccaaa

SEQ ID NO: 821505 - DNA, 98 bp, Homo sapiens
gctcggagctgctcatcaccaaggccaagaacgggcacctggctgtgattgtggtgtccgagtgaccggcacactgtctgacacacagtcagtgtgca

SEQ ID NO: 821506 - DNA, 100 bp, Homo sapiens
gcagataaagggcattacaaattctgtgagcttcttattggcaggaggatcagctgatttattcggaggatttgctgactttggctcagctgctgcatca

SEQ ID NO: 821507 - DNA, 100 bp, Homo sapiens
cagagattcaggccagagttgtgggccgccgtcggcagcaagaacagagagagaggtggacagatctgagagatactgagtttcaggtttagctgtgcct

SEQ ID NO: 821508 - DNA, 100 bp, Homo sapiens
tcagttacaagagaaactttatgtgcctgtaaaagaatacccagatgtacaaacacaagtgcgccttgcaaaaaaaaactttgacaaattgaagatggat

SEQ ID NO: 821509 - DNA, 100 bp, Homo sapiens
actggttgcctaattttatggatgtcttcacgtggtctttaccgtttgttggagaaaaaggaacattaaaatctccccagatgctcactgctctgatcat

SEQ ID NO: 821510 - DNA, 99 bp, Homo sapiens
gaagacccagtacagctggacgtttgccgtccactctgagaaccccgagatgcccctgtccttcacaataagccgaggattctgggtgctgctttccta

SEQ ID NO: 821511 - DNA, 100 bp, Homo sapiens
ataaagtgctataattcagagcatggagcacaccttcctggttcacctgagctggattcggagaggaacaattggcttctttgcatgcttttggtttgtt

SEQ ID NO: 821512 - DNA, 98 bp, Homo sapiens
atatcttgaaaagctgccagaaagtggttccccctggaagtcctgggcccattactcgacatgggtcttacgacagtttagcttctgaccatagtgga

SEQ ID NO: 821513 - DNA, 124 bp, Homo sapiens
tccaatcaggactcagctttgggaagagcgccacgcggtgggcgaggggatgccctagtaaattcgcagctcgcaaaggatctccttcatccctctccagaagaggagaagaggaaacacaaga

SEQ ID NO: 821514 - DNA, 98 bp, Homo sapiens
ccgactccgtaggagcgcgggggcggctcctgctcttcctggactcctgagcagaggacattggctccctggattatcaagagtttgtagttgacatt

SEQ ID NO: 821515 - DNA, 99 bp, Homo sapiens
ttttggtgatgctttcaaacagtgtcaatacaaagatactctccccaagagatacaatcttgcttgaccgtttgggacatcaatcttccacatgaagtg

SEQ ID NO: 821516 - DNA, 100 bp, Homo sapiens
atgctccaacctatacaacaagagatgaactggttgccaaggtgaagaaaagagggatatcgagtagcaatgagtattaggaagacagctgatcctgccc

SEQ ID NO: 821517 - DNA, 98 bp, Homo sapiens
gacatttctcttctaagagaagtagtaaaaccagctgcagtgttatcaaagcctagtatcagaaggccaggcgagactgcaacactgctcatcacccc

SEQ ID NO: 821518 - DNA, 100 bp, Homo sapiens
atgaccctgagcaaggaaaatctgagggatgagctttctgatgttagccaaggcggatctaaagctaccactccagcatcaacagctaattcagatgtgg

SEQ ID NO: 821519 - DNA, 100 bp, Homo sapiens
tgggaattttaggtaatatggcctgtttccaggagatatgtgtgtccatcagcagtgataaaaatcttggctgtttctggcaaagcctgccgtgtcttac

SEQ ID NO: 821520 - DNA, 99 bp, Homo sapiens
ttccaattggggccgtaccatggcggagaagactcaaaagaggagtacaaaccaccaggaacccgtaaacttcataacattcttggagtggaaacagga

SEQ ID NO: 821521 - DNA, 100 bp, Homo sapiens
tcaggaatcttctccccagagactcctaagtgggcacactgcttctgacatccaccgcaagcgcatggagaaagacctgctggagctgcagacactcatc

SEQ ID NO: 821522 - DNA, 100 bp, Homo sapiens
atctctcagggaagtgaatcacaacacgcattggaaaagtgcattgcttattctccaccttttggtgattatgcacagcacttttccagccattaactcc

SEQ ID NO: 821523 - DNA, 98 bp, Homo sapiens
ttggagccgtctgcaaagtgtccccggcaagaaggttatcaatactctggctgaccatcatcatcgtgggactgactttggtggaagtccttggttac

SEQ ID NO: 821524 - DNA, 99 bp, Homo sapiens
cgacgagcggagcctcaggagccggcggggacgccatgcgagccaggttcatatttggtgcttagacaaattcaaaatgaggaaacatcggcacttgcc

SEQ ID NO: 821525 - DNA, 100 bp, Homo sapiens
tggattttagatatctgccagatgaaaaagcccaaaaatatccaatggtccatttattgcaaaaaagtgataactcatttaaccaggaactgttgaaaag

SEQ ID NO: 821526 - DNA, 99 bp, Homo sapiens
cataatcctggagagccccggtttaagatctccaggtgaagtagatttttattttcgttcccacatgcagggcagcacaaggagaatgggcgtcatgac

SEQ ID NO: 821527 - DNA, 98 bp, Homo sapiens
tcggatccttctggagtccgtgtgccagcaacagagctgggtccgggtgtacggaatttgctcgccctgatacatcgaatgatagagtttgttgtacg

SEQ ID NO: 821528 - DNA, 100 bp, Homo sapiens
cactccacgagcgacgtggtgcggcagtacatggccaggctcatcaatgcttttgcgtcactggcagaagttttcggctttgtgagaaaccttaccatca

SEQ ID NO: 821529 - DNA, 125 bp, Homo sapiens
aagctttaccctcccagggtctgagctcatctgctgttttggagaaacttaaggagtacagctctatgggccgaggagtgaccttcctatttcctatacaagcaaagacattccatcatgtttac

SEQ ID NO: 821530 - DNA, 99 bp, Homo sapiens
ggaggatgtgtgattcccactggtcgcctgcaggatttaccgaggagcattatggatcctgggagaatactgtagtaccaaggaagacattcagagtgt

SEQ ID NO: 821531 - DNA, 100 bp, Homo sapiens
gccctcaccagtccccaatgtagaagaggtgacacttcccaaaacagggagaaaactggttgtcctggatgtttgaaaagttggtcgttgtcatggtgtg

SEQ ID NO: 821532 - DNA, 117 bp, Homo sapiens
ccttgcctcgaaatggaccccaactgctcctgctcgcctgaatcatttgctgtttcaaatagagaactgtgcgatgatgagaaagagttcatacattttccagtatgtgaggggacc

SEQ ID NO: 821533 - DNA, 51 bp, Homo sapiens
cgaggaaaggtgtgctgtgcctgaggccagaaggaaagccacgcaagttgg

SEQ ID NO: 821534 - DNA, 99 bp, Homo sapiens
cagtcccagcgctgtcgtgctcctctactcggattaaactgcaaatatctcatgaagctgctgcctgtatcactggtctccgggcagccatggaggctt

SEQ ID NO: 821535 - DNA, 98 bp, Homo sapiens
caggaccctacccagggttctagaaatccaggcaggcatctatcttgaagacccctttgctgatgcaagtaagggtgatgacctgcttcctgctggca

SEQ ID NO: 821536 - DNA, 100 bp, Homo sapiens
aaagaagagccaagagaaggtccttttctacaaatatcagagccatggctcagatggcttcgtgcccctgggcaccctcctgcagttgccccagttccgc

SEQ ID NO: 821537 - DNA, 100 bp, Homo sapiens
ttcttctcactgctgtaagcaaagccatgaccctctgccacagagatagttttgatccaaggactgccatttgggaactgcctgcccgtcagtgatggcc

SEQ ID NO: 821538 - DNA, 99 bp, Homo sapiens
tctggaataggggctgaaggagagattgtaaatcctcacttattgaaagatcttaccgagcggggcctatggcatgaagagatgaaaaaccagattatt

SEQ ID NO: 821539 - DNA, 129 bp, Homo sapiens
ggaccacctggtcggggaggagaccatggctgactacctgctgtacaccctcaacaaacaccagcgctttgggtgaattatgtaacctcattacgctggatgtagctcacaatcaacttgaacaccttc

SEQ ID NO: 821540 - DNA, 100 bp, Homo sapiens
tgcagactcagactggccaaaattcaatccctgctttagctcagcctctacggcagacacatgcaggccaacccagaaccaccgaagaagaataatgaca

SEQ ID NO: 821541 - DNA, 100 bp, Homo sapiens
ttatgcagttattcgtttcttacgggaacaaagtcagatggacacttacacctcggatgaacaagaaagtttggaagaccattaaaaatctcaagtgacg

SEQ ID NO: 821542 - DNA, 99 bp, Homo sapiens
gagctactgtactggctattggaaggaggagattctgaagataaggaggaagctgaatatggtgggcatgatcagatagatttgtatgacgatgtcata

SEQ ID NO: 821543 - DNA, 100 bp, Homo sapiens
cattacactgaagcagatgacgatgactttgagggaatgaaagctactggttgattttaaagtgcctgggcctcacaggtttggagatgtcccagaataa

SEQ ID NO: 821544 - DNA, 98 bp, Homo sapiens
aacgtgttggaccttccggagcttctcagaagacagagggttttcttttgagtgttgcactagaatggtgacagggaagaaaaagtatcaagaaacta

SEQ ID NO: 821545 - DNA, 100 bp, Homo sapiens
aagactgagacgttggagttttatcctagaggataaaggaaatctttgggaaagtcagtattttatatagcaacagtctctggtcccagcccaccccatg

SEQ ID NO: 821546 - DNA, 100 bp, Homo sapiens
cagccaaagaactttctcttgtcaacaagaacaagtcatcggctattgtggaaatattctccaacaacagctggaggaggaggctgccaagccgcccgag

SEQ ID NO: 821547 - DNA, 100 bp, Homo sapiens
ctttgatttttgtgaaacgtgtttcaagaccaaaaaacacaataccaggcatacatttggcagaataaatgaaccagctctgctttcccagcacgctgcc

SEQ ID NO: 821548 - DNA, 100 bp, Homo sapiens
ttcagattacagagccaaactctcacagatcagacaaatctaccatacggagctggagaaatacgagcaggtgctggagaatctggtaaaagcaccattg

SEQ ID NO: 821549 - DNA, 100 bp, Homo sapiens
tggctatgaacccagaggtcgtggaggtggccgtggaggcagaggtggcatggggttgtggcagcactgcctgaaggtatgagaccagattctaatcttt

SEQ ID NO: 821550 - DNA, 99 bp, Homo sapiens
ggaaaagctaatcaagtgcgacgaaattcagtgcttacttttctggtgcagaaagattgttgggaacagacaggaaccaatgtgggaattcaacttcaa

SEQ ID NO: 821551 - DNA, 100 bp, Homo sapiens
ctgaggatagtttagaaggatgcttggattgtctgcttcaagccctggctcaaaataacttacagattccagtctgctgttagatgattattcatccaag

SEQ ID NO: 821552 - DNA, 100 bp, Homo sapiens
aggctgctgcgcctcatcgtggaccacaacatagccgactacatgacagccaagaacaacgtcgtcatcaactataagccccaggatgggtgagttcaac

SEQ ID NO: 821553 - DNA, 100 bp, Homo sapiens
ggaggcagaggccagccggcggtgcatggagctggttcatgcatgggagatctcagaccagttgttacagatccggcaggatgtggagtcatgctatttt

SEQ ID NO: 821554 - DNA, 100 bp, Homo sapiens
ctcagccactagtcatcagcaaattgataccacatttgtgtatcctgtttggagactccaacagtcaggatgaactgagtgatgttattgatattaagga

SEQ ID NO: 821555 - DNA, 100 bp, Homo sapiens
ccaaacaccctcagctccacattgagagcaaaatctacaagatgatgcagggaggaggtgagcccgtggtagcagcagaagcaggcattatgggataacg

SEQ ID NO: 821556 - DNA, 98 bp, Homo sapiens
ggtgccggcgagggggcagaggaggcggccaaggacctggccgacatcgcggccttcttccgatccgattgcagtgcttttgtccacaaaggctgccg

SEQ ID NO: 821557 - DNA, 100 bp, Homo sapiens
ggattatgaagtattaattcttccactgatatctcaaaaggtgatctggacaaaggaacaggtatctcaggtcttaaagaaagtgcagaagagatggtca

SEQ ID NO: 821558 - DNA, 98 bp, Homo sapiens
ttgagagcatgcgagagcacctcaagttccaaatggaggaaacagagcaaatgcagcgttacaatcaaagacttattgaggaattgaaaaacagacag

SEQ ID NO: 821559 - DNA, 100 bp, Homo sapiens
tgaggatgacgggacagtggccttcgcgctaacgaagatcagccaaatggccgatgacacagtggcagaactggacaggcatctggcagtgaagaccaaa

SEQ ID NO: 821560 - DNA, 98 bp, Homo sapiens
acatggttctaaccttcagtactaaagaagatgcagtttcctttgcagaaaaaaatggggctgataacatccggaaatactggagccgctactaccaa

SEQ ID NO: 821561 - DNA, 98 bp, Homo sapiens
tgtggtctctgtccaagcacgagtcttctgacgtgaactgcagaaggctgaccggttccctgatgtgttacctgcttctgctactgatccaaactgca

SEQ ID NO: 821562 - DNA, 99 bp, Homo sapiens
tcattttggacccaccactggtagccctggataaagatgcaccggttccttttgcagatgacttgtggggggaccacagtctggaggtggaggctggcc

SEQ ID NO: 821563 - DNA, 98 bp, Homo sapiens
tagtgccaccttctcctatgactgctggcagagatggaggaggagctacgttatgcacccctgtctttccgaaaccccatgatgtctaagcttcgaaa

SEQ ID NO: 821564 - DNA, 99 bp, Homo sapiens
tgtagcgtcagatccttgagtgataaaggagtagagctcctggaatgaggccgcccatgggaggccatatgccaatgatgcctgggcccccaatgatga

SEQ ID NO: 821565 - DNA, 100 bp, Homo sapiens
aagactcttcccggttgatcgtggattatttgagtatggactccaattgccttgacagtgtttttagtggctgttgcaacattatgtaaagaacaaggaa

SEQ ID NO: 821566 - DNA, 99 bp, Homo sapiens
cctaaatgtggcgacttgtgcacacatgtagagacctttgtatttcgtaagaaggcaacaagttcttctcctctacagaaggattttgcaaacaattcg

SEQ ID NO: 821567 - DNA, 51 bp, Homo sapiens
gtggcagtattcggcttggagaaaaggtgaaaaatgttctaaaactgattg

SEQ ID NO: 821568 - DNA, 100 bp, Homo sapiens
attactgatgggagcaagttgactaccaccagtggagtccaggatgagacatgcacaccacagagcgtggcgatggaacagtaaccgggcttgtgagagg

SEQ ID NO: 821569 - DNA, 100 bp, Homo sapiens
tcccactgattctacattatgatctttcattcgtacgtgcctttgagtttacctatgttaatgtttatggcactcacgttttggtaagtgctgctcatga

SEQ ID NO: 821570 - DNA, 128 bp, Homo sapiens
aaacatccaagaaaaatgtccttaaagcaattgagcaggctgatctactgcaggaggttcatatccagctttcagagtggcaccgtgcaatttttcttccacaggcctggcttgcatacatgaatcga

SEQ ID NO: 821571 - DNA, 100 bp, Homo sapiens
ggcgaggaggcgcggaaccatggccgatgggggcgagggcgaagacgagatccagttcctgcgaactgtatataatgtttacatggcagggaggcagctg

SEQ ID NO: 821572 - DNA, 100 bp, Homo sapiens
cagatgaatgatgtcatcaccgtcatcgagggaaggctttgctggctcctgtctgccccgcttcagcaccatgcccttcatctactgcaacatcaacgag

SEQ ID NO: 821573 - DNA, 98 bp, Homo sapiens
cagatcgaagcggatttccgattgaatggctgcgggaacaccatcgggccaccattaaggtcattcgacgcatgcagtactttgtggccaagaagaaa

SEQ ID NO: 821574 - DNA, 99 bp, Homo sapiens
cggaatgcactacaacaggaaaatcatattatagatggagtaaagcttctggagctatttgacagcgaagaccctcgggaacgggactacttaaaaaca

SEQ ID NO: 821575 - DNA, 98 bp, Homo sapiens
tcaatctagaaattatcccaaggacgctgcattttcattttgcattgagcctcacaaattacacagctaggcttgctgctgaatacggcagtgaggga

SEQ ID NO: 821576 - DNA, 106 bp, Homo sapiens
aattaaagcagaaagaaagctgcggcctgtatcaccagaggagattagacgtagcagattagccgtgttgaaatccttgtctcctgtagacccagtggaacccata

SEQ ID NO: 821577 - DNA, 100 bp, Homo sapiens
aacaggagaacgggaagcctcctgccgagataaagccaccacgtctggtgtgatccctcacatccacaaatctctgattggaaagaagggacagcagaaa

SEQ ID NO: 821578 - DNA, 99 bp, Homo sapiens
accccgactcttcctggtgaagcatctgatgcacgttccatccggcgctcagctgggcttgagctgatgaagagtatgaagatggaattgaaaggacgt

SEQ ID NO: 821579 - DNA, 107 bp, Homo sapiens
cgaagaactcgagcgacagagacaagctgagcttgccgcacaaaaagctagagagacattcaggttttgatgggaagccttgtgtacctgagacaagggattgagaa

SEQ ID NO: 821580 - DNA, 100 bp, Homo sapiens
tcggctacaacatttggcagagtttttgttccagcagctgggaatgttggtgtcctttgtgaagagccacatcagaccttatatggatgaaatagtcacc

SEQ ID NO: 821581 - DNA, 100 bp, Homo sapiens
catcacttcgaagcccccggtgcagtacaggaagttacagcaactccatgtaaagatgatggtgatgcaaggatttcagccaattcctgtctcagcatgg

SEQ ID NO: 821582 - DNA, 133 bp, Homo sapiens
acaagagtatccctgtggaggacaaccagatggtggagatcagtgcctggttccaggaggccataggcttcattgggtaaccaggagccgacaacaactcctgacgcaatggttcagccttttactaccatcc

SEQ ID NO: 821583 - DNA, 100 bp, Homo sapiens
ctgattatcttttagctctcagcactgaaccacatgaaatgaagatcacctctgcctatctacaggacattgagaatgcctataagaaaacctttctccc

SEQ ID NO: 821584 - DNA, 100 bp, Homo sapiens
ccatcttccatccctgatgcttggagaagctgaggacacacagggttggatgcatcataatatggatctagtaggagacaaagccacaaaggaaagctat

SEQ ID NO: 821585 - DNA, 100 bp, Homo sapiens
aaacctcaggacttgagtaacagcaacatgacggagctgtcattgcaaaaggagcagctgcagctcaagatcattgagattgaggatgaagctgagaagt

SEQ ID NO: 821586 - DNA, 99 bp, Homo sapiens
gcctggcgtgcactccgcacctcggggacattattgcgcgtggaacggctgcttttggaagttactgtaatgaatgtatgttggatccagactgcggtt

SEQ ID NO: 821587 - DNA, 98 bp, Homo sapiens
cttacgtccccgagtgcggcagtaccgcctccttcccagccgcgcggcttcctccagacctctcggcgcgggagctcttgtccctggcaaagcgaaag

SEQ ID NO: 821588 - DNA, 100 bp, Homo sapiens
ggacataacaagccaatgcacgcagatataatttctacagtagaatttaatcattctggagaattactagcaacaggagataaaggtggtagagttgtca

SEQ ID NO: 821589 - DNA, 100 bp, Homo sapiens
cataccctcatttctggggtcaacagtccagatggggaggataagatcaatgccctcattaaagcagccggtgtaaatgttgagcctttttggcctggct

SEQ ID NO: 821590 - DNA, 100 bp, Homo sapiens
ctgccgcagctctgcagaatacagtgtccataagatcacctctacctttcatcaagggtgtccgcaatgttgccagtgtctgtctgcagattggctaccc

SEQ ID NO: 821591 - DNA, 75 bp, Homo sapiens
aaggcagtggcccaggccacagaatgaaaaatctactactcccgtctcaaagtccaatacccctactccacgaac

SEQ ID NO: 821592 - DNA, 98 bp, Homo sapiens
tccgtctgccacacgctgatggtgcagcaccgcatgatggtacccaaagtcaggggttgtagaaggtgatttagctgccatagaagcatacaagtcat

SEQ ID NO: 821593 - DNA, 100 bp, Homo sapiens
cgcctgcgacgtggaggctgactttgccgtcattgctgggttgatggtgcatgttgataaaagaattactctggcagctttcaaacaacatttagagccc

SEQ ID NO: 821594 - DNA, 99 bp, Homo sapiens
aaaatggagcccttcaccaatgggagtgcagcctgccacaggcgaggttgtgtttgatagtttccaggactctgcttctcgttcagagctagaaacccg

SEQ ID NO: 821595 - DNA, 100 bp, Homo sapiens
ttccatacgacataatctgtcattgaacaaatgtttccttaaagtgcctcgatctaaggatgaccctggaaaggtaacaaacctgaatttggcaactggc

SEQ ID NO: 821596 - DNA, 100 bp, Homo sapiens
gacaatggaggcaaagaaacctctctgcatccccaagatcttttgccagaaatgagggcatactggcctgacgtaattcactcgtttcccaatcgcagcc

SEQ ID NO: 821597 - DNA, 99 bp, Homo sapiens
tcaggtgaactggattccgtgtcaagacccccacaggatgtgatcttcgtggtggaaagctaaattttaaaaccaccccaatggatgcagacagtgatg

SEQ ID NO: 821598 - DNA, 98 bp, Homo sapiens
cgggtatggctgaaaagagacagtggtcaatactggcccagcatttaccacacaatggcctatgcaacaaggagacgcgcctttgccctggtctctca

SEQ ID NO: 821599 - DNA, 98 bp, Homo sapiens
aaagtcacccggcctgacagtgggcacctgtatgctatgaaggtgctgaagaaggcaacgctgaaaggtcctgtacatgggattgtcaccaggaccta

SEQ ID NO: 821600 - DNA, 100 bp, Homo sapiens
caacaaggcctgttccttcagcaagccttccaacaggtgccttggaatttgtgtcgctgagtcagcaagcctttcagatttgcccggtttttgttgtttg

SEQ ID NO: 821601 - DNA, 98 bp, Homo sapiens
ttcagtctacaaaggactcttctaaaaggatatgtgttgctaatacccatctttactggcatcctaaagctcttttggaagaagaaagaaaagcctat

SEQ ID NO: 821602 - DNA, 99 bp, Homo sapiens
ccagggagggaaatatgtcatgtatcccatagctgtgagtggcgatcacgagaacaataagccattgccgaaatctaaaaaaacttgtagcaaaggcag

SEQ ID NO: 821603 - DNA, 100 bp, Homo sapiens
tatgtggacttgactaaattggcagtgacgaagaaaagagtgagacctctggagaagcaggatccatttgaatccagagaattcggtcaacagtggatga

SEQ ID NO: 821604 - DNA, 100 bp, Homo sapiens
atcaaattgtatgtacgcagagttttcatcatggataactgtgaggagctaatccctgaatatctgactgagatatggggagcctacactccggagggct

SEQ ID NO: 821605 - DNA, 98 bp, Homo sapiens
gggaagtctccatggtgaagtataggctgaggctacctgtgaacagtacgcagtgaatgttgaaaagcttttgacatcacctatgtgcgtctcaagtt

SEQ ID NO: 821606 - DNA, 100 bp, Homo sapiens
aataccaccagcagcaccagcaacagtggcaatgagaccagtggaagcagcaccatcggggagacaagcaaaacgagcctctgactccaggttatcatgg

SEQ ID NO: 821607 - DNA, 100 bp, Homo sapiens
ctgttccccaccacccgagcgctcctttctctgatatttggccccaagccgatgcatcacagcttcagctttagctgcagctgcctctgttcagccactt

SEQ ID NO: 821608 - DNA, 100 bp, Homo sapiens
ttatggaagagaatgtgactggtggtcggttggggtatttttatacgaaatgcttgtagatctaaatgagtgtggcctgaagccccggccctgtaagcac

SEQ ID NO: 821609 - DNA, 100 bp, Homo sapiens
tttgctacgcatggcacggcctttgacaagaggcagtcttcccgtgtcccagtgagcctgctctcagcaaaaacgagctgatcctgaccacagagtccat

SEQ ID NO: 821610 - DNA, 100 bp, Homo sapiens
tcgaaggtgtccaagacaacatgaagctccataagagcccctcttcttgggcctgcgattcctcacctggaagggagaagagtggacttcctgcctagag

SEQ ID NO: 821611 - DNA, 137 bp, Homo sapiens
tttctagtccctcttacttgaagcatgtctttcagagcccggcaccacccatcttgagtatctgagaaatgtgtgtgaaaacagaaggttgttccaccgagattcacatccagattggacagtttgtgttgattgaa

SEQ ID NO: 821612 - DNA, 133 bp, Homo sapiens
ggcaatgtcccgccgcaaacagggcaacccgcagcacttgtcccagagggagctcatcacccagcatcccgagggccccgtcttcggacgaggagtgcttctttgacctgttgaccaagttccagagcagccg

SEQ ID NO: 821613 - DNA, 100 bp, Homo sapiens
tgaaactgctttttgaaacagagaaaatagatatagtactacattttgccgcacaaacacatgtaggtccttccatagtgacgccccccaaggacatctg

SEQ ID NO: 821614 - DNA, 98 bp, Homo sapiens
caggggcaacgagaccactgccgacagcaacgagacaaccacgacctcaggttttataggatcacattgacaaaagtaccatggagttttatgagtca

SEQ ID NO: 821615 - DNA, 100 bp, Homo sapiens
aacagcatcctgacatcgaaaacccggacctcgcttacctgcatgctgcctacaacacagcagtcccctcaggatgagcaggaaaagctcttggatgaag

SEQ ID NO: 821616 - DNA, 100 bp, Homo sapiens
aggagattgagtacgaggtggtgagagacgcctatggcaactgtgtcacgtgactggctttgatctgtggctgtccgtgctggccctgggcattgtctgt

SEQ ID NO: 821617 - DNA, 100 bp, Homo sapiens
caagcagcagccagagaatgggaggccatcatctgtgcgatctctgcggtggacgaggtggactacaagacggctgaggagaagtacatcaaggggcctt

SEQ ID NO: 821618 - DNA, 100 bp, Homo sapiens
agaggtgccctgaggagcagggaagcatggctattgtggatgtaaaagccatgttcaaggtttctgggtgtctctggggagcccctgggccagattttcc

SEQ ID NO: 821619 - DNA, 100 bp, Homo sapiens
cttggaagtcagcatagtccaggcaggacagcatctttaaatcagagaccaaggacacacagcttacgaggaaatatttcagtaaaagcagttaaaaaag

SEQ ID NO: 821620 - DNA, 98 bp, Homo sapiens
ggacaggaccagatggtagaatcaccaagaaggatatcgactcttttgtgcctagtaaagttgctcctctgagctcctgtgacggccacgacgggctg

SEQ ID NO: 821621 - DNA, 98 bp, Homo sapiens
ccatcagctgaatcagattcttagacatcggcttgtaaccacagatcttcctcctcagttagcaaatcttacagttgcttcgccgacacgaggtgacc

SEQ ID NO: 821622 - DNA, 144 bp, Homo sapiens
gtcagctgcgtgattcccgtgattgcgttacaagctttgtctccttcgacttggagtctttgtccaggacggagttcatgatcaagtgttgcccacaccaaatgcttcatccagagtcatagtacatgtggatctggattgctt

SEQ ID NO: 821623 - DNA, 100 bp, Homo sapiens
gagaaggggaataagactgcatctgttcatatgagcctaccgtatgtgaacgggagctgtgtgtgtttgcttttcaaaccctgggagtaatgaatgaagc

SEQ ID NO: 821624 - DNA, 99 bp, Homo sapiens
gcaaagactatagttttggttaaaaatgttctttcccgacattatgttcatcttgagaggtaactgaagtggtgaaaaactacagaggagaggactact

SEQ ID NO: 821625 - DNA, 122 bp, Homo sapiens
ccctatcagaatctggaccagacaacgaactgagcatcctgggcaaggtcattgctagaatcgtggatggaagcagattcactgagttcaaagccttttatggagacacattagttacaggt

SEQ ID NO: 821626 - DNA, 100 bp, Homo sapiens
tgaatgtttatttgaaatgggctttgaagagactctttgtgaagaaacgagccagtgactgaaacaccctggtggaaacctgttgacagaccttccactt

SEQ ID NO: 821627 - DNA, 100 bp, Homo sapiens
cctgtcctttcacaaccagctgggattccacaggcagttcaagtcaagcaactaccatcagagggttctcgcttcagcacaagatccggagttttgaaga

SEQ ID NO: 821628 - DNA, 100 bp, Homo sapiens
aataaagtcagagccaaaagaagcagcaaaatgtacctgaagactcgttctcagatgccctacaaagccaacttcatgtattgcggtacccctcccacac

SEQ ID NO: 821629 - DNA, 100 bp, Homo sapiens
cgagctcctcaagaatctcgtgctcaccggtttctcccacatcgacctggccggtctaattgaagccaacggagaactcaaggtcttcatagaccagaac

SEQ ID NO: 821630 - DNA, 100 bp, Homo sapiens
gacctacccactacaatacctcttgggactgggctcgatttgagactggcacagcctccaggttggcgggctcatctgcgctggggttctgtgcgccatg

SEQ ID NO: 821631 - DNA, 100 bp, Homo sapiens
ccgggaggggggagcggcgttggaggccaccgtttccagctgtggtcgccaggacccccccagagccaagaccttctccagaaggtgacccttccccccc

SEQ ID NO: 821632 - DNA, 98 bp, Homo sapiens
ctagaatcttgcctgctccacagtttggctaggaattatctgtgaatgtaggaccactggatttgcagtcttcatctgacactgtggagagtttctag

SEQ ID NO: 821633 - DNA, 100 bp, Homo sapiens
ctggacatcaccatgaaggagtctctcaccaccagggagatcagacggcaggagcatcgagagtaaacatgaggttacgatcctgggaggacttaatgaa

SEQ ID NO: 821634 - DNA, 98 bp, Homo sapiens
ctgaaacagaacctgtccaggagctggcatgacgtgcaggtctctagcgctcggccgctgcagaagggcagtcaccccatgtgcaaggagcacgaaga

SEQ ID NO: 821635 - DNA, 99 bp, Homo sapiens
ttacatctctagataacagtctgcactttcacccgtttcagatatgaaaaacagtagctccgtatcgaatacattgacaaatggatgtgtcatcaatgg

SEQ ID NO: 821636 - DNA, 98 bp, Homo sapiens
agccgtgagatgcgtggtccaccatcggtgacctcaccgcctcggttcgccctcagccgccccgataagaaggctgactgcacaatcacaatggctga

SEQ ID NO: 821637 - DNA, 98 bp, Homo sapiens
gaggatccagtgttcaccatcctggccccggaagacaccatgccacaaggagagtgatctcttcccctgttttcacaatggaggactccggaaagact

SEQ ID NO: 821638 - DNA, 132 bp, Homo sapiens
ggccctgagcctcctgcaacacctgcggcctcactgggacccccaggaggtgaccctgcaggagtcctaagcagacttaaagccaagaaaataagaagaggaaagagagaggggctgccttaaccagctgtg

SEQ ID NO: 821639 - DNA, 99 bp, Homo sapiens
tacatttgtgaaagtcagtttctgaggaatttcatcagcctacaagtgtaaggaatccagaacttgaacgaaacggactctacccggcctacactggac

SEQ ID NO: 821640 - DNA, 100 bp, Homo sapiens
ggactgattaaaatagaatggcctaattggaaagaatttcaggatcaccggtttctcctgcttcatccagaatgcctccaactcaggccgaaagtgttat

SEQ ID NO: 821641 - DNA, 98 bp, Homo sapiens
aaggagaaacctgtggaaatgcagaaaagcttgcagaatatatttgttccagctgctctttggcgtaaattgcaatcgattagggatcgtttctcaga

SEQ ID NO: 821642 - DNA, 98 bp, Homo sapiens
acggaagaaaaggtctggccggttatacattggctcttcaaagacgttcacctcatcagagaaatccctgactcctttgcagtggtgtagacatgtcc

SEQ ID NO: 821643 - DNA, 100 bp, Homo sapiens
agccatctgtgccatcatcgtggtagttattgtaaatttggggatattccctgcccaaaaaattcctggaaaattgactagtattaagtgtgagtaaaag

SEQ ID NO: 821644 - DNA, 100 bp, Homo sapiens
tactacttttcaaaagagaccgaaggaagaggaatgggatccagaatataccccaaagagcaagaagtacttcttgtttggacatcacatttcacagtca

SEQ ID NO: 821645 - DNA, 100 bp, Homo sapiens
tttcacttcatggatcagttatgcgccattcacttttgaagggaatttctgcccagatagtgtctgcagctgctcttgcagccaatgccggaacaggatt

SEQ ID NO: 821646 - DNA, 100 bp, Homo sapiens
aacaattgcctgaaagtgaaagcttcaaactgatccagacatttaatgtggatgcaccatgccagaccgtggaagatttaacgaatggggttgtgatggc

SEQ ID NO: 821647 - DNA, 141 bp, Homo sapiens
caactgtttgaaaaacagctacaactatatgaaattcatggagctcagaaaattgctgatggagtgggatggggaaagacaccatagtcataaaagaagaaagcaaaaaatataaatgaagtacttgtacctatattaatt

SEQ ID NO: 821648 - DNA, 123 bp, Homo sapiens
ttcagtgtgccttgaactctatgagtctgatgggaagaactctgccaaagaggaaaccaagtttgcacagcttggtgtgtgccttgcctagtttcacttgatactcttcaggaattatgtaga

SEQ ID NO: 821649 - DNA, 98 bp, Homo sapiens
aatgcaagtgagcatggatatcccagatatccttcgagccaagaggacatctgaaatctatagccagacttatgaaaatatgcatcagtttaatactg

SEQ ID NO: 821650 - DNA, 98 bp, Homo sapiens
tagacaacaagcagcctattatgcccagacaagtccccagggaatgccacagcatcctccagcacctcagcgttctgccctaggtccaaatgttacca

SEQ ID NO: 821651 - DNA, 100 bp, Homo sapiens
acttgaggaacaggagaaaatggatttaaaaacaagtagagaattatgtagccgtttagttttgcagaacactgaaatctatggactctaaaatggactt

SEQ ID NO: 821652 - DNA, 100 bp, Homo sapiens
tatgctcaagggaatctcgtggagtattactataagatgaaattttttacaaagtgtgttgcattttccaaaagttttcatacagtctcggggttttaaa

SEQ ID NO: 821653 - DNA, 100 bp, Homo sapiens
tctgatggaagagagctctgtctggaccccaaggaaaactgggtgcagagggttgtggagaagtttttgaagaggaatacatggactccaataaatacat

SEQ ID NO: 821654 - DNA, 113 bp, Homo sapiens
tgataaagcctgtcggctgaaaattcacctgcggagccatacaggtggcaatgcagtggtggatggttgtggcaaggcccagaacagcacggagctcgctgcagaggagtaca

SEQ ID NO: 821655 - DNA, 101 bp, Homo sapiens
gctaccttgagaatggagcgaggagccaaggagaagaaccaccagctttacaagccctacaccaacgtatgacatgatgggaagaaatcagactgctgtga

SEQ ID NO: 821656 - DNA, 101 bp, Homo sapiens
tcccaacatgttctacatcgatcctgagaaaggagacattgtcactgttgtgtcacctgcgctgctggaccgagaggcaaccactgagaaaacggaaccga

SEQ ID NO: 821657 - DNA, 100 bp, Homo sapiens
ctcaacaccctgagtgcggatttctgctatgatgacaggtttctgaaggattgtcattcttgcatagcagtgtgaaaatggtgcatggaaatatcactcc

SEQ ID NO: 821658 - DNA, 98 bp, Homo sapiens
aaaggggaggttacgcagcaaaccatccagaagcaaacggggattcagcgtccgatcctttggaacagggactcacgtgaagcttccaggaccagctc

SEQ ID NO: 821659 - DNA, 100 bp, Homo sapiens
agagacgccggccgtggacatcggggcagctgacctcgcccacgcccagcagcagcagcaacaggtggaagcaagaagcaagttttctcaggtatttgcc

SEQ ID NO: 821660 - DNA, 100 bp, Homo sapiens
ggacggattcgattcaacggggttccggaccgcgctgcgctatggagcagagcctgccctcgcaaaacccgatcttgaagaatatcaccgactacctgat

SEQ ID NO: 821661 - DNA, 154 bp, Homo sapiens
tggtgctaagcaggcctcatctcagagctgggtgccaggctgaaggatcactgaggaaggggaagtgggcaaagcagggttgggggatccagctatctgtaattgtgaagtgaagaggatgtgactgccaggtaatgctaaccccgaatccttg

SEQ ID NO: 821662 - DNA, 117 bp, Homo sapiens
ggttaatttccaaaatggaatagaatgtggtggtgcctatgtgaaactgctttctaaaacaccagaactcaacctggaaacagagcaaatgcagcgttacaatcaaagacttattga

SEQ ID NO: 821663 - DNA, 100 bp, Homo sapiens
ggaactccaaagacattgtcaaccgattctattcagtaccaccttcagatggaggataagaatggacgactcagattgatggacaacttttcttaattaa

SEQ ID NO: 821664 - DNA, 98 bp, Homo sapiens
cctcacgttctttcgcttttttacctgccaatcaaactgctacaagacaacaccctgatctggcatggacatgtctgagcagagggcggggtgcaggc

SEQ ID NO: 821665 - DNA, 100 bp, Homo sapiens
gtatgcagtcccccaggatacagggtcaaaggagagcacaaccatcgcagttggaagcccatggggcagatattatggtgggaatgggatattcacaaga

SEQ ID NO: 821666 - DNA, 100 bp, Homo sapiens
ggaacctgctgtatctactcaagagtggaagttttcacagctgagatctgtatctgtggacctgaatgttgatccctcgcttcagattgacatacctgat

SEQ ID NO: 821667 - DNA, 99 bp, Homo sapiens
ggggctctggacgaccatggagaagagagccttgcaaaggaccatcgcatgaaacttatgcaacaacaacaggaagtggctggactctctaaacaattg

SEQ ID NO: 821668 - DNA, 98 bp, Homo sapiens
cgctggcgggggtcgtgagggagtgcgccgggagcggagatatgtattggtaaaggttttcaaggtgtcatgaaaagatggggatttaaaggccagcc

SEQ ID NO: 821669 - DNA, 98 bp, Homo sapiens
gccacaaaaaatggacttgactatgcactcagatcactccaagaactgaggcccctgtcagcagtgtcagtaatagtttggagaatgccctgcacaca

SEQ ID NO: 821670 - DNA, 100 bp, Homo sapiens
ctcctacgtttacctgtccatgatgaggaaattgaggcacagagattaactaatctgaaccagataatgccataagtagtagaactgcgatgcaaacttg

SEQ ID NO: 821671 - DNA, 99 bp, Homo sapiens
tggtaccgagcggagaggagatgcacacggcactcgagtgtgagtgatggaatggggagaagatattaaagcagtttcaaaagatgaagcagtgatgtt

SEQ ID NO: 821672 - DNA, 98 bp, Homo sapiens
gctgcatagtttcggtcatctaaaggaggttttaaacagtataacaggaatcattgtagtcaatcattttccagttctcagccgctcagttgtgatca

SEQ ID NO: 821673 - DNA, 100 bp, Homo sapiens
gtcatctccctgctggagcaagaggcagagctgtgggcggtggagtctagacttccccaaggcgtgtacccagatatcaacatggcaggagagcccaaac

SEQ ID NO: 821674 - DNA, 101 bp, Homo sapiens
cattgcctttcttcgtagcacctttgctgtattcacacaccttcctgactacaaatccctccaggatatcattgccatcctgggtatggatgaactttctg

SEQ ID NO: 821675 - DNA, 100 bp, Homo sapiens
gttcaagagaataatcatctcagttttgatcccctggcatcatttattctccgtactgatcactacatcatgcaattctgtggtgttcttggtcacacat

SEQ ID NO: 821676 - DNA, 98 bp, Homo sapiens
gagcacgtcatctccatcgagggattgaaagaaggtggcaagaggaagaagcagaagcagagagaggagtcgaagaagaagaagtcgaccaaaggcaa

SEQ ID NO: 821677 - DNA, 101 bp, Homo sapiens
tgatttctatgagaagtatcgtaacccccaaagagaaaaagaaatgatgcaattgtatatcagaattccagaggggtgactaccatattgatgtctgtatc

SEQ ID NO: 821678 - DNA, 98 bp, Homo sapiens
tgggtgtaggggccgagtacgcccgggtggtgggatctgaatacacacgctcaggagcatctatcggctgcacgccaacatcaacacaggcgaagatg

SEQ ID NO: 821679 - DNA, 100 bp, Homo sapiens
gatataccaaaattggaaggagatagaaattaagctgctcagcaaggaactgcggagcttcctgacagctcttgtatcactgctctctgtctatgtgacc

SEQ ID NO: 821680 - DNA, 100 bp, Homo sapiens
gaccctgagactcccctaaaggccagaaaggacacaggcctgtactaccaccggtacctccaggaggtcatcgatgtactggagacggatgggcatttcc

SEQ ID NO: 821681 - DNA, 100 bp, Homo sapiens
gcgtcatgagatgcctccacacatctatgctatatctgaatctgcttacagatgcatgcttcaagccaaaatgaagtttaatccctttgtgacttccgac

SEQ ID NO: 821682 - DNA, 117 bp, Homo sapiens
gagcaccgtctcccagtacgaccgggacaagtactggaaccgctttcgagacatccaacttagaaataatgtttcattcaagataaggctcgtggcttaggagattgtgacctggct

SEQ ID NO: 821683 - DNA, 100 bp, Homo sapiens
aagatgcgcttggcttgcggtatccactgtcttctctcatgtatacagtacaaaattggacagctgtacatgatcagcaaacacagccatgaacagagtg

SEQ ID NO: 821684 - DNA, 98 bp, Homo sapiens
cataatcatagaggcaagtgggggaggagcgttccttgtcctccctctgcacaagataatctggagctttcaaaatgtttgccaaagcaaccaggaat

SEQ ID NO: 821685 - DNA, 98 bp, Homo sapiens
ggactgatgaagaaagacaggagatccggcagcagatcgagatgaagctttccaaatcctgaggaggatgaaggggctggccctggaggccgagagtg

SEQ ID NO: 821686 - DNA, 99 bp, Homo sapiens
gccaggactgtgatggtacaggaagggaacgtggaaagcgcatacaggaccctaaacagaaatttaagatccgcattgaagacccaccccgcagaaagc

SEQ ID NO: 821687 - DNA, 100 bp, Homo sapiens
tgagtgacgagtttgtggactcctttaaggatggatagaatgacagaagatgctcttcgcttgaatctgttgaagcggagcttggacccagcagatgagc

SEQ ID NO: 821688 - DNA, 100 bp, Homo sapiens
aggattccaagtaactcttatttggcactactgcagtcttcagttaagcaacaagtagaagctattgaaaaacagtacatttctgcaattgagaaacagg

SEQ ID NO: 821689 - DNA, 98 bp, Homo sapiens
gttctggaagcagcaaaagcataggcaggctttcaaaaacagctgaagacttacagtgagaaactggacaaagagcaagcagccctcgagaagataga

SEQ ID NO: 821690 - DNA, 100 bp, Homo sapiens
gaatattaatctttggagagacatcctatattcctttcagccgattcgaagacagtctcttacacctcctcctcagaacactattacatgggaagaatat

SEQ ID NO: 821691 - DNA, 98 bp, Homo sapiens
gtttttatccatggatgacttgcttgggctgttcggctcttgaatcccagcgatgaaaccaggaactcactttcccgggatgccgagtctccattcct

SEQ ID NO: 821692 - DNA, 100 bp, Homo sapiens
tgcgtcaggtcacccagcagagatcagcaatccttggctcactgaggaggtttggttcctaaaagtaaagctttagaggccaccaaattggcaattgaag

SEQ ID NO: 821693 - DNA, 99 bp, Homo sapiens
ttgtgcaagaggtactgtccatcaaacatcttccaccacagcttagaggtgctgatattcgtggcttcagtgctcctaggacatttggccttacactgg

SEQ ID NO: 821694 - DNA, 100 bp, Homo sapiens
cctgaccacccgtgccctggaccacgcccagccgctgctcgagcacctgcagccccagcaaaccagccctgagcaaaggggttctgaggtccataccaag

SEQ ID NO: 821695 - DNA, 101 bp, Homo sapiens
cggctcccgcaccatggaggaggacgacagctacgatgaaggatttgggggcagagcacttggcaggtcatgaaggggtccaacttctcgggttgttgaac

SEQ ID NO: 821696 - DNA, 100 bp, Homo sapiens
gccgtccacgcccattgctcaccgaggacccagctcaagtttaaacacacctgggagcttcagacgtggtacatgtgaagattttttggcagcttagcgt

SEQ ID NO: 821697 - DNA, 98 bp, Homo sapiens
ggcgaggggggcggccgcctcaccggtgtgaggtgggcacagatagctggtcgcagtgcaatgacacacctgtgaagtttgctcgttttcctgtcact

SEQ ID NO: 821698 - DNA, 98 bp, Homo sapiens
cttcctcgctgcagcggccctggcgggtgccctggctaccatggaccatcctgctggtcagcactgcggctggtgatttgatgaaggctgctgcagga

SEQ ID NO: 821699 - DNA, 99 bp, Homo sapiens
cgacagccaggcccgggagaagaagccgctctgtgacccacctctgaatcccacaaaactgcaccagagagccgggcgcaagatgaaccagcaccctgt

SEQ ID NO: 821700 - DNA, 126 bp, Homo sapiens
agattcaatgaagtggccgcacagtatagtgaagataaagccaggcaagggaaactggcgatggaatatgagaggagccctctggaaagaaaaggacagaccctgtgctttcatgaaagtgaagat

SEQ ID NO: 821701 - DNA, 100 bp, Homo sapiens
agatcatgatgtttaagaacatgacgccgtcacccttcctgcgattctacttaggatcagtggacgggcctctacctcatcctcgatggtcagctgaggc

SEQ ID NO: 821702 - DNA, 98 bp, Homo sapiens
gggattccacctgtgcccaccctggcagcatcccacctcctgagtcctctcggcacccagcaaggaaaatgttggggcttttcaggaagcataataag

SEQ ID NO: 821703 - DNA, 100 bp, Homo sapiens
gagaaggtgtgcatggatctgccaaattttatatttcagatttgtggaagacctgtccacgctgagtttatagcaactgtcaattacggttcagattttc

SEQ ID NO: 821704 - DNA, 98 bp, Homo sapiens
agaagttcaagcagcagaaatatgagagtttgctctccaaagctcggggaattgattccagctctgttaaactccggggtagttctctcttcatggat

SEQ ID NO: 821705 - DNA, 100 bp, Homo sapiens
ctgcggggcttccctgcggctggagtaagcctgcccctggggtctggcagccactgcagcccggatggagccccgcaggtgctgtcagaggcggaggaga

SEQ ID NO: 821706 - DNA, 100 bp, Homo sapiens
caaaattctgaactcaggacttggcaacttgaagtacatctggattccttatgtgtgcatgttagcagcatttggtgtatgttctcccgaactttggatg

SEQ ID NO: 821707 - DNA, 98 bp, Homo sapiens
ccggctggatgggtcagaattgtgacataaggcactgaccatccgtgcactgccaataacccagagagctgctccgtttcactttcaccccaggactt

SEQ ID NO: 821708 - DNA, 100 bp, Homo sapiens
ttctaggaaatgaagagacaaaaagagagtatgacctgcagcggtgtggtaattgtcatgagaaaaccctggacaacagccatgacaaacagaaatattt

SEQ ID NO: 821709 - DNA, 98 bp, Homo sapiens
agcagtggtcgaatccagtagaaaactggtcaaggaagctgttttccctgatgaatttcacctccagactttgaatccttttcttcgggcctgtgctg

SEQ ID NO: 821710 - DNA, 99 bp, Homo sapiens
gaatggtcagaaaccctccataacctgaaggacattgtgacaaatgtttcccccagaatcatccggggaaccacctctggccccatgtatggccctgga

SEQ ID NO: 821711 - DNA, 100 bp, Homo sapiens
caagaagataactatccaaatagtctatgtataaaagtaaatgggaagctatttcctttgcctgttgaggaacaggttagcaccactgagagagtgtttc

SEQ ID NO: 821712 - DNA, 100 bp, Homo sapiens
ctgaagatttcctggttggagggacagccccaggatgccgtgggccgcagccactcaggactgtcaaagatgacggagggccgccgatgtcaagtacatc

SEQ ID NO: 821713 - DNA, 100 bp, Homo sapiens
gactgtggcggcttcggcggctcaggttgtggtagaggcggaggctcaggcagcttgagattcatgcccgaaaccaaaatgaaataatttttgggctgaa

SEQ ID NO: 821714 - DNA, 101 bp, Homo sapiens
tgtggaagaaaatcaagaaagtacacctgttgtcattcaacaagaaaccactggcaccccacgctcagagtcacccaccgaccaagaaaccaccggcgtcg

SEQ ID NO: 821715 - DNA, 98 bp, Homo sapiens
gactatgaagggttttgaatatatcttggctaagctgcaagatttttcggacgccgcccgatactacattccctgagcccacctgcctgtcagcatca

SEQ ID NO: 821716 - DNA, 100 bp, Homo sapiens
ccctcgcctatgccttcagacatcaccagccagcaagaagtctatgtgccccaggatcctggattacctgaggaagaagagatcaaggaaaaaaaaccca

SEQ ID NO: 821717 - DNA, 119 bp, Homo sapiens
tcctcctgaaggtggcggccagcgccctgaaccgggcggacttaatgcagaacgtaaaacagcaggggccgatcctgacaaagcacggcaagaacccagtcatggagctgaacgagaag

SEQ ID NO: 821718 - DNA, 100 bp, Homo sapiens
gcccgatccaagaaccttctggactaatgatgatccaggtgctgaaagatgggcgtttggtaaacaagaatggatcatctgggcctatactaacagtgtc

SEQ ID NO: 821719 - DNA, 100 bp, Homo sapiens
agaggaaggcgatactctcgctcacgcagcaggagcaggggacgaagtgaatctgcatgtcggttttatagtcagcaaatgaaggggaaacaactagcaa

SEQ ID NO: 821720 - DNA, 100 bp, Homo sapiens
ggccctgagtcaaagaagatgcctcgaactaaacaaattcatcccagaaatctaagagcatgacgacagagatgatggtgtggattattgggccaaaaga

SEQ ID NO: 821721 - DNA, 99 bp, Homo sapiens
ggacaccagcctccaggcccagtgccaggagaacccccatcaaaggaagacagtgtggagcagataaggtcccactctatgaccagtgggaggatgtga

SEQ ID NO: 821722 - DNA, 98 bp, Homo sapiens
acagacatcataaataatgaccatgaaaatgtaaaatatcttcctggacacaagctgccagaaaatgtgcaacctcaagcccagcagcgaagagtcac

SEQ ID NO: 821723 - DNA, 98 bp, Homo sapiens
agatgagacgagaaagaacacgctttgttgcttctaaacctctggaggaggagttttaaccgtgattggagataccacaaagaagaacgagtatggat

SEQ ID NO: 821724 - DNA, 100 bp, Homo sapiens
cttcgttccccgccaaccgcaaccattgacgccatgtcgggttattcgagtgaccgagaccgcggccgggaccgaggaaaatgacagatggcgagacctg

SEQ ID NO: 821725 - DNA, 100 bp, Homo sapiens
aaagtgcccttgtgaaagaaaaagagctgtcaatcgaacttgcaaacatcagggatgaagttggggtctctctttttggcatgtcggccctgttactccc

SEQ ID NO: 821726 - DNA, 98 bp, Homo sapiens
aacacccagaatgaactgatggagaggtctggaacaaaaagaatgcaaatgaaaaaggaagaagccagacttctaagcttcctccaagatttgccaaa

SEQ ID NO: 821727 - DNA, 98 bp, Homo sapiens
ttcacctgagccacctgaacagatttcctgcccggggccctcatggacggttggatcagggccgaagaaatccccggcttcctgactgatgaagagtg

SEQ ID NO: 821728 - DNA, 99 bp, Homo sapiens
gtcgagcacataacggggttcgggtgtctcgtgtgtgaacatcacaggaagaaggtagataatgactataatgcccttcgagaaagactcagcaccttg

SEQ ID NO: 821729 - DNA, 100 bp, Homo sapiens
aatcattcacttgctttgcattgaacccatgccacacagtgccattgccaaaaatttacctgagaatgaattagcttaccgaaaggagatggtgagagct

SEQ ID NO: 821730 - DNA, 98 bp, Homo sapiens
agcaatcacagagactcggagagcatcactggcaaccactgagaaaacggaaccgaatagtcaagaggacaagaatgatggtggaaaatcaagaaaag

SEQ ID NO: 821731 - DNA, 100 bp, Homo sapiens
tggagttgctggtgttctatactggaagaggcatgccagaggtagagcagcctgactggctcatggagaaagcctacctaagaatgaagccgggacccgg

SEQ ID NO: 821732 - DNA, 98 bp, Homo sapiens
taactcatatatttaacccccctccaaaaaggcatccgcttcgatcctgaaattccgcaaacactacgactagagtttgctaaggcaaacacgaagat

SEQ ID NO: 821733 - DNA, 98 bp, Homo sapiens
tatgatgaaccaatcttgaaacacctgcaggatattaaagtgaaattttctgaccctggacagcctatgtgaggaggacatgtaccgtgctgcagatg

SEQ ID NO: 821734 - DNA, 99 bp, Homo sapiens
acccaggctctgtgaccatctttggagagtcagcgggaggagaaagtgtctctgttcttgttcctatctgacccacgaagccagtggcttggatgaaca

SEQ ID NO: 821735 - DNA, 98 bp, Homo sapiens
gaagcaatcctcccacttcggcctctcaaagtgctgggatatcagacatgagccacctgccatgcttggcctatagaatggatcttggagaatgtctg

SEQ ID NO: 821736 - DNA, 98 bp, Homo sapiens
agaattggccaaagaagttgagaaaatgggagcagttttcatggatgcccctgtttctggtgttatataagtttggagagacagtttctattgttttt

SEQ ID NO: 821737 - DNA, 100 bp, Homo sapiens
ttaattgtgggttgtggcctacaaatgttccagcagctctcaggcattaacaccatcatggatcattttggatccaaacacccaaaatattctgatacac

SEQ ID NO: 821738 - DNA, 99 bp, Homo sapiens
gtcaatggagcagaggcggggaaggagtcacggggcgcgcacgccggggaagactacaagttccaagatgagatgggattctccaacatggaagatgat

SEQ ID NO: 821739 - DNA, 98 bp, Homo sapiens
tttccagcaggctgcagatacgagtggacaatctattcttattctgagaaggaacttatatgccacaatcagttctctctctttcttgttggctctgg

SEQ ID NO: 821740 - DNA, 98 bp, Homo sapiens
tggcatccaaatatccagattttaagcagcatgttcagataaatctgaatggaagagtgagatgcagtggcagaacgtggagcacgttggtgaccaga

SEQ ID NO: 821741 - DNA, 100 bp, Homo sapiens
atacatcatccctgtatcgaattcatccctgtataatcctgcccttacacctgtgctcctatacaagattaacattcaaattaaacaaccaccatgtcga

SEQ ID NO: 821742 - DNA, 98 bp, Homo sapiens
ccgtttcctgccttgctctttggaccacattgtcaattcacaccgatctcagtctgtggtagaagctgggaccctgaaacatgaggagaagggagaga

SEQ ID NO: 821743 - DNA, 100 bp, Homo sapiens
agaaggttcaagatgtaaagaagactattcagaaaaagatgattgacgctgaattccagagacgctgtaacactctgatttcattgattgagaaagaaaa

SEQ ID NO: 821744 - DNA, 100 bp, Homo sapiens
cagcttccaaagagatacagggcagaggaaaatgcaagaagactgatggagcaggcttgcaatattaaagtccttggtaaatcctgcaagccaatcccag

SEQ ID NO: 821745 - DNA, 98 bp, Homo sapiens
gggcgccaccgctgccacctccgcgaggcatgtcagagcgggagcgacaggtgatgaagaagctgaaggaggtggtggacaaacaacgcgacgagatc

SEQ ID NO: 821746 - DNA, 100 bp, Homo sapiens
gctgcccggcgagctggccaagcacgccgtgtccgagggcaccaaggcggtcaccaagtacaccagctcgaagtactctgtggatatccccttggacaaa

SEQ ID NO: 821747 - DNA, 98 bp, Homo sapiens
cagcatcaaaatacatctactcatattgagagctgtcgacagttacgtcaacattgttgacctcctgtactggagagacattaagaagactggagtgg

SEQ ID NO: 821748 - DNA, 98 bp, Homo sapiens
gagaccccgaaaacggaagcgcagggagaaggaagaggtgtttgaaaagtttgcttgcctaaactggacttgaagcaatttaaactactggagatctg

SEQ ID NO: 821749 - DNA, 100 bp, Homo sapiens
ctcattgttgcttcccctaagatgttactcaggctcccgaatttgccattttcagtggaaaacaagtggtcgttactagctaagatgtgtttgtactttg

SEQ ID NO: 821750 - DNA, 99 bp, Homo sapiens
tgggcaggagaggcctgttgctgccgtctcgactcgtggatggaattactctgcttaatgtaagcaagctgaacattttgaagcttgctcctggtgggc

SEQ ID NO: 821751 - DNA, 100 bp, Homo sapiens
tctgcctcccggttctgccgcgcgggccctgcatgtggagctgccgtctcagcagatgccagaagtgggtggagaactgtaggagagcagacttagaaga

SEQ ID NO: 821752 - DNA, 100 bp, Homo sapiens
cactttacagaaacagtgtgtaccattccgacgttacaatggtggagttggcaggtgtgcgcaggccatatacaaacagttcgacactgaccgatcaggg

SEQ ID NO: 821753 - DNA, 100 bp, Homo sapiens
gaacatgggtgaccttcggaggccagatcaccgatgaggagcagtttttgcaagaaaggatcaaagtgaacggaaaagctgggaaccttggtggaggggt

SEQ ID NO: 821754 - DNA, 98 bp, Homo sapiens
ttccccagaccctacccctatccccagtggagccggagtgcgggcgcgccccaccaccgccctcaccatggtgatttgatgaaggctgctgcaggaga

SEQ ID NO: 821755 - DNA, 100 bp, Homo sapiens
acggacgggccaacgccgtggccagctccactgagagaaccccagcgggaatgcatatcagtccacgtgggccaagcgggagttcagattggcaatgcct

SEQ ID NO: 821756 - DNA, 98 bp, Homo sapiens
gggaaaccactgtagtctgggacaagataactggagagcctctctacaatgctgtgggtttccgcagacatgcagctccagttacaagaaggcagttc

SEQ ID NO: 821757 - DNA, 100 bp, Homo sapiens
aggatgctcaacctttacttcttttcggcatagatcaagaagctggtcccacggaaagtggtatctcgggaatcagaaaacccgcctagtgccaagcaac

SEQ ID NO: 821758 - DNA, 98 bp, Homo sapiens
ccttatattcctgatgtgagcagtccctctgacacatccaacttcgacgtggatgacgacgtgctgagaaacacggatgacattattgacgatgtgga

SEQ ID NO: 821759 - DNA, 100 bp, Homo sapiens
acgggccagccccgccgccctcgcaacctggcagccgccgccgtggaagattctcacatgcttaacactggaaatgatttgaaagaaaatgtcaaaagcg

SEQ ID NO: 821760 - DNA, 99 bp, Homo sapiens
gagaattccgcagcccacacggtttattgggcacttcctagcaccaggcactgcaataagaaatggaggttaaaccatgaagaaacatggctctagccc

SEQ ID NO: 821761 - DNA, 99 bp, Homo sapiens
tggcattacgtagaatccattgatcctgtcactgtcagtataaactcatggattgaactggaagggaaaaggccgaggcatcagcgtgtgaagaccgca

SEQ ID NO: 821762 - DNA, 100 bp, Homo sapiens
ttgctgctccgacgcggaccccagtaccaaggatttccatcaccaaggagtaagaagaccttcgggcagagactgttgggtatgctcccttcagaaaaca

SEQ ID NO: 821763 - DNA, 100 bp, Homo sapiens
ttcctaaaatagagctctcaaaacctggctgttttccttcagagcactggcctccaattccaaaactgttacatcaggttgtggagcagttacaaaaggt

SEQ ID NO: 821764 - DNA, 100 bp, Homo sapiens
tggccatcactatacacaacgttccaggtgaggtcttgcccgtgagcgtgacagccactgcctgaaggaccgcctggcccggtgcaccatgcattgcaac

SEQ ID NO: 821765 - DNA, 100 bp, Homo sapiens
ttggaaagaggtcaaattcaattaaaaggaatcctaatgcaccggttgtcagacgaggttggctttataaacaggtattccactttaggccgggtgcggt

SEQ ID NO: 821766 - DNA, 109 bp, Homo sapiens
gcttgaccgcatcgtgaaggaatctggaggaaagctgaccaggcggcttgtgaacagtcagggtgttggaactcgccataaggcattgatcaggattatggtttcccgt

SEQ ID NO: 821767 - DNA, 100 bp, Homo sapiens
gtgggtgtgacacagaattttgcagcaacagttctcagaaacaccaagggcaacgtcagcgatacagtgtggaaatgtccatcagacacctgaaaaagac

SEQ ID NO: 821768 - DNA, 100 bp, Homo sapiens
tgaatgactccaacgaattaggtggtctgactaccagtggctctgcagaggtctgtttatgatggtgaagaacatggacgtttcatggagaagcttgaaa

SEQ ID NO: 821769 - DNA, 100 bp, Homo sapiens
gaagctgaagtcgttttttaaagagtatggacaaatagaatctgtacgatttcgttctctgtgggtaattccagaattgattggccataccattgtcact

SEQ ID NO: 821770 - DNA, 100 bp, Homo sapiens
acacttgagcttggggagccaacttccatgatggaagaagagggagagtttacagatgcttcctcagcaacggaaagccatagctaagttcaaggagcca

SEQ ID NO: 821771 - DNA, 98 bp, Homo sapiens
tcagttgcttgactcgtttggatcacaaccgagctaaagctcaatgggggcccctgaagccactgatggaagccacactaccggggcatcggaccatg

SEQ ID NO: 821772 - DNA, 100 bp, Homo sapiens
gcaagcccgagcaatatcaaggcccagtttagaattctcctaccaaaaaccatctcaccaatccctgttaccctcgggattatagcatcagcttcaccat

SEQ ID NO: 821773 - DNA, 100 bp, Homo sapiens
tctgtcacgccaacgtcatccgctacatcgtgtgcaggtgacctgagcatctctgcagaccgcctgagtgagaagcgctctcccaacgactttgccttat

SEQ ID NO: 821774 - DNA, 100 bp, Homo sapiens
ttggtcatgaaagagattccttgcagagacagctcaacacggcacttccacagctgctctgttaaaagcgaaaatgaaacaattgcctgcggcaacagtt

SEQ ID NO: 821775 - DNA, 100 bp, Homo sapiens
gacaaatcaaattagtggttttgtgtgggaacctgcccttccgacggatctgcaagcgcttcggggcggatgtgacatgtggagagatggccgtctgcac

SEQ ID NO: 821776 - DNA, 100 bp, Homo sapiens
tcatgcagtggtacaaggaccagaagaaactgcaccggaaatgtgcctaccaggggctgacctgctggaagagcatcttggtgaaatccggaacctgcgc

SEQ ID NO: 821777 - DNA, 101 bp, Homo sapiens
cggcttcagggagtcggaccagcttttcaaacaatacaggccatttcataattctgaatcatgtctgataacggagaactggaagataagcctccagcacc

SEQ ID NO: 821778 - DNA, 100 bp, Homo sapiens
gaagctctttgtggcttcaagaagacgataaaaacattggacaatcgaattcttgttattacatccaaagcaggttgtgaccgagattcccgacgagaga

SEQ ID NO: 821779 - DNA, 100 bp, Homo sapiens
atcaagtctcagagcagcaacatgctgacgccctatgactactcctctgtgatgcactatgggagtgtaaacaggaacatcgataagtagtgtaaaaact

SEQ ID NO: 821780 - DNA, 100 bp, Homo sapiens
tgtgattgtggaaacagcaagtttaaaaatttggaatgcaaattacttcctattttccgcagatttccagtggccccactgatcccttatccactcatca

SEQ ID NO: 821781 - DNA, 98 bp, Homo sapiens
tctgtgttgcgcgacacaagttttacagactaaaccagtgtaacctttacagatgtagagctaaaacgactgaaggatgctttcaagaggacctgtgg

SEQ ID NO: 821782 - DNA, 98 bp, Homo sapiens
cggcctgtacatcggcaacttcaaaggtgttcaccatttccaaagaactggtccctcgggtactatccaaggtgatagaagcagtttctgaagagctc

SEQ ID NO: 821783 - DNA, 50 bp, Homo sapiens
cagaacctcatctcaaacattaagagcttagaaaccaagatagccaagtg

SEQ ID NO: 821784 - DNA, 100 bp, Homo sapiens
agagcaacatctttcctcaccccaagcactgctcagcacgcaggcatgtgaggaagctgggcttaaaggagactccagcaaatggagagacagaccacag

SEQ ID NO: 821785 - DNA, 51 bp, Homo sapiens
cagtatccttggggcactgtgcaggaaggacagaataacgggctcccagat

SEQ ID NO: 821786 - DNA, 100 bp, Homo sapiens
ggtttgacgagcacaaagaattatggtaaaaccatccttacaaagattgtcactgctgttccaagggcacacgcagagggatttggaattcctggagagt

SEQ ID NO: 821787 - DNA, 98 bp, Homo sapiens
gccgcggggctggccgccatgcacaagctgcacttcctgcacaggagtgagctgagtcgacagaaacttcatacccaagagctgctttctcagctgga

SEQ ID NO: 821788 - DNA, 98 bp, Homo sapiens
ccgcgccgcggccgttagtcatgtcggactttaagaaagaaaggccttaatggttgtgagagccctgatgctgacgattactttgagcacagtccact

SEQ ID NO: 821789 - DNA, 98 bp, Homo sapiens
aacatatgccagttcctcgtagagagtgagctcagcgatggcatcgcgatgctggtggcaggcaatgaccgcgtgcaagcagtgatcacacagatgga

SEQ ID NO: 821790 - DNA, 100 bp, Homo sapiens
tgatatcgtccatctccctagagattgcatttgcacacgattcaactcgtgtgatccagtgttacattcagtatggtaatgaagaacagagaaaacaggc

SEQ ID NO: 821791 - DNA, 100 bp, Homo sapiens
tatagcctcgacctcctggactcaagtgatcctcccacctcagtctcccgagtagtcaggactacagagagattctccctgagaaacaagcagaattttt

SEQ ID NO: 821792 - DNA, 98 bp, Homo sapiens
cttctaaaccaacactcctagccaatggtggtcatggagtagaagggagcgatactacagactctggctcctcctcctcctcagaagatgaacgaccc

SEQ ID NO: 821793 - DNA, 100 bp, Homo sapiens
tgatgaagatgatgatgatgaagatgatgaggaggaggaagaagaggaggaggaagagtcttttatgacatcaagagaaatgatcccagaaagaaaaaat

SEQ ID NO: 821794 - DNA, 100 bp, Homo sapiens
cttccgctgacgtggctcttgccctggcaagtgctgcctcccaaaatggtcatagatgagatagcagggaacttcagcagagcagttcatggtttgcaag

SEQ ID NO: 821795 - DNA, 100 bp, Homo sapiens
gcgggaaaaagaggccaaagatctgacagaactggttcagcggagaataacatatcttcaggttgggaatccacgtgttgaacttaccctctcagagctc

SEQ ID NO: 821796 - DNA, 98 bp, Homo sapiens
gtttacagtgcagtcttatcgaaggatgtgcatgaaggacagcctcttctcaatgttggggaatggcggtcaatgtgtattctacctcgataacccaa

SEQ ID NO: 821797 - DNA, 99 bp, Homo sapiens
aggagttcagccgcgctgccgagaagctttacctcgctgaccctatgaagctatggagtgctgctgtgggaactgctcaccggagaagtcccctatcgg

SEQ ID NO: 821798 - DNA, 100 bp, Homo sapiens
acccgaggggctacacagtatataaggtcaccgcccggccttcaataccccaggtcccaaactacaggctgtcgatgacgatcccagactggctccaggc

SEQ ID NO: 821799 - DNA, 98 bp, Homo sapiens
aatgaagtaaagcccacagagatctacaaccttggagcccagagccacgtcaaaatcactactggttacaacctggaagatgaccgctgtgagtgtgt

SEQ ID NO: 821800 - DNA, 100 bp, Homo sapiens
aacctgtacacattttaaagaggtcttttgcaagaactgtctcagtggtatcctttgtgtggctgatcagtgtcacggcttaagagaactagccctgaac

SEQ ID NO: 821801 - DNA, 100 bp, Homo sapiens
tttgcctccatcgtcacaggggtggaggagggacacctgactgatagtgaatgtaatcagaaacacacatccaagaaagggtcactgatagagcgcaaga

SEQ ID NO: 821802 - DNA, 98 bp, Homo sapiens
ggcgtccgagtcaacaaccgcttcgagctgaccatggtgaatccgggcagcagctcgcagccgcccccggtgacggccggctccctctcctggaagcg

SEQ ID NO: 821803 - DNA, 98 bp, Homo sapiens
agaatctgaaggtgaaaaacgagctcttcaaaaggctggacaagtttgctgctgacacaaacgtgcagatatctgatagccctttccgttgcactcaa

SEQ ID NO: 821804 - DNA, 100 bp, Homo sapiens
gtctgggtgtcccagcgagcccctgcagggacagtatggctgagggtcaggtgtgctgccagctggcctgccactcctcctgctatgatgcctgggcaga

SEQ ID NO: 821805 - DNA, 100 bp, Homo sapiens
accctaaggaaaatgattcatcatcggaagaggcagatgctctctatgaagctctgaagaatcttacaccatatgtggctattgaggacaaagacatgca

SEQ ID NO: 821806 - DNA, 100 bp, Homo sapiens
tgtggatgaagctcacaggttgaaaaaccaaagctccctgctgcataagaccttgtcagagtttgtgaagaaatatgggaacctttttagcttggagctt

SEQ ID NO: 821807 - DNA, 98 bp, Homo sapiens
tcaatatcttcacccagcatgagatctcagggaacacagaggatatccctttggtgcgctggaggcagcagtggctggagaatggcactttgcttttt

SEQ ID NO: 821808 - DNA, 100 bp, Homo sapiens
aatcaggctggagttgcaaggacccaggggatcacctaatgccagaagccacacgtcaagttcttgaggagctgactgagttgcctgtgatggtggaact

SEQ ID NO: 821809 - DNA, 100 bp, Homo sapiens
ctagcaggttcggcggccggggatgaaatctttgacatggtaaaaccaaaggatcctttgaaaatctctcttcaggatttaatcaacagtaatcaaggag

SEQ ID NO: 821810 - DNA, 100 bp, Homo sapiens
accgtctagtataagacagagcacgaaaggcatttttactgctggtcttgagagctgatgacaataacatgggcaatggctgctctcagaagctggcgac

SEQ ID NO: 821811 - DNA, 98 bp, Homo sapiens
ttgcagagctttccagcccgtttgtgaatcagcggtagttggcaaaaaaggagaaagccactaaggtacaaaagacactggacaaccatattgcaatc

SEQ ID NO: 821812 - DNA, 99 bp, Homo sapiens
tttacatacgagaatggcttgtgaaatcatgcctctgcaaaggtaggtgagctcgtgaaacaatatgaagaggagaaaatagccttttaaggaaattgg

SEQ ID NO: 821813 - DNA, 99 bp, Homo sapiens
gcaggttcaaatggctggtataattataggcaccagggtgactgtcgttcctacagttacgtgtgtggaatctccagtaaagatgaacctgactgggaa

SEQ ID NO: 821814 - DNA, 100 bp, Homo sapiens
agatcatgaaacgaggtcgccttcccagcagcagtgaggattctgacgacaatggcatagcaggacccagtgctccataaaggataatagtttccagtac

SEQ ID NO: 821815 - DNA, 100 bp, Homo sapiens
cgtgccaaaataaatgttgctatgatttgtcaaaccttggtaatgagtatggtgtcaggatttacaccactaatttctgcaggtatattttcagccactc

SEQ ID NO: 821816 - DNA, 100 bp, Homo sapiens
attactatgttagttggaataactggactcttttacactcaactaattggcatcatcacagtatcacacctgtgtatcataatatgtttgctttaatgag

SEQ ID NO: 821817 - DNA, 100 bp, Homo sapiens
gttttgctgaccttattcaccatgacttatcagattctcagaggattaaacagcaagcaacattgtttgttggagagtcccacaggaagtggaaaaagct

SEQ ID NO: 821818 - DNA, 98 bp, Homo sapiens
acagctgtggaaagaagttgcaaaacactggctggtgtgatcccccccaattcagtgcttcattttgatgtacttctgatggatatttggaattctga

SEQ ID NO: 821819 - DNA, 100 bp, Homo sapiens
aagaaatcaagtggattggcctgcctaccaattctgctcaggaatgtcagaatctggaggtttttgtaaggccagcttccttcctttactggaatttgcc

SEQ ID NO: 821820 - DNA, 98 bp, Homo sapiens
cccccctgagcccgaggtgctgacgtcgcaaaaaaattggataattctctttgtggccagatgggtttgtatggacaggcttgtccatctgtaacttc

SEQ ID NO: 821821 - DNA, 100 bp, Homo sapiens
attcagtggtgtttttctcaggtgaaaggagcagtagatgatgatgtagcagaaggagtccaatgtgctgattgctgctaacagtcagggtacaattaag

SEQ ID NO: 821822 - DNA, 100 bp, Homo sapiens
agcggccccgagtatgcttcgtttttcgccgtcatgggcgcctcggccgccatggtcttcagcggtcaaaatgcagatcttcgtgaaaacccttaccggc

SEQ ID NO: 821823 - DNA, 98 bp, Homo sapiens
tccagctccaacctggtttcataggcagtggtaatactggaacaacctcttctccaagattctcaggcaatcaaagaggcagttgctgtgggaggtgt

SEQ ID NO: 821824 - DNA, 98 bp, Homo sapiens
gctgatcatgtacaaggccatctggtacgaccagttcacctgccccgacggcttcctgctgcggcttcttggacacttaatgattgttggcaagaaat

SEQ ID NO: 821825 - DNA, 124 bp, Homo sapiens
tgctggcggaggacgagctccgggatgctgtactccttgtctttgcaaacaaacagcaattctgtggtgttcttggtcacacatttatggagtttctgaagggcagtggagattactgccaggc

SEQ ID NO: 821826 - DNA, 100 bp, Homo sapiens
taccatggaaccattgttaaccagattgtttgtaaagaatgtaagaacgttagcgagaggcagaaatgcactcggtgatggaaagagagccactattctg

SEQ ID NO: 821827 - DNA, 98 bp, Homo sapiens
ttttcttggatggttgggagcagatcgattttaccttggataccctgctttggttctccgggagatgttgcataaccactccttcgtgggctgtgtga

SEQ ID NO: 821828 - DNA, 100 bp, Homo sapiens
gtatgaagaacagtcacaggacagtttgaaaatctgaacacagttgctgagtgtctgttttctctggtcaacggtgatgacatgtttgcaacctttgccc

SEQ ID NO: 821829 - DNA, 100 bp, Homo sapiens
tgtgaacatcgaatcatggaatcccttgcatggctctcagaaaacagttcctcctgaggatttcagagaagagctggacttcctggctgactctcacatt

SEQ ID NO: 821830 - DNA, 100 bp, Homo sapiens
ctctggcgaagtttggagcccagaatgaagagatgttacccagtatcttggtgttgctgaagagtccttcattacagtttgaagctgcttgggcattaac

SEQ ID NO: 821831 - DNA, 100 bp, Homo sapiens
cttcctaggcagaatgcttggaaaggaaaccacccctactcctaatcccccgactacagaagaggagaaaacggaatctaatcaggaggttgctaaccca

SEQ ID NO: 821832 - DNA, 98 bp, Homo sapiens
gatgacgcagactggagggaggtgatgatgccctattcgacagaactgatattttatattgaaatggatcctccaggaatactcccccagttgcaaga

SEQ ID NO: 821833 - DNA, 100 bp, Homo sapiens
ccatgcttcccagagcggagacaacagcagtgagcaagatgaagatcagcttcgtgcaaagggttatgacaaaacaccagacttcattttacaagtacca

SEQ ID NO: 821834 - DNA, 100 bp, Homo sapiens
tttttagtgtcactgagctagtaagagtgtcacagaggaatgaaagctactggttgattttaaagtgcctgggcctcacaggtttggagatgtcccagaa

SEQ ID NO: 821835 - DNA, 100 bp, Homo sapiens
ccgtagtggactgagggcctgcaagagggagtgagggctagtggagggccagctgcctgtgggggctggacatcgtccaaatttgtatcctactgtgggg

SEQ ID NO: 821836 - DNA, 100 bp, Homo sapiens
taaaggagcagccctggtgtcacctatcagtaaaagggtgaaaaggaacagcctgtatttgcaatgaccggccttcgatggggatctttcagagatgctg

SEQ ID NO: 821837 - DNA, 100 bp, Homo sapiens
actgcaacctctgccttccgggttcgagtaattctcctgcctcagcctcccaagcagctgggtctacaggatcagagtgacagttgatggcgaatttctg

SEQ ID NO: 821838 - DNA, 100 bp, Homo sapiens
agtggaagctcttcatctacaacccgaccaccggagaattcctggggcgcaccgccaagagctggggagagacagcgtctggagaccatcctcagtctct

SEQ ID NO: 821839 - DNA, 100 bp, Homo sapiens
agtcgtcaacaagatggtgagcatgatggagggtgtcatccagtgtgtaatgcatcttgaagaccggttgcaggagctatacttcaaaagtaaaatgctg

SEQ ID NO: 821840 - DNA, 100 bp, Homo sapiens
cttctggcaagaggtgctgatatcaacacggtcaacgtggacggcttgacagccctgcaccaggttgctgaaaagccaggagtcaaaatgactgagcgct

SEQ ID NO: 821841 - DNA, 98 bp, Homo sapiens
ggaagtcttgaagaatagagccataaagaaagcaaagcgcagaaatgttggatttgaaatgtgaaaggaccacccacccaccgtctgtcttgtggtca

SEQ ID NO: 821842 - DNA, 100 bp, Homo sapiens
actaggaatctatgatgctgatggtgatggagattttgatgtggatgatgccaaagttttattagattctgcctgatcaatgcaggagtcctgtacctct

SEQ ID NO: 821843 - DNA, 100 bp, Homo sapiens
ctgtgggatggcaggacgggcaaagttttatggacgaggagccccctacaatgccttgacggggaaggactccactagaggggtagccaagatgtccttg

SEQ ID NO: 821844 - DNA, 100 bp, Homo sapiens
atgggactgtacgtggacccgcaaggccggagggcacgcgcgcaggagctcatgtggcctgcggctcctgtcgcctgtaagaacggagaccaacctgggc

SEQ ID NO: 821845 - DNA, 98 bp, Homo sapiens
tattctggcccaaggagataataaagttgacgacagagattattatggtaacaagcgactggaattggcaggacaggatcttcgaaatcaactatatg

SEQ ID NO: 821846 - DNA, 98 bp, Homo sapiens
attcgtctcggaaaccccgcctcttacagtcacgagatccgcaaacgattaattctgtcagacaaagggcagctggattggaagaagatgtatttcaa

SEQ ID NO: 821847 - DNA, 100 bp, Homo sapiens
caagaaggccgtgtgcgaggagtgcctcaaagtctacctgagcgcccagaatagcctaacatggcagaccagagacagcgctcactgtctacctctgggg

SEQ ID NO: 821848 - DNA, 100 bp, Homo sapiens
ataagggaggaggcagacggcaacaagatggaggaagaggaaggtgccaaagtgatgccatctgcagttttgtgatctgcaatgattcttcccttcgagg

SEQ ID NO: 821849 - DNA, 100 bp, Homo sapiens
aaaacctggagacttttgaagaagtggtcaagtccacgctggcagtgtgggtgaagtggcccatccatcccagcgccccagagcttgcgggccacaagag

SEQ ID NO: 821850 - DNA, 98 bp, Homo sapiens
ttaccttaaaccttttaagcaaggaaattgaactaagaaatggagaggctccctacacaccttttctcactgaattgatgtaccagaatctaaaggtg

SEQ ID NO: 821851 - DNA, 100 bp, Homo sapiens
gccgaacttcagggtttccaccgttcgttcaaggatgatcggctgaatgtaacagaggaactaacgtccaacgacaagacgaggattctcaacgtccagt

SEQ ID NO: 821852 - DNA, 100 bp, Homo sapiens
tacaaacaagccgtgggcccagaggacaaaacaaacctgaaggatgtgattggcgccgggttgcagcagttactgacgccacaggtcatcatctggatca

SEQ ID NO: 821853 - DNA, 100 bp, Homo sapiens
gatgcgggggctgctgcaatgacgagggcctggagtgtgtgcccactgaggagtccaacatcaccatgcagaagtggttcagctcagcctcgcccccgag

SEQ ID NO: 821854 - DNA, 100 bp, Homo sapiens
ctatcccaacggaagaggccggatggagtccgtgagatgggttttagctgccgccggagtcgagccccactgtgttctccttgcctcaaaagaaaactcg

SEQ ID NO: 821855 - DNA, 98 bp, Homo sapiens
tcccgataacttgcagactgtggcgcaactggtcttggtagcggaggcacccgaatgctgcccgggtgagatggaaatcctgtatgaatgtggaagcc

SEQ ID NO: 821856 - DNA, 99 bp, Homo sapiens
ttgaagaatagagccataaagaaagcaaagcgcagaaatgttggatttgaagggaaactgactctactctgtgatgccaagacagatgggagtttcctt

SEQ ID NO: 821857 - DNA, 100 bp, Homo sapiens
caaaatgaacacagtcactgggcctctctacatatgacatcgtgatcactacctatagcctcgtggccaaggagattcccacaaacaagcaagaggcaga

SEQ ID NO: 821858 - DNA, 99 bp, Homo sapiens
gaggattattaaaggtcagttgctcgcaggataacaaagccattgacctttgccgattgtgttggggacgaacttcctttaggatgggaaaccgtatat

SEQ ID NO: 821859 - DNA, 100 bp, Homo sapiens
agatatgcgctattgccaggtttcattccaagatgatcatgtgtctttggaaagtgcgtttacagtaagatatccccaaggctcctggcaaaatcatccc

SEQ ID NO: 821860 - DNA, 99 bp, Homo sapiens
gtccgccccgcgagcacagagcctcgcctttgccgatccgccgcccgtccacacccgccgccagtctgcagatctccaggggagcccaccagcctagtc

SEQ ID NO: 821861 - DNA, 100 bp, Homo sapiens
ggagggcagcctgcgggattggtatgacttcgtgtggaaccgcacgcgtggcatacggaaggaatcctcaacagatgccactgtaagtggggagagaagc

SEQ ID NO: 821862 - DNA, 100 bp, Homo sapiens
aatcaaactttgggcacaagtcatgaagccgacaagcccgggagacacagtgtcagaattacaaggttttgacctgtagcagagaaccaattctggagaa

SEQ ID NO: 821863 - DNA, 100 bp, Homo sapiens
gctaacaactgcccagctttgaggaagcggggaagggctcaacagccccagcaccttagaatgcagccctgggtcccagccaccatctccaggacctgcc

SEQ ID NO: 821864 - DNA, 99 bp, Homo sapiens
cccggccatggcggacaacgagaaactggacaaccaacggctcaagaatttcaagaacaaaggccgcgacttggaggccttataatgggactaatttta

SEQ ID NO: 821865 - DNA, 99 bp, Homo sapiens
aggaaagcaccatgacgtccatccatttcgtggttcacccgctgccgggcaccgaggaccagctcaatgacaggtggtccgtactgagaagaacagttt

SEQ ID NO: 821866 - DNA, 100 bp, Homo sapiens
atgaatttgtcacattctcctgccctggcgctgacaagggtccagcctccgatggaccttggggccagcttgcggtaagaacttgcctttagaagatcct

SEQ ID NO: 821867 - DNA, 100 bp, Homo sapiens
gatccatctgtcttagcaaggctgtcatcacactattgacctgttgtattggcgggacatcaagcagacgggcatcgtgtttgggagtttcctgctgctg

SEQ ID NO: 821868 - DNA, 100 bp, Homo sapiens
gggtattctacgcgcacactgccagagctcagcttcctttctggaacaactggacccaaagagcagatataatttctacagtagaatttaatcattctgg

SEQ ID NO: 821869 - DNA, 111 bp, Homo sapiens
ctatgggtcagagcagcgcacgcatgaagctgaattgggctgtggcagctggagccgaggatccagcctgatgtgtgagaagcggatattggcggcagtgaccagtgcggg

SEQ ID NO: 821870 - DNA, 99 bp, Homo sapiens
aaccgtggacagcaacatttcccacaggacacgaagtttgtcggcccttgccttggcagagctgagagcctggcccaactagagaatctgtgcaaacag

SEQ ID NO: 821871 - DNA, 98 bp, Homo sapiens
gttaatcctcaatttaagcctgatctaacccctagaaacagcacccccccaggcagcagcagcagttttcatctctggatgacaagccccagttccca

SEQ ID NO: 821872 - DNA, 100 bp, Homo sapiens
gtcagctccaacaaggagatatgtactgcgcttgcaattctgtggtgttcttggtcacacatttatggagtttctgaagggcagtggagattactgccag

SEQ ID NO: 821873 - DNA, 99 bp, Homo sapiens
ggcaggcgagattgcctgacccaggcctgctcggccctcacagggtctctcaggcagctgcagagcttcaacagtactgtatgcagaatgcctgcaagg

SEQ ID NO: 821874 - DNA, 129 bp, Homo sapiens
ggctatattccttctaactacgtggctgaggacagaagcctacaggcagagccggttacgactcactgattaaaaagagggactttttcaaatactttgcacttttgattgtgtattatggataccaag

SEQ ID NO: 821875 - DNA, 60 bp, Homo sapiens
tgtggaatcttttaactcccaagtggacatttgggagcaataaaaataagaagaaaggaa

SEQ ID NO: 821876 - DNA, 100 bp, Homo sapiens
cctctgagatatgccgtttacggcgaggatctggatgagctgcactaccaggacacagattcagatgtgccggagcagagggatagcaagtgcaaggtca

SEQ ID NO: 821877 - DNA, 98 bp, Homo sapiens
tgcgcgaagctggccaaagcctgcccagacggctcacctgtgcgggatggaacaaaagggcagctgcaatgactctccgcacggtattattgtcattg

SEQ ID NO: 821878 - DNA, 100 bp, Homo sapiens
tctcagaagccatgcccctcaggctggaacttgccctgtctcctcgcagatgagagccgagactgtctgaagctgggcccacctgctgagggagaagtcg

SEQ ID NO: 821879 - DNA, 100 bp, Homo sapiens
tcttcaacactgttattgtaaacaaagaaacagattgtctcagtttacctagctttgaaaatgccatacccatgggagagaagaaggatgtgtataaggc

SEQ ID NO: 821880 - DNA, 99 bp, Homo sapiens
acctctctaaaattgctgcctctggtggggaagtggaagatcctgataacttaagtgactctctcttttccggtgatgaagaaaatgctgggactgagg

SEQ ID NO: 821881 - DNA, 98 bp, Homo sapiens
aaggctgtgcaacgcggagcgtgagaggaagtaagactttgaccccgacgcaggcttcagtgattgccgcggatcagaagcctgagcactttggctcg

SEQ ID NO: 821882 - DNA, 100 bp, Homo sapiens
cgggaatgctgccgtggtgaagcatgaagtcacagggctactgttttccaatcctcaggacagaactgtaccgctctctttttggccagctccaccctcc

SEQ ID NO: 821883 - DNA, 98 bp, Homo sapiens
gcacttcctacacagcctgctgaagaagcagcacgaaagagagaggtccgtctaatgaagaacagtctcgctctgtcgtccaggctggagtccaatgc

SEQ ID NO: 821884 - DNA, 100 bp, Homo sapiens
cgctactggggtcgatcaggaacagaaagtgatcatgagaacggacattctttgaagtctaatcatgatcactacagatgaacccaatgtgccaacttcc

SEQ ID NO: 821885 - DNA, 100 bp, Homo sapiens
ggtaacttctgcttgtaatggaacacggaatgtggccccttcaggagagatgaatgatttcggaatcaagaatatggaccaggtagcccctgtggctaac

SEQ ID NO: 821886 - DNA, 100 bp, Homo sapiens
tggagacttcctcagtgacaccccagaggccctcatcaacgcgggagacttccacggcctgcagtgcctggtactggataggaacttcatggaatggagc

SEQ ID NO: 821887 - DNA, 98 bp, Homo sapiens
agtcaactgcgtggaagagaagctgatgcttttttcaaagccgctataagccttgttccggaagttccaaagatgattaatattgatgggaagatgcg

SEQ ID NO: 821888 - DNA, 100 bp, Homo sapiens
gatgatgatgattcagactctgatggtgatggcaaaggtgattaaaaattctggccatctcccaagagacagaatagctgaggatttcgtttgggctcag

SEQ ID NO: 821889 - DNA, 100 bp, Homo sapiens
cttttgaaggtgcaagatactatataaaggttgccacaccatttggaggttttgaaaaagcatcaagaatggttaaatttaaagttccagattttgagct

SEQ ID NO: 821890 - DNA, 100 bp, Homo sapiens
aagaattcagggatcggtctggaaactgtgttccctgcaaccagtgtgggccaggcatggagttgtctaaggcacattgcaagcaacccgtgccttgatg

SEQ ID NO: 821891 - DNA, 100 bp, Homo sapiens
tccaggccagaattagttatacccaagcagtggatgtttgtccaagactggttttcagaaaggatgcaagtggccaaagtggacttctctacagtgttac

SEQ ID NO: 821892 - DNA, 98 bp, Homo sapiens
agacctacaggtggagttggagcagtagctctgctaattgggccaaatgctcctttaatttttgaacgagtgcagtcattggagaaatcgatgaagaa

SEQ ID NO: 821893 - DNA, 98 bp, Homo sapiens
ggtcatctttggacatgtcttggcagcaggtctccaggatagctgcttatgcctacagtgcactttctcagatccgtgtggacgcaaaagaggagctg

SEQ ID NO: 821894 - DNA, 100 bp, Homo sapiens
tggaaacctcatagcagctgcctgccagaatggaagcatacagatctgggaccgaaatttgactgagtgcatcatcgacgaggactgtgggcccagcatg

SEQ ID NO: 821895 - DNA, 100 bp, Homo sapiens
ctgaagtgcgggcgcagctggcggagctggagctggagctctcggagggttgggaatccacgtgttgaacttaccctctcagagctccaagatatggcag

SEQ ID NO: 821896 - DNA, 100 bp, Homo sapiens
aaaaatcaacaccaggactacagtaaggctgaaatcattgaagtgcttggagtgcagaactgaaagaggtgtgtgtgtgcaggccacagcagcatgccct

SEQ ID NO: 821897 - DNA, 100 bp, Homo sapiens
gttcaacatcctcctggccaccgactcctacaagcaattctgtggtgttcttggtcacacatttatggagtttctgaagggcagtggagattactgccag

SEQ ID NO: 821898 - DNA, 98 bp, Homo sapiens
tttaagtggacaggagataatatgttttttatcaaaggagacatggattcactagctttcggtggtggaggctcccagaaccatttattttatttcga

SEQ ID NO: 821899 - DNA, 100 bp, Homo sapiens
tggtgctgaggttctcggatttcgggaaggccatgttcaaacccatgagattacctaaaaccagatccatggatgatcttctttctgcctgtgacacaag

SEQ ID NO: 821900 - DNA, 98 bp, Homo sapiens
cagagggacacgctggtgcatctgtttgccggagggactacaaagctgatgaagacccagcattattccagtcagtcaagaccaagagaggccctttg

SEQ ID NO: 821901 - DNA, 100 bp, Homo sapiens
tgcttcgtgcctggtgtgacgtctctcaggatgcctgagccggggaagaagccagccgcttacaaacacgcagatggcaagaagattgatggcaggaggg

SEQ ID NO: 821902 - DNA, 100 bp, Homo sapiens
tgctatggccatcagtgaaatgacagataaactagggcttcagtctcttcgtaacagaacatctgaccagtgcacaggacttcagggcttcctggtgttc

SEQ ID NO: 821903 - DNA, 100 bp, Homo sapiens
atgcatctgatgctctctctccagtccttgctgaagagactttccgttacatgaattttggaagatggcaaagttcatgacacccgtgatccaggacaac

SEQ ID NO: 821904 - DNA, 100 bp, Homo sapiens
gcgatggcttcagacagcatatttgagtcatttccttcgtacccacagtgcttcatgagagataggaaccaaggctttagccttctcaactcattgactg

SEQ ID NO: 821905 - DNA, 100 bp, Homo sapiens
gctcccaggccagtgccagtacttgggcttgccagtggcggattacttcaagcagtggattaatctgaaaaagggttttggccaaattgggcgagggcac

SEQ ID NO: 821906 - DNA, 101 bp, Homo sapiens
atctgggccaaaaggaatgaccctagccagactcagggatcaaagagcaaacagattcagtggcctgcattgcatatctttctgaagccatgaagctgaca

SEQ ID NO: 821907 - DNA, 98 bp, Homo sapiens
ctgtgacctgctggcattgaatgatttatagctaagactccaggacacccctgaagccgagaaatggagtatgctgctgctgttccgctttgcgtcct

SEQ ID NO: 821908 - DNA, 98 bp, Homo sapiens
aaagttgaaaacaagaccgtccaagagcctcaagggaatacggttggacagaatgaactgaagattacaagtgatcaagtgataaattcaggattgat

SEQ ID NO: 821909 - DNA, 100 bp, Homo sapiens
gctcagtcgctttggaaacgctttcctgaatcgtggtgttcgtccatttggagtttctttacttatttgtggttggaatgagggacgaccatatttattt

SEQ ID NO: 821910 - DNA, 100 bp, Homo sapiens
cagccacccttggtgatgagcctcggaaagtgctcctgcggctgtatggagcgattttgcagatggttcccgtgtcagtggctatgatgacacctcaagt

SEQ ID NO: 821911 - DNA, 100 bp, Homo sapiens
aaattacatgaattagaaaaagagaacttacaactgaaagctaaacttcatgatatggaaatggcaaaagatgtgattgaagagcatggtccttcagaaa

SEQ ID NO: 821912 - DNA, 98 bp, Homo sapiens
aataaatttgagatccttggggttgtaggtgaaggctggtcacagtggctcacatctctaattccagcactttgggaggccaaggcaagaggatcact

SEQ ID NO: 821913 - DNA, 100 bp, Homo sapiens
caattacaagcagctcacaaacggccacggctctgcacactggatcgtcggaaactggagcgaggtgttgaaaagtctcctctagagctttggaaggctg

SEQ ID NO: 821914 - DNA, 98 bp, Homo sapiens
atatgcaagattgctgacttcggattggcccgattgatagaagacaatgagtacacagcaagacaaggtggttaaataaacttggatcggctgtaatc

SEQ ID NO: 821915 - DNA, 100 bp, Homo sapiens
gggttgacctcagtctcctggagcttccagccagagggggccgacactactgtgtcgatatttaacaccgtgcccgatatgcctctcaccaatgcccagc

SEQ ID NO: 821916 - DNA, 100 bp, Homo sapiens
cgaagacgagatccagttcctgcgaactacatcgcagatggcagcagagaatattggaagtgaattaccacccagtgccactcgatttaggctagatatg

SEQ ID NO: 821917 - DNA, 128 bp, Homo sapiens
ctggatccagtgtgcccaccacccccacatcatccgtctcacccccacaggaggccaggttggaaaggaacaagtgtcattcaaggatgtatgtgtggacttcactcaggaagagtggtatctgctgg

SEQ ID NO: 821918 - DNA, 100 bp, Homo sapiens
ccgagtggaagctcttcatctacaacccgaccaccggagaattcctggggcgcaccgccaagagctgggagtagcacagaagagggaggatgctgtttcc

SEQ ID NO: 821919 - DNA, 99 bp, Homo sapiens
tttgttgccccgcttggctgcattccgaccttctgccttcacagctggtggagctgtctaaggctcaagatatagaagcaggagatggcaccacatcag

SEQ ID NO: 821920 - DNA, 100 bp, Homo sapiens
gcggagaccctcgaagtgcgcaaacttgacactcaccctgaccggttaccttgaggatagttttgtaaaatctggagtcttcaatgtatcagaacttgta

SEQ ID NO: 821921 - DNA, 99 bp, Homo sapiens
tgttgctctgggacctgcaggtcccggaaggtccttagggaggaccccagacaccggagactgggaaatggatcacctgctgttaccagctaccaccca

SEQ ID NO: 821922 - DNA, 51 bp, Homo sapiens
aacgcttagcccaggctatggaggcccccagagagaagccctacccatgga

SEQ ID NO: 821923 - DNA, 100 bp, Homo sapiens
ggccttcgcggtggcgatgctcttcttggaaaaccagatccagaaactggaggagtcccgctcgaagctagggttccggggagacgaggaaccattccgt

SEQ ID NO: 821924 - DNA, 102 bp, Homo sapiens
ctacatcccacagagatacccagacaacaggatcgtctcgtccaagaaaatccaatctgatttgacaagtcatgagatcagtttagaagaaatgaagaaaca

SEQ ID NO: 821925 - DNA, 98 bp, Homo sapiens
tcaggttgctgcatggacacatggacgagtgtctcactgtcccttcaggagaacatggtgaagagcagcggagagttgatcaagaacttaatggaaaa

SEQ ID NO: 821926 - DNA, 98 bp, Homo sapiens
gcgactgtgtggagaaggaatatcccaaccgggttctgaaaagtgccttttctgaaaactctgctgcttggattctactctagagctgtctctttata

SEQ ID NO: 821927 - DNA, 100 bp, Homo sapiens
ctcttggcagccttcctgatttctgcagctctgtgtgaagggcgaagtctaaaaatggaggaagatctttaagagaaaaactggacaaaataggattaaa

SEQ ID NO: 821928 - DNA, 100 bp, Homo sapiens
accacaaatttattcaagtcaattaccatcctttaccaggcaataatgacgatgaggacctgacaccagagcagaaggcagagcgtgagaaggagcggag

SEQ ID NO: 821929 - DNA, 99 bp, Homo sapiens
gcgcagcaaggctgacgtggagcggtacatcgcctcggtgcagggctccaccccgtcgcctcgacagtttgccatgagtccatctaacttcagcagcag

SEQ ID NO: 821930 - DNA, 100 bp, Homo sapiens
ccggcagtttgtaacacagctgtatgctcttccatgtgtcctcagtcagacaccattactaaaggtccggaccctatttgtcagtggccttcctctggat

SEQ ID NO: 821931 - DNA, 100 bp, Homo sapiens
gttcatcttcctccctgtgtactttccatttgccttcctggaaatctcctgcaaagaagctgagccatgcaattagtaaatctttggggtgtgtacccac

SEQ ID NO: 821932 - DNA, 98 bp, Homo sapiens
tggctggtttcctggacagagaacatccaaggttccattaaatacatcatgcttaaccctagttcacgaatcaagattgatgatcttacagcagaact

SEQ ID NO: 821933 - DNA, 100 bp, Homo sapiens
tctgaaccttctgagaaaacatggtcaacgtcttgaaaggagtgcttatagaatgattgtaaaccatggctgtgtggatacaagctcagcagctccaagg

SEQ ID NO: 821934 - DNA, 100 bp, Homo sapiens
ggagatgatcctggcggattttcagattcgacggaggcgccttgcacgacttgctggtggacagacctctcagccaaccaccccactcacctctccccag

SEQ ID NO: 821935 - DNA, 100 bp, Homo sapiens
agctctgatcgccgggaacccttgccgctgctgtcctgcgaccccaagcagctggctgatggtgtgaactcgggccagggcctgggcatcgagatcatcg

SEQ ID NO: 821936 - DNA, 99 bp, Homo sapiens
taaagacagagaaaggcatagacggcatgaatatgatatatggccaccagctggaaaggaacgaaaacgttcaataaccaaaaatcccaaaattggagg

SEQ ID NO: 821937 - DNA, 99 bp, Homo sapiens
cccacctaccactgtccgagtgacacacaagactggatcattgcacccaagggctatgctgccaattactgtgatggagaatgctccttcccactcaac

SEQ ID NO: 821938 - DNA, 100 bp, Homo sapiens
gcaggcgctttaccacgacccagatcccagcggaaaggagcgcgcctctttttggcttggggagctgcagcgttcggaatagccaggccagaagaaggaa

SEQ ID NO: 821939 - DNA, 100 bp, Homo sapiens
gcagaagtacccccaccacgcctctgcaatcatgggtcaccaagagaggctgagagaccagaatggacagcaaattatggatgaacctatgggagaggag

SEQ ID NO: 821940 - DNA, 98 bp, Homo sapiens
gtgaggagaccatagctgcacagccaggtaattctgttccacaggatatctgctgtatggcagctgatggcagattagtctttgctgcttatggaaat

SEQ ID NO: 821941 - DNA, 100 bp, Homo sapiens
cggcgggagaggcgccggggccgcacaggaccattcaaagactgtcagcaagcaaaagaagctgggcattcggtcagtgggatttatatgattaaacctg

SEQ ID NO: 821942 - DNA, 98 bp, Homo sapiens
tagcaacaggatcaaaagatacaacagttatcatatggcaagttgatccgggaatgaaagctactggttgattttaaagtgcctgggcctcacaggtt

SEQ ID NO: 821943 - DNA, 98 bp, Homo sapiens
ctcattggactcaagccagcatggctcacaccacaaaggttaacggcagtgcctcagggcaagttaaagtcttcagagccctgtatacgtttgaaccc

SEQ ID NO: 821944 - DNA, 98 bp, Homo sapiens
tgtgatgccctgactgagctgctggctaagatcaccaacacagacgtggatgaaggatactagccgcaagaacaacatgtttgcacagtttcggaaaa

SEQ ID NO: 821945 - DNA, 100 bp, Homo sapiens
cttccaaagagatacagggcagaggaaaatgcaagaagactgatggagcaggcttgcaatattaaaagcacagcaatggaggaaacagctatatgggaac

SEQ ID NO: 821946 - DNA, 142 bp, Homo sapiens
gccccagacaattgagtctatcaaccttctcaaatctaaaaaatgtcccttcattgttgcactcaataaggtctcccatttttctaagtatggccttcaggattctgatgaagaggaggaggagcatccgtctaaaactagt

SEQ ID NO: 821947 - DNA, 100 bp, Homo sapiens
cggcggcgggagtcctggcgctctgcagcccttcctggatctggagagagcagctgctgctgccccaccacctgccaggcccggccactgagcagccccc

SEQ ID NO: 821948 - DNA, 98 bp, Homo sapiens
acattcttcagctctagcagtgcaaaggcttcactgaaaaagaacattacaaattttttttgaaagaaatttggggaaatcaatgtggactgaacata

SEQ ID NO: 821949 - DNA, 100 bp, Homo sapiens
tgggttctctgtgaatggcaagccaaatttgtatcctactgtggggcttcaaacaccaggagaagtggtcgatgccaattttgggcaacatcctttcgtg

SEQ ID NO: 821950 - DNA, 100 bp, Homo sapiens
agcggagacctcgctgcgctcatggcgtcgcccggaaagtccatgagatgctgaagaaggggtgggatgctgaaggttctcccttccgaggccagcgatt

SEQ ID NO: 821951 - DNA, 98 bp, Homo sapiens
gaggacgaagccaacgtgagggcggtgcaggcccactacctccgaagcccctcccctagccagttcttccaggttggaaagagaatatgctggagagc

SEQ ID NO: 821952 - DNA, 100 bp, Homo sapiens
atgatgaccatgtggacatgctttcgggccttcaggatcttctccagccagtggatgtcgtgaggcggaaccaaccctcctggccatgggaggggccgtg

SEQ ID NO: 821953 - DNA, 98 bp, Homo sapiens
agaaatgtacacacaggagagctggctgcagtaaaaatcattaaattggagcctgggaatggatttgtaaactcaagagcttctccaaatttgattgg

SEQ ID NO: 821954 - DNA, 123 bp, Homo sapiens
gagtggatggtcaagagcgtgccctacttcaaggataagggtgacagcaacagctcggcgggctggaagtttggaaattttagcattcaggtgccaggaatgcagatgggacagccagtgcca

SEQ ID NO: 821955 - DNA, 98 bp, Homo sapiens
gctgtgggaaataatgatgtaaaggcaaccacacctccaaatcaaggaaggccagattctcctgtctatgctaaccttcaagaactgaaaatatccca

SEQ ID NO: 821956 - DNA, 100 bp, Homo sapiens
acgtacacagcaggactgagtgaagaagaacagctcgagagagcattacaagccagcctctgggaccgagatatggaatgtgcagatgtcccactattaa

SEQ ID NO: 821957 - DNA, 100 bp, Homo sapiens
ctcagactgtcacagtgaacccaatcaggaggaggtcttcttcaaggatgtctctgattaaagaagctaattgatcaagaaatcaagtctcaggaggaga

SEQ ID NO: 821958 - DNA, 98 bp, Homo sapiens
gccttggacctaatgaggcgcctgcctccccagcaaatcgagaaaaacctcagcgacctgatcgacctgcttggggccctggtccacagtcctgtcaa

SEQ ID NO: 821959 - DNA, 98 bp, Homo sapiens
tgaaactggcctcccaagccctgataagtgctcaggaacagcccatggaagaatcatatgaagaggtggtgactgaggtcgtaagcaggagtggacat

SEQ ID NO: 821960 - DNA, 100 bp, Homo sapiens
aacaccccgagcgaggccaaccttcaggaggaggagctgtgccgaagcgagtgccacttgtctgcagggccgtaccgcggaaccctctttgccgaccagc

SEQ ID NO: 821961 - DNA, 100 bp, Homo sapiens
cgctcctctcccgccgggcgggctcctttgtcttctgggctttcgtcgcgagatggaacgctggtatcatggtacagtcaccagaaaaagcttacagttc

SEQ ID NO: 821962 - DNA, 99 bp, Homo sapiens
atgccttcaatactacctttatttccaccatagtggtgatttacaagtcaagttaaaatgtccccagaagtggccttgaaccgaatatctccaatgctc

SEQ ID NO: 821963 - DNA, 100 bp, Homo sapiens
cggacactttgttattggagaaacatgcagattatatcgcatcctatggctcaaagaaagatgattattgagttctctggtgatgttgatagcctggaac

SEQ ID NO: 821964 - DNA, 100 bp, Homo sapiens
cttattccactcttcggcgaagctttacgttcatgtaaacagcatgacgtgaggccgtggatgcaggcattaaggtgctgttcctataatcagatgttca

SEQ ID NO: 821965 - DNA, 99 bp, Homo sapiens
atctcttcagagctgatcacaaggaagctgtaagaaccatagcatcagaagagctaacaattgctggaatgacctttacaacttttgatcttggtgggc

SEQ ID NO: 821966 - DNA, 98 bp, Homo sapiens
aggaactcggagagtttcaaggaatgtacatctccgttcatggatgcattaacagccaatgggacaaccaacatacagacatctgttacaggagtgac

SEQ ID NO: 821967 - DNA, 100 bp, Homo sapiens
aggattctcgctgtgacagagacaacaccgagtatgagaatttctttcaagatggcttgaaaacagctgataagttgaaacagtacattgaaaaactggc

SEQ ID NO: 821968 - DNA, 100 bp, Homo sapiens
aagccttgtaaccatcaggtagatacagcaccaacggtgaaagaaaagatgttgtcccggttaagagtagtttccaccacttgtactttggcatgtcgac

SEQ ID NO: 821969 - DNA, 100 bp, Homo sapiens
gtccccaaggggtgtttggatgcaagctgaaatcacctttaagaagcccatgcctaccaaggttacaagaggacccacctgtgggtgtcagtggcgcacc

SEQ ID NO: 821970 - DNA, 100 bp, Homo sapiens
agtgcctgctctccagtgtctgaaaacaaatgtttttctggtcttcacttttttgaggcaggaagggccgttgctccagggagaactgcaaatatcttca

SEQ ID NO: 821971 - DNA, 98 bp, Homo sapiens
tccaaagtggatgcctccggggagaacccagcgggtgccgcttctccacccgaggcttccacctccaacgagccatgttccaggctgcaggagccgcc

SEQ ID NO: 821972 - DNA, 99 bp, Homo sapiens
tctcatctcgctcggctgcgggaaatcgggctgaagcgactgagtccgcgatggaggtgacagagctgaatgaacctctctccaatgaagatcgaaatc

SEQ ID NO: 821973 - DNA, 100 bp, Homo sapiens
cagggaattgtgccggaggttctgaagaagatcgtaacaacttatgacatggttgatatctgtgcagaagaattggggaataatgtaaagcccgctgtta

SEQ ID NO: 821974 - DNA, 122 bp, Homo sapiens
ctgtcaccttgcaacagtactaccgagaagcaatgattcaggggtacaattttggatttgagcttcttggacacttaatgattgttggcaagaaatgtgctgctgatctgggcctgaataag

SEQ ID NO: 821975 - DNA, 100 bp, Homo sapiens
accccaccgccatcctggatgaggggtccccacggagtctggaccatggaggagcgaggtctggcccccaagttcgacaccacctttgagagcgcgcggc

SEQ ID NO: 821976 - DNA, 98 bp, Homo sapiens
gacggcctctggaaccggcaccatgtggagcgggtggagatcatcatgaaagagaccgtggatgctgaaggcctgaagacggaagaagggagtgtcag

SEQ ID NO: 821977 - DNA, 98 bp, Homo sapiens
agattcgcagtggtcgcttcttctccttgtgaacagcctgggcatcagtgaagagctgaaggagaagctgcgggatgtgatggtggaccggcacaagg

SEQ ID NO: 821978 - DNA, 100 bp, Homo sapiens
ccaagtggcggggactactggtgcctgcgctgaaaaagagagatgtggataatttgccctgcctccaacatctctttctcagctttaacaatatatctag

SEQ ID NO: 821979 - DNA, 100 bp, Homo sapiens
tttgcctcacagttcccgctgggattcgtagccagagtctttggaaaccacccctactcctaatcccccgactacagaagaggagaaaacggaatctaat

SEQ ID NO: 821980 - DNA, 100 bp, Homo sapiens
gccaaggaagggtggcttcatttccgaccccttgtcaccgataagggcaaggcacttaagtattcatcgaagagtcaccccagtagcggtgatcacagac

SEQ ID NO: 821981 - DNA, 100 bp, Homo sapiens
aagctgtaaaggttcttatagaacatggagttcaacccagtgttatcatcctactcagtctgttctccactcctcatgaaaaaagcttggccagaccaca

SEQ ID NO: 821982 - DNA, 100 bp, Homo sapiens
tcatctcagggcagttcctacagatgaagcaagagcttttgcaggcaaggcatctttacatatgtgattatcataaaaacttaattcagagtgttcgaaa

SEQ ID NO: 821983 - DNA, 98 bp, Homo sapiens
agctgactgctcaggaagtaaaatcgggacagagcagaatgggctgatatagatccggtgccgcagaatgatggccccaatcccgtggtccagatcat

SEQ ID NO: 821984 - DNA, 98 bp, Homo sapiens
tgaacttaaaggatcagtagcaatttggagcggtaagcccccaatatgtgaaagtggagccgccaccaaaatgcagattttcgtgaaaacccttacgg

SEQ ID NO: 821985 - DNA, 98 bp, Homo sapiens
aataaagaaaaaagatgaaaagatccaactattagaacttcagcttgttgcagaagttttacaagtacctccaatgagagtatatgaagtagcaactt

SEQ ID NO: 821986 - DNA, 98 bp, Homo sapiens
tcatcttgaagcccagaataagattaagggttgtacaggctctttgaatatgactctgcaaaggtataaaaaccaggtgccaataaatgtccatgcaa

SEQ ID NO: 821987 - DNA, 100 bp, Homo sapiens
gagcagcgtggagagtatcatctcaccaaagttgcctttccccatcttcctggttctgctccttcgtggcctagtcttgtggacaccagcaagcagtggg

SEQ ID NO: 821988 - DNA, 115 bp, Homo sapiens
taatgatgatgctcagtttgatgcgtcacactacgacagtgagaaaggaggtggagttggcatgaacttaacagcagcagatactgtgatttttgttgacagtgactttaatcct

SEQ ID NO: 821989 - DNA, 99 bp, Homo sapiens
gaaaaggaagattactcagagattatagggagcatgggatcaatatggaaattatgtaatccaacatgtactggagcacggtcgtcctgaggataaaag

SEQ ID NO: 821990 - DNA, 100 bp, Homo sapiens
tcacttccagttgtgcaaaatgactccagtcgaggcagttctgtctcttcgaatcttcagcctaccaggacatcctcggaaagtatttattctaggccag

SEQ ID NO: 821991 - DNA, 100 bp, Homo sapiens
gggagctccattccctaaggcactgtgcagcgcgtcaaccgcttgtactctgcgatgcccccgccaggtctgagccggacccgcgcccctcctgcgagac

SEQ ID NO: 821992 - DNA, 100 bp, Homo sapiens
actctgactccacctttacttttacctacgttggcggccccagaagatgtttactgaactgcaacagatgaggcaacagttaccagacatggaatttggc

SEQ ID NO: 821993 - DNA, 98 bp, Homo sapiens
ctaaaacaggatttgactctactaatccagacctctgctccttttaaggaaagaccaacaccttctctgaataataattgtactacatctgaggattc

SEQ ID NO: 821994 - DNA, 100 bp, Homo sapiens
agtggtcatacttctttaactataatcttcatagtagtgtatttatttggcgctgtgttacaggaggaggtgcgccagtctgtaactcctgccgagccag

SEQ ID NO: 821995 - DNA, 99 bp, Homo sapiens
aaaactcggtctcctgttgctcactttcctgggtattgtagccgctgtgcttgtcaagattttatttggagagaagcaagcatctttgcctctttggag

SEQ ID NO: 821996 - DNA, 98 bp, Homo sapiens
acgaattgaaaaaggaaccccaaaggagtcgattcttaaaaactctgcttctgttggagtcagtggatcggtggggaaaatgctgcttaccctgggcc

SEQ ID NO: 821997 - DNA, 101 bp, Homo sapiens
cgcgttgctatacagaatctttggatatgtgcatcagtggtttatgccaagtgggagagttcagagcacacgctgctgagtggacagccaacgtcacagcc

SEQ ID NO: 821998 - DNA, 99 bp, Homo sapiens
cagaacatcttgctgtcctatgccaatcgcagaaaatcaagtgtcagtggtattcgcatcaaaatagaatggtgaggttctggagaattgatgaggatt

SEQ ID NO: 821999 - DNA, 99 bp, Homo sapiens
ggaatatgaggaagacctactggagcagtcgcagtgagtttaaaaaattatagatgcccagttcatttttactgggtgcgtggtgaagaaattattcct

SEQ ID NO: 822000 - DNA, 118 bp, Homo sapiens
gatatcacctttgccactgacattgcagagctgtgggctgtgttccacaagttcaaagcggagattctggagctggctggcaatgcagcgagagacaacaagaagggacgggtcacac

SEQ ID NO: 822001 - DNA, 100 bp, Homo sapiens
ggcataggttatgaagctaatcctggcgttccaccagcaaccatgagtggttccatgatgggaagtgacatgatctgccggaggcgctgggcaatgaccc

SEQ ID NO: 822002 - DNA, 98 bp, Homo sapiens
gctgattcagcgcatcggcagcggcacctacggcgacgtctacaagaaaccaaggtgtatgttggtaacctgggaactggcgctggcaaaggagagtt

SEQ ID NO: 822003 - DNA, 98 bp, Homo sapiens
ctggctcgagaacgaagtaggccgtctcgctctgggtctccaggcccgcgaccgtccgccagtcgtcccgagttggaatcgaagcctcttaaaatggc

SEQ ID NO: 822004 - DNA, 143 bp, Homo sapiens
gatccatgagaccgaatccttcttcaagacgagagacaaggagtaccaggaaacgataggtcagatcgagagcatacctgaagagagatacaagatgaagagcaagcccctaggaatctgcctgataatcgattgcattggca

SEQ ID NO: 822005 - DNA, 100 bp, Homo sapiens
aaaaggacaagcagtttgttgccaaggtttgcctgcaatgagatttcattctctacatttaaaggacatcctttctgagctgctgtgaataaatttggaa

SEQ ID NO: 822006 - DNA, 100 bp, Homo sapiens
ccacgcctggaacaaggaccgcacccgacagtcattttgtttactcattcagccctgttgcaggtcccaataaactcttcataaggttgacagaagcacc

SEQ ID NO: 822007 - DNA, 98 bp, Homo sapiens
gagacccggctgggaagtgcaggcaaagccggctgttaccctgcacagccgtcaccctcaactttcccttcagaggctgtgcccaggtgggcgttctc

SEQ ID NO: 822008 - DNA, 100 bp, Homo sapiens
gcgagtatacatgcaaagcttccaatgagtatggcagtgtcagctgtacagccacactaactgtgacagagtgtgaacatggctacgcctcttcattccc

SEQ ID NO: 822009 - DNA, 99 bp, Homo sapiens
tcactcctcaggtgtccagcctgctcaggacatgaggctctgcctgcagtcagcaacttggaatattcagacttcagaccagcatcacagattataacc

SEQ ID NO: 822010 - DNA, 100 bp, Homo sapiens
atgattttaattggtaataaagcagatctggatcatcaaagacagggaatgaaagctactggttgattttaaagtgcctgggcctcacaggtttggagat

SEQ ID NO: 822011 - DNA, 98 bp, Homo sapiens
ggggaaatgcgtgcactgcgtccctctagaggacagtcattttgtttactcattcagccctgttgcaggtcccaataaactcttcataaggttgacag

SEQ ID NO: 822012 - DNA, 100 bp, Homo sapiens
tcagctttacaaaccctgaatttataactgaaccaagatcactccatggatgaaatgacagctgtggtgaaaattgaaaaaggagttggtggcaataatg

SEQ ID NO: 822013 - DNA, 100 bp, Homo sapiens
tatttaacggcagccgagagatgccctacaccaacccgcgagggcctgtccacatcatcacaggatctgctcttagcagtgtctgcaaaaacgaatcttt

SEQ ID NO: 822014 - DNA, 98 bp, Homo sapiens
aagagaaagaaacactttccagagttccctgcaacccgtgcttatgcagatagttactattatgaagatggaggaggtgcctcattagaccttaaagc

SEQ ID NO: 822015 - DNA, 98 bp, Homo sapiens
gcattcaagctcgccgcaggatctgtgagaatgggcctgactgtgcaggctgcaatgtgacgcaaaatcgaatgaagctaatggccgacaactacgag

SEQ ID NO: 822016 - DNA, 98 bp, Homo sapiens
cgattggaaccagcacaagtacaagaagctgaaaccccacgtagtgttcttgaagaaattggactgacataactctcctcccttgttgatgacttctt

SEQ ID NO: 822017 - DNA, 98 bp, Homo sapiens
aaactccctggtctctgttggtgtagaagccaaaatcagtgccggtggtggtgtgcacattgagccccggtatagacagttcccccagctgaccagat

SEQ ID NO: 822018 - DNA, 100 bp, Homo sapiens
agcaattaatcccaagttgcttcagttggtcgaagacagaggttcaggctgacttgacaggaattaagtggaaaaaatatgtatggcaaggcccaacttc

SEQ ID NO: 822019 - DNA, 100 bp, Homo sapiens
atcaaccaggtctacaacggctccgtggacgagggctccaagccagacgactgcaagaacattgccaacatcatgaagacactcgcctatcgaggcttca

SEQ ID NO: 822020 - DNA, 100 bp, Homo sapiens
gctcgagaatacagagagaaaattgagacggagctaagagatatctgcaatgatgtactgtatgactatgaatatgatgaaaatggtgacagagtcgttt

SEQ ID NO: 822021 - DNA, 100 bp, Homo sapiens
tgggttccacttccagcaacagctcctgcagcagtaccgagtgccccggggaagccattccccaccccccaggaacggcagagtcgaaacaaacaatgag

SEQ ID NO: 822022 - DNA, 100 bp, Homo sapiens
aaaacctgaaaacattggaccacacaaagtcttactgggtgaagccctcgagcacctgcggccccttccggaccctggacaccatgtacgaggccggcag

SEQ ID NO: 822023 - DNA, 100 bp, Homo sapiens
tctccaacccggaaatatttctccaacctcggaatgttacgttcataacttactaaggattagtgtatattttccaaccttgaggcatgaaattctggag

SEQ ID NO: 822024 - DNA, 98 bp, Homo sapiens
caaccgccagatcaacctggagctctacgcctcctacgtttacctgtccatggcctccccatggccacccatggaccagtcggcattcacttcctccc

SEQ ID NO: 822025 - DNA, 98 bp, Homo sapiens
ttttccagcagcatggacacaagaagcatatttctggcccccaaagacaaaccaagtggagacacagcagctgtatttgaagaaggtggtgatgtgga

SEQ ID NO: 822026 - DNA, 99 bp, Homo sapiens
gctggtcatgaaaaaattccctcttcagtttacatatatggcagtgaagtcttcaggacggggtgagttactgatctctctctgctatcagtccaccac

SEQ ID NO: 822027 - DNA, 100 bp, Homo sapiens
ccaggccggggataccgttgaacttctgaaaggagatgcacacagtctgttttggcagggcgttacctactgcggagaaagttcagcaagcagtcttacc

SEQ ID NO: 822028 - DNA, 100 bp, Homo sapiens
cggatggctagagagagaagagaggcatgaaagtcattgagagtcgagcccaaaaagatgaagaaaaaatggaaattcaggagatccaactgaaagaggc

SEQ ID NO: 822029 - DNA, 100 bp, Homo sapiens
aagttttggacatcgatttcaactactccagggttccttgaaaagaaaacaggtagttaacctatctcctgccaacagcaagcgacccaatggctttgtg

SEQ ID NO: 822030 - DNA, 100 bp, Homo sapiens
cgctatgtggcgaatatcttcccttacaagggttatatatggaattatggtaccctccctcagggtattttaagcctggaatattgtgtgggtattattg

SEQ ID NO: 822031 - DNA, 100 bp, Homo sapiens
acatctactcattcaagtggaaatttatgccaactcttctctgacccataatgcctcagatgagagtccggagtgttgtcatgtgaagcctgccatccag

SEQ ID NO: 822032 - DNA, 100 bp, Homo sapiens
ggatcacttagacaagaagaaaaaagcatctgagcctggaaaagttatagttcttgtcaataagcggaggaaatatttgagagtgtaggagatcgagagc

SEQ ID NO: 822033 - DNA, 100 bp, Homo sapiens
tacctgaaccggcacctgcacacctggatccaggataacggaggctggttaatgaaggagttcccccttctgagtatgttcaatatccatgaaaaccttt

SEQ ID NO: 822034 - DNA, 112 bp, Homo sapiens
cggatctggccaacaagacgcacccgtccatcttcgggatcttcgacgggcacgggggagagatcgtaaagctgaaaattgaaatcatgaaagtagacaggactaaactgaa

SEQ ID NO: 822035 - DNA, 100 bp, Homo sapiens
ccgaggaggggagcgggaagcgcagatacgtgcttttcaacatgccttcagcactaatgactgctccaggaatgtctacattaagaagaatggctttact

SEQ ID NO: 822036 - DNA, 100 bp, Homo sapiens
atgaaggagtaggacttgtgcattcaaacatagcaactgagcatttgatgaatacagaaatatcagccaaaaggacattgtggacagcataaaaggagaa

SEQ ID NO: 822037 - DNA, 100 bp, Homo sapiens
ctacagagcaggagttgccgcagccccaggctgagacagcttaattggcttagtgtcgacttcaataattggaaagactgggaagatgattcagatgaag

SEQ ID NO: 822038 - DNA, 100 bp, Homo sapiens
agcagatttcccaagagcagcggaaaatgatccagtcacagaatggcaacatacttgtttaacattgaattctgtgcaagaaagaaaaaatttaatatat

SEQ ID NO: 822039 - DNA, 100 bp, Homo sapiens
atctaacagccaatagaaaagcagaaagccgcctcttggtttgcgtcctgcactgaaaggaaatgacggattttccaagtccttctcagcaaatcaacct

SEQ ID NO: 822040 - DNA, 100 bp, Homo sapiens
cctcaaggacatggagcgcttgaaagaggtgctcaaccatgtctattagagaaactgaatgaggaggcaaagcatgacaagtgccacaagagacctgcac

SEQ ID NO: 822041 - DNA, 98 bp, Homo sapiens
tggaattgctaagaaaagtagtagtccctgggatccgtatgtccattaaacttcatcaggaaggatctgagtctctccctgcggagacagccctgaag

SEQ ID NO: 822042 - DNA, 113 bp, Homo sapiens
tgaactccctgtcacatgatacagccactgggcttatacagtatgcattggaccagggcgtgaacgtcacccagagctagcaacatggaccacagatatactggtgactccgc

SEQ ID NO: 822043 - DNA, 100 bp, Homo sapiens
tttaattaatctcctgctgacgggacatgctgtttctaatgtatgggatggtgatagagagtgctcaggaatgagtagatttcgggcagacaacttgaac

SEQ ID NO: 822044 - DNA, 98 bp, Homo sapiens
atctgagccacagtgtgatcccagctttaaaggagatgcaggagaaaatacggcattgctaggtgatgatgaacagtctacacagatggctgcaagtt

SEQ ID NO: 822045 - DNA, 75 bp, Homo sapiens
ctgaggggcgagaactgatcctggacctggagaagaatgaccagccatacgtcgtgtgccggcagtgtcctgagt

SEQ ID NO: 822046 - DNA, 100 bp, Homo sapiens
gaaaacgaggatggaaaaccttttatgctgtactgaagggaacagttctttacttgcaaaaggtaaaatctgtaaaaactgggtcagttttttggacaat

SEQ ID NO: 822047 - DNA, 100 bp, Homo sapiens
accttcagcggatttggggattaggctcttttaggtatttacatgaggaatttccagagtcctggtcagttcccaggttggctgaaggctttgatgtcag

SEQ ID NO: 822048 - DNA, 98 bp, Homo sapiens
ggggctgtgccgggcggagagaactcagcgaggattctgagtactatactggcaattgctggagaagattttgcaattgttgcttctgatactcgatt

SEQ ID NO: 822049 - DNA, 100 bp, Homo sapiens
gaagaagagaattgtggatattttggtggggtgaagaccccagttttgctgaccttattcaccatgacttatcaggtgacttgatggagggtgagctcta

SEQ ID NO: 822050 - DNA, 98 bp, Homo sapiens
gatgttgacctggacgaagtgtactgccttaacgactttgaagaagatgacacaggagttcgcagcacttactaaagaactcaatgtatgcagggaac

SEQ ID NO: 822051 - DNA, 99 bp, Homo sapiens
aattgggtgcttcacagagacttgccaacaggaaggccgggtgtgcagtcacatctctgctagcttcggagctgaccaaggatgatgccatggctgctg

SEQ ID NO: 822052 - DNA, 99 bp, Homo sapiens
ccgccgcccgctttcggctcgggcctcagttttcggctttgtgagaaaccttaccatcaaacacgatggccagcaacgttaccaacaagacagatcctc

SEQ ID NO: 822053 - DNA, 99 bp, Homo sapiens
ctgagatctgcagctggggcaggctgcagcaaagtgttactcaccaaagaggcggggtttcaccatgttgcccagactggtcttgaactcctgagctta

SEQ ID NO: 822054 - DNA, 98 bp, Homo sapiens
tgagcgaggtttgcccggagcgcgcacgaggaggagcaccgaacagccagttccctgagcagtggtgcccttacgtggacaaagaaattcagcctaga

SEQ ID NO: 822055 - DNA, 98 bp, Homo sapiens
aaaagtacttccagaagcagtgccatgaatgcatagaacacatcaggaagcagaactggtttgaggcctttgaaggagatcttgtgcgaaaactcaaa

SEQ ID NO: 822056 - DNA, 100 bp, Homo sapiens
gcacacgcagagacaggccgaggagacgcgggccttcgagcagctcatgaccgacctcaccctgtcgcggttctgggaggtgatcagtgatgaacatggc

SEQ ID NO: 822057 - DNA, 100 bp, Homo sapiens
caaaatgcgttaggaaaatgtgatgcatgtctcagtgtctggatgtggatagtgaagctaagaaactattgggtttaggacagaaacatctggtgatggg

SEQ ID NO: 822058 - DNA, 100 bp, Homo sapiens
aattatgaaacaacctggcccatgagatgatagctgtggaagatctggacgttggtggttggctatgtgttgactgtttcattcaagtggaatgcaagca

SEQ ID NO: 822059 - DNA, 98 bp, Homo sapiens
ccatcacccaccagcccaggaagcctgcggaagcagagggaactaattccagagttctactacctaccagagatgtttgtcaacagtaatggatataa

SEQ ID NO: 822060 - DNA, 100 bp, Homo sapiens
atctggacgaggacgaggacgacctggaggtgttcagcaagggtccttgcactgggaatcaacagagtttggcacacagcaggctgtgggatgctgtggt

SEQ ID NO: 822061 - DNA, 109 bp, Homo sapiens
ggaagcacactgtgtagaatttctcaccaaacatcttagggcagataatgcctttatgttacttactcaggaggagccattggatgaaagctcagtgaagaaaatgatc

SEQ ID NO: 822062 - DNA, 126 bp, Homo sapiens
tctattgcgcagctcgctgccgtgcgtttaacccaggcgaggaggaggaggagaaaattcccccagattcgggcagaggaagaagcccctccagatggtgctgttgccgaatacagaagagaaaag

SEQ ID NO: 822063 - DNA, 98 bp, Homo sapiens
tttcaagcctgaaggaaaggcagaactgcctgattacaggagctttaacagaatactacaacacatctttgcaggattctttgcaaattctgccattc

SEQ ID NO: 822064 - DNA, 100 bp, Homo sapiens
aaagaagctggaagccgcagaccttgtgatattccaggctgagtatgcccatcgtggtttctccgaggtgaaaactcccacactgttttctacgaagctc

SEQ ID NO: 822065 - DNA, 100 bp, Homo sapiens
atccagaccttcaagatgtgttacttattcctgttattggacccaggaagaattcagggaacttcgagaacagccaagtgaccctcaagctgaacaagag

SEQ ID NO: 822066 - DNA, 101 bp, Homo sapiens
ttcgacgacatcatcgtcttcgcctatgcctgccaggctgctgccgaggtatcaggaagtttaaggaagttgcccaaggttgcacagctcagaaggggcac

SEQ ID NO: 822067 - DNA, 103 bp, Homo sapiens
gatcctcatcttttatacactcttagtgctgtccaggggatggactatttgggttctcggcaatacgttcaccgggacttggcagcaagaaatgtccttgttg

SEQ ID NO: 822068 - DNA, 99 bp, Homo sapiens
tctgatccagaccaggactttgacaaagaggccgccatggcatcagatgaaggcaaactttttgttggagggctgagttttgacaccaatgagcagtcg

SEQ ID NO: 822069 - DNA, 100 bp, Homo sapiens
ctggaaacagccaaggaggaattcctgactggcactgaaaaaaggtggtgaagcagcgcttgcagatgtacaactcgcagcaccggtcagcaatcagctg

SEQ ID NO: 822070 - DNA, 98 bp, Homo sapiens
gttaaaggaacctctacaacgaaggtgaagccacggaagataaggtctcggcgcggaagatggccggcggcgtggacggccccatcgggatcccgttc

SEQ ID NO: 822071 - DNA, 100 bp, Homo sapiens
atgggtctgggaccttaacagggagccatggatgatgatgctgaagctatccttgctgcagacttcgaaattggtcactttttacgtgagcgtataatcc

SEQ ID NO: 822072 - DNA, 99 bp, Homo sapiens
ccgatctcagccttgctgatcatctcgtacagcagcagaaaatgaccatgttacaggattcactccttctccagttgcacagccacacccttcagctgg

SEQ ID NO: 822073 - DNA, 100 bp, Homo sapiens
agcagccctggtgtcacctatcagtaaaaggaaggagtcaagactgagaacaacgatcatattaatttgaaggtggcggggcaggatggttctgtggtgc

SEQ ID NO: 822074 - DNA, 112 bp, Homo sapiens
ttattcagcactcagaatgctccaggcagtgtaatctcattccatcttcattcatgactccagacagctacttgaaggaaattttgccaaagaagtgagccatgaaatggat

SEQ ID NO: 822075 - DNA, 100 bp, Homo sapiens
cggaccatccgctctccctgcgctctccgcaccgcggcttaaatgatgtattttgtgatcgcagcgatgaaaggtgaggctggtgccaagttcattgagg

SEQ ID NO: 822076 - DNA, 100 bp, Homo sapiens
ggatccagcttccttctgaaaaggcgatcttcctgtttgtggataagacagtcccacagtccaggcactccaggaataggaactacaaagctgaatttgc

SEQ ID NO: 822077 - DNA, 100 bp, Homo sapiens
ctgtgcctgcttcgtgcctggtgtgacgtctctcaggatgcctgagccggggaagaagccagggccaggatcctcttcctgctccagttgctggccgacc

SEQ ID NO: 822078 - DNA, 100 bp, Homo sapiens
attcctaccctgatgttgctgttggttccctctcagattcagtaactattttcaggaactgtggctgcaccatctgtcttcatcttcccgccatctgatg

SEQ ID NO: 822079 - DNA, 99 bp, Homo sapiens
cagggagggaacaaagcccacagcaccggaggtatttaactgaaaggaatatctgcttcactgttgcaaccaaaccagatgccttcttccacttcacca

SEQ ID NO: 822080 - DNA, 98 bp, Homo sapiens
gaagattttgacagtcgtagatacaaatttttggatgatgatggatccatttctcctattgaggagtcaacgaaacccgaaccctagcggagattgcc

SEQ ID NO: 822081 - DNA, 98 bp, Homo sapiens
gggctctgagcgcgccgcggcacaggttgttggaaaggacaccaatgtcatgttggtggctttggcagcaaaatgtcttactggcctggctgttgggc

SEQ ID NO: 822082 - DNA, 98 bp, Homo sapiens
ggacctccaggggaacaatgaggcctacgcagagctcatcgtccttgatctgttcagcctgtgtgcgctgtaagagctgtggggcaactccaggcaag

SEQ ID NO: 822083 - DNA, 100 bp, Homo sapiens
tcttctgaccgggacagagtcaccatttgatttggaacagcagtggcaagatctcatgtccatcatggaaatgcagatttctgagagagcagacaccatc

SEQ ID NO: 822084 - DNA, 98 bp, Homo sapiens
ttttcagaactgcagggaaacagccatcatgagaatgttcgtggcatcagagagaaagatgagagctcaccaggtgctcaccttcctcctgctcttcg

SEQ ID NO: 822085 - DNA, 100 bp, Homo sapiens
aaactagaaagaccacgaacttcaaaggggaaagcaaggccaaagacagggagaagtgtttctgaaagatctatccagcactccgatggccagcaacaac

SEQ ID NO: 822086 - DNA, 50 bp, Homo sapiens
tttgacggcttcgccaagggccagagggacattggctggcgcccggacag

SEQ ID NO: 822087 - DNA, 100 bp, Homo sapiens
gaggttttggctctgcgtgagtgtggtctacgagctgtttctcatctttatactcttccagaactgaagcgctgcggcatggcgcgcgcctgcctccagg

SEQ ID NO: 822088 - DNA, 98 bp, Homo sapiens
ccaaatagcagaagaataccatgaggtcaaaaaggaaatcaccctgcttgagcaaaggaagaaaatgtctgatgaattttcggtaagttgatcagttt

SEQ ID NO: 822089 - DNA, 100 bp, Homo sapiens
tcagacatatttgatggaacaatcattagttcagtgcagtgtctgacttgtgacaggttggttgaatctggcgatgtggaacccatggatatggagggct

SEQ ID NO: 822090 - DNA, 100 bp, Homo sapiens
aggaactcctctgatgtcctggtttatgttaccagcaatgacactacgggcacacgtgtttcacgttgacaggtttgcttgggacgctagtaaccatggg

SEQ ID NO: 822091 - DNA, 98 bp, Homo sapiens
gatgaagcctggaatggattcgtggctgctgctgaactgcccagccgattacacctcaacaagaaggcaactgacaaacagccttatagcaagctccc

SEQ ID NO: 822092 - DNA, 100 bp, Homo sapiens
gacatcttcctatacaccgagctgcctatgaggggcattatctggttgtgggaagaaaatgtattcctttttgagaggaaccaaacaactgcaggtgctg

SEQ ID NO: 822093 - DNA, 100 bp, Homo sapiens
aattgttattcttccttctctgaggcctgagctcatctttgggtgaaaaattgtcgggatcttctgcagtccagctacaacaaacagcgctttgatcaac

SEQ ID NO: 822094 - DNA, 98 bp, Homo sapiens
caggcagacggatgaggagcggctggagctgaggcaacagattggcaccaagctcaccaggtagaacagcaatggtatctccacataggaaacaccaa

SEQ ID NO: 822095 - DNA, 100 bp, Homo sapiens
aatctgttggattctaatgcagttcatcacatcattcatgattttcagtggattgtattacacagagcatgaatatacttctttaggttacacgcatggg

SEQ ID NO: 822096 - DNA, 101 bp, Homo sapiens
cgcggcatccgtaaccacaaggaggacgaggtgaccttgaggaaccctgggagctcaggaaggaaggagcgcccagaagcagggacagggagctggttggg

SEQ ID NO: 822097 - DNA, 100 bp, Homo sapiens
gagtcccaggactcatccgacagcataggctcctcacagaaagcccacgggatcctagcacggcgcccatcttacaggtatggtgctgggtgcagatgca

SEQ ID NO: 822098 - DNA, 99 bp, Homo sapiens
tggctagcaggaatgcttactgttgcgtggttcgttattaacaggaaactaaatatattttgccaactttggaaaaagaattattcttggcagagcaca

SEQ ID NO: 822099 - DNA, 100 bp, Homo sapiens
tgcagctgacgatccgttggtgcatgaaagtcttctaaccattccaaaatctctttcagattacccattctgtttccacaagcaatgtaattggatttac

SEQ ID NO: 822100 - DNA, 100 bp, Homo sapiens
tcgtctcttacgtctgcggaagtgcagctgcctcagttcttagcgcaggtgactgaaaactcctgaggcatttcctggactagaatgggtagtgaagacc

SEQ ID NO: 822101 - DNA, 100 bp, Homo sapiens
aaaagaatttcatactggcctcaactagccttgggtccattcggatgatgaagtgtttgaaagaggattgaatgctctagttcagctaagtgtcgttgtt

SEQ ID NO: 822102 - DNA, 98 bp, Homo sapiens
gaacagattcctctgtggaagccagggagaagaggagcgcaatgtccctgctcttctctcgatgcaactctatcgtcacagtcaagaaaaataagaga

SEQ ID NO: 822103 - DNA, 98 bp, Homo sapiens
gacattctttcttgggaaagatgaagatgaaaaacaggacagtgactccgaatctgaggctcaacagtcactggagcttatccagtcaaaaatagtaa

SEQ ID NO: 822104 - DNA, 100 bp, Homo sapiens
ccgaaatcatgaagagcatcggtgaggccatccagtatctgcattcaatcaacattgcccatcgggatgtcaaggaaccagcagcacaaacactgttggg

SEQ ID NO: 822105 - DNA, 100 bp, Homo sapiens
gctgagcggccggcggcgcgggcccggcggcggcggcagcggggtccgggtccggagcgccacatgatcggcatgttggtaaaatttattccaaatgttc

SEQ ID NO: 822106 - DNA, 140 bp, Homo sapiens
tctcttcttgcatggacactactgctgaccatatgcccaatcaatgaagtgaagaaaaagcttgagatggtgaaatagtggtgaaaaataacccaaatgaatctgtaactgctaatgccgctaccaattctccttcatgt

SEQ ID NO: 822107 - DNA, 98 bp, Homo sapiens
tcagttcgaagagcagcattggaaactctgtttacgttattatcaacacaggaccaggctgaccggttccctgatgtgttacctgcttctgctactga

SEQ ID NO: 822108 - DNA, 98 bp, Homo sapiens
gagtttggagccccggagtggggtgtcggcgcctcattcgggtggagctgagccggagacagggtttcatcaccttaaatggttttgaaccaatgaag

SEQ ID NO: 822109 - DNA, 98 bp, Homo sapiens
ccagttccaagcctttagcacaagtcgcaatgatgatgtcaaatgcttttgttgtgatggtggcttgaggtgttgggaatctggagatgatccatggg

SEQ ID NO: 822110 - DNA, 100 bp, Homo sapiens
actgggtcccttgaagaatctacagatgagtctgagattcacaatgacatcctttcaagaagtcccattgcagacttccaactttgcccatgtcatcttt

SEQ ID NO: 822111 - DNA, 100 bp, Homo sapiens
aagcactacgagcttgctggtgttgctgagggctgggaagaaggaatttttatgtggtgggaagggcctggatcagctaattcagagactgcttcaatca

SEQ ID NO: 822112 - DNA, 99 bp, Homo sapiens
aaatattctctttggaatgggaaatcctctgcttgacatctctgctgtagtggacaaagatttccttgataagaagatgatccctatgatcttgaagat

SEQ ID NO: 822113 - DNA, 98 bp, Homo sapiens
tggaccagcagtatgacaccttccacaatggcagctgggtccacctcaccatcaacgtgccctgaggtacggctgaacatcatctctaacctggactg

SEQ ID NO: 822114 - DNA, 99 bp, Homo sapiens
ggaaatcaaggacttcctgctcacagcccgacgaaaggatgccaaatagtctgctgaaacgttaccagccccaccgagtcccttccacttgttgtgccc

SEQ ID NO: 822115 - DNA, 98 bp, Homo sapiens
accaagagtcttaatgccttcaacgtaggcgatgactgacttcagattttcctgtccttgatcccagctggactgctcaagaagaaatggccctttta

SEQ ID NO: 822116 - DNA, 99 bp, Homo sapiens
gaacctcagaacatgggtccgtggtcgtttgtttctccaaggtttgaaaagcagctggcctgcaaggtgacttaagagattaaaattaatttggttgct

SEQ ID NO: 822117 - DNA, 100 bp, Homo sapiens
aataatgatagaatgaagaccacaataaaagagacctctacttagctcagcaattcttaccttgagtggggtttaatctggactgaattggaggaaagga

SEQ ID NO: 822118 - DNA, 100 bp, Homo sapiens
cctctctcctgatacagcaggcgctcaccatgttccctggagctggaaaaggattttggtctgagatgctgggcgtgggggacttctattacgaactagg

SEQ ID NO: 822119 - DNA, 100 bp, Homo sapiens
tgatgatgacggccctgtgtccagccagggatacatgccctacctcaacaagtacatcctggacaagataaatcaagggagagatctcagtgtggtgtga

SEQ ID NO: 822120 - DNA, 100 bp, Homo sapiens
tcagcccttctgagctctgtgctgaacaaggtggatttcattgactgggtagacaacatgtggccaaggcacttgaaggaaagccagactgaatcaacaa

SEQ ID NO: 822121 - DNA, 100 bp, Homo sapiens
ccagatcatccatgtgagtgaccatgcagcaaaagaaggagggtcctctcagtgattaaggatcgcaaaagtggccgcacagccctgcatttggcagctg

SEQ ID NO: 822122 - DNA, 100 bp, Homo sapiens
tgaaaatcgtggccgggcgccatttgccagtgatggaccgtgctagtgacctgactgatgccttcgtggagggtgttgatgatgccttctatacattagt

SEQ ID NO: 822123 - DNA, 101 bp, Homo sapiens
cttaaagtaggacaaccatggagccttcctgtggcaggagagacaacaaagcgctattatcctaagttcaaaagacccctttcgtcacccaccctgggtat

SEQ ID NO: 822124 - DNA, 100 bp, Homo sapiens
taccccaccaagcaagctgctctgaaaagtgtgaaatcaaagttgcacaacccaaagaggtatataggcagcaacagcaacaacaaaaaggtggaagagg

SEQ ID NO: 822125 - DNA, 100 bp, Homo sapiens
cccagacggctcacctgtgcgggatggaacaaaaggacactgcccatctctaagataagaacctggaaaggggactctgttggccattggaaattgcaga

SEQ ID NO: 822126 - DNA, 100 bp, Homo sapiens
ctggcatatgccatggatttttggtccaaaggacaactgaaagctctgtttttggaacatgagcaaagatgtcaaggaagttaagcttacctactgacct

SEQ ID NO: 822127 - DNA, 100 bp, Homo sapiens
tgaaaccatcgtatggaaggcattcagccccactactgtcaacactggccgagtgaactttgaggcgctgatcatcaccatgtcggtagtcgggggaacc

SEQ ID NO: 822128 - DNA, 100 bp, Homo sapiens
aggccatggacaaacacaacctggaggaggaggagccggaggactatgagctgctgcagattctctcagatgaccggagctatgtatgtcaaaaaggatg

SEQ ID NO: 822129 - DNA, 100 bp, Homo sapiens
cggagagggcaataagagcctggtggtggcccacgcgcagtttcggagcaacatcccctgtcacctggttgatatctcttgcggattaccctgcagtgcc

SEQ ID NO: 822130 - DNA, 100 bp, Homo sapiens
tatgcattcagcttcgagcttccacagaccggagcgtgctttggacaccatgaattttgatgttataaagggcaagccagtacgcatcatgtggtctcag

SEQ ID NO: 822131 - DNA, 98 bp, Homo sapiens
tccgaaccccttcatgcccaaatcccggaaactccagcgtgtctccagccgtgccaccctgaagggtcccttcccaagcccttagggaccgcagagga

SEQ ID NO: 822132 - DNA, 98 bp, Homo sapiens
aattacaggaatcttctctcattgggtctgtgcagacttttgcagacaaatcaaaacaagaagctctgaagaatgacctggtggaggctttgaagaga

SEQ ID NO: 822133 - DNA, 100 bp, Homo sapiens
gaaaatctctaaatgcagattccagaaaaattacagcacatctcagtgaatttgcaagtggtgcagtggcttctatgttttgggttgatgctgaattagg

SEQ ID NO: 822134 - DNA, 104 bp, Homo sapiens
agcctggggtgaggaatgcagtgagaagggtgttgcagttcttcaggagagagcggagcgtgctttggacaccatgaattttgatgttataaagggcaagccag

SEQ ID NO: 822135 - DNA, 50 bp, Homo sapiens
ttaaggattccaagtaactcttatttggatgtttgcacacttgctcacgc

SEQ ID NO: 822136 - DNA, 98 bp, Homo sapiens
ccgattttgattgatttccatgctctgaaagacatccttgggcccccgatgtatgaaatggagctcttcccctccccactgcagaccctctccaggaa

SEQ ID NO: 822137 - DNA, 100 bp, Homo sapiens
ttgtctctacctgcagacattagctagttttctgaatttccagatcccatgtggggttcagattatgtgcagttgtcaaggacaccaccttcatctgagg

SEQ ID NO: 822138 - DNA, 100 bp, Homo sapiens
gatggagacaccctctgggggtcctctctgagtcaaatccagtggaaacattaaagaatgtgcttcagagagaaaggaaatgaaaccaaatggaaatctg

SEQ ID NO: 822139 - DNA, 98 bp, Homo sapiens
gatttgctctatgatcgtgataaagattctgaagggagtggtaatggaagtgaagatgcttcaaaggacagtggagaaggttcctgtagtgattctga

SEQ ID NO: 822140 - DNA, 100 bp, Homo sapiens
ccaccttccgaggcaggaacagcacccggacggactacgagtaccagcactccaatttgtatgccatatcagctccagagtttcctattttggagaagca

SEQ ID NO: 822141 - DNA, 100 bp, Homo sapiens
ggtcagtagctggatcctttgataatgaaggcattgctatttttgcacttcagttcacatactatttatgggaggaataaacatggtgtgtctcgaaaga

SEQ ID NO: 822142 - DNA, 100 bp, Homo sapiens
ggcggtgctgcaagagaaggcactcaagtttatgggtacttaccaaaagctgctacctctctacttcccaaggtcattaaaagaggagaatcgatcattg

SEQ ID NO: 822143 - DNA, 100 bp, Homo sapiens
ctcccatagacatgtccaaagacttccactacagaggcagaaagtgaaactcttcactgctcacaacaatatgaccaactatgctaccgtatgggcatca

SEQ ID NO: 822144 - DNA, 100 bp, Homo sapiens
gatgatttacttggagaagatttgctatctggcaaaaagattacataccggttacggcacctccttcgtgcaaggtgtgatgcatccccagtgaccaaca

SEQ ID NO: 822145 - DNA, 99 bp, Homo sapiens
acagagccatactgcgttatagcggccgtgagtgtggatgaggtcaccattgtcaacattttgaccaaccgcagcaatgcacagagacaggatattgcc

SEQ ID NO: 822146 - DNA, 99 bp, Homo sapiens
aatgggaggtgctatggatttagtgtccagtgcgaaaaccaaagtggtggtcaccatggagcattctgcaaaggaatcctatgaggatggttgtgagga

SEQ ID NO: 822147 - DNA, 100 bp, Homo sapiens
ccgcctttcgggggctccgcgcccagcgagcgcttggagctgcacgtggacgctgcaagctttcttcctggtggcagatgacatcatggattcatccctt

SEQ ID NO: 822148 - DNA, 98 bp, Homo sapiens
tctgcccacagccctccactcaacacaggaaggaatttgctgattcccttggaattccgtttttggaaaccagtgctaagaatgcaacgaatgtagaa

SEQ ID NO: 822149 - DNA, 98 bp, Homo sapiens
agacagtgaacaaaggcagtctgttgaggcatctggacaccacacacatcatcagtctggacacatgctaaccaagagtgagaagaaccagttattgg

SEQ ID NO: 822150 - DNA, 98 bp, Homo sapiens
gcaatcacagagactcggagagcatcactgattgccacggcagtgaagtttctacagaattcccgggtccgccagagcccacttgcaaccaggagagc

SEQ ID NO: 822151 - DNA, 98 bp, Homo sapiens
cagccgtgtgacagtaactgaacattggtctaaagtctttccaaaaggtcaaggttcacaagccacattgctgtgaggaagcctgggctacatggaga

SEQ ID NO: 822152 - DNA, 100 bp, Homo sapiens
gaatgaatttgaagaacgggtaacagtggcctttatacgaacaatccaggttcgatacaagaggctgttttcctagcgtggcttgctgcctttggtaaga

SEQ ID NO: 822153 - DNA, 99 bp, Homo sapiens
gagagtcgtgaagcagttgagaaagaatttgagcctctgctgaattggatgaaagataaagcccttaaggacaaggaattggcagcaatgaaacagatt

SEQ ID NO: 822154 - DNA, 98 bp, Homo sapiens
tggcaggctgggggatttttatcaaagatcctgtgcagaaaaatgaattcatctcagaatactgtggagaggaatttgctgacacaatatcttccgcc

SEQ ID NO: 822155 - DNA, 98 bp, Homo sapiens
tctctcacccatccatgggaagccctgctactgctggattagcgccaggttcagcgtcttccatttctttcaagctcaaatctttcactggatgtttt

SEQ ID NO: 822156 - DNA, 100 bp, Homo sapiens
caatgagatcgtggacaagatcatgggcaaaggacagatccagctgcatcttcctcccgtgaggctggccgagctccacgctgatctgaagatacaggag

SEQ ID NO: 822157 - DNA, 100 bp, Homo sapiens
agttgtgccccaacttgtgaagcttctaggagcttctgaattgccaattgtggtacaggtgaacaaaggcagagtaaactgtcaccccagatgcaggtac

SEQ ID NO: 822158 - DNA, 100 bp, Homo sapiens
atgtggagaggaagatcttggacttatttcagcttaataaggattaaactgcaaatatctcatgaagctgctgcctgtatcactggtctccgggcagcca

SEQ ID NO: 822159 - DNA, 98 bp, Homo sapiens
tttcctgaagtcaccacacatagaggagagagaaaatggctgagttaaagggctattactgtgtttcgaccccaaaacttcaatcaatttttcatcca

SEQ ID NO: 822160 - DNA, 99 bp, Homo sapiens
aaaccttgagaccctgagactttcagaaacttattcacagttaccaaagctgctatttgaactgctgggacctgaaggacttgaacttattgagaaact

SEQ ID NO: 822161 - DNA, 100 bp, Homo sapiens
cttatggcggcgctggagagggggcgctgagctgttgggtgctatatgttccacatgtatgttggagttcgtgctggaggagggatcggggatgaaatcg

SEQ ID NO: 822162 - DNA, 100 bp, Homo sapiens
ccttgagggaagtctgcgatgatgaaagagattgtattgctgttttggaaagaattagcagattggccgatgattcagatggagttttgctcttgtcacc

SEQ ID NO: 822163 - DNA, 98 bp, Homo sapiens
cttgatgttcatttctctcatctataaaattgaaggctggaggagcacttaaatatagatccggtggtatggatgagaaaacaattgctttacttgtt

SEQ ID NO: 822164 - DNA, 98 bp, Homo sapiens
agtcacaggcacatcagcaaagagagcaggaaagtccaatccaaccttttatctccagaagggctttcaaacatatgtgctcaggaaaaaaccaccag

SEQ ID NO: 822165 - DNA, 98 bp, Homo sapiens
caggagctggatccggcttccggaaggcgcagttgtgtagcagttgagtaatgctggttagctgttaaggtggcgtgttgcagtgcagagtgcttggc

SEQ ID NO: 822166 - DNA, 98 bp, Homo sapiens
gaacctgcaccagatggcagatagcagctcctttggcatgggcgtgtggtccaaggttcttctttgcggtccagttggtccaaagctacatgagcttc

SEQ ID NO: 822167 - DNA, 51 bp, Homo sapiens
gctcaatgcaggtattcaagcagcttcctccagattaggccgagcacttgc

SEQ ID NO: 822168 - DNA, 100 bp, Homo sapiens
gtggaagtggttggaaatggcacctatggacaagtctataagattctgcttctcagaagatgcactattatagatactctaacgccaaggtcagctgctg

SEQ ID NO: 822169 - DNA, 51 bp, Homo sapiens
gcgtgactttcccctcgggtccaggccaacatagccgaggtagaggtctcc

SEQ ID NO: 822170 - DNA, 99 bp, Homo sapiens
gagcaagtcttgagggatgcacctatggattccattgaatgggctgaagtggtgatcaatgtgaacaatattctcaagctatcagttgagggatttgca

SEQ ID NO: 822171 - DNA, 98 bp, Homo sapiens
tagaatcaagttataatgaggaaatcttgggcttgatggatcctgctttgcaaatggcaaatacgagaatgaagacctttcgaatccgtcaaaaccta

SEQ ID NO: 822172 - DNA, 100 bp, Homo sapiens
tgtgagtgaccatgcagcaaaagaaggagggtcctctcagtgattaagctccggaccaaaatttaacagtgccatccgaggaaagattgggttgcctcat

SEQ ID NO: 822173 - DNA, 137 bp, Homo sapiens
aaactttgtgattcaggagaactggtcgccatcaagaaagtattgcaggacaagagatttaaggttatcaatactctggctgaccatcatcatcgtgggactgactttggtggaagtccttggttacatgtcattat

SEQ ID NO: 822174 - DNA, 100 bp, Homo sapiens
gagattggaatcaatgcttatggacataggcacaaactaattaaaggagtcgagagacttatctccggacaacaagatggagaggagaaaacctatggtg

SEQ ID NO: 822175 - DNA, 98 bp, Homo sapiens
agctgtactggagccacccgcgaaaattcggccagggttctcgctcttgagggggagagacttgatgccaaaatgaaaagactagaatcaaagtacgc

SEQ ID NO: 822176 - DNA, 99 bp, Homo sapiens
gatgtctccctgcctctcaataccttgggcccagtcatgaagatggaacctctgaataacctccaggtcacagggattatggacccagaacagatgctg

SEQ ID NO: 822177 - DNA, 99 bp, Homo sapiens
aagaaaggattcgttacagccagagattggtggataatattaatgcagctgtgatggatttgaaaaaaaagaagatccgcagtctaagtgaagaggtca

SEQ ID NO: 822178 - DNA, 100 bp, Homo sapiens
ggtacctctccttttccctctccctttccctaagttgacgaaggatcagagattggtgtattcgggcagactgcttcccgatcatctgcagctgaaagac

SEQ ID NO: 822179 - DNA, 100 bp, Homo sapiens
ttttgcaccactggatgttgtttactgttttaccaacagactgcagtttcttcactaccaaaatgacatcattttccacctctgctcagtgttcaacatc

SEQ ID NO: 822180 - DNA, 99 bp, Homo sapiens
acattttatgttgtctctttccgaaggcgcacataaaatccaaatcccacttgaaccaactgaagaaaagaagaagattggactcagatgctgtcaaca

SEQ ID NO: 822181 - DNA, 99 bp, Homo sapiens
gtgcttctgactatcttctcttcaccagctcttcagatcaatatggtaaatatgctgaagatatatttggagaattattcaatgaagcacatagttttt

SEQ ID NO: 822182 - DNA, 99 bp, Homo sapiens
tcactgactggcacaggtgttgggctatgaagatttttgtaacaactaaaaactcaaaaaaccaaggcatagaggaagctttaaaaaatcgcaatttta

SEQ ID NO: 822183 - DNA, 101 bp, Homo sapiens
gtatcctgtcaagggggcaagtggataccctggggctgagaggaatcttctggagtactcttattttgaaaaggagcactttagtgaataaagaacctgac

SEQ ID NO: 822184 - DNA, 98 bp, Homo sapiens
taacagtcctttggacagcccccggaatttctctccaaatgcacctgctcacttttcttttgttcctgcccgtaggctcccaggccagtgccagtact

SEQ ID NO: 822185 - DNA, 98 bp, Homo sapiens
gaaaatggcggacgggaaggcgggagacgagaagcctgaaaagtcgcagcgagctggagccgccggaggaaatggaagttccagtattaccgaaaatc

SEQ ID NO: 822186 - DNA, 99 bp, Homo sapiens
ttctactcttacaaaggaactgtccacactgctgaaaaatctgttacagctcttttgaggaagcttaagcagcaatccagggaaagtgttgaagaaaaa

SEQ ID NO: 822187 - DNA, 100 bp, Homo sapiens
gcagcagaggctgttggaggccaagcggaaagaagagcaggagcttcatcagctggaaatgcagctggagcaagagtatgaagagaagcagatggtcctc

SEQ ID NO: 822188 - DNA, 100 bp, Homo sapiens
tgtcggttttcaataacaagaacagctattactcgtggaggagcccaggaagaggctcctggtttgtgcaagccctctgctccatcctggaggagcacgg

SEQ ID NO: 822189 - DNA, 100 bp, Homo sapiens
aggcctccgggcccggcgccgccgcccgcagacttaattcagtgcacaaatgagatgaatgtgaacatcccacagttggcagacagtttatttgaaagaa

SEQ ID NO: 822190 - DNA, 98 bp, Homo sapiens
aaaagtggctgtcgtgaagacatctgcgtgtgcggggtgcgtgggtgcctggagatgaagctggaaaggtgctcagaattttgatgtcatacgactat

SEQ ID NO: 822191 - DNA, 98 bp, Homo sapiens
gtgaccttcgcttggtgtcctcctggcctcagcaacctgacaattctgtcgtgtcccgattgcattctcacaacacaatacaatcatggaccttgtgc

SEQ ID NO: 822192 - DNA, 98 bp, Homo sapiens
aatagctagaagatccagtaaatttgctggcacccgttttcttaaaagaggtgcaaactgtgagtttttcagttatgggacaaaaatattatatcaaa

SEQ ID NO: 822193 - DNA, 100 bp, Homo sapiens
ccccgttacactctatgactgtcatggcatgaaggggaaccagctctggggataccggaagcattagtgccagcagtagttcccaagggctgtctcagcc

SEQ ID NO: 822194 - DNA, 100 bp, Homo sapiens
atggtgtttccatgacgactttggaagacgtatttttaaagctagaagttgaagcagaaattgaccaagcaggatttgtactgtgttcgcagtgacctgg

SEQ ID NO: 822195 - DNA, 106 bp, Homo sapiens
cggcagacggcgacagtggcggcggcgccatggcagggcttgcaggtcttgctcagtgtgcagaactctgctggcagctgagaggggaagccggaaagaggcaagt

SEQ ID NO: 822196 - DNA, 100 bp, Homo sapiens
atcaggatcggaagcctgcgtaactttctcccttgatccgggagtctttccactgggctgttactgaggcggagacacgggtgatgattggctttctggg

SEQ ID NO: 822197 - DNA, 100 bp, Homo sapiens
tacaggagaattcggtttgtaggtcgtcagaaagagaatgcactgctgcctgcaggcctgaggcagaaggatcagaccaccaaggcgcccacgggcccct

SEQ ID NO: 822198 - DNA, 100 bp, Homo sapiens
aaatacgcagattgcttggccatcaaaactgaagatcggagccaaatccaagaaaggtggggagcattaagcgggaaatgaccttcacatttcagtcaga

SEQ ID NO: 822199 - DNA, 99 bp, Homo sapiens
aaagatggaggatactttggttaataatagtgatcagcagctggactgtgccttggacctaatgaggcgcctgcctccccagcaaatcgagaaaaacct

SEQ ID NO: 822200 - DNA, 98 bp, Homo sapiens
tttggcttctgtctcacctagacccgtccggtcgcagactgtctccgagacgcttcctgtccgactctgagatttgcccacctgatgaccttgccagc

SEQ ID NO: 822201 - DNA, 100 bp, Homo sapiens
tcccactccgcgaggacagaggactctgcaagaagcttcaacattgctttatggcatgtgtggtcgtttttcactccattgttgttgtttacccagttta

SEQ ID NO: 822202 - DNA, 100 bp, Homo sapiens
tgggacttcccgtccgcggcgtggaggtactatactggcaattgctggagaagattttgcaattgttgcttctgatactcgattgagtgaagggttttca

SEQ ID NO: 822203 - DNA, 100 bp, Homo sapiens
gcaggaaaagatctctctacttctcctaaggtactccaaagattcaggtttactcacgtcatccagcagagaatggaaagtcaaatttcctgaattgcta

SEQ ID NO: 822204 - DNA, 100 bp, Homo sapiens
ttttgatttattaaatttaaatagattagtaactggcatagacaactatgggcaggttcagaatttaacattacgcagccagaagttgggtgtattatct

SEQ ID NO: 822205 - DNA, 100 bp, Homo sapiens
atgccgctcctaagcctgcacagccgcggcggcagcagcagtgagagattgtggacctgacagtgggcaacaacaaaactctcctggacattgacaacac

SEQ ID NO: 822206 - DNA, 100 bp, Homo sapiens
tttcaggaggaagcgatggcttcagacagcatatttgagtcatttccttcgtacccacagtgcttcatgagagcacttgcactattactcagcagcagta

SEQ ID NO: 822207 - DNA, 99 bp, Homo sapiens
acagcaatatctctgggctttcacagagccaaagccttggctggacagtcagtacgaatctgtaaaggccccagggctgtgttttcccgcatcttgcta

SEQ ID NO: 822208 - DNA, 99 bp, Homo sapiens
ttttgtgaagcggcagctgaggagactccggcgctcgccatggccgacgaaaagcccaaggctttggaactgcgacataactagcgatggctgctgcga

SEQ ID NO: 822209 - DNA, 98 bp, Homo sapiens
ggccatagcagggaataatttcaatttgaaaacaagtggaatagtgctgtcttccttgatacaaactggactctcaggacaaaacgacaccagccaaa

SEQ ID NO: 822210 - DNA, 100 bp, Homo sapiens
aagcgtcacttgacaagcctatagaatcggcatcctctggtatcacgattccaaaacccccaaagccaccagataagccgctgatgccctacatgaggta

SEQ ID NO: 822211 - DNA, 98 bp, Homo sapiens
tagcaaaaaagatgatccgggtataataatgaagttaaaagagcagcactccaagcaaattgaaccatctttgtatcctaagttgtttcagaaaaatc

SEQ ID NO: 822212 - DNA, 153 bp, Homo sapiens
aaaatcgaagaagcacctagaagaataagagatgtgattaatgtattccaccacctccgccagttaagaggaaaaaggaggtgaaacagcagaaatgcctgacatgtatccccctggagagtatgacctagctgggtttgccgttggtgccat

SEQ ID NO: 822213 - DNA, 100 bp, Homo sapiens
tcgacgtgtaccactacgaggtggacatcaagccggataagtgtccccgtagagtcaaccggttccaatactgtgttgcagtgggagcccaaactttccc

SEQ ID NO: 822214 - DNA, 100 bp, Homo sapiens
ggcgctgcaggagatgctggctaacaccgtggagaaatcagaaggggttgcctacaaagctgattataaacatgatattgtcgactacaactacccagcc

SEQ ID NO: 822215 - DNA, 100 bp, Homo sapiens
tgcagtttgccaagtgaaaaagagcgatacctctcaagtcaaagcagcaggaagataccacaatcagaccctccgctggttatattctgggcactaaatg

SEQ ID NO: 822216 - DNA, 100 bp, Homo sapiens
tataatgaggatgatgcaaaggcagcaagagatgcacaggaggttcttctttgcggtccagttggtccaaagctacatgagcttcttgatgacaatgtct

SEQ ID NO: 822217 - DNA, 100 bp, Homo sapiens
ctcggaacccctcactcatgaagcaggtttctaagcatgaattgaggaacagaagaagcagagcagatgatcggagcagcatttgtttctccccaaatct

SEQ ID NO: 822218 - DNA, 100 bp, Homo sapiens
agcaacctctttcaggctttaataggtacgaatttggtcaggctctcttcactggctgggctgctgcttctctctgccttctgggaggtgccctactttg

SEQ ID NO: 822219 - DNA, 100 bp, Homo sapiens
aaggagctgaaagaacatggtccagaaaacattgtaatggccatcgctggaaacaagtgcgacctctcagatattaggacttgtcttacaaggaccggca

SEQ ID NO: 822220 - DNA, 123 bp, Homo sapiens
cggcgctgatctacaagaaaatccacaagaacgcactttcctcccaggtggataattactgtaccttcctcatggaaaaagttttatttaaagtgttatttctcattgaatactatcaaaaag

SEQ ID NO: 822221 - DNA, 99 bp, Homo sapiens
aacgattgatgaagtagttgaggtaatctacagttgctgcagaactgcctggcagtgttaaatggagacacataagccacactccgccttcctgttaaa

SEQ ID NO: 822222 - DNA, 100 bp, Homo sapiens
gaacaaacaaagggctgcaactacgttttaagacaattatctcctatattgatgagcaatttgagaggtacctgcatgacgagagcggcttgaacaggcg

SEQ ID NO: 822223 - DNA, 100 bp, Homo sapiens
tttgttccatgctgaggggggatttcagatttcatggaagctgccaaagaatgtcgacgtcgaaagaaagaatatgtaaaatgtctggagagccgagttg

SEQ ID NO: 822224 - DNA, 100 bp, Homo sapiens
ggaggggccctttggtggtggtatggaaaacatgggtcgatttggatctgggatgaacatgggcaggataaatgatgagctgcttcagaaagagcaaaac

SEQ ID NO: 822225 - DNA, 99 bp, Homo sapiens
atctcttcgttcttcctggaacacttactatactaacacagagatatggagtctggagaacggttaccatcctcagcagcctcctctactacaccaact

SEQ ID NO: 822226 - DNA, 98 bp, Homo sapiens
tgctggtgacagcttcgaaggacagagatgttaagctatgggagagacccagtatgcagctgagtttggagcctcttccatcaagtggacctgatttt

SEQ ID NO: 822227 - DNA, 100 bp, Homo sapiens
ttatatcatttaaaccacatggctatctaaagaggaaggatttttactgggagaggtaagacaagaggaaacgtttagcatcagtgactcacaaatcagc

SEQ ID NO: 822228 - DNA, 100 bp, Homo sapiens
agcttactggaggttttggctctgcgtgagtgtggtctacgagctgtttctcatctttatactcttccaggtctctaattaacagaagatggcaaagccc

SEQ ID NO: 822229 - DNA, 99 bp, Homo sapiens
gcgcaagtcgagaggaaactgttgtgcctcttcatattggcgatcctgttgtgatgctcaggaattcagtgatgtggagagggccattgagaccctcat

SEQ ID NO: 822230 - DNA, 98 bp, Homo sapiens
gcgccgtattttctactagcgtggaggaacggaggaagaatccattcacactccccaaaccagacaccaccacacgcctcctgctgggtgccatcgcg

SEQ ID NO: 822231 - DNA, 50 bp, Homo sapiens
ttcatcactcgtgacttcactcagccttgatcatggccttgccaggttgg

SEQ ID NO: 822232 - DNA, 98 bp, Homo sapiens
gaagatgatgtgagtgatgaggaaggacaggaactctttgacacagaaaatgttgttgtatgccaatatgataagctatatgttctcctttcagccaa

SEQ ID NO: 822233 - DNA, 101 bp, Homo sapiens
tgcgaacattccttttaacctatgtcttacaaaggcccaaggtgataaaagaaaatgtggctgaagttacccgaagttcagcttgcagtgtaattcagaag

SEQ ID NO: 822234 - DNA, 100 bp, Homo sapiens
agtccaccatttgaccaaccaatgagtcgaaggtctcgtagagcttccttagttttggatacaaaggaccttacaatagaaaaagtagtgatcaatggac

SEQ ID NO: 822235 - DNA, 100 bp, Homo sapiens
atgaaggagagtggagtggcccaccacctgaatgcagaggatgacgatgtcgataccaagaagcagaagaccgacgaggatgactagacagcaaaaaagg

SEQ ID NO: 822236 - DNA, 113 bp, Homo sapiens
tcgttcttggcagaaattatattttccagcccgtgtctgcagattgtctccagctttaagaccacgacatcgagagctgcctgccagctcgtgaaggagtacatcggccaccg

SEQ ID NO: 822237 - DNA, 98 bp, Homo sapiens
gtacgctgccctgctcaccaagcacacccgcaaggtcgtgcacgatgccaagtcctggatcagtgacattcgagcaggaaccgccccttcatgcagga

SEQ ID NO: 822238 - DNA, 98 bp, Homo sapiens
gcagtggcggcgcaaccagccttctagggcggcggaggcagagatcctacaagaatccaggatgatgatcccagattgccagcgcaggttggaagccg

SEQ ID NO: 822239 - DNA, 99 bp, Homo sapiens
tggaaggcagcttccgtcgaagaggagggggctgcggtggccaccgcggcggagcccgaggtatctcagatgaagacatcatcaacattactcttccta

SEQ ID NO: 822240 - DNA, 99 bp, Homo sapiens
tctttccaaatacgtcagatccccaaaaagttccatcaccgggacagcttcaacacagggtccacagcgtggggcatttcccagtgtctatccgacagc

SEQ ID NO: 822241 - DNA, 100 bp, Homo sapiens
gttcgctgcccggtccgcccgcggtgagaggtttggtgcacctcgatttggaggaagtagggcagggcccttatctggaaagaagtttggaaaccctggg

SEQ ID NO: 822242 - DNA, 99 bp, Homo sapiens
tgagacagagttgcgaccgcgcggcagatatttagcttcctgtggtatactgatgagcagaactcttccactacatacctcaattttgcctaaggagat

SEQ ID NO: 822243 - DNA, 98 bp, Homo sapiens
caaggaggtttacaaaatagacatgccgcccttcttcccctccgaaatggatgaggatcgcagtacggaacctgaccgattgcaggtgtttcacaaga

SEQ ID NO: 822244 - DNA, 100 bp, Homo sapiens
ggatgaagattcaccaaataagctatatactttggttacctatgtacctgttaccactttcaaaactcagcaaaacccagcagctcagattcctgccagg

SEQ ID NO: 822245 - DNA, 99 bp, Homo sapiens
tctccacaaaaacagagagtaaatatagtaaaaggcaatgagaaccccagaaacagaaagcagctacaacctggaatgtatcctgtcaggtataatgtc

SEQ ID NO: 822246 - DNA, 100 bp, Homo sapiens
acgatgccgctctccgaaaaatcacctttccccacggaggagctttatctttatatactgcccttaccacacagcagaaactggcaggtgtcactgcact

SEQ ID NO: 822247 - DNA, 98 bp, Homo sapiens
atttttggagattttagccctgatgaattcaatcaattctttgtgactcctcgatcttcagttgagtggcctgaggcttccaccactaaacgcaaagc

SEQ ID NO: 822248 - DNA, 100 bp, Homo sapiens
aacaaagtcagatggacacttacacctcggatgaacaagaaagtttggaagtctgaccagtgcacaggacttcagggcttcctggtgttccacagctttg

SEQ ID NO: 822249 - DNA, 100 bp, Homo sapiens
cccacagccaacttccaacaagatgtgggcacaaaaactaccattcgcctgatgaactctcaggccaccaccacctatcatgacagatggtgaagatgcg

SEQ ID NO: 822250 - DNA, 100 bp, Homo sapiens
agtatgaagagcggatgaggatacagaaggctggaggaaacgtcaggtgacaactgttgatagatttcaaggtcaacagaatgactatattcttctttct

SEQ ID NO: 822251 - DNA, 100 bp, Homo sapiens
ctgttttccccaggccagcatccttcagaaaaagcatccccgaggaggaagacgaatcgttaaacatcttaggtcaggcagtagaagatggtgaaagaaa

SEQ ID NO: 822252 - DNA, 100 bp, Homo sapiens
gctctcggggccagagggaaagcagagccggccctgcatggaggaaaatgaattgtacagcagcgcagtcacaggctggagtgtaatggcacaatctcgg

SEQ ID NO: 822253 - DNA, 98 bp, Homo sapiens
tcgagcccccagaaaggtgcttggttcttccacctctgccactaattcgacatcagtttcatcgaggaaagagcatatcatgtcccgagtgggaaaat

SEQ ID NO: 822254 - DNA, 100 bp, Homo sapiens
tgttcccattctagcgcctagaatttttggctccaataaatggctgccaaacgagggattctttcatctggtcggggcagaggaattcattcaagaggtc

SEQ ID NO: 822255 - DNA, 100 bp, Homo sapiens
cataatgaagctgagcttggcgatgatgacgtttttacaggacatctctacaccgttcccatccgggaacagggcaacatctacaagcccaacaacaagg

SEQ ID NO: 822256 - DNA, 100 bp, Homo sapiens
atgcacggttgtgttgcgtgtagcttccactttcataagggcaagtgtccagagaatggctgggatgaaagtacacttgaactctttttacatgaacttg

SEQ ID NO: 822257 - DNA, 98 bp, Homo sapiens
ggagttcttccagaacgccaaaagttacttggactcaaagttaaagcatccaactggtccatcacagtgctattcagaaatctaccaaggagcttcga

SEQ ID NO: 822258 - DNA, 113 bp, Homo sapiens
cagggagtgatggtcagctaggactcatgactactgaggattctgtggcagtgcccagggaaaaccagaaataccgggtatatgtcgtgataccacttctgccagggttcgaa

SEQ ID NO: 822259 - DNA, 98 bp, Homo sapiens
accaaggatttccaagtgatttcttccaaagcacaggaatctcactctgttaaagctggtctgttctaactgagctgctagcagaagaaagtcttccc

SEQ ID NO: 822260 - DNA, 100 bp, Homo sapiens
tcccaatgccatccagagctgtgcctcccagcaccacagtccttctgcagtccctcgtccagccacccccagtgcacagccagagaacaacacatcacac

SEQ ID NO: 822261 - DNA, 100 bp, Homo sapiens
ttgaaaatactgttaccttgaaggaccttcttttgaacaccatgtcccaagaggagaaggcggcttacctgaggtaaggatagatacattaggcttgctt

SEQ ID NO: 822262 - DNA, 100 bp, Homo sapiens
atgaagtgcagaggtttttttctgtatggaagctccaaaaggaaagataccagattgatcttgatcacctctgcctccccagcacctagtcttccttggc

SEQ ID NO: 822263 - DNA, 100 bp, Homo sapiens
ttgccagttgagaacgatatacatatgtcagtttttgacaagaattgcagcaggaaaaacccttgggttctccaaaaaatgtggaatcctttgcatctat

SEQ ID NO: 822264 - DNA, 100 bp, Homo sapiens
atgcgggaccagatcatccgcgtgaagcgaatcgagagctccagatcatgagaaagctagatcactgtaacatagtccgattgcgttatttcttctactc

SEQ ID NO: 822265 - DNA, 100 bp, Homo sapiens
acatccggaaatcctgccaacagtgcaaggaagcctggttcagcaggtggccctaaggttggagcactattcctgatcagagaactccagttgcttcaac

SEQ ID NO: 822266 - DNA, 100 bp, Homo sapiens
aaagatggcatctggctggttcagacttttggggataaaaacagaaactccaagtactgtatcaacaaatgcaagtacaccacaatcagtgagcagtgtg

SEQ ID NO: 822267 - DNA, 100 bp, Homo sapiens
accagttctgtttgcctgttttggatagcaatgatcccaatttccagatgccttgttcaacagatggggaaattgaggcagagaagccaagacatgtgct

SEQ ID NO: 822268 - DNA, 100 bp, Homo sapiens
tgggtgtaatacatcatgaactgcaggaaaacttggaatataacgtggagcctcaagaaatctcacaccctgacgtgggacgctatttctcagagtttac

SEQ ID NO: 822269 - DNA, 100 bp, Homo sapiens
ggggcacgatgttgaacatgtggaaggtgcgcgagctggtggacaaagcgtgttgaaaagtctcctctagagctttggaaggctgaatgcactaaacatg

SEQ ID NO: 822270 - DNA, 99 bp, Homo sapiens
gaattcagaaggatatcgacgtcgtgatccagaagtccagagctgaggactgcctgtttgcagatgactctgttagaccaaatatgactttaaaggcca

SEQ ID NO: 822271 - DNA, 98 bp, Homo sapiens
ttaatcctgtaaatacgaatctttccaaaggagatgcccggctttgatgaactaggtggacttctcaaaccaacagtggcctctcagaaccagaacct

SEQ ID NO: 822272 - DNA, 98 bp, Homo sapiens
acaggatgctgagaggaccaacacaagagcaaagtccctgggagaattcattaaggagcttgcccgggatgcagaagaggagatttgcaccctagtta

SEQ ID NO: 822273 - DNA, 100 bp, Homo sapiens
aaaaacttccagaacatctgggagaatatttaatggaaaatcgcttggttaaaacctgacacttttaacaggttatcaatactctggctgaccatcatca

SEQ ID NO: 822274 - DNA, 100 bp, Homo sapiens
aaccaaagtggaaatagcaaattcaagagagaagaagaaggaggttcctgctgtgccagaaacccttaagaaaaagcgaaggaatttcgcagagctgaag

SEQ ID NO: 822275 - DNA, 100 bp, Homo sapiens
gtacgtgtacatcatttacggcatgtacttctgcatgaacatctccagccaggtaagactttgaccccgacgcaggcttcagtgattgccgcggatcaga

SEQ ID NO: 822276 - DNA, 100 bp, Homo sapiens
gcggaagatggtgttgctgagagtgttaattctgctcctctcctgggcggcggggatgggagaaacatgagttctgctggcgctgatgggagaaaagcga

SEQ ID NO: 822277 - DNA, 98 bp, Homo sapiens
tcccgggagacggcgggcatgacggctacaggatgggcgcgaacaatggcaaacagtacggcagtgagggtcccgcaggctcccgatggcgagattac

SEQ ID NO: 822278 - DNA, 100 bp, Homo sapiens
cattcctgtgaagacagtgaaaaacgcctcaggcctagttctccctacaggagatacaactcgtcaacgaatcaaattcagtgatgacagagtatgcaag

SEQ ID NO: 822279 - DNA, 100 bp, Homo sapiens
gatgctcaacagatgtatattcatgaaggctttcttagaaatggcttctgaggaagctgccgttactatggtgaattattacactcctattactcctcac

SEQ ID NO: 822280 - DNA, 100 bp, Homo sapiens
catcacagtcaactatcgacttggagtactcggctatggaaagggcaaatggaatggagctggatggtagaagaattcgggtggattattctataaccaa

SEQ ID NO: 822281 - DNA, 99 bp, Homo sapiens
gagcatccgggatgggatccacggacccctgcttttgtgatggacgcctctgaccccacccagctctctgcatcctgtgtgcagctcttaggtctcctt

SEQ ID NO: 822282 - DNA, 112 bp, Homo sapiens
cttttgaaccaggaatgtttcctcctactcctctttcacctgccaggttcaatgattccactcagttacaacagcttcataaccaagtcttactggaacaacaccaattgca

SEQ ID NO: 822283 - DNA, 98 bp, Homo sapiens
tatgcacgaaagaagagtgctggacttttgactggtacagtttcaccagtgatcattaaagaatgggcagcttacaaaggaaagtctcctcaaacccc

SEQ ID NO: 822284 - DNA, 100 bp, Homo sapiens
ctctgacgaaggactggaaggtggcggtggtgaaggtgcaggccgttggggcggctcagaggcagctctgcggccgtcacgatgttctggaagtttgact

SEQ ID NO: 822285 - DNA, 100 bp, Homo sapiens
ttctggttcacagtcatcaccctcagctttggctactacacagtatgtgcaggtgaaatttgtctgcattcggacccaatcaaacaggaagagaacgcgg

SEQ ID NO: 822286 - DNA, 100 bp, Homo sapiens
ggatgctagagagttcctggataaacagacttaattcagtgcacaaatgagatgaatgtgaacatcccacagttggcagacagtttatttgaaagaacta

SEQ ID NO: 822287 - DNA, 98 bp, Homo sapiens
aagactggggctgctcccatcattgatgtggtgcgatcggttcaagtgctggattgtgtcatgtgaccatcccaaaactcagagcaccctatggccgt

SEQ ID NO: 822288 - DNA, 98 bp, Homo sapiens
ggaccttccgcaagttcacctaccgcggcgtggacctcgaccagctgctggacatgtcctagtgcacagcgacttcaccgcggcagccaccaggggcg

SEQ ID NO: 822289 - DNA, 101 bp, Homo sapiens
gcggccaacatggcggaacgcaggagacacaagaagcggatccagaatatgagttggaagtaaagagggtgcaagacattctttcgggaatagagaaacca

SEQ ID NO: 822290 - DNA, 100 bp, Homo sapiens
ccgcccgcggacctgcggcccgacgaggaagttttctactgtaaagtcaccaacgagatcttccgccactacgagttctttggcatggacacaagttcag

SEQ ID NO: 822291 - DNA, 100 bp, Homo sapiens
acaggaaaaacagccaccttcagtatctcagtcctccagtgtttggatattcagctcactccatcactcgatgagataatatgagatttctacttcggag

SEQ ID NO: 822292 - DNA, 100 bp, Homo sapiens
ggccacccccaaagacaaaagacacagaagaaaaagtgggactgaagtacactgaagcagatgaagatcagcttcgtgcaaagggttatgacaaaacacc

SEQ ID NO: 822293 - DNA, 100 bp, Homo sapiens
gccccagtaaaggctatttatcctttgcattgtctcatgatcagtggatgtggaatgcagtagccctctgggcctgggatattgtggttgataactgtgc

SEQ ID NO: 822294 - DNA, 98 bp, Homo sapiens
ttccagtgccatcaaccacctcaaagacactggttgctgaagccgacgtagcttctctgaacagacgcatccagctggttgaggaagagttggatcgt

SEQ ID NO: 822295 - DNA, 100 bp, Homo sapiens
cagccatgatgaaagctcagtttatgagtctctgggatggattggatactgatcacagctgccagttgctacccaagcattgtgccaaaactatcagtca

SEQ ID NO: 822296 - DNA, 100 bp, Homo sapiens
gaatatattgcaaaggcattcttggcggaaggacccgagacgtgaaaaaaacaggcgtattctggtaatttcgaggagaaatgagccgtcagactgctac

SEQ ID NO: 822297 - DNA, 100 bp, Homo sapiens
gttccctgctgctgaccttggtggtgtttgtgtctgtgatctactcctgcgtaaagggagaagattgcctacttcaccagagcaaagataagcatcccat

SEQ ID NO: 822298 - DNA, 100 bp, Homo sapiens
agtcttcaaagctgtttctgacatctgtaagacttttaggttatgtaccgaaggactctaccgtgtcagcgggaataaaactgaccaagacaatattcaa

SEQ ID NO: 822299 - DNA, 99 bp, Homo sapiens
aaaaaacaggataaaatcttatgattatgaggcatgggcaaaacttgatgtggctgcaaagttggctttcacagtgcaagcctttgattcccaatgggg

SEQ ID NO: 822300 - DNA, 100 bp, Homo sapiens
tgtgcaaaaggggagctggctacttctcgctctgcttcatcccactattattttggcacaacaggaagtatccctctgaagaagatatgatcgaatgggc

SEQ ID NO: 822301 - DNA, 98 bp, Homo sapiens
gaggcgtgtcaccagtttatcacagggaaagtcctggagagtgctgcagcagctcccagtccagtgctaggaaacattcccccaggagatggcatgcc

SEQ ID NO: 822302 - DNA, 98 bp, Homo sapiens
tcagcggatggtctgggtggacctggaggactcagcccaggagagtgttattactcgagatattcatcgtacatttcccgcacatgattactttaaag

SEQ ID NO: 822303 - DNA, 100 bp, Homo sapiens
ttctctagctattgccttattttttctcatggatgttcttcttcgagtatttgtagaaggaattacggatccagatcaggagatttgaggagctgctgcc

SEQ ID NO: 822304 - DNA, 100 bp, Homo sapiens
gcgggcccggcggcggcggcagcggggtccgggtccggagcgccacaggtgtttgccagcttcccagtaaaaatgatgaaaaagaatatccacacagaag

SEQ ID NO: 822305 - DNA, 101 bp, Homo sapiens
tctacctgatccgtctggccgccggccacctggtccagctgcccgcaggggtggtgtggcggggcaccctggcccgcatgcggtacaaaagaaccaaggca

SEQ ID NO: 822306 - DNA, 98 bp, Homo sapiens
ggcgggcgaagagccgccgcccggcccgcgatgtcaccattgttcagctgggtggccaaggttaccattgccacctggggctttttcaggactctgga

SEQ ID NO: 822307 - DNA, 98 bp, Homo sapiens
acaacagtgacgaagagaactgtctcctggtgaccgagcacccgcctccgggcatcttcaactatgtgactacccctgaatctacaaagaatcttgtg

SEQ ID NO: 822308 - DNA, 100 bp, Homo sapiens
tatgagatccagtttgggcacctgcagcgacctacccactacaatacctcttgggactgggctcgatttgagttccgatgaagttaaattccgtcaagat

SEQ ID NO: 822309 - DNA, 98 bp, Homo sapiens
gatctacgagtggatggtgcgttgcgtgccctacttcaaggataagggcgacagcaacagctctgccggctggaagttgcctttccccatcttcctgg

SEQ ID NO: 822310 - DNA, 101 bp, Homo sapiens
attgggggcaggagctgctttttcaatgagaagaatgaacagacctagtgggcgttgcctttagacccaggaattgaatgatctggcacgggaccctccag

SEQ ID NO: 822311 - DNA, 99 bp, Homo sapiens
ggacggcgcagacggaggcggcggagccgggagcgcaggaatgccatatggcagccgagagaactccctcctctactctgagattcccaagaaggtccg

SEQ ID NO: 822312 - DNA, 100 bp, Homo sapiens
agaaaacaagggaggagaagacaagctaaaaatgattcgggaatatcggcaaatgaatctgtctatgatcttctcccaaaggagttacagttacctccat

SEQ ID NO: 822313 - DNA, 100 bp, Homo sapiens
ccctagcagcgcgcctggctctggcccccgcgaaggaggacggagtttgctcatgatggagcagtccaagaagtcctccctcatggtggcccgcagtatt

SEQ ID NO: 822314 - DNA, 99 bp, Homo sapiens
ccagatgtcgatgccattccagcagtgggaagctttgaatgactcagtgaagacggttcgatggatgatgtactggattgtttttgctctctatactgt

SEQ ID NO: 822315 - DNA, 99 bp, Homo sapiens
caacctagtgggtgtaatacatcatgaactgcagggtctacttccccagcaggacagcatcattctcctatatcttctagacatcactcatcttcctca

SEQ ID NO: 822316 - DNA, 100 bp, Homo sapiens
ttggctcgacaatttaccaattcctgtggtgacgtcagaccagctggctacagcaaacatcattcaagatgtccagcaaagggagcagcacagatggcag

SEQ ID NO: 822317 - DNA, 100 bp, Homo sapiens
tcgagaccactttggccgtacattctataatcaggcaattatgtcttctaaaaatattgcacagactgccactctccgcccctacctgagtgccgtgcgg

SEQ ID NO: 822318 - DNA, 98 bp, Homo sapiens
tgggctgctcggcttcactgtctcagggcccctgaacctcccagagccctccgtgattgttggaatgtgctgagctgtgaggagagcatcagggtttg

SEQ ID NO: 822319 - DNA, 100 bp, Homo sapiens
acatcagttatattccatctactgtctttttcttcaatgggcagcatatgaaagtggattatgggtatgttgagtctaaaaaggacagagtcacagtagt

SEQ ID NO: 822320 - DNA, 100 bp, Homo sapiens
aatcctcactaccagtcaccaaacatggttctccgtggaggagccagccaacgtcctttgaccccaaaccagaaccagcagggacagcaaacggatcccc

SEQ ID NO: 822321 - DNA, 98 bp, Homo sapiens
acatgtatgagtgcagctgccccgagctggatcagctggtggacatctgtcggaaaggagatgtggcattactgaactgtacagccattgtgaatacc

SEQ ID NO: 822322 - DNA, 98 bp, Homo sapiens
tgactcatgcattctttcttcaaacaacctccctaccaaggatcttctttcaggttactctcatctggattattgtagtcaccttgtcactggtatct

SEQ ID NO: 822323 - DNA, 98 bp, Homo sapiens
acagatcgccggggaggcagcgcgggatcccagcctcaggcgtgcgcggacggtgtgcgggccaagattgacagacacctaatattcatgacttgaga

SEQ ID NO: 822324 - DNA, 100 bp, Homo sapiens
atatactcaattacacttcgactctcaaagcaataccaggatagctgttgtttcagagaaagtgtatttggtacaggaaattaatagagctgatattccc

SEQ ID NO: 822325 - DNA, 100 bp, Homo sapiens
tctgatgcaagcgaagaaccttttccctaatacgtacctcattgtgggagatacaaggcagatccaaccatccccaccgtggtcctacgatcagtcctac

SEQ ID NO: 822326 - DNA, 98 bp, Homo sapiens
gagcaccccctgggacagcgccacattcgccggttaagtgggcagaccaacatccacctcagcaaaaacttcttcctgacgaatcgcgccagggagcg

SEQ ID NO: 822327 - DNA, 98 bp, Homo sapiens
ccacctaaaacattgttatgctggaaatgctagaatataatcactatcaggctgaaaggttccctgagtcgaggtgactggtacaagacaaaggagat

SEQ ID NO: 822328 - DNA, 100 bp, Homo sapiens
ctcaggtggaaaccaagatagatgtgtcctatgaataccgcttcctggagttcacgactctgagtgctgacggtgtgaagggagacctgctgattgacat

SEQ ID NO: 822329 - DNA, 100 bp, Homo sapiens
aatgcagaatgcagagattttgttttgaattgtgaaatacttccacctcttttagagctttgatgacagtagggaaagaaccatttcctaccatttacgt

SEQ ID NO: 822330 - DNA, 100 bp, Homo sapiens
aaagttcctccaggtttgccatcttcagtttgtggaatcttgcttcccttttttccaacctttgtttatttgtattgatgccctttgcctttttctttct

SEQ ID NO: 822331 - DNA, 99 bp, Homo sapiens
tcggctgagccgcgccgcaccatgcccgccgtggacaagctcctgctagaggaggcgttgcaggacagcccccagctaatgggaatgacagcaagaaat

SEQ ID NO: 822332 - DNA, 98 bp, Homo sapiens
gggcgccagtccgggcaggggcagcgggagccggccggcaaaatgatgcttcaacacccaggccaggtctctgcctcggaagtgagtgcttctgccat

SEQ ID NO: 822333 - DNA, 99 bp, Homo sapiens
tttgttatatgggcttctcatatcttacccacaggtgaaaagagatttgaatgcccggaatgttctaaaaggtttatgcggagtgatcatctctccaaa

SEQ ID NO: 822334 - DNA, 100 bp, Homo sapiens
atgtcaaattggcagggagcaattgacagttgtttagagagggaagcatacgcacctcggatattctttgaggcttccagacctccatggtttactccca

SEQ ID NO: 822335 - DNA, 100 bp, Homo sapiens
tgccgttggctatagcaaatgccccagcggtttccaacctagatgaggaaagccgatggacagtccactacactgccccgtggcaccagcaggagaatgt

SEQ ID NO: 822336 - DNA, 100 bp, Homo sapiens
catttctgggtgacactcaacaggattcccgagctattctcaagctggaataactgagactgaatggacaagtggatcttcaaaaggcggacctctgcag

SEQ ID NO: 822337 - DNA, 98 bp, Homo sapiens
tgggtacaaagtgagaatttacagagatcatcctcttcagaaacacttatgtccctgatgccaaaaatgcacctactctttcctctaactctggtgag

SEQ ID NO: 822338 - DNA, 98 bp, Homo sapiens
gcactcgcctcggatttgggggcttcctcactcgtggctttccgaaggctgctgatttgggccaggcttagtcatctattggtatggatttatccagg

SEQ ID NO: 822339 - DNA, 100 bp, Homo sapiens
cattcactgcagagctcacttggccaatcatgatgaactaatttccaaggcattgaagttgatatcgatgtggagcacggagggaaaagaagccgcctga

SEQ ID NO: 822340 - DNA, 100 bp, Homo sapiens
gagtgatttcttctgacttgagcctgcagtgtgctgtgagagatctaccactagagtgcagcagctgccccgagccccgtgcttggcaacattcccccca

SEQ ID NO: 822341 - DNA, 100 bp, Homo sapiens
ccagccgtgaacctttgcaccccatgttcccagatcagcctgagaagccactcaacttggctcacatcgtaggtcctgctgtactagccaccaaagcagc

SEQ ID NO: 822342 - DNA, 100 bp, Homo sapiens
ggactcatgatctttgggatagcagattgtttgcctactccagcacttttccagccattaactccaggctctcgagaatttgaagatgttgtaaatattc

SEQ ID NO: 822343 - DNA, 98 bp, Homo sapiens
cgaaaacggaagcgcagggagaaggaagaggtgtttgaaaagcatgatggaagtggttcattgcatgatattcaactgtcattgccatccagtccaga

SEQ ID NO: 822344 - DNA, 98 bp, Homo sapiens
aggctgcaaaacccggggggttggtggcccagtcccacctcccatgagctaatgaatgtggctggagaatgctggaggagaccttaaggatggccacc

SEQ ID NO: 822345 - DNA, 100 bp, Homo sapiens
gttggagttcgcggtgcagatgacctgtcagagctgtgtggacgcggtgcgcaaatccctgcaaggggtggcagcgtggtaccatgcgacgacgctatga

SEQ ID NO: 822346 - DNA, 100 bp, Homo sapiens
cagggctcggcgtcgctgccaccatgacgggaaggttttgctgttactgctcagtgtagtcacaccttgaataagaaatggaaaaccttgggatgttgat

SEQ ID NO: 822347 - DNA, 100 bp, Homo sapiens
gcgacgactcgctgtaccccatcgcggtgctcatagacgaactccgcaatgaggacgttcaggagaatgaagtttctagattagaagacataatgcagca

SEQ ID NO: 822348 - DNA, 100 bp, Homo sapiens
gggaggattaagtgaggggacatgagtcaggatggctaaaggtgaccccaagaaaccaaagggcaagatgtccgcttatgccttctttgtgcagacatgc

SEQ ID NO: 822349 - DNA, 100 bp, Homo sapiens
ctggagaactacatcaccgctctgcaggctgttcctcctcggaggtcctcaaagagggcagcgggctgttcccagatctcctggtgagggagacggaggc

SEQ ID NO: 822350 - DNA, 100 bp, Homo sapiens
ttccatgggggctgggccctcattgactgtgaccctagctgcccagagcccagaccaagcatggacgccgtggatgccaccatggagaaactccgggcac

SEQ ID NO: 822351 - DNA, 98 bp, Homo sapiens
gaaaaattggagcaggctgccattgtcaaagagaagggaaccgtatacttcaaggtgtgggcccatcgctggatggatctgtcagaacacggctttgg

SEQ ID NO: 822352 - DNA, 90 bp, Homo sapiens
ctttgacacgctggccaccgtgggtgctggagaatctggtaaaagcaccattgtgaagcagatgaggatcctgcatgttaatgggtttaa

SEQ ID NO: 822353 - DNA, 98 bp, Homo sapiens
cgtggaccacatagacatttacgcggatgtcggcgaagagttcaaccagacaagttggatggcttgaggactggtactaaaaggaaacgtgactggga

SEQ ID NO: 822354 - DNA, 100 bp, Homo sapiens
ctttggagaacttctggagctggccaacgtgcaggagggctgatcccttatccaacatggttctaaccttcagtactaaagaagatgcagtttcctttgc

SEQ ID NO: 822355 - DNA, 101 bp, Homo sapiens
gctgcatgagcggttgtcttcttgcttccgggaactcaaggagaaagtagaaaagcactatggggttataacactggatgtatgttgtgttcacagcgaag

SEQ ID NO: 822356 - DNA, 100 bp, Homo sapiens
gcattaaaggttttagaaatactacataggggactgttgacatttagggatgtggccatagaattctctctggaggagtggcaacacctggacattgcac

SEQ ID NO: 822357 - DNA, 98 bp, Homo sapiens
agcaattcatttgagcaagagctgggagcatttttcccctgggcctgatcaactttgacccctggtggacaaacgactgtgagcagaatgagtcagag

SEQ ID NO: 822358 - DNA, 100 bp, Homo sapiens
ctgggatggttgtgagggaagggacaagaagatactgccctgatctttggatggattatatgaaagaagaattgaaccacccccttggtagacctgagaa

SEQ ID NO: 822359 - DNA, 100 bp, Homo sapiens
cagcgagccccactgctcggggaggaggagccacggccggggacagatacagatccacgggttttagaaaaacaagaattacagcagccaacctatgttg

SEQ ID NO: 822360 - DNA, 100 bp, Homo sapiens
ttctggctccgggctgagcttcctggagaagaggaagattgtcctgggtcacataatgccagctgagcgtaaaaagccagcaagtatggaagaaaaagac

SEQ ID NO: 822361 - DNA, 100 bp, Homo sapiens
atgttgggccaggaagttggttactccattcgatttgaagactgcagtagtgcaaaaaccattcttaagattccagacagcattggaaaagacatagaaa

SEQ ID NO: 822362 - DNA, 100 bp, Homo sapiens
tggcttcccagtgggagaggaccggcaaaccatttaatccactcttgggagaaacgtatgaattaatcaggttcaggcgtgaacggcctggaggagccca

SEQ ID NO: 822363 - DNA, 100 bp, Homo sapiens
ccactggacgctcatcagagggaagatctttttcctcaattggaacttataatcaaaactgtattaagctcggcaagagatgagccctctggtcctgcac

SEQ ID NO: 822364 - DNA, 100 bp, Homo sapiens
taccctggaccctaactctacaatcaaggaagaaggacatctctgcttccgccagggaatgaaagctactggttgattttaaagtgcctgggcctcacag

SEQ ID NO: 822365 - DNA, 98 bp, Homo sapiens
tctcttcagtcccagttgacagcttctgaacgtttccaagagaatagttcggatcattcagatctacggaatccagaggcagcattgtctccaacctt

SEQ ID NO: 822366 - DNA, 98 bp, Homo sapiens
cttctccctgaagcagatatttcagaacatacatatgatagttgagaaagacacatattctgatcatgaagaaataaacacaagttaaatatgactaa

SEQ ID NO: 822367 - DNA, 100 bp, Homo sapiens
gcagctcctgcccctgtccgggggatgactgattctcctccgccagaaacttcagtgctctcaagaaggaaaatatttatgaaaacaataaactggtgag

SEQ ID NO: 822368 - DNA, 98 bp, Homo sapiens
agcctctacagcgaacccttcaaggaacccccaaagttcaaaagaatgctgaaccgggagctgacacacctctcagagatgagccgatcagggaacca

SEQ ID NO: 822369 - DNA, 100 bp, Homo sapiens
tgcaatgtgcttctcacgggatttggccacactgactggctttcagactgctgcttccatcccaggtcacatttagggcaggcaaaacataagggatata

SEQ ID NO: 822370 - DNA, 100 bp, Homo sapiens
tcgtgactcagttctcacttggctgctcaaatccacaagaatcggaatgtcagttaatgctattcgcaagcagagtacagatgaggaagttacatctttg

SEQ ID NO: 822371 - DNA, 100 bp, Homo sapiens
ctggagtgaagttttcactgtggagaagccaggtgggaagaagtcttactactttgaccgcgatgatgtggctttgaagaactttgccaaatactttctt

SEQ ID NO: 822372 - DNA, 100 bp, Homo sapiens
gcaagaacgtcgggctcaggcccagcagggccatcggccatacttcctgaaaaaatgtacccagacagccattgtcttcatcaagcagccgtcctcccag

SEQ ID NO: 822373 - DNA, 100 bp, Homo sapiens
ttaaagacgaaataaagaaaaaagatgaaaagatccaactattagaacttcagcttgacggacatataatgatctgaaccaatatccagtgtttccgtgg

SEQ ID NO: 822374 - DNA, 100 bp, Homo sapiens
aaagttggaagaaagggtgtcatcacagtaaagcaaaaaagaaattcctgtgtttaactttaccatccatgagatccactgtcaaaggaacattggtatg

SEQ ID NO: 822375 - DNA, 100 bp, Homo sapiens
tggagtgggcgcggaggcgaccgccatggcgttcctcaaactccgtgaccagggagaactggagaagttaaatcagtccacggatgatatcaacagacgg

SEQ ID NO: 822376 - DNA, 100 bp, Homo sapiens
aagaaactgaggcctggaatttgattaactcattcaaggttacccagttgccaactgggtacatggaaaactcagtctcctacagcgcaattgaagacgt

SEQ ID NO: 822377 - DNA, 100 bp, Homo sapiens
cgagtggccgaccacggatttgcattgccgaggacgggaccccagggcagcgaagcagatactgaccgagctttatcattactggaagaatactgcaaaa

SEQ ID NO: 822378 - DNA, 100 bp, Homo sapiens
gatgatgattcagactctgatggtgatggcaaaggcctgatcaaccccgtataaccaaagatgtaatttgttttcatgctgaagatttcttagaagtagt

SEQ ID NO: 822379 - DNA, 100 bp, Homo sapiens
ctttaatccagtgactgtcaggtcgatcatatgctgtgctcctggcggacatcctccccacactcgtcatcaaattgttggctcctcttggccttcacct

SEQ ID NO: 822380 - DNA, 100 bp, Homo sapiens
aattgaagaaaaactaagactcacatctacaagcaatgaactggctcctggatttggatttggaattgcaatatctggtggacgagataatcctcatttt

SEQ ID NO: 822381 - DNA, 98 bp, Homo sapiens
agagaaattcagaacctcaagcttttcaggcatcctcatataattaaactattgggaaaatgaggtacgttagtgttcgcgattttaaaggcaaagtg

SEQ ID NO: 822382 - DNA, 101 bp, Homo sapiens
ggcatccatttactctgaggaaggcaacattgaacatgccttcatcctctataacaagtatatcacgacgtggtatttattccaacatgctaggattcctt

SEQ ID NO: 822383 - DNA, 100 bp, Homo sapiens
aagcaccaacacctgaggacagcagcccacccagtacagcatggaccacttctcagggatgcacaattggtacgcctgttcccacgcgaggccgacctac

SEQ ID NO: 822384 - DNA, 98 bp, Homo sapiens
cgaccaggcctccactggcatcaccgacacactatgctccctccaaagcctatttgtgtggaagtaatcgaaaagacaacatatttattgatcctgga

SEQ ID NO: 822385 - DNA, 98 bp, Homo sapiens
tgccagcaaggatgactcaatcatcactgttttaacagctttggagtttaacccttctgccaatccagaggcaagcacaatattccagaggaactctc

SEQ ID NO: 822386 - DNA, 100 bp, Homo sapiens
gcggcggcgggggcaccagcaggatgtactattctcggcgcggcgtgatcaccgaccagaactcggacggctactggttttcaaatggaacattttgatg

SEQ ID NO: 822387 - DNA, 134 bp, Homo sapiens
tgatgagaacatggtgctggtttccttgcttaaacactacagtgatttcttccaaggtcaaaggacgaagggctttcagcaatcgtgagaccgtctagtataagacagagcacgaaaggcatttttactgctgg

SEQ ID NO: 822388 - DNA, 100 bp, Homo sapiens
tctgggcaaaattggacaaacggggcagtcacaaagactacaaaaagggaaaagcgtgcactaacaccaaggggttcaactagatatagcttcacaatct

SEQ ID NO: 822389 - DNA, 98 bp, Homo sapiens
tcaagtgggcatcctgggagctccattccctaaggcactgtggtcagttcaccgggacctggaggcccagattgcgatcgtgacggagaaccaggccc

SEQ ID NO: 822390 - DNA, 100 bp, Homo sapiens
agggagacaccgattataagaagagaaactcagcgctggggaagaaggacctctttgtttttagacatgaattggccataatgagactagcagcctttat

SEQ ID NO: 822391 - DNA, 50 bp, Homo sapiens
tacttctgcatgaacatctccagccaggatttggtgcttccagatgtgag

SEQ ID NO: 822392 - DNA, 99 bp, Homo sapiens
ttccgccgtctgtgacagcttcttgatctgtccccaggtatgatctcgtgaaaccttgagagaaactgaatgacgaatgaaactattgttcctgtttca

SEQ ID NO: 822393 - DNA, 98 bp, Homo sapiens
catgagagaagaaatacaggatgcctctcagctgccacctgcctttgacctttttgaagcctttgcaaaagttgcacttcctgcagaagaggattatt

SEQ ID NO: 822394 - DNA, 107 bp, Homo sapiens
tgacatcattgcatgggttaatgacatagtatctttaaactacacaaaagtggaacagctttgttcagaccccaagactgcttctgagacagaaacagatatctgtg

SEQ ID NO: 822395 - DNA, 98 bp, Homo sapiens
attacatattccagtaatggtggatgaagttgttcattgtttgtcaccacaaaaaggacagacaattgcagcatgactttcccagggccctgattttc

SEQ ID NO: 822396 - DNA, 121 bp, Homo sapiens
gggagtatcaaatatgagaaagctaggccatctgaataactttactaaggatgtaacagtccctcccaagcctgtctcgctccatcctttatatcagactaaactctatcctcctgctaag

SEQ ID NO: 822397 - DNA, 99 bp, Homo sapiens
aaaaatcactgcattacatcagcagggatgaaggtggctggagaagaggaccagctgaggaatcttcaagctggagagactcaagtcgccgggacgata

SEQ ID NO: 822398 - DNA, 98 bp, Homo sapiens
tccttgtggtcctgctcgttggaggctgtgcagcagaagggcgcaaaccagaagaagagggtgtggaagataacgggctggaggaaaactctggggat

SEQ ID NO: 822399 - DNA, 100 bp, Homo sapiens
agggcacacagagtgaacagaaaaagaggatacctctgcgatcccgggtcatctccagatgctagggttatggaggcggggtttcaccatgttgcccaga

SEQ ID NO: 822400 - DNA, 99 bp, Homo sapiens
tccaagttctaccagccctacatcggacagctggcttttaaaggaatgaagagactcaatagaatccagtcaatagtgtttgagactgcctacaacacc

SEQ ID NO: 822401 - DNA, 98 bp, Homo sapiens
ttgacgaaggtaattgggactcccatcaagtctccacacagctagcagccacgtggggcacttctccagatactggtagacacagtctgggccctctc

SEQ ID NO: 822402 - DNA, 100 bp, Homo sapiens
cacccaggatagagtcagtgaccacaggatagcatatgaagttcgtgatattaagaaccaatacagggcagatgtgaagtggatgaaaggcatgggctgg

SEQ ID NO: 822403 - DNA, 100 bp, Homo sapiens
ttttttggacgaattcatggaggcagtttcttccaacttatatagaattggtgataggatcacaacttctgaggtcccagcaagagtcctaacatctagc

SEQ ID NO: 822404 - DNA, 100 bp, Homo sapiens
gaaaagacaaacagaggaagaggaaggaaaagacaatcattgcttcaagaatgctgacccttgtagaaggcaaacttgaagataaatcttttgactccag

SEQ ID NO: 822405 - DNA, 98 bp, Homo sapiens
ctgaggtgaagacagatcatgggactgataaattggattatagctggacagacatccgctgcccctttgaaaaacgaagagatgcagcatgcgtgttt

SEQ ID NO: 822406 - DNA, 100 bp, Homo sapiens
tatgcaaggagcttacatctcccagtacacccctgtgccttcttccagtgtttcagtcgagtggagtgctggttccaggaggatttggtgttcgaggaac

SEQ ID NO: 822407 - DNA, 100 bp, Homo sapiens
tgtggcgaatggggctcacgtcgagtgttccagtgcctcttaattgagggtgagaattgtggagaagatgctctaagagaagcagaaagatttgttattg

SEQ ID NO: 822408 - DNA, 100 bp, Homo sapiens
ccggctgccacccgcgctccctccgccgccgccgccttgctgctgctcaaagctgctgccgccccttgggctaaaaggactttccttatcccagttgatt

SEQ ID NO: 822409 - DNA, 98 bp, Homo sapiens
tttgttcaggcgttcgtgcagaaggaccctttggataatgacaagtttagaaaccagtcccataactgatactgatcttgcaaagagaactgtcttcc

SEQ ID NO: 822410 - DNA, 98 bp, Homo sapiens
tatcgaaatcaagttgaggaatccactaaacaaatacaggttcttcaaggtttcaagtgccccatttgctccaagtctgtggcttctgacgagatgga

SEQ ID NO: 822411 - DNA, 98 bp, Homo sapiens
gaggccacctcagagagagtgttggagatgtacgtgtaaggagccgagcaggatttgaatcagaaagaagaggttctcacccatatattgattttcgt

SEQ ID NO: 822412 - DNA, 101 bp, Homo sapiens
ctcgtcgacatgagtgatgtggaggaaaacaacttcgagggcagattactccacaggatccgctgaacataggatgttgccacaaaatctacctcgtgtat

SEQ ID NO: 822413 - DNA, 99 bp, Homo sapiens
ttgaatttctctctgtaaaggagattgtcactgctgttccaagggcacacgcagagggatttggaattcctggagagttgcctttgtgagaagctggaa

SEQ ID NO: 822414 - DNA, 100 bp, Homo sapiens
gctgactttgtgcttggtgctgctgatagggctggcagccctggggcttttgtaacaccttccaccatgaccacctcagcaagttcccacttaaataaag

SEQ ID NO: 822415 - DNA, 99 bp, Homo sapiens
agtcctcgtcagcactgactttcagctatggaatcggtaacatttgtcgatcacccattgcagaagcagttttcaggaaacttgtaaccgatcaaaaca

SEQ ID NO: 822416 - DNA, 100 bp, Homo sapiens
agatcatcacctccatgaagtgcatcatggggcaggatggcaccagccttgccaaggccacctttgatgccatttctaagacctacagctacctgacccc

SEQ ID NO: 822417 - DNA, 98 bp, Homo sapiens
tgccgctttgacattctttcttgggaaagatgaagatgaaaaacaggacagtgactccgaatctgaggcaaaatcagttgaggtacaaggagagaccg

SEQ ID NO: 822418 - DNA, 98 bp, Homo sapiens
agctggcaaaggagaagtaacttttgataaccatgatgactacacagacttctactatgacatttgctccttttgaggatacattgagttggatgcta

SEQ ID NO: 822419 - DNA, 100 bp, Homo sapiens
acagttcgaggggccaaggcagaagaaatcttggagaagggtctaaagctctcagatctggctcgagaccaccatggctaaggtggaaggggctgccgcc

SEQ ID NO: 822420 - DNA, 100 bp, Homo sapiens
agaagaggtcccaatcccccactctttccgccctaatggaggtctccagtttcggtctgggataaaagtgaaagtggtgattggcattgtactgctagct

SEQ ID NO: 822421 - DNA, 110 bp, Homo sapiens
gcgggaggtgttcgagaacgaccccgagacggtctgctcaccaggtggccagataccgcccacgtgcccccatcattgctgtgacccggaatccccagacagctcgtcag

SEQ ID NO: 822422 - DNA, 100 bp, Homo sapiens
gcctcgggacccgcggtccccgctcttgctgatactccatcttctaaaccaacactcctagccaatggtggtcatggagtagaagggagcgatactacag

SEQ ID NO: 822423 - DNA, 98 bp, Homo sapiens
ggcgctcttgttttgaatacgtagtctgtcctgttctttcaaagtttctcttcctcagaagaaatcagatgctgttcagagcacgaaggctagaattt

SEQ ID NO: 822424 - DNA, 122 bp, Homo sapiens
cagagaagagcttccctccgcagtccgggccgaggagggacagtccacgccgagtttgtatctacttgaacaagaatggcagcacaggcccccacttagataagaagaaggtccagcaactc

SEQ ID NO: 822425 - DNA, 100 bp, Homo sapiens
tcctgtactggactgcatcaggccgcgtctcctcaggcctggagcattggtaagcgtcacactgccaaagtgagagctgctggagaactcataatcccag

SEQ ID NO: 822426 - DNA, 100 bp, Homo sapiens
agaacatccactagcctcactaaagctgtgttggggtggaagaggaggaggcgcccgacatcgacatataccactgcccaaactgtgagaaaacccatgg

SEQ ID NO: 822427 - DNA, 100 bp, Homo sapiens
aaggttttgcttttgcatggaaatgtctactgcacagttgcaccactgagaaggacaggttaccacattctcatctggagccaggaggaagccaggacac

SEQ ID NO: 822428 - DNA, 100 bp, Homo sapiens
gaacgtcaccgaggagaagtaccaggaggcgttggccaaggctttgacagatccaaatgcttctgctgcccagcaggctgttctccagcagcacatcaat

SEQ ID NO: 822429 - DNA, 100 bp, Homo sapiens
ttttacaccaagatcttcttggacccggagaagagggtgcggcggcagcacatggagcgttgtaccagcttcctggtggatgagctgggcgtggtggatc

SEQ ID NO: 822430 - DNA, 100 bp, Homo sapiens
gtttttcactgatgaccttttccagtatgctggggagaagcgcaggcccccttacaggacctggcaatgcccagacatctgtgtccccctcaaaagtcat

SEQ ID NO: 822431 - DNA, 100 bp, Homo sapiens
aagaggagccccacaaagaggaggaggttggaccattggtggaacatatttatgagctgtcggaaaaggtaacagaagatggaactcgaaatcccaatga

SEQ ID NO: 822432 - DNA, 100 bp, Homo sapiens
ggatgcatgtggacagccaagaagaagctggctgactgcgagaaggtggctgtggagttcgggaaccagctggagtcattgccatctggacacatacaag

SEQ ID NO: 822433 - DNA, 100 bp, Homo sapiens
ggacctcctggaagccaaaaatgatctcgatttattaatgatgcataccaggaagtactggatctactcctgccattaaatcttgaggttgtggttgaac

SEQ ID NO: 822434 - DNA, 99 bp, Homo sapiens
ggaaatgtcactgcagctttaaaaagcagtgggctctggaacaacacggtgttcatcttttctacaggagtatgctgctgctgttccgctttgcgtcct

SEQ ID NO: 822435 - DNA, 99 bp, Homo sapiens
gagagttcttccaaagtcgcccaggcaccttctccatgcattgcaagtcacagcaaactgtacaatggcagttgagtgggttttgaaaaacgtctgaat

SEQ ID NO: 822436 - DNA, 98 bp, Homo sapiens
gctattttgcccagcccgtcatgaaggactggcttgggatcctgagagagcaagaaaagtttaccgggagcttcagaaaaagttattcatcatttttg

SEQ ID NO: 822437 - DNA, 98 bp, Homo sapiens
ggatccgagactggcagcatgagcagcatgagcaatggtcgaattggatggagatgatgtaagagtctcctctagaggaaaatatgctgaaagagaca

SEQ ID NO: 822438 - DNA, 98 bp, Homo sapiens
ctcagatcccaaacaactggcagaatttgctagacttaatcttttgacacctcgacatttgaatcagaaggggaaagcgcttcctttaagcagtgctg

SEQ ID NO: 822439 - DNA, 100 bp, Homo sapiens
gctgtatctcagggacagagtctgcagcaaaaaaggtgatggcttggacaacagtgtagcttcccccagcacaggtgacgatgatgaccctgataaggac

SEQ ID NO: 822440 - DNA, 100 bp, Homo sapiens
tggagttgtggaactgatgtttaaaatcattggaccatttagtaagaagaattccagtcttataaatgtatcctactcagtacatgtatctgaagattac

SEQ ID NO: 822441 - DNA, 99 bp, Homo sapiens
atacgtttgcttccttacctcagcattttcaacaatacctcctgcttttgctcccagaagtggataggcaggacccactgatctcagcatgaagagaca

SEQ ID NO: 822442 - DNA, 100 bp, Homo sapiens
atccattatgctggctgttatgtacgcaggagagcaggttgttgccctggatgcccaaaatattgtagctgtttcatgtggagaagctcatacgttagcg

SEQ ID NO: 822443 - DNA, 98 bp, Homo sapiens
cccggggccgtgcgctctcgggccactcggccgcaggtcagggatgttggaagctggagtagacaggattatttctcaggtggtggatccaaaactta

SEQ ID NO: 822444 - DNA, 98 bp, Homo sapiens
gattctggacaagtgtaatgaaattatcaactggcttgataagaatcaggccctggaggaagcactgagcatccaaaccccgccatcatctccaccaa

SEQ ID NO: 822445 - DNA, 98 bp, Homo sapiens
tttgctacagcatcccacattaagtcaacggtgtttggagaagagggattgaccctgaatcttgaagacgttcagcctcatgacttaggaaaagttgg

SEQ ID NO: 822446 - DNA, 100 bp, Homo sapiens
catggcgtctcatccgcaaacccggatccaggcttacctggagaagaacaagatcggtcccctgtttgagctgatttccatagcagtggacacattgttg

SEQ ID NO: 822447 - DNA, 98 bp, Homo sapiens
ccagccctgtggctgaagagcattccctcataaagctgtacgtaaatcagcttgatcacggtgcacgggacacggccaacacggtgaaggaaaagttc

SEQ ID NO: 822448 - DNA, 98 bp, Homo sapiens
acatgcggtctggatcggattttggaggcattgaagctgctgctgagcccgggagaggttctgtccggaagcagattctaaaaccatgttgcagtgct

SEQ ID NO: 822449 - DNA, 100 bp, Homo sapiens
gagctgttaaaataaagtctgcaaacaaagaccagctgctggaagtgggtgtgccggggagtgcgcagagacacaaggcatatacaagctgagtttcagc

SEQ ID NO: 822450 - DNA, 100 bp, Homo sapiens
gggagtattatgaaaagatcgttttgaacgaagaatgtgatcagaactggtacaaggcagagcttaatggaaaagacggcttcattcccaagaactacat

SEQ ID NO: 822451 - DNA, 100 bp, Homo sapiens
gcgggagctgctggagttcacccacatgtacctgcagtcagatgatgagattcttggtgccaccattgagaactccaggattgtcctgcagatcgacaat

SEQ ID NO: 822452 - DNA, 101 bp, Homo sapiens
caatggccctcaccagaacccagccatgtggtcagcctgatctcggacttcacagccagcagaacttgttccttgcctgtatctccccttggttcaatagc

SEQ ID NO: 822453 - DNA, 100 bp, Homo sapiens
ccccaatcttgtgtgggcactgaagggggactacaggttcgagatagagacagcgtttcaccgtgttagccaggatggtctcgatctcctgacctcgtga

SEQ ID NO: 822454 - DNA, 100 bp, Homo sapiens
tgcaatgacataactgcttacctttttggatttttttttgggagaactccattaattaagttctttattggtgaaaacatgaatccagatggcatggttg

SEQ ID NO: 822455 - DNA, 99 bp, Homo sapiens
gtggaaccctcaaaaatgcctccaccagaaccaagatcactccatggatgaaatgacagctgtggtgaaaattgaaaaaggagttggtggcaataatgg

SEQ ID NO: 822456 - DNA, 100 bp, Homo sapiens
agaagcatggtcttggacagcagcaagacaggtgtgtcttcactgggatttatatttttgaagctttgattaaaatattggcaagaggtttcattctgga

SEQ ID NO: 822457 - DNA, 98 bp, Homo sapiens
ggaacatccccttccaggcccacagccgggagatccgagagctcttcaggtccccaggtgcatccaatttttcaactttaccaaagatctctccttca

SEQ ID NO: 822458 - DNA, 99 bp, Homo sapiens
caaatcttgctgcttttaattcaactcagaggagcggagcagcgaacagaatccatcattcaccgggctctctactatgacttgatcagcagcccagac

SEQ ID NO: 822459 - DNA, 100 bp, Homo sapiens
gaatgcagcgcgctcggaggcctcttccagaccatcatcagcgacatgaaggagcacgccaagatgtcccttgtgactgtccccttctaccagaagagac

SEQ ID NO: 822460 - DNA, 75 bp, Homo sapiens
atgagagtcggagccgaataccaagctcggatccctgaatttgatccaggagtcggagaagctggaaagtgtgaa

SEQ ID NO: 822461 - DNA, 99 bp, Homo sapiens
ccagagcgtggcagaaggcagagaagtgaacgccccagcaaaaggttcaatatggaatttttccagataactttacattcaatttactgatggattctt

SEQ ID NO: 822462 - DNA, 99 bp, Homo sapiens
tcagcttctgcggcagtttggaaaggaaatggatcagacaatggctgccaatgctcagaagaataaattcttgattgatgggtttccaagaaatcaaga

SEQ ID NO: 822463 - DNA, 99 bp, Homo sapiens
ctatctcgcttttcccctggccttctgtatcttcatggtgcggctcatcttcgagaggtgcagcagtaccgcgtcgccatgactgccaaggactgctcc

SEQ ID NO: 822464 - DNA, 100 bp, Homo sapiens
ctccaagacccccgttgccatgtcaggtccaaaaacagagacttttccctcccagtccctaagtttaaggtgggaatggaagtggccccacatctcaaag

SEQ ID NO: 822465 - DNA, 100 bp, Homo sapiens
tggagtaataaaccgcaatgaaaccattcagtggctgtacactctcattgggtcaaaggtatcgaaggatgatcgcagtgatgtggagagcagctcagag

SEQ ID NO: 822466 - DNA, 100 bp, Homo sapiens
gtgcagccaaccatgatgctgccatctttccaggaggctttggagcggctaaaaacctgtgctgctgcatgaggaggcgggtgattctggctttgtcagt

SEQ ID NO: 822467 - DNA, 98 bp, Homo sapiens
tcctacaaggcaggcagtattgggtgcaggtcccaggtgtgacaccttcagcaggtctcagggaagatggcagccctaggggacattcaggagtcccc

SEQ ID NO: 822468 - DNA, 100 bp, Homo sapiens
attaagacctcgcactgtgtccagcccgatcccttacacaccttctccgagttcaagcaggcctatatcacctggtgagtccagtacacagccaaggttg

SEQ ID NO: 822469 - DNA, 100 bp, Homo sapiens
cgggaaaacactttccttctcaagtttcacaagctccgggtggataaggcagctgctgcagcagcggcactacaagccaaatcagatgagaaggcggcgg

SEQ ID NO: 822470 - DNA, 100 bp, Homo sapiens
gtgggaatatgacgaagaggaggagaaaaaccagctggagattgagagactggaggagcagacacgatgaggcgagtggtacgacagagcaagtttcggc

SEQ ID NO: 822471 - DNA, 98 bp, Homo sapiens
ggcgcggggaccgctgtgctctcgggaaaaagaccttgatgaagttctgcagacccactcagtgtttgtaaatgtttcctaaggtcaggttgccaaga

SEQ ID NO: 822472 - DNA, 98 bp, Homo sapiens
aagctggtaagggaggcgtcgctgattccagagagctaaagccgatgcatgctatttctctgagatgttccagcaagcaggccaagcgtcatattgac

SEQ ID NO: 822473 - DNA, 100 bp, Homo sapiens
ccccgagataccggcgccatgtccagcgctcggacccccctacccacgctgaacgagagggacacggagcaggaaaaccagtagattcccagacatcgcg

SEQ ID NO: 822474 - DNA, 98 bp, Homo sapiens
accttcagcccccccgcgaacgcccaaggttcttcattagaagctgtaaccacctgtgaactatgtaaagagaagttggagcttaacctggaggattt

SEQ ID NO: 822475 - DNA, 100 bp, Homo sapiens
gtccctagagccagcaagacatgggccccagtttccagaccctgacacctctcatttaaccagaagacgtggaggggaaagaaaccttgactggttcccc

SEQ ID NO: 822476 - DNA, 100 bp, Homo sapiens
caacgccagagcccaggtgcccagaggactttcttccagcttctgctgtccttctttgtggagagcaagtcacccacaaaagctgtatataatgccagac

SEQ ID NO: 822477 - DNA, 98 bp, Homo sapiens
atcagtattcagcgtctgtccactccctcgatggcttccgccccaggatgctcccctgcgcctcctgcctacccgggtctctactgctctgggcgctg

SEQ ID NO: 822478 - DNA, 100 bp, Homo sapiens
ttcttgtcaggcataggatttcactatttgcacctgttcttcccggagcctatcagcaaagccattcccaaggctatggctacatgcaccagaccagtgt

SEQ ID NO: 822479 - DNA, 101 bp, Homo sapiens
cagacatcaacatgcatcccttcttctttgccttggggaagatcctctctgtggagatgcttgctctgtcaaggcacagcctattgtctcctttgctcagt

SEQ ID NO: 822480 - DNA, 100 bp, Homo sapiens
gagatgtatcagtttcttctgaagtacaatcaactgtagaagcctttgtagcagcgtttggcaacatattgactgcatggggattgataggcagcatatt

SEQ ID NO: 822481 - DNA, 98 bp, Homo sapiens
ttattagctttagtgaaatgggctaataatgctggcaaagtggaaaaatgtgcgctaaaagatggcggcaaggcagcccaggcaaatgtaagaatagg

SEQ ID NO: 822482 - DNA, 105 bp, Homo sapiens
gaaggcctcgctggagatcgagtaccaagtacagcagttgcaaggagtttacagtttacaggaacagcacttctggactttatgttctgacgtttatgttgggac

SEQ ID NO: 822483 - DNA, 98 bp, Homo sapiens
cagtccctggtgtgaagcaggagggcagactttgacgacactgcgacatactcagcagtggccaccaatgcccacggacaagtgtccaccaacgcggc

SEQ ID NO: 822484 - DNA, 98 bp, Homo sapiens
aacagctggcagcatcacccccggacagcaaggttgtgggcatttttgcaggatttgggctgctgctcttggtggcctcacctttcctactcctggcc

SEQ ID NO: 822485 - DNA, 98 bp, Homo sapiens
cacatcacgtccagcatacagggccttgccaccatccacgcctacaataaagggcaggagtttctgcacaggtattatagctgcaaatgtccttgtat

SEQ ID NO: 822486 - DNA, 99 bp, Homo sapiens
agcagatattcagtgccagcccgagattctgctgccagttcatcacctccgttaccgcgctctatgacctgtcatcagtggatatcaaagtattgcaga

SEQ ID NO: 822487 - DNA, 98 bp, Homo sapiens
cggtggtgttggcgctgaggacccggacagccgattatgtttgagaccttcaacaccccggccatgtacgtggccatccaggccgtgctgtccctcta

SEQ ID NO: 822488 - DNA, 100 bp, Homo sapiens
gatagacttaaaatatttcccatattatgggaaaaaactgcatggtatcactgggatacatcagattggatgccaagcgttcctctgccggacatacaag

SEQ ID NO: 822489 - DNA, 99 bp, Homo sapiens
aagggtcctaaaacaggatcagtaaagaaggaaaaagcagtaaagccagaggaaggctgccagctgttggtatatccaggagcttttaatctgaccact

SEQ ID NO: 822490 - DNA, 100 bp, Homo sapiens
ctcactcctgtcaatatattcttgggctgaactcgtttgagcagctgtgcatcaattacaccaatgagaagctgcagcagctcttcaaccacaccatgtt

SEQ ID NO: 822491 - DNA, 133 bp, Homo sapiens
agccaggaatatgtcataccagggctttaccaaagacaatggcgtggtgcctgttgttaaggaattaatgggggagctgcgttcctttgcctgcaacaggggtcaagatgagttttgcctgacttctttgatg

SEQ ID NO: 822492 - DNA, 100 bp, Homo sapiens
agcagggcagcagtgctctggaggtggcagaatcacagctggtgttaacgaggctttcatgagaaggacaagaagccatattgccgaaaggatttcttag

SEQ ID NO: 822493 - DNA, 101 bp, Homo sapiens
cgcaaacaagccaatcccaggaggaaaaacggagactttgaatgtgattgatcctggcttgatggacctaaatgggatgagtgaggatgccctggaatggg

SEQ ID NO: 822494 - DNA, 121 bp, Homo sapiens
ttacttgttggggccctcttgataaaaagagatgtggggggattctcgacctgctaacagaactggaccttttcgaatggagatgtatgcatttcgattcttcatccgcctgtagatgacc

SEQ ID NO: 822495 - DNA, 100 bp, Homo sapiens
ctggaccggcaaattaaagcaattatgaaagaagtcattccttttttgaaggtcatcaccgagtggtcttctcacatcatccttcaggcagcaccaagag

SEQ ID NO: 822496 - DNA, 100 bp, Homo sapiens
aacttacgtgtactttaccaacgagctgaagcagggtgcagttctacctcaagaaataagccaagtaaatcaacatcataaatctggctttaatgacaac

SEQ ID NO: 822497 - DNA, 98 bp, Homo sapiens
gcttcctgacgctcctggcgcatctggtggtcgtcatcaccttattctggtcccggctccctggaattcccatgccaccaccacctttgggactcccc

SEQ ID NO: 822498 - DNA, 98 bp, Homo sapiens
agaagaagaatacaaacaaacaggagatgggcacatacctcagattcattgtctcccgcatgaaggagagggtctcctctgagcctccggcctccata

SEQ ID NO: 822499 - DNA, 100 bp, Homo sapiens
tgggacgatcaggctgtatggaatgtggactactgccagatcctcaaggacattacagttgaggacatgtggaatgcaagctttaggacttcacctgaca

SEQ ID NO: 822500 - DNA, 100 bp, Homo sapiens
gatcagcgaggagcagcagcagctccagcaggcgctggctcctgctcaggttgtttgaagaacctgaaagaactcaatgtgggtttcaactatctgaaga

SEQ ID NO: 822501 - DNA, 100 bp, Homo sapiens
cagaaaagatacgaggctctaggagagttttaccgggcagaagttgaagccctccattcttcgggtatgacagcagttgttaaattcattgactacggaa

SEQ ID NO: 822502 - DNA, 98 bp, Homo sapiens
aggcctgtgtccggagcctgagctgtgagtcataccctaatgatcccagcaagataatgtcctgtcttctaagatgtgcatcaagcctggtacatact

SEQ ID NO: 822503 - DNA, 100 bp, Homo sapiens
ggaaaacctaaccatgaagacttgaacttaatacagcaagaaagaccatcaagtttaccaatgccatggacaatattaccaggcagaaccaattctacga

SEQ ID NO: 822504 - DNA, 147 bp, Homo sapiens
gtcgaatctacaaagatatgtttttggactctaatttcacggacactgaaagcagagaccatggagcttcttggttttaaaatcaaagatgggaaaatcggagaaaattgcccttccccatggccagcttgttcatggtatacactt

SEQ ID NO: 822505 - DNA, 99 bp, Homo sapiens
ccgcacttgagggactgaagccatgcaggacccctgggcagacctcttcagaaatagcagatctcacattcttgaaggtggcattgaagagcactaaga

SEQ ID NO: 822506 - DNA, 100 bp, Homo sapiens
ccatggagcccatcgtgctgcagtacgtgcctcatgatcgcttcaacaagagacgagttgtactgctgtcacaggaaatggacgctggattacaagcatg

SEQ ID NO: 822507 - DNA, 98 bp, Homo sapiens
tcgtggaaggctctatcgtccgcatctcgatggagaacttccttgcagtcattggagaaatcgatgaagaaacagattctgcgcttgatttggggaat

SEQ ID NO: 822508 - DNA, 98 bp, Homo sapiens
ttgccttatacagctaaagccatggaaagagctgatgagattttctgaccacggggctgctcttaacactgagaagcgttttccatgtgaattttgtg

SEQ ID NO: 822509 - DNA, 140 bp, Homo sapiens
tttgcaggatgggagggctcagggtgtgcgttcccctctgctgaggcagagctccagtgaacagtgcaggggatgtcccactcttgttcaagcattgccaggccctagcacacaagtcactgcaggcagcaaccatacgg

SEQ ID NO: 822510 - DNA, 98 bp, Homo sapiens
ggccaccatagcaaagaagtctgcaggcaggaggacagagcgggatgccaccagcttgtccaaagggaagttccaggagctcctggtgggcatcgttg

SEQ ID NO: 822511 - DNA, 99 bp, Homo sapiens
atgggttgcatatgcagcatggatatactggacaaagcggtgattcataccctaggcgggacagagcacgatgaacccttaggagaaatcttgagagtg

SEQ ID NO: 822512 - DNA, 100 bp, Homo sapiens
cttggcagctactagcattatctgtggctgctcttgcctgggagtcatggctctggtgtttgccatcaaggcagatcagcggtttgtatggaatggtcat

SEQ ID NO: 822513 - DNA, 50 bp, Homo sapiens
tctatcccaggaatacagctttgcattagagatgttcgacaagcagcagg

SEQ ID NO: 822514 - DNA, 104 bp, Homo sapiens
ggaaacctttccaacacagatgtccaagctgccaagaaaccactgattgcttgtgtggagaaacagctattaggagaacatttaacagcaattctgcagaaagg

SEQ ID NO: 822515 - DNA, 100 bp, Homo sapiens
ctagtggcttgtgatcccagcaggtctagtggtgaaaaagatgagcagacatgtttgatgtgggcttatgaaaaagaaaccgaagctgaaagactggcat

SEQ ID NO: 822516 - DNA, 100 bp, Homo sapiens
gggtgactcagcttcgagcttgtgccaaataccacatggaaatgaattctaagatgtccctggtagatttgggaaagaagcttttagaagcggcacgagc

SEQ ID NO: 822517 - DNA, 98 bp, Homo sapiens
ccgtacccgccaagctgtcatcacaaaagagttgattgaaattatctctggtgctgcagctctccctgggcgctgcctatggcacagccaagagcggt

SEQ ID NO: 822518 - DNA, 98 bp, Homo sapiens
tggagacagaacggatgatttatctggtgacagaatatgctagtggaggggaaatatttgatctccaagaaggagaagcttctctcgcagccggagca

SEQ ID NO: 822519 - DNA, 98 bp, Homo sapiens
tccaccacctcgcagccggggaggcaactggagcgaaaccagcgacagattacataccggttacggcacctccttcgtgcaaggtgtgatgcatcccc

SEQ ID NO: 822520 - DNA, 100 bp, Homo sapiens
cagaataccaggcttgaattgctgtggtcagggaagagcctgctacagatggtcaaaaaggtttctaatattcaggcaagagcagttgtgttgtcctggg

SEQ ID NO: 822521 - DNA, 100 bp, Homo sapiens
tgggcatctaccagatgtacttgtgcttcctgctggccgtgctgctgcaggaagaagaagaattttcagttcttgccagctgcctgggacttctgccaac

SEQ ID NO: 822522 - DNA, 100 bp, Homo sapiens
gataaatcccaccagggcctcatcacctcacgatacttccttgaattacagcacaaattagataagttgctacaggagcaaaaaatcccagaagtgggat

SEQ ID NO: 822523 - DNA, 98 bp, Homo sapiens
ttcctggaacgccctctttttaaaaaagaaagaatcttcaagagggagacatagggaaaaggaagacataaaaatcactaaggaaagaactccagaaa

SEQ ID NO: 822524 - DNA, 98 bp, Homo sapiens
ccttcttggcggtggccttgacagcctgctctccacgtggcctcccagccttggaatcggtttttgctgtttaccctcttggatgctggagagaattc

SEQ ID NO: 822525 - DNA, 100 bp, Homo sapiens
ccggccggtcggtttccggatgaaacgaggagccagagcctgccttctggtacaagatgcctgtggaatgttcggtgaagtgcacttggagttcaccatg

SEQ ID NO: 822526 - DNA, 100 bp, Homo sapiens
ttcttttctctcttcagcccccaacccagtggaggtgacagaactgaagggcctggccaaccatgtggttgtgggcagtgtctcctgtgagaccaaggac

SEQ ID NO: 822527 - DNA, 101 bp, Homo sapiens
tgatgatagccagtcccgagagccagatgtcatctgggtgattctcagtgtggaggtgggtggacttttaggagtaacgcagcagctgtcatcttttgaaa

SEQ ID NO: 822528 - DNA, 101 bp, Homo sapiens
gacagctggccgccgatattcaccaagcgcttcgctacaagattgtggtggtgccatgcagcaagaatcagagagatgcagagttagagccagaaggcctg

SEQ ID NO: 822529 - DNA, 99 bp, Homo sapiens
tggacacccagcggtctgacatcgcgacgctgctcaaaacctcgctccggaaaggggacacctgattgagaggatccagaatccagatctctggaatag

SEQ ID NO: 822530 - DNA, 99 bp, Homo sapiens
tcctttatatagaagggagagtaggtgttcctccaagaaaagctggttatattgaagacctggttttgatgctgcctcagaacatttgggataacctat

SEQ ID NO: 822531 - DNA, 100 bp, Homo sapiens
cgtggtactcagcaagctcgagttaaagttggatgtgctggaacagctgatgactatcagccagttcgtctgctcagtaaacctggggaactgagaagag

SEQ ID NO: 822532 - DNA, 113 bp, Homo sapiens
aagtatggagagaaatacgttttcaatggattgccacagtaagacctctgtatggcttttcaattttagttgaaattctctctccatggccttttggagtcccttgctgtatc

SEQ ID NO: 822533 - DNA, 100 bp, Homo sapiens
acgggacgccttggttgacttcagtgaacagtatactccagaagccgatccctacttcatccaagaccgtaagaaccttgatgctgtccatgatatcact

SEQ ID NO: 822534 - DNA, 98 bp, Homo sapiens
ctctgttcagagaagtatgcaagatccagggggccatcatcatgtcctcactgatagaagtagtcatcggcctcctcggcctgcctggggctctactg

SEQ ID NO: 822535 - DNA, 99 bp, Homo sapiens
aaaactgaagattgtcatgattgtttatcctaatcccaatgctgaagtaagattgtcttggaaatactaagttggatgaaacctgatgcgtccttttta

SEQ ID NO: 822536 - DNA, 51 bp, Homo sapiens
gcccagccggttcagagcaaaccgcagaagatgactttcacacgacctgcc

SEQ ID NO: 822537 - DNA, 98 bp, Homo sapiens
tgcggaagatgatcagccaggcacagaagattgacgtgagtgaattcagatataactcaagcttgttagagggctttttaaaaataaaaagttgattc

SEQ ID NO: 822538 - DNA, 100 bp, Homo sapiens
ctcagcctcctgtgtagctgggattacaggtcctagcttactctgccaccactgcccggcaggaggaagttccccagcagacagtggccccacagcaaca

SEQ ID NO: 822539 - DNA, 100 bp, Homo sapiens
aggagagcccttcagcgaggaagctacacttttcaccaaggaactggtgctgcagcgagagagccccacagtcttcgttataacctcacggtgctgtcct

SEQ ID NO: 822540 - DNA, 100 bp, Homo sapiens
gtgaacggagtgaccaagagcaggtttgaggttgattccaaagatagttctcataactccacaaactctgaatttgcagctgaagctgagggtcagaatg

SEQ ID NO: 822541 - DNA, 98 bp, Homo sapiens
ttttaggattgtcaaaaggaggattgaggaggatcagatcaataatggaggcaatgagtggagcctttcaggctggcatggagagcttaaggggcaac

SEQ ID NO: 822542 - DNA, 98 bp, Homo sapiens
gaagatacttctagtcctcagagtaggcctttggcttcggatttgaaaggtgatttcagaaagtatggatatactcttcagaataagaggaggccttg

SEQ ID NO: 822543 - DNA, 100 bp, Homo sapiens
tggagtgtgcggcccgataagcgctttcgcttggcgctgggcagcttcgtggaggagtacaacaacaaggtgatgctgtggagtcttcaaaaagcccgac

SEQ ID NO: 822544 - DNA, 100 bp, Homo sapiens
gtgaaatggtagaatatatcacccataatcggaatgtgatcacagagcctatttacccagaagtagtccatatgacctagaggatcaagacataatggga

SEQ ID NO: 822545 - DNA, 108 bp, Homo sapiens
aacatcttaactaaaagcactcccacgtctacaatggagtcgagtctagaattcacacagagccacctagagctcgagcgtttgatggcattgagcaatgaaataaag

SEQ ID NO: 822546 - DNA, 98 bp, Homo sapiens
tgaaatcagagatccttcggaagcggcagctggtggaggacaggaacctgctggtggtgaaaggtgtagcagtcactcggcctacacccacagcatcg

SEQ ID NO: 822547 - DNA, 100 bp, Homo sapiens
gcctacctacatcctcagatggaccgttgaactgatcgtggccaacaccaagactggttatgatgtgattgctcaagcccaatctgggactgggaaaacg

SEQ ID NO: 822548 - DNA, 100 bp, Homo sapiens
gaaggtagcaagaccagtgaggaggctctagtaactgtccaggcatttgatgaagcaattgctgaattggatacgctgaatgaagagtcttataaagaca

SEQ ID NO: 822549 - DNA, 98 bp, Homo sapiens
aaggagctcggggactcccccaaagacaagcacaagctccgggtggataaggcagctgctgcagcagcggcactacaagccaaatcagatgagaaggc

SEQ ID NO: 822550 - DNA, 99 bp, Homo sapiens
gaaagggccggttgagggatatgaggagaatgaggagtttctgaggaccatgcaccacctgctgctggagaaatgcttcggttacccacagtctttcgc

SEQ ID NO: 822551 - DNA, 98 bp, Homo sapiens
tcacgtgcccatcagtgacagcaagtccattcagaactccaaatgagaagatgaagcaagtgttaaagaagactatagaagaagccaaagcaataata

SEQ ID NO: 822552 - DNA, 50 bp, Homo sapiens
ctggaacatggacgtggagaggcaggagtccgggaccatgtctggagaac

SEQ ID NO: 822553 - DNA, 100 bp, Homo sapiens
cacagggcccgatgagccagagaagcttgcatgtagagcgcatgaagtacaggacaataaagcttcctacacatatcaccaggaggatctctttgaaaga

SEQ ID NO: 822554 - DNA, 100 bp, Homo sapiens
aaattgcaccacagatatatgggttctataatggatttccagttcttaggaacaatttatttgaaagacctgaaggatttctacaagcaaagaagaacaa

SEQ ID NO: 822555 - DNA, 100 bp, Homo sapiens
agcacccaggatggtgcaaacccatagacatctgaagagctgccatgtctggggcatcttcctcagaacagaacaacaacagctatgaaaccaaaacccc

SEQ ID NO: 822556 - DNA, 99 bp, Homo sapiens
aaattcaaggatgatccagttggaccttttggacaggaaagtgtaacatcagttacagatcaccttggttctgggacatccgacagtgctggcataact

SEQ ID NO: 822557 - DNA, 98 bp, Homo sapiens
gcaatcggcgtgagttctgcttatatgagtcagctcctagacctagactatccgtctaagagggaagctacagggcaaggctaggtcaccctgatctc

SEQ ID NO: 822558 - DNA, 100 bp, Homo sapiens
ctgtacctacaaggtctccccgattctcatctgcccataatcatggacacagccccaggatgtgcagggagcaggggagagaagacagaagaggttggag

SEQ ID NO: 822559 - DNA, 100 bp, Homo sapiens
tttgaggtcaacgagagggaggaggcagagggagaagagctggcgagagtggcagagggcaccagcttcccgcctcaggagccacggcacagtccgcagg

SEQ ID NO: 822560 - DNA, 100 bp, Homo sapiens
ctcatggaggccgtgagccatgttcaggcaccctttacaagtgcaacacatttggagcatgtgaggcccatgtttaagatgaaggttattctttcagcag

SEQ ID NO: 822561 - DNA, 110 bp, Homo sapiens
ggaatctgggtgcagttcctgcagtaccccactctacgatcagattgtaaaccatggctgtgtggatacaagctcagcagctccaaggagaagcccttcatcagatgcaa

SEQ ID NO: 822562 - DNA, 100 bp, Homo sapiens
aactatggcttacaacatcacacccctgcgcagggccacagtggaatgtgtgaaagatcaggctgacatttggtcattgggaattactgctattgaacta

SEQ ID NO: 822563 - DNA, 98 bp, Homo sapiens
cagttgctggacagtttgaggatgcagatgttgatcactgaaaatgatttatgcaagtttaagctatactgacttctgttgaaaccattcaaagctaa

SEQ ID NO: 822564 - DNA, 100 bp, Homo sapiens
gagtctgactccaatgaattttctgtaattgctgacccaagaggaaacactctaggacggggaacgacaattacgcagcctgcttctgcaaagtggtacg

SEQ ID NO: 822565 - DNA, 98 bp, Homo sapiens
caggctttggcagttggataccagacagcttctcacaacagaaggatgccctgcagtggtctcgccatccagctacagtggagggagaggagccagag

SEQ ID NO: 822566 - DNA, 100 bp, Homo sapiens
tgtggatggcacaacatatgaagcctcaggaccatccaagaaaacagcaaaacttcacgtagcggtgaagctgcacagaagagatcacagaaggagtctg

SEQ ID NO: 822567 - DNA, 100 bp, Homo sapiens
tgaacatgcctccattcacctgtgggacctgctggaagggaaggaaaaacctgtatgtggaaccacctataacaacgaacttgatgcaagtgataggttt

SEQ ID NO: 822568 - DNA, 100 bp, Homo sapiens
gaggggccgggaacccgccggggagaggcacccgagacccacggagaccgcggcatgatgccattgtcacactcctgaagcattataagagaccacaaga

SEQ ID NO: 822569 - DNA, 99 bp, Homo sapiens
ttctgcagcgctgtatcgtgtcgccggcagggaggcatagcgcctctctgatcttcctgcatggctcagatatcccagaggaggaagccagatattgga

SEQ ID NO: 822570 - DNA, 98 bp, Homo sapiens
gaaagactgccctaaaaggaaaaggtattttaaggatggtgcagttaagaaaccttattctgcaaagacactgtccaacaagaagtcttctgcatcct

SEQ ID NO: 822571 - DNA, 100 bp, Homo sapiens
cagaaactagaacgtgaggctcggatatgtcgacttctgaaacatccaaacatcggccgagtgtactacttcaaccacatcactaacgccagccagtggg

SEQ ID NO: 822572 - DNA, 99 bp, Homo sapiens
cctcattggctgtctccagaagctgctgtttggaaaggtggcaaaggatagcagcagacacaggctcagtctgctggagcgggtcagtgccgaggctgt

SEQ ID NO: 822573 - DNA, 100 bp, Homo sapiens
gcagtgactgtcatggacgtggcgcacctggccaaacatgtgcagctggtgatttctaccactccaaacgccggctgatcttctccaagaggaagcccta

SEQ ID NO: 822574 - DNA, 100 bp, Homo sapiens
aagaggcagcttatagacaaccgcaagctcattgagacggttccacttccaaacatgagttccaggccgagacaaagaagcttttggacattgttgcccg

SEQ ID NO: 822575 - DNA, 98 bp, Homo sapiens
catgtcattataccttcacccagcatttcatccctcgtcgaaaggattggattggcatctttagagcaggacagacggccctgatgctggccgtcagc

SEQ ID NO: 822576 - DNA, 100 bp, Homo sapiens
ttatcataattcctgcagctaccacctctttaataaccatgcttaatgcaaaagaccttctacaggacctgaaatgccttcaattaagttgcagagttct

SEQ ID NO: 822577 - DNA, 98 bp, Homo sapiens
aaaaattaatcaacagagtgggacctaatggtgagagatgatgaaccaggtggaagggcagcagaagaaccttgtgcacgccattgagtccctgccag

SEQ ID NO: 822578 - DNA, 100 bp, Homo sapiens
atgaatcagtctctctccctgctctacaacgtgcctgcagtggccgaggagattcaggatgaagttgtgaaacaaagagtcctcttcgtggaaaagaaaa

SEQ ID NO: 822579 - DNA, 100 bp, Homo sapiens
aaaaaaaccacaaatgtttttctgttttgcctgaatacatgatttaaacaagagatttccacagaaggaactctttccagttaacagacagagtgtggat

SEQ ID NO: 822580 - DNA, 100 bp, Homo sapiens
agaggattgaacaagagattgagatggaaatgaaagaaatgaagctgttgtcatttctggaaggaaactggcccagcagatcaagcaggaagtgcggcag

SEQ ID NO: 822581 - DNA, 100 bp, Homo sapiens
tcatcttggaaatgtcagctcttccgcagtgattgaagctttgataaatgaaatcttcctaagtataggccataaaattttgagtagaaaaatccagaaa

SEQ ID NO: 822582 - DNA, 100 bp, Homo sapiens
agctgtacagccacactaactgtgacagaagacccttttgaggacttctttgggaatcgaaggggtccccgaggaagcagaagccgagggacggggtcgt

SEQ ID NO: 822583 - DNA, 98 bp, Homo sapiens
gcggctgctgctagagctggagcatttgccggtgccctgcaggagtcattaaatcaaaacttcatgctgatcatcacccaccgagaagtccagcggga

SEQ ID NO: 822584 - DNA, 99 bp, Homo sapiens
ggagaccaagaagcctggcatgaacttgcagaactttacatcaatgaacatgacattgagaagttctgtgcagaaggcatcccactattgggaattctg

SEQ ID NO: 822585 - DNA, 99 bp, Homo sapiens
tagagaagagagttctttccttggcctgggagcatccgtttctgacgcacatgttttgtacattccagaccaagatgcctaccttaatgcctctgaaac

SEQ ID NO: 822586 - DNA, 98 bp, Homo sapiens
tgaaataaaggagcaagaaatgttcaaaggaacaacatctttaccatctcatctcaagaatggaggggtatgacaaggcagcaaagattgctaagaca

SEQ ID NO: 822587 - DNA, 100 bp, Homo sapiens
agaggaagttgaagaggtggcaccacctagaggcaggatgtagccaatcaaatgtgcaccaagaccaaggaggagtgtgagaagcactatatgaagcatt

SEQ ID NO: 822588 - DNA, 98 bp, Homo sapiens
ctgctgaggaggagccgaagcccaaaaagctgaaggtggaggcgccgcaagcgctgagatgtatcctccactcctcgctggccaccatcctgctgccc

SEQ ID NO: 822589 - DNA, 100 bp, Homo sapiens
ctggcaagctgaggccctaccagtttaagccatccagtccaatggatcagatgggcaagatgagacctcagccatatggcgggactaacccatactcgca

SEQ ID NO: 822590 - DNA, 123 bp, Homo sapiens
cagcagttgcccctggtaacgggggaggcagcaggaggaggaggaggaggagggactcggcgggaggatgcttcgagagctgtgcccaggagtgaacaaccagccctacctctgtgagagtgg

SEQ ID NO: 822591 - DNA, 99 bp, Homo sapiens
tgttggacaacaaaaaatgaaaacttagattgcaacagtgattcacaggtgtttccctctttgaatgatcgaatcatcaatttagttgttggcagctta

SEQ ID NO: 822592 - DNA, 99 bp, Homo sapiens
tttgacctggcaattaaaggtgttaaatctccttggtgtgatgtttttgacatagatgatgcaaagggtgcaacaccggaggatttcagcaacctccca

SEQ ID NO: 822593 - DNA, 135 bp, Homo sapiens
tttgagaccagtgccaaggaggccatcaacgtggagcaggcgttccagacgattgcacggaatgcacttaagcagagcaaaggatatgcgattggcaatgccccggagttggccaaggcccataatagccatgcc

SEQ ID NO: 822594 - DNA, 98 bp, Homo sapiens
cgccgctgctgggagatgggcctactcgcccgccaccctgcgctgccgccgctctgaggagttaaaggcttgttgattggtgctggctgtgccctcta

SEQ ID NO: 822595 - DNA, 100 bp, Homo sapiens
ccggtgcctcctgccaaaaagccagaagctccacctcctaaaggacaaggagactggctttcacagaggtttgggttgggttcagttttcttcagaagaa

SEQ ID NO: 822596 - DNA, 100 bp, Homo sapiens
tccaaagccattcactacctgcacaacgttcaaccatgctcggtcatctgtggcagtatatcaagtttgcgcgataacaatatctcagaccgaggcatct

SEQ ID NO: 822597 - DNA, 98 bp, Homo sapiens
taaaagagccctgcaatttgaagatacatgagacagcagccaaacccccaggtgatctgggctcttgggatctgctcatttgcctgtcttctaagaaa

SEQ ID NO: 822598 - DNA, 98 bp, Homo sapiens
tctcagcttattaaccgaatgttcccgagcccatcgaaacatccgaaaatttctcaaagatcagctggaggagaaagctcgcctagaagcagaggcca

SEQ ID NO: 822599 - DNA, 100 bp, Homo sapiens
ctgctcatcagcatgattctggctgtcctctatagaaggaaaaactctaaacgggattacactgggatcacagaagaactgcagcttcctggggagcagt

SEQ ID NO: 822600 - DNA, 99 bp, Homo sapiens
tgcggtgtctgctgctattctccgagcttcgcaatggaatcgggcgcctgattgctgagtgtcatctcaaccccatcatcctgcccctgtggcatgtcg

SEQ ID NO: 822601 - DNA, 100 bp, Homo sapiens
ccgcccaccagttcgcccgtccccctgccccgttcacaatgtgagagcacagtaaggactattgctatggatggtacagaaggcttggttagaggccaga

SEQ ID NO: 822602 - DNA, 98 bp, Homo sapiens
ttggtggtgaccccgcccagttggcccagaggatctcttctaacatccagaagatcacacagtgttgggttgagcattcatgatggtacctggaagtc

SEQ ID NO: 822603 - DNA, 100 bp, Homo sapiens
gacttacagaggagccccatgggccggaagcaggggggaacgctggacgacctaaaagcagcatctgttatagcaaaatacccacacaaaataaagagtg

SEQ ID NO: 822604 - DNA, 100 bp, Homo sapiens
cagaaagtgaagctgtttcgggccagcgacccgctgctcagcgtcctcatgtggggggtaaaccactcgccaagttctatagaaattttagagtattcat

SEQ ID NO: 822605 - DNA, 98 bp, Homo sapiens
caaatactgcttgtgctgtggggaattccaccaagttgttcactctgatcacagaaaatttcaagcttacgaggaaatatttcagtaaaagcagttaa

SEQ ID NO: 822606 - DNA, 100 bp, Homo sapiens
gtatgcataatatggaatgttcttaacccagaagtagctgaatgtgttactccattgctgaggagtgggctcaaaatctccttcgccaagaccaaacatg

SEQ ID NO: 822607 - DNA, 100 bp, Homo sapiens
caggctcagtgaagaaggtcaacgagtcctcactgaactggcctcaggggctgataacatccggaaatactggagccgctactaccaaggatctcaaggg

SEQ ID NO: 822608 - DNA, 98 bp, Homo sapiens
caatatctgtgtcgttcttggcagaaattatattttccagcccgtgtctgcagattcacagttaatagaaggatctctatagttggatttggcttgta

SEQ ID NO: 822609 - DNA, 100 bp, Homo sapiens
ggggccggcaaggccatcggcgtgctgaccagcggcggggatgctcaaggggacggcaaaacagaacagaaaggcggagataaaaagaggggtgttaaaa

SEQ ID NO: 822610 - DNA, 99 bp, Homo sapiens
atgactcctccctacccgcagtttgagtagccggatcgagctgggagatgtgacaccacacaatattaaacagttgaaaagattgaatcaggtcatctt

SEQ ID NO: 822611 - DNA, 100 bp, Homo sapiens
gacagtttctggaagttataacgctacacgaagaactaagaatattattagcacaagagcaccatactttgagggtaaaataccatgaagattttgaaaa

SEQ ID NO: 822612 - DNA, 100 bp, Homo sapiens
tgcagtatttccagtctgtctcagttccacaaggagagattcaaaattgacatgccacacagatttaaagtctacaattacaagagcccgaccttctgtg

SEQ ID NO: 822613 - DNA, 98 bp, Homo sapiens
cagtcttgaggtcctacatctccgaaagcaagctcttctagaagttggtgcttttgaagatgatgatatcacgcacgttgaaggaagtgtagatccta

SEQ ID NO: 822614 - DNA, 98 bp, Homo sapiens
ggcagagaagaaggctgctgatgtaaactgtcttgagccccaccctcacctgcctgtgctggcaaccagtggcctagaccatgatgtgaagatctggg

SEQ ID NO: 822615 - DNA, 100 bp, Homo sapiens
atgaccactgtggagaacaaatccaagattagcacagttatggaaattcttgaagcccaatactccactggaatctcggatttctaagcagtggtgtgaa

SEQ ID NO: 822616 - DNA, 133 bp, Homo sapiens
acgaggattccaggtgacagtacacgtgggcaacgtacgtcagacggcagtggtggaaaagatccatgccaaggtaaagagaaatgtgtatgaccttacaagtatccccgttcgccaccaattatgggagggc

SEQ ID NO: 822617 - DNA, 100 bp, Homo sapiens
caaagcctattcaaaaataaaggtggacaatcacctttttaacaagatgaagcctgctgggagcgtgaatgacatggccctggatgccttcgacttggac

SEQ ID NO: 822618 - DNA, 98 bp, Homo sapiens
tcgccgtgctggccgcggcccgcctcagcatctggtacagccgagtggaatatgtgatcaagtgtgacatgtcagctctgcagaagattctgtatcgc

SEQ ID NO: 822619 - DNA, 98 bp, Homo sapiens
tccctacagactgggagctgttagagggcagggatcctagctgacacatctatgtcctcgccttggttggagatttcttcagaggccccacagtatca

SEQ ID NO: 822620 - DNA, 100 bp, Homo sapiens
ccctggggtgtaaaatcctccaggaccctaaacagatggacagttgatgcatttcaggaattaaacaaccaccatgtcgagcaaaaaggcaaagaccaag

SEQ ID NO: 822621 - DNA, 98 bp, Homo sapiens
ccgggatcatcaagaaacaaatcttgaagcacctctccagatagcctgggctggaagctcttctacgtcacaggctgcctgtttgtggctgtgcagaa

SEQ ID NO: 822622 - DNA, 98 bp, Homo sapiens
acagattgcagtatccgggatccagttaggaaccttcacccccccaaggatgaaggacccaaggccttgcagtctcatcctactcaagtgtggctctg

SEQ ID NO: 822623 - DNA, 100 bp, Homo sapiens
ctgaaaacatttttgaaaagacaagccatcaaaactgccttcagaagcaaaaggctgttgtgtacagctgtggagccagagttggattcttccaagggga

SEQ ID NO: 822624 - DNA, 98 bp, Homo sapiens
cggaagccctgagggcagctgttcccactggctctgctgaccttgtgccttggttatcaatactctggctgaccatcatcatcgtgggactgactttg

SEQ ID NO: 822625 - DNA, 100 bp, Homo sapiens
tctgcctatggttttatggggttcacagacctggaagagcccatctctggatgccctggaggcccatgggctctagggatggagctatgacattgaagag

SEQ ID NO: 822626 - DNA, 98 bp, Homo sapiens
aggtgtgatcaacacctgcacggtacctgcacgaatctcacaaactatgatctctgcagcatttttcttggaacctctacgctcttggtttgggttgg

SEQ ID NO: 822627 - DNA, 100 bp, Homo sapiens
gtgaggcctccccagccacgtgaaactgaattcctgcccctagaggagtgttactttatggtcctccaggtactggaaaaacaatgatcgccagggctgt

SEQ ID NO: 822628 - DNA, 98 bp, Homo sapiens
tgaaacatattccgtggtgtatctgtacagcagtttcctcatccctgcagctgtgtttgaacagccgagagacacacaagattgcagtattttatgtt

SEQ ID NO: 822629 - DNA, 100 bp, Homo sapiens
caacgacgggctccccggctcggctctcgctgcggcagacgggctcccccgggatgatctacaggagaactacgatgacccgcacaaaacccctgcctcc

SEQ ID NO: 822630 - DNA, 99 bp, Homo sapiens
ttaaactgtacttcagggatttgccaattccactcattacatatgatgcctaccctaagtttatagaatctgccaggaactctaatgatccaggacaaa

SEQ ID NO: 822631 - DNA, 100 bp, Homo sapiens
cccacctccccccggagccaggctggtttcggaaatgcccttacagcagcagtgattcgcctttgccagtctcatctcgtgtctgctttgttaagttcca

SEQ ID NO: 822632 - DNA, 98 bp, Homo sapiens
ggcgatggagggagtcagcagccaccggaccctgtcttacagccgctggagctatgacaggatgtggtggatacccaccctggtctcacgttcctgaa

SEQ ID NO: 822633 - DNA, 100 bp, Homo sapiens
tgaggagtcttcttgacccaaggtggcacaagaatggctcaactctccaaatagagagaatttctatcagttgcaagtacgaaaatttcctgccgattat

SEQ ID NO: 822634 - DNA, 99 bp, Homo sapiens
tgggaaaggtggaaaccagctgcgctgtcctaaatgtggcgacttgtgcacacatgtagagacctttgtatcacccagtcagcttgaagagtttcaaat

SEQ ID NO: 822635 - DNA, 99 bp, Homo sapiens
ccagaacttgtgccacagaactacagttcctaaatatttgtcacagcaatgggctaaagcctctggaagaggtgaagttgggaaactgcggattgccaa

SEQ ID NO: 822636 - DNA, 100 bp, Homo sapiens
caacagcttacctgagccagccaagaagagtaatgccatcggtcccctggtagccttgtggctgatttacaaacaaggcggggtaacgcaagaagcagct

SEQ ID NO: 822637 - DNA, 100 bp, Homo sapiens
cagtccccgctgagactgagcagacgcctccaggatctgtcggcagctgctgttctgaggtagaaattgagaagctggattaccatcattatctgcctct

SEQ ID NO: 822638 - DNA, 98 bp, Homo sapiens
taaagacaagaagaatcctttaggaccttttggagagcgagacgatcaacaggtgtttatccagaaagttgttcccatcaccaacaaactatttgtaa

SEQ ID NO: 822639 - DNA, 99 bp, Homo sapiens
ggacccgcaagcatgcccaccactgccacaaacgccgcaccaggtcttgtagcagcgcctcctcgataagccaatggacacgtcagtgttatctgaaga

SEQ ID NO: 822640 - DNA, 98 bp, Homo sapiens
aaggcaaagaacaagagaagacctcagatgtgaagtccattaaagccgatcgcattaacagactccaggcagctcttgccagcacccagcagttccag

SEQ ID NO: 822641 - DNA, 98 bp, Homo sapiens
cagaggagattagacgtagcagattaggcccggattgcatttctacaaggcgaaagaaaaggtcaagagaacctgaagaaggacttagtaagaagaat

SEQ ID NO: 822642 - DNA, 100 bp, Homo sapiens
gcgggcccgggctgcggcgtgtgcgcgcccgccagctgctccggagatacgtgagctgaagagacgcctgaaagctgagaagaaagtagcagagaaggag

SEQ ID NO: 822643 - DNA, 98 bp, Homo sapiens
ccaggaagtcggagtttgagccccggaggcagagcggctgccatgatccacattgtttgaagttattgtgagtgcctcgaggaccaaggaaccgttga

SEQ ID NO: 822644 - DNA, 100 bp, Homo sapiens
tgaatcagtctctctccctgctctacaacgtgcctgcagtggccgaggagattcaggatgaagttgtttcctcgctgatctcttcatgccgtgtaatttc

SEQ ID NO: 822645 - DNA, 100 bp, Homo sapiens
gacgactggctgttgaccctgttcaggcctcggtgaagactgaaccggccgctgacactctcggagaagattgtgtatggacacctggatgaccccgcca

SEQ ID NO: 822646 - DNA, 100 bp, Homo sapiens
cagctggcctggtttgatactgacctgtaaatcatcctttaggtgcggtggctactaaagttcgaaggcacgatatgcgtgtccatccttaccaaaggat

SEQ ID NO: 822647 - DNA, 98 bp, Homo sapiens
ttggacacaggaagattcatctaagcaggcagaaacatatttaaccaagtgtgaacatggctacgcctcttcattcccgtccatgccgagcccccgac

SEQ ID NO: 822648 - DNA, 100 bp, Homo sapiens
aacaagtgactgtcccaattggagttctgctggtgatctttgaatctcgtcctgactgtctaccccagggcgaactttctgaccaagtatacaactaccc

SEQ ID NO: 822649 - DNA, 99 bp, Homo sapiens
ttacttgttggggccctcttgataaaaagagatgtggggggattctcgacctgctaacagaactggaccttttcggacctgcgcgaagtctggctcaat

SEQ ID NO: 822650 - DNA, 100 bp, Homo sapiens
aaactcctgtatatattcaaacaacggaatgaaagctactggttgattttaaagtgcctgggcctcacaggtttggagatgtcccagaataaggcacaat

SEQ ID NO: 822651 - DNA, 98 bp, Homo sapiens
cgtagcagaatttagcatctattgggatgtcgattgcactttactgggggatttgcctcagatggagttacagcaatactggagtaaccgcttcctaa

SEQ ID NO: 822652 - DNA, 98 bp, Homo sapiens
ggaggcctggctgagctgtcatcccccagctgatgaacttattagtcctaaagacattgatcctgtccagcgctatgtcccactaaaggatcaacgta

SEQ ID NO: 822653 - DNA, 122 bp, Homo sapiens
gagaagctgcagctgacttacatggaggagacgtgtcgtcactatgtggcccatgtgaaggcaaccactgagaaaacggaaccgaatagtcaagaggacaagaatgatggtggaaaatcaag

SEQ ID NO: 822654 - DNA, 99 bp, Homo sapiens
tctgcttcccttcggaggaaaatttcaggctgaaggtttagcgggtgccgaggcgtagaggctccggtgttttttgtgccaattgcctgaccacaaaga

SEQ ID NO: 822655 - DNA, 100 bp, Homo sapiens
cggagaaggtgaccacctgtggtactgacgtaatcgcgctcaccaagcaggtgctgaaaggctcccggagctccgagaaagcgccgcccttggtgggccg

SEQ ID NO: 822656 - DNA, 98 bp, Homo sapiens
tggaatcataggattaacaacttggaaaaggcctatgatactcctgtcatttccctcaaagcttctgaagagtcatcctttgagaaaacaaaagagac

SEQ ID NO: 822657 - DNA, 100 bp, Homo sapiens
aggagcgagagcctgttggaacatgctttcttcaagatggaacaaagactgttgagtatgctccatgtagatcacgttgcaaaagcttctcatttcagag

SEQ ID NO: 822658 - DNA, 98 bp, Homo sapiens
gaaatagttccctttcgagttgcagcttacaacaagaaaaagaagcgtatggactactatgactctgaacattttcatatgagtccaacaagcaatga

SEQ ID NO: 822659 - DNA, 98 bp, Homo sapiens
accttcataattggagaaacaccaaaaggaatccgcagtttctgatgaagaattgaaaagaagagtagctgaggagctggcattggagcaagccaaga

SEQ ID NO: 822660 - DNA, 100 bp, Homo sapiens
ggtatcatgagagatatagcccacttagaaatcacaattgtagaaggcatgaaacaaaaaatgtggagtattgaaaatattgccttcggttctggtggag

SEQ ID NO: 822661 - DNA, 100 bp, Homo sapiens
gaagcgaccaaagcgcctgaggaccggcaacatggtgcggtcggggaataagggactttgaacatgtcggggatcgccctcagcagactcgcccaggaga

SEQ ID NO: 822662 - DNA, 100 bp, Homo sapiens
ccgcttcctggaatggcaagcgcagcaacaacagagagcacgtggctctgacgcccgctctgcggcttcggtgtttgaacaggccacagtccaggagcgc

SEQ ID NO: 822663 - DNA, 100 bp, Homo sapiens
tgccgttggtcctgtgcggtcacttagccaaggtgtccggctttgctggcccagcaagcctgataagcatgaagctcttatctttggtggctgtggtcgg

SEQ ID NO: 822664 - DNA, 99 bp, Homo sapiens
caggttgtagcagtgaagaagctgacgaggactcaggtgtacagtggagttttctggaggctacatgacatgtgataagaaaacagactgaaaaaggga

SEQ ID NO: 822665 - DNA, 100 bp, Homo sapiens
atcagagcagttttacaaatatgcagtacaatgactaggtttcctcggcctatgtcgcctcttcaagatgtgtccactattatcggaagtcgtgagcaat

SEQ ID NO: 822666 - DNA, 99 bp, Homo sapiens
ttaggattcaggccaaactggtaaatgacgaaggggcttcttccagagccaaggaggaagggttgtccgggaaaaccagcattggaatcagctgattca

SEQ ID NO: 822667 - DNA, 100 bp, Homo sapiens
ggagacctcggtgggcagaaaggaaccgggttgtcttgggccgggcagggcggagactggatctccaattactgcgtcatgtgttggattaggcaattct

SEQ ID NO: 822668 - DNA, 51 bp, Homo sapiens
ctacgacccggagcacccgacccctgagtattgctattaaggagtcagcaa

SEQ ID NO: 822669 - DNA, 98 bp, Homo sapiens
tggcccaggaatttataccagctgtagcaaaagtgggaagccaagcctttcctcccggtaaatttcatctgatttccaagttaggaagagtggaaaaa

SEQ ID NO: 822670 - DNA, 98 bp, Homo sapiens
agcgtgtccccagacggagtgtgtggaccctgtgtacgagcctgatcagtgctgtcccatctgcaaaaatgataccaaagaggatccctcattgaagg

SEQ ID NO: 822671 - DNA, 100 bp, Homo sapiens
atgaagttgattgactatggtctctccggctaccagctccttgacctgtttatggtttgggattggtctacttacctagctgattatgggcagccagctt

SEQ ID NO: 822672 - DNA, 100 bp, Homo sapiens
ggtatagggaggacacctctggattgaggatcttatgacctactttagaggaaggaaaatgcaacatggcagcagcaatggaaacagaacagctgggtgt

SEQ ID NO: 822673 - DNA, 100 bp, Homo sapiens
ataccgaaaagggcctgatgtctgctttgataacaatgtcttgaatctctttggcagtaacagtcttgatggaggaagcagccctatgatcaagcccaaa

SEQ ID NO: 822674 - DNA, 98 bp, Homo sapiens
ttggaaaacggagagactggggagaatttccgttactatggcaatgacggcagggactacaacaacctttcctatgagcaaccatacccgggaaagag

SEQ ID NO: 822675 - DNA, 100 bp, Homo sapiens
aagcccatcagtgtctggcaggggatccctgcctcccctaaaggggccttcctgagcaatgacgcaggcctactgaacttgacgcactggtatttggcca

SEQ ID NO: 822676 - DNA, 100 bp, Homo sapiens
cgccggccgcggcggcggccgccaccggctctaggatcctgaaggatcagaagttgacatggtagaagaaattgatcatattggaattatctcttttcct

SEQ ID NO: 822677 - DNA, 100 bp, Homo sapiens
gaaacagacattcaacatgattgcatttgaaaacccagtgacttgattgtaaaaatttacagagcggaatcatatgctggtctccaagagtttaaagcag

SEQ ID NO: 822678 - DNA, 100 bp, Homo sapiens
ctgaaagatattgacctcatctgtagcaatgctttagagtataatccagataaggacccaggagccgtgctggtatagaggactctaagaagtggggcat

SEQ ID NO: 822679 - DNA, 98 bp, Homo sapiens
ctcccatccgagcgctaccgaaccagtggagcacatgtatcggcaagcagtgtaaacggaggacttggggaaaaaggaccacatagtccatcgaagaa

SEQ ID NO: 822680 - DNA, 100 bp, Homo sapiens
gcaggagcgggtccagcttcaggagtactggcggaggggctggacgttccacgccaaaggataaggagccccgtggaatcatccctttagagaatctgag

SEQ ID NO: 822681 - DNA, 98 bp, Homo sapiens
caaccatgaaagcccagcgggaaaggctacagattccggggctgaccttggaacatgggaaagcggaaccaccaaaaggagtgatgatcaacgatctc

SEQ ID NO: 822682 - DNA, 100 bp, Homo sapiens
ctgtgatgtgtgccgagggaggaattgatatttcagcagttgaatcagttgaattcacttcatcaagaaactatcatgaaatgcgtgaaaagtaggaaag

SEQ ID NO: 822683 - DNA, 100 bp, Homo sapiens
ggatcagttgcctgggtactcggtggaaaccaacattctgcccacaaaaatgagagagaaaacaccatcttatgaagaatcctgcaaaaatgtctctcta

SEQ ID NO: 822684 - DNA, 100 bp, Homo sapiens
gagagccccttgcagaagacgccgtacgagcaatcagccatgactgcctttgcactgtccatgctctcagcccaccacctcctccccctgccattgcagt

SEQ ID NO: 822685 - DNA, 100 bp, Homo sapiens
cttggccaacctccggattgagaggaggaaacagctggaggagatcctggagatgaagagctggagtcagatggcagcactatggaggactattcacagg

SEQ ID NO: 822686 - DNA, 100 bp, Homo sapiens
tcacaagacaagggtcctaaaacaggatcagtaaagaaggaaaaagcagtaaagccagaggaagggtatcactgggatacatcagattggatgccaagcg

SEQ ID NO: 822687 - DNA, 100 bp, Homo sapiens
cgtactggctggatgcgttcctcaagcccagcctcgccaggactaccttaagggactgagtatcattggggaattacatgaatgacagtcttcgaaccaa

SEQ ID NO: 822688 - DNA, 100 bp, Homo sapiens
aaacaacgtgttattgatcttcgctgtaacccaagaacaagttcatttatatgagatatgggaaaatagtctccacaaaggcaattttggataagacaac

SEQ ID NO: 822689 - DNA, 100 bp, Homo sapiens
agacagctgaagcgtgttggggaaggagctgtaaagagattgccaccttccagagaagaggtacgagatgacaagacaaccataaagtgtgaaacctccc

SEQ ID NO: 822690 - DNA, 100 bp, Homo sapiens
gtttaccatcctcaactgcctgcagggcgccttcctctacctgctgcactgcctgctcaacaagaagactggcacagcctccaggttggcgggctcatct

SEQ ID NO: 822691 - DNA, 100 bp, Homo sapiens
agaggattattctctataatcccagttagagacacaatgacataaacatcgctagagtaatgccttctagctttttcctgctgttgcggtttttcttgag

SEQ ID NO: 822692 - DNA, 98 bp, Homo sapiens
caagtacagtctacaaaaagacctgctagagccattattgccccgaatagccaggccagaagaaggaaggcctgtggtgagtgggacaggaaatgaca

SEQ ID NO: 822693 - DNA, 100 bp, Homo sapiens
gctcccctcccccatcaaaggaaaggggaaaatgtctcagtcgaaaggtcttaattacagagcacggtgacctgggtaatagcagatttttagatccaag

SEQ ID NO: 822694 - DNA, 98 bp, Homo sapiens
tattcctgtgattgtccacctgagctcaaaggtatgaccccaaaacaaaccagtggagcagtgatgtggcccctacaagcacctgcaggacaagtgtt

SEQ ID NO: 822695 - DNA, 100 bp, Homo sapiens
tttgccatttatttatgcctttggaggtcaaaaagaagggcttcgggtctgggatataagcacagtctcttcagaaaatggtgtgaatggaacattaact

SEQ ID NO: 822696 - DNA, 104 bp, Homo sapiens
ccatcatccatgggaacctgacctgtgacaccatcttcatccagcacaacggactcatcaagattggctctgagatagaatctcactatgttgaccaggctggt

SEQ ID NO: 822697 - DNA, 100 bp, Homo sapiens
cacttttcaaaatgctttggtgggaagaagtagaggactgttatgagagtccggagtgttgtcatgtgaagcctgccatccaggaacctccaatagttat

SEQ ID NO: 822698 - DNA, 98 bp, Homo sapiens
tgttgaaaaatgcggttaaaaaggtgatgggtatctttaagagcagcttattccaagctttgctaggtgagtggcagtgtgatgagtgtttatagtgg

SEQ ID NO: 822699 - DNA, 99 bp, Homo sapiens
tgttttttaagggaccaggaaaagtggtgatggttgcaatttgcataatctcgtggaacagtgtcatagctgcaaagtggaattctatcctcaaatttc

SEQ ID NO: 822700 - DNA, 100 bp, Homo sapiens
ctcaatgacctccagtaagggagggcaagaagatatgaacctgagccttcagtcaagaccctccagcttgcctttgctgattgttggaggttcttttggt

SEQ ID NO: 822701 - DNA, 98 bp, Homo sapiens
tccctctgctgggcgtcctgttcttccaggtttgtttcagtgttggaaggcgtgttgtctaagctgtcaaggtatgatgaaggcactttcttttcatc

SEQ ID NO: 822702 - DNA, 99 bp, Homo sapiens
ctggatcctgctcctctgggttgaaacccgggcgccgccaagatgccggtaaattcaactggaagggaactattaaagcaattctgaaacaggccccag

SEQ ID NO: 822703 - DNA, 51 bp, Homo sapiens
gtttgcccttgagggggccctggtgaaagaacttgtcctggacaacagtcg

SEQ ID NO: 822704 - DNA, 100 bp, Homo sapiens
ccagccagtaaaacaagtggcctttacacagggcagggtgggtatatggctgccaaggtccagaaattggaggaacagtttcgatcagatgctgctatgc

SEQ ID NO: 822705 - DNA, 100 bp, Homo sapiens
atggggagagagaagctgaaagctgccgactgcgacctgcagatcaccaatgcgcagacgaaagaagtttaagcttgaagcgttcgtaaggttctcaaag

SEQ ID NO: 822706 - DNA, 98 bp, Homo sapiens
taggatttaaccgctctctgcctcccagcgggtcacagaaagtcgagagagccaaatgacgattgaggagaggaagcagctcatcactgtgagagagg

SEQ ID NO: 822707 - DNA, 50 bp, Homo sapiens
gaagggacgtgggggcggccacggcaggaagtttatctcgacaatgctag

SEQ ID NO: 822708 - DNA, 100 bp, Homo sapiens
taacaagtctgattctaaccagtatattggggaactgaaagatcagatagcagagctgaatcatgagattttaaacagacatcccccctttggaacccag

SEQ ID NO: 822709 - DNA, 99 bp, Homo sapiens
ttcgtttttcgccgtcatgggcgcctcggccgccatggtcttcagcgaaaaaaccgggaagatcctgacggagttcctccagttctatgaagaccagta

SEQ ID NO: 822710 - DNA, 100 bp, Homo sapiens
agagaagttattgccacttaatacaaagtccttggaagcaagtggctgttcttgtagttttctgcatagataagttccaagaccaaagattaaattaaga

SEQ ID NO: 822711 - DNA, 125 bp, Homo sapiens
cgggacaatcttggcatgttggtctggtcacccaatcaaaatctgtcagaagcaaagtcaacccttctgtggggctcaattttggaaatcttggaagtacttcaactccagcaactacatctgct

SEQ ID NO: 822712 - DNA, 99 bp, Homo sapiens
ggaagatggcgctggccggatggaaatcctaatgacagtctccaaattcgcctccatctgtaccatgatcaccacgcttattaatcataaagataatac

SEQ ID NO: 822713 - DNA, 100 bp, Homo sapiens
gagcccagaaccactgcctacaaaccaccctctcctgaccctgaagaactgtgaatctaggtcaacctattaagatacgtttccaggaatctgaagaacg

SEQ ID NO: 822714 - DNA, 98 bp, Homo sapiens
gattccttgcagagacagctcaacacggcacttccacaggtgtcatttgcctatgctgtatattggattagaatatggtttgaccaataactcaaaac

SEQ ID NO: 822715 - DNA, 100 bp, Homo sapiens
gaatctacaggagtaaagcgaattgtccaagccctgaatgccaatgtgtggtccaatgtagtgatgaagaatggactggggttttaaggggtgtggcagg

SEQ ID NO: 822716 - DNA, 100 bp, Homo sapiens
aacctgaccgggcacgaggagaagtttttcagaagaagtgaagtcaagatgaagaaccatttgcttttctggggagtcctggcggtttttattaaggctg

SEQ ID NO: 822717 - DNA, 98 bp, Homo sapiens
ttggagaaccaccgcatcaagagcttcaagaacaagggccgcgatgtggaagtggcattgcagacagtgtagccaagtggatatttaaacaggacttc

SEQ ID NO: 822718 - DNA, 100 bp, Homo sapiens
ccgctacagttcaaaagaagaggtagtgaaggcacaaaagtctctgcacatgcttctccagggaaagtgaccgaggcagtgaaagaggccattgacgcag

SEQ ID NO: 822719 - DNA, 100 bp, Homo sapiens
gtgtggagacaggggcttttatttcagcccagaggcagagctacacaaccatggaatccaaattaattcctgttctgtgcgactggtggatataaaaaag

SEQ ID NO: 822720 - DNA, 98 bp, Homo sapiens
attgagacggagctaagagatatctgcaatgatgtactgatttacactgactgggccaaccactacctagcaaaatcaggccacaagcggctgatcaa

SEQ ID NO: 822721 - DNA, 98 bp, Homo sapiens
gtgtctgtggaggatgaggaagggactggaagccccaagaaatacaaacctggtcgatgtgatgatattttgaaatggaagcctcccagtctgaattc

SEQ ID NO: 822722 - DNA, 100 bp, Homo sapiens
gacatatgggtggggacataatgaactcagacctattgcaaggaaaggacactcccctaacatatttgagttgagaattatggctgcaggaaaatttgca

SEQ ID NO: 822723 - DNA, 100 bp, Homo sapiens
atgtgggtagaggacgtgttagacaagttcatgagggaaaatatttatccccaaacagaaacctgtacagacttttacagaagaaaaagtgtctcttgat

SEQ ID NO: 822724 - DNA, 99 bp, Homo sapiens
ctgaacaggcagggccagacccaggaatcagagatcattgatttcttcctgggggcctctctcaaggatgaggttttgaagattatgccagtgcagaag

SEQ ID NO: 822725 - DNA, 98 bp, Homo sapiens
gaagaccttactgctgatagcaccatcttcaaatttgtggaagcttattcaggtcaattcagtgaagatatgatacccacagtgggcttcaacatgag

SEQ ID NO: 822726 - DNA, 98 bp, Homo sapiens
ggagcttgatccagacctctacaagcaaatggagaagttcaggaaggttcattattatgaagatggtaatgttcagctagtgagtcataaagatatac

SEQ ID NO: 822727 - DNA, 99 bp, Homo sapiens
gctggtcgcagatcctgagacccggacagtggcagtgaaacaggtggacccccaaaagtacaagggcatatttaacggattctcagttacacttaaaga

SEQ ID NO: 822728 - DNA, 99 bp, Homo sapiens
ccctcttgataaaaagagatgtggggggattctcgacctgctaacagaactggaccttttcgagtattgggaaagggtcgttgtggtgcatagacccag

SEQ ID NO: 822729 - DNA, 98 bp, Homo sapiens
acatattccttgagagcatttgagaaaccccctcaggtacagacccaggctcttcgagactttgagaaggaggagccattggatgaaagctcagtgaa

SEQ ID NO: 822730 - DNA, 100 bp, Homo sapiens
ctctgaggcggcgagagatggtcaggtctggagctcgaccgggccaggaaaatcgtgaagtcgatagaaatgaaggcctgaaatttgcacgaaagcattc

SEQ ID NO: 822731 - DNA, 100 bp, Homo sapiens
atattggatgtggtaatggaaagtatcttggcatcaataaggagttatatatggttgctgccaagctgcaggagacagagcaggcgctacaggagcagga

SEQ ID NO: 822732 - DNA, 100 bp, Homo sapiens
agagtacatgagacgatgaagcaaagaaaaattgtatggcgacttcttgagctggaagctagaggaaacccttgcccagttccctttgcagcctgggaag

SEQ ID NO: 822733 - DNA, 100 bp, Homo sapiens
tccggcatgcaaaatctggaggtacagcacttcacgttgcagctgctaaaggctatacggaagttttaaacacaaccagtgtctctgaagaagatgtctc

SEQ ID NO: 822734 - DNA, 98 bp, Homo sapiens
ggcgccaggcgcggaggactcccggtatcttttgacaggctggcgcctcggctctggggacccgcagaatgacagcccatatcaaggcggtgtattct

SEQ ID NO: 822735 - DNA, 100 bp, Homo sapiens
ggagagggaactgccgcctctgacaccagttctccgctggaaaaagggacaaaagattgcccaaaagaatcagggtccaaattccaagcctgtagtgtcc

SEQ ID NO: 822736 - DNA, 100 bp, Homo sapiens
tggaatcaagcaccttcattctgctggaattattcatcgggcagtgaaatcaactgtgcagaccatcactgttggaggagtgagcacatcacagtttaag

SEQ ID NO: 822737 - DNA, 98 bp, Homo sapiens
gtgaccgagaccgtgaccgagagcgtgaccgagagcgcgaatatcgtcatcgttagaagaatatgaacatcgacatttctgccttctcctgcattgct

SEQ ID NO: 822738 - DNA, 100 bp, Homo sapiens
tggtggccatcttcccatctcccatgatgtatgctggaccaactgaggtgtgccttcttcctgctcctcctcctcactggaaaacatgcttttgtttaac

SEQ ID NO: 822739 - DNA, 100 bp, Homo sapiens
ctacagctccgcgcccgccagttgcttgatcaggtggaacagattcagaaggagcaggattaccaaagggaggaattctaaggaaaggtgcaaagctgtt

SEQ ID NO: 822740 - DNA, 98 bp, Homo sapiens
cagtgacagacctggagactgcagttctctatccttcacacagttgaacaagagatttttcaatcaagactttggaactacgaagatggaagagattt

SEQ ID NO: 822741 - DNA, 100 bp, Homo sapiens
cccccgctcccggggtccccggccggccaagcaggtcctgctcaatctggaattttgtcagatcgtgaagtggtaaacctctttcttcattttactgtca

SEQ ID NO: 822742 - DNA, 98 bp, Homo sapiens
acaagtactgtgtcaacatgcaaggccagtctgaagatgatgagaaactgaaaaagaggaaggagcgatttgggattgtcacaagttcagctggaact

SEQ ID NO: 822743 - DNA, 99 bp, Homo sapiens
ttctttcgatcagagatcggcggagaccctcgaagtgcgcaaacttgacactcaccctgaccggtgttaagtgtgatgcttccataatacatttggatg

SEQ ID NO: 822744 - DNA, 100 bp, Homo sapiens
tgcgagaacaagtttaacgacaagcacatcaccactctgcagcctagatattatcctactgaagatgtgcctcgaaagctgttgagccacggcaaaaaac

SEQ ID NO: 822745 - DNA, 98 bp, Homo sapiens
tttgttaaggattccaagtaactcttatttggttaatccagcacgtatggggccaagtgtaggctcccagcaggaactgagagcgccatgtcttccag

SEQ ID NO: 822746 - DNA, 100 bp, Homo sapiens
agccaaagacaagacgcaggagaaaatcgagacctcaagtaatcattcccaactgctaaatcctgaagatgacctcttaccagggaagattcgagacagc

SEQ ID NO: 822747 - DNA, 99 bp, Homo sapiens
tcggaagcctgcgtaactttctcccttgatccgggagtctttccactgggtatgcaaccactcatgtattcggttcaggaagcattaaatgccagacca

SEQ ID NO: 822748 - DNA, 100 bp, Homo sapiens
gagtggaatccatgtttctggacgcggatttttggcctcatactctgttatagataaacaagtgctcactgttcgggctgccatccccattatcatgggg

SEQ ID NO: 822749 - DNA, 98 bp, Homo sapiens
ggaagtttacacatgtggtttgaacaccaaggggcaactgggccatgagagggaaggaaacaagccagatcagccaaatggccgatgacacagtggca

SEQ ID NO: 822750 - DNA, 100 bp, Homo sapiens
ccgacctggccaacctgagcgaaggcgtctccctggcagagaggggcagttttggagccatgaacgtgcgcatcgaccccagtagcctgtccttcaacat

SEQ ID NO: 822751 - DNA, 100 bp, Homo sapiens
tccttgacagaattgactataacgttgaacagtcctgtatcaaaactgaagatggtttgaaacagcttcacaaggactggaatgtcacgtggaataccag

SEQ ID NO: 822752 - DNA, 99 bp, Homo sapiens
gaccgggcgagcagagtaagaagcagcttcaaggttactgactttttatgatgtttggtggctatgagactatagaagcatacgaagatgatctttatc

SEQ ID NO: 822753 - DNA, 98 bp, Homo sapiens
cgatctggacgcggcgctgctgaccgacatcgaaggtgacgcagctggaccagaggctggcactcatcaccgacatgcttcaccagctgctctccttg

SEQ ID NO: 822754 - DNA, 100 bp, Homo sapiens
ccatggagaagcttagctccatcaaatctcaaacaatttatgagattattgataattctcaaggattctacgtaatttgatggagcttcttgaggcagaa

SEQ ID NO: 822755 - DNA, 98 bp, Homo sapiens
aactcaagctttgatcttggctcccacaagagagttggctgtgcagatccagaagttggaaatggaggatgaagatacaattgatgtgttccaacagc

SEQ ID NO: 822756 - DNA, 98 bp, Homo sapiens
gccacgctcagcgccgagggcgagatcgtgcagatttgtagccaaaccgtgcgccatagccctcaacattcaggccaatggaccacaaattgctccgc

SEQ ID NO: 822757 - DNA, 100 bp, Homo sapiens
cagccagttgacccggctcacaatgtcagccgcctgcaccgtgatgaaacttatcaggacatatttcgtgatttttcccaaatggcatccaataatccag

SEQ ID NO: 822758 - DNA, 100 bp, Homo sapiens
tcaccctgatggacattctggacacagatggggacaagtggttagatgaactggattctgggctccaaggcacattcaggaccccgcgagccagcggctg

SEQ ID NO: 822759 - DNA, 100 bp, Homo sapiens
tgcaattcataatggagctactgtactggctattggaaggaggagattctgaagataaggaggttctaaatggcttctaagaagttgggtgcagattttc

SEQ ID NO: 822760 - DNA, 100 bp, Homo sapiens
cttcgtgaagctaatcaagcaattaatcccaagttgcttcagttggtcgaagacagaggttcagccttttttagcaaaacttcagtctccgattaaagag

SEQ ID NO: 822761 - DNA, 98 bp, Homo sapiens
aaatgggctactgatgacatcaaatctcaacttcatttactttggatatatacgaatagcattgaagaacttgatggtgtccttacatccatattcaa

SEQ ID NO: 822762 - DNA, 100 bp, Homo sapiens
tcagtcgcagcaccatgttcccatccaggacaccttccccttcctgaacatcaatggacatggatttgattgacatactttggaggcaagatatagatct

SEQ ID NO: 822763 - DNA, 98 bp, Homo sapiens
ctcttcgaagtgaccagcgctaacgttgtcaaggacccgccctccaagtacgtggcccttaatctcacttgcaacgtgtggggagacccgcctccgga

SEQ ID NO: 822764 - DNA, 100 bp, Homo sapiens
aagcgctacaagaacagaaccatcctgggctacaagacgctggccgcgggctccatcagcatggctgagggacccagacatggagctgcgggaagaagcc

SEQ ID NO: 822765 - DNA, 100 bp, Homo sapiens
cgctggaaaaatttgggacaatatggcctctactacgtggacagtgaagggaaccggatttcaggggccaccttctctgtaggttctggctctgtgtatg

SEQ ID NO: 822766 - DNA, 98 bp, Homo sapiens
cagaaggtatccgtggggcaggcagcctagatctgatgggggaagccaccaggattacatcatctgctggtgtgatgaatgcagactctgctaccatt

SEQ ID NO: 822767 - DNA, 100 bp, Homo sapiens
agaagtaagcatttttcctgtggaagaacagcaggaagtaccaccaggtcagcagcaaggacaagatggagtaaaagtccagcaagctactatagctcct

SEQ ID NO: 822768 - DNA, 99 bp, Homo sapiens
tttccgccggggcgagacccccagtcctgagaaacatctttgtcctcacctgcatcatcatcgtctgttccctgctcttccctgtcctgtggcacctct

SEQ ID NO: 822769 - DNA, 100 bp, Homo sapiens
tagactcaagttcgctgacaggtccagttgcagatacaaacttggattttttccagtctgatccttttgttggcaacctgtttgattcacatgatgacag

SEQ ID NO: 822770 - DNA, 100 bp, Homo sapiens
gtcgtccagagagttgggtccaaactcttctttgacaagagagacaactctgactttgggagctgcagtccatggctgaccaggagcaggtgtcaccagc

SEQ ID NO: 822771 - DNA, 98 bp, Homo sapiens
aagagcagcattggaaactctgtttacgttattatcaacacaggaccagctggtgagagagtgtaaggaggtcctgaagggcggcctgctgatgaagc

SEQ ID NO: 822772 - DNA, 99 bp, Homo sapiens
ggatgagtacgataccgaagcgggctgtgtgccccttctccacccagaggtccagcctgatgagtgaagaggctaagcgaggagcacccaacccttggc

SEQ ID NO: 822773 - DNA, 98 bp, Homo sapiens
tacttctatatctacaagggggtccgcaaggtgtctgcaattgaactccaaggtgcagaatggtttggaaagtagctgtattcctcagtgtggccctg

SEQ ID NO: 822774 - DNA, 100 bp, Homo sapiens
gacatcgtcccgctctgtgctgccgacatccaggaccagctaaagaagcgctttgcttacctgtccggtctgtctcgttggaaaatccagaacataccct

SEQ ID NO: 822775 - DNA, 98 bp, Homo sapiens
gggtcatctccagatgctagggttatggaacccttaggagaaatcttgagagtggacagcaattgtgaagatcgccagagagttctgtgtttcatcac

SEQ ID NO: 822776 - DNA, 100 bp, Homo sapiens
ccttgggaattcctggcatgagatcagtgctgctctggcaaaggggacatgagcgatgaagatgatgagaatgaattttttgatgcacctgagatcatca

SEQ ID NO: 822777 - DNA, 100 bp, Homo sapiens
ccgccaccaccgaatggacgagttctcccggggaaatgtaccgtccagcgagttgcagatctacacttgaaccaatgaggccattcttctggcactttat

SEQ ID NO: 822778 - DNA, 98 bp, Homo sapiens
agcagctgccttcttggacgcctttcagaaagtggctgacatggccaccaacacacgtgggatatctgcattacctccacctcctccacctccaccac

SEQ ID NO: 822779 - DNA, 100 bp, Homo sapiens
aagtttgtagaatggctcaaaaatgctgaagaaggcctatgttgtccttggccagtttctggtgctaaagaaagatgaagacctcttccgggaatggctg

SEQ ID NO: 822780 - DNA, 99 bp, Homo sapiens
tccaattcaagaggaggagaggggttgttttataaactgcctggccgaatcagccttttcacgctcaagcttgcaggagggttcctacttgttatctca

SEQ ID NO: 822781 - DNA, 100 bp, Homo sapiens
agcataaaccatgctgtgatgtcacagctaccatagaactccagggtagtgttgggctggcccatgtgggctcagagacattttaaatccaaaggatgtg

SEQ ID NO: 822782 - DNA, 100 bp, Homo sapiens
gaattggctagatcaggaagcctatgtcaactatggaacaacaacttgcagctcatctctattgatgttttagaaagagcgttttcgctacgtaaagcac

SEQ ID NO: 822783 - DNA, 100 bp, Homo sapiens
ggcgtgatgagagtcattggggaagatgagaatgtgcctactgctcctgatcctccaagtcaacatttacgtgggcatgggacaggcttttgctttgatt

SEQ ID NO: 822784 - DNA, 100 bp, Homo sapiens
ggggaccaaactctccatcacccagggggaggagccccagccccgcgacgaggaggaagcggagctggagctgctgaggcagtttgacctggcctggcag

SEQ ID NO: 822785 - DNA, 100 bp, Homo sapiens
atgtgaaattgagactgacaaagctgtggttaccttagatgcaagtgatgatggaatcttggccaaaatcgtgtatgaaaagacacagactgtactctca

SEQ ID NO: 822786 - DNA, 98 bp, Homo sapiens
aacagaacaccaggacatcccagagtctgggaaatgattcttgagtatcagaacaccaccttctttggtggaacctgtatatccatgattgattacct

SEQ ID NO: 822787 - DNA, 99 bp, Homo sapiens
cccgaagaagaaaggattcgttacagccagagattggagtcagtggatcggtggggaaaatgctgcttaccctgggccctgggctgtagaaagaagaca

SEQ ID NO: 822788 - DNA, 100 bp, Homo sapiens
aagtcttctcatttaaaagctcacctgaggactcacactggatcaatgtgactctaagaacaaatggatgaatgaatatccatatgaagagaaaaacaat

SEQ ID NO: 822789 - DNA, 100 bp, Homo sapiens
taatgactttggtgccctcaacatctctcagagacgaaaggtcaacaactacaatatcagcaatgtgtcccataactatgcccgagctgtcctttcccag

SEQ ID NO: 822790 - DNA, 129 bp, Homo sapiens
ctcagaagcatgtgtcttccccagctctgcagccacatactatccgtttgttcaggaaccaccagtgacagagcatcgggctgtcaatctctttcttcagggatatgaaaagtcttggattgaaacaga

SEQ ID NO: 822791 - DNA, 100 bp, Homo sapiens
ggtgaaggaaaaggtttgccggctgaaccaggagttggaggtccccctccccactaagtgcctctttgcatagcaccagtccccacccgcacgctctctg

SEQ ID NO: 822792 - DNA, 100 bp, Homo sapiens
agaagtggtatttgtcctcgtagtgcataaagcattcctctgaatattgatttgctgaatagcccagacttattggaagcaacgattggtgatgtaattg

SEQ ID NO: 822793 - DNA, 99 bp, Homo sapiens
gtctctctgctgcggcgcggggaccgctgtgctctcgattggccgcgtaatccaggttgctgctgggagcagcaacctcaagagagtgaccttggagct

SEQ ID NO: 822794 - DNA, 98 bp, Homo sapiens
tcgtaggcggcggcgccgccgcgccaccctgttcttccgtgtctccctctgcctggcggcagtcacggccaaggctttcaaggatatgctgtattcag

SEQ ID NO: 822795 - DNA, 98 bp, Homo sapiens
tgctggatggcaacatggacatcaagctggcagcaaaatgatgcttcaacacccaggccaggtctctgcctcggaagtgagtgcttctgccatcgtcc

SEQ ID NO: 822796 - DNA, 100 bp, Homo sapiens
tgtgatggaggctctacagaggacggctgtgtcgcagcctctcgggatgacaccactctgaatgcactgaacacactatggattacagccaccaagcaag

SEQ ID NO: 822797 - DNA, 100 bp, Homo sapiens
gtgttccaattcctgtgtttcatcataagaccaaggatgaatacttgatcaacaggaggccttacatcgggaacaaatgttggaacagaagttagccacg

SEQ ID NO: 822798 - DNA, 100 bp, Homo sapiens
tggggccaagggacaatggtcaccgtctcttcagggactgatgggcacactttccggagtgcctgtttaccgagatggttggaagcagagtggatctttg

SEQ ID NO: 822799 - DNA, 99 bp, Homo sapiens
tcgagggtgacgctcgctccgctcgtcccgctcgtcatggcctacccgggatacggaggaggggcatgcttctgacggccaatgaaacccccaagatgg

SEQ ID NO: 822800 - DNA, 100 bp, Homo sapiens
accctctttatggccatggagcactaccccatgactgagcaattcagtagtgtgttgactgtaggaaacctgcaattaccagctctggctgggtcgccac

SEQ ID NO: 822801 - DNA, 100 bp, Homo sapiens
aaatagactctgaagtaatatctggactttgaaattgtttttcgttggaatatacgttgcacatttatggcgattctgagtgtgagggcagacttctgcc

SEQ ID NO: 822802 - DNA, 99 bp, Homo sapiens
ttcgatttggaggacagagactgcaattggcctttaccagagtttgatccaagccagattcgactgattgtatatcaagactgtgaaagacgagggaga

SEQ ID NO: 822803 - DNA, 108 bp, Homo sapiens
tgcagtacctgcagaaggtctctggagacatcttcagcagcctgtgggccaaagctgaccaactcccccaccgtcatcgtcatggtgggcctccccgcccggggcaag

SEQ ID NO: 822804 - DNA, 100 bp, Homo sapiens
catcagagtcctagagatgtctatgaagtctgcgtgctttagaatggatgaacaagagttaaccggaccagtcctgcctctgttgtagaagacatgtggt

SEQ ID NO: 822805 - DNA, 100 bp, Homo sapiens
ctatcatcagccagcagggggaggtggattctcaatatcctcctgttcagagacttatgaccccaaagccagtttccatagcaacaaatcgaagtgttta

SEQ ID NO: 822806 - DNA, 99 bp, Homo sapiens
ccgcaggcgctgtcacccagtgctgatcacagaagaactgcagcttcctggggagcagtttcacctccacaggcatcgcttcatactcctcactgtcaa

SEQ ID NO: 822807 - DNA, 99 bp, Homo sapiens
acagaatgaactcttggagcccctaaagaatctggccttctccccagccaccatggcgtatcctgtggagcacccagacaaattcctgaagtttggcat

SEQ ID NO: 822808 - DNA, 100 bp, Homo sapiens
agaaattgacagagctttgggcattcctgaacttgtcaatcagataatgagcttcagtccccaagatctgcgaagacgtttgtgggtgatttttccagga

SEQ ID NO: 822809 - DNA, 100 bp, Homo sapiens
aaagacagattgaagaaatgcagagacagagcctgctccaagttttcctcagtgaggccttttgctggattggtctgaggaacaattctggctggaggtg

SEQ ID NO: 822810 - DNA, 100 bp, Homo sapiens
cagaggaatagtctacaaaggaagacttgtaacctggagaagaggcccgatacttctccccacaagctcgccgtcgattccacgctgcccttgcttcttg

SEQ ID NO: 822811 - DNA, 98 bp, Homo sapiens
tattttggaaggtcaacatcatgttattcttcgcactataggaaaagaagccttttcatatcctcagaaacaggaaaatgactcaggcactttggaca

SEQ ID NO: 822812 - DNA, 100 bp, Homo sapiens
gctgatgctgtaaaaaaggctagaggtttcttggaatttgtggaggattttattcaggttcctaggaatctcgttggtcacggtctagatcacattctcg

SEQ ID NO: 822813 - DNA, 50 bp, Homo sapiens
tagggagtgccagacagtgggcgcaggtgaaaacttttggcccgtttgga

SEQ ID NO: 822814 - DNA, 100 bp, Homo sapiens
tgcagcaagcagacctctctgctctggaggacatgcttccaacaaagagaaagaaatggtgactaggaaaatcatgggagtaatgttgtgtgtttctcag

SEQ ID NO: 822815 - DNA, 99 bp, Homo sapiens
gggaagagatgcgaggatgacaaggcctggcgcaagcgctggtttgtcctccggcgaggccgcatgagcggcaaccccgatgtcttggagtactacagg

SEQ ID NO: 822816 - DNA, 50 bp, Homo sapiens
ggaggagccacggccggggacaggggctgcagtcttgcagtgatatctgg

SEQ ID NO: 822817 - DNA, 98 bp, Homo sapiens
aaaacataaacaagaattggaagacatgaggaaagctggtcacgaagccctcagcattattgtggatgaatataaggatccttcaaaccaaaaatgtg

SEQ ID NO: 822818 - DNA, 98 bp, Homo sapiens
cgaaggaatcatgtataaatggcttttaggaatggtagcttcctggggatggtatgctggatatacaggccttgctattttggaagctacaagaaaaa

SEQ ID NO: 822819 - DNA, 100 bp, Homo sapiens
gccgcggtgaccccctccccggctgccgccgccgccgcctcggccgaccagggacctgcccgcctgcggctgctccggggaccagttactctccacaaga

SEQ ID NO: 822820 - DNA, 98 bp, Homo sapiens
ttcagctacagggtgaccaacgcaagaacatatgccagttcctcgtagaggctgtttctcttggaggtggtgcaggaggttgaggaaagcacctctga

SEQ ID NO: 822821 - DNA, 99 bp, Homo sapiens
gtcgaacgatgttggactcatagtcactgccagaaaggactacctgattgctctgtccctgcagcagcaacagccacgaggcccgctggggcttaccga

SEQ ID NO: 822822 - DNA, 100 bp, Homo sapiens
tatgaaatctgaagatgaagtgggaagtttaatagagtatgaattcaggacttacaaaccatccaagttggaattcctcatgaggagcacctcaaagaaa

SEQ ID NO: 822823 - DNA, 100 bp, Homo sapiens
attaggcctctctggaagcattacttccagaatacccagagcatcctggccagaacaagccaaggagccaagacgagagggacacacggacaaacaacag

SEQ ID NO: 822824 - DNA, 100 bp, Homo sapiens
acttttacctgtttggattaatatgtctctgttcaggccccttcacagatgtagtcactacaaatcttaaattgcgaaatccatcggatagaaaagtgtg

SEQ ID NO: 822825 - DNA, 98 bp, Homo sapiens
gaatctgtagtgtggctggtatcggtgttcccctggtttaactagcctgtttggtatgcaaccactcatgtattcggttcaggaagcattaaatgcca

SEQ ID NO: 822826 - DNA, 51 bp, Homo sapiens
gctccccccattggacaagtggaagagctggaagaggcgccgctgacggtg

SEQ ID NO: 822827 - DNA, 100 bp, Homo sapiens
ccctggatgagggggaagggcctcaaagccagaaggagttgaacatgtaggaagtttcatggcccagcccctcctgagagccctgaactgccaaccagac

SEQ ID NO: 822828 - DNA, 100 bp, Homo sapiens
gagaacctgaagccgcctctgcaggctcctgcaaagttctgatctacaatggccaactggacatcatcgtggcagctgccctgacagagcgctccttgat

SEQ ID NO: 822829 - DNA, 99 bp, Homo sapiens
ttatggatattctggtggggagatgaacccaacctagtgggtgtaatacatcatgaactgcaggttcattcggctcctaaagaagtagcagtgtccaag

SEQ ID NO: 822830 - DNA, 98 bp, Homo sapiens
ctgatatggaagaggaagcagatgatggttctaagatgggatctgatttagtcagtcagaattcatcagctccggaagctgggtgaagaaaagaaaca

SEQ ID NO: 822831 - DNA, 98 bp, Homo sapiens
ttcttcccggggcgccataaacgcccccaatttcccagctgctaaaggaagaggaagctaaaagatggcggcaaggcagcccaggcaaatgtaagaat

SEQ ID NO: 822832 - DNA, 100 bp, Homo sapiens
acaggggggcgagaagagaaacaggtgcagctattgctggagtttaccgagcagcagggaaggaaatgataccatttgaagccctcacactgggcactgg

SEQ ID NO: 822833 - DNA, 98 bp, Homo sapiens
gaaatgagacgcattaacttccagactccaggatccactagttcctggactatgggaactgatgactcgcccaatgtcacagatgatgcagctgatga

SEQ ID NO: 822834 - DNA, 99 bp, Homo sapiens
acatttctggctctgaaggcgaacgcttcgctggccatttaggagctctgctcaaagccagacgtgtgtggaccagttgacaaagatccaaactgaatt

SEQ ID NO: 822835 - DNA, 100 bp, Homo sapiens
gaaatagtggcaggtgacagtctgcatgtgcagttttcagaaagtgaagtcactgcttttgctgtcttggatcaagaccagaaagaaattattgatacca

SEQ ID NO: 822836 - DNA, 100 bp, Homo sapiens
cagcaagcaccacgcggcctacgtgaacaacctgaacgtcaccgaggagaagtaccaggaggcgttggccaagggtccaggccatcaacgtgtccagccg

SEQ ID NO: 822837 - DNA, 98 bp, Homo sapiens
acggagtcctgttccaccttcagagcgtcacggcgtacgccctcatggggaaaatctccccggtgactttcagacttaattcagtgcacaaatgagat

SEQ ID NO: 822838 - DNA, 100 bp, Homo sapiens
ccatggtgacggtggccctgtcagtggctctcttggccctcctgaaatggaagctatgaagcagataacccagctcctaccagaggacctcagaaaggag

SEQ ID NO: 822839 - DNA, 100 bp, Homo sapiens
gatgtgcactgctacaggactctactatggaggacttcgcaggtgagcagtaacggaaatcagccccgtttattcctcccagcacctgccttatccaact

SEQ ID NO: 822840 - DNA, 100 bp, Homo sapiens
tgaaactacctgtgcagctccagagagctatggctgcagaagcagaagcgtcccgcgaggcccgcgccaaggttatggaattagaatcaaagctaaatga

SEQ ID NO: 822841 - DNA, 50 bp, Homo sapiens
gcaagccctacagaatttgggacctacggagtcgttcacgcctactgagg

SEQ ID NO: 822842 - DNA, 131 bp, Homo sapiens
atacaaagaactcttaaagcagctgacttcccagcagcatgcgattcttattgaccttgtaagcactatcctttgtactccctcaacgtggcctccatgtggttgaagctagggagactctacatgggcct

SEQ ID NO: 822843 - DNA, 98 bp, Homo sapiens
gctgaatccagtaccaaaaacgtcaacaacagttttacgtgagattacgtactataggtgaacttttagctcctgcagctccttttgacaagaaatgt

SEQ ID NO: 822844 - DNA, 100 bp, Homo sapiens
ttacataggacgccagcagggaattttgttacactggaggaaggaaaaggagaccttgaggaatatggtcagcaaaatgatgcttcaacacccaggccag

SEQ ID NO: 822845 - DNA, 100 bp, Homo sapiens
tgtgggtattatttccctgtcggacattctgcaagccctgatcctcacaccagcaggaccccgctctggacacgaacggcagcctggtggcacccagccc

SEQ ID NO: 822846 - DNA, 100 bp, Homo sapiens
aaaaatgggcacgattctatactgcagaagtagttcttgcattggatgcaatccattccatgggttttattcacagcaactttgactctttgaatgaaga

SEQ ID NO: 822847 - DNA, 100 bp, Homo sapiens
cagctggaggaggaacttcgaaccatggaccaggccctcaagtccctgatggcctcagaggaggaggtctgaggtcaccaagcctcctccttgcttggag

SEQ ID NO: 822848 - DNA, 100 bp, Homo sapiens
ttctgctgtccttctttgtggagagcaagggctgtgggacagatgatgtctaccatgttctacccactggtcacctttgtcctcctcctcatctgcattg

SEQ ID NO: 822849 - DNA, 100 bp, Homo sapiens
caagagaagaaagccaaggaggcagcaggggccagcaaggccctgaatgtgactgtggacgtgcaggtaacccagaatctcccaatgaaagaaggctgca

SEQ ID NO: 822850 - DNA, 100 bp, Homo sapiens
tgctcagccaggccgactacctcaacctggtgcagtgcgagacgctagagggtgactcctgcacctgcgccggctcctgcaaatgcaaagagtgcaaatg

SEQ ID NO: 822851 - DNA, 125 bp, Homo sapiens
ctgaaggaggcctttgtggtggaggaggaaggcgtaggagagaccatgactgaggaacagtatctggcaccaattctgacccagtcatttgtgatccctggctcttgtgatatgctgaagatttc

SEQ ID NO: 822852 - DNA, 100 bp, Homo sapiens
ttagcaacctgtgcagaagccctacccagacctaactgggaactggctctgtatatcatcatctcaggaataatgaggagtagcactgtagatgggttaa

SEQ ID NO: 822853 - DNA, 100 bp, Homo sapiens
cgcaaagcggggacccagaccctggagcctcagttggaagcagccgatccagcctgcggagcctgtggggcagatagcctgggctggaagctcttctacg

SEQ ID NO: 822854 - DNA, 100 bp, Homo sapiens
cgagcacttttaactactggaagtttgcgtggccaaaaggtgtgttttgctgacttcaagcatccctgctacaaaatggcctacttccatgaactgtcca

SEQ ID NO: 822855 - DNA, 100 bp, Homo sapiens
ccgagacattagtggaacttcaaaggaatgagtgggatccaatcatcgaatgggctgagaaaagaaaaggcaacagatggctccctgcaaagtgaggatt

SEQ ID NO: 822856 - DNA, 100 bp, Homo sapiens
ctttattaccctttgtgtcatcctccacagctccagggaaggcactcaaaagtggggggcaggaaaggtctgacctacgagaaacatggcaaccagcgcc

SEQ ID NO: 822857 - DNA, 100 bp, Homo sapiens
ctggatttcctgaagatgtttacagtgcagtcttatcgaaggatgtgcatgaaggacagcctcttctcaatgaaagatgtgtcatggcaatgctgagaag

SEQ ID NO: 822858 - DNA, 131 bp, Homo sapiens
tttttcatgacctttctcatctgactcgtgatctgcccatcttgttactccctagcagtgtggtaagacttacagattccagtctgctgttagatgattattcatccaagttgagccccaaaccaaagaga

SEQ ID NO: 822859 - DNA, 98 bp, Homo sapiens
cgccatgagctggggcacggagctgtgggcgcatattaaatttcctattgactacccctattcaccacctaccttcagattcttgaccaaaatgtggc

SEQ ID NO: 822860 - DNA, 100 bp, Homo sapiens
acaagctggtgatgcccaactacccattcatcaacattcggtcaagtgattccttttctggccgaagggatcagaatccatggagacaaagtcacggagg

SEQ ID NO: 822861 - DNA, 98 bp, Homo sapiens
aaagcctgcccagacggctcacctgtgcgggatggaacaaaaggagtgttcagcctgggtgttcctgtagatgctctcttctttattggtaaccagtt

SEQ ID NO: 822862 - DNA, 100 bp, Homo sapiens
ttgaagttcaagagctcagaccctaaacacttttctgtagaaggtcagttggaattcagggcattgctatttattcctcgtcgggctccctttgaccttt

SEQ ID NO: 822863 - DNA, 99 bp, Homo sapiens
aattccaaaatgtgtaagacgggatattctcttctgtgctgtcaagggcagttccggcgaggggggagcctcagcaggattgctgtgtgaaaaccgagc

SEQ ID NO: 822864 - DNA, 100 bp, Homo sapiens
tcgataaatcagacagaacagttaatcctcaatttaagcctgatctaacccctagaaacagtattggatgaacgaatatacctcatccattggaattgga

SEQ ID NO: 822865 - DNA, 99 bp, Homo sapiens
gcagcagcggctgtggtggttccgggtgtctttgtccccccggtgtcgctgccctggcccgcagctctcttacccagctgcgaagactagaagaacttg

SEQ ID NO: 822866 - DNA, 98 bp, Homo sapiens
cctaggggacataaaattagtgattactttgaggagccagcaccgctctttgaccttgccatgcttgccttagatagtccagagagtggctggacaga

SEQ ID NO: 822867 - DNA, 119 bp, Homo sapiens
ttgaaaaatgcggttaaaaaggtgatgggtatctttaagagcagcttattccaagctttgctagtggactgttcatcaccattcatgacaaaggtcatcttgcaacaatgctgaattct

SEQ ID NO: 822868 - DNA, 98 bp, Homo sapiens
aggaccccctccggctcaagtgtgtcaagcaaggcttctagtgaggacgttgccagctccccggagcgccactacacgcccttgccttctgcttccag

SEQ ID NO: 822869 - DNA, 100 bp, Homo sapiens
cagcgatcagaaggagaaaaagtacgagttggagatgacctcatcttagttagcgtgtcctctgaaaggtacttggatccagtttatggaaaaggaaaac

SEQ ID NO: 822870 - DNA, 100 bp, Homo sapiens
cgctttcctgggttgcttctggcggccatggtgttgctgctgtactccttctccggaataggaggccttcaagattttgtgctgaaatctgcaacactgt

SEQ ID NO: 822871 - DNA, 98 bp, Homo sapiens
ctaccatgacgataagcaaccaacgttcagagcactctatgaagcaatacgggatgtctgcgagctctgcaagggagcggcccctcctgacagccccg

SEQ ID NO: 822872 - DNA, 100 bp, Homo sapiens
taaccggcgtgcagaacctgaggaagaagcacaagcggctggaagcagaactggctgcgcatgagccggctattcagtggaggatgctggcgctgagaag

SEQ ID NO: 822873 - DNA, 100 bp, Homo sapiens
catacctttggttaaaggagctgccgtcaggagcgggatcgttacgcctacaagattcatcttccagaaacagtagagcagctgaggaaattcaatgcaa

SEQ ID NO: 822874 - DNA, 100 bp, Homo sapiens
aattaatttttccatctaattatgacctccttcgccacttacagtatgcaacacattttcctatacctctgagagtagcagatcgactctatggtgtata

SEQ ID NO: 822875 - DNA, 98 bp, Homo sapiens
gaaaaacaaacgtcttgaagactgaaagcctgttattcaaagaggttagcagtagactgttggaagtaaggatgcttggatattaattcatctgtgaa

SEQ ID NO: 822876 - DNA, 98 bp, Homo sapiens
cattgtgttgctgcagattgccaaagtacagcagggaagaactggaaactcagagaaagaaactgcccttccatctacaaaagctgagtttacttctc

SEQ ID NO: 822877 - DNA, 100 bp, Homo sapiens
cctggaaaccctgcattttgggaaactcgactttggagaaaccaccgtgctggaccgcttttacaatgcagttggacagagagactctgaagatgtgagc

SEQ ID NO: 822878 - DNA, 100 bp, Homo sapiens
cagtgacaagaacagtgggccacaggggccccgaagaactcccacaatgccacaggaggaggcagcagtggcatttattttcaactggcttggattttgt

SEQ ID NO: 822879 - DNA, 100 bp, Homo sapiens
tgttattgataactatgtttatgaacataccctgctactcaccctgtaatggatcttaaagcattccccaaagataacatgctttgggtggaatggacta

SEQ ID NO: 822880 - DNA, 99 bp, Homo sapiens
gcgggagctgtgcagctccttatcatggttaaacccatccagagtaatggctgcggccttacccaggaccctgggggagttgcagctgtatagaatatt

SEQ ID NO: 822881 - DNA, 98 bp, Homo sapiens
cagcagctgtcgccgccgctctcagacgcccctgtcctggcaagagctagaaggtgagcgtgccagttcctgtgcacacaagcgctcagcatcctggg

SEQ ID NO: 822882 - DNA, 100 bp, Homo sapiens
cggcgaatatttggcttgttgatgggtacccttcaaaaatttaaacaagaatccactgttgctactgaaagggatgctgaaaacgccattcaacagatgg

SEQ ID NO: 822883 - DNA, 98 bp, Homo sapiens
attttctttccccctttaacttagaggaacgaggattatacagaaatttgaagttgaaactccattggaagaagctattaaatttttaacaccgttga

SEQ ID NO: 822884 - DNA, 99 bp, Homo sapiens
ttcgcagtggtcgcttcttctccttgtacaagttcagggacctaactgtggaagaactaaggaatgtaaatgtatttttcccacatttcaaatattcca

SEQ ID NO: 822885 - DNA, 147 bp, Homo sapiens
gcaactgttacaagaagccagtctttaaatattcgaacaactcagcttgcaaaagcccagggccatatatctcaggaagctcttactcctcagaaatgtattcctcacatcatcgtccggggtctcgtgcgtattcgatgcgttcag

SEQ ID NO: 822886 - DNA, 100 bp, Homo sapiens
attcttgtggaggatagagcaggatctgattgagaaagttgtcatcctgcgaaaagctgtgcaactcactcaagccatggacactagtactgtaggagtt

SEQ ID NO: 822887 - DNA, 100 bp, Homo sapiens
gggcggcggaaaatagcctttgccatcactgccattaagattggagaccgtgtcatggcatttgtcaattacaatgcctgggcagaggtggtctgcacac

SEQ ID NO: 822888 - DNA, 100 bp, Homo sapiens
ttgaaagaacccacaggtgcatttcacagcactctgggcgaaaattggatgtgaaaatgaagccagaccgagctcagagagtggcaacagtgtgaaaaga

SEQ ID NO: 822889 - DNA, 98 bp, Homo sapiens
tcctcatctgtccccaccacaatcaatacgattggaaccagcacaagtacaaaacctgctaaggctgcctcagacctgactgcctggttcagcctctt

SEQ ID NO: 822890 - DNA, 98 bp, Homo sapiens
tcccaccgtctgccaggacccaaaggagcccagggctctctgctgtgcaggctgtctctctgagaacccgaggatccacctctgatgttcagtgaaga

SEQ ID NO: 822891 - DNA, 98 bp, Homo sapiens
agtctcgaggtgtgaagctgatgcccagcaaagacaacagccagaagacgtctgtgtcctcccagtgcaacgtcagcttaaagaagcagaggagccgc

SEQ ID NO: 822892 - DNA, 98 bp, Homo sapiens
tctgaccaatctggtttgggagcacaagcaagcccaggcagccaaagagaagaagaagaggaggaggaggaagaagggaactgtccaggtttattgct

SEQ ID NO: 822893 - DNA, 99 bp, Homo sapiens
tatggaataactatcacgtcgtgaaatattctttggattttggacctctggatagtagatcaggttctatttcaccaattggcatggaaccaacgacaa

SEQ ID NO: 822894 - DNA, 100 bp, Homo sapiens
tgataaagatgatgatatccttctcaaccttgtgggatgtgaaaactctgttactgaagatgagctgcttcagaaagagcaaaactattcagatgacgtc

SEQ ID NO: 822895 - DNA, 101 bp, Homo sapiens
atctacaacaacatgaaacagttcatccgctacctcatctcgtccaacgtcggggaagttgtctgtttggaccccaatgaccagaagtctctagaggggat

SEQ ID NO: 822896 - DNA, 98 bp, Homo sapiens
agctcaggagctggagaccaaagctgagctcctccagtctgagcatgtctgttcgatcctggcttccctcctgcggaacctgagagggcagcagcgga

SEQ ID NO: 822897 - DNA, 98 bp, Homo sapiens
agtgcttgatatcacagaggaaactctgcattctcgcttcctggaggccgagcagaagcgcaacgcagagtcggtgaagggcatgaggaagagcgagc

SEQ ID NO: 822898 - DNA, 136 bp, Homo sapiens
ccctttaggatttgttagaaaggagacccgactgcaactgctggattgctgcaaggctgagggacgagaacgagcttcagcgccagtcagcaaagtaaataaatactgtgcttcttccaactttcattccacttgg

SEQ ID NO: 822899 - DNA, 100 bp, Homo sapiens
tggttacctcgtgaggcgcctcaggccacggcatatgcctccaaggacggggtcctcactgaggccatgatggacgcctgtgtgcaagatgctgtccagc

SEQ ID NO: 822900 - DNA, 100 bp, Homo sapiens
tagcgcctagaatttttggctccaataaatgcatggacaccacgttgctgaaaacatgctttgggactgccactgaatttatcttttgcggttttatgac

SEQ ID NO: 822901 - DNA, 100 bp, Homo sapiens
cctcccgtgtcatcggcttcactgtcctcacagaggcagaccctgcagccacttctcctcttaagaacaatgatgaaggctcactggacatatacgctgg

SEQ ID NO: 822902 - DNA, 100 bp, Homo sapiens
gctcgtcccggccctggcccgccgcaaacgaggatccgctgcgctcggggaacgcgacagcggcgctcgtggccccgccaactgggtacatggaaaactc

SEQ ID NO: 822903 - DNA, 100 bp, Homo sapiens
gaggggagcatgggtgccaaggagtcacggatcggattcctcagctacgaggaggcgctgaggagaggtccctccagctacaaggtgggcaccatggcgg

SEQ ID NO: 822904 - DNA, 100 bp, Homo sapiens
gaaaaagatgttttgatccctaaaataatgagagaaaaggccaaagagaggtgttctgaacaagttcaaggaactgcaagcacatgttgaccagataact

SEQ ID NO: 822905 - DNA, 98 bp, Homo sapiens
atcacatggccagttggtccattcaacaaatggttattggatgcccattatgtggcaggcactgttccgggggagagatatatttttgccatcatgga

SEQ ID NO: 822906 - DNA, 99 bp, Homo sapiens
acatgcttacttccccttcaccttccttcatgatggtttctgaaggattgtcattcttgcatagcagtgtgaaaatggtgcatggaaatatcactcctg

SEQ ID NO: 822907 - DNA, 98 bp, Homo sapiens
ggtcctggatcagctgtccaaaaacatcaccaggatggggctaacaaacttcaccctcaactacctcaggaacccagcccttgctgacatctacacag

SEQ ID NO: 822908 - DNA, 100 bp, Homo sapiens
tgtaaacctacttcattaggttgctgtgaagttaaatgagttaatgagaagaatatcaggcagatggtatgggttcatagaagggcacgtggtgattccc

SEQ ID NO: 822909 - DNA, 100 bp, Homo sapiens
tactcttcagggatgagtcatgtggcagtggaaaatgcgctcgggctggaccagcaggttatcaatactctggctgaccatcatcatcgtgggactgact

SEQ ID NO: 822910 - DNA, 99 bp, Homo sapiens
cggccgccgcccgagcgctcgagaaagtcctctcgggagaagcagcgcctgttcccggggcagatccaggttcagccccgacacgtctctgctactgga

SEQ ID NO: 822911 - DNA, 100 bp, Homo sapiens
tggtgctctggaccggacagtgaggaggacgacaagcccattggggccacccacaggcactctttaatgaagaaacaccagagctgttaaacacattgag

SEQ ID NO: 822912 - DNA, 100 bp, Homo sapiens
gcttgacccgcagctaccaaaacgtctatgtctgcacagggccactcttcctgcccagggaggcagcgtccatggagcaaaaggaatgccaggatcctgc

SEQ ID NO: 822913 - DNA, 140 bp, Homo sapiens
gatgcctggaccccagtacagactattgaacctgaatgggaaggagggtggcctggtttttaagcttcccaggcctccctggagcacgaggagggcaagatcctccgggcccagctagagttcaaccagatcaaggcaga

SEQ ID NO: 822914 - DNA, 116 bp, Homo sapiens
caaggagccacaaagaagaaaacatttcttttaatttttaaacttggtttgaaagttgattatggaagattcccacaagagtaccacgtcagagacagcacctcaacctggttcag

SEQ ID NO: 822915 - DNA, 100 bp, Homo sapiens
ctccacaaatatttacagtcggaggagtactcggtgaaatcctgtcctgaagactgtaagcttaacaaacaacagttgcagttactgaaagaacggttcc

SEQ ID NO: 822916 - DNA, 100 bp, Homo sapiens
cttgaggacacttaccacgaaatggagtgaaggtacctgagcgcaggaaccatggtcttcattgctgcctcagcattagcggaagtgccacgggccggct

SEQ ID NO: 822917 - DNA, 112 bp, Homo sapiens
agggaagcagaggagaaccgggagccattcagaaaagcatcagccactatgtgattgtcatgtccatgaccatctttttggtgttcctcaatggcctggcccagctgctcac

SEQ ID NO: 822918 - DNA, 100 bp, Homo sapiens
ctctgcctcgtgccgctgagcctggcgcagatcgagatcagcaaggacaactcctgcaaagaaaactgtacttgttcctcctgcttgctccgggccccca

SEQ ID NO: 822919 - DNA, 100 bp, Homo sapiens
agacgcaggagaagcgcttcaaggacccgggactagtggaccagctggtgaaggcagacagcgagtggcgacgatatgctgcaatgtacaacaactctga

SEQ ID NO: 822920 - DNA, 99 bp, Homo sapiens
tttaaatgagaaagcagtttcatacagacaagttgcatttgatttcacaaaagtgaagagaggctatatcgagaagtttactgactttcttcggctctt

SEQ ID NO: 822921 - DNA, 100 bp, Homo sapiens
ccgctttgttcagctgcagcatggagagatagataaacgggaggttccagccttggcaagaggagtgtggcccttcctggaatccctctggacacaccct

SEQ ID NO: 822922 - DNA, 100 bp, Homo sapiens
ggctctatcagcatgggaaacttacactgctgcataatggagaacctctctacattccagtaacccaggtgaatcagttcagacagctgtattccaaagt

SEQ ID NO: 822923 - DNA, 118 bp, Homo sapiens
cctggggaacccgttcagcacaccagtggggcagtgcctcggtccaccatctgctcccctgaacttgatttcaaatgtcaacgagacatctgtgaacttggaatggagtagccctcag

SEQ ID NO: 822924 - DNA, 99 bp, Homo sapiens
gcgaggccaaaggactgaacccgcaggagcgtcacgggcgccggggcggctgccgacggcgggactgggtaagaagagttcctgggtcaagtggtcacc

SEQ ID NO: 822925 - DNA, 98 bp, Homo sapiens
ccttccttgctttcagaatttcacccaggttctgacagattgacaagtatctctatgccatgcggctctccgatgaaactctcatagatatcatgact

SEQ ID NO: 822926 - DNA, 100 bp, Homo sapiens
cctgactatggcacggccacaaggaggaggcctgagtgtgggcggggccttcataccagcaaaagtaccggcgtgtcaaaaaaatgtcagatgacgagga

SEQ ID NO: 822927 - DNA, 98 bp, Homo sapiens
gggaccaggttaccctaacagcaggaaggttgtcacatcaggtccacccatctggccgggcagtaccttcttcaagagaaatggagcccttctccaag

SEQ ID NO: 822928 - DNA, 98 bp, Homo sapiens
acacatgcatgtacagcttcaattagataatctcaggtgatggatgtggacacactgtactaggccctgagagtggaacccttacatccataaactac

SEQ ID NO: 822929 - DNA, 100 bp, Homo sapiens
gccaggccttcgagttgcgcttcaaacaatacctcaggaacccacccaaactggtcacccctcatgacaggctccaggaggccagagctctactgaagcg

SEQ ID NO: 822930 - DNA, 120 bp, Homo sapiens
caactctcgtagtggaactaatatgggagaaggactgttgggagaatttaggatcttgttgaatccagtccagacatatctgaagagatggattaagaatgctttggattaaggattgtg

SEQ ID NO: 822931 - DNA, 100 bp, Homo sapiens
caaagacgggcgcaaagattgcttgaagaaatccatgccatgaagaatccacattcatctcaatggaaggatcctgccttaagtcaacttatttgttttt

SEQ ID NO: 822932 - DNA, 100 bp, Homo sapiens
tctgacccagaaacagaatggccttcagaccacagagtggtatcctgaggtgcggcaccactgtcccaacactcccatcatcctagtgggaactaaactt

SEQ ID NO: 822933 - DNA, 100 bp, Homo sapiens
gaggcattttccccaaagtagcaacaaatatcatgagagcatggctcttccagcatctcacactaaaagatggcggcaaggcagcccaggcaaatgtaag

SEQ ID NO: 822934 - DNA, 50 bp, Homo sapiens
ttctcaggcgtcaccgagagctcagaaaaactgattgcttatcaacgaga

SEQ ID NO: 822935 - DNA, 100 bp, Homo sapiens
ttggaacaacatatctacacctctctaaaattgctgcctctggtggggaagtggaaggataactataatgggatgagctttgtctgtattggggctatct

SEQ ID NO: 822936 - DNA, 100 bp, Homo sapiens
tgttgtgacaatcagtcacacaattcattcatccagagatctaccgcatcgtgtcacagaaacagatcgcagaccgcgctgcccacgacgagtccccggg

SEQ ID NO: 822937 - DNA, 128 bp, Homo sapiens
aaaaaatgaatcaaaagaaaatctctaaatgcagattccagaaaaattacagcacatctcagtgaatttgcaagtgaaccttctgataacttaagagagattctccaaaatgtggccagattgcaggg

SEQ ID NO: 822938 - DNA, 98 bp, Homo sapiens
cagctacactccaaccacgtcccgctctccccagcatttccacagacctggtcctgaccaaagagcagatttgtacttggaaggaaaagaccagctcg

SEQ ID NO: 822939 - DNA, 100 bp, Homo sapiens
ggccatcgtgaactttgtcaaccagaagctggaccgcctgggcctgtctgtgcagaatctggacacccagactacagtggtagtggaggccgaagcggcg

SEQ ID NO: 822940 - DNA, 100 bp, Homo sapiens
tccgggggcctggctaaggaaaccctattacctccaggtgagcctgaatttaaatacattgggaatatgcatgggaatgaggctgttggacgagaactgc

SEQ ID NO: 822941 - DNA, 98 bp, Homo sapiens
tcttattgcagcaattattggagctgtacagattgccatcatagtagcaattgtaatgtgcataacaagcaaattgctcgaccctcgcaagaagaaaa

SEQ ID NO: 822942 - DNA, 100 bp, Homo sapiens
ccagagaccacttctccacatgaatattctgttttgctgcccgaagcttgggcactcaacacaagccagctgaaggcactgaatattgaaatgctgcctg

SEQ ID NO: 822943 - DNA, 100 bp, Homo sapiens
ggagattctcaacagataccctcacttcaagactaagattgaagctattcctgcaccaactgacctgaagttcactcaggtcacacccacaagcctgagc

SEQ ID NO: 822944 - DNA, 98 bp, Homo sapiens
tcagcacaatgacattgacaaacgggaaactctgatgaggaagaaagtgcttcagaatctgaactttggaagggtccactaccagagacagatgaaaa

SEQ ID NO: 822945 - DNA, 100 bp, Homo sapiens
actggattcacgggtagagattggcttcgggctgagctagcagtgagcaccttttggcccaatgaatatcagatgaggacggggacttggttgccttttc

SEQ ID NO: 822946 - DNA, 98 bp, Homo sapiens
catccgcatcaacaagatgttgtcctgtgctggggctgacaggttccaatactgtgttgcagtgggagcccaaactttccccagtgtgagtgctccca

SEQ ID NO: 822947 - DNA, 139 bp, Homo sapiens
tggtgcctaccaagaagtctcagatcttttctacagcttctgataatcaaccaactgttacaatcaaggtctatgaagcaatgccctgccctaaggaagacactcccaattctgtttgggagcctgcgaaggcaaaata

SEQ ID NO: 822948 - DNA, 98 bp, Homo sapiens
atctcctcctccactgccactacagggaagtgcatcacatgtcagagtgaagatagtccaagtcctaagagacagcgcctctctcattcagtctttga

SEQ ID NO: 822949 - DNA, 98 bp, Homo sapiens
ccgttgccggtgccggcctagcgtcctggaattacttcaatcaagaaatatatcctggacaattccagccatctctctgtcacaaattcatagccttg

SEQ ID NO: 822950 - DNA, 100 bp, Homo sapiens
agaagacatactggcagcagggcgcatattaaatttcctattgactacccctattcaccacctaccttcagattcttgaccaaaatgtggcaccccaaca

SEQ ID NO: 822951 - DNA, 98 bp, Homo sapiens
aggattggctgcagcagctacattagcagctggattgccttttgcaattcttacttcaaggcatacccccttccaacgaggagtattctgtaatgatg

SEQ ID NO: 822952 - DNA, 100 bp, Homo sapiens
ctgtcggagttgtagccatgccctaggttcagaatttaacattacgcagccagaagttgggtgtattatctagctcacagaatggtccaccaaaaagcac

SEQ ID NO: 822953 - DNA, 100 bp, Homo sapiens
ttctagcttcccatcgacggtcagtgcgcacgttgtaatcagctgaggccatgtcaggagacggagccacggagcaggaatacggggtgctttgcattca

SEQ ID NO: 822954 - DNA, 98 bp, Homo sapiens
aagaaggacgcactgactcgcctcaagcacctgcgcatcgtcatcgtgaaccaaggactgggttttgctctggaagcctgtcctgattgcttctgtaa

SEQ ID NO: 822955 - DNA, 98 bp, Homo sapiens
cattatcaacatgctgatgggctttgacaaggcggagctgtgcatgaagatccatccttttacaatccctgctattattcgtccattcagcgtattga

SEQ ID NO: 822956 - DNA, 98 bp, Homo sapiens
ggggggccaccgaatcgctgtcacgccggcagggaaattcaactactgaggaggttacggcacaaaaatgtcatccagctggtggatgtgttatacaa

SEQ ID NO: 822957 - DNA, 98 bp, Homo sapiens
tgcatggggattgataggcagcatattcctgatacatatctatgtgaacgttgtcagcctagagatgaggaaggaacagagcatttacgaaaacgaaa

SEQ ID NO: 822958 - DNA, 100 bp, Homo sapiens
gcataccctacaccctgcagaatcactattaccgcaacaataggtacgaagatgccctggtgctcctgctcacagaggtgttgaatcgaatccagttcag

SEQ ID NO: 822959 - DNA, 100 bp, Homo sapiens
ggatcctaaaagtctagagatcaggactctggcagttgagagactgttggagcctcttgttacacaggttgtagatatttccggtatattttaaagcaag

SEQ ID NO: 822960 - DNA, 100 bp, Homo sapiens
agaaggactatgggggaactgatggcgttcctgttacctctcatcattgtgttaatggtgaagcacagcgattcccgatgacgactcatttaatttacat

SEQ ID NO: 822961 - DNA, 100 bp, Homo sapiens
gggggttggtggcccagtcccacctcccatgagctaatgaatgtgggatttttagactctgaggagcagttggagctaatccacattatggaaatggaaa

SEQ ID NO: 822962 - DNA, 100 bp, Homo sapiens
caccagtaacaggagactgcagcagacccaggcccaggtggatgagacaatgcagatcttcgtgaagactctgactggtaagaccatcaccctcgaggtt

SEQ ID NO: 822963 - DNA, 100 bp, Homo sapiens
gaagaacctgaaggacacactagatcttagcaaagcaatgtctcaagatggtgcttctcagttccaagaagtcattcggcaagagctagaattatctgtg

SEQ ID NO: 822964 - DNA, 99 bp, Homo sapiens
acgaggagctgcgggaggagatccacaagggggtgaatctctacattaagaacttggatgacactattgatgatgagaaattaaggaaagaattttctc

SEQ ID NO: 822965 - DNA, 98 bp, Homo sapiens
agggaccgaaatggagagcaaaggaatggaagttggatacactttgtgacttgtacgagacactgaccattacacaggctgttatttttctcaatacg

SEQ ID NO: 822966 - DNA, 101 bp, Homo sapiens
aactactgtctcaacgtcatgaagggctgcttggcaaatcaggctgacctcgacacagagtggaatctgtttatagggtcgacaagtgcccccaatgattt

SEQ ID NO: 822967 - DNA, 100 bp, Homo sapiens
tgtcctcatcatcccgtcagagctgaggtacttcgtgaaggtgttggagcgggccggagagaagtagagtgggctgcgaggagaaggaaacaggcctttc

SEQ ID NO: 822968 - DNA, 99 bp, Homo sapiens
tgggttttctgtttccttttggcctactcccaagaagatattggttgtagacaagtactcattgataatgaaagtacaagacatggatggccagttttt

SEQ ID NO: 822969 - DNA, 99 bp, Homo sapiens
tttggtggaaaacggacatcagacaaagtcaagaattgatagatgtcacatgtaccctgctgcttctaaacccagactttaccactgcatggaacgtga

SEQ ID NO: 822970 - DNA, 100 bp, Homo sapiens
gcctacagaaccgtcccaaaatatggcaaagaaacctattctgagagtgaaagcagcagcagtagcaacatctccaccatgttggtgacacacgattaca

SEQ ID NO: 822971 - DNA, 98 bp, Homo sapiens
tcttgttacctgtggaaatcagaagagagaatatagtaaaaatacgcagtacagtcccagatcgtgcccgggtgttgggaggtctcccagacgtggtc

SEQ ID NO: 822972 - DNA, 100 bp, Homo sapiens
agtagatgataaagatgatgatatccttctcaaccttgtgggatgtgaaaactctgttactgaaggtgtgaaatctaagaatcccctgccaactcttgag

SEQ ID NO: 822973 - DNA, 98 bp, Homo sapiens
gggagtccttgcagaagtggcccagcattaccaagacacgctgattagagcgaagagagagaaagcccaggatcccctaacaacagtgagagagcaat

SEQ ID NO: 822974 - DNA, 100 bp, Homo sapiens
ttgtcgttgatggacagagctatctgctgctgatcagagatgaagggggccccccggaggcgcaggccatgacgctgatggagtacctcatcaagaccgg

SEQ ID NO: 822975 - DNA, 100 bp, Homo sapiens
gacagcaaacagagattcgggttctgccgcttatcttcaggagcgaagagctgcttctgtatcttaagggttctcatgtatcagccatcttctgtaaggg

SEQ ID NO: 822976 - DNA, 100 bp, Homo sapiens
tcctgggctaccgacaggctctacagctccgcagaattcaaggaccttgcaaaatggaaagatcgtcgaaaaagttacacttcagatctgcagaagaaaa

SEQ ID NO: 822977 - DNA, 100 bp, Homo sapiens
atggacaagagaaagctcgggcgacggccatcttcatccgggtcgagctgtgcagttttagcgggtacaagatctaccccggacacgggaggcgctacgc

SEQ ID NO: 822978 - DNA, 100 bp, Homo sapiens
gaatgccagtgcatcttttgcacagctctcctggaatgaggccgcccatgggaggccatatgccaatgatgcctgggcccccaatgatgagacctcctgc

SEQ ID NO: 822979 - DNA, 100 bp, Homo sapiens
atgttcaactctatacagaacacagagctccagcaacctggcagaattacgacagcttcttgattgtgtgtctcagtttgaaactgaattctacatcagt

SEQ ID NO: 822980 - DNA, 100 bp, Homo sapiens
agcagctcctgcccctgtccgggggatgactgattctcctccgccaggagacacacggacatcgggaacggacggaggaaggatgtgcagttgcagcctt

SEQ ID NO: 822981 - DNA, 99 bp, Homo sapiens
tcagaggtccctggagtttctgcttcctccagagccaggtcttgggcgtctttggtactggcttttttaggggtctgcctggggattacccttgctgtg

SEQ ID NO: 822982 - DNA, 99 bp, Homo sapiens
ggagcgacagaaaacttggaactaagctggaggacaccgagtactcttatgcagtccccatggaatccatgtcagtgaacgcctcacatggaaaaggat

SEQ ID NO: 822983 - DNA, 100 bp, Homo sapiens
gcctctccagggagtgctctgttcacggctccatcgctgttaggaggttatattcaaaagaaaaaggaactgtggggaatctgtatctttattgcagcag

SEQ ID NO: 822984 - DNA, 100 bp, Homo sapiens
cctggccccggagctgttgctggacccctggcagggccagccagctcggtgtgtacaaagcgtttgtcgataactataaagtcgctctggagacagctga

SEQ ID NO: 822985 - DNA, 98 bp, Homo sapiens
tacaagaacagagggattctttgactcagaaactacaggtggctgactgttcttgggatgaaacaataaagatctatgaccctgcttgtcttactatt

SEQ ID NO: 822986 - DNA, 100 bp, Homo sapiens
ctttctgtttcagatttcagatactctgactccacctttacttttacctacgttggcggccccagaagggacttgccatgaggtgttgaagccttgtttc

SEQ ID NO: 822987 - DNA, 100 bp, Homo sapiens
acagattattcttggagctggaccagtacttgaggaagtaattcctcacatggctaaagagtatggattccgatatgaactagttcaatataggtggccc

SEQ ID NO: 822988 - DNA, 100 bp, Homo sapiens
agtcctgagcttcccaccgaagatgaacagggttcctggggcatcgacgatctccatatttcattgcaagtggtattattcagcacgacttgattttctc

SEQ ID NO: 822989 - DNA, 99 bp, Homo sapiens
tacccaaggaaaagtaatactcttttgagagattaggtgatggtgggtatgggctacacacgggaagaaatcaaagagtccttgaccagccagaagtac

SEQ ID NO: 822990 - DNA, 100 bp, Homo sapiens
actttaacttcaaacctgacaaatgtgcaatcttaaaagaaactgtgaagcaaattcgtcagatcaaagaacaaggacctatatccagactttgcctgac

SEQ ID NO: 822991 - DNA, 100 bp, Homo sapiens
cactaacactgtgggacttggtttgcctatgtcaagatcacaggttttatctgagccttggagattatcaacaagccagacccctcagcagcaagtggag

SEQ ID NO: 822992 - DNA, 100 bp, Homo sapiens
tggacagacatctggaccagttattaatgtgtgccatttatgtgatggcaaaggggccaagaaatgaagcttcaggcctgtgaagttggagagcagcaag

SEQ ID NO: 822993 - DNA, 98 bp, Homo sapiens
cttggcccctttcctcatctgtagacacacttgagtagcccaggtttgggtacccagaccccacctacctgacccgggtgcaagaggagctgagagcg

SEQ ID NO: 822994 - DNA, 100 bp, Homo sapiens
ctacatcaatcaaaaccttccttggggatacaaacacaccttgaaccagattgatgaagtaaaggtgtggcctcagggacatggatgaagctggaaacca

SEQ ID NO: 822995 - DNA, 98 bp, Homo sapiens
aggattgggccgagcctatgccctggcttttgcagaaagaggagcgttagttgttgactgaaactgttgaggagcccatggaggaagaagaagcagcc

SEQ ID NO: 822996 - DNA, 98 bp, Homo sapiens
aagcaatctacgaagaccgaggaaaagctgcggatttgataatgggctgcattaaaagtaaagaaaacaaaagtccagccattaaatacagacctgaa

SEQ ID NO: 822997 - DNA, 99 bp, Homo sapiens
ggagagaaaacctctgcgaggaaagggaaggagcaagccgtggatctggtgactgagccggagttcatctaacatagctcttttgtattttggaacatt

SEQ ID NO: 822998 - DNA, 100 bp, Homo sapiens
gaaggacccccaggcactcagcgagagaacctccatttctaccagaatcctttgaccgaattcttctggatgcaccctgtagtggaatgggacagagacc

SEQ ID NO: 822999 - DNA, 134 bp, Homo sapiens
tagtgatctacgacgctccccaagtaagcctacacttgcctatccagaaagcaacagcagaggcctgcactgcccaaagtcttggaaacttgctggatatgatgtaccgggagccagcacgatggtcctacaca

SEQ ID NO: 823000 - DNA, 100 bp, Homo sapiens
tgtggtgcgaccactggagagggagtttctcgccctcgtcgcgcctgccgcgcggagagataagatgtcatctgggtgattctcagtgtggaggtgggtg

SEQ ID NO: 823001 - DNA, 99 bp, Homo sapiens
gctgatattgactccatttgaacgaaatttggacttttggcgccagctctggagagtcattgagagaaggaagtgctctctggcgtggtggtcatatcg

SEQ ID NO: 823002 - DNA, 100 bp, Homo sapiens
aagcgcttcctggatgagaagagcggcagtttcgtgagcgacctcagcaggttatcaatactctggctgaccatcatcatcgtgggactgactttggtgg

SEQ ID NO: 823003 - DNA, 100 bp, Homo sapiens
gacttaattgtaggagcttttggtgtagatcgagctatcttatacagcgagttcctggggaaaaccccagggcaaaacgctcagaaatggattcctgcac

SEQ ID NO: 823004 - DNA, 99 bp, Homo sapiens
gctggacgaccggctctactgcgtctaccagagcatggtgctcttcttcttcgagaattacaccggggtccaggctgcactccattttgcaatggcctc

SEQ ID NO: 823005 - DNA, 99 bp, Homo sapiens
tcagataaaaccagtgaagatatatgtctacaagttatgagccaagaaatccaggaacagctgcataagcagcaggaggtaattgcagacaaacagatg

SEQ ID NO: 823006 - DNA, 99 bp, Homo sapiens
ataataccaagaaagccccacttggagccatgaccctctgcattacaaacccattatgggtaacaaaaactcgccttatgttacagtatgatgctgttg

SEQ ID NO: 823007 - DNA, 109 bp, Homo sapiens
ctgactcttctatgctgtgttcagtcggagccagtaaagcagttaattggactcctgagattaacaaagaacacttgctacagggtctgcttcctgatgtgcaagtacc

SEQ ID NO: 823008 - DNA, 98 bp, Homo sapiens
agtagaaaactggtcaaggaagctgccttcctgggctatgtgctgtatggagagtgccaggaggtcttgtggtggggaggagtgttccttattctctg

SEQ ID NO: 823009 - DNA, 100 bp, Homo sapiens
cggggctgcggagggccagtggactcagtgataatagagtgacatccttcagagacctcattcatgaccaagatgaagatgaggaggaagaggaaggcca

SEQ ID NO: 823010 - DNA, 100 bp, Homo sapiens
cacctgattgaaattggaaatggtcttgtcacctttcaacttcgaggactggaattccgaggtttgcaatggtctggagcagccaaggaagcagcagcgc

SEQ ID NO: 823011 - DNA, 98 bp, Homo sapiens
ggattgagagcaactatggcgtacacacactggagatcaacaggcagtatttggcagtcgtattcagagataaacccctggagctatgggatgttagg

SEQ ID NO: 823012 - DNA, 98 bp, Homo sapiens
cgggcaataagactctttaaagaaggcaaggagagaatgtatgaagaacagtcacaggacagcatgttccaccttccctcttcacggaacctaatgaa

SEQ ID NO: 823013 - DNA, 138 bp, Homo sapiens
atcatactgggatcttttttcacatccagcccatgcggactgagcagccaaagcttgacagagatgccttcaattaagttgcagagttctgatggagagatatttgaagttgatgtggaaattgccaaacaatctgtg

SEQ ID NO: 823014 - DNA, 100 bp, Homo sapiens
aggacacttgtggagagctcgaattccagaatgatgaaattgtgataagttctgaacgtcgaaaagaaaagtctcgagatgcagccagatctcggcgaag

SEQ ID NO: 823015 - DNA, 98 bp, Homo sapiens
ttgattaactcattcaaggttacccagttggtaaagcttcagcgactgaaggagtgtggactttttgaatttcaagaacagtaaagttggaacacagc

SEQ ID NO: 823016 - DNA, 98 bp, Homo sapiens
ctggggaacccgttcagcacaccagtggggcagtgcctcggctggacgtaaagaaagaagtgatgcactcaattctgcaatagataaaatgaccaaga

SEQ ID NO: 823017 - DNA, 50 bp, Homo sapiens
tcagaacagagccaatggcttggaatgagttaagtgggcagaccaacatc

SEQ ID NO: 823018 - DNA, 132 bp, Homo sapiens
cttaatagtgagtcttccaaccagagcttgtgtagcgtcagatccttgagtgataaaggagtagagatatggccgcgtggaaagtgtcaaaattcttcccaagaggggatctgaaggaggagtggctgcctt

SEQ ID NO: 823019 - DNA, 100 bp, Homo sapiens
gtcactgcagtagaattccttgtagataagcaactggattttttaactgaagatagtgcctttcagccctaccagccaaagaagcctaaagccccagaca

SEQ ID NO: 823020 - DNA, 109 bp, Homo sapiens
cgctgcagctctgggacactgccaaagctgcagggccactgcaagtctataaagaacacgctcaggagatactctcagcccctgcatgaagaaatagcattgcataaac

SEQ ID NO: 823021 - DNA, 100 bp, Homo sapiens
atgaaaaaaccaaaattatcgccaagattcagcaaaactacaggatctcatgcacatctcacgggcccggaagccagcgttcatcctgggctccatgagg

SEQ ID NO: 823022 - DNA, 100 bp, Homo sapiens
aaacctcagcttgatgatgtatctcagaagatgcagatgcctccagctattacgagtcccatggcaacaaggatcagaggcagagctgctttccatgccg

SEQ ID NO: 823023 - DNA, 98 bp, Homo sapiens
ggcggcggcgctcggcgatggtaggcgtccctggagcggccgccttccagcggagttacccagggagattatacacctatggaagacagtgaagaaac

SEQ ID NO: 823024 - DNA, 98 bp, Homo sapiens
tgtgattctttactcagctgagtgtgccacacaggtagccctggacggcattcagtgttttggagaactcctggaagccccgtcttcctcctcatgcc

SEQ ID NO: 823025 - DNA, 98 bp, Homo sapiens
gagtttatctggagtgtagagtcactggaaaccccactcctcgagtcaggagagcacagaatggggattcaacacctcggcaatgcccttttagtgtg

SEQ ID NO: 823026 - DNA, 100 bp, Homo sapiens
ctgcgatgcctgtataacccagggactggcgcactcacagctttccagagtaaacatcagtctccaaagataactacatcccttcttcccatcaacaatg

SEQ ID NO: 823027 - DNA, 100 bp, Homo sapiens
cccagaggcacttgaacaagaaagggactgacctggacttagtggagcaactcaacatttatgagggctgtttaacgacccccaactccccatccatgca

SEQ ID NO: 823028 - DNA, 100 bp, Homo sapiens
ctgcagtctctgtcttggctggacccaggtgggcagatcctcagatcaggttggtcaaagaaaaagtgatgtatgaaaaagaggcaaaacaacaagaaga

SEQ ID NO: 823029 - DNA, 100 bp, Homo sapiens
ttcaagcaagcaagatacgagagcttttagcagagaagagtttgccttctgccaggtggatgcctccatcgctctggccctggccctggccgtcctgtgt

SEQ ID NO: 823030 - DNA, 100 bp, Homo sapiens
gacagaatcttgctctgttgcccaggtatgtccgcatgctgggggcactttacatgaggctgacaggcactgcaattgattgctacaagtacttggaacc

SEQ ID NO: 823031 - DNA, 100 bp, Homo sapiens
gaagaggacacacagagtattggtcctaaagtccagagacagagcactaattagaactgtagcgtgaacgtgaactgtgtgaacatcagatgcccgctgc

SEQ ID NO: 823032 - DNA, 100 bp, Homo sapiens
ggggacctgcatacttacttactttattcccgattggagacaggaccaaagctacggataaatggtgaaaaattagaagaactcttatctgagagagctg

SEQ ID NO: 823033 - DNA, 121 bp, Homo sapiens
gcgacgacggcaccctgcacatgcacttctcccgcaaccccaaggtgctgaacccccgcggcctccggcaccctggaggagaagaggttctgctggaacaagctggtgtagatgcaagtga

SEQ ID NO: 823034 - DNA, 100 bp, Homo sapiens
aaacagtgatcgctaagaactttgccgataccttaggatacaacatagaacctattatgctctatcagataccatgtttgtgtggaagtgccccgtgttt

SEQ ID NO: 823035 - DNA, 129 bp, Homo sapiens
gcaacgccgaacccagtcgcgcagcgctgcagtgaattttccccccaaactgcaataagccgccttccaagataccggggagaccacgacgctgcctcctgggcgccatgagttcctgttcagcttcca

SEQ ID NO: 823036 - DNA, 98 bp, Homo sapiens
gatatccccgtgcactttgactttctgttttctgactctcatgcagaagtaatttctgggaaacaagaagacaacagtgcaggaggaaagcacagtag

SEQ ID NO: 823037 - DNA, 115 bp, Homo sapiens
aaaactctagaagtctggatgtcggtgggcctctgagatatgccgtttacgggaatactcccccagttgcaagaggcgcaggaccgtggaagacttcaacaaattctgcaccttt

SEQ ID NO: 823038 - DNA, 100 bp, Homo sapiens
ggagtgcttccatcggcgcactggacagaagtgtgccctgaagctctacgtggccacggaggccatcctcattgcactggttggggccacgccatcctac

SEQ ID NO: 823039 - DNA, 100 bp, Homo sapiens
aagaaaatcatttgtgatgggtcagctagtatgcaggctaggcaaactgtttactcctggcttgggggcattaggaagcactggaggctcttcgggaact

SEQ ID NO: 823040 - DNA, 100 bp, Homo sapiens
ggacgtgatgacctgatggattatcaccggcggcagagggaggaaagactcagggagcaggaaatggagcgattggaaatggctagtgatgagctgaaag

SEQ ID NO: 823041 - DNA, 50 bp, Homo sapiens
tcgaaatgtagaagtaatagagttgcaaatgcagccctgaggatttggct

SEQ ID NO: 823042 - DNA, 100 bp, Homo sapiens
cctcagcctcccaagtagcagggactacagaatttcagaaactgtggaggagtgtcactgtagattccatggacgaggagaaaattgaagaatatctgaa

SEQ ID NO: 823043 - DNA, 100 bp, Homo sapiens
cgtggacaagatcatgggcaaaggacagatccaggaaagaccacagcaagattctttcattcgtctcctcctagcctgggggaccaggctcgaactgacc

SEQ ID NO: 823044 - DNA, 50 bp, Homo sapiens
cttcgacccggaagtttacctagacaaggaggctctgtcggtggtgagcg

SEQ ID NO: 823045 - DNA, 138 bp, Homo sapiens
ccgcgccctcgaggtggaggagtgccgctgcccgccaggctacatcggtctgtcctgccagggcatctggcggatccccgtggacgagattgaccggccgggcagctttgcctggcacatgaaccgctccatcgtgct

SEQ ID NO: 823046 - DNA, 103 bp, Homo sapiens
gaaacctagccccggacgagaagcgcagcaacgtgcggtgggaccacgagagcctttaccaacagggacgcttatgtcaactgggcagtgaattttgtgaatt

SEQ ID NO: 823047 - DNA, 98 bp, Homo sapiens
atcttgcatcagtgggaacaagactacctcctcctttaccccagaacctcctttacacagtatcagaacactattcagactatgaagacagttccctc

SEQ ID NO: 823048 - DNA, 98 bp, Homo sapiens
ggcagcggaggaggatgctctgggctaggcgagatgccgctatcaccatggggatggttcttctaaatgaagcagcaacttcgaaaggcgatgttgga

SEQ ID NO: 823049 - DNA, 100 bp, Homo sapiens
cagggaccgagggcgagacacgcctgggcccaggtgtggcgtctctgtccccatctggttttaggaagctcttcgtgggcggtcttgactggagcacgac

SEQ ID NO: 823050 - DNA, 98 bp, Homo sapiens
gggacccggttccccggcccacagtgggggtgtgcaaacccgagagaactgggaatgttttaaaggaagttgggctactcacaagttactacataaga

SEQ ID NO: 823051 - DNA, 98 bp, Homo sapiens
gctcaggtgctgcaggcacagcccgagaaaccgcagcactacacgtccgtgacgagaagttattaccgaggcgcggccggggctctcctcgtctatga

SEQ ID NO: 823052 - DNA, 100 bp, Homo sapiens
acagactagccactttgcattgactggaaacaatggcatttacagaaagagtcaacagcagtggcaacaggtgtgctgggcatcaaggtgaagatcatgc

SEQ ID NO: 823053 - DNA, 99 bp, Homo sapiens
cgcgtcccgctcgctgggagagaggtacctctccttttccctctccctttccctaaggacagagcgggatgccaccagcttgtccaaagggaagttcca

SEQ ID NO: 823054 - DNA, 98 bp, Homo sapiens
tggaatgaatccttctagagacgtccacggttgacatcatggacatatgtgagtccatcctggagaggaagcggcatgacagcgaaaggtctacttgc

SEQ ID NO: 823055 - DNA, 98 bp, Homo sapiens
tggattttctttcccttattccagttgatccccagaatataaaaaggcttctgcagaaccccaaagtgacagagtttgatgctgcccgcctggtgatg

SEQ ID NO: 823056 - DNA, 100 bp, Homo sapiens
aatgaagcaactataattaacagttcaacatcaataaaggtgcacacatataatcttagataatgctgatgttctgagtcagtaccaactgaattctatc

SEQ ID NO: 823057 - DNA, 100 bp, Homo sapiens
ctcggagactagaggctggataccaaatagcagtggaaaccgagcctgtgtggtgcccctatctccttgttccaagggcctctcttgccttgaaagcctt

SEQ ID NO: 823058 - DNA, 98 bp, Homo sapiens
ttggccaagaagagagatcctgtttctcacatttgtttcattgaagaaatagttaaggtcaaagctcagattcacagttgcataagccgtcacctgga

SEQ ID NO: 823059 - DNA, 99 bp, Homo sapiens
gacttctggccagatgtggaaccatatccgtggacctccatatgctcataagaacccacacaatggacaagtgtcgactcctttacatctagcagcggg

SEQ ID NO: 823060 - DNA, 100 bp, Homo sapiens
tccctgggcgcgtcagaacaggcgctgcggctgatcatctccatcttcctggattccaacaatgtctcacccatcttggctgccacccaaaagcactggt

SEQ ID NO: 823061 - DNA, 100 bp, Homo sapiens
agaaaaattaaaagaagtcaatctatttttacagaaccttctgaggaaaggaggccatacagaaattgaacctcagcacttctgtcaagctttccacaga

SEQ ID NO: 823062 - DNA, 100 bp, Homo sapiens
gatttagcaccattctgctctgctacttgtaaggaaagtaatggaccagtgaaggtgtggggaagcattaaaggactgactgaaggcctgcatggattcc

SEQ ID NO: 823063 - DNA, 50 bp, Homo sapiens
gaacttcccttcctcgtagacacagatgatgacttacgagtggtatttac

SEQ ID NO: 823064 - DNA, 98 bp, Homo sapiens
tttaattccaccacctttcataaagccaccagcagtttgtggagatgagtgcactggccttcttctcggtgacttggctcgcctggagcagatggtca

SEQ ID NO: 823065 - DNA, 98 bp, Homo sapiens
tttggacctgaaacagaaattctggaacacctatatggaattgaaagatgttggccatcgtgatcagatggctgcagctagaggaatcctgcagaaga

SEQ ID NO: 823066 - DNA, 100 bp, Homo sapiens
tgctaagaacaacagtcaggccaagccttctgcctgtgatgccgccaggtcagcagaggcggaggcccgggctgtggatggccgaggagccgaactcgtg

SEQ ID NO: 823067 - DNA, 100 bp, Homo sapiens
ctcggcttcaccttcagatgcgcggggcgtgcgcgtcctcctccccaggcccgccgcctccctgccaagggctccacgtgttccccacgtttgtggcgta

SEQ ID NO: 823068 - DNA, 98 bp, Homo sapiens
tggatccagggataaatcccaaacttcttaacccctagaccggtttttagtccattgactatgcagcctaatggttaattaccatgctcagcattacc

SEQ ID NO: 823069 - DNA, 100 bp, Homo sapiens
gcgactgtcattcacaaccccctgaaagcggcatccgcttcgatcctgaaattccgcaaacactacgactagagtttgctaaggcaaacacgaagatggc

SEQ ID NO: 823070 - DNA, 99 bp, Homo sapiens
ttgacccagtctatttatgacaagaagcttgtgttaatgcagaaaaatctccagggcctggctgagcaactgggggcatttgcagctggagtcaagcag

SEQ ID NO: 823071 - DNA, 147 bp, Homo sapiens
tacctttgaacttatcaacgtcatcaaggaagaggccttaacaagggatggtcccaccattgttcatgatgatacctcctatggaagattgtaaggaacaagagcctattatggacaacaatatttctctggtgccttttgagagac

SEQ ID NO: 823072 - DNA, 100 bp, Homo sapiens
acctggaacccactttactcagagtgacagagctccacagaaaagagtccgatcaagagggcaccaagggaaaggacccgacgtccggagccaaggatgg

SEQ ID NO: 823073 - DNA, 99 bp, Homo sapiens
tttggggctccctcgggcacctccggtaccgctgcagccaccgcggcccccgcggaagtggtccaaaggcaaagttcgggacaagctcaataacttagt

SEQ ID NO: 823074 - DNA, 100 bp, Homo sapiens
cttcaaatgggcaccagtctaaatcgtgaaagacccctgacaaaagacaatcatcttctgggtacatttgatctgactggaattcctcctgctcctcgtg

SEQ ID NO: 823075 - DNA, 100 bp, Homo sapiens
ggagattcagacatagacaagaatgattacccagaataaaagccgccctcattctaggggagaatataatgtttacagcacctttcaaagtcatgaaccg

SEQ ID NO: 823076 - DNA, 98 bp, Homo sapiens
aaatgactacattggagacatccatcaggagatggacagggaggagctggagctggagggttgccacaccatttggaggttttgaaaaagcatcaaga

SEQ ID NO: 823077 - DNA, 98 bp, Homo sapiens
tggaggggaggattttgaggacacttgtggagagctcgaattccagaatgatgaaattgtcatgcttgagagttcaaaccggcttgatgaagaacaca

SEQ ID NO: 823078 - DNA, 100 bp, Homo sapiens
aggagcgagcgctgcgaggtggcggcctgaggccatctccccggttgttgtgcacagccacgaaacaaaagaacagtggccagaacctggaagaggacat

SEQ ID NO: 823079 - DNA, 98 bp, Homo sapiens
aaaacctagaacatctcagacagcagctcttggagcagcaacagcctcaaaagtatgaaaatcaagctctcatgtttggaaaatggggtacttctgga

SEQ ID NO: 823080 - DNA, 60 bp, Homo sapiens
ggttgaaaataatctagatattgatggctttgatatggaatgtgcagatgtcccactatt

SEQ ID NO: 823081 - DNA, 110 bp, Homo sapiens
caaagtggcctccaagaatgtcatccctgccctggaactggtggagcccattaagattatgtttgagaccttcaacaccccggccatgtacgtggccatccaggccgtgc

SEQ ID NO: 823082 - DNA, 104 bp, Homo sapiens
gtgatgacacaaaatcccagatctacctgacgggcctgcgagggttgaagattgtgaagcaatagcctaagactgacgacaacagtggagacttggacccagga

SEQ ID NO: 823083 - DNA, 100 bp, Homo sapiens
tgagtgctaaatacagaggagccttttgtgaagccaagatcaagacagcaaaaagacttgtcaaagtcaaggattatattccatcacaacaagatattct

SEQ ID NO: 823084 - DNA, 98 bp, Homo sapiens
agtgccggggtttaagggccaggaaaggaagcattcagggaatttaggtgtagccagaagaaaatcagggacacggccaacacggtgaaggaaaagtt

SEQ ID NO: 823085 - DNA, 136 bp, Homo sapiens
cgggccgcgggctgcggacgctcggtcccgcgctgcgcatccccgcggacgccacagcgctgtgggtggaaagttgtaaacctacacccattgaaaaagcagccgccctccttcccaggagctgctgaagagagag

SEQ ID NO: 823086 - DNA, 100 bp, Homo sapiens
cgagagccgcgggagagtgtgcagccgagtcactactgcctgcctgcctgcctgctacgagcatgtaacttctaatgccagcgatagtgaaagtagttac

SEQ ID NO: 823087 - DNA, 98 bp, Homo sapiens
agcatgctaagaacaacagtcaggccaagccttctgcctgtgatgcccagctccatgaccttctccagctgaggcaggagaatgcctacctgaccacc

SEQ ID NO: 823088 - DNA, 98 bp, Homo sapiens
tcggcaccgtccgcgactgctatgagggttgaaaacatcctcttgcatgaccgaggccactatgtcctgtgtgactttggaagcgccaccaacaaatt

SEQ ID NO: 823089 - DNA, 99 bp, Homo sapiens
ttgcagcagagccagcagctagcgcagacatgtcatgctgcccaaggacatagccaagctggtccctaaaacccatctgatgtctgaatctgaatggag

SEQ ID NO: 823090 - DNA, 100 bp, Homo sapiens
ctacctggcattgccttttgttgagtgccacacccccctgtcccagtgcactggggctgtggatcccttcaaagctgagattgcctgtctgtggtctcca

SEQ ID NO: 823091 - DNA, 99 bp, Homo sapiens
cgagcccaaggcaattgatcccaagttgtcgacgaccgacagggtggtgaaaggtccctggtgctgaaccgcctgcgtccagttgccagcgggggtggg

SEQ ID NO: 823092 - DNA, 103 bp, Homo sapiens
tatattccatctactgtctttttcttcaatgggcagcatatgaaagtggattatgggtgactttttggacggagatgcccattatgaaagaaatggaaataat

SEQ ID NO: 823093 - DNA, 99 bp, Homo sapiens
ggcgagcccttgggccgcgtctcctttgagcctgaagcaggacattctaaatgaaaagactgaattggaagcaacacttaaggaagcggagttggtaac

SEQ ID NO: 823094 - DNA, 98 bp, Homo sapiens
gactcaagtggtgcagtgaccaatcagaaataatatccaatcagtacaacaatgagccttcaaacatatttgagttgcagaatgaagaagagtctgga

SEQ ID NO: 823095 - DNA, 100 bp, Homo sapiens
ggaaatccaaaggcagacagtacgggctcccttcgccaaactcttcattttctcttacaaaactttttaccaacaaaaaaaagcaagtagttatactcag

SEQ ID NO: 823096 - DNA, 100 bp, Homo sapiens
aaaaaggagacccctcttccgctcctgttttatactgcttccatatttacagtacgaatttggtcaggctctcttcactggctgggctgctgcttctctc

SEQ ID NO: 823097 - DNA, 98 bp, Homo sapiens
cgggatcggttgccttgagcctggaaggaagcagccaccctcgccatggcctccccgcccgcctgcccctcggaggaggacgagagcctgaagggctg

SEQ ID NO: 823098 - DNA, 98 bp, Homo sapiens
aagatgagctgtcctttcaggaaggagccattatttatgtcatcaagaagaatgacgatgacattgttcgaagtgatgttgccttagataaacagaaa

SEQ ID NO: 823099 - DNA, 98 bp, Homo sapiens
cacttttgccaaagtctacaatccaggaacaagagagacataagcaactgaagtccgctggtctgccatgtgaatctggaggggcagccgttctactc

SEQ ID NO: 823100 - DNA, 100 bp, Homo sapiens
tttctgaagagactataaagcttctgaaagatcccaccaaatattttggttgtgagctgggagcacagacccagtttgatgttaagaatgaccgttacat

SEQ ID NO: 823101 - DNA, 98 bp, Homo sapiens
ggcgccaacggccgctgccgcagccgcgagggcggctacacctgcgagtgcttcgaggacttcactgactgaggctgatgtgaatccaaaggcctatc

SEQ ID NO: 823102 - DNA, 100 bp, Homo sapiens
gaaaacaagttcagggctcccactgattctacattatgcatctgacagatacgtctcatggtgtaagaaataagtgcctgcagttacttggcaatcttgg

SEQ ID NO: 823103 - DNA, 99 bp, Homo sapiens
cgggggcggcgcggggagccggcggttatctgggcggcggagcgctcacaatgtggcaggagacagaaaaggaggtatatcgaattccaaagaaaagtc

SEQ ID NO: 823104 - DNA, 100 bp, Homo sapiens
cgagttagcaattgtcaccgcagactttgttaagggattgtcaatgaggcagatcagattccgatttgacgggcaaccaatcaatgaaacagacacacct

SEQ ID NO: 823105 - DNA, 100 bp, Homo sapiens
agctcaagctcatcgacttcggttcgggtgcgctgctcaaggacacggtctacaccgacttcgacgtcgtgagatggagaataaagaaactctcaaaggg

SEQ ID NO: 823106 - DNA, 100 bp, Homo sapiens
aatcacagcaacagactctcctgcagaccttcccaggaagccagagccacacacaccatcatggtcctggatgaatctggttatagatggacaagagacg

SEQ ID NO: 823107 - DNA, 98 bp, Homo sapiens
acatgtcagtgtcctttcacacccatgtgaaagaggaggcaggtggaagtcatcataaagtttctgtttcacccgtcgtccatgttcgaggactctgt

SEQ ID NO: 823108 - DNA, 100 bp, Homo sapiens
cgtcatttccatgggacgagattctgaactcattcgccatcatgaccgggtcctataacaacttcttcaggatgtttgatagagacacgcggagggatgt

SEQ ID NO: 823109 - DNA, 100 bp, Homo sapiens
gttcaaaacagtagccgtgttaacgaacagcctgaaaaatccccctccgtgctaactgttccagattttgctaaacatgttgactttctagaagccataa

SEQ ID NO: 823110 - DNA, 100 bp, Homo sapiens
ctcgcttttcgaactccgcgacccgagcgcaagggttacacatcattttggaatgactgtatatcatctggattacgtggctgtatgttaattgaattag

SEQ ID NO: 823111 - DNA, 99 bp, Homo sapiens
ttttgtggtccacaagaggtgccatgaatttgttactttttcttgtccgggtgcggataagggacccgacactgatgcatgacagcaagcgctgtggcg

SEQ ID NO: 823112 - DNA, 99 bp, Homo sapiens
ccaaagaagatttatgttcaggaccatttagtctcatgattccacctttccactgatagactcaagttcccagaaccagattagaaaacgcatcgtact

SEQ ID NO: 823113 - DNA, 100 bp, Homo sapiens
tttgagcaagagctgggagcatttttcccctgggcctgatcaattatgtttgagaccttcaacaccccggccatgtacgtggccatccaggccgtgctgt

SEQ ID NO: 823114 - DNA, 113 bp, Homo sapiens
cagacttgtagaaactgtaggggatccaggagaagatgcacagctggaggaaagcaggaatgttcagaggcaaatgaagattctgcagaataagcaagctcagattgtcaaag

SEQ ID NO: 823115 - DNA, 100 bp, Homo sapiens
aggaagtccactagcagcttctaagggtacaggtgaacaaaggcagagtaaactgtcaccccagatgcaggtacatcaagacaaaaccctgccaccagct

SEQ ID NO: 823116 - DNA, 100 bp, Homo sapiens
cagagggacacgctggtgcatctgtttgccggaggattccagggtctgagagagagccaagatgaatatggccttccaagaagacatgctgacaagaaaa

SEQ ID NO: 823117 - DNA, 99 bp, Homo sapiens
tctacctgaaaatattggcaagacccctcgtccagtcattgtggaacccatggagcagtttgatgatgaagatggcttgccagagaagctgatgcagaa

SEQ ID NO: 823118 - DNA, 98 bp, Homo sapiens
ctgcgcatctacttcctggaggagcgcatgcaacagaagtatgaggccagccgggaggacatctacaagcggattgcagtgcttttgtccacaaaggc

SEQ ID NO: 823119 - DNA, 98 bp, Homo sapiens
tactgcagacgttatcggatgaatcggatgaggtgcttgtgaggttagaaggtggaattgggttgtccttaattaataaagtcccagaagaactggtc

SEQ ID NO: 823120 - DNA, 100 bp, Homo sapiens
tggatgctaagccagaccggtcctcgtttgtaccgtccctcttcaggagtcggatggtcagggctgccctttctgtcgttgtgaaataaaaggaactgag

SEQ ID NO: 823121 - DNA, 98 bp, Homo sapiens
tcaaagtcatgaacttcacaattaaacgcttcgttaagggactcaggcagtacgggaagaacttcttcagaattagaaaggagctgcttcccaataag

SEQ ID NO: 823122 - DNA, 99 bp, Homo sapiens
ttcaactatggcagcagcgtggcctccgccaccgtgcacatccgaatggtgtatgcagagaatatttccaaaatggtgggaagagaaaagcacttgaga

SEQ ID NO: 823123 - DNA, 100 bp, Homo sapiens
ctagctggcacaaggaaagatgttgaagtcacaaagggaacagtacgtatttggcattcaagcacctaccggcttgagagcacactgaattatggaatgg

SEQ ID NO: 823124 - DNA, 99 bp, Homo sapiens
gaaaacaagaggctcagagctgtttaggaatctgctcgagattcgcaaaggtatgatctcgtgaaatcttgagagaaactgaatgacgaatgaaactat

SEQ ID NO: 823125 - DNA, 101 bp, Homo sapiens
cataaacacatcaccttgatttttaatcccacggcctacagattcctggaggagatgcggcggcggcttcccttggccaacatgtcctactacgtgagccc

SEQ ID NO: 823126 - DNA, 99 bp, Homo sapiens
ccctttctcctcggcactgtattctttacctgcttcccaatcccactgatgaggatcagcccatgcaatgatgggacagaatttggaggatcaatttat

SEQ ID NO: 823127 - DNA, 100 bp, Homo sapiens
cttcacccgggctccgctcttgccttctccacacttgtttggtgaactcaaggttagtcataagcattttgaagaagctttcaagaaagtaagatcatct

SEQ ID NO: 823128 - DNA, 100 bp, Homo sapiens
aagcagtgcaacccaagacctaagaatcttgatgttggagagctggaggtgtttcagaaagatggggaacgaaaaattcagagtcgacagcaacttccag

SEQ ID NO: 823129 - DNA, 100 bp, Homo sapiens
gagaccgtgaccgagagcgtgaccgagagcgcgaatatcgtcatcgttagaagggctgtacaaaaggtagacataatagtgagaagccacctgagccagt

SEQ ID NO: 823130 - DNA, 98 bp, Homo sapiens
acctgctcagcgccgagggcctggcgcctctgcacctctgccgcacggccgcctcgctcggtgctcatcatcactgtaggggacctttgaaagagctg

SEQ ID NO: 823131 - DNA, 99 bp, Homo sapiens
gcacggcacagcacgctcgacttcatgctcggcgccaaagttgaagctgtcaagcccagcgaggacagtcctgaaaatgctacttctcgaggaaacaca

SEQ ID NO: 823132 - DNA, 100 bp, Homo sapiens
ccctctgcagctgaataacccttttaacgagtattccaaatttgatggcaagaaggagctcaaaaagtgggatgagtttgaagatattttagaagagagg

SEQ ID NO: 823133 - DNA, 100 bp, Homo sapiens
tctcttctttacttaacactagaaatattggacatttctcttgggaagttgtgcatctgacaggaatatagtactgtacgatatgaggcaagctactcct

SEQ ID NO: 823134 - DNA, 100 bp, Homo sapiens
gatttggcaccttccctgcatgacttagacaacatctttgataattctgatgacgacgaacttgggcccactgatgatattgtcctaatggcacaaacgc

SEQ ID NO: 823135 - DNA, 60 bp, Homo sapiens
cctgtcgggtagaaacctcagtgaaggctctcaaaattagagagatgtgtaattgtccac

SEQ ID NO: 823136 - DNA, 100 bp, Homo sapiens
ttccactggatatggcgctgctgttaaaactggcaagctgttaggcaattttcttcagtggtatggcattttctcaaataaaactctgcaagagttatca

SEQ ID NO: 823137 - DNA, 100 bp, Homo sapiens
gcggaaccatggccgatgggggcgagggcgaagacgagatccagttcctgcgaacttatgaagtgtaacagaacagactttaccacctgaaactgctgct

SEQ ID NO: 823138 - DNA, 100 bp, Homo sapiens
ccaactcgttgtttgcgtgcaatgttcaccagtcagtgtttgaaggagaagagagcaagagcagttcagagccccagttgcagacgacttgtcctgccac

SEQ ID NO: 823139 - DNA, 100 bp, Homo sapiens
gccaagctggagtttacacaggcaaactgtcagaaaagagtagcctgggctgtctggaaatctgaggctgctctttggcgtaaattgcaatcgattaggg

SEQ ID NO: 823140 - DNA, 99 bp, Homo sapiens
acatgacaatcacgtgcagctcaagtggagtgtgttgaccagcaagacgggacccattcaggatcacacagttttcatacagtctcggggttttaaaac

SEQ ID NO: 823141 - DNA, 128 bp, Homo sapiens
gaagagcagcaactatgagaatggagaaataggggaaagtcaagtgaaaggtggtgaagagccaattgaggtctgcttagtggcctatcttggcttgtttatgctttgtgtctcatatcaggttgacg

SEQ ID NO: 823142 - DNA, 98 bp, Homo sapiens
caggaacaagagagaaagagtggatttcagcctgcacggatggtcttgaaacacaaatggtttttgcattcccacggaggtctgtaccatcatttctg

SEQ ID NO: 823143 - DNA, 100 bp, Homo sapiens
cggagctgacggtggaggttcgcggctctaacggggctttctacaaggaatcccgttctgcttccagaagtggaagtgctcacggatcggggaaatctgc

SEQ ID NO: 823144 - DNA, 100 bp, Homo sapiens
gtgggtctgtgaagaggtcggcggcccctgcgggcgccagtcagatgagctgcttcagaaagagcaaaactattcagatgacgtcttggccaacatgatt

SEQ ID NO: 823145 - DNA, 100 bp, Homo sapiens
agttggtcgaagacagaggttcaggtggattctccacagttttcctcgtgcgtactcacggtggaatccgatgtgcattgaagcgaatgtatgtcaataa

SEQ ID NO: 823146 - DNA, 100 bp, Homo sapiens
aggatacccacagtacggctggcagggtggacctcaggagcctcctaaaaccacagttaatatgatcctctgttgaagcaagaagacaaactgtatggtg

SEQ ID NO: 823147 - DNA, 99 bp, Homo sapiens
ctacagggcgtcaagggtggggtggaccatgcagcagcttttggaagaattgccttctcttgcccccagaaagagtcccccccgaagggcgtgaccatc

SEQ ID NO: 823148 - DNA, 100 bp, Homo sapiens
gagatggggaggaatccagctctgcctgacatccaggcatcctctccaaattgcatagttgtggaagctgatcgaggaagcctaagcaggctctgtgaag

SEQ ID NO: 823149 - DNA, 99 bp, Homo sapiens
aaagaacctctggtgttgaaagatgcctgtgaggagccaccaacatttgaagctatggagctcattggtaaaccaaaaccctactatgagattggtgaa

SEQ ID NO: 823150 - DNA, 98 bp, Homo sapiens
ctgcagtgggagaggagaagagatgctggcgtgaagggagctccacctcagatcaggcgtcccaatcgagaagtaagacctctgaggaaagaaatggc

SEQ ID NO: 823151 - DNA, 98 bp, Homo sapiens
gtcaaagctgtttggagaaaatcagaagtacagttttatctagccacatcttggaggactcattaccagagaagctggctgtgcatgagaagaatgtc

SEQ ID NO: 823152 - DNA, 100 bp, Homo sapiens
atggtgcctggttcttgtgtctcttggtggccaatgttcctgatagttttaatgaagtgtatgctgatggtagcatatgtttagatatccttcagaatcg

SEQ ID NO: 823153 - DNA, 99 bp, Homo sapiens
ctgtccttacttactgtcctcaaatacgtatattactcttccatggatgccccttgataacagagctgataataaaccatgcttaagttttagtgaacc

SEQ ID NO: 823154 - DNA, 100 bp, Homo sapiens
ttacagcagatgatatcaacaagactctccagaaagagcaacagtaatggagtacatgagcactggaagtgacaataaagaagagattgatttattaatt

SEQ ID NO: 823155 - DNA, 100 bp, Homo sapiens
catgaattccagagttttcaagaaaattcaaggtatccgttacagcactgatgtgagtgtagatgaagtaaaagctttggcttctctgatgacatacaag

SEQ ID NO: 823156 - DNA, 100 bp, Homo sapiens
aacaaggcacctaacctcgccagagctttggtattcacttacaagcagagcacaattacccaccagaaggtgactgctatgcaccccacgaacgaggagg

SEQ ID NO: 823157 - DNA, 99 bp, Homo sapiens
aaggatgatgatattagtgatactttctctgaaccaggatgtttggaccaggaagagagtacaacttcactcggcccaatgagaagggagagtatgaga

SEQ ID NO: 823158 - DNA, 100 bp, Homo sapiens
tgcgccatcatcctcatcatcatcataggaaagaccacagcaagattctttcattcgtctcctcctagcctgggggaccaggctcgaactgaccctggac

SEQ ID NO: 823159 - DNA, 100 bp, Homo sapiens
agaaggccgtctcagaagggtacaaggatttcagggcaattgctatcgccagccaaggccacctttgatgccatttctaagacctacagctacctgaccc

SEQ ID NO: 823160 - DNA, 100 bp, Homo sapiens
ttgcagaagccgtggagacgggtgaggaggatgtgattatggaagctctgcggtcatacaaccaggaggctgaggaattcctctacagattcttgccaca

SEQ ID NO: 823161 - DNA, 99 bp, Homo sapiens
ggagccacgttcacagatgctgagagtgaagggggtagagacggggtttcgccgtgttagccaggatggtctcgatctcctgacctcgtgatccgcccg

SEQ ID NO: 823162 - DNA, 100 bp, Homo sapiens
ttcttgccaggctgtgtgagcaggagcccgctgctcttccccactcagggctaccagggcatggtggacggaggctcaaacatcgcagaggccgactggg

SEQ ID NO: 823163 - DNA, 100 bp, Homo sapiens
tggccaacggtagacgcctcttattatggtgggagaggcgttggaggcattaaaagaatggagggaagatgtctgacatactgctgcaggcgtcagtcca

SEQ ID NO: 823164 - DNA, 98 bp, Homo sapiens
acagaccttgggggcactgcctcgctttgggacaactcggggccgcatcaacggaggctgaacagtacccagggggagattcgtgtcggtcctagtca

SEQ ID NO: 823165 - DNA, 100 bp, Homo sapiens
cagggatggacaaccgtaggggatttggaaggatgtgtacattataaagttgccctctccagggtcaccctagaatcagatctgctccccagcatcttct

SEQ ID NO: 823166 - DNA, 100 bp, Homo sapiens
gcctgggcagcctgctggaccctgccaagaagtcgcccatcgcagcagctcgagcctgctcagcctgccggtctgggtgctgatggatgaggacgtccgg

SEQ ID NO: 823167 - DNA, 98 bp, Homo sapiens
tctcttcccagcagagacagcaccaggggtcagcagggggccagctcaggacacacagacccagctggaactcgatttgtagccaaaccgtgcgccat

SEQ ID NO: 823168 - DNA, 98 bp, Homo sapiens
gatttaaacaagagatttccacagaaggagacaaagcttttgttgatttcctgagtgatgaaattaaggaggaaagaaaaattcagaagcataaaacc

SEQ ID NO: 823169 - DNA, 100 bp, Homo sapiens
aggtggctcgtaagttggtgatcattgaaggagacttggaacgcacagaggaacgagctgagctggcagagtcgtatttattacagtatcaggagccaat

SEQ ID NO: 823170 - DNA, 98 bp, Homo sapiens
tacacgttgggggtgtagttagtgcacgttctgtgaagcttttggatcgtatccacaatcctgctactcccgagcccggagaggacccacgcgtgacc

SEQ ID NO: 823171 - DNA, 100 bp, Homo sapiens
ttcaggcagatggcaagacctgcaaaggacacagcattgttggttttgccatgtactattttacctatgacccgtggattggcaagttattgtatcttga

SEQ ID NO: 823172 - DNA, 100 bp, Homo sapiens
ccgggacccaggaccatgtctctgtctcgctcagaggagatgcaccggctcacggaaaatgtctataaggcatcagatgccagctctgaaaaactcttca

SEQ ID NO: 823173 - DNA, 98 bp, Homo sapiens
ccagatcgggatttacgtggagatcaagcgcagcgatggacactcatgaggaccatgatacttccactgagaatacagacgagtccaaccatgaccct

SEQ ID NO: 823174 - DNA, 99 bp, Homo sapiens
tttacccggctcaagactgggagatgggaggtgaccaggtgatgtgtccaatctagatcccaacttctcatttgaaggcaccaaactggatgtggggaa

SEQ ID NO: 823175 - DNA, 100 bp, Homo sapiens
tattataaatgaagatctggacagtggcacacagataccgtttattaaaagagctgtggctgtatattcagcatgcagctttactttttcaaagattcct

SEQ ID NO: 823176 - DNA, 100 bp, Homo sapiens
tccacaatgactatgatgaattcaactggcgcattggagtgactgtctggcatcaccaagatgacactccacgccacccggggggctgcactcctctctt

SEQ ID NO: 823177 - DNA, 100 bp, Homo sapiens
cggcggggaaaatggcggacgggaaggcgggagacgagaagcctgaaaagtcgcagcgagctggagccgccggagaagaaaaagtcagcactttttgaag

SEQ ID NO: 823178 - DNA, 100 bp, Homo sapiens
gctggtcagcttggtcatgatctaccagttcattgttcagggtcgataaagacaggagtggagtgatatcagacaccgagcttcagcaagctctctccaa

SEQ ID NO: 823179 - DNA, 100 bp, Homo sapiens
aggaggtggaaggaatgaggaaagagctcattctcatgaagaagcaccatgagcagcaaatcacagatgaaggtctcattactatatgcagagggtgcca

SEQ ID NO: 823180 - DNA, 100 bp, Homo sapiens
agggatccttcacccgtgtctgcttccacttcaccatcggatgtttgccactcagactgagggggagctcagagtgacccaaattctcaaagaaaagttt

SEQ ID NO: 823181 - DNA, 98 bp, Homo sapiens
gaactttaggagagctgtgttctctgcagattctaaataaaccacataatcctatggtaaatgctggagcaattgttgtgacttcactaataaaggta

SEQ ID NO: 823182 - DNA, 98 bp, Homo sapiens
tagtccagctcaaattgtgacatatgatcttctgtcagtcatttgccatcatggaactgcaagtagtatatgttgtcggtggctatgatgggcaaaac

SEQ ID NO: 823183 - DNA, 99 bp, Homo sapiens
accactgctgctgccccatttccgtgctgcccttgttcagtgaattctacagtcttggtgaagaacacgaagaagactaatccagagataaaagaaaaa

SEQ ID NO: 823184 - DNA, 100 bp, Homo sapiens
ctgctgcaaacttgagactcaggagctagagcctaaatttaacctgatgcagattcttcaagataatggcaatcttagttttacacctgcagcagaagtc

SEQ ID NO: 823185 - DNA, 100 bp, Homo sapiens
aaagcagtcaaacatgctgaccgctcaagagattctacatcagtttggtttcactcagaccgtacaaaattggacagctgtacatgatcagcaaacacag

SEQ ID NO: 823186 - DNA, 99 bp, Homo sapiens
tgtttccattgcgctctacaatgacatttctcacatgaagatcaaagatgccttgccatcgcttataacccacaccatggataacttattggactttgc

SEQ ID NO: 823187 - DNA, 100 bp, Homo sapiens
ttcttcttgaaattaggcagactcttcaaaacgcactcattcagtttgctactagagctcagagttctacagagtcaccactgaacaatatcagaaagct

SEQ ID NO: 823188 - DNA, 100 bp, Homo sapiens
cctgtgggaagaatcacgccttctacagactgcagccactgcggcccaggacgggctctacgagtgcattctctgtgcctgctgtagcaccagctgcccc

SEQ ID NO: 823189 - DNA, 99 bp, Homo sapiens
ttccccattcggtgcaccaagagcaacctcacacggtgtgggctgaatgaagagctgccagatcccacagaaaaaactgcctctgacagctcttgctca

SEQ ID NO: 823190 - DNA, 99 bp, Homo sapiens
ccattttgtcttctgtggatgggtgagagtcccctttgcaccctcccccagtaatatcagcagtctgagctatcagctgaagaaagtccagaaaaatta

SEQ ID NO: 823191 - DNA, 100 bp, Homo sapiens
actttctgtcaacactatactcaatcaacagatgaacagccaggatctcacataggttccatcaatggtgagcaccagcctgaatgcagaagcgctccag

SEQ ID NO: 823192 - DNA, 100 bp, Homo sapiens
agtcttcccgcgtccgccgattcctcctccttggtcgccgcgtccttggctggcgtgtcctggctataagtcaccatggcacagcaagctgccgataagt

SEQ ID NO: 823193 - DNA, 100 bp, Homo sapiens
atcctcctgactccataaactattggattcataacctgctccatgcttgaaaacatggggattggaattcggatgttaatgcaggcgagggcagtgagtt

SEQ ID NO: 823194 - DNA, 98 bp, Homo sapiens
aagactcgcatccgaatgggccagtatgaatttcccaacccagaatggtcagaagtatcagaggaaggttaatgactccagagagtaagatcagattc

SEQ ID NO: 823195 - DNA, 134 bp, Homo sapiens
tgggagccacggtgccaggaccatctacaagagccaaatcaagattgcgtttctcaaagtcctacagacactcatccaagaggaaggatggccagtatcttttctaagttgctaactggccgcaatgcttctct

SEQ ID NO: 823196 - DNA, 100 bp, Homo sapiens
gggatcacaaacactcagagtggaaaaagtaccatcatttgaaacagtaccgggaccctctggtgataatggcatcagtgttacaatgatcttggtagcc

SEQ ID NO: 823197 - DNA, 106 bp, Homo sapiens
cctgcctcagcctcctaagtagctgggactacagggttttttgattaactcaaaaccagagaatgcctgtgaacccatagtgcctccaccagtaaaagacaattca

SEQ ID NO: 823198 - DNA, 118 bp, Homo sapiens
gctgcagcagcaagtcccatcggaggacctccctgccctgtataccgagggaacagatacctggcttggtgactttaaagaagctcccctgtgttagttttgctggtgttgatagcct

SEQ ID NO: 823199 - DNA, 100 bp, Homo sapiens
ttcaaagctactgcagacgacgagctgagcttcaaaaggggggacatcctcaagcttccagctgatcttaccaagatgcatctcacagaaaaccctcatc

SEQ ID NO: 823200 - DNA, 98 bp, Homo sapiens
atggccctggagaaaaagctgaaccaggcccttttggatcttcatgccctgggttctgcccgcacggacccccatgtgcgcttctccgagaaggtcac

SEQ ID NO: 823201 - DNA, 100 bp, Homo sapiens
agaaattaagaaggaaatatctccattattacatgaagcagatgacatttgaagcccaagcctttttagaagctgtgcaattcttccgacaggagaaggg

SEQ ID NO: 823202 - DNA, 100 bp, Homo sapiens
ctctttgcaccttaatgtggtacctccggtttgtttaaagggctcactttactgcgaagactgtctaaacaagagatgtgaggaggagcttcttcaatta

SEQ ID NO: 823203 - DNA, 98 bp, Homo sapiens
ctgtatgatagtgttagttccacagatggggaggacagtctagagagaaaggtctgccatgtgaatctggaggggcagccgttctactccaagaagga

SEQ ID NO: 823204 - DNA, 99 bp, Homo sapiens
ctcggtgtaagaccaccaaatatcggaacccctccttgaagctgatggtgaatgtgtgcggacacactctgatcaactcactatcctgaaggtccattc

SEQ ID NO: 823205 - DNA, 100 bp, Homo sapiens
tgatctctataggcaaatggattgctgataatcagccaaggcagaaagtgaaactcttcactgctcacaacaatatgaccaactatgctaccgtatgggc

SEQ ID NO: 823206 - DNA, 98 bp, Homo sapiens
gcaactccagccagctcaccgtccacctgcgatctcacacgggtgctggagaatctggtaaaagcaccattgtgaagcagatgaggatcctgcatgtt

SEQ ID NO: 823207 - DNA, 100 bp, Homo sapiens
cctaatcaaggagaagactgctatttttttttctattccacatgtaccaaagatctcttgaatcgtgtagaagattttcaacagcatagtcagaaactac

SEQ ID NO: 823208 - DNA, 98 bp, Homo sapiens
tggagcagggagaggagctgtggataacgggaggtgaatttccatgtcaacatagtcctggtgaaggtgtggttccagaaccggaggacaaagtacaa

SEQ ID NO: 823209 - DNA, 100 bp, Homo sapiens
acttggatatgctgacgactgtgcaggaagaaaacgagccagtgatttacaatagagcaagcattccaagctgtatcaaggagtcgtgttctcaaaagca

SEQ ID NO: 823210 - DNA, 100 bp, Homo sapiens
gaagacatgcttacttccccttcaccttccttcatgatgggaaaacttgttattggacacaatatgctcttggacgtcatgcacacagttcatcagttct

SEQ ID NO: 823211 - DNA, 99 bp, Homo sapiens
tctaatgaaacagatttcctgattggcattaatgaagagtcagtggaaggcacggcaatctatttaccagctgctgtaagtaaagatgattccattatt

SEQ ID NO: 823212 - DNA, 100 bp, Homo sapiens
atgactgctggaaggagcacgaggaagcagtggaatatgtgatcaagtgtgacatgtcagctctgcagaagattctgtatcgccatatgcaagccaaggg

SEQ ID NO: 823213 - DNA, 98 bp, Homo sapiens
tgatatacacttttcaaaatgctttggtgggaagaagtagaggactgttgttggccttcattccacgatgtgatcaattctgaggcaatcacattcac

SEQ ID NO: 823214 - DNA, 100 bp, Homo sapiens
agcaagagcaagatcaccgtgacatccgaggtgcctttctccaaaaggcccgccagctcatcctgcagtatggcttgaccctcagtgatctggatcgaca

SEQ ID NO: 823215 - DNA, 50 bp, Homo sapiens
tctacactgagtcggaggcgaaggtatccagtcggaattctttattaaca

SEQ ID NO: 823216 - DNA, 99 bp, Homo sapiens
agaacacccgactcggtgattatagattcaagttgtggaaagtaaaaatgtagccctaccaaaaggaactattgtactggcttctccaggctggacaac

SEQ ID NO: 823217 - DNA, 100 bp, Homo sapiens
cagcaccaaaggcaaggatttggacggtttctcattgatttcatttccacgggctcccttgctcagcagtatgcgcaccctaacgctaccctgcacccac

SEQ ID NO: 823218 - DNA, 99 bp, Homo sapiens
agatgtccaaaaacttccctacaataactgctttgtgtattcatcgagatttagcagccagaaatgttttggtaacagaaaacaatgtgatgaaaatag

SEQ ID NO: 823219 - DNA, 98 bp, Homo sapiens
gacaccgggctccggaaccactgcacgacggggctggacttggtagctggcagtgttgtgatggcttttgaagaagtatgcccggacagaatagatct

SEQ ID NO: 823220 - DNA, 100 bp, Homo sapiens
cccaggatcaagaccaagaacctggtcagtatttgataggtacaagagttacagcccttatgacatgttggaaagcatcaggaaagaggttaaaggagac

SEQ ID NO: 823221 - DNA, 100 bp, Homo sapiens
gtatggaaaagtgtacaggattgagggagatgaaacttctactgaagcagcaacacgcctgcacttaaggaaagcttcataaaagccattggtgttggac

SEQ ID NO: 823222 - DNA, 100 bp, Homo sapiens
cctcttataacagaaagaaagaggatggagagggcaacgtttggattgcaaagtcatcagccggtgccaaagctctgcccctgaggactgcacgtccttc

SEQ ID NO: 823223 - DNA, 100 bp, Homo sapiens
aactgctttacaaagtattttaaacatccagtcatggataaaaatgagctggttcagaaggccaaactggccgagcaggctgagcgatatgatgacatgg

SEQ ID NO: 823224 - DNA, 100 bp, Homo sapiens
atttgctgtcagccatgaacggatggatgtgatgcctgctagccaaaaggatcagtcgcatcgaatacattcattcaaagaacttcatccaccgggatgt

SEQ ID NO: 823225 - DNA, 100 bp, Homo sapiens
cctactttgactcagagctgatcagatgtggggaatgccatcacacctgcggaacctgcgtggtttctgtagaaaatgtttcctgactgcaatgagggaa

SEQ ID NO: 823226 - DNA, 98 bp, Homo sapiens
tccttcagacccctccagacatccaatcagagcattcaagggatggtgaaatggatgatagtcgagcagtagaagactcagaaagtggtgtttacatg

SEQ ID NO: 823227 - DNA, 100 bp, Homo sapiens
ccgcacgccgaccggcgccgggagatcctgggaaacaaaccatcaggcctcccagaaagtatccgggatctgaaaatcaccaaatcaccacatccggaca

SEQ ID NO: 823228 - DNA, 98 bp, Homo sapiens
tttgagccatcggatctaagatccaaaagtttgcttgcctaaactggacttgaagcaatttaaactactggagatctgccattttataatatcacaat

SEQ ID NO: 823229 - DNA, 100 bp, Homo sapiens
tgactgcggagactacagtgatgagacacacgccaactgcaccaaccagggaatgtggacccccctgtctggtacgacaccgacgtgaagctgtttgaga

SEQ ID NO: 823230 - DNA, 100 bp, Homo sapiens
accgtgtggttcttcatcgtgctattcctggtctacatcctgcgggtgcctttgaaaatcaacgacaacttgagcacagaaatgactgctgtccatgcag

SEQ ID NO: 823231 - DNA, 100 bp, Homo sapiens
attgactgtatttgggctgcagcacaggtaaaccaggtgaaatgtcaactacctgaaagtattttccaagtagacgaactcttgcaccgtctcaattttt

SEQ ID NO: 823232 - DNA, 100 bp, Homo sapiens
caagactggtccacggagtgtatgaccacaaacagccatcaaggatggatgacatggctgtggatagtgatgaggaggtggattatagcaaaatggacca

SEQ ID NO: 823233 - DNA, 99 bp, Homo sapiens
ttcaagtggctaatcttacaacagcacaaattcatctaaccagagtggttaagaaagtagctcaatacatggctgatgtattggaagatagcaaagaca

SEQ ID NO: 823234 - DNA, 100 bp, Homo sapiens
ggagccacctagaacagtttcaggcagatataaaaggtacctttgtgcatcgactcctccaattttgctgtgattgaagctgggttaaagtgctgccaag

SEQ ID NO: 823235 - DNA, 100 bp, Homo sapiens
acagttgattcagcggttgcgaagaatggaacgaagcttaagtagctacaggggaaaatattctgagatggagatcttataacaatttttgatagttctg

SEQ ID NO: 823236 - DNA, 100 bp, Homo sapiens
ggacatcagtatgcgagagcgtacttcgtgatagcagctcacactttcaatttcacctcttctttggtggacaggatctgcatctccaatggatactgag

SEQ ID NO: 823237 - DNA, 100 bp, Homo sapiens
gccagcacagtccccactgacgggagcagcagaaatgagacaggccgacggtcgcaaggtcctacggtcaagcatccgggagtttctatgcagcgaagcc

SEQ ID NO: 823238 - DNA, 109 bp, Homo sapiens
ctcatttctccagatgccaacattgacctcacaaccgagcaaattgaagagacgttaaaatacttccatatcagacaccccgaagaactttctctcttaaagaaaccca

SEQ ID NO: 823239 - DNA, 98 bp, Homo sapiens
tagcgatctatattccctttccagaagatgattccaacgccaccaattccaacctgttttcatatgagtccaacaagcaatgaagacctcaggaaaat

SEQ ID NO: 823240 - DNA, 100 bp, Homo sapiens
ggcaccgggatcgtgaccgagaccgtgaccgagagcgtgaccgagagcgcgaatatcgtcatcgttagaagccagttgtttggggaagaagatgctgatc

SEQ ID NO: 823241 - DNA, 100 bp, Homo sapiens
gaactgaaattctgcgttcaagatcaacctctagaatcccgtagactctgcaacaagccaattcagagcttgcccaacatggacagcatttttagtgagg

SEQ ID NO: 823242 - DNA, 99 bp, Homo sapiens
tttatatcctgacactatgaatgctacttggatgcctcttaaggtagtaagcattaataatgtctttcatctttgagtggatctacaatggcttcagca

SEQ ID NO: 823243 - DNA, 105 bp, Homo sapiens
acagtaaggccaaaaatgtgcatactcacagagttagagagagggatggtggtatggcctcacaagtcttggtctacccaccatatgtttatcaaactcagtcaa

SEQ ID NO: 823244 - DNA, 100 bp, Homo sapiens
ctgaaagaataattggtgccacagacagcagtggagaattgatgtttctcatgaaatggcctggttgcagtatgcttgaaatctgggatgtggaagaccc

SEQ ID NO: 823245 - DNA, 101 bp, Homo sapiens
ctcaagcgatcatccggcctcggcctcctaaagtgctgggactgcaggtcacgacatttagtgaggcccgccaagctgccccctgtgtgctattctttgat

SEQ ID NO: 823246 - DNA, 100 bp, Homo sapiens
tccctttggccgcagtagtatagagctgaccaagatgctatgtgagatcttgaaagtgggcgagttgcgagacatggaaatttacactacagaaggcaag

SEQ ID NO: 823247 - DNA, 145 bp, Homo sapiens
agccggaccatcgtcccagagagctggggcagggggccgtgcccaatctccagggctcctggggccactgctgacctgttcctcgtctcctcattatgaaagacatggtcagacgactgcaggaactgcggcacacggagcaggt

SEQ ID NO: 823248 - DNA, 100 bp, Homo sapiens
ctttgttgctgctgcacattaggttgcagtatgtggccagttatttgcctcagtaaaagaactggggctgtggctgagatgtcacatggcagataggatc

SEQ ID NO: 823249 - DNA, 98 bp, Homo sapiens
gggccctgaaaaacggagacttggatgaggtgaaagactatgtggccaaggtgaaaggtgtagcagtcactcggcctacacccacagcatcgaccttg

SEQ ID NO: 823250 - DNA, 100 bp, Homo sapiens
gctcaccgggcagcgtgggtgagcggcgcagcggcggcagcggagagcgagagaggggagcagaactcccccactggaaaggattctgaaagaaatgaag

SEQ ID NO: 823251 - DNA, 100 bp, Homo sapiens
aataagaagagaagatggacagtttcagtgcattacaggccatcgaagacggcaatttggaggaaatggaagaggaagtacggcttaagaagcgaaaaag

SEQ ID NO: 823252 - DNA, 100 bp, Homo sapiens
ggctgctgaccagaagaggtttagtgccctcctgagtgactgcgtcaggcatctcaatcatggaatagccaggccagaagaaggaaggcctgtggtgagt

SEQ ID NO: 823253 - DNA, 101 bp, Homo sapiens
ggtttacatatgaccaaaggactcgccctctgggaggcttaccgagagtttgaaagtgcgattgtggaagctgctcggtgccatctgggattgacagctca

SEQ ID NO: 823254 - DNA, 100 bp, Homo sapiens
aacaataaagttctgtctttcactatcccctccttatccaagccttcaatataccatgaaatatgaaaattttgaggatcctatgggaactattgataag

SEQ ID NO: 823255 - DNA, 100 bp, Homo sapiens
cccaagtccctctactcgcgagaactcccccactggaaaggattctgaaagaaatgaagtcagccctcagaaatgaagttgactgcctgctggctttctg

SEQ ID NO: 823256 - DNA, 100 bp, Homo sapiens
ggctttgatgcagtactccaggcagccgtctgcaagtttcacagattccttggtgtctttctccgctgagattttgtcacggacactatgtgaacccctt

SEQ ID NO: 823257 - DNA, 99 bp, Homo sapiens
tctgctcagcctggtgaaccacacaggtgtattttgacctacgaattggagatgaagatgtaggccgggtgatctttggtctcttcggaaagactgttc

SEQ ID NO: 823258 - DNA, 98 bp, Homo sapiens
tgagccccagccatggaatgaatatccacaatttagcatcaggcaaaggaagcaccgcacatttttcagatcatccaagcctagaaaacatggaacag

SEQ ID NO: 823259 - DNA, 100 bp, Homo sapiens
ttcacggtgccccccgtgtttgtgtctgtgtacttaaacagaagttggcttggactttccgtgacatttctgaagatctgaaatcttcagtaggttgatg

SEQ ID NO: 823260 - DNA, 99 bp, Homo sapiens
ggagcactggggcctggaccagcctcttctgaaacactgggaccaagatcactccatggatgaaatgacagctgtggtgaaaattgaaaaaggagttgg

SEQ ID NO: 823261 - DNA, 98 bp, Homo sapiens
ctggaggtggactggagcagtgagaaagcaaaggctgctctgaagcgcacgacctccgactactttctccttcaagctcctgcccctcctaaagctga

SEQ ID NO: 823262 - DNA, 100 bp, Homo sapiens
gggagtgtgtttctgaagaatgcagcaggaaggttgaaaggactgagtggagtagctggagtgagttcccgctgtgaaaaagcctgcaaccctcggatgg

SEQ ID NO: 823263 - DNA, 147 bp, Homo sapiens
caggaactggccggggtccgcaccgggcctgagtcggtccgaggccgtcccaggagcagctgcccgtgcggggcctcaagatccctgagtgagggccaccccacggcccagcatgagaaaatgctctgtgacacctggtgtatcgag

SEQ ID NO: 823264 - DNA, 100 bp, Homo sapiens
tgccggcctggctgatgtttgcttctgtttccacgctgcccagcaatgttccaggtggagcttgtggaaggcgctttgacttccgtccaaaacctgatcc

SEQ ID NO: 823265 - DNA, 100 bp, Homo sapiens
agataaagaatcagataaagaagatggacgggaatctccttcttatgatgcgctggctccctccctccgaggctacttctcagggctggaagtcccgtca

SEQ ID NO: 823266 - DNA, 100 bp, Homo sapiens
tcatcgaggagggcacattccttttcacctcagagtcggtcggggaaggccacccagattgcatcatcagagaaaatacacccagtcattttgcggtgaa

SEQ ID NO: 823267 - DNA, 100 bp, Homo sapiens
ttcacttaatcatatccgagctgacctgggcctgtccccacacctcactgcgctcatggcaggtggacagcccctggggcacagcagcagcacgggggac

SEQ ID NO: 823268 - DNA, 99 bp, Homo sapiens
gctgggagctgtagactggagctgttcctattcggccatcttggctcctgtgcatcacaagtctttgctattacagagtctcactctgttgcccaggct

SEQ ID NO: 823269 - DNA, 106 bp, Homo sapiens
ataacggagaatggaactgtatgccagcagcttgttgtacatgatgtcttggcattgcccattttcaagcaggaagattccagccttccattggatggtgaaacag

SEQ ID NO: 823270 - DNA, 98 bp, Homo sapiens
cgcagaacccgggagtaggagactcagaatcgaatctcttctccctccccttcttgactcagattgatggacaacttttcttaattaagcaccttttg

SEQ ID NO: 823271 - DNA, 100 bp, Homo sapiens
cgaagaaacagacattcaacatgattgcatttgaaagaggtgtgcatgaaatccgagagatcagacagtttcacttcactggctggccggatcatggggt

SEQ ID NO: 823272 - DNA, 146 bp, Homo sapiens
cggtgaaggtgcaggcccggcgccgccactgccgcagccaggagatggttcgggcctagcggagccgggactggagttggttgaatctggcgatgtggaacccatggatatggagggctgactatatacaccatgttttttcctgg

SEQ ID NO: 823273 - DNA, 120 bp, Homo sapiens
ttttgtgaaaggccaatttcatgaatttcaagagagtaccattggggtacttcatgaccatgatcgtttcccttgctgcggttgcttgggtgggacaacaagtccacaacctgcttctca

SEQ ID NO: 823274 - DNA, 100 bp, Homo sapiens
tgcaaatgcacctcctgcaagaaaaggtacaggcatccttcacctgctattgttgcaagaacagtcagaattttacatacactactaactctggttaaca

SEQ ID NO: 823275 - DNA, 100 bp, Homo sapiens
tccagagctccgacttatttctgtgggcagacattaacattcaggcgccaagcccatctttgtgtgcttgcatccaactgtgatgagcctatgtatgtca

SEQ ID NO: 823276 - DNA, 99 bp, Homo sapiens
gagcgagcagacgcgcacaccggcgagccaagttccgcagcctggcatggcttctggggacctttacgaggttaaaaagatcaagtggcatgagcagcc

SEQ ID NO: 823277 - DNA, 101 bp, Homo sapiens
aaaaacagcaccagccaccatgagcactcccacaatactggtcgcaacagcagtccatgcatatcgatagtgcctggtggtgctagctcctcccacctcag

SEQ ID NO: 823278 - DNA, 100 bp, Homo sapiens
gaggaacccagagaagatagaacgaatgtgtgccctttttacaaagcctccccagctttctgaggatgatatctggctaaaaagcgagggagacaactat

SEQ ID NO: 823279 - DNA, 51 bp, Homo sapiens
ggcgacagcaacagctctgccggctggaagcctgccacagtgactcaggtc

SEQ ID NO: 823280 - DNA, 98 bp, Homo sapiens
ctcaactatctcgctgacacgcaggtttttgtctgatgaaaatagtctggagtataaatattacaagctgaagttggcagaaatgcagcggatgagcg

SEQ ID NO: 823281 - DNA, 100 bp, Homo sapiens
gcgggtgctgcttgctgcaggctctggggagtcgccatggttgctaggaagaggctcaatgtttgtgttttcaccagatcagtttcagagactgcttaaa

SEQ ID NO: 823282 - DNA, 98 bp, Homo sapiens
catcttccaccatccataatgaagctgagcttggcgatgatgacgtttttacacacccttacccttctgaagaacagaaaaagcagttggcacaagac

SEQ ID NO: 823283 - DNA, 99 bp, Homo sapiens
aaagtcattgcagtcgtcaacaagatggtgagcatgatggagggtgtcatccaggctgaggctgaggtggcctccttgaaccgtaggatccagctggtt

SEQ ID NO: 823284 - DNA, 100 bp, Homo sapiens
ccgcgggtttgggaggagtatgccaaccagcatggccctggacaggtgaggacctgaggcacagatgctaaccagcttgctggagatcacacactcatga

SEQ ID NO: 823285 - DNA, 98 bp, Homo sapiens
ccccggctccatcgacctcaaggacatcaacttccggccgcagatgtcccaggtgtgaacccacatccctgcccccagggccacctgcaggacgccga

SEQ ID NO: 823286 - DNA, 98 bp, Homo sapiens
ctgttccaaagcctcctggaccgtccaagaagactgcgcccggggcacggccaactgtgtggtgttcagctgcccactctacagctttgaccgcgcgg

SEQ ID NO: 823287 - DNA, 98 bp, Homo sapiens
ctgggctccggggagggcctgatcatagtcaagatgagttccggaggagatactattcgttacttgtccttgcatgacaacaaatacatcagatactt

SEQ ID NO: 823288 - DNA, 100 bp, Homo sapiens
tgtgatccagcatgacgtggaggccgagaagcagctgatccgggaggaaacattggcaaatttggagcgacagatctatgcttttgagggaagctacctg

SEQ ID NO: 823289 - DNA, 100 bp, Homo sapiens
ggagtctccgcgtcccgctcgctgggagagaggtacctctccttttccctctccctttccctaaggcaggaataccaatgggaccaatgccagcagcggg

SEQ ID NO: 823290 - DNA, 101 bp, Homo sapiens
attccctggtaatccaggtgccccaggttctccaggccctgctggtccttctggccctgctggaaaagatggtcgcactggacatcctggtacagttggac

SEQ ID NO: 823291 - DNA, 100 bp, Homo sapiens
aggcattccaaagagcagtttgaggcggcgcagaagcttgagcaggagtacagcaggtacttcacaggaaatgcatctacaaccacaactgtgatagaca

SEQ ID NO: 823292 - DNA, 99 bp, Homo sapiens
gtgaaaccgcagccccctctgagtgatgcctacctcagtggtatgcctgccaagagacgcaaggctgaagcagaggacctggatggaggaacattatca

SEQ ID NO: 823293 - DNA, 98 bp, Homo sapiens
aaacccatctaatcacagactcctatttgaagtatttgacgaaaatagactggatctctgtcgaagtttgccttacctgggaaatcagaagtgacatc

SEQ ID NO: 823294 - DNA, 100 bp, Homo sapiens
tgaaaccagcctcaagtttcacctatcctcactgatccgtggacttctgtatgatcaggcctccccaaagccagtcctgtgtcaccaatcaaaggaaagg

SEQ ID NO: 823295 - DNA, 99 bp, Homo sapiens
ggttccccggcccacagtgggggtgtgcaaacccgagagaactggtctcgtttcctctcagtccatccacccttcatggggccagagccctctctccag

SEQ ID NO: 823296 - DNA, 100 bp, Homo sapiens
ctggctaacaccgtggagaaatcagaagggatgaaaagtatctctctcgcctcttgccatcaattgcattccaaattcttggatcagtctctaggagaac

SEQ ID NO: 823297 - DNA, 99 bp, Homo sapiens
gaaaacatgacgtctccagccaaattcaaaaaggataaggagatcatagcagagtacgatactcaggtcaaaggtgtaaacgtcctacttcggggcaac

SEQ ID NO: 823298 - DNA, 134 bp, Homo sapiens
tgtgcaacaagtgtctttggttataaattatgatctacctaccaatcgtgaaaactatattcacagctgataaaatactgggaagcattcctacctgaagccaaagccattgcctagcaataagattgttgccg

SEQ ID NO: 823299 - DNA, 100 bp, Homo sapiens
ctgccctcaagttgtagcaagatatttaagtcatgtcctacaaaatagttacagctggcggatgctgccaagcggggagcgtttggccatgagcgctatg

SEQ ID NO: 823300 - DNA, 100 bp, Homo sapiens
gtattaaggatgcccctgcatactattattccgttgttacaagaggttcttgggtgtctctggggagtccctgggccagaccttcctccagactccagcc

SEQ ID NO: 823301 - DNA, 98 bp, Homo sapiens
tatcctaaacttttcaagcctgaaggaaaggcagaactgcctgattacaggagctttaacaggcacgtgtggttctcaaatataggcattctgatggg

SEQ ID NO: 823302 - DNA, 100 bp, Homo sapiens
agaattcccaagccagagctttccaggttcatgcttttatcaagagatctgatgctgaggaagtggattttgcaggttggctctgctccaccatcggcct

SEQ ID NO: 823303 - DNA, 98 bp, Homo sapiens
aagaagtcgcccatcgcagcagctcgggggcttgtacatgacagctggaatagcctccagttgaggggcttggtggtgctccttatctctaaagcagc

SEQ ID NO: 823304 - DNA, 100 bp, Homo sapiens
cacctgggaggtggaccggagctcgtccagctgcgtgcctaggatgtttcgtctgaactcactttctgctttggcagaactggctgtgggttctcgatgg

SEQ ID NO: 823305 - DNA, 100 bp, Homo sapiens
ctacagtatgcacttaatgtcccttctctggctgatgaacttgctcttgtggatgttttggaagataagcttaaaggagaaatgatggatctgcagcatg

SEQ ID NO: 823306 - DNA, 99 bp, Homo sapiens
gaggctttcctgctggtggcaaccgcctacgagacactcaagggcttcctgaagaatgagaaggacaatgccctgctgtctgccatcgaagagtcccgg

SEQ ID NO: 823307 - DNA, 100 bp, Homo sapiens
caggtggaggagaggcagcggcggctggaggaaaggggcgtggctgtggagaaggcgctccggggcgaagcagcgggtcacagaaagtcgagagagccaa

SEQ ID NO: 823308 - DNA, 98 bp, Homo sapiens
ttttcccagatctttgctgagtggtcctgcccagaatgccggatcacatctaactttgtcattccaagtgagtactgggtggaggagaaagaagagaa

SEQ ID NO: 823309 - DNA, 100 bp, Homo sapiens
ttcacttcccaaggacagaggcaaacggagcagtgcgtttgtgtttgaactttctggggagcactggacgatgagctcacagtgcctgcactttacccca

SEQ ID NO: 823310 - DNA, 98 bp, Homo sapiens
gtctgagctctgcgagaaccttgaggccccagggacaggctggcctgacatggaaggtgaaacaaggcagcagcccctgcctccaggagaactctgca

SEQ ID NO: 823311 - DNA, 100 bp, Homo sapiens
aggatgaactggcgggtgtggacgccactacagttcatcaacatcaactacgtccctctgaaggtggacccaagtggagagattgtggaactggcgaaag

SEQ ID NO: 823312 - DNA, 98 bp, Homo sapiens
ctgaaggagggaaacgcggcgcgtccaggtatgatctcgtgaaatcttgagagaaactgaatgacgaatgaaactattgttcctgtttcacacagaag

SEQ ID NO: 823313 - DNA, 100 bp, Homo sapiens
cctttctctctctgccaggtctgccattttacacttttctgatctcctccttcccttctgtgagctatgtctcagctggtgaatgcatatgtgatgacaa

SEQ ID NO: 823314 - DNA, 123 bp, Homo sapiens
agcatgttgcagtcatcctcaaccaagaaatccgggagttggaacgtcaacaggagcaacttgtaaaggtatccatcatcccacgtggcaaaggactaggttatgctcagtatttaccaaaag

SEQ ID NO: 823315 - DNA, 100 bp, Homo sapiens
agaagaaaatgtccacccccatcgaagtgttgtgtaaaggctacccttgcccgctacaacttcatccgaagcatggccgcctacagcctcctgctgttcc

SEQ ID NO: 823316 - DNA, 100 bp, Homo sapiens
gatgtgtgaagaaaaaagaagtaaaagaagctattattacaagaataaaggcaggaatcaatccattcaatggctcagcagggagctgctggatgagaaa

SEQ ID NO: 823317 - DNA, 100 bp, Homo sapiens
gttactgtgaacattcatgcacaaatttttatgtggaggccccttcacagatgtagtcactacaaatcttaaattgcgaaatccatcggatagaaaagtg

SEQ ID NO: 823318 - DNA, 99 bp, Homo sapiens
ccgaagaagcatcgttaaagtctctcttcaccctgccgtcatgtctaagtcagagtctgcgggccaggcatcgacatccgcaacgactatcagcagctg

SEQ ID NO: 823319 - DNA, 98 bp, Homo sapiens
gatttaaaagacagtcctcgtcagcactgactttcagctatggaatcgggcgcaacctatatcctggtgatggtggatccagatgcccctagcagagc

SEQ ID NO: 823320 - DNA, 99 bp, Homo sapiens
ggcgctatctctgccctcagtatcaacaatgattgctcaagacttctttgtggctttgctaaaggacagattcagccatccctgtggaaagtgacaccg

SEQ ID NO: 823321 - DNA, 100 bp, Homo sapiens
ggctggccgccatgcacaagctgcacttcctgcacagatgggcttaggtcacgagcaaggatttggagccccttgtttaaaatgcaaagaaaaatgtgaa

SEQ ID NO: 823322 - DNA, 100 bp, Homo sapiens
tacgtcttcagtggttctcgtctcaaactctatttgccaaaggaaacttgccttatcaccttcttgcttgcagagaatgtaactggtcactacatttccc

SEQ ID NO: 823323 - DNA, 100 bp, Homo sapiens
acctgcaccgttgtcctacttccagaatgcacagatgtctgaggacaaccacctgagcaatacttttgtgaagaaatatgggaacctttttagcttggag

SEQ ID NO: 823324 - DNA, 98 bp, Homo sapiens
tctaccagttcctcggggtgcagcaggcccctagcagtcttcttgatgctttggaacaacatttagcttccttggaaggaaagaaaatcaaagattct

SEQ ID NO: 823325 - DNA, 100 bp, Homo sapiens
aaagaaattgcctggtgatgacagactgatgaaaaatagagctgatcaccgttccagccccaacgtagcaactcgaaatctatgacatgattggacaagc

SEQ ID NO: 823326 - DNA, 99 bp, Homo sapiens
ccagacttcccctatggtcagtatgaacaactctgctcatggtgattacatgcaaaataacgagagcagcttaatagagcaagctccaatacctcagga

SEQ ID NO: 823327 - DNA, 98 bp, Homo sapiens
tcttcgtattaccactgtctctgcactgagatttgggctgctttgcttccagcgtcacacatcataactgaggctggcagtgatggtgaaagcatagg

SEQ ID NO: 823328 - DNA, 99 bp, Homo sapiens
gacattgtggcaatcatcctgaatgaatttagagccaaactgtccaaggctttggcagctcttgtcaggatggtgaagctgttcatcggaaacctgccc

SEQ ID NO: 823329 - DNA, 99 bp, Homo sapiens
tggcggcggcggcaccagcagtaacaacagcgaggaagaagaggacgacgacgacgaggaagaggaggtttctgagaaagttggagtgactggtccccc

SEQ ID NO: 823330 - DNA, 100 bp, Homo sapiens
aggcgcggagggaagacgccctggtgctcaccaagcaagattttatcatgtgggcaacctgctgcaactggttctgcctggatggacagcctgaggaggt

SEQ ID NO: 823331 - DNA, 100 bp, Homo sapiens
tgctctgtgcgcgcctccatctgggccatggatggctgtgttggggtggaagaggaggaggcgcccgacatcgacatataccactgcccaaactgtgaga

SEQ ID NO: 823332 - DNA, 100 bp, Homo sapiens
cattcagtgtttgcgacaggcttccaactcacccaaggtctcagagcagctgctcaagcttgatgaacaagggccgagccgctgccgctcatggatttgt

SEQ ID NO: 823333 - DNA, 100 bp, Homo sapiens
agaatgcacagtatttgctgcagaacagtattttcatctcagcctagtgacgatgaatcaagtagtgatgaaaccagtaatcagcccagtcctgccttta

SEQ ID NO: 823334 - DNA, 100 bp, Homo sapiens
ttgcaagttcccatcgtcccaggaactagaggatgcctcctgctgttctcttaagaaagattccaacccaatggacatggatttgattgacatactttgg

SEQ ID NO: 823335 - DNA, 100 bp, Homo sapiens
aggcactgctttttcatgacggtacggacattgctgcaggagaagaggttgccatcaagcttgaatgtgtcaaaaccaaacaccctcagctccacattga

SEQ ID NO: 823336 - DNA, 98 bp, Homo sapiens
ggtcctttgagttcagttgtcttctcagagatgccaggaagcctcaggttcactattatgaagatggcaatgttcagttggttagtcataaagatgta

SEQ ID NO: 823337 - DNA, 98 bp, Homo sapiens
ttaggagccggtgagtccgggtggatgaggtcagagcgccccatggtgtggtgctgcctctttgtccgttcgcaggttttcacctcaaatggccccac

SEQ ID NO: 823338 - DNA, 99 bp, Homo sapiens
cgcctcatcccactctggaagctgagccggcggcgggaggagctagggctggagcctctccagcctcccgcgaagagttcacatgagactctgaatata

SEQ ID NO: 823339 - DNA, 100 bp, Homo sapiens
gtgcctggagatgcagttataatgccattcagagaagtagccaagccaacagagcctgatgagcatgatacactgaagagatggtgccttggcacccttg

SEQ ID NO: 823340 - DNA, 100 bp, Homo sapiens
aaaggagcaagagcaagatcaccgtgacatccgaggtgcctttctccaaaagagagcagagctgacatctgataaagacatgtaccttgacaacagctcc

SEQ ID NO: 823341 - DNA, 98 bp, Homo sapiens
taccccactcctgggccgtccctgaagaaacacatttactccccaataattgtacgggaggtgatcgaggaagaagaaccaagtgaaaaatcagaggc

SEQ ID NO: 823342 - DNA, 100 bp, Homo sapiens
gctgtgggacacgcggttcttctccagcgccctggcctccctcaccttggacacctcgcttgggtttggtgcacctcgatttggaggaagtagggcaggg

SEQ ID NO: 823343 - DNA, 100 bp, Homo sapiens
atggagagaagtctgccactatccatctcaggttttgcgcacagctgcttccagtatgccatccagaagaaatggccgctgtacatgagcaccaagaaca

SEQ ID NO: 823344 - DNA, 98 bp, Homo sapiens
cgagctcctcaagaatctcgtgctcaccggtttctcccacatcgacctgtgatcaacaaatacaagcgcagacgatttcagaaaaccaagaacctgct

SEQ ID NO: 823345 - DNA, 100 bp, Homo sapiens
cctgctccgacctaagcggagcagcctcaagagccgagccgagattgacagtcagatggagacctcgtgccaaattacatttgagtttgtagaccaggaa

SEQ ID NO: 823346 - DNA, 99 bp, Homo sapiens
ttgagtcgggaaatggccgctgtgtggttgcaacggagataaattcccggaaccgcgattcggcgtgtcagaagctggataagaaatcatctccatcca

SEQ ID NO: 823347 - DNA, 98 bp, Homo sapiens
gggcccgggccggatgggcgctgcgggccggggcgcggaccgcggagcggccgttctgtggatggagttataaaggaagtgaatgtgagcccatgccc

SEQ ID NO: 823348 - DNA, 100 bp, Homo sapiens
gattgcaaacagtggttctgctggattgataaacccagctgctacagaatgaggagaaacctgtgcaaatgatgtttaagcaatctacttttaagaagac

SEQ ID NO: 823349 - DNA, 100 bp, Homo sapiens
agtagtgaaaatgattttgaagttattggaagataaaaatggagaggtacagaatttagctgtcaaatgcttcatcactggtccagctgtaataccaggg

SEQ ID NO: 823350 - DNA, 98 bp, Homo sapiens
ttggagaattcaaggaaataagtttcacacctaataatctatgccagcaattatgacaatgttagcagaccatgcagctcgtcagctgcttgatttca

SEQ ID NO: 823351 - DNA, 100 bp, Homo sapiens
tgaaaacaatgaagattatttacaatgctaccctgctttttctggtgtcctgaacctggaagttgtgctttttaaggttgtctgcagagtgagattatgg

SEQ ID NO: 823352 - DNA, 100 bp, Homo sapiens
gtcatgattgcaactgggtgggtcaaagcactattcctgatcagagaactccagttgcttcaacacacagtatcagtagtgcagccaccccagatcgaat

SEQ ID NO: 823353 - DNA, 101 bp, Homo sapiens
gaaatgttctcttcacggtggaaaacacagatccagagtgttactggcttacaaattggattgagtaaaggcatgacttcctggcaccacagggaaaatcg

SEQ ID NO: 823354 - DNA, 99 bp, Homo sapiens
ttccagttgcacatttcctgcaaggactccaaagtggtgagggtcatcttggagattgaagaaccagcctcaaaccataatggcggacaacttcttttt

SEQ ID NO: 823355 - DNA, 100 bp, Homo sapiens
actccttgaccagcatcttggctgaccttgagtgcagctccccctataagcctcggcctccacagggtcagtatagaccttctgatttgctgtgccctga

SEQ ID NO: 823356 - DNA, 99 bp, Homo sapiens
aaaaactgacagcttactccttgtattgattctactcttctctacaaatatagactccgttccctaccacagccttttctgcaggctgtacaagaagca

SEQ ID NO: 823357 - DNA, 100 bp, Homo sapiens
gggccccgtccgcgtgacgctcctgcctgcgcgcggccaagccatgctcggccccaggttgatgataattagaagcatgctttccactgaacttcccgac

SEQ ID NO: 823358 - DNA, 98 bp, Homo sapiens
attgagagcagagtgcaagaatgggaagagggcttcgtgccctgtgcacgtttgccacctagtgaccaaactgaaataagatgaaatcattggcttcc

SEQ ID NO: 823359 - DNA, 100 bp, Homo sapiens
gcgggcggacgacagaggatgccgaaccactccaaactcccccactggaaaggattctgaaagaaatgaagtcagccctcagaaatgaagttgactgcct

SEQ ID NO: 823360 - DNA, 98 bp, Homo sapiens
gagacgtgggcgccctccccgccaaggcccgtgcgagttggttgaatctggcgatgtggaacccatggatatggagggctgactatatacaccatgtt

SEQ ID NO: 823361 - DNA, 100 bp, Homo sapiens
gcgagattgcctgacccaggcctgctcggccctcacagggtgttcatgaagtctgtgaagctggagtgggtgcaagacaacatcagggcagcccaagatc

SEQ ID NO: 823362 - DNA, 99 bp, Homo sapiens
cattagcctggctcaatatctaatcaatgtcagatgccctgctgtgccatgatgatgagctggaagggcgccggattgccttcatcctgtacctggttc

SEQ ID NO: 823363 - DNA, 100 bp, Homo sapiens
gtaccagctggacctgcccaaggccaacctcctcttcaaaggttggatggcaagcatgtggtgtttggcaaagtgaaagaaggcatgaatattgtggagg

SEQ ID NO: 823364 - DNA, 98 bp, Homo sapiens
ccccagagcatacaacagacttatttcttccacttagttctgaggtgaagacagatcatgggactgataaattgtgttgctaacaaccacaagcagaa

SEQ ID NO: 823365 - DNA, 98 bp, Homo sapiens
agctcttcactcctcagcgcgacgtcgtgtcgagttcccaaaaagctccgcaggggctgtagggaggtggaggagatgtcaagattgaaagtcagaag

SEQ ID NO: 823366 - DNA, 100 bp, Homo sapiens
actgtggacagtgaagagaggcctctcccaaagcacctgcgcaggccaggagtggtggctcacacctgtaatcccagctctgggaggccaaggccagtgg

SEQ ID NO: 823367 - DNA, 100 bp, Homo sapiens
gcaggctgcggcagacggcgacagtggcggcggcgccatggcagggcttgcagacaggccgacggtcgcaaggtcctacggtcaagcatccgggagtttc

SEQ ID NO: 823368 - DNA, 100 bp, Homo sapiens
tgaacccattgtcacccctccgcctgaacccccgccaacaaacaaatggcaacttgataattggctgaataaagtgaacccacataaagtgtcacccgcc

SEQ ID NO: 823369 - DNA, 99 bp, Homo sapiens
gacactctgcaggaagccaaggagcacagggtgtccctgaagtgccgcaggcagctccgtgtggaggagctggagatgagccccaacggtaaactgact

SEQ ID NO: 823370 - DNA, 98 bp, Homo sapiens
gaccagcggtatctcagccctggatggtgaatttcagtcagcctcagaggttgacttctacattgataaggtggtcttcgagggatagcacgaggtgg

SEQ ID NO: 823371 - DNA, 125 bp, Homo sapiens
accgaggaaaaggaatcgtatcgtatgtccgctatccagaacctccactctttcgcattactctactgactggcagagacaggagaggtagatgtccacgcccacagaccctggtgcgatgcccc

SEQ ID NO: 823372 - DNA, 100 bp, Homo sapiens
aaaatgaagattttgacagtcgtagatacaaatttttggatgatgatggatccatttctcctattgaggagtcaacctaccaagtcaggattgttacccc

SEQ ID NO: 823373 - DNA, 98 bp, Homo sapiens
gttggaacacagcagagggtgtgtaataaaatacaggtgtagagttcggtgctcgaatgataactattgatgggaaacagataaaacttcagatatgg

SEQ ID NO: 823374 - DNA, 99 bp, Homo sapiens
cttgtgtagcgtcagatccttgagtgataaaggagtagaggttttggcacaaataccagtgggaatagtatttttggaagtaaaccagcacctgggact

SEQ ID NO: 823375 - DNA, 98 bp, Homo sapiens
gtgacactcaacaggattcccgattatctttctcaaggaatagatctttctggaatagaagtgatagaaaatgatctactttttattgcaagagcccg

SEQ ID NO: 823376 - DNA, 100 bp, Homo sapiens
gcgccaagatccattcgttgccgccggaggggaagcttgggatcatggtagctacagcaagctgggtagcaggcagatccaaaggatatcatgaagtttc

SEQ ID NO: 823377 - DNA, 98 bp, Homo sapiens
gaggcacccgagccctgagagtccgccgccaacgcgcaggtgctagcggccccttcgccctgcaggcagaaatactcagtgtcctcagtcacagaaac

SEQ ID NO: 823378 - DNA, 100 bp, Homo sapiens
cctccgtgtggacgatagagccacatccagcaccacggacagctcccgggcggtggggaacgccaagcacaacgtgcatgtcatgaacatctccacaggc

SEQ ID NO: 823379 - DNA, 100 bp, Homo sapiens
ccagcataggtgctgggttcatttaccctttggtcggaacgggtgttaaataccacattatttgaaagctgggagatcgttggaccttacccttcctggt

SEQ ID NO: 823380 - DNA, 99 bp, Homo sapiens
agctccagttgcagttctccaatgatatctacagcacctatcacttgttccctccaagacaactgaatggaaagtctttgggttcggaggattccagaa

SEQ ID NO: 823381 - DNA, 100 bp, Homo sapiens
gggaatggatatgaactacattatccaaaggaagaaagaatttcggaaccctagaagtttgcctgcaatggtactgtaattgagcatccggaatatggag

SEQ ID NO: 823382 - DNA, 100 bp, Homo sapiens
gggcacggggctgccgcaggcccagctgctctggcgcaaggcagcgtctatcccagactaccggggccctaatggagtgtggacactgcttcagaaaggg

SEQ ID NO: 823383 - DNA, 98 bp, Homo sapiens
ggcggagctggagctggagctctcggaggatctcttccctgaagaacaggctgaaaaaggtctccacaaccactggggatggtgtggccagagcgttc

SEQ ID NO: 823384 - DNA, 99 bp, Homo sapiens
ggaaccctggtcaccgtctcctcaggctatgtatgtcaaaaaggatgttcctttgtggcaaaaacatggacggaacttctgaaacatgtgagagaaacc

SEQ ID NO: 823385 - DNA, 98 bp, Homo sapiens
gagtccggaggctggtggagactccctgcatccaggacagtctgagagatgcaggtcagctcctccagtaccacaacttctgagagtcaagatccgtc

SEQ ID NO: 823386 - DNA, 98 bp, Homo sapiens
tatggtggtggaggtggtggcagcagaggtagttatggaggaggtgatggtggatataatggatttggaggtgatgatcgtgcccgggtgttgggagg

SEQ ID NO: 823387 - DNA, 100 bp, Homo sapiens
gttcatgccagcccagaacagagaatcaggatattaccttccaaatgatgatggagaattttatcagttctgttacgttacccataagggtgaaattcgt

SEQ ID NO: 823388 - DNA, 98 bp, Homo sapiens
gtggacacttttcttcagaagctggtcgccgccggcaggctctttaagggtcacccagagactctggagaagtttgacaagttcaagcacctgaagtc

SEQ ID NO: 823389 - DNA, 101 bp, Homo sapiens
ccaccatggcctccgtctgccacacgctgatggtgcagcaccgcatgatggtacccaaagtcagtggtttatcagatactatcattttggatataatatca

SEQ ID NO: 823390 - DNA, 100 bp, Homo sapiens
aacctatacaaagaagtgatgctggaaaatctcaggaatctggtctcattggttcgatcctttggtacagaagacagaccgacagatcgtccaataccac

SEQ ID NO: 823391 - DNA, 99 bp, Homo sapiens
gacgatatgaatatgaaagaattccgagagaacgagcacctcctcgaagtcatcccagtctctgttatctctattcagacctgtataaacataccaatt

SEQ ID NO: 823392 - DNA, 100 bp, Homo sapiens
cgctgctgacaagagtgcaggccacagatgccgacgcagaggcggggtttcaccatgttgcccagactggtcttgaactcctgagcttaagcaatccacc

SEQ ID NO: 823393 - DNA, 98 bp, Homo sapiens
aaggctacgagaggacgattgcagggttcggtccgagcccggtgggaggctcccggagcgcagcctgggcccagcccaccccgcgccggcggccatgg

SEQ ID NO: 823394 - DNA, 99 bp, Homo sapiens
tgaaactcatctgtacctcacttagaaaggtattaatctctggagaagacacatccacagttagcactttcttcagatgctgacgctcggtgaacagtt

SEQ ID NO: 823395 - DNA, 98 bp, Homo sapiens
caagggcccttcctatgggctctcggccgaagtcaagaacaagctcgaattacatctttacaagaggaggtgaagcatctcaaacataatctcgaaaa

SEQ ID NO: 823396 - DNA, 99 bp, Homo sapiens
gacactccttccataatatactgttccaagtgaagaccgtgcctcagcatgtgcagtctttgccaacaaaaaaaattaccaagaaacctattccagatg

SEQ ID NO: 823397 - DNA, 100 bp, Homo sapiens
cccccaaagatcattctgcctgggaaagaaatgaaagtctttccaatgcaggtccctgagtgccagaggtggtggtgttgcttatcttctggaaccccat

SEQ ID NO: 823398 - DNA, 100 bp, Homo sapiens
tccccctcctgctatggagaaggaatcctgttcacgatgctggtatttggaccagcctgcgggtttatcctgggctctttctgtaccaaaatctacgtgg

SEQ ID NO: 823399 - DNA, 98 bp, Homo sapiens
gctgacgtgcccgaactggccagactcctggagatcgacccgtacttgaagccctacgccgtggacttccagcgcagcctcaagtactacagccttcc

SEQ ID NO: 823400 - DNA, 98 bp, Homo sapiens
caggagtcatgagcgacagcggcgagcagaactacggcgagcgggttgtccttctattcaggccactcttcgttttccatgtactgcatgctgtttgt

SEQ ID NO: 823401 - DNA, 100 bp, Homo sapiens
tgttaccaagaggggattgatctgctcctgcaggttctgaaagaagagaagctgaatttggacgacagccagtgggaggacatccacgttgtcaccggag

SEQ ID NO: 823402 - DNA, 98 bp, Homo sapiens
aacgcaggttctctctctattcagccatgtacatcttcatgtgatcagccaggattttgattctccttgccttaaaaacaaaaaacattggaattctt

SEQ ID NO: 823403 - DNA, 100 bp, Homo sapiens
agaaaaaggattttttatcagcgcctcaatctctactcgaagaagaaagagaagaaacgttttctcaggtctctaattaacagaagatggcaaagcccag

SEQ ID NO: 823404 - DNA, 98 bp, Homo sapiens
ggcctaagcagctaccatggcccaggtggccggcgcggcgttgtcccaggcgggttgctcactaccctgggaaatcttacaccttcaagcactgtgtt

SEQ ID NO: 823405 - DNA, 51 bp, Homo sapiens
agggactgggactgcctacattgagagtgttctgccagttctggataatcc

SEQ ID NO: 823406 - DNA, 100 bp, Homo sapiens
atattagcgctagccctgcagacagaggtgtgctgacgacctgctacaacagaacggacaaggcaaaatctcagcaagttcggacctctagtacaataag

SEQ ID NO: 823407 - DNA, 100 bp, Homo sapiens
gacaggatggattgccagggcttcctggcccgaaaggagagcctggaaatgtttcaacgtgcgcaagcgttgcggcggcgggcagaggactactacagat

SEQ ID NO: 823408 - DNA, 100 bp, Homo sapiens
agtctccaggcccagtacatggatgcttgttggatgaattaatgaaccttgacccacaccaagatgatgaggagtctgatgaggaagctgtgaagaaaac

SEQ ID NO: 823409 - DNA, 100 bp, Homo sapiens
gcattctctccagtggcaagggaaaatatagcaggactgggcacttggagtcctgcatgccaaaatcattgcagctataacattgatgggtcctcagtgg

SEQ ID NO: 823410 - DNA, 98 bp, Homo sapiens
aagatccggctcacaggtggagagccgcttatccggccggacgtggtggacattgtggaggctgacccgcggctgattgagtccctctcccagatgct

SEQ ID NO: 823411 - DNA, 100 bp, Homo sapiens
attaaccgggacactccatcgcctcagggcgcctcggaaaccaggagatcatgaggtcatgaatgaaaaacttcagcactgcatggaactaacagatcta

SEQ ID NO: 823412 - DNA, 98 bp, Homo sapiens
acagtacgcctacttctataaagtcatccaggtctatgaaggcctagacatcatcaccaacaaggtttctgcccaagagcagagaatctgccggcacc

SEQ ID NO: 823413 - DNA, 98 bp, Homo sapiens
tacgtctccaggatacctacaatttggatacagataccatctcaaagggtaatcttccagatggggaaattgaggcagagaagccaagacatgtgcta

SEQ ID NO: 823414 - DNA, 100 bp, Homo sapiens
tctcttctcgccctggcggggaaggtattgttgcagcatctggcagtgagactgaggatgaggacagcatggacattcccttggacctttcttcatccgc

SEQ ID NO: 823415 - DNA, 99 bp, Homo sapiens
ccggagccgcagaggctcccgggctggactcaggcttctcagacctggaatggccaaatatcaaggtgaagttcaaagtttgaaactggatgatgattc

SEQ ID NO: 823416 - DNA, 100 bp, Homo sapiens
ccagtcagtgtttctcttcattgacagacagcacttgcaggtgctggagaatctggtaaaagcaccattgtgaagcagatgaggatcctgcatgttaatg

SEQ ID NO: 823417 - DNA, 100 bp, Homo sapiens
gaggctttacagctgcatgagaaccgtcaaattggccagtcggctttgaacatcatcgagaagcactttggtgagcctgaaaacagcctcctgtcatccc

SEQ ID NO: 823418 - DNA, 98 bp, Homo sapiens
agcctcaagaaaccagtaacagattgtgttatttcaggcctgtccttgatagtggtcgggaagcgaagtcccggagaagaacgtgcctgccggcgccc

SEQ ID NO: 823419 - DNA, 100 bp, Homo sapiens
gaggctaagaaagtggtgaatcccctgtttgagaaaaggcctaagaattttggcattgatggctttggaagattcagaacagaagcacaatcttttacat

SEQ ID NO: 823420 - DNA, 99 bp, Homo sapiens
tgaaaacctgagtgatcctgtgtctcccgtggtgcgagcctttccgaaagatgaatgagaaaggtgtcttactctgggataaaatccataagttgcaga

SEQ ID NO: 823421 - DNA, 98 bp, Homo sapiens
aagactctggagccagtcttgaggtcctacatctccgaaagcaagctcttctagaagttggcctggttgcagtatgcttgaaatctgggatgtggaag

SEQ ID NO: 823422 - DNA, 143 bp, Homo sapiens
ggggcaaagacctacccagatactgattccttcaacactgtagcagagatcactgggagcaaatatccagaacaggcaatctataagatggtttcctctgtaatgaaaatgcctgaagatgagtcaaccccagagaaaagaac

SEQ ID NO: 823423 - DNA, 100 bp, Homo sapiens
tggtcttggtagcggaggcacccgaatgctgcccgggtgaggagtgaaacctcggtccggctgggctattgatccctttggacactcaccaacaatggct

SEQ ID NO: 823424 - DNA, 100 bp, Homo sapiens
catggcaaagactggcaaaagcacaaggattctcgctgtgacagagacaacaccgagtatgagaaagttgatctctctaatgtattagatcttcatgcct

SEQ ID NO: 823425 - DNA, 100 bp, Homo sapiens
tccgaggtcgccgcccactactgcaagaaatatagtcagaatggcggcagtggagcatcgtcattcttcaggattgccctactggccctacctcacagct

SEQ ID NO: 823426 - DNA, 98 bp, Homo sapiens
atagttgtgattctctcagaattttttaataccacatggcaggaggcaaattgtgcaagctgcacgtgggaatttggagccatggtgaactacatcaa

SEQ ID NO: 823427 - DNA, 100 bp, Homo sapiens
tcatgtacaaaattacaagtggaaatccacaaggattcttttcaatacatcctaaaacagctgacctcaagagaatttgcaagacaatagttgaggctgc

SEQ ID NO: 823428 - DNA, 99 bp, Homo sapiens
cgagaatgcgagagaaagagcctccgtcaccacatacaacagccaactcagtttataaatccagaaacacctggctatgttggatttgcaaacctcccc

SEQ ID NO: 823429 - DNA, 100 bp, Homo sapiens
ggcatctcccggaaagtgcgttttaaggcgaagtcatgatgtattctcccatctgtctcactcagtaacagtgtatcatgtatgccactgattccagggg

SEQ ID NO: 823430 - DNA, 98 bp, Homo sapiens
gaacagaaccctgggaggggaattccagcaccgcagcaaccactccagaaactttccctccttcagaaccaaaaacttttgctagaaaatcagctttt

SEQ ID NO: 823431 - DNA, 101 bp, Homo sapiens
caacaatatcattctccttcaagggaataaaattttctaaggttttgcacactagggaccaagaagccctcggggacactgctgagaaaagactgccgaag

SEQ ID NO: 823432 - DNA, 100 bp, Homo sapiens
ccatcaaaaagtgattaagcagagaatggagaagaaggttgattccagaacagtgcccaaacctcgtgttaaaaagcagccgaagactcagcgtggaaag

SEQ ID NO: 823433 - DNA, 100 bp, Homo sapiens
agagaagcagaattatacctagaagtctactaatggacagttagtcacccacctacatgttgaggatctcatagatcagaacatactggagcctgtaacc

SEQ ID NO: 823434 - DNA, 99 bp, Homo sapiens
gaaggagaaacaaacttcagctctgaaatagaagatcttgcaaggggtattttaagcctggaatattgtgtgggtattattggtggcaaacctaaacag

SEQ ID NO: 823435 - DNA, 100 bp, Homo sapiens
ccccagttaagctgcgctccgggagatgtggaattagaagaagctattagaagaagtcttgaggaaatgtaattaaagatattaccacacaacatcaagt

SEQ ID NO: 823436 - DNA, 100 bp, Homo sapiens
atggcgaatgtggctgataagtctagattcaccaatgtcaaacagtttattgcaccagatggcaggagaggagaacttcaaggaagagctcagatcccag

SEQ ID NO: 823437 - DNA, 99 bp, Homo sapiens
ctgtaattgctgaacttaaaaagcagtctaaacctgtgaccacccctgaagaaattgcacagatgaagttggagcccttgtttttgacattggatccta

SEQ ID NO: 823438 - DNA, 98 bp, Homo sapiens
agagatcggcggagaccctcgaagtgcgcaaacttgacactcaccctgaccggaaaagaatacttgagatccatttgtaaggaaagaaaaggaagcaa

SEQ ID NO: 823439 - DNA, 99 bp, Homo sapiens
gaacttagcagcagctccactgaacagataagggtttttctatatgagtggagaagacagctgttaccagggaggtcatacaacatttttttaggatgt

SEQ ID NO: 823440 - DNA, 100 bp, Homo sapiens
aaaatactgaaattgatagcagtttgaatggagtggcaaggaatttactatgccaaaaagaaaaacggagataatatacaacaaaatgtgaagataatac

SEQ ID NO: 823441 - DNA, 98 bp, Homo sapiens
ggaaaagatccctggaatatgaagggacacagtacggtagtcaaacccccagaaaggcctaaagaatgtatttgacgaagcaatattggctgccctgg

SEQ ID NO: 823442 - DNA, 100 bp, Homo sapiens
cctcagcacatggtgggggccacaccatttgccgtggccaggctagagagcagcccgacggccatggaggctgaagagacgatggaatgccttcaggagt

SEQ ID NO: 823443 - DNA, 100 bp, Homo sapiens
tgctgttcagctacgtggaggagctggtggagattcgcgagatcaaagacgctggccttcagacctgatcagactcccaggggcagccaccacatgtatg

SEQ ID NO: 823444 - DNA, 98 bp, Homo sapiens
agtggtcggcttggtgtggtgtgcggaggagctccaggcccgtcggcgcggagctaagaagaaatttcctgacttgtttgtcttcttggaagattcct

SEQ ID NO: 823445 - DNA, 100 bp, Homo sapiens
gggacgtcctcattgtcctcggggcccagatcattgatctgatgatgctggtcatcgatgtgaccaaggggatgcagacccagtcagcggaatgccttgt

SEQ ID NO: 823446 - DNA, 100 bp, Homo sapiens
agccaggccagcggaagatcgtcatgcataaggtttctggtcctcataccgtgtggttgagtgaaatcaaaacttccacgatagcaatgctgattggaca

SEQ ID NO: 823447 - DNA, 98 bp, Homo sapiens
gaagctgagaaagttgccaaagaagccaaagatcttgcacatgaagctacaaaactgtatcacaggtatattgaaattgctataaagcagtgcaggag

SEQ ID NO: 823448 - DNA, 98 bp, Homo sapiens
ttcttcggggtctggtggaaaaacaagcccaagtggctcctccagggcatctgctcggacatcatcatgcagctggacgacgtggttagcagtactgt

SEQ ID NO: 823449 - DNA, 100 bp, Homo sapiens
ggacaacaaaagcctcctacaagagtcctaccaaaaattcatcttggaggcatagtcaagttcctagatcttcatcaatggtacttggatcatttggaac

SEQ ID NO: 823450 - DNA, 99 bp, Homo sapiens
aagaagaaacgggccgcgaaccgcagtatcatgctggccaagaagatcatcattaaggacggaggcacgtcactcagcctctgaagaagcttcgggttc

SEQ ID NO: 823451 - DNA, 98 bp, Homo sapiens
aattgcagccagggatattgagaaacttctgagcaacagatctaaagccctggtgatcatacatctgtcggtggcctgggagacagtttttatgaata

SEQ ID NO: 823452 - DNA, 100 bp, Homo sapiens
tataggcgcagcgccccccagagagagccctcaacaggaaggcatgcatgtgacacctcaggtttccacttgagcggcacagtgacagaacctgcaatac

SEQ ID NO: 823453 - DNA, 111 bp, Homo sapiens
tggagatatttcacaaggtgggccagggtgagaaccagagaatcaccagggaggagttcatcgcggctgtaaaggcataattttgcacgatggcagtcaaatgagagcaaa

SEQ ID NO: 823454 - DNA, 100 bp, Homo sapiens
ttcccatgccagtgctatatggagtgtttctttatatgggtgcttcatctctaaagggaattcagatgaagcgttctgtcagccaccctggttcttgcag

SEQ ID NO: 823455 - DNA, 100 bp, Homo sapiens
aagagtttaatagataattttgctttaaatccagctgaagaagcatctgtagggaatccagaaggagcgttcatgaagatgttacaagcccggaagcagc

SEQ ID NO: 823456 - DNA, 98 bp, Homo sapiens
cacctgaatgaggctggcagccttcccgcagaaaaagatgtttgacacagtgaagcgattaagagaaaaatcttgtttaattgtagcaaccacatcag

SEQ ID NO: 823457 - DNA, 100 bp, Homo sapiens
tatactaaaacacctacagaatctttttgtaccaaggagaactatgccatttttgggtcaggactggagatctcctggatggagttggattaagacagaa

SEQ ID NO: 823458 - DNA, 74 bp, Homo sapiens
aaggaagtgtatcttcatacatcaccacacctgaaagcagatgatacttggaggacagaatatgttccagtgcc

SEQ ID NO: 823459 - DNA, 100 bp, Homo sapiens
gaactactctacggcatctggagcaactggaactttccatcttacctactttttggactttaagaccataaaggacttcctctgctgaggacccaaactg

SEQ ID NO: 823460 - DNA, 100 bp, Homo sapiens
accacagccacccttggtgatgagcctcggaaagtgctcctgcggctgtatggagcgattttgcagatgggagtcgtcgcatggtggatgtcatggacgt

SEQ ID NO: 823461 - DNA, 99 bp, Homo sapiens
aagggagttttccggggccctctcagcaagaacgggaacaaaactctggggcttctgaggagaatggcctgcctcacacgtcagccagaacccagctgc

SEQ ID NO: 823462 - DNA, 112 bp, Homo sapiens
tacagaggagcccatggcatcatagttgtgtatgatgtgacagatcaggatattcatccgttctatgctgatttgatgaatattctctacgacaaggatcattacaagttgg

SEQ ID NO: 823463 - DNA, 99 bp, Homo sapiens
atatccttctcaaccttgtgggatgtgaaaactctgttactgaagatgcggaaaacgccatgcggtacataaatgggacgcgtctggatgaccgaatca

SEQ ID NO: 823464 - DNA, 100 bp, Homo sapiens
ttctggcatcattaacggaccttttaccatgaatagttctactccttctacaggtgtgtatggtgaggaaaatagcagctgaatactatgacaacctccc

SEQ ID NO: 823465 - DNA, 100 bp, Homo sapiens
cggagctcgggcgggtcctacagagacagttatgacagttacggttccacgcaggcgcgggggacgacggcgggggctacacggtggaggtgagcatcaa

SEQ ID NO: 823466 - DNA, 98 bp, Homo sapiens
ttttcaagcctgaaggaaaggcagaactgcctgattacaggagctttaacaggaaacatgccctgaactgtcacagaatgaaaccagcgctcttcagc

SEQ ID NO: 823467 - DNA, 99 bp, Homo sapiens
actgcgggactgcggcggcgccggcctccggggagaaacgaacctactgggttggtgacatttacaagacagagtcttgaagattttccagaatgggaa

SEQ ID NO: 823468 - DNA, 98 bp, Homo sapiens
ctgcgaagaactcctaaacaggtggatccaggtgcaagtgtaatctccatgccactgtatgtgtgtatgacaacagcaaattgacatgcgaatgtgag

SEQ ID NO: 823469 - DNA, 100 bp, Homo sapiens
ggagtctccgcgtcccgctcgctgggagagaggtacctctccttttccctctccctttccctaagggcgtctctggccgagcctctttttgtggaaaacg

SEQ ID NO: 823470 - DNA, 100 bp, Homo sapiens
atcatgggaagcactctcacttattaaagatcttggccttagaaaatttacgtgtatacctgtgtgagaaaatcatagctgagagacattttgatcatct

SEQ ID NO: 823471 - DNA, 99 bp, Homo sapiens
taacatgtatcctggagcgaatcctaccttccaaacaggactgatcctttgaaatactccagccatgactaaaagagaagcagaggagctgatagaaat

SEQ ID NO: 823472 - DNA, 100 bp, Homo sapiens
aggagaagcactgttgttttccacacagaaagtgccgaaggttttccaagttatgacacagcctctgaacaactccacgaggcaggctacgatgcctaca

SEQ ID NO: 823473 - DNA, 100 bp, Homo sapiens
tgcacatttcctgtggggatttgatcttaaaaaacaaaagatttagatccatgtggacagaaacttttgccagctgaggtgggtgtcctggttggcaaag

SEQ ID NO: 823474 - DNA, 98 bp, Homo sapiens
agcggggccgggcctcctgcgaggcggtgctcacagtgctggaggtcggagagatgaatgtcaagatgctggactttgagacgttcttgcccatcctg

SEQ ID NO: 823475 - DNA, 100 bp, Homo sapiens
tgatttgtcggatgaagataagacactttctcagttacagagagcttacgaggaaatatttcagtaaaagcagttaaaaaagaagtagaaaagaaactcc

SEQ ID NO: 823476 - DNA, 100 bp, Homo sapiens
agcagcaaccctatcatcgtctcctgtggctgggacaagctggtcaaggaggaagaacgtgcaaaacgtgaggagctagagcgaatactggaagagaata

SEQ ID NO: 823477 - DNA, 100 bp, Homo sapiens
acaattataaaatgtcagcttttaaggatctgttacctaaagcaataaaaaatggccagaggatcagtgtccgatgaggaaatgatggagctcagagaag

SEQ ID NO: 823478 - DNA, 99 bp, Homo sapiens
agaacgactctgtctgaagcttgttcagcctggcttccttgagcaagcaacttattcacagatcatggaagggaagtggttgctgtgtatgttactggt

SEQ ID NO: 823479 - DNA, 98 bp, Homo sapiens
gaaatcctactccacccataggaagacccacgtccacacctactcctcctcaggtgcctttgaacccttgtgcactttttagttagatctttattaac

SEQ ID NO: 823480 - DNA, 98 bp, Homo sapiens
acagcctcatcacccggctgctggagggtaagaaccttgatgctgtccatgatatcactgtggcgtatcctcacaacattcctcaatcagagaagcac

SEQ ID NO: 823481 - DNA, 100 bp, Homo sapiens
ccatcccggtgcacacagttcctctttctgaagatcagtgagagtagcatgtttgtctccaagagacgtttcattttgaagacatgtggtaccaccctct

SEQ ID NO: 823482 - DNA, 100 bp, Homo sapiens
tatgcccaattcttcaactcctaccagccagatcaacacaattgataaaaatccgttaacacaggcagtgcctaaatgtcagcgctgggagaaactgcag

SEQ ID NO: 823483 - DNA, 100 bp, Homo sapiens
ccaagctccactgttcagatgcaaagatggtcagcaagaggatgaagccagtaaaattgaagctctgcacaagagaagaaatttacttgcagcattttgt

SEQ ID NO: 823484 - DNA, 100 bp, Homo sapiens
agacacaggtcactcaaataggcagttccgcctggtggtgaagacagccctgaagctgctgctcgtctttgtagagtactcggagtccaacgcacctctc

SEQ ID NO: 823485 - DNA, 100 bp, Homo sapiens
agctccggctcccgctgcctgcaccatgtccgccagagttggattggatgctgctggcaagacaaccattctgtataaactgaagttaggggagatagtc

SEQ ID NO: 823486 - DNA, 111 bp, Homo sapiens
cacaggaagtacaggagtacaggttttgacacaagaacagttggccaatactggtgcccaagcctggattaaaaaggtgcaaattgagcatgacccagaattagaaaaaga

SEQ ID NO: 823487 - DNA, 99 bp, Homo sapiens
gtgtgacaaagggtatcatactttttgtcttcaaccagttatgaaatcagtaccaaccaatggctggaaatgcaaagaggatacagaccacaattacta

SEQ ID NO: 823488 - DNA, 98 bp, Homo sapiens
cctactgaacccggcagcgacggcaccatgtcagacaaggaaattactcatgatgtcaaagactttatattcagagcaccaatcaaattaagcaagcc

SEQ ID NO: 823489 - DNA, 98 bp, Homo sapiens
ccatgctgggtgtgccccagctttaccgcaaccaccgccaccagtccacggagggcatgagaggctgacccgcggctgattgagtccctctcccagat

SEQ ID NO: 823490 - DNA, 100 bp, Homo sapiens
gtgacagcacaggtcacagtaaggccaaaaatgtgcatactcacagagttagagagagggatggtgagtgaagatagtccaagtcctaagagacagcgcc

SEQ ID NO: 823491 - DNA, 98 bp, Homo sapiens
aggcccagaagcaagtcaagagcctccagagcttgttgaagatgaactgcctctcctcctccctgcctggggagcccagtggccagggaggggagtgg

SEQ ID NO: 823492 - DNA, 99 bp, Homo sapiens
ctaccttcagctcccctcaggacccaccactggagacaaaaggacttcattcacctctcagccacccatccctgcagtcctccctaagcaatcccaacc

SEQ ID NO: 823493 - DNA, 99 bp, Homo sapiens
cggactcgggcgccgctgtagccgcccaccggtttttctgccacttttgcaagggcgaggtcagccccaaactaccggatgaactggcatctttaaaag

SEQ ID NO: 823494 - DNA, 100 bp, Homo sapiens
gcttcagcatcgtcacggacactcctgagctacagagactgaagaggactcaggagcaaatcagtaatgtgaagctgtacttcacaaaaacagtagagga

SEQ ID NO: 823495 - DNA, 100 bp, Homo sapiens
tcattctcatatttcaccaataaagagttcccgattttgaaatgctgggctcactcagaagtggcagccccttgtgctttggagaatgaggatatctgcc

SEQ ID NO: 823496 - DNA, 100 bp, Homo sapiens
cctgtctgctctgtggactcaacagtttgtggcaagacaagctcagaactgagaagctgtcaccacaggccatgcgggtgcagacggagatggagctacg

SEQ ID NO: 823497 - DNA, 98 bp, Homo sapiens
gaaacctgtcaggaatacgagcttctggaacaccttccaccatgaccacctcagcaagttcccacttaaataaaggcatcaagcaggtgtacatgtcc

SEQ ID NO: 823498 - DNA, 98 bp, Homo sapiens
agcacggagaggcgccagtcggagcctcatggccttttcgaggactttatcagctcagactccaaggtccgcgcagccacccgggaacagtcagaata

SEQ ID NO: 823499 - DNA, 99 bp, Homo sapiens
tgagctgttcctcccagctacgagctgccccagccatacacactgctgctatggatatgctgggaggacctggtatcgaaagccagtgtagaaaagttg

SEQ ID NO: 823500 - DNA, 99 bp, Homo sapiens
tcagcctggctgccggcttgttcttactggccctgagtctttgggggcagcctgcagaggctgcgggtgatgttgcaaatgaagtggagactgaacaaa

SEQ ID NO: 823501 - DNA, 98 bp, Homo sapiens
tcatgcccaaatcccggaaactccagcgtgtctccagccgtgaacaccttccaccatgaccacctcagcaagttcccacttaaataaaggcatcaagc

SEQ ID NO: 823502 - DNA, 98 bp, Homo sapiens
gtgaggctttagcccgcttcgagcgcccgggggcgaagagacggaggatgcaaatgaagaagccccattgagggaccgctcccacatcgagaagaccc

SEQ ID NO: 823503 - DNA, 51 bp, Homo sapiens
gcgcaaagcttgcgaggtggcgttagctcgaaggtccatgtgttttgcaaa

SEQ ID NO: 823504 - DNA, 100 bp, Homo sapiens
tctgaagcagtggccgacatcaagttttcctctgcagagagagtctacaaggagattgaacaggtggttggcccacatcgccctccagcgcttgatgacc

SEQ ID NO: 823505 - DNA, 98 bp, Homo sapiens
cagttttgttctgctccagctgttcgaaggtgatccagaccctgcaattgtcaatggggtttattggtctgaatctctaaacaaagtttttgtagata

SEQ ID NO: 823506 - DNA, 98 bp, Homo sapiens
gatgagggaggtgcccctgcgttgtaccatccgcctgtgggacacctaccagtgcatcccctcggcaattgtgagcttcaccgtctccaggaggaacg

SEQ ID NO: 823507 - DNA, 124 bp, Homo sapiens
cggccacccggggagacgtcttagacagtcgtggttcctgtgatctgtgtcctctttgcagaagctctccatcctgctgaaaaaccaagatgatcttgataaagcaattgacattttagataga

SEQ ID NO: 823508 - DNA, 100 bp, Homo sapiens
ttacatctgagaacaatgaactgtggaagaaggtggagaccctggagaatgccaacaggccacgtgctgtacgccgacatcaagatggagaatgggaagt

SEQ ID NO: 823509 - DNA, 98 bp, Homo sapiens
ttgggatattcacaatgtatggaaacagagaatgatatggaacctagcaaagctgttccactgaatgcatctaagcaagatggacctatgccaaaacc

SEQ ID NO: 823510 - DNA, 100 bp, Homo sapiens
ggatcgctacggaccttaaaatacccgcaacagccccttcgtcccaagccagtactgatgcaggcactgcaggagccctgactccacagcatgttcgagc

SEQ ID NO: 823511 - DNA, 99 bp, Homo sapiens
ggcaaggtggtgtgcagcagcctggaactcgcgcaggtcctgcccccagatactctgcccaaccgcacggtcaccctgcaatgattcgtgtgaatacct

SEQ ID NO: 823512 - DNA, 98 bp, Homo sapiens
gacttgcatctctttgggcccaaccagcgcccagccccctgctatgacccttgcgagaatcccactgtaagatggggttatgtcgctatgaagtttgc

SEQ ID NO: 823513 - DNA, 134 bp, Homo sapiens
cagcgggagcagccggaacgatgccggccgtgagcctcccgcccaaggagaatgcgctcttcaagcggatcttgaagtgaacatccacttgcccagctttactgccattcaatcatggaacaccatcattttga

SEQ ID NO: 823514 - DNA, 133 bp, Homo sapiens
tacaccctgcatgcttcgaaactctgacagcatactggaggccattcagaaaaagcttggagctgccactccgaaaccagtcccagaacccgagaaacagacagaccatacagttaaaattgctggagtcatc

SEQ ID NO: 823515 - DNA, 98 bp, Homo sapiens
aaaaagttgaagatatcaatggatgtcctagaagtcagtctcagatggtttaatagactacaacttccactgtttccgaaaagctattcatgaggttt

SEQ ID NO: 823516 - DNA, 100 bp, Homo sapiens
cacttgtcaacttcctcttcagtcatcagtatttccatggagaatgattatctgggacctcgaagaattgagagtctacaaaaagaagatgctgattggc

SEQ ID NO: 823517 - DNA, 99 bp, Homo sapiens
actcccttgacctcaggaccctacccagggttctagaaatccaggcaggcatctatcttgaaggcaattaagttggaatatgcaaggttggttaagttg

SEQ ID NO: 823518 - DNA, 98 bp, Homo sapiens
ggctcggagtccgctggccacccagctgagaggagaggcgcccccggggacggaaagcgtctctagcagctgatatccccagacttggatatagttcc

SEQ ID NO: 823519 - DNA, 100 bp, Homo sapiens
taataggatggcatctaatatttttggaccaacagaagaacctcagaacatacccaagaggacaaatcccccagccttgaaaagatcttttgaggtcgag

SEQ ID NO: 823520 - DNA, 100 bp, Homo sapiens
gggcagcaacggcgacatccagcaaggaaggtgggagtcaatcattttgacaagtctcctgaaaggaacagctagcaggaactgaaacctttttccattt

SEQ ID NO: 823521 - DNA, 100 bp, Homo sapiens
tgattactgcaagtgctggatagcagacaataggcctattctcattcagattgtggatgcctcgtcagtcatcacttgggatttcgacgtgtgcaaaggg

SEQ ID NO: 823522 - DNA, 99 bp, Homo sapiens
gcccatgaggaggcctggggaccatgggctccaggatcaaattacaggagcttattaatcataagaaggctgaggacacagagaagaaagatgagccca

SEQ ID NO: 823523 - DNA, 100 bp, Homo sapiens
acatcagtgtgggaagccaagcagatacaaccccagagttccaaaagttggtttgcatggacagattcagagcagtcccacagagcccaggtcctgttaa

SEQ ID NO: 823524 - DNA, 100 bp, Homo sapiens
gaaagccaagatccactaccggaagaagaaacagctcatgaggcatttcatccttcatgaagccattcaggattttgaattgcatatgagtgcttggctc

SEQ ID NO: 823525 - DNA, 98 bp, Homo sapiens
agggagcgagagctggagaagctgggattggagattccacccaaacttgctggtcactgggagctcaagaggtttggatatggaccttcttcaattcc

SEQ ID NO: 823526 - DNA, 100 bp, Homo sapiens
gagattgctatcgacaacacggcttttatggacgagttcttttctgagatgtcaccaatcctttgcagataatgtatagtgtgtcacaaggacatcgacc

SEQ ID NO: 823527 - DNA, 99 bp, Homo sapiens
tctgaaggaagaaaggaaaattctggaaaacgcccagagatttaatcaggtcgtcatacctcagaagaaaggcaagaaggctgctgcaacctcagcaaa

SEQ ID NO: 823528 - DNA, 98 bp, Homo sapiens
ggcgtcttctacctgacgctcgtcctcatcctggtcactagcggactcttcttcgccttcgatgcgacttcatgatagcatatcagaagagggctttc

SEQ ID NO: 823529 - DNA, 100 bp, Homo sapiens
acattgactgcacatggaacattgagggtgtccgcaatgttgccagtgtctgtctgcagattggctacccaactgttgcatcagtaccccattctatcat

SEQ ID NO: 823530 - DNA, 98 bp, Homo sapiens
aagatggtacagcccagaagagatggttactttgaagaaaaggttaagaagttcttacaagagttctaccaggatgatgaactcgggaagaagcagtt

SEQ ID NO: 823531 - DNA, 100 bp, Homo sapiens
tttgttatcttctggataaatctaagcaactgttcaatgggttaaggttttgaacgaagaatgtgatcagaactggtacaaggcagagcttaatggaaaa

SEQ ID NO: 823532 - DNA, 98 bp, Homo sapiens
aagatccactaccacaacccacctgagctggccatggaggccctggagggaactctaatgatccaggacaaagaagttaccctggagtatgtatcaag

SEQ ID NO: 823533 - DNA, 100 bp, Homo sapiens
caagaacagtaaagttggaacacagcagagggtgtgtaataaaatacagcttcatgattgtatccaaaaaaccttgaatgaatggagttcccaaatcaac

SEQ ID NO: 823534 - DNA, 98 bp, Homo sapiens
acaaccaggcaatgctggatagataccgaattcttatcacaaagattcacggcccttccacagtaccttccacaataccagtgctaatctgactgaga

SEQ ID NO: 823535 - DNA, 98 bp, Homo sapiens
ctgggttctattttccctcctcaaactgactttgcagccacggagagttggttgaatctggcgatgtggaacccatggatatggagggctgactatat

SEQ ID NO: 823536 - DNA, 100 bp, Homo sapiens
gcaccagttacacaaggacttctttatccgagcgctggattgcatgagaagatggatatcagtattgacaaatagcaaagaagaggccctaaccatggcc

SEQ ID NO: 823537 - DNA, 99 bp, Homo sapiens
ggcagctcgtcggtgttctgcaaagactgcaggaagattgtaaaccatggctgtgtggatacaagctcagcagctccaaggagaagcccttcatcagat

SEQ ID NO: 823538 - DNA, 100 bp, Homo sapiens
cagcctcctcagtagctgggattacaggtttcatttagtggagaaattgggtatgacctcggaggagtcaagaaagagttcttctactgtctgtttgcag

SEQ ID NO: 823539 - DNA, 99 bp, Homo sapiens
gggaaggagcaggatttagaggaccactagttggaccccatcctcgtgctggaggaacaggaaatctgaaatagagtactatgctatgttggctaaaac

SEQ ID NO: 823540 - DNA, 100 bp, Homo sapiens
gtcattcatttttgatcaggagaaagaagacagccatcatttgaaagaattggagcgttattcagtatattaatgtcttattgataatggcagaacatcc

SEQ ID NO: 823541 - DNA, 98 bp, Homo sapiens
aataattctccattgagaagagagaagaacattctcgaatacctagaatggggaaaagcttttgacatcacctatgtgcgtctcaagttccacaccag

SEQ ID NO: 823542 - DNA, 98 bp, Homo sapiens
tgacatctacctccatcaggaccccagatgtctgacagccctgtgtgacaccaagataagtaactcaggacaatcatctactgtgattgagaacattc

SEQ ID NO: 823543 - DNA, 99 bp, Homo sapiens
ggaagtggaggaggcggctataataatagcaaacatcgatggcctactggggataacattcatgcagaacatcagagtcagaatgagtatattgctaac

SEQ ID NO: 823544 - DNA, 100 bp, Homo sapiens
cagagcccgtttttagcataaagaacctctaaaatgcagacctccagctctagatctgtgcacctgagtgaatggcagaagaattacttcgcaattacat

SEQ ID NO: 823545 - DNA, 100 bp, Homo sapiens
tgccctgcgggtgggcatgggaagtggctccatctgcattacgcaggaagatctcctgggaggcccccgtggagaagaagactgagtgtatccagaaagg

SEQ ID NO: 823546 - DNA, 102 bp, Homo sapiens
cgagatccagttcctgcgaactctccgacagttagttaatatgtgcatcaacccagatccagagaagcgaccagacgtcacctatgtttatgacgtagcaaa

SEQ ID NO: 823547 - DNA, 98 bp, Homo sapiens
gagaaatccaaggacttcaagaaccacgtgatcaagtaccttgagacactcctttactcacagcagcagattcctagaggggagtgcctgcgagcctc

SEQ ID NO: 823548 - DNA, 100 bp, Homo sapiens
ggcggcagcctggagagtcgaagcagcagctctcgctccagaagcttcactttggtagacccacaacttgtggatggacacctttcatattttcttggag

SEQ ID NO: 823549 - DNA, 100 bp, Homo sapiens
gggcagcgctgctgggatggcgcgggccgggccggcgtggctgctgctggcaatctggatggagatcttataacaatttttgatagttctgacctttcct

SEQ ID NO: 823550 - DNA, 98 bp, Homo sapiens
gcgctcggcacccagctggcgggggtccataggctgctgcaggcgccgcacaagtactggagaaaatgaaactgggattgacccatcaagatgcttgg

SEQ ID NO: 823551 - DNA, 100 bp, Homo sapiens
ggcgtgcaggactcgggtggctctgaggtcgcctggggaccccagaagaattatatccagatcgagagacagaagattctgaaagggttcaatgaaatga

SEQ ID NO: 823552 - DNA, 98 bp, Homo sapiens
agcaacgatattgccctggtccacctctccagtcccctgcccctcacagctggggaccgctccttggcagatgtcatcatccatgagatctcccacag

SEQ ID NO: 823553 - DNA, 98 bp, Homo sapiens
cgtctctctgctgcggcgcggggaccgctgtgctctcgatccgggatcagttgaaggaagaggagatccacatctaccagttccccgaatgtgactct

SEQ ID NO: 823554 - DNA, 98 bp, Homo sapiens
gggtacacaaatggagtgaagtgaatacagctatcaaaatgatcccaggtgtgttccagagaacaagccttcagacatttgctatattgacgctgagc

SEQ ID NO: 823555 - DNA, 100 bp, Homo sapiens
agaacctgcgagccgacaacgccttcatgctgctcacgcaggtaactaggatttctacctcaaccgcgagacctatgcaaggacggtgtggaccaactcg

SEQ ID NO: 823556 - DNA, 100 bp, Homo sapiens
ctgtagcatcttctcaattggacagtacatctgtggacaaagcagtacctgaaacagaagatgtgcaggagaagctgctcgagaatgtcgcagaaagaag

SEQ ID NO: 823557 - DNA, 100 bp, Homo sapiens
gattcattccacttaaaacctgaaaacattggaccacacaaagtcttactggtttccatggatctcaatagtgccagcactgttgttcttcaggtgttaa

SEQ ID NO: 823558 - DNA, 100 bp, Homo sapiens
ttggccttggtggtctcaactgtggaaaccagctccacctggaggggaacttcctacaccgcctccccagcgaggtcagtgccctgcagcacctcaaggc

SEQ ID NO: 823559 - DNA, 113 bp, Homo sapiens
ccagataaaggaggtgatgaggttatgttcatgaggatagcaaaagcttatgctgcgtgcctggaatacttattaagaaacgatgcaaatccagggatccgtgataagcaagg

SEQ ID NO: 823560 - DNA, 136 bp, Homo sapiens
tgaagagcgactgtccttctatgagactggagagataccacgaaagaatctggatgtcatgaaggaagcaatggttcagatggtcagtaggacagaaggtaacattgatgactcgctcattggtggaaatgcctcc

SEQ ID NO: 823561 - DNA, 99 bp, Homo sapiens
catcttcagcctagaggtacaagagcttcaggctgcaggagaccggcttttggcttcaagtctggatagtcagaagtttgtgacagtgccctccagtaa

SEQ ID NO: 823562 - DNA, 100 bp, Homo sapiens
atctaacagccaatagaaaagcagaaagccgcctcttggtttgcgtcctgcactgaaaggaaatgacggattttgaaatgagcagatttgcagaaaaact

SEQ ID NO: 823563 - DNA, 101 bp, Homo sapiens
cccaggctgatgggaaggagcacccaggagctgaaggtatcgaaggatgatcgcagtgatgtggagagcagctcagaggaagaagatgtgaccacctgcac

SEQ ID NO: 823564 - DNA, 98 bp, Homo sapiens
gccgccggcccggacatggccgccaacatgtacagggtcggaggcagttgaagatgactttgtggaaatgcggaagaacgaccctcagagcatcactg

SEQ ID NO: 823565 - DNA, 100 bp, Homo sapiens
gctaagccatggctttggaaattctctaattgcttttctcgtcctgagcagacgctgccacatagtccccaaacgctccatttatcttaaagaaattgga

SEQ ID NO: 823566 - DNA, 99 bp, Homo sapiens
agggaacttagggggctcccgcctccccggccacgcgagcgggaacagtctcctccactcggagcgatgtgcactgggaactacacctttgttccttac

SEQ ID NO: 823567 - DNA, 98 bp, Homo sapiens
cttctccgccatgcaaggctggcgcgtctccatggagttcttcgtgccatgaaggaggacagtgaaaaagttccgagcttgttaactgattatattct

SEQ ID NO: 823568 - DNA, 100 bp, Homo sapiens
gctggggctccctgtatgcatggtgtggggttggtgtgattagcttcgcagtctggaaagctttaggagttcacagtaaccagaggcaggagaagtgtcc

SEQ ID NO: 823569 - DNA, 100 bp, Homo sapiens
ttctggcactgcactgggtaggaaaaagatgacacccccaaccatggttgtgaagatgctagcgacacatcgctgttgggagttcttcctgcctctgaag

SEQ ID NO: 823570 - DNA, 99 bp, Homo sapiens
aaaaccagttggtggtgacaagaacggcggtacccgggtggttaaacttcgcaaaatgatgtggactttcaccctctccctaaaaagatcaagaacaga

SEQ ID NO: 823571 - DNA, 100 bp, Homo sapiens
attgtgactgcctgcttgcaggctgtgtcacagaagagaatgccacaccagaggaatataatacagttgtacagaagccaagacaaattctgtgtcaatt

SEQ ID NO: 823572 - DNA, 100 bp, Homo sapiens
ccgactccttctcccgcacctccagatcttgcagccgctttttgaagggaaccgcgggctctgccaggagagaagactgttctgcctcctgggggcattg

SEQ ID NO: 823573 - DNA, 98 bp, Homo sapiens
tcagacccagcagctcccctcccactgtggctcccgcatctgcctccctgccccagcccatcctctctaaccaaggcacccggtactgagctgactag

SEQ ID NO: 823574 - DNA, 98 bp, Homo sapiens
tgctgtctggatccagagacaagactattaagatgtgggatgtcagtactggcatgtgccttatgaccctcgtacttatatactctggatttcccaga

SEQ ID NO: 823575 - DNA, 100 bp, Homo sapiens
acctaatccgcgagacttgctaagaatttttgagagatatcttcaatctcctgtttttgttgccaagtctaaaggaccgacaacagccaaagtgcaaatc

SEQ ID NO: 823576 - DNA, 100 bp, Homo sapiens
accaactagagataaaaataccagaaacatacccatttaatccccctaaggactttctgaagaccttttcccccgatgtcttccggttcttctgcctgcg

SEQ ID NO: 823577 - DNA, 100 bp, Homo sapiens
atcatcaccaggctgcttactggaaactggatgcagcaaggaaataggatttaaccgctctctgcctcccaggataaggagccccgtggaatcatccctt

SEQ ID NO: 823578 - DNA, 98 bp, Homo sapiens
gactctggaccgacgtgatgggtatcctggtgcccaaatgtgagtctgcaaaagctgccagaacagtggctatggagtgttttagaggaaattaaatg

SEQ ID NO: 823579 - DNA, 99 bp, Homo sapiens
gctgaggaggccgaaggcatcggggacaaggaaagaccacagcaagattctttcattcgtctcctcctagcctgggggaccaggctcgaactgaccctg

SEQ ID NO: 823580 - DNA, 50 bp, Homo sapiens
ctgcctttgagcggactcccttttaagcagtgcctgatttgagatggggt

SEQ ID NO: 823581 - DNA, 98 bp, Homo sapiens
agtgtggacggggccaccggctggagcggatcccacacctccggaccgagggacgcgggagcatctttccttgaagaagtacattattgacattgtgg

SEQ ID NO: 823582 - DNA, 100 bp, Homo sapiens
gagagcgctacggctacggcctgggcactggtggctacagctacatcacgggaggaggaggtgctgtccccggcataggtccatctctgcagaagccatt

SEQ ID NO: 823583 - DNA, 99 bp, Homo sapiens
ttcagtactgtgggtgatatttgcctttagtgcactcttctccttcacagtaaagtggctgaccagaacttctgactcacagtaccactgaagttactc

SEQ ID NO: 823584 - DNA, 100 bp, Homo sapiens
gcgaccggcaactactttggattcacccacagcggggcggcggcggcggcggctgcggcccaatatagatactccatccgcaggaccagtgacaagggcc

SEQ ID NO: 823585 - DNA, 111 bp, Homo sapiens
aaaactgggtgcagagggttgtggagaagtttttgaagaggtttgaatggggatgtgaatgttaatggcttatctactgtatctcacactactacttcagggattttgaac

SEQ ID NO: 823586 - DNA, 98 bp, Homo sapiens
tcgggcgttcagccgctcgctctccgccttccagaaggatttttagactctgaggagcagttggagctaatccacattatggaaatggaaaccaccga

SEQ ID NO: 823587 - DNA, 100 bp, Homo sapiens
tgtggattttcaaataggaaaatcaaaaggcccaaagagacagctcactgaactcccccactggaaaggattctgaaagaaatgaagtcagccctcagaa

SEQ ID NO: 823588 - DNA, 98 bp, Homo sapiens
tcagcactggaaacgaatagaaggtgctcttaatctgttacagtgtacatgggaaggcagtcagacatatttccaacatttgggtcaaaaccttgtcc

SEQ ID NO: 823589 - DNA, 100 bp, Homo sapiens
atcattcgtcataccattagatctacaaacaggaatgccagagctgaacggacagcttcagaaataaattaaacctcaaatatttgttgttaagtgatct

SEQ ID NO: 823590 - DNA, 100 bp, Homo sapiens
gttttccagccattggtttaccgtcatgatatccctgtatctgctgctgctgctcataatgcagtgtctcatatgttgcttagctgctctcaaactcctg

SEQ ID NO: 823591 - DNA, 100 bp, Homo sapiens
tgagaatccctaaggcggggaaccgcagcgcagtgacagtgcagaaccccggcgcggcccttgatgtgttttcgcattataacaaggacctgttgacaga

SEQ ID NO: 823592 - DNA, 100 bp, Homo sapiens
agatgtaaatgtggcagcatgcaaagaaaactttcagagtaagcgcctaggatcccttaataagtttaaggccaaggcccgttccattcttctagcaact

SEQ ID NO: 823593 - DNA, 100 bp, Homo sapiens
cactgaaaccaccgtggaagtcgcctggtgtgaactgcagaacatccagtcatggataaaaatgagctggttcagaaggccaaactggccgagcaggctg

SEQ ID NO: 823594 - DNA, 142 bp, Homo sapiens
tgtcaatattgcagagcatcttggtggaattggaggggatctgtactccgcagctattgtctgggaggagcagtaatagaggacacatctcttaactgggttgctctaagaactgatgtctaaaccgtctcagcatggcctg

SEQ ID NO: 823595 - DNA, 100 bp, Homo sapiens
ttttcatggattttcaatgtatgaattcatccatgctgctatgaggccagatgtcattacagaaactgtagtggaggtgtcaactgaagagtctgaaccc

SEQ ID NO: 823596 - DNA, 98 bp, Homo sapiens
atgttcccagaacattgcacgatgcctcctggaatagcgggttttgcagcaattgttgcatatggattatataaactgaagagcaggggaaatactaa

SEQ ID NO: 823597 - DNA, 105 bp, Homo sapiens
cgacaggaggtcatctgtccttgtgccagctcgccagaggccctcactgtggccatccggaggctaaacatatttttgactggtatgaacccattctactttcat

SEQ ID NO: 823598 - DNA, 98 bp, Homo sapiens
caggaagcagttggaagagatgtaccagaccggatcactaaaccttaataatcaatcacatagtccaaacaggagctttacagaaatgcactgtatga

SEQ ID NO: 823599 - DNA, 98 bp, Homo sapiens
aactattccatgattgttatgttcactgctcttcagcctcagcggcagtgttctgtgtgcaggcttacatcaaaatctatcaaggagaagaacttcca

SEQ ID NO: 823600 - DNA, 100 bp, Homo sapiens
ttgaaaatgaaattgcaaataaagattctatgcatcgacagatgttgatatatcactacttgtgtcttttaacaaaatgaaaaaattgactactgatggg

SEQ ID NO: 823601 - DNA, 99 bp, Homo sapiens
agatcccctcagttctgcgctgctcccgttccccctccccagagcaaggaaactggccaagaagcggaaagagaccatgagcagcacccgacaggagat

SEQ ID NO: 823602 - DNA, 98 bp, Homo sapiens
tggccatagggattggaaccctgatctacgggcactggagcataatgaagtggaaccgtgagcgcagggccatgctatgatagtggaagcttatccaa

SEQ ID NO: 823603 - DNA, 98 bp, Homo sapiens
caggatcttcccggttcagggacctggcgatttctgagtgttccggctgctactttgtcctggattggctccagaagacctattggtgccgccaactg

SEQ ID NO: 823604 - DNA, 100 bp, Homo sapiens
ctgggttcgttttattcagcggcagtggtgctttcccgaatctcagaatgccaaaccaggaatggatctggcagacacctatattatgtttgttcggcaa

SEQ ID NO: 823605 - DNA, 100 bp, Homo sapiens
gtacacatggagcgggcagaggatgcagtggaggccatcaggggccttgataacacagagtttcaagttttagaaagagcgttttcgctacgtaaagcac

SEQ ID NO: 823606 - DNA, 98 bp, Homo sapiens
aaccgaataggtgtttccttcattgatgatggaagtaatgcaacagaatgaactgagcgccaatggacaatatcaatgtcttgctgaactgtccacca

SEQ ID NO: 823607 - DNA, 108 bp, Homo sapiens
gcagatgaacctgtacgccacctgggaggtggaccggagctcgtccagctgcgtgcctagggtcaacatatttcactggcacctattcacaagcttgaagaagctctg

SEQ ID NO: 823608 - DNA, 100 bp, Homo sapiens
tgctagtaacgtcatggaggatgaacgacagatggagcagctatcagatgaagaaattgatcatggtgctgaagaagacagtgacaaggaagatcaggac

SEQ ID NO: 823609 - DNA, 98 bp, Homo sapiens
accatctccgtggaaggaatagaccacgatgttacatccggtgtatgcaacagcgttattgcaacaggctaacgaaaacagacaaaattcaactggaa

SEQ ID NO: 823610 - DNA, 100 bp, Homo sapiens
gaacccacacaatggacaagtggaggatgcagcattcaaggttctatcttggaagcagagactgtgccctcaccagatgctgaacctgctgagcaccctg

SEQ ID NO: 823611 - DNA, 98 bp, Homo sapiens
agcctgaaggaaaggcagaactgcctgattacaggagctttaacagcaagttgtcctcgaagaaggtacaattgcttttaaaaattgggttaaaacag

SEQ ID NO: 823612 - DNA, 100 bp, Homo sapiens
acagccaccgcccggcgcccgagaggccacctgcgtgctagaggcaaacttttgtctctctcggtactccaaagattcaggtttactcacgtcatccagc

SEQ ID NO: 823613 - DNA, 100 bp, Homo sapiens
cgggaacatctgtgtcctctccacagatccaccgtgggcgccctgctggcatctgagtttggtggtaatccatttgcttccttggtgagcaatacatcct

SEQ ID NO: 823614 - DNA, 98 bp, Homo sapiens
gcgccgctgccgctgctgctggtgttagcgctcagtcaagtgctgcatttgatacagttcttgggataaatgttgcagtcaagaaactaagccgtcct

SEQ ID NO: 823615 - DNA, 100 bp, Homo sapiens
tgggacacccgggagtcaggaaatggtcatcatcagatttgaaatatttaaagtggatacaaaactatttcagcaatgcagacaattaagtgtgttgttg

SEQ ID NO: 823616 - DNA, 99 bp, Homo sapiens
tgagaactttaagagtggtgtgtgggatgaagctctcttgactatgagtaaaggagaaaaggctcgactggagattgaaccagaatgggcttacggaaa

SEQ ID NO: 823617 - DNA, 98 bp, Homo sapiens
ccgcgcgccacccgctaggatgccggtggccccagcgccctcagccgacggagctcctccacaatttacagtaacccccaaggatcaagtggtgctgg

SEQ ID NO: 823618 - DNA, 125 bp, Homo sapiens
gggaagagcttttccagggcgatgccttccatcagtcggatacacacatattcatcatcatgggtgcatcgataccatggcctgggagaccatcctgatggatacactggaggacaacatccccc

SEQ ID NO: 823619 - DNA, 100 bp, Homo sapiens
caaaattcagagagattgcagaaggttccaatacatatgaagaggcagctgcctatattcaatgccagtttgaagatctgaacagaagaaaagataccaa

SEQ ID NO: 823620 - DNA, 98 bp, Homo sapiens
cgcatgtgatcactctgggactcgtggggctgcagcaccggttctcagaggcactgtgactgacttccctggatttgatgagcgggctgatgcagaaa

SEQ ID NO: 823621 - DNA, 100 bp, Homo sapiens
aaaattcgagccaagttaaaggatggagcagatggtgctttttacccagatgaaatacaaaggccacctgtcagagtcccctcttggggactggaagaca

SEQ ID NO: 823622 - DNA, 155 bp, Homo sapiens
ctgcatctgctcctgcaagactctggagccagtcttgaggtcctacatctccgaaagcaagctcttctagaagttgattggcactgttgaagaaaagcggggaggaagattggagaaacagactcagcaggaggcaggagggcggcaaggcgccg

SEQ ID NO: 823623 - DNA, 100 bp, Homo sapiens
ggaatctaaaaagccctcagtaccagagacagaagcagatggattcgtccttttaggaagctttctttggaaaagatcttctagatacaagtagacaaag

SEQ ID NO: 823624 - DNA, 100 bp, Homo sapiens
aaaacgtgcacagaatcagatgtttcacaatctcagaattccagatttgggccaggcttagtcatctattggtatggatttatccaggagctggactgca

SEQ ID NO: 823625 - DNA, 100 bp, Homo sapiens
atttacaatggtcatcagggcactatccgcacaaagtattcccagcttctcaataggtttggcatggacaagatctatgaaggccaagtggaggtgactg

SEQ ID NO: 823626 - DNA, 100 bp, Homo sapiens
agcgagccagcgcccggagcaagcggagctcccccaagagccggaaagggctgtcacatggtgactgaagaacttcattccataacgtttgaaacacaga

SEQ ID NO: 823627 - DNA, 98 bp, Homo sapiens
cggattacaaaggttcacttcaaggagactcaatttgaactcagagtactgggaaaagatgcaatctttggcagccagacactacctaactccaattt

SEQ ID NO: 823628 - DNA, 100 bp, Homo sapiens
tgacaaatgtgcaatcttaaaagaaactgtgaagcaaattcgtcagatcaaagaacaaggtctgacggtaactgctgtaaaagactcaggagaatggaat

SEQ ID NO: 823629 - DNA, 100 bp, Homo sapiens
gtcagctgcgtgattcccgtgattgcgttacaagctttgtctccttcgacttggagtctttgtccaggacgggaagaacagtgattattgagcagagttg

SEQ ID NO: 823630 - DNA, 132 bp, Homo sapiens
tcggctctcagaagaagtttagccgcccacttctgcctgccactacaacaaaactgtctcaggtgaatctttgtagcccctacttgttactgagaagagcagtactggcttgcttacgtcagcttgtacaaa

SEQ ID NO: 823631 - DNA, 98 bp, Homo sapiens
cagcatcccacattaagtcaacgatccaggatgagaagactgataaaagaagaagctagctgaacagctgtaaaatgcccaaatctgggttcacaaaa

SEQ ID NO: 823632 - DNA, 98 bp, Homo sapiens
actcagctcgcccggtttctcggcgaatgacagcacagatagcagaccccacgttagctgaaatgggaaaaaacttgaaggaggcagtgaagatgctg

SEQ ID NO: 823633 - DNA, 99 bp, Homo sapiens
ggaaatggccgctgtgtggttgcaacggagataaattcccggaaccgcgattcggcgtgtcagaatcatggtgtcatggaaagggatttactttatact

SEQ ID NO: 823634 - DNA, 98 bp, Homo sapiens
ctcaaggacaacccgtacatcaccgacggctaccgggcctacctgccgtccaggctgtgtatcaaaaggtgccgacgccaccgccgagcccatgatcc

SEQ ID NO: 823635 - DNA, 100 bp, Homo sapiens
agcgcttcagtcaaaccctgcaggaaactgctgcacgagtaaatcaatcagctctggaagctgtcactccttccccatctttccagcagaggcacgagag

SEQ ID NO: 823636 - DNA, 100 bp, Homo sapiens
cgtcgagccagacagactgctgagcgactatattgagaaggaggtaaaggttgtgtgtcgcagccctgtcggtgaataacttctgtgacaaccgcgaagc

SEQ ID NO: 823637 - DNA, 100 bp, Homo sapiens
gaaaacaggacgattagatgagcttgagaaagccatcaccactcaaaactgtaatactaaatgtgttaccataccaagcctgcctagggtagttaaaaga

SEQ ID NO: 823638 - DNA, 98 bp, Homo sapiens
cttccccacttccctgcactctcatcgctctcggcctcggcctcggcctccgacacgggagaagagcctgctgagtgcagtgaggccggtctcctgca

SEQ ID NO: 823639 - DNA, 100 bp, Homo sapiens
aacatagatagaattggtcgatcagagatgcgcctggagaaggacaggttctctgtcaacctggatgtgaagcacttctccccagaggaactcaaagtta

SEQ ID NO: 823640 - DNA, 99 bp, Homo sapiens
atttctgaaggcatttgctgttggtgtccagcaagatggcacaacagcattattgaaagcagccaacaaagggtataatgatgtcataaaagagttgct

SEQ ID NO: 823641 - DNA, 100 bp, Homo sapiens
ccactctcacgccttcctatcaaacagctatgaaactggtgcccttgaaagatcctaccaggacatcctcggaaagtatttattctaggccaggctccag

SEQ ID NO: 823642 - DNA, 100 bp, Homo sapiens
cacacattctgccttcacttgaggtcaactgccttcaccaagaatccacattcatctcaatggaaggatcctgccttaagtcaacttatttgtttttgcc

SEQ ID NO: 823643 - DNA, 100 bp, Homo sapiens
agaacgcagatcagaggtagtcggacctttcccgctggcgcgcagcctcagctaggaactggccagtcatggtggcttatgcctgtaatcccaggacttt

SEQ ID NO: 823644 - DNA, 98 bp, Homo sapiens
ggatcccgtccgagccccggccccaagtaacgccgccgccccggagccgccgtcaaaaggctgagtttcaaattctggataatgtagactcaacggga

SEQ ID NO: 823645 - DNA, 132 bp, Homo sapiens
gtttagaataaatattttatcgcttgacggtctggctccagctgtcagtgagaactccgatttggaacaggaacttctgcagaaagccgtcattacacctgattttgaaaaaaaccactgtgttccaccata

SEQ ID NO: 823646 - DNA, 99 bp, Homo sapiens
aaagatatggaacgaagaattgtagcccaactcctaacctgcatggatggtttttgccaatccagaagactgtgtagcatttggcaaaggagaaaatgc

SEQ ID NO: 823647 - DNA, 99 bp, Homo sapiens
ccgagttcaacatcctcctggccaccgactcctacaagagacagggcagggcattgttcatgcactgaccgacctcagcagccccggcatgacctcagg

SEQ ID NO: 823648 - DNA, 100 bp, Homo sapiens
taatttctttctcgctgatcgcctaacttctactgacgaagcttggaagttgcagaaggtagtcaaaccacacactccattaataaggtttcctgacaga

SEQ ID NO: 823649 - DNA, 100 bp, Homo sapiens
tctgcagagtctatataccaatagagaattattccccaaattggaactattcactaaccgattcaaggttcagaatttaacattacgcagccagaagttg

SEQ ID NO: 823650 - DNA, 98 bp, Homo sapiens
tgggcaccccttcagaagcgattgaaattatggaggaggagcacctctatgccttgaggtggaaagaactggaaatgcacagcctggctttgcaaaac

SEQ ID NO: 823651 - DNA, 98 bp, Homo sapiens
tgattcaaaatgggacactaattgaaagaaaaatggagtgctggcatacattgggaattttcgcctgcttgcagagctttccagcccgtttgtgaatc

SEQ ID NO: 823652 - DNA, 98 bp, Homo sapiens
agtgttccattgcttgaaagtgttggttcccaagcatttcagatctgctcggtagacctggtgcaccaccaccatgttggctgcaaggctggtgtgtc

SEQ ID NO: 823653 - DNA, 99 bp, Homo sapiens
ggcagtacaagcttacgtctctgctcttcagtacaatccttattccactgaactgaagaaactctactgccaaattgcaaagacatgccccatccagat

SEQ ID NO: 823654 - DNA, 100 bp, Homo sapiens
ttggaagcctggttttggtaaaattacagaattggccaagccaaactcaggctctgaattggttttgtctgaagatgaaaaaagtgacaatgaagataag

SEQ ID NO: 823655 - DNA, 100 bp, Homo sapiens
cgaaaacggaagcgcagggagaaggaagaggtgtttgaaaaggttgtccttctattcaggccactcttcgttttccatgtactgcatgctgtttgtggca

SEQ ID NO: 823656 - DNA, 100 bp, Homo sapiens
atcaatcagccagtgagggtcaacgtcaagcgggagtatgaccacatgaatggatccaggatccaaggagctggttctgctggttggaccaaacctcgtg

SEQ ID NO: 823657 - DNA, 98 bp, Homo sapiens
gaagctggatttcagtactggaaacttcaatgtgttagctgttagggtcttctttgattcctgcgacggcttcttcactaactataactggcgggagg

SEQ ID NO: 823658 - DNA, 100 bp, Homo sapiens
tgagatcaaatggcacttcattggccacctacagaaacaaaatgtcaacaaattgatggactctcttgagcctgagggatccattacagtttcaatgggt

SEQ ID NO: 823659 - DNA, 99 bp, Homo sapiens
agcgagctgagtggttgtgtggtcgcgtctcggaaaccggtagcgcttgcagcatggcttgcttccggcgtcatggctcaaagggccttcccgaatcct

SEQ ID NO: 823660 - DNA, 99 bp, Homo sapiens
ctgtccatcgtgtgcctgatgatcacgcagctggctggcttcagtggaccagcaaacctgtatgtgggactggtggtcatgtgtggcttcgtccttttt

SEQ ID NO: 823661 - DNA, 98 bp, Homo sapiens
ggacacagcaatatctctgggctttcacagaaatgggcaagttcatgaaacctgggaaggtggtgcttgtcctggctggacgctactccggacgcaaa

SEQ ID NO: 823662 - DNA, 98 bp, Homo sapiens
caacgtcaacaaggccctggatttcatagccagcaaaggcgtcaaactggtgtccatcggagccgaagctccttccaactcctcagaacctccactct

SEQ ID NO: 823663 - DNA, 100 bp, Homo sapiens
acattattttgccttaattgatcaactaattgaaggacatcagtggctggaaaataatataggtgcaggaagctgtttggagactctggaaaaaggaaag

SEQ ID NO: 823664 - DNA, 100 bp, Homo sapiens
ggggaagaaggtggtccttgtaccctacacctcggagcatgtgcccagattggttcgagtgagtaaaaactaccgatcagtcatcagagcatgtatggag

SEQ ID NO: 823665 - DNA, 98 bp, Homo sapiens
ggtcatactaaagaacacatctggaagatgccagaggaacaagcattctgtgttttggtgaaaatcatgtacgactatggtttgagagacctctacag

SEQ ID NO: 823666 - DNA, 134 bp, Homo sapiens
gaaacggagccagcggctgaggaggggccccagcagcccccgaaggccctatcaggacatggagtatgaaagacgctgcactgggtgttcaacagccatcactccttggagcatctcctaccatttatacacag

SEQ ID NO: 823667 - DNA, 100 bp, Homo sapiens
tccaagtcaaacgcagaaggactgcctcactgagcaaccaagagatgaaaactttcggaagagaaagttgcctgtggtaagttcagttgttaaagtaaaa

SEQ ID NO: 823668 - DNA, 98 bp, Homo sapiens
gcggtacatcgcctcggtgcagggctccaccccgtcgcctcgacaggatttcagatgcatgccaggtttccactgattgccagaactcgagatcacta

SEQ ID NO: 823669 - DNA, 99 bp, Homo sapiens
ttgaatgttgaagatgtccttaccagctttgacaatacaggaaatgtttgtgagactgctgctcctcgggccattttgaccggccatgactatgaggtc

SEQ ID NO: 823670 - DNA, 100 bp, Homo sapiens
gctgcttctgccgccgccggccgcctgggaccttgcggtgaggctgcgcggggccgaggccgcctccgagcgccagggcaagaagtacaagcccctggac

SEQ ID NO: 823671 - DNA, 100 bp, Homo sapiens
tggactttagggctgtggtgatggatgaggtggtgctgacaatcgagcaaggaaacctggatttatacacgttgctgctggaagacattcttgtattgtt

SEQ ID NO: 823672 - DNA, 98 bp, Homo sapiens
ctgaatccaggctgtttctatcgtttacgagtttactgcatcagtgatggaggacagagtgcgctgctaggggagctgatcctggaccgtcacaactt

SEQ ID NO: 823673 - DNA, 98 bp, Homo sapiens
atctgaggtcttattttgttgagtcgaaagtgaaattttcctttggccaacgtgacagaatgacagcccatatcaaggcggtgtattctttttgacaa

SEQ ID NO: 823674 - DNA, 51 bp, Homo sapiens
ggaacacctcgccaaagcagagaaataggtaaaccagacttgaatacaaca

SEQ ID NO: 823675 - DNA, 100 bp, Homo sapiens
gtatggcagtgtcagctgtacagccacactaactgtgacaggaattgcattttgtgaaaaaagaacaagaattttctgcaaggatcatatctaagtgcac

SEQ ID NO: 823676 - DNA, 98 bp, Homo sapiens
aagaaagagatgaagaacgtattaaaaaatttgtacaagaagaagctttcagattcctttggaaccaggaaaccatcaagatctcattttacagctgg

SEQ ID NO: 823677 - DNA, 99 bp, Homo sapiens
gctactaacagcctgggtgagatcaacactagtgccaagctctcagtgctcgaaggtgatcgaggagttctacaaccagacatgggtccaccgctatgg

SEQ ID NO: 823678 - DNA, 118 bp, Homo sapiens
gctccgttgcctgctcccggagggagacgcgctgccgaggagaacccagcggctggagaatgctggaggagaccttaaggatggccaccaccactatgaaggagctgttgtcattctg

SEQ ID NO: 823679 - DNA, 100 bp, Homo sapiens
aagccagacaacttctggcagaaacagaggactaattttggcagttctaaatttgaatttgaggttcctaaaagtaaagctttagaggccaccaaattgg

SEQ ID NO: 823680 - DNA, 100 bp, Homo sapiens
ctcgaagtgcgcaaacttgacactcaccctgaccgatttgatggtagagtggtggcaaagcttccttttacccctctttcttacatccaaggactgtctc

SEQ ID NO: 823681 - DNA, 100 bp, Homo sapiens
gaggaggaggaagaacgggagttcagaaaacagttccccctgcatgaaaagcaatggccaatgtacatggtggactatgccggcctgaacgtgcagctcc

SEQ ID NO: 823682 - DNA, 100 bp, Homo sapiens
acaaagccaaatgttgtggaaagagtcaagtaaagaacagtttgccagtacaaacattgctgaagagctagtaaaactcttcaagaaacaaatagaacat

SEQ ID NO: 823683 - DNA, 98 bp, Homo sapiens
gctggcaaaaatgcagtcgagaggaggtcgaacagatatggccgccaagaacgagtcatgtttgacaaaattacatctcgaatccagaagctttgtta

SEQ ID NO: 823684 - DNA, 100 bp, Homo sapiens
tctgattaagcagttttacagtcttttgacttcacagagaatgcagttgtcttgacttcaggtctgtctgttctgttggcaagtaaatgcagtactgttc

SEQ ID NO: 823685 - DNA, 98 bp, Homo sapiens
gtgcggatcctgctggtgggagaacgtgtctttcctgaagactatcttcccgtctcaaaatggacatgatggatccacggatgtacagcagagagcca

SEQ ID NO: 823686 - DNA, 99 bp, Homo sapiens
gtagttggaacaacatatctacacctctctaaaattgctgcctctggtggggaagtggaagcgtcactggtgtaccgcctgccccagtcgtgggtgggg

SEQ ID NO: 823687 - DNA, 115 bp, Homo sapiens
gctgctgctgccgctgccgccctgagtcactgcctgcgcagctccggccgcctggctccccatactagtcgccggtagcagcaattgcagagacagatgaatctgcagaatcaga

SEQ ID NO: 823688 - DNA, 98 bp, Homo sapiens
tgacctgcaggtattgggagatccacagctaagactccaggaccctctggaagcctagaaatggctaatggaggttggcaggatgctactaccccttc

SEQ ID NO: 823689 - DNA, 100 bp, Homo sapiens
gtgagctcatagacatggagaccaccaccacctttcccagggtgatcatgcaggaagtagaacatgcattaagttcaggaaaatgtttataggaggcctt

SEQ ID NO: 823690 - DNA, 98 bp, Homo sapiens
cagccgcttgtcagtgtgatgaagattggcacccaggtggaatgaatcttacttgttgaatatcttctggttactagttggattcatttgtgaaagaa

SEQ ID NO: 823691 - DNA, 98 bp, Homo sapiens
ctgaggttttcctaagccatcccctggcggaaccgcccccagggaacgggtatggcaatccccgaaactcaccaggtctgctggtctcacctggtaac

SEQ ID NO: 823692 - DNA, 100 bp, Homo sapiens
cgtgctggtgtctgagtggatggggacctgcctgctggctaccggctctctgaccagttccacgacatcctcattcgaaagtttgacaggcagggacggg

SEQ ID NO: 823693 - DNA, 98 bp, Homo sapiens
atgacagattacgccccctatcctatccgcaaacagattatagctggacagacatccgctgcccctttgaaaaacgaagagatgcagcatgcgtgttt

SEQ ID NO: 823694 - DNA, 99 bp, Homo sapiens
caatcagcttcctgcgaacacacaagctcctctcctcagatcagatctcatccccagtttggtgatctctgccagaggaccactgctgcctcctgctgc

SEQ ID NO: 823695 - DNA, 100 bp, Homo sapiens
caccacctgaggatccagaaaccgccccagcgatggaagaggatcaggagctggagaggttcttgcatacactgagggacttcacggaaaatggatgttc

SEQ ID NO: 823696 - DNA, 100 bp, Homo sapiens
agaagaacaagatgatcaagatggctcttcatggaaatgcattgtcagatccatccttttacaatccctgctattattcgtccattcagcgtattgaact

SEQ ID NO: 823697 - DNA, 100 bp, Homo sapiens
gctgtgcattgttggtgggattctgctcgtgttccaaatcatcgcctttctggtgggaggcttgattgccaagaagacctgtgcagacagtgacttcacc

SEQ ID NO: 823698 - DNA, 99 bp, Homo sapiens
ggacatcttcatttacagagcaacttgatgaaggtacacccaatagagagctcttgcaagcttaggatatgaaaagagctgtgtgttgttcaattgtgc

SEQ ID NO: 823699 - DNA, 98 bp, Homo sapiens
tctcctggttaatcaagaattctctatttctgctccgtcatccatgccactagtgaaatggtaaaggagctggatggtcatgtgctcaaatgtgtgaa

SEQ ID NO: 823700 - DNA, 100 bp, Homo sapiens
ggatttacgcgcacgttggaaccgaagagagctctgttgttgcagtagctacagcaagctgggtagcaggcagatccaaaggatatcatgaagtttccag

SEQ ID NO: 823701 - DNA, 98 bp, Homo sapiens
gaatggaccgacacgggtattgtaccgctgagggaaaggagcgggactccggacctccaggagactcagacgatgccctgctgaagatgaccatcagc

SEQ ID NO: 823702 - DNA, 100 bp, Homo sapiens
taccagtacacggcccacgttgccagtaagtgaaaatggtgatcacctaagcacatggatgagacgtgagcacagttatggcagagaagtttctccgcac

SEQ ID NO: 823703 - DNA, 100 bp, Homo sapiens
catggaggagatcggcctcagcccccgcaaggatggcctttcctaccagcataagctgtggccatgactactgaagtaggctctgtgtctgaagtgaaga

SEQ ID NO: 823704 - DNA, 100 bp, Homo sapiens
atacaagatggcaaaatcctaatggctttgttagaagtcctgtctgggcggaatctggtagctacagcaagctgggtagcaggcagatccaaaggatatc

SEQ ID NO: 823705 - DNA, 100 bp, Homo sapiens
tgtaatatgtgcgtggtccagaaaccggaggagcagtacaaagtgatgctgcagtaaattcctcatctatgcctgtctgctgctgttctctgtgctgctg

SEQ ID NO: 823706 - DNA, 100 bp, Homo sapiens
gccgttcaaatgtcctttctgtagctacgcctgtagaagaagggacgccctcacaggacacctcaggacccattctggaagccgggaagccaagctccgc

SEQ ID NO: 823707 - DNA, 100 bp, Homo sapiens
caccgcggccggagctgtgggctgccctctctgctccctgcagcctactggatcgcacaccaagcagtgaaaatagtgtttgactccattgacaacctag

SEQ ID NO: 823708 - DNA, 98 bp, Homo sapiens
aagggtgcaagaagaatcagtgaagaggatgtggagaactttgacgtgaccaacttgtctcaagacatgctgcgaagcattgaggctgacagcttttg

SEQ ID NO: 823709 - DNA, 100 bp, Homo sapiens
agccctcatccactcaacacattcactgacaaactctcacgctcacaccgggtcatctgattgtgatggtcttttaagccgtcctatttttactcaggag

SEQ ID NO: 823710 - DNA, 99 bp, Homo sapiens
ccggttccccggcccacagtgggggtgtgcaaacccgagagaactggattcatgcccaagcacaaaacaacccatttaaagaagatgctcggccttaaa

SEQ ID NO: 823711 - DNA, 100 bp, Homo sapiens
gtgaagtgtatccctaagaaggcgctgaagggcaaggaaagcagcatagagaatgagatagccgtcctgagaaaaaagtgaagtcactgcttttgctgtc

SEQ ID NO: 823712 - DNA, 98 bp, Homo sapiens
agccatcacctggatgcctacgtgggaagggacctcgaatgtgggaccccagcccctctccagctcgaaatcgaatgggaagatacagtgcagtcgga

SEQ ID NO: 823713 - DNA, 99 bp, Homo sapiens
ggaaatcttagtggatgcagaatcagatgaacttatgaatgaagaaatgctgtgccaagaatttggaagatttggaccgttagccagtgtgaaaatcat

SEQ ID NO: 823714 - DNA, 98 bp, Homo sapiens
gcgtttggcaacagcgagggcaaagagctggtggcctcaggtgaaaagtaccagaggtttgaaaaggcatttctcctagctgttgacgttggtgctcg

SEQ ID NO: 823715 - DNA, 98 bp, Homo sapiens
tttgatggtgaggaggaaccctcgcaagggcagaaggttgaagaacaggaggccagttggacaaatgcgagtaaaaagcaacgtgaaaagctacttga

SEQ ID NO: 823716 - DNA, 100 bp, Homo sapiens
tgaagctgaggaggggagtaaattgaaaatattggggccatttagtaacttctttgcaaggtaccgctagagcgacatgatggtggaatctgcctcggag

SEQ ID NO: 823717 - DNA, 100 bp, Homo sapiens
tgaacatgagcctcctcctctccttctacctgctggggttgcttgtcagtagcgggcaaggctcttgcagaccaatttgaagataaaactacatctgtat

SEQ ID NO: 823718 - DNA, 100 bp, Homo sapiens
accttcgacgaggaagcttataaaaatgtggttaaagaactgaatcattatctggaagctgagaaatcttgtaggactgatctagagatgtatgtagctg

SEQ ID NO: 823719 - DNA, 98 bp, Homo sapiens
acccaacttaaccaatgctctgcctcagggtgcaaatgccaaccaagagtacagttgtgaatttggctccgcgaagtattatgcactgtgtggctttg

SEQ ID NO: 823720 - DNA, 100 bp, Homo sapiens
tagttatttcgtcctcttccgttcttcacccctacaccttggacaggtcaatggccagcaaggaggggggtccgagccggcggcggcggcggcagtggtg

SEQ ID NO: 823721 - DNA, 100 bp, Homo sapiens
tctggtgcgagaaattgctcaggactttaaaacagatctgcgcttccagagcgcagctatcggtgctttgcaggtcgtgataaactgtgccattcctaaa

SEQ ID NO: 823722 - DNA, 100 bp, Homo sapiens
ctgtcccagaaaagaaggtgcctgaagctattcctcccaaaccggaaagtcctccccctgaagctttcccatggtttggcatggacattgggggaactct

SEQ ID NO: 823723 - DNA, 100 bp, Homo sapiens
ctgaacctgcataccatccgcgaccgagtctggcagatccagtcttgctcagctctcacaggagagggcgttcagaaatctgtggaccgaagcatacaaa

SEQ ID NO: 823724 - DNA, 100 bp, Homo sapiens
gtaagaaaggcagcggatcgtctggaggaagagatagaggaacatgcttttgacgacaataaatcaagaaccatggagtctggcagtaccgccgccagtg

SEQ ID NO: 823725 - DNA, 99 bp, Homo sapiens
gaagcaccactggttccatagtgtgtggttacaatggttggtctgatttacccatatgttatggaccttttggagagcgagacgatcaacaggtgttta

SEQ ID NO: 823726 - DNA, 100 bp, Homo sapiens
atgttccaaagcacagctgggtctgggggagtacaagaggatgccctgatggcagttagcacactggtggaaggtggacaagagcaaggaccaagtgtgg

SEQ ID NO: 823727 - DNA, 149 bp, Homo sapiens
tgcagccgcaccacattggcgtggccgtcaaggagctggacctctacctggcctacttcgtgcgtgagcgagacaacacttccttcagaaaacgggaaacttccatttgtcacacgtcttggtccagataaatcccaggaagtagcatc

SEQ ID NO: 823728 - DNA, 100 bp, Homo sapiens
gagttggaccagtcaacatctgcagaagattttcgcaagctctggaaaactccacctcgagagaaagcaggcttccttcaccacgtcaagaagtcggacc

SEQ ID NO: 823729 - DNA, 100 bp, Homo sapiens
aaaatttctccaaaaaggatgtcatgttcctggcctggacacattcagctaacgtattttagcaggtggagtgaggttgaagattcctgtgacagcgatg

SEQ ID NO: 823730 - DNA, 98 bp, Homo sapiens
cactggctttggaaaagagaattctatgcgaaaacaggagatcattaagattacagaacagctgattgaagccatcaacaatggggactttgaggcct

SEQ ID NO: 823731 - DNA, 100 bp, Homo sapiens
cagtgtgagattcatggccacgcagtgctttgcaacgctaattagactcatgccacttgagtacgtagagaaatcgacactcttaatgaacgtttagctg

SEQ ID NO: 823732 - DNA, 100 bp, Homo sapiens
agactattccaatacagattatagacaaccactcagctcttaacatagggcctgattacattccaacagaggaagaaaggagagtcttcgcagaatgcaa

SEQ ID NO: 823733 - DNA, 99 bp, Homo sapiens
gttatcaagtattacccagagcaagagccccagctgctcagcggcatcggccggatttccctgcaggtatcagacttggtgataattctgaattatgac

SEQ ID NO: 823734 - DNA, 98 bp, Homo sapiens
agaagcctgaaaagtcgcagcgagctggagccgccggaggtgtacaaagataatcaatgctgattcggaggacccaaaatacattatcaacgtaaagc

SEQ ID NO: 823735 - DNA, 98 bp, Homo sapiens
tgcacgccagaacctgaggagagaatggcatgccagttttaacagtgtatgccagggaacacacattctctttcgagaattcagcttcgtccaagcca

SEQ ID NO: 823736 - DNA, 98 bp, Homo sapiens
taccacagcccaggcgaaaccaggagagacccaggaggaagagactaactcaggagaggctgatttaaactgcaatattcaagatgatgctggggctt

SEQ ID NO: 823737 - DNA, 98 bp, Homo sapiens
acatacttgtctccatcctcaggaatcccttcctgatactagaagtgagcactcccaccaaaggcatagagaacaaagcttttgatcgcaatacagaa

SEQ ID NO: 823738 - DNA, 100 bp, Homo sapiens
tgtctttcctaccatctaaaatacgaaggtttctggctgggctagagtaccgtggcacaatctcagctcattgcaacctctgcttcctgggctcaagcac

SEQ ID NO: 823739 - DNA, 100 bp, Homo sapiens
cccagctttaaaggagatgcaggagaaaatacggcattgctagggtggagagattcaaccagttagcgtgaaagttggagataaagttcttctcccagaa

SEQ ID NO: 823740 - DNA, 100 bp, Homo sapiens
tagaacaggaggatttcatccctctacttcagttctttatagctccaagctctacagattcttcaaatatattgagaatagggatgttgcaaaaacagtg

SEQ ID NO: 823741 - DNA, 98 bp, Homo sapiens
atgacgacctgtctgttcgacactgcactaatgcttacatgttagtctacatcagggaatcaaaactgagtggttgtgtcaaaccgattggtgacatc

SEQ ID NO: 823742 - DNA, 100 bp, Homo sapiens
tgagtcctgcccttctgtatcctgtgaaagacctgtcttgagaaaaggccagtgttgtccctactgcataggctgaccaactgactgaagagcagattgc

SEQ ID NO: 823743 - DNA, 98 bp, Homo sapiens
ggctgaaaaacttggcattcatcccagcagctgccatggatggattttgggggaacatggcgactcaagtgctgagatgattgacaaattgacattga

SEQ ID NO: 823744 - DNA, 100 bp, Homo sapiens
gtcatggagctctttgatggcaaaactggacatcagaagacagtggatctctctggacaagatggaattggctgctctagaaaaaattaaatctacttgg

SEQ ID NO: 823745 - DNA, 98 bp, Homo sapiens
atcggtgttcccctggtttaactagcctgtttgaatgtcgaggtcttggcgagcaggagcaacacttcagagcaagaccaggcggggactgaaatgcg

SEQ ID NO: 823746 - DNA, 100 bp, Homo sapiens
atacgtctgaacctttgctgtctatggatctgctctaaaccttatagcctgcttatgggggaagataccccagaatcttccatgctccgtcacactgcag

SEQ ID NO: 823747 - DNA, 100 bp, Homo sapiens
agcggagcaagagggaccccagaaactgatccgcaaagtgtctacctcggggcagatccggaccaagttcctccaggagtgatccaaaatggagcgcggg

SEQ ID NO: 823748 - DNA, 99 bp, Homo sapiens
tggtgcagccgggacccaggaccatgtctctgtctcgctcagaggagatgcaccggctcacggaaaatgtctataagataagagtgcccaggagtggaa

SEQ ID NO: 823749 - DNA, 100 bp, Homo sapiens
aacgacaggacgttggggcggcctggctccctcaggttgacatcatggacatatgtgagtccatcctggagaggaagcggcatgacagcgaaaggtctac

SEQ ID NO: 823750 - DNA, 98 bp, Homo sapiens
cgtctcatggcgttggaataccggctctcagcggctaccttcactgcctggtgtaactcccacctaaggaaagccggcacccagattgagaacatcga

SEQ ID NO: 823751 - DNA, 98 bp, Homo sapiens
tggagatgatccatttcaaggacttgctgctgcacgagtggatccactagatgctgtgattcatggtagatcttcagacgtttggtgggcacccacac

SEQ ID NO: 823752 - DNA, 98 bp, Homo sapiens
tattcctccgaaccagcatccccaccatcaacatggagaacaagaccacgtggggcataattggaatatcatttggagaaagtgtcatggaagttctg

SEQ ID NO: 823753 - DNA, 60 bp, Homo sapiens
tgcacttgagaaaattaatgtggcaggtgttctttgacctaatgagagaaatcagaacaa

SEQ ID NO: 823754 - DNA, 98 bp, Homo sapiens
ccccaaagcacagatccattacgcacatttaaagataccatctaccttactcaggcagaggttgaaaagataattgcagttgcctgggacatttttca

SEQ ID NO: 823755 - DNA, 98 bp, Homo sapiens
taatggatgatgcagttcaaataactaaggaagttccaggttaaaggcagcctcagctcacggggcagttgatggtggtagagaacagccctgggaag

SEQ ID NO: 823756 - DNA, 100 bp, Homo sapiens
ctgccccacgccctgggcccttgaagtccccacaggagacaaccctgacgggagcatggagctgctgtccacgccccacagcattgagatcaacaacatc

SEQ ID NO: 823757 - DNA, 51 bp, Homo sapiens
gacaaattgtcaagaagtccccgattctgatcatgagcgtcttgttgttca

SEQ ID NO: 823758 - DNA, 100 bp, Homo sapiens
atgatggtattgatgatgaacgtctccggaaagagttttctccatttggtacaatcactagtgcaaaggcgccatgatagcagtggcagtggacattcag

SEQ ID NO: 823759 - DNA, 100 bp, Homo sapiens
cccacttggtgaatggagatgcagctcagcagtcataccctaatgatcccagcaagataatgtcctgtcttctaagatgtgcatcaagcctggtacatac

SEQ ID NO: 823760 - DNA, 98 bp, Homo sapiens
tgaagttcgataaagggccgtggctcaagcaggacaatcgcactttataccacctgcgattactgtgtgttcatcctcgaggtggtgtgattcagagt

SEQ ID NO: 823761 - DNA, 99 bp, Homo sapiens
ttctgttactccactgactctctcttttcctgataacatggccagcaagaaagtaattacagtgtttggagcaacagatgtgtatatctcatgattgat

SEQ ID NO: 823762 - DNA, 98 bp, Homo sapiens
ctggcgggatgggcgtttgcctaacgtatttaatggagaacactgagctgaaggttgaagtggagagcttgaaacgagaactccaggacaagaaacag

SEQ ID NO: 823763 - DNA, 100 bp, Homo sapiens
ccgggagaggcaccaaatctggcctgggggcccgagaagcttcctctcaggtgatcgtgcagtccggccgccaccccacagtgctgcagaagctctgcca

SEQ ID NO: 823764 - DNA, 98 bp, Homo sapiens
agactgctgaaaagctggcccgtgacctgaaggctgtcaagtatgtggagtgttctgcacttacacagagaacgtttgtctgcctgatgagagccact

SEQ ID NO: 823765 - DNA, 100 bp, Homo sapiens
gcctccaaatgccccaagtgcgacaagaccgtgtacttcggtttccttgttgcagaatgaaagtgtagaaaaaaacaagagcatacaaagtttgcacaat

SEQ ID NO: 823766 - DNA, 100 bp, Homo sapiens
aaaatcattcgattcgagagacaagcagaagaattcctcaatgcagtcttttatagaaaagatccaggatgagaagactgataaaagaagaagctagctg

SEQ ID NO: 823767 - DNA, 100 bp, Homo sapiens
tggtggtcttcaaggagctggagaaggagctgatctccgtggtgatcgctgtcaagatgcagggtctaggtgctggagtgcgcacggaggccgatgtaga

SEQ ID NO: 823768 - DNA, 100 bp, Homo sapiens
agacatgattgattacttttgtgatattcacgaaccacttcaactcctcatattcccagaagggactgatctcacagcatcagaagagctaacaattgct

SEQ ID NO: 823769 - DNA, 100 bp, Homo sapiens
gtacatccactggacctaaaatatgaccctgatccaggcatgagccatgagcccaagtccccttcgctagggatgctttccaccgcgaccaggaccaccg

SEQ ID NO: 823770 - DNA, 98 bp, Homo sapiens
gggacggagagaacacgagcccatcagatcaatgagctgagcaatgttcctgttcctgtcatgctaatgccagatgacttcaaagcctacagcaagat

SEQ ID NO: 823771 - DNA, 98 bp, Homo sapiens
agttgatgatatgttatcaaaagtagagaaaatgaaaggagagcaagaatctcataggtacccgaggattaataaagaatctttacttcctgtagcaa

SEQ ID NO: 823772 - DNA, 100 bp, Homo sapiens
atatttcatatgttttagctacaaacatttatctaagcaatctgaagaggatgtaagtcagtttgattccaagtttacacgtcagacacctgtcgacagc

SEQ ID NO: 823773 - DNA, 140 bp, Homo sapiens
gaagaagaggctcagggaataaatgggaacaggccagcaaaacactcagctgcaagtccaaagccacaaggtagttcaacttatcagcaatgagatactaccttatgccaattttattcctaaggaatttgttggtcaaa

SEQ ID NO: 823774 - DNA, 50 bp, Homo sapiens
gccatattgaaagaagctgagagagagggcaaacttgaagataaatcttt

SEQ ID NO: 823775 - DNA, 98 bp, Homo sapiens
cctgaatcttctgggagctgaggaaccagatatcttgaaaagctgccagaaagcaatggccaatgtacatggtggactatgccggcctgaacgtgcag

SEQ ID NO: 823776 - DNA, 100 bp, Homo sapiens
cagcactatagtgcaggtgttggaagtgaaagatttctataggaagccactgcctcccctggctgtgccacagcgacctaacagtgatgctcatgatgtg

SEQ ID NO: 823777 - DNA, 100 bp, Homo sapiens
gagtcagctgaagagctcatcagagatggcagaggctgtgcccaggtgggcgttctcaaggccttggcggagtgcggcatccctgtggacatggtgggag

SEQ ID NO: 823778 - DNA, 99 bp, Homo sapiens
ggaacttctgcccagctctccttggtaccaaagcagtcagactcacagcctaattctgataacctaagtcgccatggtgaatgtgggaaaaagcaagtg

SEQ ID NO: 823779 - DNA, 99 bp, Homo sapiens
gcgacgcccggcgcgagctcaagctgctgctgctcggacctgaaggagaagaaggagaaggtggaggagaaggcaagccggaaagagcgaaagaaagaa

SEQ ID NO: 823780 - DNA, 99 bp, Homo sapiens
gaaaaggaagcaacaacataatgcccagagttggagccaattaaaccaggtactccaaagattcaggtttactcacgtcatccagcagagaatggaaag

SEQ ID NO: 823781 - DNA, 98 bp, Homo sapiens
atagagacaagcttggagaaagagatgacactatcccacctgaatacagacatctcctggatgataatggacagatgtgttcagagcaacattgtttt

SEQ ID NO: 823782 - DNA, 100 bp, Homo sapiens
gatgttgttggccaggtctctacggatctgatagcccagaggtagtgaaaatggacacatccattcaacctctttgcaacacataaaaactgtgacggag

SEQ ID NO: 823783 - DNA, 100 bp, Homo sapiens
cgggccgtgcaccggtggcgaggagctctacttgctctgcgacaaggtgcagaaagttggaaatggaggatgaagatacaattgatgtgttccaacagca

SEQ ID NO: 823784 - DNA, 100 bp, Homo sapiens
caaggatttccgggactacctcatgagctactctcggaaccgcacgtttgacacgtacattgggcagggctacgtgattcctgggatggatgaaggtcta

SEQ ID NO: 823785 - DNA, 100 bp, Homo sapiens
agtctggagaaaaatctccaaagtcttattactctaatggagtactattccaaagaagccttgggtataagaatgcgggagtgattgagttggaagcgtg

SEQ ID NO: 823786 - DNA, 100 bp, Homo sapiens
atctccagatgcatatcggttcctcacagaacaagacagacagctaagactacttcaggcacagttcacttcttcaactgagatggacatgatataatct

SEQ ID NO: 823787 - DNA, 98 bp, Homo sapiens
agtttgctaaatttgaaaaggagaaaatgaatgccaaatgggacacggtgcgtatagcagcaaaattcatcattcatgcccctcctggagaatttaat

SEQ ID NO: 823788 - DNA, 100 bp, Homo sapiens
atccaaatactgcatatcagaaacaacagacgaagttatacggaagcgtctcctcattgatggagatggtgctggagatgatcggagaattaatctgcta

SEQ ID NO: 823789 - DNA, 99 bp, Homo sapiens
gcctaccatcgtttcttcctgcctttgggccgtcaggcagttggttgggacccgctccaaccctcggggcataaggaaatggtggcaggcacttcctcc

SEQ ID NO: 823790 - DNA, 100 bp, Homo sapiens
agaagaggaaagacttgtctcagcttccttcttcttcaacgtggggccagcagtccaatacaacagcatgtcagtcccaggccacgctgtcgttggctga

SEQ ID NO: 823791 - DNA, 100 bp, Homo sapiens
acaaggagctggacatcgagcctgagggaggggaaaggcgcaggatgctgtgtgctgtggacccacctggggttcatggagtgggccacggggcccagcc

SEQ ID NO: 823792 - DNA, 100 bp, Homo sapiens
ttctcagccgccgcatcgcgggggtggaggacatcgacatccaggcgaactcggcctatcgctaccctccgaagtccgtttgtttcgacgccggaccgcg

SEQ ID NO: 823793 - DNA, 98 bp, Homo sapiens
tgccatgtgagacgtgcctttgaccttctgccatgattgtgaggcctccccagccacgtgaaactgttcctgatatggcaggctatcctcacatccgt

SEQ ID NO: 823794 - DNA, 98 bp, Homo sapiens
cttgagagctgggttctattttccctcctcaaactgactttgcagccacggagagggacattagtcatgagtgccgagtgtgcggggtcacagaagtg

SEQ ID NO: 823795 - DNA, 98 bp, Homo sapiens
gtgattggtgcaagcgacgtgggatgagggatgacttgtcaagctcgaacatcatatactgaagatgaagttctttggggtcatcgtttttttcctgt

SEQ ID NO: 823796 - DNA, 100 bp, Homo sapiens
acaccccattctcaaaaacaaagagtatcatcaacgggaagtgagaggtgatctttagacagtgactgagtatggatcatttgaacgaggcaactcaggg

SEQ ID NO: 823797 - DNA, 100 bp, Homo sapiens
gagctgctgcaggtccgagccatggatgctgaccggggagtcaatgctgaggtccactactccctcctgaaaggtgtcatctttaagaaatgaaaagcga

SEQ ID NO: 823798 - DNA, 100 bp, Homo sapiens
gtcatatgctagtgatctctataatggttccagtatagtctctagttcaaaagaatgctgaaccgggagctgacacacctctcagagatgagccgatcag

SEQ ID NO: 823799 - DNA, 100 bp, Homo sapiens
cacagacctgcgctgcttcctacacagcctcctgtcgtgtggacttggttacttatataacaaggttccagtgggacatggccaaatatccaatcaagca

SEQ ID NO: 823800 - DNA, 99 bp, Homo sapiens
tcagagttcaatgtcagttctgaaggaattccagagacgctgtaacactctgatttcattgattgagaaagaaaatatggaaattgaggaaagagagag

SEQ ID NO: 823801 - DNA, 98 bp, Homo sapiens
gctgagttgagacatcagcaagtgctgggcctggaatgtcagaagcagcaggtccagagggggcaaacctctttatttaccaccttccacaggaattt

SEQ ID NO: 823802 - DNA, 100 bp, Homo sapiens
caaaagctcctacttcagcaaatgcagaatcagcccattgcaggaatgggataccaagtctcccaacaacagagacagtgcacgatctgattttctggag

SEQ ID NO: 823803 - DNA, 100 bp, Homo sapiens
ctcctggatcttaccagtgcgttccctgcacagaaggattccgaggctggaatggacagtgccttgatcttcccagacccgtcagattttgaccgctgct

SEQ ID NO: 823804 - DNA, 100 bp, Homo sapiens
cccggaaggcttcaaaggctgtcgcaaggaggaaggttcggggtgagggcactggcgtgctgggctcattatccctgcccctctcagagctcctcgtggc

SEQ ID NO: 823805 - DNA, 99 bp, Homo sapiens
agagaatgtgtcagccgatgcaccgagtccagcccaggaaaatggagaggtgtagagttcggtgctcgaatgataactattgatgggaaacagataaaa

SEQ ID NO: 823806 - DNA, 100 bp, Homo sapiens
agcgccatggcccagattctgccaattcgttttcaggagcatctccagatatgcacccaatgtccagggagcgtgcaaaatttgtcaaaagtggcctttt

SEQ ID NO: 823807 - DNA, 98 bp, Homo sapiens
actctacgagcctgatcagctccaggagctcaagggcagcagaagaagcctttgtaaatgacattgacgagtcgtccccaggcactgagtgggaacgg

SEQ ID NO: 823808 - DNA, 100 bp, Homo sapiens
atggtgggcaaggccttggtgccttattaccgtcaaatcctccctgtcctgaacatctttaagaatatgaatgggaggacatgtatgcccaggactctat

SEQ ID NO: 823809 - DNA, 98 bp, Homo sapiens
cctcccagtgttgggattataggtgtgagccaccacacccagccactaaggacactgcccatctctaagataagaacctggaaaggggactctgttgg

SEQ ID NO: 823810 - DNA, 51 bp, Homo sapiens
cccagacaggtggcgacggcagaggagaaattgacaatggcccttcagcta

SEQ ID NO: 823811 - DNA, 100 bp, Homo sapiens
cacagtttcttggagacccagttgagaaagctgcccaactaagacctatctccctaccaggagtttctagcactgaagcagtagaagactcagaaagtgg

SEQ ID NO: 823812 - DNA, 100 bp, Homo sapiens
gggagagatcgttggttcacagggaagtcgcctggaaaaaccaatagtaaatctccgagaagcaagggataatgctgtggctgaaaaggaacgagcagtg

SEQ ID NO: 823813 - DNA, 98 bp, Homo sapiens
cgagaagaagttgaggcgctataatcccagtgttccaatgcagaagttgcaggatatccagagagcaatggagctgctatccgcatgccagggcccag

SEQ ID NO: 823814 - DNA, 100 bp, Homo sapiens
ttagcaagctactgagtttcatggcacctattgaccatactacaatgaatgatgatgccagattccgaagaggctcaatctgtaaatccttctagtgttg

SEQ ID NO: 823815 - DNA, 99 bp, Homo sapiens
tttggacctgaaacagaaattctggaacacctatatggctggaacctatttgcctcagtcctatctgattcatgagcacatggttattactgatcgcat

SEQ ID NO: 823816 - DNA, 99 bp, Homo sapiens
gatgtatgaaggagttggagttgttgaaaccaaggacatggatttgattgacatactttggaggcaagatatagatcttggagtaagtcgagaagtatt

SEQ ID NO: 823817 - DNA, 100 bp, Homo sapiens
gcaggaaccagactgggggcgagctgagcacctgtagtcaatcacacgcaggaagccagcagacctgcagaacttggctcccgggacccacccaccattt

SEQ ID NO: 823818 - DNA, 98 bp, Homo sapiens
gcggagtgcgatgtggtaatggcggcgaccgagccggagctgctcgacgaccaagaggcgaagagttgggacccctgattttagcaggatggcccaat

SEQ ID NO: 823819 - DNA, 98 bp, Homo sapiens
gaccttggagtaattcgtcgacaggcagtttatccaggattatggtatgaggtactattaccaggtttacagcattttagaaacagtagcaacattgg

SEQ ID NO: 823820 - DNA, 99 bp, Homo sapiens
gagaagtggagaagaaatcagtcagccgcagagagcctacgactagatttgcatctttacgtcctgcgcggaggctgctacacacatgcagaagtcatg

SEQ ID NO: 823821 - DNA, 98 bp, Homo sapiens
cgaccaccaacttttcctccaaccattccaccagcaaaagaagatgatgtctttctacctaaagatattgacctagacagtgtggatatggatgagac

SEQ ID NO: 823822 - DNA, 99 bp, Homo sapiens
gaagctcttggggccagcgtgcgtcctgacgcacaggagagagctgaagcaccctgaaacgacagaaacaagcaatccgattccagaaaattcggaggc

SEQ ID NO: 823823 - DNA, 98 bp, Homo sapiens
tctggactgcagaagaacaaggtggagttggtgccttccagtattatcagttacacaaggctgctgatactttggctgtgaggcaaaaaaggagaatt

SEQ ID NO: 823824 - DNA, 99 bp, Homo sapiens
gaagaaaggattcgttacagccagagattggacacaactcagatgggaagttcatcgcccgggcacagcggatagagtacgactgtgaactagttcccc

SEQ ID NO: 823825 - DNA, 100 bp, Homo sapiens
ctgagccccgccaggaccatgcccactgctgtgttgaaatgggtctcagcatgatcaaaaccatcagataagccaatggacacgtcagtgttatctgaag

SEQ ID NO: 823826 - DNA, 100 bp, Homo sapiens
ttcaaggggaggagaaatagagtccacttcttgatgggaggcgtgacatatgaggagcgggaaggcctcctgcaccctggagaccgtgtgggaagacaag

SEQ ID NO: 823827 - DNA, 98 bp, Homo sapiens
ttagtggtctcactgacttcaagaatgaagccacggactttcacggactctcgttggggagatagagattcagaaggcacctggagaaaaggacctga

SEQ ID NO: 823828 - DNA, 100 bp, Homo sapiens
ggaattgatttgggaacaactggtcgtcttcagttaatggcaagacttgcagaggatacaaactggactctcaggacaaaacgacaccagccaaaccagc

SEQ ID NO: 823829 - DNA, 100 bp, Homo sapiens
ctgcattgtgtgatgaaaagaactgggaaggtatacccagaaaaatgatggaaaggaaaaggaacatgaattacatctggatcagtcccttgaaatcagg

SEQ ID NO: 823830 - DNA, 100 bp, Homo sapiens
atcggggtcatctccttcatgcagagtgacatgggtcgggaagcagcatatgagtctgtagaagaggcgacaccagggcttccaaatgaacaaccgaaag

SEQ ID NO: 823831 - DNA, 99 bp, Homo sapiens
actgcgcttgttttcctgggattgaatgctggtgggaagttttcggctttgtgagaaaccttaccatcaaacacgatggccagcaacgttaccaacaag

SEQ ID NO: 823832 - DNA, 98 bp, Homo sapiens
gcgcgccggagcggggtccgatggttctcgaaggcccgcggcgccccgtgctgcagatcccaaggtccccttcagttggtcacaagaggaaatttctg

SEQ ID NO: 823833 - DNA, 98 bp, Homo sapiens
aaacgatctcaaagaaaactgtcaggagcatacaagaggctccaggaagtgtttggattgtgagctatttcagaactgttctcaggactcattatttt

SEQ ID NO: 823834 - DNA, 100 bp, Homo sapiens
tcgtacagccatgcaggcatggagccctgcccagaatcaccccatttacctagcaacagttgtggacatcggatacccaaggagacgaagctgaagcagg

SEQ ID NO: 823835 - DNA, 98 bp, Homo sapiens
gaagaccagaagtggatggagaatgctgtctttgcaggtgccatgcctacaatggcaagcatcaagctgtctacacttcatcccattgtgaatcatcc

SEQ ID NO: 823836 - DNA, 100 bp, Homo sapiens
agtcagtcattttactgtcaagacatttcttcggcattctgcaacaggcatacccagagtatcttatcacttaccagatcatgaagccagaagccccttc

SEQ ID NO: 823837 - DNA, 100 bp, Homo sapiens
taatccgagacaagcagcctatgaaatgaggatgcagaataactctgtaaatggtttgtgagtactggaaaagataacctcctcaatgcttggcggaccc

SEQ ID NO: 823838 - DNA, 98 bp, Homo sapiens
gtcatccgcatcaacaagatgttgtcctgtgctggggctgacagctacagagggccggagctggagatgtggtctctgggagtcactctgtacacgct

SEQ ID NO: 823839 - DNA, 99 bp, Homo sapiens
gaagctgcagccgcacctggccaagggctgtggaaaatctctgttctcacaaagtctccccaatgctctacaagcaactgcgtcaggcctgtgaagacc

SEQ ID NO: 823840 - DNA, 98 bp, Homo sapiens
ggcgctcggcatccaggacgttccctcccccgatccaagttggaattagcatcctctcgggggatatgatgtttcagcttctccgaggtctggacttt

SEQ ID NO: 823841 - DNA, 100 bp, Homo sapiens
tgacccagaacagatgcgacagagtttgctgactgcaatccgttcgggagaggctgctgccaaattgaaaaggcaagcggatgagaccctggactttgag

SEQ ID NO: 823842 - DNA, 98 bp, Homo sapiens
gcccccattggcctcaaagctgttgtcggagagagttcacgcaaagaatctgctccacaagttttgcttccagaagaagagaaaattatagtggaaga

SEQ ID NO: 823843 - DNA, 120 bp, Homo sapiens
agaagcaggtgcagatcaagaccctggagggcgagttctcggtcaccatgtggtcctcagggtggcccagttgaaatccttcccttcctctaccttggaagtgcctaccatgcatccaag

SEQ ID NO: 823844 - DNA, 100 bp, Homo sapiens
aatccgcatctggggcacggagggacagagcgggatgccaccagcttgtccaaagggaagttccaggagctcctggtgggcatcgttgtggagaatgacg

SEQ ID NO: 823845 - DNA, 100 bp, Homo sapiens
cctacagtgacacgggttcatccacaggcagccacggcacctccaccaccgtcagctcggccagggtttcgagttctttgaagccagtgccaaggagaac

SEQ ID NO: 823846 - DNA, 100 bp, Homo sapiens
gaaagacgaggaaagaggaggaaaacaaaagctgctacttatggaagatacaaaggtgtctgccccaagcaagtctcttgggaggaggaggcggcggctg

SEQ ID NO: 823847 - DNA, 100 bp, Homo sapiens
gaggtacctctccttttccctctccctttccctaaggagaaggaagccaacatccttttggagccatgaatattgtccgaactccatctgttgctcagat

SEQ ID NO: 823848 - DNA, 100 bp, Homo sapiens
ccgcccgggtctgcagggacctcatggactgtgagcagaagatggtggatgcaatacttccatgcaggaggcaatgggctgaagaaaaccttcctggaga

SEQ ID NO: 823849 - DNA, 98 bp, Homo sapiens
gagtgctaaactgtgtggggcgcggatgggatccagctgttagtcgggatacattaattgtttggtcagaagcagagaactatgatttggctctgagt

SEQ ID NO: 823850 - DNA, 98 bp, Homo sapiens
aaagtagggcatccttcacccatctgaagggaggaaatagtggcaggtgacagtctgcatgtgcagttttcagctccggaccaaaatttaacagtgcc

SEQ ID NO: 823851 - DNA, 100 bp, Homo sapiens
gtgcctaccaagaagtctcagatcttttctacagcttctgataatcaaccaactgttacaatcaaggtctatgaagatgggcgagctttggttcatagca

SEQ ID NO: 823852 - DNA, 100 bp, Homo sapiens
tgcaaaagtttcaaatggtacttggagaatgtctttcctgacttaagggctcccattgtgagagctagtggtgtgtacgctggggaggaggaggaggaag

SEQ ID NO: 823853 - DNA, 100 bp, Homo sapiens
ctcaaatctcctgctgtgaaccagcagaatttttgaacaggttaccaacatcaagaagacactcaaagccaccgcatcctcctcggctcaggagatggag

SEQ ID NO: 823854 - DNA, 100 bp, Homo sapiens
gccagtgaagaaagtaacagtgagatagagcagataatgttaattcaagactctcgaagagaagcttcagtgcagatggatttgagatgctacaaaaccc

SEQ ID NO: 823855 - DNA, 100 bp, Homo sapiens
tggaaagtgaatgtgcggaaaatgccttcaaatcaggtaatgatccttataacaggggcacacaaggcatttgccctgtacaaagcaatagaagaaggag

SEQ ID NO: 823856 - DNA, 136 bp, Homo sapiens
tatgacttgcaattcctgtgtttggaccattgagcagcagattggaaaagtgaatggtgtgcatcacattaaggcccgatgagagaaagggaaagttaaggatgctggagcagaacaatggatttctctttctctt

SEQ ID NO: 823857 - DNA, 99 bp, Homo sapiens
tcagcgtcccccacaccacagacccgcgccgccgacgacccagcagccgccatggctctgctccgagaaggcagacggtaacaagtactccttgctgga

SEQ ID NO: 823858 - DNA, 98 bp, Homo sapiens
cagtaacagtgccagtggttggaaagaaagcagaaatgcccctttggcgccttatcaattgtcaatctaccaagcaacttggaaaaagaaaccacaca

SEQ ID NO: 823859 - DNA, 100 bp, Homo sapiens
tggtggtggcttaagttttgaagggaggtagcatccgttggatatccacaccatccttctcgctgcagggaggcaagtgaggcctatctggttggccttt

SEQ ID NO: 823860 - DNA, 100 bp, Homo sapiens
agatggatgctcacccgaaggctgattactttggccataaagaatgctgatgggagaaccattttcctaattttcaaattgttgagctgtttgccataat

SEQ ID NO: 823861 - DNA, 100 bp, Homo sapiens
ttacaaacagcaaccctcattgaagatattttgggtgttaaaaaggcctatgagagctacaagaagaaggactacacccaggtggactacttaatcaacg

SEQ ID NO: 823862 - DNA, 100 bp, Homo sapiens
gtcctgtcaagatgaaccatttagagatcctgctgtttggccaccccctgttcctgcagaacacagagcatctgctgcacccaagcctgagccggttcct

SEQ ID NO: 823863 - DNA, 100 bp, Homo sapiens
gcaggagcttttcgtaaagggaagtcatttctactggacttcatgcttagatacatgtataacaagattactttctatgaagacaaaaattttcaaggcc

SEQ ID NO: 823864 - DNA, 98 bp, Homo sapiens
acttttgcaaatgtccccctggtttttacacctctccagatggtaccagatgcataggtgctggagaatctggtaaaagcaccattgtgaagcagatg

SEQ ID NO: 823865 - DNA, 99 bp, Homo sapiens
tctacatcaacttggctgaccattggaaagggacacgtcaaaggctacatatcgcatcagcatcagaagctggtggtcagcaagcagaacccatttcct

SEQ ID NO: 823866 - DNA, 125 bp, Homo sapiens
aaccacccccaatcattggaagatttggaacctcactgaaaattggtattgttggattgccaaatgttgggtacaagaaaattccccaggacacagagctggtttggagcctttctttgatttta

SEQ ID NO: 823867 - DNA, 100 bp, Homo sapiens
ttccaatttgcccatctgggtcaacaagcttgacatggagagtggtggacatgacaacagagtcaactgcatacagtggcatcaagacagtggctgttta

SEQ ID NO: 823868 - DNA, 100 bp, Homo sapiens
agaagatggaaaaaacttgtttaatggaaaatcttttcaagccatacaccaattcaatttggaaggatggaagtcttcaaaagatctgaaaaatcagctt

SEQ ID NO: 823869 - DNA, 100 bp, Homo sapiens
gagtgttcaagatgctctctctggaccgatcccactgcttcaacggaccacaccaaaatgccatctcaaatggaacacgccatggaaaccatgatgttta

SEQ ID NO: 823870 - DNA, 100 bp, Homo sapiens
tctacttctccacttgaaccaccttcagacagagattcaagtcaatctgaaagtcccagccagccaagtgacgctgacattaaggaccagccagaaaatg

SEQ ID NO: 823871 - DNA, 98 bp, Homo sapiens
caaagcttccaatgagtatggcagtgtcagctgtacagccacactaactgtgacaggtgtgagtcatcctgttctaaagcaagttgctgaacagtttc

SEQ ID NO: 823872 - DNA, 100 bp, Homo sapiens
tgtcaccaacctgaacaatgccttcgaagtggctgagaaatacctcgacatccccaagatgctggatgcagaggaatgttggctaccagggtatttagcc

SEQ ID NO: 823873 - DNA, 100 bp, Homo sapiens
tggtactctaccttctggccaatgattatgtttgagaccttcaacaccccggccatgtacgtggccatccaggccgtgctgtccctctacgcctctgggc

SEQ ID NO: 823874 - DNA, 100 bp, Homo sapiens
gggatcaagatcagctccaggcctgggaaagtgaagtgaacagagtatctgtcaggcaagagctgctgtgatggtttatgatgatgccaataagaagtgg

SEQ ID NO: 823875 - DNA, 101 bp, Homo sapiens
atattttgcgagtactcaacaccaacatcgatgggcggcggaaaatagcctttgccatcactgccattaaggctcatcggaacctgtcccagctccctaat

SEQ ID NO: 823876 - DNA, 100 bp, Homo sapiens
gggccacaacggggccggcaagaccaccacccttctctggcatctctatcccctatgaggcaccacgtaagacctcctgcccttagctctcttgctcacc

SEQ ID NO: 823877 - DNA, 100 bp, Homo sapiens
gcggagatctctctcatctcgctcggctgcgggaaatcgggctgaagcgactgagtccgcgatggagagcagtatagctgtgactatggatctggcagat

SEQ ID NO: 823878 - DNA, 98 bp, Homo sapiens
actcctacctcccggcatttaaagtctttttcctgaaaccaagtacctctggtgacagtttacaaagtggaagcattccattggcaaatgaatccttg

SEQ ID NO: 823879 - DNA, 99 bp, Homo sapiens
tcaggttgtggtagaggcggaggctcaggcagcttgagggacacttgacattcagggacgtggccatagaattctctcaggaggagtggaaatgcctgg

SEQ ID NO: 823880 - DNA, 100 bp, Homo sapiens
tttggagacaagaagcagcttgattccaaagaaccattggaaagttggagccatcctacgtgatccgcaagtttctggatgcccagcgcattcacaacct

SEQ ID NO: 823881 - DNA, 98 bp, Homo sapiens
gctgagcagcacgggggcccccaaaatggggatctcgaggacctggaagaagcagaggagccagacatggaggaagacgatgatcagaaagctgtgaa

SEQ ID NO: 823882 - DNA, 98 bp, Homo sapiens
acccttccccttcttttttcttcttcaggggaacttagcaattcggatccttttaaggcctggcaacctcattctttaacgagaggaacataaatatt

SEQ ID NO: 823883 - DNA, 100 bp, Homo sapiens
cagaaggagctggcggacatcactttagaccctccacctaattgcagaatttagtggcatggttctactgtgtaaagtctgtggggatgtggcgtcagga

SEQ ID NO: 823884 - DNA, 100 bp, Homo sapiens
gcgacccggtgtgtggcgcgcccagagccccgcgtttcagccctagggaagaaacccgggaaggccgtggctgccatcatccaggacatccattcccaga

SEQ ID NO: 823885 - DNA, 100 bp, Homo sapiens
gccctgagggccttcgagagctaccgcgccagacagacacagaaactgatgaccagcaacttgaggaagtaccattatataatgatgtaatgctcccctc

SEQ ID NO: 823886 - DNA, 99 bp, Homo sapiens
tgacccgcctgctctccaccaagcaatctgcacatcgtgctgccacacgaggcttcattcgttatggctggcgctggggttggagaactgcagtgtttg

SEQ ID NO: 823887 - DNA, 98 bp, Homo sapiens
cgatgggttgtccgactgggagcagaggaagccttgaggacctactcacagataggaattgaagtctagggacaggaagatggttggcgacgtgaccg

SEQ ID NO: 823888 - DNA, 100 bp, Homo sapiens
tgcaaaatattcaggagaccgtcgttgccttgtatttccagagaacaggtgtgggcagaagaaaaagctagtgatcaacagtggcaatggagctgtggag

SEQ ID NO: 823889 - DNA, 98 bp, Homo sapiens
gggaatcggagaccatggcagtgcagctggtgcccgactcagctctcggcctgctgatgattgccaacactcctgatagctgaatgtgtgctggttta

SEQ ID NO: 823890 - DNA, 100 bp, Homo sapiens
accctgcctccttcccgccgccccctgggccacagacccctttgcttctgtttttgggaatgaatcatttggaggtggatttgctgacttcagcacattg

SEQ ID NO: 823891 - DNA, 100 bp, Homo sapiens
gaaaaagttgaatactgagtctgtatcagcgagtaaccagctcataaatcacatcgaacagtttttggatactaatgaaacaccgtattttatgaagagc

SEQ ID NO: 823892 - DNA, 100 bp, Homo sapiens
cctcactatctcctccctcttctcccgactatttggcaagaagcagatgcgcattttgatgggttggacccaatgatctgcttttaatgaatagaatata

SEQ ID NO: 823893 - DNA, 100 bp, Homo sapiens
ctgttactgaaggaactggtgatattattaaggtgtggtggacacaggcctattcatcaacatggctgagagagtctactttgggatgcaggatggctca

SEQ ID NO: 823894 - DNA, 98 bp, Homo sapiens
cggtgctcgagtgcctgcaggatgtgagggagatctgtctcgtaactgtgtaatcaaggaactagcaccacaacaggaaggtaacccaggagaagtat

SEQ ID NO: 823895 - DNA, 100 bp, Homo sapiens
ctgacagtgttacagagggacttgaagctcagtgagaaaaggtgttggtggaatgagcgttgcatgtgtcttgaagagaaaagcagtgctttggcaggac

SEQ ID NO: 823896 - DNA, 98 bp, Homo sapiens
agcaacagtatcgggaagacttatttcaggcacccatggacttggagaactggtcggggacaccctgtacctgaggtcttgctggatccatagcattg

SEQ ID NO: 823897 - DNA, 99 bp, Homo sapiens
cagccgcttcgtgtggttcttttctggcatcgtaggaggtggcctgctggtgttagacaaacccagtaggctaactgaaaaggaacttgctgaggctgc

SEQ ID NO: 823898 - DNA, 100 bp, Homo sapiens
aaaccagttcgtttaaggctttcttctttctcctgtggacaagccagtgctaccccattcacagacatcaagattttcgacaatgaagccaaagacgtgg

SEQ ID NO: 823899 - DNA, 100 bp, Homo sapiens
ggtgcacctcagcactatcccaagactgctggcaacaggaaatttccagaactctttgcacagttcaagtccttcctgggggtaaaagagctgtccttcg

SEQ ID NO: 823900 - DNA, 100 bp, Homo sapiens
aaattatgatctacctaccaatcgtgaaaactatattcacagaaacattgtcaattgttgctgtggaactagaactgaaggatttcatgaatgttctccc

SEQ ID NO: 823901 - DNA, 100 bp, Homo sapiens
agaacttgtacagagatgtgatgttggagaactatagcaatctggttttcttgggacccgtccctgctcctgaccatcaccgtcactggggtcactgtgc

SEQ ID NO: 823902 - DNA, 99 bp, Homo sapiens
gcgaattggagaaaaagttcagtgggaagcatgtcgtctttatcgctcaggtagatatagttgtaggtactccgggaagactagatgacttggtgtcaa

SEQ ID NO: 823903 - DNA, 100 bp, Homo sapiens
tgataaagatgatgatatccttctcaaccttgtgggatgtgaaaactctgttactgaaggttcgagaacttgtcttggacaattgcaaatcaaatgatgg

SEQ ID NO: 823904 - DNA, 98 bp, Homo sapiens
caaggcctaccatcgtttcttcctgcctttgggccgtcaggcagttggttgggacccgctccaaccctcggtaaaatatacccaggaccataaacaga

SEQ ID NO: 823905 - DNA, 74 bp, Homo sapiens
tcgtctccgccttccagttcggagagatgttcctcctgctgatcaagagaagctttttatccagaagttacgtc

SEQ ID NO: 823906 - DNA, 100 bp, Homo sapiens
ctgttggcggcggcgctagcttcggagtctcccgcgcgcacctcagccgcctcctagcggcgcggcgctcgctcctacgagattatggagaagtctggcg

SEQ ID NO: 823907 - DNA, 98 bp, Homo sapiens
atcatcaatactttctactcgaacaaagagatctttctgagagagctcatttcaaattcatcagatgaatatattaaaggaatctgtgaacctgaact

SEQ ID NO: 823908 - DNA, 100 bp, Homo sapiens
ttagactcaaaaattggagtccttataggaaaagcacaaccagtgtctctgaagaagatgtctcaagtagatattctcgaacagatagaagtgggttccc

SEQ ID NO: 823909 - DNA, 99 bp, Homo sapiens
cagaaactgttattcgggcattctacggagggagatattcttgagctgagctgcccctcctggacctgatgaagctgtacgaaggcgccttcctgccga

SEQ ID NO: 823910 - DNA, 100 bp, Homo sapiens
tcagctgccacctgcctttgacctttttgaagcctttgcaaaagtgaccaagaatatggcccaggtgaccaaagccctggacaaggccctgagcaccatg

SEQ ID NO: 823911 - DNA, 99 bp, Homo sapiens
caccaccgggcgccgagttcctggcggctcgcacgatttgcttgtaaatgcatcacgaagaggcagcccagaatgaagaaagcaagcaggagtgttggc

SEQ ID NO: 823912 - DNA, 100 bp, Homo sapiens
cgatctccgccctggggtcattgtcagctctagcctctcggaatttgtcttcttcagtggaaaccccgagaagactgatcagttcttcagttctaaaaca

SEQ ID NO: 823913 - DNA, 100 bp, Homo sapiens
caccttcagctgtttcctgagttgctgtttcttgggactgcgaagctatacaggctctcttccaccaaagccacctaagccaatgacttcagcagttcca

SEQ ID NO: 823914 - DNA, 98 bp, Homo sapiens
gtgactatgtggacagaggctatttcagtatagagatgtgactggagtgatttgcacccggatgcctagactcgccatctgctcaaagactgctcaga

SEQ ID NO: 823915 - DNA, 98 bp, Homo sapiens
gacatcctggaacctgggaaaggaaaaccagaactgatggctctatttgcagtctttcagacaacattcttcttaacattgctgtccttgaggactta

SEQ ID NO: 823916 - DNA, 100 bp, Homo sapiens
atttaattgaatcaagctgcaaagtaactaggtgcacttacagagtgctacgatgaactggggaacagatatcagcttccagtgtattgcttggcaccgc

SEQ ID NO: 823917 - DNA, 111 bp, Homo sapiens
aacatgaagctaccggccagggttttctttactctggggtcccggctgccctgtggcctcgctcctcggaggggtcatcgagcagctcggtgggaagcagctggtcatgaa

SEQ ID NO: 823918 - DNA, 101 bp, Homo sapiens
gttaccccatgcctgtccaggagacccaggcgccagagtccccaggagaggctgttcggctcttgaatcccagcgatgaaaccaggaactcactttcccgg

SEQ ID NO: 823919 - DNA, 100 bp, Homo sapiens
ctccattccatttgtggaggagcggctaaagcaacaagtgtgaaccggttggcaatggagacaagaaaagtaatgaaaggaaatcattccagaaagacag

SEQ ID NO: 823920 - DNA, 98 bp, Homo sapiens
gatgttacaaatgaacaaggatctcccagaattcaaggaagccttctccctatttgataaagatggcgatggcaccatcacaacaaaggaacttggaa

SEQ ID NO: 823921 - DNA, 98 bp, Homo sapiens
ccacaccacccacacaccagtcggcagcctccctgaaattccgggtagatatgcctggctcaggcagtgcattcatccccaccatcaacgccatcacg

SEQ ID NO: 823922 - DNA, 100 bp, Homo sapiens
acttatcagtagtgacttacagtaaggaatttgctgacacaatatcttccgcctggtgctgggcatatcctaagaacttacaactttcctgtattatcct

SEQ ID NO: 823923 - DNA, 98 bp, Homo sapiens
aagctctcgagagtctcacggagacgcaggctgaaactgccgccaaccggatctgtaaggtgctggctgtcaaccaagagaacgagcacctgatggag

SEQ ID NO: 823924 - DNA, 100 bp, Homo sapiens
cacactgataatgtgattcagtggttgaatgccatggatgagattggattgcctaaggttatagcaatacgccctattaggagaattacacatatctcag

SEQ ID NO: 823925 - DNA, 99 bp, Homo sapiens
tgcaggaagcctttttggtggcatggtcctcaagaagttcctaaaagaggaagcctttgacaagttgcctcagtctacggttcctgagatgcagcgtag

SEQ ID NO: 823926 - DNA, 98 bp, Homo sapiens
gcttggaaaacggagagactggggagaagtcttgtgataatggtcactgtatgctgaatggaacacatggtccatcttcagagaagaaatcaaacatc

SEQ ID NO: 823927 - DNA, 100 bp, Homo sapiens
agtcctgtgtcctgcaaagagaaaccagacagagttgaggagcccccggactacagccaacatgcccatcactcggatgcgcatgagaccctggctagag

SEQ ID NO: 823928 - DNA, 132 bp, Homo sapiens
gaagattcaagaaatggaaaagagcgatgaatctagcacagacttggaagagctgaaaaacgctgactggtgtccaagcaaaacctatgacccactgattaagtccacccgagattttccagatgatgtcat

SEQ ID NO: 823929 - DNA, 98 bp, Homo sapiens
cgcaccccactcggcgtcgcgcggcgtgccctgcttgtcacagcttcttccagaccagctggtcttgcttctggagcatctcttggagcagaagactc

SEQ ID NO: 823930 - DNA, 129 bp, Homo sapiens
tggaacatgctttcttcaagatggaacaaagactgttgagtatgctccatgtagatcacaatggactgctgaattatgaagtatttcagacccagtagtagaacatcactctgccactcactcctttat

SEQ ID NO: 823931 - DNA, 99 bp, Homo sapiens
actatttcattagcctcagaacgatatgataaagacgatgaagccccctctgatggtgacatgtacagccatgatgggaatactgatgagccagaatgg

SEQ ID NO: 823932 - DNA, 100 bp, Homo sapiens
cgccgccaacgcgcaggtgctagcggccccttcgccctgcaggcatgtagaagtccaggtgtttggtgatcaccatggcaatgctgtgtacttgtttgaa

SEQ ID NO: 823933 - DNA, 138 bp, Homo sapiens
gtaatatccttaagattaaaacttcagaaacttcaggaagatgcagttgagaatgatgattatgataaagaagtgcctagctgccactccatttatatgaggcaagaaggcttcctggctcatcccagcagaacagaa

SEQ ID NO: 823934 - DNA, 100 bp, Homo sapiens
ctttgccctgatgcgggcggcaggcctgcctgagctcagctgctccaaagacatccagtatctcaaggtatttattacagtatcaggagccaataccttg

SEQ ID NO: 823935 - DNA, 100 bp, Homo sapiens
tcctgcttctgctgctggtggggctcacggcgcctgccttggcgctggccggctacatcgagatgccttcaattaagttgcagagttctgatggagagat

SEQ ID NO: 823936 - DNA, 99 bp, Homo sapiens
agaagatctgggtgcccgtggaccacaggccctcgttgcccagatcggaaggagagttttacatggaagtggcttacagaaacttggcgctgaggtgca

SEQ ID NO: 823937 - DNA, 98 bp, Homo sapiens
cacaccagtggggcagtgcctcggcagagatcctacaagaatccaggatgatgatcccagattgccagcgcaggttggaagccgcatatttggatctt

SEQ ID NO: 823938 - DNA, 100 bp, Homo sapiens
aaggattgtggtcccgcctcacctggggtatggagaggaaggaagaggtataaatgaccaaggattgtacagagttgtgggggtgagttcaaaggtccag

SEQ ID NO: 823939 - DNA, 100 bp, Homo sapiens
ccgtgttggaaaaggtcatcggatttttgcagaaacacaatgggattcccaagagctttgaatgaagacatttaagattacttctagtaaccttgcttgt

SEQ ID NO: 823940 - DNA, 100 bp, Homo sapiens
taaaagtctagagatcaggactctggcagttgagagactgttggagcctcttgttacacagaagctatggagatattttgcatagaatgaaggatctctg

SEQ ID NO: 823941 - DNA, 51 bp, Homo sapiens
accacagctggtgaacagtccagctgtggatttctttaaccagatcaacat

SEQ ID NO: 823942 - DNA, 100 bp, Homo sapiens
ttttagattagagacactggctggattgaggagtagaaggctcaaacaacccaaggtagctacagcaagctgggtagcaggcagatccaaaggatatcat

SEQ ID NO: 823943 - DNA, 98 bp, Homo sapiens
cgaagacgagatccagttcctgcgaactccagagactgctgctactttgaaacgtacgatagaggccctgatggacagaggagcaatagtgagggact

SEQ ID NO: 823944 - DNA, 143 bp, Homo sapiens
agcccagctgaaatggactggcccccttgagcctgtcccaagccctggtgccaggtgtccatccccgtgctgaggatagaccactggaacaatgagaaggagagaattctactggtcacagacaagactctcttgatctgcaa

SEQ ID NO: 823945 - DNA, 100 bp, Homo sapiens
actaggagtatgccagatggaagaaccattgttagtgaacgtggacaaagctgttgtctcagggagcacagaagtttacccagggttgatgataaccgct

SEQ ID NO: 823946 - DNA, 99 bp, Homo sapiens
caggccttcgccaacagcggcaacgccatcaagcccgtctccttcatccgagacctgaaaaagtatggtgtttgcgaaaacttgcggaagctggagatc

SEQ ID NO: 823947 - DNA, 100 bp, Homo sapiens
gcagcatccaacgagatgaagatagctatgtaattaacggcaaaaaatggtggagcagtggtgagccagccatgagagggtatcttgtggccatattcct

SEQ ID NO: 823948 - DNA, 100 bp, Homo sapiens
tgcctttatgatgaatgcaataattctccattgagaagagagaagaacattctcgaatacctagaatgggaaatgctgctcatggattctcccttattca

SEQ ID NO: 823949 - DNA, 100 bp, Homo sapiens
caggatggaattttcaaggagacagatgctggaaggagaagattggctggcgaaaggatgcactgcatttgctggtgttcacaacagatgatgtgcccca

SEQ ID NO: 823950 - DNA, 100 bp, Homo sapiens
caccgtactgaagttccctgatgatcagactcagaaaattttggaaagagaagatgctcggctgatgattttgacttcagcgttccaggatccatgaagc

SEQ ID NO: 823951 - DNA, 100 bp, Homo sapiens
gttcgcggaggtgcggagagactccttgggggtcgagcacataacggggttcgggtgtctcgtgtgtgaacatcacagttgagccccatatgggggttgg

SEQ ID NO: 823952 - DNA, 100 bp, Homo sapiens
attgatgtctgataagaagtgttctgtcgaaaagaaatcagaaatggaaagtgttttggcccagtttcattcattggctcccatgtactatcgaggctca

SEQ ID NO: 823953 - DNA, 100 bp, Homo sapiens
gaagaaattattgaaaacttacagcaagatggttcatcttttgccctagagcaattgaaggtgtcatagagacgtcagatcgactggaccgtgaatcgac

SEQ ID NO: 823954 - DNA, 99 bp, Homo sapiens
caagctgctaagggagaaaggacactgggaggtccggataaaggagctgggaggtcctgattatggaatgctccagaaaacctagatgagcagattaag

SEQ ID NO: 823955 - DNA, 100 bp, Homo sapiens
cctgtacagcctgcagaactgcacagccatgggagattcggagatggcagtctttggggctgccgccccctacctgcgcaagtcagagaaggagcggcta

SEQ ID NO: 823956 - DNA, 99 bp, Homo sapiens
ttaaggattccaagtaactcttatttgtcttttcgtctgcagatgactatagagaacatgaaccatttgaaattcattccccacaaagactacacagcc

SEQ ID NO: 823957 - DNA, 98 bp, Homo sapiens
agaactacagcgagggcagtggcgtggccccggaggatgccaaccctgtggtaattgagccatcatctgttttgaatggaggaaaatactcatttgga

SEQ ID NO: 823958 - DNA, 100 bp, Homo sapiens
tatggaacttgaaaagcgtgaaaaaagaagcttattaaacaagaatttagaggagaaactgacgaccaagaggatgctggtggaaaagatgggccgagaa

SEQ ID NO: 823959 - DNA, 100 bp, Homo sapiens
gcaaatacaatcactctaaaatgtgtgatagcggagcgtgctttggacaccatgaattttgatgttataaagggcaagccagtacgcatcatgtggtctc

SEQ ID NO: 823960 - DNA, 98 bp, Homo sapiens
ttgccagaggtgcaagccaggcttctatcgtgacctgcggagacccttctcagctccagatgcttgcaaacatggtgagaacaagaccaagattggaa

SEQ ID NO: 823961 - DNA, 100 bp, Homo sapiens
tctgcctgtgtgagcagtctctggacaagatgaccacactccaggaatgccagtgcatcttttgcacagcttttcattaaagaacgatcaaaagtcaaca

SEQ ID NO: 823962 - DNA, 100 bp, Homo sapiens
tgaccaccaccctcgtgtctgccaccatcttcgacttgagcgaagttttatgcaagactcttgttcatctgatagtgaaacagaagatgctttagaaaag

SEQ ID NO: 823963 - DNA, 99 bp, Homo sapiens
gatgacaagcacgagtttctgtcagaagaggcagaagtggatgtgagagaaagagagacacagagagacagagagccaaagagggcaagagacttgact

SEQ ID NO: 823964 - DNA, 99 bp, Homo sapiens
tgagacaccgctatcacagctgctgcaatcgcttgggagagctcctgggccacccctcctttcaggtcaagtgatgagccctcctcttcagctaggaaa

SEQ ID NO: 823965 - DNA, 101 bp, Homo sapiens
aacaactagtgcaaccagtaagttgatccatccagatgaggatatatccctggtggcctgtggattaaaccacactttggcagtgtcagcagatggttcca

SEQ ID NO: 823966 - DNA, 98 bp, Homo sapiens
tgcagatggcactttccaaagtggatgcctccggggaggttcgagactataagaggcttacccccatttctgtgctggaccatgcactagaatcttta

SEQ ID NO: 823967 - DNA, 98 bp, Homo sapiens
cggaagccctgagggcagctgttcccactggctctgctgaccttgtgccttgagttgctggagaatgtaaccctaatccataaaccagtgtcgttgca

SEQ ID NO: 823968 - DNA, 98 bp, Homo sapiens
cacaacagagggacaacaaaagcctcctacaagagtcctaccaaaagtcctggaatatgttttgaaatggcaaaatccatgtttcaaagtaaaatagc

SEQ ID NO: 823969 - DNA, 100 bp, Homo sapiens
tggcgccaggacgaaggccctactgggcaagtctggctcttgctgattgaattcctttggtgcagtttagcatgttcctctgtgttctgcatctcctgta

SEQ ID NO: 823970 - DNA, 100 bp, Homo sapiens
ggaggacctccctgccctgtataccgagggaacaggcaatagagcatatgttctacaggagaagcatggttgtggctgattcagtttcacatataacaca

SEQ ID NO: 823971 - DNA, 98 bp, Homo sapiens
caaactttgtgattcaggagaactggtcgccatcaagaaagtattgcaggacaagagatttaaggtggacttaggtgaaggcaagatttgcttctgtt

SEQ ID NO: 823972 - DNA, 98 bp, Homo sapiens
aacatcgaggctctgaatggcaactgctctgacactgagaccctacagcttggggcctgggctcctctgaccatcctcattgagaaaggaaagtgagt

SEQ ID NO: 823973 - DNA, 111 bp, Homo sapiens
aacgggatctggatgagctggacaaggatcatttacagttgagagaagcctgggatggcctcgatcaccagattgggaaaatgaggtacgttagtgttcgcgattttaaag

SEQ ID NO: 823974 - DNA, 98 bp, Homo sapiens
gccgcgcacaaccgcacgtgcagtattggtaaaggttttcaaggtgtcatgaaaagatggggatttaaaggccagcctgctacgcatggtcaaacgaa

SEQ ID NO: 823975 - DNA, 99 bp, Homo sapiens
ctggaccagcccattgggagttacttcagcgaagccgtcagaagaagaagttgtagaaggagagaaggaagtcgaggctttgaagaaaagtgcggactg

SEQ ID NO: 823976 - DNA, 100 bp, Homo sapiens
tcatccaaacctgtcaacatgttgaagctggtccctgcagacggcttcccatttttatgaccggatgctgggaagcctgctggtccacaggtccatacat

SEQ ID NO: 823977 - DNA, 100 bp, Homo sapiens
gcagagactggtcttgaagagcagcttagcgaaagaaaccctctctgagttcttgggcacgttcatcttgattgatttgaactcagaggatcaaaaagcc

SEQ ID NO: 823978 - DNA, 98 bp, Homo sapiens
caacttcttgttaaatggggttgtagcatagaagatgtggactacaatggaaaccttccaggtggatgaaaatactaggaaaagtttatttaagttac

SEQ ID NO: 823979 - DNA, 98 bp, Homo sapiens
aagccagagccacacacaccatcatggtcctgcaaggagctgtacctccaaccagttcagttcctcctgttgccggggccccatcggttggacaacct

SEQ ID NO: 823980 - DNA, 99 bp, Homo sapiens
agaagcaaactacaaaccaacttttctatcagacgatgaattgaaacacctcattctcagggttaaacactttaagatgagaaaaattgatctctgtct

SEQ ID NO: 823981 - DNA, 99 bp, Homo sapiens
gaagccagccagaccaggaacccaccagaaggaaccaattccggacacataacaagcagcagtgaggacaccaaagggatcgtgggactttaccagatc

SEQ ID NO: 823982 - DNA, 100 bp, Homo sapiens
cggtcgattggtctgaaattcttgaagagacaggtttcagtgttgactggtgggctcttggagtgctcatgtttgagatgatggcaggaaggtctccatt

SEQ ID NO: 823983 - DNA, 98 bp, Homo sapiens
ctacctggaagacacatgcgtggagtggctccacaaatacctggagaaggggaaggagacgctgcttcacctggcaggtattaatctctggagaagac

SEQ ID NO: 823984 - DNA, 99 bp, Homo sapiens
acatattcatcatcatgggtgcatcggctaccaagcagtttctcgaagagattaacaagtggacagttcagtacaatgtttccccgctgtcttggaatg

SEQ ID NO: 823985 - DNA, 100 bp, Homo sapiens
aacttttcaagcctgaaggaaaggcagaactgcctgattacaggagctttaacaggtcatacagcagatggaacaaaaaaaattacaacaaggaattcct

SEQ ID NO: 823986 - DNA, 100 bp, Homo sapiens
accatggccgatgggggcgagggcgaagacgagatccagttcctgcgaactgtgattttcaaagccaagtcaaaatattctccagaattactcaaatacc

SEQ ID NO: 823987 - DNA, 98 bp, Homo sapiens
tggaactagcagatgctggcgacctatccagaatgatcaagacgcaaaatcgaatgaagctaatggccgacaactacgaggatgaccacttcaaatcc

SEQ ID NO: 823988 - DNA, 100 bp, Homo sapiens
agagtttatggaatgatcctggaatccaggaatgctatgatagacgacgagaatatcaattatctgactctaccaaatatattagaaaggaagatatcca

SEQ ID NO: 823989 - DNA, 100 bp, Homo sapiens
aagtggaatcttgatgagctgcctaaatttgagaagaatttttatcaagagcaccctgatttggctaggcgcacagcacggagcgtgctttggacaccat

SEQ ID NO: 823990 - DNA, 50 bp, Homo sapiens
gacatcttccgaatctacattaaagatccagatattgtttcagaaaaaaa

SEQ ID NO: 823991 - DNA, 154 bp, Homo sapiens
aatggcaattttaggtcctacgtttaccctcgatgctcttgttgaatgtcttgtgattggagttggtaccatgtcaggatggtggatgctgtggaggagatgggaataatccaaattgctgcatgaaccagaagaaagaccactcagtaagtga

SEQ ID NO: 823992 - DNA, 98 bp, Homo sapiens
aagtttgccccggtagttgctccaaaacctaagtacaacccatacaaacaacctggaggtgagggtcctcagaatggttggaatgaccctccagcttt

SEQ ID NO: 823993 - DNA, 100 bp, Homo sapiens
caagtatagcagaaaacatggaaggttattcaggtgcggacattaccaacgtgtgcagaatggacagcaaattatggatgaacctatgggagaggaggag

SEQ ID NO: 823994 - DNA, 100 bp, Homo sapiens
cgccgagctcagttcgctgtccgcgccggctcccaccccggcccgaccccgacccggcccggtcaggccccatactcagccgcggcgagtcctttgcaca

SEQ ID NO: 823995 - DNA, 100 bp, Homo sapiens
atgatcttttggaggaggaggatgaatttgatagagagccagattctcctgaatataaagccgcttgcaaactctgggatttgtaccttcgaacaagaaa

SEQ ID NO: 823996 - DNA, 100 bp, Homo sapiens
ctgggaaggtctatgtcagcacgcagaaggtttgaggagcattgcttctcatacagtaagggtcctgtagcatccacagtatcagcgttttctgtcctct

SEQ ID NO: 823997 - DNA, 99 bp, Homo sapiens
gagatcaccgacaagatcaccacggacgagatgatcaaacgcctgaagatacactctgtgcagttttagagagagacacactcagtattcgagaaagtc

SEQ ID NO: 823998 - DNA, 100 bp, Homo sapiens
acaacagcagccacaggaaccttgagatgatgaagataaactgacctggaaggatcgtttcccaggttacctgatgaactttgcctccatcttattcatg

SEQ ID NO: 823999 - DNA, 100 bp, Homo sapiens
gggggggtgatgtctgtggaaatgcaggccccgaaacttctgtggctgaaagaggggagccctggaagcttatgttcaatcagtgagaagtagagaaggc

SEQ ID NO: 824000 - DNA, 100 bp, Homo sapiens
atgaaggagcattcctcttggatgtgttcagagcaacattgttttgttgacacaagcatttagaagaaagtttgtgattcctgactttatgtcttttacc

SEQ ID NO: 824001 - DNA, 98 bp, Homo sapiens
cgccacctacccagtgaccatgataggttgacagatttgcaatggaattagaacaaagccgaaatttgagcaataccatagtgcacattgacatggat

SEQ ID NO: 824002 - DNA, 100 bp, Homo sapiens
gcggtgcccgaggagtagtcgctggagtccgcgcctccctggtgaaaattgataccaaggccattccactgtttgggaactccctgaagcctgacagtct

SEQ ID NO: 824003 - DNA, 50 bp, Homo sapiens
gtcctttatatagaagggagagagctttgcctgacaagggggatctgatg

SEQ ID NO: 824004 - DNA, 100 bp, Homo sapiens
tcagagtgatagatcattcacaatatctgtgtcgttcttggcagaaattatattttccagcccgtgtctgcagggcactgtgtttagtcttgagtcagag

SEQ ID NO: 824005 - DNA, 99 bp, Homo sapiens
aaaccttttcctcaccaccccggatggagaagatggaatttcatctacgtcttccacacacttgggcaagtgtccagagaatggctgggatgaaagtac

SEQ ID NO: 824006 - DNA, 99 bp, Homo sapiens
tggtcctctggtcttccctgaccccgcggccggacgacccaagcccgctgagcaggatgagggtgctgactgggttacttttttaaacactaggaatgg

SEQ ID NO: 824007 - DNA, 99 bp, Homo sapiens
tgccccgcccactttggccctgcactaccaccctcaccccttcctcaacaggctctcaccacacacttgttcatgggcgcagcaaagaagagggatcca

SEQ ID NO: 824008 - DNA, 100 bp, Homo sapiens
ctacatcccacagagatacccagacaacaggatcgtctcgtccaagtattaaaggtggaagaaggtccatatctttttctgtgggtgcttcaagtgttgt

SEQ ID NO: 824009 - DNA, 100 bp, Homo sapiens
tttttgatctcaactgcaaaatctgcatagatcttgcagttctacttctaagtatgtaatccagagaaaattctgacttgtgtataaaagaagactcatt

SEQ ID NO: 824010 - DNA, 100 bp, Homo sapiens
gtgattgaggtgcatggaaaacatgaagagcgccagatgtatcctccactcctcgctggccaccatcctgctgcccaacagaagaagctcttctgtctcc

SEQ ID NO: 824011 - DNA, 98 bp, Homo sapiens
tgcggtcctgaagcgcctgtcgctgctggaggacatcgtgtaccggcagctgaatgctgtatgcaggagctattcttgaagtttgtggatgaaaattg

SEQ ID NO: 824012 - DNA, 100 bp, Homo sapiens
ggacagccctgtcccactcactctttcccctgccgctcctgccggcagctccaaccatgggaggccgcgtctttctcgggccgcgatgggcctcttggaa

SEQ ID NO: 824013 - DNA, 98 bp, Homo sapiens
ctctccagtgtaatgattattgacaacaggaacgtcaaggtcgtgggaaataaaaggcagttctacacagactgcagcaacggttgcatctgcatatc

SEQ ID NO: 824014 - DNA, 100 bp, Homo sapiens
gacctgacaaaaagtccaaccctatcatcaggacagtgaagtctgtgggcatgatcgcgggagggacaggcatcacctatgagccacccaactataaggc

SEQ ID NO: 824015 - DNA, 98 bp, Homo sapiens
cgcatcttcacaactccgtcttacagagcagacaccaaatgaggaatgtttgttcctggaaaggctggaggagaaccattacaacacctatatatcca

SEQ ID NO: 824016 - DNA, 98 bp, Homo sapiens
ttctccgagccagcgagccagcgagccgccgacccgccgagcaaaatgccctggcttgaaaaacagtccaattgatgaaagtgaggtgcaaacagcaa

SEQ ID NO: 824017 - DNA, 100 bp, Homo sapiens
cattgctgcatcaagaaacccaagctgctgagatttggagcaagaggtggtggtggccttcccccgaagaaatttggtaatcctggggagcgtttgcgta

SEQ ID NO: 824018 - DNA, 100 bp, Homo sapiens
cccgcggcggcggccggcagcggcgagatcgtccaactgaacgtaggggggaccagaaccccagagatgaaaggcctcctcccactggcttggttcctgg

SEQ ID NO: 824019 - DNA, 98 bp, Homo sapiens
agaattaacattaaataaagtggatgaagaatttgtggtgaccaagaatatggcccaggtgaccaaagccctggacaaggccctgagcaccatggacc

SEQ ID NO: 824020 - DNA, 100 bp, Homo sapiens
tctcggccgaagtcaagaacaagtttccccctttctagggtgaggatggttctacacagccacccggagttccttagttgaaaggtgcgccctgctgtga

SEQ ID NO: 824021 - DNA, 100 bp, Homo sapiens
cagcatagagacgctaatctcacagctcttgcagctattggaccaaggaagaagagaccactagaatctggaattgagatggagtgaaggtacctgagcg

SEQ ID NO: 824022 - DNA, 98 bp, Homo sapiens
atttggaaagcatggtggaactattcccattgtacccacggcagagttccaagacaggatatcgtgtctgtgcactaatcatctcgaccttctacatg

SEQ ID NO: 824023 - DNA, 98 bp, Homo sapiens
gtgcggggtgccggccacatcactgtgtgaggggaagtggcttcgaaacattgactattaccgtttagatggttccactactgcacagtcaaggaaga

SEQ ID NO: 824024 - DNA, 51 bp, Homo sapiens
agccctgcctcggcggaccaaaggaaaacccgcctagtgccaagcaaccct

SEQ ID NO: 824025 - DNA, 98 bp, Homo sapiens
taatgctggggaccctgagatcgtcaagtctcccagcgaccccaagcaataccgttcaaatctgaacatcaatgatgtactagggaactactcattga

SEQ ID NO: 824026 - DNA, 98 bp, Homo sapiens
gttcaagagctcagaccctaaatgtaaacaggaacatcgataagtagtgtaaaaacttgcacaatgaaatccgaagccaaggatggagaggaggagag

SEQ ID NO: 824027 - DNA, 100 bp, Homo sapiens
gctggaggaggccagctctacaggcgaatcttttagctgaaaaagtagagcagctgatggaatggagttccagacgctcaatcttccgaatgaatggtga

SEQ ID NO: 824028 - DNA, 101 bp, Homo sapiens
ctcaagggcttcagcaccgcgcccatggcagagccagaccgtctcacagatttcaagcctggctactggattggtgtccgctatgatgagccactggggaa

SEQ ID NO: 824029 - DNA, 98 bp, Homo sapiens
gaatgccagcatctgccaagcatcccaagagtactatgatccctattttcaagatgtggcatctgagatgttgagaagacacacagccagcaggtgga

SEQ ID NO: 824030 - DNA, 99 bp, Homo sapiens
tttgctggatttaagcactgctgcactttatgaggaccctatctgcagatgttctgaatacctctgagaatagagattgattattcaaccaggatacct

SEQ ID NO: 824031 - DNA, 100 bp, Homo sapiens
tcagctttagaaatacactggaaggtctcagagccactcgaccagctttcatgtgtcaccgaaggcaggccatcaaactccaggtggatgacacagaaga

SEQ ID NO: 824032 - DNA, 100 bp, Homo sapiens
actcttacctaccaccttagtcgtttatttcttccgagttagaaatcctacaaaggaccttggagaagaaaatggctttccagatagcactggagatcct

SEQ ID NO: 824033 - DNA, 98 bp, Homo sapiens
agccatggacgcgtccctggagaagggagaagatgttcgtggaagaggtgtccacaggccaggagtgtggagtggtgctggacaagacctgtttctat

SEQ ID NO: 824034 - DNA, 100 bp, Homo sapiens
acattcacaacagataggtgatagttgggaatggagaccatcaaaggattggccatttgatgatggagctccaccccctaatcagatagtagatgattgg

SEQ ID NO: 824035 - DNA, 99 bp, Homo sapiens
atagcatcaaaaacaacattgaagaggaggaaaaagaggttggctcagaccttagctggatctccaaaatacaagtgaatcacccggcagttctgaggc

SEQ ID NO: 824036 - DNA, 98 bp, Homo sapiens
cttccccacttccctgcactctcatcgctctcggcctcggcctcggcctccgacacggtaagaatgattgatgttggctgatattggagtgctcattc

SEQ ID NO: 824037 - DNA, 100 bp, Homo sapiens
ctctggcagcccatcccggtgcacacagttcctctttctgaagatcaggatattggcagagtctggcctggaactaaaatgcctggaaaaatgggaaaca

SEQ ID NO: 824038 - DNA, 99 bp, Homo sapiens
aagagtagaaggagcatcgatgcaggttactcactataaacaatatccacccaacacaagcaaagtttattcctactttgaatgccgtgaaaagaagac

SEQ ID NO: 824039 - DNA, 100 bp, Homo sapiens
tgaaataacccttgatcctcctcctaattgcaggtgagcgtcctgaccaccctggagcgtaggttcaacctgcagagcgctgacgtgggtgtgatcgcta

SEQ ID NO: 824040 - DNA, 99 bp, Homo sapiens
tcttaagcctgtgtggattcgatgcactcattcagaaaactactactccagtgaccccatggatcaggtgtttgcattgagactccttgcattccgcca

SEQ ID NO: 824041 - DNA, 100 bp, Homo sapiens
agaaagctaacgatgaaaatcggcggacttaccagaatcttgtcattgagaaggatggttcaaatgaagggccgagatggacgaaaaaatgtggttcctt

SEQ ID NO: 824042 - DNA, 100 bp, Homo sapiens
attctctatttctgctccgtcatccatgccactgtttatggttggctgtgggagatgtgatgactggtttcatggtgattgtgttgggttaagtctttct

SEQ ID NO: 824043 - DNA, 100 bp, Homo sapiens
gtgagagtctcatttctatgcacagtgtttctcaggaggatggagctagttagctgtctgttgtctgtagcccaggcctgtctccactaactctggaccc

SEQ ID NO: 824044 - DNA, 100 bp, Homo sapiens
aggccaagtgctcgcagttctgcaccactggcatggatggcggcatgagtatctgggatgtgaaggtgtttgatgtacagaggaaagtcacctataggaa

SEQ ID NO: 824045 - DNA, 100 bp, Homo sapiens
ccctgccataggacaggctgaggctgagtctcagtgttgccctgttcagtctgaggtcacgagaagagaatgccttctagatgcaaaatcacctccaaac

SEQ ID NO: 824046 - DNA, 100 bp, Homo sapiens
cagaattatacagatagtagttcctcttctacagagtcctcccagagttcccaaggtggttctttgaagctctgaagtatcccaagttttctaaagctat

SEQ ID NO: 824047 - DNA, 99 bp, Homo sapiens
tctttgtcactccccggcggcagcacgaaagtaccatggagcccaagcaatctttaatgagctaccttgtgaatatgtggagccccatgaattaaaaga

SEQ ID NO: 824048 - DNA, 100 bp, Homo sapiens
tgcaaaatggacctaacacacccaacaagaaagtgactgagaccgaagatgatagtgatagtgacagcgatgatgatgaagatgatgttcatgtcactat

SEQ ID NO: 824049 - DNA, 98 bp, Homo sapiens
gcagtgtatgaacccagggcactgtggggacagggcgacgtgtgtccaggcgtttgccgtgtggggatggtggcagatactctggctgctacgtgaga

SEQ ID NO: 824050 - DNA, 98 bp, Homo sapiens
gcgttggggtgagaccctcacttcatccgggcagcttgtgcagctggaagagaaagggcagggttcagtgccctggtcagtatatggtgtctacatcc

SEQ ID NO: 824051 - DNA, 100 bp, Homo sapiens
gaggaaatagtactaggatcacagtaccatggatgtggtaggcgaaaatgaggccctgcagcagttctttgaagggatatcagcacatttggagcctccc

SEQ ID NO: 824052 - DNA, 98 bp, Homo sapiens
agcggctgcagatggagatgaaggaggacgacgtttcttttctcatgctccgacagttagttaatatgtgcatcaacccagatccagagaagcgacca

SEQ ID NO: 824053 - DNA, 98 bp, Homo sapiens
ttgatctccgccaccgtcttcaggccaggtcacagtaatgaaaggcagtaatagaaataaggatcattcagcagaaggagaaggggttggaaaacgac

SEQ ID NO: 824054 - DNA, 100 bp, Homo sapiens
ctggttactgggaaaagatatcctggaaatgtttactattagtgtaagcgacttcaggaagaaatcaccaaacagtctccaacgttgcaaagaaatgcct

SEQ ID NO: 824055 - DNA, 100 bp, Homo sapiens
ttccagattatctggttttgtccaactgcgagactggaagactgcaccataccaggagtccctgtgtctaatgtgaatctagagatccggcccaccggag

SEQ ID NO: 824056 - DNA, 99 bp, Homo sapiens
gctgacaaaaacgggatcgctttggaaacatctttaccctgttcattgggccagaggtgttcccttcccaaagaacttccttcagatctgcaagaagat

SEQ ID NO: 824057 - DNA, 98 bp, Homo sapiens
ttattattggccctccagatacactttagtgaggcaggcgactaatcagattgtgatgaattgtgctgatattgatattattacagcttcatatgcac

SEQ ID NO: 824058 - DNA, 99 bp, Homo sapiens
ttgttcatcagactcttcaccagggcttttttgatatcccagtagacaatttgtatgcagagccggctgtcctaaagtggataagggagaatatctctg

SEQ ID NO: 824059 - DNA, 99 bp, Homo sapiens
ttcgattcactaatgtcccagaaaggacacaaatagatgtaggcagaatacctttacagaggttaaaattgctccagggcctggaatggatggtttccc

SEQ ID NO: 824060 - DNA, 98 bp, Homo sapiens
caccctcacagtttgctctgctcttccaacaccagtggaagatgatcacatcccagaacttggagcgtgatgcccagaagtgtgtgaactggtctgtg

SEQ ID NO: 824061 - DNA, 100 bp, Homo sapiens
tggtgaagaaagtgagcgaggagtcagaaactcagccactggttgccttggtaggcaataaaagatgaccatgaaagctgtggttctaattctaccaacc

SEQ ID NO: 824062 - DNA, 98 bp, Homo sapiens
cgaacttggtggccagcgccgcgcccggggccgtgcgctctcgggccactcggccgcagggtctccaactgaattccttgaagagaaaatggcctacc

SEQ ID NO: 824063 - DNA, 100 bp, Homo sapiens
tccaaataaattgcaagcattctatccaaatgctgagtcagtgctgattctctcaaatagagcttgaaggataaatcttcatttttgtttcaacaaaact

SEQ ID NO: 824064 - DNA, 100 bp, Homo sapiens
cggaactgcggagttgctgggtccaccgacccttaccctcagcgagagaagtaacccctatttgatggctttgcagatggactaggagttgctgaagcta

SEQ ID NO: 824065 - DNA, 100 bp, Homo sapiens
gaactaggatgtcccgacatgaagttgattatggaagattcccacaagagtaccacgtcagagacagcacctcaacctggttcagcagttcagggagctc

SEQ ID NO: 824066 - DNA, 100 bp, Homo sapiens
tatctggcccctggggggctttcaggtctatgctccatcagcaagcactgccgactacaatagggactcgccaggctatccttcctccaaaccagcaacc

SEQ ID NO: 824067 - DNA, 100 bp, Homo sapiens
gataggcggccatggtccaaccttgaaggcaatactgaacactgcgcagcttgcagaggtctcctggcagccctcattaggaattctgtctggccccgat

SEQ ID NO: 824068 - DNA, 100 bp, Homo sapiens
gccccggacgagagctccgtgcgggtggctgtcagagatttacaaacgaggaccacctggcagttcataaacacaagcatgagatgacattgaaatttgg

SEQ ID NO: 824069 - DNA, 98 bp, Homo sapiens
ttgctttggatcttgtggaaagtcagacatatgagctatttgcattcatcagtcacatgggaacatccacaatgagtggtcattacatttgccatatc

SEQ ID NO: 824070 - DNA, 98 bp, Homo sapiens
gagggatcccagcggccatgaccaggagccacaggcccaaatattgagaaatcagtgaaggatttgcaacgctgcaccgtttctctaactagatatcg

SEQ ID NO: 824071 - DNA, 139 bp, Homo sapiens
aacaataaattctcactctgtagtattagaaatataagccaagttcttgagaagaagagaaacaactgttttgttgcaaatgcagccctgaggatttggctactgcatataacaacagggggcaaatcaagtacttcag

SEQ ID NO: 824072 - DNA, 98 bp, Homo sapiens
ttttgaagatgcaacgagtgcacttggaacccacttccagcgggtgatcccagaagatggccctgcagctcagaacccagaaaatgtcaaaaggcttc

SEQ ID NO: 824073 - DNA, 130 bp, Homo sapiens
ctaatacacgatacctttttcttggcgattatgtggacagaggttattttagtatagagacatgtcatgctgcccaaggacatagccaagctggtccctaaaacccatctgatgtctgaatctgaatgga

SEQ ID NO: 824074 - DNA, 100 bp, Homo sapiens
cattccaggaggcagcctcatgtcatgagccagtggtccaggtctgcttcccgtaaccgcaggcatgatctgccggaggcgctgggcaatgaccccggga

SEQ ID NO: 824075 - DNA, 100 bp, Homo sapiens
agaagcaaaactcgtgttgttgaaaaagttgcggcagagtcaaatacaaaaggaagccaccgcccagaagatttgtcttcagcgaagcggaagtttgcag

SEQ ID NO: 824076 - DNA, 100 bp, Homo sapiens
agcaggtgtatgatcttttggaggaggaggatgaatttgatagagaggttggaattgtacagtatggagaaaacgtgacccatgagttcaacctcaataa

SEQ ID NO: 824077 - DNA, 100 bp, Homo sapiens
aaaacgctggagaacaaacactcgccctctaccaggtggtcttgtccagaatgccgtgtgatatcagagtttgtaattccaagtgtgtattgggtggaag

SEQ ID NO: 824078 - DNA, 101 bp, Homo sapiens
aaaaccttgtggaagagacaagccattttgtgcgcaccacttttgtgtccaggcataagaaatttgacgatgctgcccagtacaagtatggcaagaaccgg

SEQ ID NO: 824079 - DNA, 98 bp, Homo sapiens
gaatcatcgatgcaggggcctcaattaatgtatctgggctgatcccttatccaacatggttctaaccttcagtactaaagaagatgcagtttcctttg

SEQ ID NO: 824080 - DNA, 100 bp, Homo sapiens
cacaagacgactcaataggaggaaggtcatcctgtacagttctacagcatgaataggcctgcctctcgccatactcccccaacaatagggggctcgttgc

SEQ ID NO: 824081 - DNA, 100 bp, Homo sapiens
gcgcccagaggcgagccctggtggaggaagagctcctgagcccgctgaacctggagcaggccgcgtacgcacgagacgccctcgccaaggctgtgtacag

SEQ ID NO: 824082 - DNA, 100 bp, Homo sapiens
ttcggtgctgcggctgtgtgttttctgagcgagccttgaaagagataaaagcggaagtttgccacacgctttggcagcatgtaagcagctgtttgccaag

SEQ ID NO: 824083 - DNA, 100 bp, Homo sapiens
gtggaacatggctagcaggaatgcttactgttgcgtggttcgttattaacagttggttgaatctggcgatgtggaacccatggatatggagggctgacta

SEQ ID NO: 824084 - DNA, 100 bp, Homo sapiens
tttgtccttactcaagttctcagaagactcatctaactagacatatgcgtactcattcagaattcctggaaaactcaagcaattcgtatttgacttacat

SEQ ID NO: 824085 - DNA, 98 bp, Homo sapiens
gggagctggttggggaggaccagaaatcaggattccagaggagaaccagccacccagcaagcaggtgaagccactcttccgccacttccgccggatag

SEQ ID NO: 824086 - DNA, 100 bp, Homo sapiens
tcgaaggttgtttggcttgtttaacagcatataccatcttcctatgcatggaaactcattatgagaaggcatcattcttaacaaagaagttaaatattgg

SEQ ID NO: 824087 - DNA, 100 bp, Homo sapiens
tttaatgtctggaaagaatgatgtggatgatgaggaagttcatggaagttcagattgttcctcatgtggttaatttggttcattctttcaaaaatgatgg

SEQ ID NO: 824088 - DNA, 98 bp, Homo sapiens
agtctaagggatatggctttgtctcctttttcaacaaatgggggtactttcattgaattccgaaatgggatgttaaacgtgtcccctattggaagaag

SEQ ID NO: 824089 - DNA, 99 bp, Homo sapiens
cgagctgagtggttgtgtggtcgcgtctcggaaaccggtagcgcttgcagcatgcaacaagctcaaccaaattggaagatctgagttatttagacgggc

SEQ ID NO: 824090 - DNA, 99 bp, Homo sapiens
gaactgagctttcacactggagatgttttgaagcccagcgatctgctcacgagctgcccatggttgaaagacaagacacagacagctgcctggtctatg

SEQ ID NO: 824091 - DNA, 100 bp, Homo sapiens
agaaactcagcgctggggaagaaggccctggagatgtacaaggatgattggaacaaagtgtcggaacatgttggaagtcgtactcaggatgaatgcatcc

SEQ ID NO: 824092 - DNA, 100 bp, Homo sapiens
cggcgacaggactttgggtctgggtgagccttctcgtggcggcggggaccgtccagcccagcgattctcagtcaggtggcaaactgtggtcatatatcag

SEQ ID NO: 824093 - DNA, 100 bp, Homo sapiens
attcttctggtgttttcaatgaggttgtggaaaggaggagaacccctgctgaaattcgagaggagtttgagcggctgcagagagagagagaagagaggag

SEQ ID NO: 824094 - DNA, 100 bp, Homo sapiens
caagaccgtgctggtctttctcaacctcatcttctgggttgctgaaaagccaggagtcaaaatgactgagcgctttgactgccaccattgcaacgaatct

SEQ ID NO: 824095 - DNA, 100 bp, Homo sapiens
tttggatcatctaaaccggaaaatagctgaactggaaaagaacattgttggtgaaaagaccaaggatttgtactgtgttcgcagtgacctggggaacctg

SEQ ID NO: 824096 - DNA, 100 bp, Homo sapiens
catgctagggtctctgcctaactgatcactcagatagcctgggctggaagctcttctacgtcacaggctgcctgtttgtggctgtgcagaacttggagga

SEQ ID NO: 824097 - DNA, 100 bp, Homo sapiens
acccatttgcttggggaattcctaggccactggctggacaaattacgaaggtatcagcagatgttgcacacaaacttggtataccttgctacaatagcag

SEQ ID NO: 824098 - DNA, 100 bp, Homo sapiens
gcggcctgaaagtggtggcgctggccagactgacacccataccttttgggcttcagaatgcagtgttttcggccctgattacgtcaaacagagatttcag

SEQ ID NO: 824099 - DNA, 99 bp, Homo sapiens
tcgcgggatgcgcccgggagccacagcctgaggtaaatcgatttagtaaggtggaagacagagcaatttttgtcactgaccgtcacctgtataaaatgg

SEQ ID NO: 824100 - DNA, 95 bp, Homo sapiens
gatatatatgctgacgaggagttcaaccagcaaagcacgattgtgtgccacaatcgagtggaccctaatggctcaagatacctgctgggagacat

SEQ ID NO: 824101 - DNA, 101 bp, Homo sapiens
ataaatgggaacaggccagcaaaacactcagctgcaagtccaaagccacaagagcagcggaaagagctcagtgctagaaagcctggtggggagggacctgc

SEQ ID NO: 824102 - DNA, 101 bp, Homo sapiens
actggacctgtgggctgggcagcagctgctgtggaagggctccttcaagcccagcgagcatggtggctctggtaggcgaggaggaaggttttctgctcaag

SEQ ID NO: 824103 - DNA, 100 bp, Homo sapiens
acgactccgtcgcagactacggacctgtctgggtctcagccgccaaagaccccgtccggtagacaatctgctgggaatttcttgggttgacagctcttgg

SEQ ID NO: 824104 - DNA, 99 bp, Homo sapiens
gaatatccagtttgagccatcggatctaagatccaaaaggttgaaaacgttagcggaagaacttatgcaaacacagcagatgcttttaaacaaggagga

SEQ ID NO: 824105 - DNA, 98 bp, Homo sapiens
aaaaacatgatatctaaaaagcagaatgtgcagagtcttttctttgccaagcaaaacagtttccaccacgtgtcatcaatcttacagaagaagtgctg

SEQ ID NO: 824106 - DNA, 98 bp, Homo sapiens
taattggagcctaccttccgcagcctccgaggacagggtgccttatcggagagactgcggagcttcagcatgcaggacctcaccaccatcaggggaga

SEQ ID NO: 824107 - DNA, 98 bp, Homo sapiens
gctttccacaatgcagttgctgtagtcatctacaataataaatccaaagaggagccagttaccatgactcatccaggaaatgggtcctgatgaatatg

SEQ ID NO: 824108 - DNA, 100 bp, Homo sapiens
caagtgttcctgcaatgctggctatgaagaaagaggttttatgtgccaaggtgtacattccaagcagagtggccctcatccttcagaatgtggatctgcc

SEQ ID NO: 824109 - DNA, 100 bp, Homo sapiens
tgcagcctcggtggccccgacatgattccttacttctccgccaacgcggtcatctcgcagaacgccatcaaccagctatcctcagtttgtggtctgccag

SEQ ID NO: 824110 - DNA, 98 bp, Homo sapiens
gcagaatttctgaaggtgttcattccatctctcttcctttctcatgttttggctttggggctaggggggaaatttgcagtggtgagaaaatgtataaa

SEQ ID NO: 824111 - DNA, 100 bp, Homo sapiens
ggaagaaaacctttgaccatgaagagaaatgagatgatagccaaaccctcaggaaaactgtggtatgtctgtgtgtaatggtaaaatatatatcctgggc

SEQ ID NO: 824112 - DNA, 99 bp, Homo sapiens
caggagtcatcggacgccagaatctggtccgtcggaagttagagctggaagctgctgtgacccgcctgcgggcagaaatccaggaactcgaccagagcc

SEQ ID NO: 824113 - DNA, 98 bp, Homo sapiens
cggcgacatgcagcagctgaaccagctgggcgcgcagtttccttacagattctagcatatggattcagtgcctggaacctgcacatgttgtggagtgg

SEQ ID NO: 824114 - DNA, 100 bp, Homo sapiens
ctcaccaagtcacatgacaagcattgccattacccagggaggagcaatacagctggctaacaatggtaccgatggggtacagggcctgcaaacattaacc

SEQ ID NO: 824115 - DNA, 100 bp, Homo sapiens
tattcatgatgttaagcaaaagtttcacaaagcatggttatgtaccgaaggactctaccgtgtcagcgggaataaaactgaccaagacaatattcaaaag

SEQ ID NO: 824116 - DNA, 98 bp, Homo sapiens
agccgtttgtcttgtcagaggcgggcatgaaatcattttatcagcatttgataactttaaagagccacagcgtcctgtgtttactcatgaaaatattc

SEQ ID NO: 824117 - DNA, 98 bp, Homo sapiens
ccggaggcgtttctgggcaaaccctggtcctcctggatcgacgccgccaaattacactgctccgacagtctctaattaacagaagatggcaaagccca

SEQ ID NO: 824118 - DNA, 98 bp, Homo sapiens
aaagttctccccagacggcagccaattcagcagctgagctgttgaagcagggggcaggtgaccaagaatatggcccaggtgaccaaagccctggacaa

SEQ ID NO: 824119 - DNA, 100 bp, Homo sapiens
agacaccaataattgctactttatcatcgggtgcagtggcagttggagtcattcgttgcccagtttgcagccaagaatgtgcagagagacacatcataga

SEQ ID NO: 824120 - DNA, 99 bp, Homo sapiens
gttccttcgcgcgtgaggctgcggctctgacgaaaaatggctacaaacttcctagcacatgagaagatctggttcgacaagttcaaatatgacgacgca

SEQ ID NO: 824121 - DNA, 60 bp, Homo sapiens
gccggtcctgaccaccgtgaacggacagtcccccccaggcactgaacttcccagccctgc

SEQ ID NO: 824122 - DNA, 99 bp, Homo sapiens
aaggaacttggttccccctccctcagcttccgccccaaaagaaaatatttacaccagcagctccagttcataccaataaagaagatcctgctacccaaa

SEQ ID NO: 824123 - DNA, 98 bp, Homo sapiens
gccgccgctgtccggagccccacagatgccttcaattaagttgcagagttctgatggagagatatttgaagttgatgtggaaattgccaaacaatctg

SEQ ID NO: 824124 - DNA, 100 bp, Homo sapiens
aacttccagctggagagcgtcaacaagctgtaccaggacgaaaaggggcactatgaacgaagaggagcagtttgtaaacattgatttgaatgatgacaac

SEQ ID NO: 824125 - DNA, 100 bp, Homo sapiens
cgacagcacagacagaatccctgctaccaacagcccacctgaggatattgaccataaggactcatatctcattacaagaagcatcatggccgagccagac

SEQ ID NO: 824126 - DNA, 100 bp, Homo sapiens
taagcatgaccccggagatagagagagtgaggcgaaaccaggagcagctgagtgcgaattctaccttgtcaaagattcctgctttacagggtagcacaaa

SEQ ID NO: 824127 - DNA, 100 bp, Homo sapiens
aggcagggcgggcggggcggccgacgacgttcgtcatttagtgcgggagggatcctgaaccgcgcggccgaaccctccggattcggacggagagcgcgag

SEQ ID NO: 824128 - DNA, 99 bp, Homo sapiens
tgtgctggccggtctgcctccgggagaaccgagcgcttccggtgcgtgtgaattaaacaaccaccatgtcgagcaaaaaggcaaagaccaagaccacca

SEQ ID NO: 824129 - DNA, 100 bp, Homo sapiens
aagctgatcactggttgttacaacattctggccaatcatgcagatcctaacaggtgctgggtaggccaggtttcagcatcgcagacaagaagcgcaggac

SEQ ID NO: 824130 - DNA, 100 bp, Homo sapiens
caaatgctggtgttcgcccctcagatgaagacagtagttctttggaatcagaagctgccagtaactcagattctagccatgaaggtcaagaggaatcttc

SEQ ID NO: 824131 - DNA, 98 bp, Homo sapiens
caaattttactttctgacaatgcagcttctcttgcagtgcagaatctttagaacacgatgttcttgatgataatacagagcagacagatgacaaaata

SEQ ID NO: 824132 - DNA, 99 bp, Homo sapiens
aaaaacctgagaacttcctgatctctctcgctgtgagacatgtctgagactcctgctcagtgtagcattaagatggtgaccctgataactatattgctt

SEQ ID NO: 824133 - DNA, 100 bp, Homo sapiens
taaaaaggaaaaacatcttgatctggagaaaaactggatgttggtagaaaaagcaagagtttgttatatagcaattgatgatcttacagcagaactggag

SEQ ID NO: 824134 - DNA, 100 bp, Homo sapiens
tttccggatcaatccagatggcagccagtcagtggtggagctctttcgacgtgtagcagcagctttgccgggaatggaaagcacacaggacagaagcaga

SEQ ID NO: 824135 - DNA, 98 bp, Homo sapiens
gagctttctaaccctgaaatttctgattggatagctttagtcaaagcagctgctgcagctgcagccaagaacaaaacagggagtaaacctcgaaccag

SEQ ID NO: 824136 - DNA, 99 bp, Homo sapiens
tggtggcttttgtgggctgctgcggggcctgcaaggagaactattgtcttatgatcacggttactataacaacagtaccaaggtggctgtgaaaaccct

SEQ ID NO: 824137 - DNA, 142 bp, Homo sapiens
tctcgctccgtggccttagctgtgctcgcgctactctctctttctggcctggaggctatccagcagaaagatgctggtttcgagttttggagatccttgttttttatggaacacagttctgtaaaattttcataagattcct

SEQ ID NO: 824138 - DNA, 100 bp, Homo sapiens
ctcaggatgttctgagattgcatcaggatattaatgattataaccggagattctcagggcaacccagatctgccgagacagcggctaacaggatatgtaa

SEQ ID NO: 824139 - DNA, 100 bp, Homo sapiens
ctggccatccttccccacccaggaccacctcccggccacgccccgggtccggctctcattcaaagatgagaactggactgatgaccaactgcttggtttt

SEQ ID NO: 824140 - DNA, 149 bp, Homo sapiens
gcttgagggggactggcctggcgtgcactccgcacctcggggacattattgcgcgtggaacggctgcttttggaaggtctggcgtgctcctgatcagagttactctgatctgaagattttggcgttcaaggcattaagataatagcctg

SEQ ID NO: 824141 - DNA, 98 bp, Homo sapiens
caatgtttctgggagagtgcttaattcctgtgaagtttatgatcctgccacagaaacggtgaaaaaggttctgaaggaccaactggcccacagggatt

SEQ ID NO: 824142 - DNA, 100 bp, Homo sapiens
tccgggaagccatagctctgcatggctccttcctcagagaagcttcctgttatgtaccttatggattctattgtgaaaaacgttggaagagagtatctca

SEQ ID NO: 824143 - DNA, 99 bp, Homo sapiens
acaaatgcacgcgacaggaaccaggcaaaagaatggaccccagcaggaaaagcaaagcaagagaattctgctaagaagttttattctgaatctgaggaa

SEQ ID NO: 824144 - DNA, 99 bp, Homo sapiens
ttgttgcaagaagaaaacatcagcggcagagggtccagacatgcgtcgggatgtccaggaaatttttcgcatgaccccccacgagaagcaggtcatgat

SEQ ID NO: 824145 - DNA, 145 bp, Homo sapiens
aaccgggctgtgatccgggaaagcaggaagggtgtcactgaccccaaagaactgaaattctgcgttcaagaatccacattcatctcaatggaaggatcctgccttaagtcaacttatttgtttttgccgggaaagtcgctacatg

SEQ ID NO: 824146 - DNA, 100 bp, Homo sapiens
actttggaaaagaaagcctttttgaagggcaagactggagagttaaatcagcttttaaatgcagttaaatcaatgcaggagaagacagttgtgtttcaac

SEQ ID NO: 824147 - DNA, 99 bp, Homo sapiens
aagtgtctgtagccgcagctgcgggtccgggattcccagccatggcagattcctccgggcagcaggatgccatggacaatattaccaggcagaaccaat

SEQ ID NO: 824148 - DNA, 98 bp, Homo sapiens
aaggcagaactgcctgattacaggagctttaacaggttctggctgatagattgtcgacagatccaggaatccgttacttttgcatcacaagtatacag

SEQ ID NO: 824149 - DNA, 100 bp, Homo sapiens
cccaaatatcactttctttgtttatgtcagtaatttcacctggcccatcaaaattcaggtagttggcaaaaaaggagaaagccactaaggtacaaaagac

SEQ ID NO: 824150 - DNA, 99 bp, Homo sapiens
ctcccgagtagttgggactacaggtccctggatctgaccggccctctactcctggggggtgtccccaacctgccagaagacttcccagtgcacaaccgg

SEQ ID NO: 824151 - DNA, 98 bp, Homo sapiens
cgcgtctccccggcccagtccgcgcccggccccgcggggccgctccggcccgctccgagcactattcctgatcagagaactccagttgcttcaacaca

SEQ ID NO: 824152 - DNA, 100 bp, Homo sapiens
gaagaagcttgaggacacctggtacactcggtttgctttgaagtatcagcccatagtgccatctgggattgacagctcagcctgaactctatcttctgaa

SEQ ID NO: 824153 - DNA, 98 bp, Homo sapiens
agatcttcaagaagaagacctgcacgacgttcatagttgactccacagatccggggctctttaagggtcacccagagactctggagaagtttgacaag

SEQ ID NO: 824154 - DNA, 99 bp, Homo sapiens
ttgctgatataatggccaagaggaatcagaaacctgaagttagaaaggctcaacgagaacaagctatcaggtatctgagagcaagcagcaatagaaatt

SEQ ID NO: 824155 - DNA, 100 bp, Homo sapiens
ttcagaaggagctagctgaaataacccttgatcctcctcctaattgcaggacccaggaccacccccaccttctccattactaggtttgaaaccactgcag

SEQ ID NO: 824156 - DNA, 100 bp, Homo sapiens
tttggatgtagcaaggaagaaattgttcagttcttctcagcaatgtagtagaaaagtgtgttactcatgcctcccgtgctgagagagctttactgattga

SEQ ID NO: 824157 - DNA, 98 bp, Homo sapiens
tgtctatcttcttccttaggaaaccataactctcaggagccttctccgcagttggcttcctcggtagcttccacacggagcatgcccgagagcctgga

SEQ ID NO: 824158 - DNA, 98 bp, Homo sapiens
ccaggccccaggcctcctgtgggacgccagtcaccagcaggagcagccaaccagcagcagccatcatggaggtgaggtcgcaggagctggtgcagcca

SEQ ID NO: 824159 - DNA, 99 bp, Homo sapiens
tcagttgtgcgttgcggccagtcgccactgctgtgatctgcaactctttcaccatctgtaatgcggagatgcaggaagttggtgttggcctatatccca

SEQ ID NO: 824160 - DNA, 99 bp, Homo sapiens
atctatcagcaggctccgggctgaagattgcttctcttctctcctccaaggtaggaagtgttgtacagttccattgcaaaaaaggacaccttctccaag

SEQ ID NO: 824161 - DNA, 100 bp, Homo sapiens
gaattattttgcaccactggatgttgtttactgaaagaagattggcccatgcacaagctggaatgttctcccatggttgtttttggggaaaactggaatc

SEQ ID NO: 824162 - DNA, 98 bp, Homo sapiens
agtaggaagctactcagagtattacagagggggcttgtacatgacagctggaatagcctccagttgaggggcttggtggtgctccttatctctaaagc

SEQ ID NO: 824163 - DNA, 99 bp, Homo sapiens
tgggaatctggagcttcagtaacagaatcatttgctgtttcaaatagagaactgtgcgatgatgagaaagagttcatacattttccagtatgtgagggg

SEQ ID NO: 824164 - DNA, 100 bp, Homo sapiens
tggttggagatcatgaccaaatatgctgtgggagaagagtgtgacttcgagtttttccagaaaggaggagtcaaggaagcccttagtgaacgagaactct

SEQ ID NO: 824165 - DNA, 98 bp, Homo sapiens
ttccaggagctgctgcgcacgaccggcgcctcggacaccttcgagggttggatgagaccccgctttctacaccaaccgcaagagacagccttgacaaa

SEQ ID NO: 824166 - DNA, 109 bp, Homo sapiens
cagaacagttttcttctgggctccaattatgaaatgggcttctccacgctgtccctggcggaccagatgagccttctgcagagtgcttggatggaaattttgatccttg

SEQ ID NO: 824167 - DNA, 100 bp, Homo sapiens
gcctgcagctggagctgagcaaagtgcgtgaggagtttaaggagctgaaagcgcgctgtaagagctcattttggaggaataatggatgaaccatctccct

SEQ ID NO: 824168 - DNA, 99 bp, Homo sapiens
atgactcagaagggaaaatgggatttaaacacccaaaggcctggttgcagtatgcctgaaatttgggatgtagaagatcctgccaatgctgggaaaact

SEQ ID NO: 824169 - DNA, 100 bp, Homo sapiens
ttcaaaacaaaatacatgtcagttatcaagagactcaacagatgcagatgaaggatggacactccacagctgaccttgactgaactccgggtccttcttg

SEQ ID NO: 824170 - DNA, 98 bp, Homo sapiens
tcttcctggacatgaccaactggtcaagagacaactgcctttgaaagagagtgagtgactgtttccaaaacagcaagcatagggagagccgccggaag

SEQ ID NO: 824171 - DNA, 100 bp, Homo sapiens
cagcaacctttgagggagaaggacatcatcatcaagagggagatggtgtcccaatacttgtacacctccaaggctttttttgctccactcaagcctgtta

SEQ ID NO: 824172 - DNA, 99 bp, Homo sapiens
ccacacctagactgatgcttattagtcatcaccgttattcctactaacgtcctgtgtcactgaggatttgtacacacagatatgacgaaagacttgaaa

SEQ ID NO: 824173 - DNA, 100 bp, Homo sapiens
agctctgcgggaagcggttcctggatagtttgcggctgagaatgcacttactggctcattcaggttgccaacttggcctgttccatctcaaataatgaag

SEQ ID NO: 824174 - DNA, 100 bp, Homo sapiens
tcacagtaaggccaaaaatgtgcatactcacagagttagagagagggatggtggatattaccttccaaatgatgatggagaattttatcagttctgttac

SEQ ID NO: 824175 - DNA, 100 bp, Homo sapiens
ccgtaacctgcgggagaggtttggaattgatgatcaagatttccagcctgattacatcaaccccagagccgtgcagctgggctcccttctcgtccgcggc

SEQ ID NO: 824176 - DNA, 100 bp, Homo sapiens
ctctttcattgttgggacatgtatattgttttttgctccactcaagcctgttagaatcaccatggaatacagctccagtgggaaggccactggagaagct

SEQ ID NO: 824177 - DNA, 100 bp, Homo sapiens
ccagagagcaatatggctggttccccaacatgcctcaccctcatctatatcctttggcagctcacaggacccagatgatgtggtaccagttggccaaaga

SEQ ID NO: 824178 - DNA, 98 bp, Homo sapiens
caggtttattctcccatagcatgtgagagaggctgctcacccaacagacgtctccatctccaaaacagccttgtactcccgcatcgggaccgctgagg

SEQ ID NO: 824179 - DNA, 98 bp, Homo sapiens
ggatgtgcttcattcgtttgcagttcagcagctcagaaaaagtgggaaggtcgctgctattgaaagaccacagcaagattctttcattcgtctcctcc

SEQ ID NO: 824180 - DNA, 99 bp, Homo sapiens
aggtccaaagaggactggtgatctacgtgtgctttttcaagggagctgataaagaacttcttcccaaaatgggacgactgggtttggattcagaagagg

SEQ ID NO: 824181 - DNA, 100 bp, Homo sapiens
aaggaaacctgttcctcggaaggaggaagaagttccaccaccaccaaaagggttgaaaggaggagcaggaggtactgatggacaaggaggtaccttccgg

SEQ ID NO: 824182 - DNA, 99 bp, Homo sapiens
ataaacaaaattagggaaatattatctgatgacaagcatgattgggagcagagagtaaatgctagttttgagacgtctggttacgcttattactcaact

SEQ ID NO: 824183 - DNA, 118 bp, Homo sapiens
ggcatatttagtcattcatttttgatcaggagaaagaagacagccatcatttgaaaggagagattaaacagattctagaaaatgaacttcagatacctgtgtccaaaatgctgttaaa

SEQ ID NO: 824184 - DNA, 100 bp, Homo sapiens
agctggagcgttgcgagcgcgaatggcacgagctggagggagaatttcaagaactgcagttggtgacaaagttcctgctgatataaggttaacttccatc

SEQ ID NO: 824185 - DNA, 100 bp, Homo sapiens
atgaagtggtgaaggagtgtgtgcagcgtgtatcgcattaagttcaaggagagctttgctgagatgaacaggggctcgaacgagtggaagacggttgtgg

SEQ ID NO: 824186 - DNA, 98 bp, Homo sapiens
tgatagtggttggcattgtcatcctgatcttcactgggatcagagatcggaagaaaatggcctgtccagaagacagccaaatacatccttcaaacaga

SEQ ID NO: 824187 - DNA, 100 bp, Homo sapiens
tttcgggacagctctctagaaactcgctctaaagacggaaccgccacagcactcaagtcttgatttcccagttaaagatgttcttcacccgaatgcagtc

SEQ ID NO: 824188 - DNA, 100 bp, Homo sapiens
cggcgatcggccgcggccgctctctgaagaacctccgagtacgaggtaaagggagaagatgaggaagagaacaatttggaagtacgtgaaaccaaaatta

SEQ ID NO: 824189 - DNA, 100 bp, Homo sapiens
tgtacctgttaccactttcaaaaggtctcctatggacagaagtgcgggcaaggagctttgttcctccccgatgtcaccctcccacagcccacttgctagc

SEQ ID NO: 824190 - DNA, 100 bp, Homo sapiens
acctctgccttccgggttcgagtaattctcctgcctcagcctcccaagcagctgggtctacaggtcacgagaagagaatgccttctagatgcaaaatcac

SEQ ID NO: 824191 - DNA, 100 bp, Homo sapiens
accgctgtccgacctgcagcaagagcttctcccgcctggagaacctgaagatccacaaccggtcgcacacagactccattcagaagagagaagaggggag

SEQ ID NO: 824192 - DNA, 100 bp, Homo sapiens
tcaactggaaagcaattattgaggcttttcatcttataaaagctgtgtcagtgttgctgaacttttcccaagaggaggagaacatgctcaaggaaactct

SEQ ID NO: 824193 - DNA, 100 bp, Homo sapiens
tttacagattctgaaattatggtgatgctgggggaaaatgatcaatattgacttccgcactcgagaatctacagccaagaagattaaagcaccaaccccc

SEQ ID NO: 824194 - DNA, 100 bp, Homo sapiens
gaaaaggtggagaatcaatttatggtggatattttaaaggtgacatgtacagccatgatgggaatactgatgagccagaatgggtaaagacagagcgaga

SEQ ID NO: 824195 - DNA, 99 bp, Homo sapiens
aaggaggaaggcctggttcttcaagaaaatggaagattgcattgtagactcctgcaaatttgggacgtcagtttcaaacatcataaaaccaggaccaaa

SEQ ID NO: 824196 - DNA, 98 bp, Homo sapiens
tgtgtctctgggagggcgctgctttccccggccacccggcgcgatgatccagaatgtcggaaatcacctgcgacgggctgaagccgacgtagcttctc

SEQ ID NO: 824197 - DNA, 98 bp, Homo sapiens
ggagacattcttgcgctgcatcgaagcctcaggaaattcacagtatggccaacagcaagatgcataccagggaccacctccacaacagggatatccac

SEQ ID NO: 824198 - DNA, 100 bp, Homo sapiens
tgtattgagaacaatatagatttgcaggtgtcttataagactttgacacttcctgttttgtctgaaaaaaatgtgaattacctgtgatatttggactcca

SEQ ID NO: 824199 - DNA, 99 bp, Homo sapiens
tgtggtacagctggaggccaagcagaaggcccggaagaaagaggagcggcagagcctgctgggtcgatggccaggtggtcttcataaactatactgcct

SEQ ID NO: 824200 - DNA, 99 bp, Homo sapiens
aagcggcggcggcggcgccgggcccgggggtggtgacagcaggtctgaggccatcagcatcagcaaagccatcaacacccaggaggcccccgtgaagga

SEQ ID NO: 824201 - DNA, 108 bp, Homo sapiens
tcttcgtgggaggcgccgtgagttcgccgctggtggctccggacaagttggatggcttgaggactggtactaaaaggaaacgtgactgggaggccattgccagcagaa

SEQ ID NO: 824202 - DNA, 100 bp, Homo sapiens
ctcccaaaaatagacgcaccattgaagttaaccggtgtaggagaagaaatccgcagaagcttattaaagttaaggaactgtggaaggtgcatcagtgaag

SEQ ID NO: 824203 - DNA, 101 bp, Homo sapiens
ggaatatgcgatgggaggaagagcgagacctaagagggtacctgtagctgggaatgtcctacgtgttaccggagaaattgacacaagattctctttttgtg

SEQ ID NO: 824204 - DNA, 100 bp, Homo sapiens
ttaaaaataatgcaataatttctttgagaaaagatctaaatgaagatgaccatcatcatgaacaggatgaagttaaaggaagtagatcgtacagccatgc

SEQ ID NO: 824205 - DNA, 50 bp, Homo sapiens
cgggaagtcactcataagcgcgctcaagacggagctggagtttgttcaga

SEQ ID NO: 824206 - DNA, 100 bp, Homo sapiens
cccagctggaatacacacaggagtgcaagatttagatgtagatgtagatcaacccaaagaagaaaagaaagaatgctactataatctcaatgacgccagt

SEQ ID NO: 824207 - DNA, 100 bp, Homo sapiens
cttgccttatcaccttcttgcttgcaggagatacaactcgtcaacgaatcaaattcagtgatgacagagtatgcaagagtcaccttctcaactgttgtcc

SEQ ID NO: 824208 - DNA, 100 bp, Homo sapiens
agcgcaccccgactgccgaggaacgagagcgcgaagctaagaatggcttattcagaagagcataaaggtatgccctgtggtttcatccgccagaattccg

SEQ ID NO: 824209 - DNA, 100 bp, Homo sapiens
gacccttactactgtccaagggatcgctgatgattacgataaaaagaaactagtgaaggcgtttaagaaaggtgataaaagaaaatgtggctgaagttac

SEQ ID NO: 824210 - DNA, 98 bp, Homo sapiens
caataattgaagctagtcatcagcttgcaactccctgtcggctctttacactactgccacagagatagttcaaggtgacaatggctcctctgcagcag

SEQ ID NO: 824211 - DNA, 98 bp, Homo sapiens
ttctcactctttttactgccaagttcccactctgcatggtgttccacatcattgacttactgctttgtgaggggttggtgtgtgctggattggctgat

SEQ ID NO: 824212 - DNA, 100 bp, Homo sapiens
atgacattaacagacaagacacttttcagaaagacagtcatttgatccttcaaaaatcacaaggaagaaaagtgttataacttattctccaacaactgga

SEQ ID NO: 824213 - DNA, 100 bp, Homo sapiens
tgctctcctggcttcttactcagtccatcttctgcttagtatgtgtattcagacagtgcctacaccaactaatgttacaattgaatcctataacatgaac

SEQ ID NO: 824214 - DNA, 100 bp, Homo sapiens
gaaaggaggaagctacgtagctctgactgatggcttagggaacctcaccatcatcattgaaaccatgattattctggaaaactatgcgtaccctggtgtt

SEQ ID NO: 824215 - DNA, 100 bp, Homo sapiens
aactggatttctacataatggccgagccatggggaatatgaggaagacctactggagcagtcgcagtgagtttaaaaatggtgagacagctttcaagaat

SEQ ID NO: 824216 - DNA, 99 bp, Homo sapiens
ccgggcccgatgagcggcggcctcggcctccggcgcagcccggaaatgtccggcaagatcgagaaagcagtgacaatgtcagtgcctactgcctgcata

SEQ ID NO: 824217 - DNA, 99 bp, Homo sapiens
gcttgtatgtggggagaatatgtggacaacacaaacctggtccccaggctctggtactttgatggaaacctggagaagctctttgctgagtgtcatgta

SEQ ID NO: 824218 - DNA, 100 bp, Homo sapiens
ttccaggaaaccttcactgctaagaggaactaagatctagagtatctcctcgaggaagtacaactgtcacattgtcctaatgcttgcagatgatatggcc

SEQ ID NO: 824219 - DNA, 98 bp, Homo sapiens
gaagattccatggccaggccccactggaggagatgaggaaggctgccgaggatctggaaattgtgggaaagcagtgccactctccgcttcacagatgc

SEQ ID NO: 824220 - DNA, 100 bp, Homo sapiens
ctgaatccgtgaaggaggcccaggagaaactggagcaggccgagaagaaggccactgatgacatccaccggaagcgcatggagaaggacctgaatgagtt

SEQ ID NO: 824221 - DNA, 99 bp, Homo sapiens
aacagaaaaccaagtcataccagtgctgtctcaattgcaggaaaagaaactctttcatctgctgctaaaagtggttctcaccattcaggaagcccttca

SEQ ID NO: 824222 - DNA, 98 bp, Homo sapiens
cgacgtgtactgctccaagtacaacgaagccaccggcgtgtgccccgacggcgacgaaacttccttcacaagtgggacccccgcagccacctgcagcc

SEQ ID NO: 824223 - DNA, 99 bp, Homo sapiens
aactcgtcatgctctttgtagcgtggtgcttctgttgctcacagtactatactggcaattgctggagaagattttgcaattgttgcttctgatactcga

SEQ ID NO: 824224 - DNA, 100 bp, Homo sapiens
atcatagtcaactgcgtggaagagaaggttgtctgcattcaaaagagcattctattaaagctaccttaatttggcgcttatttttcttaatcatgtttct

SEQ ID NO: 824225 - DNA, 98 bp, Homo sapiens
cagaactgcctgattacaggagctttaacagatgcctgtgaggagccaccaacatttgaagctatggagctcattggtaaaccaaaaccctactatga

SEQ ID NO: 824226 - DNA, 100 bp, Homo sapiens
cctagagctccgggacaatgataagactcgctatatggggaaggagactaatagacaagtcacgagttacctgtgtcaaatgggttcccggttcggaaag

SEQ ID NO: 824227 - DNA, 98 bp, Homo sapiens
tcccgggcgggccgtcgcgggagagctatcatggtgaacttacttcagattgtgcgggaccactgggttcatgttcttgtccctatgggatttgtcat

SEQ ID NO: 824228 - DNA, 98 bp, Homo sapiens
ggagtgcaatggcacagtcatagctcactgcaacctcagccttccacatttggcctcaaaacttccaatgtcaataattatagtaggtgttggaccag

SEQ ID NO: 824229 - DNA, 99 bp, Homo sapiens
ggattcacctctacttcacccatctggacattgagctgtcagagaactgtgcgtatgactcagtgcagcccccggtccctgagaagcggccccctgaaa

SEQ ID NO: 824230 - DNA, 100 bp, Homo sapiens
atggccgatgggggcgagggcgaagacgagatccagttcctgcgaactacgtaaaattcatcctgatcagaaaaatattaatgcctatgttgtgtttaag

SEQ ID NO: 824231 - DNA, 100 bp, Homo sapiens
agaaagaacggcagaacacacagcaagcaattctgtggtgttcttggtcacacatttatggagtttctgaagggcagtggagattactgccaggcacagc

SEQ ID NO: 824232 - DNA, 99 bp, Homo sapiens
ggatctctactgtgcagctccagagagacgtgaaacatgtgaacactcaagtgaagcaaaagccttccatgattacaccagagtgaactccgagcagga

SEQ ID NO: 824233 - DNA, 98 bp, Homo sapiens
aagtgtccgcaactacacacaagaagcatccttaggagctctgcagaacctcacggccggaagtggaccagctggtgagattggagagatgaaggatg

SEQ ID NO: 824234 - DNA, 100 bp, Homo sapiens
aatgggaagaatgagagaagtcatatgcccggcacaagctccttaataagcatttatagtcagtttttggcagcaatagaatcactaaaggcattctggg

SEQ ID NO: 824235 - DNA, 98 bp, Homo sapiens
cagatccccaggccccctccacccagtcggctagccctcgcctctgccatccggagtcttccagagcctctcatgacctatgagttacatggagattt

SEQ ID NO: 824236 - DNA, 100 bp, Homo sapiens
gggatacacagtggagaagcgagagggctacccacttcggccaggacccagatgatgtggtaccagttggccaaagaagagcctggtgttggtgcatgtg

SEQ ID NO: 824237 - DNA, 98 bp, Homo sapiens
ccaagccggcctaccccagatcatccaaaaacgctctgctgttgcccgtattcaggagttcttcagacggagaaaagaaaggaaagaaatggaagaat

SEQ ID NO: 824238 - DNA, 100 bp, Homo sapiens
cgtatccaagtactgtgcctccttgggacacaaggcaaatcactccttcactccaaactgcatctacgatataatggctttgactacttactaacataca

SEQ ID NO: 824239 - DNA, 100 bp, Homo sapiens
cagcaagtcccatcggaggacctccctgccctgtataccgagggaacaggtgcctgtgtagatcatcctagaatacctgtgtggtgctgtccttcctcaa

SEQ ID NO: 824240 - DNA, 100 bp, Homo sapiens
gatggacattttggaccagggagccctacagcgtctcttcaaaaaggtgaaaggtgtagcagtcactcggcctacacccacagcatcgaccttgtgaacc

SEQ ID NO: 824241 - DNA, 99 bp, Homo sapiens
ctggcatcaccatctacatcaggtcagctgtctcagtttggggcaagtttatacgggcaacaaagtgaagtattacagacacttagcacctgatcactt

SEQ ID NO: 824242 - DNA, 100 bp, Homo sapiens
aaaacaaaacaaatatgaactatgataagctgagcagagccctgcgatactattatgacaaggaaccattggagatactcattactctttgaaggcttac

SEQ ID NO: 824243 - DNA, 100 bp, Homo sapiens
gcttggaattctgcccactctgcggagttagcagtcacgacctccagcacagattccctataaggagcccctgctggtgcaccagaactaccgggggcca

SEQ ID NO: 824244 - DNA, 99 bp, Homo sapiens
aagcgccgcggttaaccacgtctcgtccacgacctccctaggcccagattgccttcctgcagggagaaaggaagggccaagaaaatttgaagaaggatc

SEQ ID NO: 824245 - DNA, 125 bp, Homo sapiens
gcttctgacagtggagacactggcattggaacttcctgttctgatagcgtggaagatgtatcctccactcctcgctggccaccatcctgctgcccaacagaagaagctcttctgtctccgatttc

SEQ ID NO: 824246 - DNA, 50 bp, Homo sapiens
agatggtgtcaaagagaaattctgggagaggaagcgactctgaatccgac

SEQ ID NO: 824247 - DNA, 100 bp, Homo sapiens
aacacttaacagcttcaggctttcctgcaagtaactggcagaagttttggtgataaagattttcggacaggtttagaaaatggaatcctcctctgcgagt

SEQ ID NO: 824248 - DNA, 99 bp, Homo sapiens
acttcttggatcttggaggtggtgtaaaggaagctcaagtatatcaagcattcaaattgctcacagctgatcctaaggcaagaaacctattggaattcg

SEQ ID NO: 824249 - DNA, 98 bp, Homo sapiens
atacttcccccacaacacaacctacagcctcaggggacactgaagccatgaagagagcattggcctccatagactccaaactgaaccaggccaaaggt

SEQ ID NO: 824250 - DNA, 100 bp, Homo sapiens
cagaacccggccctcaccgccctcaccacccctatccagacggctgcccttcaagtaccaattgggaaaatgaggtacgttagtgttcgcgattttaaag

SEQ ID NO: 824251 - DNA, 100 bp, Homo sapiens
ggaggatatggccttaaatcctatcagcctctaatgagattgcgacataagcataaagatgcctatcaagtgatattggatggtgtgaaaggtggtacta

SEQ ID NO: 824252 - DNA, 100 bp, Homo sapiens
gtgaaggcaatgatttataccatgaaatgattgaatctggtgttatcaacttaaaagatgccacctctaaggcatgtggagaccccaaggcaaaaccatc

SEQ ID NO: 824253 - DNA, 98 bp, Homo sapiens
atcagccatggtatcggcaaggatgtggagtcctgccatgatatggtggtctgtttttctggggggccaccaacacctcccgtgaatctaccatgtac

SEQ ID NO: 824254 - DNA, 141 bp, Homo sapiens
ggtgactggctggaagtgtgaccgctgtctgcccgggttccactcgctcagtgagggaggctgcagattcctcttctcctgtaaatgaccacagaggaagacaatgaatgaggtgaaagaatcccttcgcagcatcgagca

SEQ ID NO: 824255 - DNA, 100 bp, Homo sapiens
cccgagatcgagctctttgtgaagattctggctacattggagattggttgctttctaaaactgaaggagaagcccatgaagagatggtggattctcactg

SEQ ID NO: 824256 - DNA, 98 bp, Homo sapiens
tttgaatttcagatgtgttcctcaatgaatcaccctgccacagtgactcaggtcactcaaggaactatccgaccagctgccaacttcgatgctataag

SEQ ID NO: 824257 - DNA, 99 bp, Homo sapiens
cgagttgccgccggagaggagtggcctcgcccgcttgctttctatgggaggattctcgtaacagcagcacaccaactgaaaagcccaaactgctcgctc

SEQ ID NO: 824258 - DNA, 100 bp, Homo sapiens
aaggatgctcctgggatttcggagaggccgcaggagtcatttcctctaacactccaagaaaggctgtgtttgcgggaagcatgcagttgctggccggagt

SEQ ID NO: 824259 - DNA, 100 bp, Homo sapiens
ggaaccacgctctcgtctggtttgatcacaagacgggcaagcggggatctgatgagcttctttcttctggcatcattaacggaccttttaccatgaatag

SEQ ID NO: 824260 - DNA, 100 bp, Homo sapiens
gggaactcgatcctgctggctgctgtctctattctctcggcctgtcagcaaaattatgtttgagaccttcaacaccccggccatgtacgtggccatccag

SEQ ID NO: 824261 - DNA, 100 bp, Homo sapiens
gtttggccttatccagtctatgaaaggccgggaagttaaacttgtagccaccacctccgctcttcccgtcaccctcgcccccacttcgggccgaaagcac

SEQ ID NO: 824262 - DNA, 98 bp, Homo sapiens
gcgcgggcagtggaacgcgagcaggagattgaccgctggagggtgaagtgtgtgcaggaggtggaggagaagaagcggagtctcgcactgttgcccgg

SEQ ID NO: 824263 - DNA, 98 bp, Homo sapiens
tgaggacacttgtggagagctcgaattccagaatgatgaaattgtgtttccaatacttatctacaggaatcgccatgaccccagctctgagggaggca

SEQ ID NO: 824264 - DNA, 98 bp, Homo sapiens
aatacaggatgcctctcagctgccacctgcctttgacctttttgaagcctttgcaaaagaatggaagttggatacactttgtgacttgtacgagacac

SEQ ID NO: 824265 - DNA, 112 bp, Homo sapiens
cgggctcttcgtggctcaggcggggggagcggaccctgacaagttccagcttcagctttagctgcagctgcctctgttcagccacttgcaacacaatgtttccaactctcta

SEQ ID NO: 824266 - DNA, 98 bp, Homo sapiens
aaaagatgaaaatagagctgaaaaagactcatgctgctgagacagagatgacactggaaaaggtgaaaggtgtagcagtcactcggcctacacccaca

SEQ ID NO: 824267 - DNA, 102 bp, Homo sapiens
tgacattcaaggatatttatctaaaaattcttcttttgagtgccagtaaaggtgaatcaaaaactctggttttaagcaacctctcctacagtgcaacagaag

SEQ ID NO: 824268 - DNA, 98 bp, Homo sapiens
gggacgcgagcggcgagccggagcgcggagcccggctcccgcaccatggaggaggacgacagctacgaacatccagtcatggataaaaatgagctggt

SEQ ID NO: 824269 - DNA, 100 bp, Homo sapiens
gagccccgtcctccttcgccgccgcgcacaaccgcacgtgcaggtcatcaccgagtggtcttctcacatcatccttcaggcagcaccaagagtcactggc

SEQ ID NO: 824270 - DNA, 100 bp, Homo sapiens
atcacttccaacagtgacgtgttctccaaataccagctcgacaaagatggggttgtcctctttaagaaggtttccggaactacccagaagatgaaggtgg

SEQ ID NO: 824271 - DNA, 98 bp, Homo sapiens
cgacgcctgtgagcttggccttggagcgaggctatcacaagctgcaccagcttctaaccgagtctgaatttcctgctgctgttcacaaagatgctttt

SEQ ID NO: 824272 - DNA, 100 bp, Homo sapiens
acttcacagccagcagaacttaccttctccaggcaaattccgttcccctgcagcaccatctcctttggctcttcggcaaccagtgaaagcatttagtaac

SEQ ID NO: 824273 - DNA, 98 bp, Homo sapiens
tttgatgtggagtccaaatttgaaagctagaaaattatggcatgccgtttagcagaactgaagatgggaagatttatcagcgtgcatttggtggacag

SEQ ID NO: 824274 - DNA, 100 bp, Homo sapiens
agagatggacggtcactcagcctatggaggtatccatcacgaattgaaaaaattgactatgaggagggcaagatgttggtccattttgagcgctggagtc

SEQ ID NO: 824275 - DNA, 98 bp, Homo sapiens
ctgacccggccccggacggagcgccggccgcaccaccgccctctggccgttgcctcaccgggtgaggcggaaccaaccctcctggccatgggaggggc

SEQ ID NO: 824276 - DNA, 100 bp, Homo sapiens
ctctgttgaggaatgaccaggtctatcagctgctgtgacttactcgaagcctcgattggccacattttggtactacgccaaggttgagctggttcctccc

SEQ ID NO: 824277 - DNA, 98 bp, Homo sapiens
actctgaggctgatatgcaatgtcacttacaacattaatcagatactgcatttaaggaggaagagttcatcgattggtggagcaaattctttgcctcc

SEQ ID NO: 824278 - DNA, 98 bp, Homo sapiens
cgctcactgcacgccagaacctgaggagagaatggcatgccagagtggccaaatcaatgaaggtccctgtatatgagaccccagctggatggagattc

SEQ ID NO: 824279 - DNA, 100 bp, Homo sapiens
tttgaaactgctccacttaccaagaattattatactgtgttaacttcttctcccactacctctgagcagcttgcctgtaaaccacctgctttctcctttg

SEQ ID NO: 824280 - DNA, 98 bp, Homo sapiens
caacctcttccccaatttcaatgcgaccgaagccaggacagcacagccgtagcactctcagactctagctcaacgcaggacttctttaatgagcccac

SEQ ID NO: 824281 - DNA, 98 bp, Homo sapiens
ttacctgtttggagagaacagcgatctgaactttctggggaacagaccagttgtgagttttgcggcctccaggtggtggatccaatttttcattaggt

SEQ ID NO: 824282 - DNA, 98 bp, Homo sapiens
aggaccccggaaacattgcaaactattctaatacctcagtttgaattgccactgagcactctagatactgtggatggtagggaagaaaagtctgcttc

SEQ ID NO: 824283 - DNA, 100 bp, Homo sapiens
ccggctgcggtccgtgcggaggctgagccggccgcgggcgcgaccggaggcaggtatttaacgttaatgcacctctgcctccacgaaaagaacaagaaat

SEQ ID NO: 824284 - DNA, 126 bp, Homo sapiens
ttctttacagtaatttcaacagaagagtgagagatggaacccgaagaagaaaggattcgttacagccagagattgagctacacccccacggtgtttgagcggtacatggtcaacctgcaagtgaaa

SEQ ID NO: 824285 - DNA, 100 bp, Homo sapiens
caaatctgtgtcccggctttgtgcttctcccgaatcagcttcgtttggttccttggatattgtacctgtggatgcatcttatgaagtaaaagaactatat

SEQ ID NO: 824286 - DNA, 100 bp, Homo sapiens
ttgaagtacaccgtggtgacattgtatcattggtaactgataaatttcaaacggaagagagtggcagcatttagaaagaatctaattgaaatgtctgaac

SEQ ID NO: 824287 - DNA, 100 bp, Homo sapiens
cagaactgttccttcagccaaagaaacaagccgtggaataggtgtatcaagtaatggtgcaaagcctgaaattcaattagcagagcctcacagacaatgg

SEQ ID NO: 824288 - DNA, 100 bp, Homo sapiens
ggggcgcggatgggatccagctgttagtcgggtaggcataggcactcaaggagttgcccctggtcctgtaattggacttcaggcaccatctactggtctt

SEQ ID NO: 824289 - DNA, 100 bp, Homo sapiens
gcagaggaacggctggcccagccaatcctggagctgctgttgcagcacttgttccccaaacaagtgctcctacattctgagtgatcagcagctggactgt

SEQ ID NO: 824290 - DNA, 100 bp, Homo sapiens
aagttgcagtgcccaaggatttgattatggactcggaaatagcaaaggtcagaagaggccaagtgatggaaatagtggattaatggcaaaaaagcaaaag

SEQ ID NO: 824291 - DNA, 50 bp, Homo sapiens
tttcaaccccagtaacccctactgtgcagatttgattagctatggacaag

SEQ ID NO: 824292 - DNA, 102 bp, Homo sapiens
ccacgccaacgacatctgcctgctgcggggccaattcctgtccccccagcagcatggcatcgtgtgctgaaccctctgagccctctgccccactgcccgccg

SEQ ID NO: 824293 - DNA, 98 bp, Homo sapiens
gaaagtgcaatatttgagtatcactgcgagatttccaggtggaacttcttttggataaactcaagcaaaagggagcaattcgacgagcactgtttctc

SEQ ID NO: 824294 - DNA, 146 bp, Homo sapiens
cctgtgcagcatgaatgagacattatctaaacagagagaagagattgacacactaaagatgtccagtaaggaattcctcctgatcagcagagactgatctttgctggcaagcagctggaagatggacgtactttgtctgactacaa

SEQ ID NO: 824295 - DNA, 100 bp, Homo sapiens
caggtccttcttctaatattattggccagtctgtggaagaagctatcaggtacctactgtcaacaacgggaagtggaggccattactgaaggtgtagagg

SEQ ID NO: 824296 - DNA, 100 bp, Homo sapiens
cttattcaggacaaaaggaggaggtgtgatgaatgcagactctgctaccattttggctgtttggatcctcctttgaaaaagtctcctaaacagacaggct

SEQ ID NO: 824297 - DNA, 100 bp, Homo sapiens
aaccatctcagaagccatgcccctcaggctggaacttgccctgtctcctcgcagatgaggtgacctccttcagcacaccccccaccccagaacggaacaa

SEQ ID NO: 824298 - DNA, 130 bp, Homo sapiens
gaccgcgccaacgatgatcttctctccgagttccccgacaagtttggatcctgtgttccccctgttgaaggaggatgttcccatcttggtcagtcctatgcggatagagatgtctggaagccagaaccat

SEQ ID NO: 824299 - DNA, 100 bp, Homo sapiens
catgccaacctgggcctggtggataaccaacaagatggggaagaaaaggattgagaactttaagagtggtgtggtggacccaagtggagagattgtggaa

SEQ ID NO: 824300 - DNA, 100 bp, Homo sapiens
gcccgcccaaggtctctcgcgggcgggagaacggaaaactcccaacttcctgattttctaccctagcaaggatggtacgaagattccaatgttcattgtg

SEQ ID NO: 824301 - DNA, 98 bp, Homo sapiens
gttggtgtctcacctttaactctccttatgctgggtgaaaacaaaggagtctccccaggacagtgctatcacccgggatattaaccgaacattcccag

SEQ ID NO: 824302 - DNA, 100 bp, Homo sapiens
gggaccccggtacggacctgtgcaggaagaagcattgcatgcatttattcagccagagattctggatggcccaaatcagtatttttgtgaacgttgtaag

SEQ ID NO: 824303 - DNA, 100 bp, Homo sapiens
ggaggtggagcatgaacaggctcggctcagcctacgggagaagcaggaggaggtccggagactgcagcaggatatgctgcaggctgctagtcattatcgc

SEQ ID NO: 824304 - DNA, 101 bp, Homo sapiens
ggacaggaggcgaaatgtgcaaatgtttatggccaacaaatggaattttcttgagcatgtttctaatcgttttgccattggaatccatggctcatgggctc

SEQ ID NO: 824305 - DNA, 98 bp, Homo sapiens
ggccgcggaggaggaggaggtggagttgctgcccttccggagtccgccccgtgaggagaatggagtgtgaggaagaggctgtctgtgtcattatgtgt

SEQ ID NO: 824306 - DNA, 100 bp, Homo sapiens
aaaaactggagagcttcatcaaaaatagtgatagctttgataaatatgggacccgtacacatggactttttaagagactgggaattccagggcccacacc

SEQ ID NO: 824307 - DNA, 101 bp, Homo sapiens
gaaagccggaaggggcaagacgggttcagttcgtcatggggctgtttggaaagacccaggagaagccgcccaaagaactgctttccccacaaataaaccag

SEQ ID NO: 824308 - DNA, 100 bp, Homo sapiens
tatggcggcgtctgcgtctgcagctgcaggggaggaggactgctatgatttaggcatagagaatcgtgatgccaccaacgaccaagtcaccaaggatgct

SEQ ID NO: 824309 - DNA, 100 bp, Homo sapiens
gtacagtttgcagaatatattcagaaaaacgtgcaactttataagatgcgaaatgaccacagtccatgccatcactgccacccagaagactgtggatggc

SEQ ID NO: 824310 - DNA, 100 bp, Homo sapiens
ctccacaccagcggcagcatgcatctgatgctctctctccagtccttgctgaagagactttccgttacatgagtctccaattgagaaacatggcactgtt

SEQ ID NO: 824311 - DNA, 100 bp, Homo sapiens
tctgctgacatcgccatggccacccgtgcagatgaggacggagacacccctgggcgctgcctatggcacagccaagagcggtaccggcattgcggccatg

SEQ ID NO: 824312 - DNA, 100 bp, Homo sapiens
agattcgcaagaccttcaatatcaaaaatgactttactgaagaggaggaagcccaggaagggcctgtcccagtcggctttaccctatcgacgcagcgtcc

SEQ ID NO: 824313 - DNA, 100 bp, Homo sapiens
tctattcttgggtagccaggatttgaaggagatactctgacctgtgccagtgggtgtcaaattgagaaccaggtagatccccaccacctacagtaaaaag

SEQ ID NO: 824314 - DNA, 98 bp, Homo sapiens
attatggagcagagatcaggccaagtttggaatcactgggttgaagaagaggatgaacttgaatctggagaccaagaggatgaggatgatgaaagtga

SEQ ID NO: 824315 - DNA, 99 bp, Homo sapiens
ttttgtggtggcggagagagtcctttacatgcctaggtaaagtgttgagagaggagaaccagtgcattgctcctgtggtttccagccgcgtgagtccag

SEQ ID NO: 824316 - DNA, 98 bp, Homo sapiens
gaccagcacggaggagtacccccacctgaagccagcccgctaccgccgtggcttcatccacaatggcatcatggcctggttgcagtatgcttgaaatc

SEQ ID NO: 824317 - DNA, 99 bp, Homo sapiens
atcttcccagctttggttggaagacctattatcagatcaaccaccaaagtgggaaacattgaaatcaagggaaatgaggcaagttatcctttggaaatg

SEQ ID NO: 824318 - DNA, 98 bp, Homo sapiens
tcggcggctgctggacaccacgataacatttagcctggaacagagcggcactcggcctgagcggatcatctttgctaaggatgggcattttgccctgg

SEQ ID NO: 824319 - DNA, 98 bp, Homo sapiens
atttgacaagactaaaaacacttctctcagaaacagagacagccgctcaggaagcaatcttgcatgcgtctggaaatggcacaaccaaggactactgc

SEQ ID NO: 824320 - DNA, 99 bp, Homo sapiens
ttctcgacaaagaccgaaaagaagatgatacaaatgaatttgttagtgctgtgtgctggagggcactaccagatgggatggagtttcgctcttgttgtc

SEQ ID NO: 824321 - DNA, 100 bp, Homo sapiens
tttcaccaaggagccccactggctgtttgggaccatggagcggacagagcgggatgccaccagcttgtccaaagggaagttccaggagctcctggtgggc

SEQ ID NO: 824322 - DNA, 99 bp, Homo sapiens
caacacggccagggcccacccagccaaagcccgggacctgtacaagggccgccagctacaagattgggaaaatgaggtacgttagtgttcgcgatttta

SEQ ID NO: 824323 - DNA, 100 bp, Homo sapiens
ccctgcctaagaatgaagttcaattaaatgcatatgttctccaagaaccacctaaaggttcgatacaagaggctgttttcctagcgtggcttgctgcctt

SEQ ID NO: 824324 - DNA, 100 bp, Homo sapiens
atgagaacagcacctcggacaaccagctgcactgggtgttcaacagccatcactccttggagcatctcctaccatttatacacagcaaactgcattggca

SEQ ID NO: 824325 - DNA, 99 bp, Homo sapiens
ttggcattacttctatagaaatggctgaaggaaaacctccttatgctgatatacatccaatgaggctgatgatataaagccatgtccacgatgtgctgc

SEQ ID NO: 824326 - DNA, 99 bp, Homo sapiens
acagacagcatctctcttttacaattgtgaaggaaagcagtaccttttaaatctcattgatacaccggtgtatcagttcctatccctgtgattggactg

SEQ ID NO: 824327 - DNA, 100 bp, Homo sapiens
gaagcttggagcgcttaaacaggctggagaccctggccgccattggaggtttctaagcatgaattgaggaacagaagaagcagagcagatgatcggagca

SEQ ID NO: 824328 - DNA, 98 bp, Homo sapiens
agccgagtgcagaagatctgggtgcccgtggaccacaggccctcgttgcccagatgtaattttttctgcaggatgaattaagagaagagacacttgct

SEQ ID NO: 824329 - DNA, 98 bp, Homo sapiens
cacctgaacttacctcagaagaaaacaaaatcccagatgctgacaaaatatgggacacagcaggacaggaacggttccagtctctcggtgtggccttc

SEQ ID NO: 824330 - DNA, 99 bp, Homo sapiens
ccatgtctgaagctgtccaattcagaacacctaaagaatatggctcaagcctggaagatgacgtggtgggggacacttcagggtactaccagcggatgt

SEQ ID NO: 824331 - DNA, 99 bp, Homo sapiens
cctcgccaagctcaagaacaagcatgaggcaatgatcactgacttggaaggacagagcgggatgccaccagcttgtccaaagggaagttccaggagctc

SEQ ID NO: 824332 - DNA, 101 bp, Homo sapiens
cagatgtatgtcacatattgcaaaaataagcctgattctactcagctgatattggaacatgcagggtcctattttgacgaattagcttaccgaaaggagat

SEQ ID NO: 824333 - DNA, 98 bp, Homo sapiens
cgaagccttcagtgggactcccccagcagatacattctcaagaaaccctaaagcaggcagcagctcagaagtcccagcagctttcagcgttgcaagaa

SEQ ID NO: 824334 - DNA, 107 bp, Homo sapiens
ttacgaccaggttgagtttgatgttcctgttggttctcgaggggactgctatgatagagctctgcgtgcctcttgctgtgccctacctggacaaacccccaactccg

SEQ ID NO: 824335 - DNA, 100 bp, Homo sapiens
ccctgcgcgcctgatgggtcgaggcggacgcgcggctgcgtcaggtgactctcctattccatctgtttcttcgggatcatcttcacctctttcagccact

SEQ ID NO: 824336 - DNA, 99 bp, Homo sapiens
gaaagtactagtccgaagtctgaacaggattcaggaattctggatgttgaagacgaggaagatgatgaagaggtagtcagatgcctccgcagccacccg

SEQ ID NO: 824337 - DNA, 100 bp, Homo sapiens
catggccactgactcatgggccctggcggtggacgagcaggaagctgcggctgagtcgatcttgcttctgaaatatctacctgggatggagtgatagtaa

SEQ ID NO: 824338 - DNA, 118 bp, Homo sapiens
ttggcttctcgactcggtcctgtttcgacagcgaacatgtcgcggcctgtcagtgaacagagtatctgtcaggcaagagctgctgtgatggtttatgatgatgccaataagaagtggg

SEQ ID NO: 824339 - DNA, 98 bp, Homo sapiens
cacctacagaaacaaaatgtcaacaaattgatggggttccagaccatcaggatatagcttttggggccttgcagcagggaactaactgcctcgacact

SEQ ID NO: 824340 - DNA, 100 bp, Homo sapiens
aagtggaaggagcagaacgtgagggtgtaacttacaaaaaggctgaccccgcactacatctacccaccagccatcgtgcagcccagcgtggtgatcccag

SEQ ID NO: 824341 - DNA, 99 bp, Homo sapiens
ttatacttgaaaccataatgctacaaactctaggtgatgatgaacagtctacacagatggctgcaagttgggaagatgataaagttacagaagcatctt

SEQ ID NO: 824342 - DNA, 100 bp, Homo sapiens
tgccacagatgaagcttataaaatgtatcggcaagcagtgtaaacggaggacttggggaaaaaggaccacatagtccatcgaagaagagtccttggaaca

SEQ ID NO: 824343 - DNA, 100 bp, Homo sapiens
tacaatgatgctgctcaggaagaccaagatgctcagccagcattgggcagcccccgcttcctgctcccctacccccttcacatggcagtagttctgggca

SEQ ID NO: 824344 - DNA, 98 bp, Homo sapiens
aagatgatgcctagtaaattacagaagaacaaacagagactgcgaaacgatcctctcaatcaaaataaggacatggatttgattgacatactttggag

SEQ ID NO: 824345 - DNA, 99 bp, Homo sapiens
gcggcagccgtgcgacaggatttggcccagctcatgaattcgagcggctctcataaagatctggctggcaaggacctctactcacggttttctgaatgg

SEQ ID NO: 824346 - DNA, 98 bp, Homo sapiens
caatactacgtcggacagagttttgccaatggttctgtacagagtaatgagatgtgtgacggctgcaaaccaggtgtttttttctgaggctgtgttga

SEQ ID NO: 824347 - DNA, 98 bp, Homo sapiens
cctcatctccaggacagtgggaagagtggctggaggaattcagtttcttggggttggattggatgctgctggcaagacaaccattctgtataaactga

SEQ ID NO: 824348 - DNA, 101 bp, Homo sapiens
gtggtcctcttctcggttgggatcctccttatcctaagtggtgttcccactgatgaagagcaggcgactgggttggagagggagatcatgctggctgcaaa

SEQ ID NO: 824349 - DNA, 98 bp, Homo sapiens
ttgaagtacaccgtggtgacattgtatcattggtgacttccttcgctgggcatctggctgggattcttgttggactaatgtacactcaagggcctctg

SEQ ID NO: 824350 - DNA, 100 bp, Homo sapiens
atccagttcctcaaccagatgacccttacattgcagacctccttcaagtggctgataacaggaaagatatgatccgccaaatgatgattaaaatatttcg

SEQ ID NO: 824351 - DNA, 100 bp, Homo sapiens
cctgaagtgttagcaccttcactccgttgactatattgtggagtatgactatgatgctgtacatgatgatgaattaactattcgagttggagaaatcatc

SEQ ID NO: 824352 - DNA, 100 bp, Homo sapiens
gttcagttcgtcatggggctgtttggaaagacccaggagaagccgcccaaagaactgtacctgcagatgaaatggcccctcctcgatgtcccctccagcg

SEQ ID NO: 824353 - DNA, 100 bp, Homo sapiens
ttacggtttacagcgaagtccacccagcgtttccgaggtgaaggcgccgcgccaggccgggcgggcgaagtcctccagctctgcatcttccgaggcctcg

SEQ ID NO: 824354 - DNA, 100 bp, Homo sapiens
cataccagtctctgtacccactcaccttgtttgtcccaggactcctctatctcctccagtttgctgatggccgccaaagttggagttcgtatgttgatga

SEQ ID NO: 824355 - DNA, 100 bp, Homo sapiens
ctggacgctgcacagcggaatctatatagggatgtgatgttagagaactacagaaacctgatcttccttgccttgagaaggaaaattatgacgtttgggc

SEQ ID NO: 824356 - DNA, 98 bp, Homo sapiens
gtctttccactgtgctcagattcaagtaaaactggctaatccttttcgaataggacaggcacatacagtgaggggcaagtgtccagagaatggctggg

SEQ ID NO: 824357 - DNA, 100 bp, Homo sapiens
gaaggaactcaagaagacctagagtacaagttgaagggattaattgacctaaccctggataagaggaatgaatgtgatttgaactcattcatgttgagag

SEQ ID NO: 824358 - DNA, 100 bp, Homo sapiens
ggagatgacaacttgacttctctggggactctgaacttccctggtcgaacagttttttctaatggctattcaagagatcctacagtaaggaattgtttga

SEQ ID NO: 824359 - DNA, 98 bp, Homo sapiens
gaacaccgcacaggcaggaggcatggccaaggtgtccctggccagtgtccttccacctgtccacaagcatggggaacatcttcgccaacctcttcaag

SEQ ID NO: 824360 - DNA, 100 bp, Homo sapiens
ggaaagtgggaggtgctgataggcctgaggagcgatgcgacaggcatgatggaggtcgagtcctcctactcggacttcatctcctgtgaccggacaggcc

SEQ ID NO: 824361 - DNA, 98 bp, Homo sapiens
cgtcggccgccgccgggcctggcatactggagcatagtgaaagagtctattttgaagcttcaaacttagtgctgctgcagaccaggaacaagagagaa

SEQ ID NO: 824362 - DNA, 98 bp, Homo sapiens
tggaaccctgcgtccaggcgtgacggtcatcccgaaaggccggccccaggtcacccaacctgcctgcagtttaccctgaacatgaccgaggctgtcaa

SEQ ID NO: 824363 - DNA, 99 bp, Homo sapiens
accagcgtcctgaagcttttgatcaccattggctgggaaggaaaaacagaatcagctgttccctgcgaaagctttaaccggatcgacattccaccatat

SEQ ID NO: 824364 - DNA, 99 bp, Homo sapiens
agcagttcaccaccgtggtggccgacacgggcgacttccacgattcgggaactggagcctctcctctgtcacagtgacaatccatctcagctcatctgg

SEQ ID NO: 824365 - DNA, 100 bp, Homo sapiens
ggatctcagaaggccagttcaaagtaatctatgccagcaattatgacaatgttagcagaccatgcagctcgtcagctgcttgatttcagccaaaaactgg

SEQ ID NO: 824366 - DNA, 99 bp, Homo sapiens
gctcccctctcaggacaacccagatgtgcaacaaagtgcgatggcgcatattaaatttcctattgactacccctattcaccacctaccttcagattctt

SEQ ID NO: 824367 - DNA, 100 bp, Homo sapiens
cttccagctgtttgaccgaacaggctctgctgccatgaaggtgaagattaagtgctggaacggcgtggccacttggctctgggtggccaacgatgagaac

SEQ ID NO: 824368 - DNA, 100 bp, Homo sapiens
attgaaggagaaattgagtctttacattcagagaattcaggaaaatcaggccaagagattgagcattctgcacagctgaaggcccagattctaggttaca

SEQ ID NO: 824369 - DNA, 99 bp, Homo sapiens
catctcccgctctgccaccatcgccatcgcctacatcatgaagaccatgggcatgtcctccgacgacgcctacagcaggagcgagaacccgagcagcgc

SEQ ID NO: 824370 - DNA, 98 bp, Homo sapiens
agaaccaactcggatattgttgagagatcatgatgcagccgtccttttggatttctttttaataatgtgtgacccttcacctttgatcccctgacctg

SEQ ID NO: 824371 - DNA, 100 bp, Homo sapiens
ctggtcatggggacagacgccaaggtcagccaagatgggaagtcgctccttgacaagctccagcggcccttgactcccggcagctccgattccctgacag

SEQ ID NO: 824372 - DNA, 100 bp, Homo sapiens
ggaaaaagtacctgttcctgttcagaaaaaagaggcacccccagccaaagtgagaaagatcagtctaaagaaaaggagaagaaagtgaaaaaaacaattc

SEQ ID NO: 824373 - DNA, 100 bp, Homo sapiens
gaagcggacccagaaatgatcaagaaagatccccagcaggccctcaaggagctggctaagatgtgtatcctggccgactgcacattgatcctcgcctgga

SEQ ID NO: 824374 - DNA, 100 bp, Homo sapiens
gaccgtggctgctggcatggtgttggacatcgtgcagattgccatcacgaaagccaaagtggatttctccagtgtggtgtgcctgcccccttccgtcatt

SEQ ID NO: 824375 - DNA, 99 bp, Homo sapiens
tgacccactggaagataaacagctcccagatggacgtatcatcaaagttgggggagagagatttgaagcaccagaagctttatttcagcctcacttgat

SEQ ID NO: 824376 - DNA, 100 bp, Homo sapiens
caatgtgagatgtctccagcatttttacggacccaatcatgagcactgctttaatagggctaggcagctggaagagaaagaccgagtgctaaagaagcag

SEQ ID NO: 824377 - DNA, 100 bp, Homo sapiens
ccggccccggcgcaggcagttcaggtcccgtcaggaagcccaagtatgtggaaagccccagagtgcctggagatgcagttataatgccattcagagaagt

SEQ ID NO: 824378 - DNA, 100 bp, Homo sapiens
cctcaagtccctgatggcctcagaggaggaggatgattgccgccgtggacacagactccccccgagaggtctttttccgagtggcagctgacatgttttc

SEQ ID NO: 824379 - DNA, 100 bp, Homo sapiens
acttgccctgcgatgctggacagggactgacagccaggatctgggagcagtaccttcacgacagcacagatccacctgatggctggccgagtaccccagg

SEQ ID NO: 824380 - DNA, 98 bp, Homo sapiens
ggttagtctggaaatggagaaactcattcctgattggctttctcttacaattgaactgcttcagaaagcacaggacgccaggaaagcatgtgcagatg

SEQ ID NO: 824381 - DNA, 101 bp, Homo sapiens
gctgggcctaacctgatcgcaattgggtctagtgaatctgcacagaaggcccttaaggaatcctatccatcttcttcaccgatatggtttgtggattctga

SEQ ID NO: 824382 - DNA, 99 bp, Homo sapiens
acctccattggatttaaaagacagtcctcgtcagcactgactttcagctatggaatcggaagaatgctgtggagctggaacttgccaagtgcaggatgg

SEQ ID NO: 824383 - DNA, 100 bp, Homo sapiens
gcaaatgcctgcaatggactagctctgctacagaacaccaaggtggataagattgtggaccagctgcagcagttaatgcaggtgtatgacttggctgccc

SEQ ID NO: 824384 - DNA, 99 bp, Homo sapiens
ttttgaccattttcatccttctgatcatggaagggctttctgcgtttcttcacgccatacgcctccactgaatgctggaagccaagcttgcacattcta

SEQ ID NO: 824385 - DNA, 100 bp, Homo sapiens
ataagaggcgcaaaagaaaagaatctcaaagtgaaaggaccagttcgaatgcctaccaagaaaatggacccaagtggggtcaaagtgctggaaacagcag

SEQ ID NO: 824386 - DNA, 99 bp, Homo sapiens
aaaacatgacgtctccagccaaattcaaaaaggataaggagatcatagcagagtacgatactcaggtcaaagtgggcaggcttggctgaaatgagaact

SEQ ID NO: 824387 - DNA, 100 bp, Homo sapiens
cggagaccccgaaaacggaagcgcagggagaaggaagaggtgtttgaaaaggctctttattgagaaactaccaaaacatcgagattacaaatctgctgtc

SEQ ID NO: 824388 - DNA, 100 bp, Homo sapiens
tagacccggcgtctggcgtccccggtgcccagcattctgcggggcaggcggacgaatgccttagtttccactttccagcctggatcccctcacactgaac

SEQ ID NO: 824389 - DNA, 98 bp, Homo sapiens
caatcgcactttataccacctgcgattactacttacagattccagtctgctgttagatgattattcatccaagttgagccccaaaccaaagagagcca

SEQ ID NO: 824390 - DNA, 100 bp, Homo sapiens
ggcattctctgagatgctccagagtttggtggtaaaagacccacatttggaaaatcttgacaccattattaaggacttggaccactctataggaactcag

SEQ ID NO: 824391 - DNA, 100 bp, Homo sapiens
gaactcaaagatgcccttaaaaggttcagcagctccacagaacagagcagtgcctcacgcctgatgagaagacacaagcggcggcggcggaagcagaagg

SEQ ID NO: 824392 - DNA, 100 bp, Homo sapiens
cctgccctgtataccgagggaacaggtcacaaatggatacttttcatggggcagtggtttagctacattatccaatatagatattcgaattccaacaggt

SEQ ID NO: 824393 - DNA, 100 bp, Homo sapiens
ttccaacaaggattggtggtggggccagatcgacgatgaggagggatggtttcctgccagctttgtgaggatggcagaaacggtggacacaagcgaaatg

SEQ ID NO: 824394 - DNA, 98 bp, Homo sapiens
tggggactttcctgattgccagaaaatgcaggcggacctgaactggggcccaagtggtgaggaggcaggggccggtggcagcatcagcagtggtggct

SEQ ID NO: 824395 - DNA, 98 bp, Homo sapiens
atggaatcaagacagttatagtcaacatggttgacgttgcaaaggcgcttaatcggcctccaacgtattttggctttggaaccgacactggggttacg

SEQ ID NO: 824396 - DNA, 101 bp, Homo sapiens
ctgaaaagtgcatcatgaattccggagttgccatgaaatatggaaacgactcctcggccgagctgagtgagcttgttctcagaacacaaacaaaacctgtg

SEQ ID NO: 824397 - DNA, 100 bp, Homo sapiens
ctgaaatcttcatttgggatctgaataacttgaatgtgccaatgaccctgggatccaagtcacagtatttctcccggcctccaaagcaaacgacgttctg

SEQ ID NO: 824398 - DNA, 138 bp, Homo sapiens
gtgtccagccacatcatatcacagtatcagttaaggagcttgatttgtttttggcatactacgtgcaggagcaaggacaacatcaacttgctgcttactgaggaggaaatgtatagcctcacggagacctttcagcgg

SEQ ID NO: 824399 - DNA, 100 bp, Homo sapiens
aaaagacacttggaatcttcttttagacttcagtacgatgattgcagatgacatgtctaattatgatgaagaagggccctccagaatttccacagcatac

SEQ ID NO: 824400 - DNA, 98 bp, Homo sapiens
tcccttcccccaagttatcaaatccaagggcggtgttgtgggcatcaaggtcatcatggtcaccggcgatcaccccatcacggccaaggccattgcca

SEQ ID NO: 824401 - DNA, 99 bp, Homo sapiens
gagagcctaactttgcaaccattggtctgcaggacatcactttagatgatgcctggaatggacaatgtgctggactacggcctggaccgagtgaccaat

SEQ ID NO: 824402 - DNA, 98 bp, Homo sapiens
tgctgctggaggccgtgcccgccgtggcgccgcagacctccatcctgtgaacttctagatccatgtggttatatcagtcctgaatctccagttgtaca

SEQ ID NO: 824403 - DNA, 100 bp, Homo sapiens
cagaattatacctagaagtctactaatggacagttagtcacccacctacatgttgagctgttgtagcaaacagtgacgaatctcagcttctgacaccagg

SEQ ID NO: 824404 - DNA, 98 bp, Homo sapiens
acagcagtgcagcttcaagggcaaggacccacagaggtccagcaccccatcctcgcccactggcacgtcatcctcagactcgggaggacatcacatcg

SEQ ID NO: 824405 - DNA, 98 bp, Homo sapiens
ctcctcgcctgcgaagcatcacgtccgcttcccgacgctgagggcagccccgtccagggcgacagaaggctagagagaggcagcagaaattgcttgcg

SEQ ID NO: 824406 - DNA, 100 bp, Homo sapiens
cctgagcctgagcccgccccgaggtccccgccccgcccgcctggctctctcgccgcggagccgccaagatgggggcctcccagaagttcctgccgaatcg

SEQ ID NO: 824407 - DNA, 100 bp, Homo sapiens
cggcgccagcagttccagtccgttgctttactttttgcttcaccgacatagtcattatgccgaagagaaaggttaaaaaagctccttgaacaagaaaagg

SEQ ID NO: 824408 - DNA, 124 bp, Homo sapiens
ggtccttcctaccattccaaaagaacagaggaccagagttgcacactttttggaaaagcagataaacctgaaaattgggatgtatggtatgaaagcaagtttgatgactgtgataaggaggctt

SEQ ID NO: 824409 - DNA, 100 bp, Homo sapiens
gctctcgccgtccgagtcgtttattggaacacgagctgaacaactactcatgcaagaaagcacattcataagaaccagaaaactagatgagtgatcggag

SEQ ID NO: 824410 - DNA, 99 bp, Homo sapiens
ctcacagtgccaaatggagctggaagcagtccagtgggaaagatctaggagagagggagaaattgatgctgccagaaagaggggacagttacagaagcg

SEQ ID NO: 824411 - DNA, 100 bp, Homo sapiens
ggggaacaagccggggaccaagccggggaccaagccggggactaaggcgagccggagaccgagcccgaacagcaggctgctgacttgagtaaaccaatag

SEQ ID NO: 824412 - DNA, 99 bp, Homo sapiens
cccaccagagtgatgtctggagctacggttgaaatgttccttcttgcctatgctgtgcgccacaccatccaggtgtaccggctctccaagtacaacacg

SEQ ID NO: 824413 - DNA, 100 bp, Homo sapiens
gctgctcagcgtcctcatgtggggggtaaaccactcgagcctgtgtggtgcccctatctccttgttccaagggcctctcttgccttgaaagccttcttat

SEQ ID NO: 824414 - DNA, 98 bp, Homo sapiens
aaaatggaaacaggactaagattcctgcattttgactctaaatggttcaacagagtttggaaaagatttctaaactggagcaggaaaaagaacattgg

SEQ ID NO: 824415 - DNA, 100 bp, Homo sapiens
aacgcagatcagaggtagtcggacctttcccgctggcgcgcagcctcagctaggcattcctgcatcgcatccggcagaacgtggccgactcagtggagaa

SEQ ID NO: 824416 - DNA, 100 bp, Homo sapiens
cagaaggagaagtttactcttggggtgaggcagaagatgggaagttggggcatggcaacagaagaatccacattcatctcaatggaaggatcctgcctta

SEQ ID NO: 824417 - DNA, 100 bp, Homo sapiens
cacgaatatctggacagcatgttttttgaccgctttctccagtggaagtggttggaaagggtactagatggaaacttgagaaaggactgcttattgataa

SEQ ID NO: 824418 - DNA, 98 bp, Homo sapiens
agcactggactcatggaggctgagcatttattcagatttaatccagagactgacttcactatagaacccacagttgtatcaatggttggggaaagata

SEQ ID NO: 824419 - DNA, 100 bp, Homo sapiens
gggctacatgtgtacgcaccgcctgctgcttctaggatgggagctacagtttttgtccagcccctggacctggtgaagaaccggatgcagttgagcgggg

SEQ ID NO: 824420 - DNA, 108 bp, Homo sapiens
aacttttcaagcctgaaggaaaggcagaactgcctgattacaggagctttaacagctccgacagttagttaatatgtgcatcaacccagatccagagaagcgaccaga

SEQ ID NO: 824421 - DNA, 131 bp, Homo sapiens
gatcgatggtactggagaaggactgcgctgcaagacccggaccctggacagtgagcccaagtgtgtggaagggtggagagattcaaccagttagcgtgaaagttggagataaagttcttctcccagaatat

SEQ ID NO: 824422 - DNA, 100 bp, Homo sapiens
acacagccggggtcgggagccgcccggggcagggctcgggagagcgggtcttgagtcaccacgtccgaatataattcttgggttagtaatctgccaaaaa

SEQ ID NO: 824423 - DNA, 100 bp, Homo sapiens
tgcagctagcggtgtatgccttttgtgggttgcattctttgaatgttttgttattgcctggatatatggccctggttaactgggacccagtggatcaaac

SEQ ID NO: 824424 - DNA, 117 bp, Homo sapiens
tcaagccgccgcctcgacccagggcccgcgggccaggagagcgctcggcgggaacctagaaagattgtacaatgaatggtgattctcgtgctgcggtggtgacctcaccacccccga

SEQ ID NO: 824425 - DNA, 99 bp, Homo sapiens
tggaatctgtatgtctttgctctgatgttcttgtatgcaccatcccataaaaactatggagaagaccagtccaatgattcattccacttaaaacctgaa

SEQ ID NO: 824426 - DNA, 100 bp, Homo sapiens
gagaaccctacttgcctaaatgaggaatgtctttcctaccatctaaaatacgaaggtttctggctgggtatggctagccatcctccaatacccatcttgg

SEQ ID NO: 824427 - DNA, 100 bp, Homo sapiens
agagtgccaaactagggccagcaggaactaccattcttggcaacagcaagaaaagcaagccattttcaaggtgaatgaactggtgcaggtagaaacgtac

SEQ ID NO: 824428 - DNA, 98 bp, Homo sapiens
ttgaggttcacagatgatacctttgatccagaacttgcagcaacaatagcccaaagcagtgtccacaccagcaccagctacaactcagcagtcagctc

SEQ ID NO: 824429 - DNA, 100 bp, Homo sapiens
caacgttgagcaagatgcagaaaccaacagacaatgccaatttacgtgtcattatggaactacttatgaggttttgatggacatgtttgatcaggatgac

SEQ ID NO: 824430 - DNA, 100 bp, Homo sapiens
ggctgcttttccggcagttttgtgaaaccaggcctgggctggagtgttacattcagttcctggactccgtgatactctcagcccctgcatgaagaaatag

SEQ ID NO: 824431 - DNA, 99 bp, Homo sapiens
aaaacctgaagcaagctctgcagaaagacttaaacctcatggccccaggtctcactatacagatggtaaggttgaagttacaaaagaaggtgtgaagtt

SEQ ID NO: 824432 - DNA, 51 bp, Homo sapiens
ttccagaggggtgacagcaaaactctattatcctcccagtccacaacgctg

SEQ ID NO: 824433 - DNA, 115 bp, Homo sapiens
cttgtacctgtctggattattcattattacatgaagtatcatgtttctgaatttatcaaagagctgctttctcggataagaggcatgaggaaactgagccctccgcagaagaaga

SEQ ID NO: 824434 - DNA, 100 bp, Homo sapiens
cagaatttctgaaggtgttcattccatctctcttcctttctcatgttttggctttggggctagggatgacgacagatatgagcaggcgagtgacgtccgg

SEQ ID NO: 824435 - DNA, 98 bp, Homo sapiens
gagtatttgagctgggaagtgactggtgaatgtaatgtactattgaaatgcaaggtgaaaaacctgacagaggagatggctgggctggatgagatcat

SEQ ID NO: 824436 - DNA, 99 bp, Homo sapiens
agaaaggttaaaacaagaaattgataatgccagagaactacaagaacagagggattctttgactcagaaactacaggacttgacccaatgaaagaagca

SEQ ID NO: 824437 - DNA, 100 bp, Homo sapiens
agaagacagagggttttcttttgagagctacagagacttctgaagtggagagtctgcgacctcctcggttcttcaatgaagatggagttatcagaccgta

SEQ ID NO: 824438 - DNA, 99 bp, Homo sapiens
tccctctcagcctccgcctggtctctggaacgcccacctaagcctgaagctccctggctacctactgctacatggttcgcatgctgtgacttggaagaa

SEQ ID NO: 824439 - DNA, 98 bp, Homo sapiens
catccctggatatgcccgttcagtttacagttcattttttgcttggtttggaaaaatttcattagaggtcagtactcctgcatttgtaccaacgaaaa

SEQ ID NO: 824440 - DNA, 100 bp, Homo sapiens
attgtggctctgatgaaaccctctcggctttatgatgcttatgaactgaaacatgccttgaagggagctccagtggcaactcttctccggagtaccctcg

SEQ ID NO: 824441 - DNA, 98 bp, Homo sapiens
gaactcgtcctacgtaacacagccagttaggcaatactgaacactgcgcagcttgcagaggtctcctggcagccctcattaggaattctgtctggccc

SEQ ID NO: 824442 - DNA, 99 bp, Homo sapiens
gacagcagcattgatcaatcttacagctaacatgttgtacctggaaaacaatgcccagactcaatttagtgaggtatgttgagtctaaaaaggacagag

SEQ ID NO: 824443 - DNA, 100 bp, Homo sapiens
gaagacctcaccaacaatcctacaatgatatatactgtgtccagttttagcataaagcagatttggaatggagagaaatggaaggagatgattgcgagtt

SEQ ID NO: 824444 - DNA, 99 bp, Homo sapiens
aatacactgaggccctggcccagagggacaaaatgattgaagatagtgggaaaagaggaaataccatggcagaaagaagacagctgtttgcagagatga

SEQ ID NO: 824445 - DNA, 101 bp, Homo sapiens
gcacaggcaacggccgaggagagtggaagtgtgagaggcacacctctgtgcagaccacatcgagcgcacctggaaatggagatggtggcagtaccagtgag

SEQ ID NO: 824446 - DNA, 98 bp, Homo sapiens
ctcttgcagaacattctgaaaatgtgcatatttcaggagtgtcaactggagatacaactcgtcaacgaatcaaattcagtgatgacagagtatgcaag

SEQ ID NO: 824447 - DNA, 100 bp, Homo sapiens
ctgctcaccaagcacacccgcaaggtcgtgcacgatgccaagattatggattggatatgtctacttctggatgcaaattttactgttgttgtaatgatgc

SEQ ID NO: 824448 - DNA, 100 bp, Homo sapiens
agggctgctctccaatgtcaacaggaatgcagcagtggagctgacacggagacacatcgcctatgctattggcatgatacttacatttgttgttctggtg

SEQ ID NO: 824449 - DNA, 98 bp, Homo sapiens
tagtctgaccctccgccaggcaaaaggaagaacatggtccaagacaattcctgggaaagttcagttcttctcaagtgagggttctgacacatctgtac

SEQ ID NO: 824450 - DNA, 98 bp, Homo sapiens
caaactacatcaagggaacagtgaaggcggaagcgggagcactttgttgaacgtggtggtgagagcacacgtcctcgtctcattcctgatcgaacgcg

SEQ ID NO: 824451 - DNA, 100 bp, Homo sapiens
gacgaacacaaagggaaagaggagaggcacccgatatatgttctctaggccttttagaaaacatggtgctggagaatctggtaaaagcaccattgtgaag

SEQ ID NO: 824452 - DNA, 99 bp, Homo sapiens
gagggtgtaccattacaggatcaacactgcttctgatggcaaggaaattcggcgccttcatcagtatgtgaaatttgctgtccaagatgtgaatgatgt

SEQ ID NO: 824453 - DNA, 99 bp, Homo sapiens
ctggagctggcttccatgatccccgccctgcgggagctgggcaggtactaggttttgacaagcttgcatcatgcgtgagtataagctagtcgttcttgg

SEQ ID NO: 824454 - DNA, 100 bp, Homo sapiens
aatgctgctttcaatgacctctggagacttgacctaaacagcaaagagtggatccgacctttggcttcagggaaatcctcattgacgattcaatttgttg

SEQ ID NO: 824455 - DNA, 100 bp, Homo sapiens
ccatgtccgccgcagacgaggttgacgggctgggcgtggcccggccgcactatggctgagccttcacgtaaatgggtccagtcatgcctcccagtaagaa

SEQ ID NO: 824456 - DNA, 100 bp, Homo sapiens
tatgaccacatgaccagcagggaccttgggtcacatgacaatctctctccaccttttgtcaattccagaatacaaagagatcacaaatcaacatctcact

SEQ ID NO: 824457 - DNA, 100 bp, Homo sapiens
gctcttcttggaaaaccagatccagaaactggaggagtcccgctcgaagctaggaaaaccagtagattcccagacatcgcgaagtgaatctgaaattgtg

SEQ ID NO: 824458 - DNA, 75 bp, Homo sapiens
aggcagcgcgggatcccagcctcaggcgtgcgcggacggtgtgcggttgaggagctcaagcttgggaaaatggtg

SEQ ID NO: 824459 - DNA, 100 bp, Homo sapiens
gagtggcagtcatcaggacctcagtgtgatacagccaattgtaaaagactgcaaagagaggcctttctttgtttggcatctgcagagacggtgaaaagca

SEQ ID NO: 824460 - DNA, 100 bp, Homo sapiens
gagaatgaggacccgggaagaaatggcaattaagttggaatatgcaaggttggttaagttggcccaagaagacaccccaccagaaaccgattatcgttta

SEQ ID NO: 824461 - DNA, 100 bp, Homo sapiens
aggtggtgaaactcaagatccccatggacaacaaggagaacgtgctggccaaagcgctctatgacaatgtggccgagtccccggatgagctctccttccg

SEQ ID NO: 824462 - DNA, 98 bp, Homo sapiens
aaaggagcggaagtcattgccagaagaagatgtagccgagacggtggctcagggagtaaaggaaggccagttgagcaaacagaagtgttcctctgcat

SEQ ID NO: 824463 - DNA, 98 bp, Homo sapiens
aagacaaggactcacagtggctgcaagattactttctatgaagacaaaaattttcaaggccgtcgctatgactgtgattgcgactgtgcagatttcca

SEQ ID NO: 824464 - DNA, 100 bp, Homo sapiens
accaactggagagaacagtaaactccttgaatgtctctgctaatttcagagcaggacttcagaagctgccaaacttgaggctgaagtaagcaaggcacaa

SEQ ID NO: 824465 - DNA, 98 bp, Homo sapiens
ccggcgctcccttgtcacgcctcgggaagcgcgcacctgccaagcaggaactgccactttcaccatacagaaaaaagctggtggagccaaagcagcag

SEQ ID NO: 824466 - DNA, 99 bp, Homo sapiens
tccagtctgcagctcccagcgtgatcgacgcagaagacaggtgatttctgcatttccgactgagtgatgactatgactccaagaaacgcaaacagcggg

SEQ ID NO: 824467 - DNA, 100 bp, Homo sapiens
cgaaaccttcgacttccttcagggtttaggagaagcactgttgttttccacacaggatttcagatgcatgccaggtttccactgattgccagaactcgag

SEQ ID NO: 824468 - DNA, 100 bp, Homo sapiens
tcttccatccccatcttacagatgtattaagaagcctcagctccagaagaaaaggaagtcattaaaggacagtatggcaagctcacggacgcgtacggct

SEQ ID NO: 824469 - DNA, 99 bp, Homo sapiens
cttatcgttttccccaggcaaggattccggagagaggatcaggtgttttcaggttaaccgtcagtccgggaccatgtctggagaactaccaccaaacat

SEQ ID NO: 824470 - DNA, 98 bp, Homo sapiens
ttgccatgaaggtgcttaaaaaggtcggatcatgctaaaaggagataatattactctgctacaaagtgtctccaactagaaatgatcaatgaagtgag

SEQ ID NO: 824471 - DNA, 100 bp, Homo sapiens
agaggtcaggccccaggagctgggctggagcagtgaggagtgtttcttccaagagaagatgactgcctgagaggagatatttggctatcggactcaaggc

SEQ ID NO: 824472 - DNA, 100 bp, Homo sapiens
agccattgaggagagagatgaagcaattgcacgagccaagcatatggaaatgtctctaaaagtgcaatggctacattggggccacacagagtgaaaacgg

SEQ ID NO: 824473 - DNA, 99 bp, Homo sapiens
ccggcctcgcggagcccgcgcgccgagccccacgttggacgtgataagtatgagcctgcagctgtttcagaacaaggtgataaaaagggcaaaaagggc

SEQ ID NO: 824474 - DNA, 98 bp, Homo sapiens
gaagaaatctttgatgatgatgacttttaccaccaggcctaccccttgctcaggttcaagaagacagtgaagaggctcattccgcatcttctttcttt

SEQ ID NO: 824475 - DNA, 100 bp, Homo sapiens
attagtgcctgtagtagaaagccttgtctatcttcagacacaaaagctctcaagaggcagaatttatataataatcctttcaactctatgagttacacca

SEQ ID NO: 824476 - DNA, 100 bp, Homo sapiens
gaaagaccgaccattcttccctgggctggtgaagtacatgaactcagggccggttgtggccatgctgacacttcctccatggcccatctatcgccggcat

SEQ ID NO: 824477 - DNA, 100 bp, Homo sapiens
ggatagctgggagtatggccaccctgctccacgatgcggtaatgaatccagcagaaggcaacgcagttgctcaggtgcttcggtatcacagccaagaccc

SEQ ID NO: 824478 - DNA, 100 bp, Homo sapiens
tttttctcatggatgttcttcttcgagtatttgtagaagggtgtggatgaggtcaccattgtcaacattttgaccaaccgcagcaatgcacagagacagg

SEQ ID NO: 824479 - DNA, 99 bp, Homo sapiens
ttggccagaactctgaaaagattgggaatggatggctacaggggaatcagcctagcaaactaggcgtagaggctccggtgttttttgtgccaattgcct

SEQ ID NO: 824480 - DNA, 100 bp, Homo sapiens
aagaaaggtggcttaaaggaactgtttggaaagggccctcaaaatgccttcttcctcgtaaaattctggaaatcttacaggctggtgttaaaggaacttc

SEQ ID NO: 824481 - DNA, 100 bp, Homo sapiens
gaagtggaaaccagagagataggagtgggctgtgatcttctacccagggtgaaaatcctatttataagagtgccgtaacaactgtggtcaatccgaagta

SEQ ID NO: 824482 - DNA, 99 bp, Homo sapiens
gggtgggaggtggaactagtcggacaaagccctcgcgtcggacccttgccagaactagaattcagcctcagcccccagatgaagatggggatcacagtg

SEQ ID NO: 824483 - DNA, 98 bp, Homo sapiens
cagagaaatcttagagtttcccgcaagggatgtttatgttccaaacactacttacagagcatctgctgcacccaagcctgagccggttcctgttcaaa

SEQ ID NO: 824484 - DNA, 98 bp, Homo sapiens
ggacatcaagtcagaggttttgtgactcacaagatgctgatcttgctcaggttgaaagcttccaggaactgcgtactgagcgctttgggcagggaggt

SEQ ID NO: 824485 - DNA, 98 bp, Homo sapiens
ttctgggtcccagggccgcaggggcagggaagtctggtgacccctcacccctcaccaaggggcagtcccctccccacccccaaggggacacctgtcca

SEQ ID NO: 824486 - DNA, 100 bp, Homo sapiens
atgagggaattccggtcagggtcaagtcgtgttctgatcactactgacttgttgacttcacagagaatgcagttgtcttgacttcaggtctgtctgttct

SEQ ID NO: 824487 - DNA, 60 bp, Homo sapiens
tcatggggcccaagaaaaagcacctggactggtaagcttgatgattaccaggaacgaatg

SEQ ID NO: 824488 - DNA, 100 bp, Homo sapiens
atggaatctggtccaaacaatcatgggaatttccaaggggattcaaacttcaacagaatgtggcaaccagagaagcctgtgtctcccaaatcaggaacac

SEQ ID NO: 824489 - DNA, 100 bp, Homo sapiens
ctggggacactattcctaagagtcccttcgttgtgcaggttggggaagctctagaggacaaaatcccagtccttggcacaaactcaggaaatggaagccg

SEQ ID NO: 824490 - DNA, 100 bp, Homo sapiens
tttatatgtcttcaaaagttaatggcagctgtgagggatattcttgaaggaattcaaagcaaatgcagccctgaggatttggctactgcatataacaaca

SEQ ID NO: 824491 - DNA, 100 bp, Homo sapiens
ttgcctgcgtggccgcaacccagcctgtggcgagggcatttgaagccaccggcgttgagtacttcaacacggccctgggaggagcggggacactgaggac

SEQ ID NO: 824492 - DNA, 99 bp, Homo sapiens
aggagacccctctgctgcaccacttcatgccgtcattgtgtggcactggacggggaatcaagagacccggtttctaatccctgctctgtcactaacaag

SEQ ID NO: 824493 - DNA, 100 bp, Homo sapiens
ccgagcgcagagcattggcaggaggggcaaggtggaacaggtagctacagcaagctgggtagcaggcagatccaaaggatatcatgaagtttccagggcc

SEQ ID NO: 824494 - DNA, 98 bp, Homo sapiens
gaccttcagttccaaagatgatgaatctgaaaggaaatccggaattatcacagaatggagatggacacatggatcatttactgccaggctgtgaagat

SEQ ID NO: 824495 - DNA, 100 bp, Homo sapiens
ctgggagcgagcgcagcaaagcgcccagcctgccgcctcgctgtccctgcggcttctgggggtgtgtttgtcaaagtgtctctgatgaaccacaacaagt

SEQ ID NO: 824496 - DNA, 98 bp, Homo sapiens
gataaagaagtaggaaggtgtatgatgctgactaatgtacagatgttaaacaaagaaccggaagacatgatcacgaaacccatcaacagctggctgat

SEQ ID NO: 824497 - DNA, 100 bp, Homo sapiens
gcagagcctgaaccttgatatccaagccttagcctgcctgtcagcactgagcatgatcacaggacacagcattgttggttttgccatgtactattttacc

SEQ ID NO: 824498 - DNA, 99 bp, Homo sapiens
gtgagtcggcggctgatttagaaggaggttcaggctacgagccagcggtgagcctggagcagtgtgagcagctggtggcagagctccgcggcagcgtgc

SEQ ID NO: 824499 - DNA, 99 bp, Homo sapiens
gcatcttattgatcctccagtcgagtttacagaggatctggttggctctgtggtgcacgtgctaagccacagacaggagctgagaggctggactgggaa

SEQ ID NO: 824500 - DNA, 98 bp, Homo sapiens
acaagatggacgggtccaggaaagaggaggaggaagacagcacattcaccaacatttctcttgcagatgacataggtgcccaaatgtgagtctgcaaa

SEQ ID NO: 824501 - DNA, 100 bp, Homo sapiens
caactgtatgatttccagtgacagcaaataactgctgcagtttggcaggaagaagatgagccttaggtctgaacgccgaggaattcatgtggatcctgtg

SEQ ID NO: 824502 - DNA, 100 bp, Homo sapiens
aacaaaattgccagaaaatctttcctctaaagtcaaactggtttcaggcacagaactgtatatccaataatagtgaaatggatcccactaattatgacag

SEQ ID NO: 824503 - DNA, 98 bp, Homo sapiens
catggagtgtgtgccttgtggagaccctcctcctccttacgaaccgcactattactccaaaggtttcggcggcaaatacggtatcgacaaggacaaag

SEQ ID NO: 824504 - DNA, 99 bp, Homo sapiens
cgggccctgtctgtgccggccgtgagctgcggcaggacggctggagaattaaacaaccaccatgtcgagcaaaaaggcaaagaccaagaccaccaagaa

SEQ ID NO: 824505 - DNA, 98 bp, Homo sapiens
gccggcagcccaccgccgccttcttggcgcgaccccaacccagccccatcactgcttcaaccacctgtgagaaattagaaaaagccaggaatgagtta

SEQ ID NO: 824506 - DNA, 100 bp, Homo sapiens
tggagaggatgcagggggaaactgggccaaatgtaggccttatctccatccagctagctcgcaaaggatctccttcatccctctccagaagaggagaaga

SEQ ID NO: 824507 - DNA, 100 bp, Homo sapiens
gggcattatgaacgaattctcaacccctacaacttattcctgtccggagacagcctaagggtctatgaaggcctagacatcatcaccaacaaggtttctg

SEQ ID NO: 824508 - DNA, 98 bp, Homo sapiens
gagttaggccgtaatgccttggctgctctcagcccccaagctggttcccgctgtagcaaacgtccgcggcctctcagattcacttgtcatggattagt

SEQ ID NO: 824509 - DNA, 100 bp, Homo sapiens
ccggcagtgaccgtgtgtcagaacaatcttgaatcatgaagctactaaccagagccggctctttctcgcttgcacagaagatgggatttccacctaatat

SEQ ID NO: 824510 - DNA, 100 bp, Homo sapiens
gacgggccggcccagagctcccgggtcgtctttcgtgtggccgcgaggtcaccctgctgattgccttcatctgtgtgcggagctccctgtggaccaacta

SEQ ID NO: 824511 - DNA, 100 bp, Homo sapiens
ggtgtccctgtacctgcagctgctgcagctgctgcacagaaattaatgcgaacagacagacttgagatccaaaattaacgggacaggctcttattccagg

SEQ ID NO: 824512 - DNA, 122 bp, Homo sapiens
aacattaagaacttggatcccattcacctgaggcacccgaagaagagaccatccatatttccaggattctcaaagttggattggtggaaacaatgaaccattgacaggctttacatggcgag

SEQ ID NO: 824513 - DNA, 98 bp, Homo sapiens
accctttctatgtactgcgcctggatgtggccaggcctactgaacttgacgcactggtatttggccatctatacaccattcttaccacacaattgaca

SEQ ID NO: 824514 - DNA, 100 bp, Homo sapiens
gacagagacgtgaagcactgaatgttggtgacatcgtgaaagtcacaaggatgaatataaatggccagtgggaaggcgaagtgaacgggcgcaaagggct

SEQ ID NO: 824515 - DNA, 98 bp, Homo sapiens
ccggggccgtggctgacatggagcagccacacccactcgcccgggtctatggccacggtcggagagtggtcctgtgtgcgctgcaccttcctgaaccc

SEQ ID NO: 824516 - DNA, 100 bp, Homo sapiens
ggtccccactttcccctgagcctcagcacctgcttgtttggaagctctacattaatcatactcctccaccactgtccaagagtaaggagagagaaatgga

SEQ ID NO: 824517 - DNA, 100 bp, Homo sapiens
tgggaagattcgaacaccgacctcgtcccggcccctgcagtccggatactcacgccagaaggttgggacagcgtcttcgctgctgctggatagtcgtgtt

SEQ ID NO: 824518 - DNA, 100 bp, Homo sapiens
atgggtcggtgggcggggcccaggttcatcatgcctagtggcgtataagaagaccccgccaccggtccctccacgcaccacttcaaagccgttcatctca

SEQ ID NO: 824519 - DNA, 98 bp, Homo sapiens
agtggcgaagggaatcgcaaggctcttccctgaccattttctactgtccctgcgcgagggcctgaaggggctctttttgaacattcagtggagacacc

SEQ ID NO: 824520 - DNA, 100 bp, Homo sapiens
caggaatcccaatttgcctccacttagtgagcggaagaatggggggacacagcgattgccacgcgccattggaatgtccctggccaaggagctcatattc

SEQ ID NO: 824521 - DNA, 100 bp, Homo sapiens
tcgtaaacatctgggtgtatatcaaacggcaagatgtccagtaatgtcccggcggatatggaggatcagctgatttattcggaggatttgctgactttgg

SEQ ID NO: 824522 - DNA, 100 bp, Homo sapiens
gtaatcgttctgagattgaaacccagacagaggggagcacagagaaagagaatgatgaagagaaaggcccggagactgcatccgtgtacaagatttgcag

SEQ ID NO: 824523 - DNA, 98 bp, Homo sapiens
ttgcacttcgagatcaagagaagtatctgtatcgatatcctggtggggaggtaaaataccatgaagattttgaaaaaacaaaggggagaggctttact

SEQ ID NO: 824524 - DNA, 100 bp, Homo sapiens
tttatctggcttactttgtccacactccgggtgaaggtgctaaaggagaagatagaagctgagaagggtcgtgatgccttccccgtggctggacagaaac

SEQ ID NO: 824525 - DNA, 99 bp, Homo sapiens
ggtgggtttatctcaaggcctgagtagccggtaacaaacgagggttcccgggattggaccgacgcagccatggtattgttgcagcatctggcagtgaga

SEQ ID NO: 824526 - DNA, 100 bp, Homo sapiens
cttcaagatggcggtgcaggagtcggcggctcagttgtccatgaccctgaaggtccaggagtacccgaccctcaagctatgtgttctcatttcacccaag

SEQ ID NO: 824527 - DNA, 100 bp, Homo sapiens
cctctttcgggggtcctcaccagaagaggttcttgggggtcgcccttctgaggaggctgcggctaacagggcccagtactatactggcaattgctggaga

SEQ ID NO: 824528 - DNA, 98 bp, Homo sapiens
atacattgatctggtcagcagtgatgatgaagagcctagcacctcttatactgatacaacagtgagctgggacggagacaagctccagtgtgtgcaga

SEQ ID NO: 824529 - DNA, 98 bp, Homo sapiens
tagtggaccttgtgcgaagaaattagagataaagtggacgacccagtgtggaacattcaaattgcaaggatgcttgagctgcccactatctacaggaa

SEQ ID NO: 824530 - DNA, 100 bp, Homo sapiens
aaaggaataggaacagcatatgaaggtcatgtcaggttggagtcattcgttgcccagtttgcagccaagaatgtgcagagagacacatcatagataactt

SEQ ID NO: 824531 - DNA, 100 bp, Homo sapiens
ccaagacagtatgcaaggccacgacccacgagatcatggggcccaagaaaaagcacctggacttactatactggcaattgctggagaagattttgcaatt

SEQ ID NO: 824532 - DNA, 98 bp, Homo sapiens
tcggtgtctgcagcaccctccgcttcctctcctaggcgacgagacccagtggctaggcttgtaaacatataacataaaaatggcttccaaaagagctc

SEQ ID NO: 824533 - DNA, 98 bp, Homo sapiens
cgagaaggcacggagtcgccgcggagcgcagagttgctggagaatgtaaccctaatccataaaccagtgtcgttgcaaccccgtgggctgatcaataa

SEQ ID NO: 824534 - DNA, 100 bp, Homo sapiens
gcacgctgctggggtacggctacaacttggaagcaccagatcaagatcatggatctcattttgcccaacggtggtactccagcaggtacttcaagtccag

SEQ ID NO: 824535 - DNA, 100 bp, Homo sapiens
cctgaaaacagaaggaaattgaaggaacttggagttaatggtctaatttatgataggtagctacagcaagctgggtagcaggcagatccaaaggatatca

SEQ ID NO: 824536 - DNA, 100 bp, Homo sapiens
cgtgaccccacccatcaccccctcctcttcattccgcagcagcactccgacaggtgcttgctcggggctgaaggtgacagtgccatcacacactgtccat

SEQ ID NO: 824537 - DNA, 146 bp, Homo sapiens
cacaggtggcccccaccacccggaggagcagctcctgcccctgtccgggggatgactgattctcctccgccagatggtcatcatgggccagtgctactacaacgagaccatcggcttcttctataacaacagtggcaaagagctca

SEQ ID NO: 824538 - DNA, 100 bp, Homo sapiens
ctgctgtttaccttggcgaggcctttcaccaagtccatggccgaagaacagttgagaattgttgaagaacaaagaaagattcatgaggaaaggatgaaac

SEQ ID NO: 824539 - DNA, 100 bp, Homo sapiens
tgatccagaagtccagagctgaggactgcctgtttgcagggcaccagcggctgtcggtgacgagcctgctcgtctgccacggattgctgatggtcggcac

SEQ ID NO: 824540 - DNA, 100 bp, Homo sapiens
ctgcagagctcggaggggcgctgtgtgtacatcacccccatggaggccctggcagagcaggaaatggagcagactagaagtgcagttgatgaggaccgga

SEQ ID NO: 824541 - DNA, 100 bp, Homo sapiens
acaataccaggcatacatttggcagaataaatgaaccagaactgataaatttcaaacggaagagagtggcagcatttagaaagaatctaattgaaatgtc

SEQ ID NO: 824542 - DNA, 98 bp, Homo sapiens
tcgactgcttcggaccatggcttttcatggagctcttgtccctggcaaagcgaaagcgcagtgactctgaggagaaggagccgcctgtgagtcagcct

SEQ ID NO: 824543 - DNA, 99 bp, Homo sapiens
aggccgttacgttttgcaagccatgaagcatatggagcctcaagtaaaacaagtttttcaaagcctaccaaaatctggaagtctgttagaactgctgtg

SEQ ID NO: 824544 - DNA, 100 bp, Homo sapiens
ggtagaagcattcgtgcagacagggcaaagaaaatgggactggttgaccaactggtggaacccctgggttcttccaggttggaaagagaatatgctggag

SEQ ID NO: 824545 - DNA, 100 bp, Homo sapiens
gctgtgggacctattgttcagttacaagagaaactttatgtgcctgtaaaagaatacccagatggaagaaacccttttttcttggagccagcaataatta

SEQ ID NO: 824546 - DNA, 100 bp, Homo sapiens
gaagagctgaccatggagatgtttgggaacagctccatcaagatttggattcaagatgtgaaataatcagcgatgggaaaatgcagctttataggaaaca

SEQ ID NO: 824547 - DNA, 100 bp, Homo sapiens
gtgggctttgctctgccaaatccacaggttatcaatactctggctgaccatcatcatcgtgggactgactttggtggaagtccttggttacatgtcatta

SEQ ID NO: 824548 - DNA, 100 bp, Homo sapiens
tgtaatattaatatttggatctaaaatcagctttatagaattgagagattgctgagcctaaatacatgttgctgcattgcctccgagaatggccggacct

SEQ ID NO: 824549 - DNA, 100 bp, Homo sapiens
tgccaccggatgtcctctgcgctggaatcagtcactgtcagcgacagacccctcggggtgtccatcacaaaagccgagattgcatcatcagagaaaatac

SEQ ID NO: 824550 - DNA, 100 bp, Homo sapiens
ctcactgaatctgctggggctggaacaatttccgaagagtgttcttatcagctgtacaacctgccatagtgaatttccatctcggaataaactttttgac

SEQ ID NO: 824551 - DNA, 100 bp, Homo sapiens
aaaagacatacttggctaccatgtaattcagagagtccacacaccctttgaaagagagggtctcaaaaccaaagatctcctggacttgtatcaacacaac

SEQ ID NO: 824552 - DNA, 99 bp, Homo sapiens
gcttctagtcggacaaaatgcagccgagaactccgctcgttctgtgcgttctcctgtcccagattgattataccggaacagagccttccagtccctgta

SEQ ID NO: 824553 - DNA, 100 bp, Homo sapiens
ttcaagaggcagctgcgtatttaaaatatctggagtccatctttcaccatcttctcctgagattgtactggaccgtgaccactcttcttccattggctgc

SEQ ID NO: 824554 - DNA, 100 bp, Homo sapiens
agagtagtaggaaatgtagaaaatactttatttattaatacatctaatcatggggtatttacttaccagtttgtagaagactatgaacctaccaaagctg

SEQ ID NO: 824555 - DNA, 100 bp, Homo sapiens
gagcagaggggagagcggccgccgccgctgccgcttccaccacagcctttctgagaaaagtctacagcattctttctctgcaggttctcttaactacagt

SEQ ID NO: 824556 - DNA, 98 bp, Homo sapiens
aatggtagaatatatcacccataatcggaatgtgatcacagagcctatttacccagaagtagtccatatgattcaaccctatgaaaagataaaggcca

SEQ ID NO: 824557 - DNA, 101 bp, Homo sapiens
ggaaatatcggccccgctggaaaagaaggtcctgtcacaaagtctcccgttgagagtactaccgaaccaccagcagttcgagcctctgaagagcgtctaag

SEQ ID NO: 824558 - DNA, 100 bp, Homo sapiens
agacgtattaaaacagtattattatttcaaaggaattgtttgaaaccaaacatgttatccagtaatggagcctctaagcatttgacattgtgcagcaaag

SEQ ID NO: 824559 - DNA, 100 bp, Homo sapiens
atgaatgccatttcccatccagtactgaagtgttaaagttagaagacatttgctaagtcaaatcacttcaggaaatgttggcagtagatgctccaaggag

SEQ ID NO: 824560 - DNA, 100 bp, Homo sapiens
aagcagtacgaagactcctgccgcgtataccaggcatccagccccgatgagaaatacaaacctggtcgatgtgatgatattttgaaatggaagcctccca

SEQ ID NO: 824561 - DNA, 100 bp, Homo sapiens
ctggaacatgcattcaacatcgccagatatcaattaggcatagagaaactactcgatcctgaagggtcgggattactgttcggaagaagaggatatcaca

SEQ ID NO: 824562 - DNA, 100 bp, Homo sapiens
gggaaaatcctgaggaagatgaagaccagagaaaccctgcaaaggagtccctagagacacctagtaatggtcgtgataaactgtgccattcctaaagggt

SEQ ID NO: 824563 - DNA, 99 bp, Homo sapiens
ggcgttaccgctgtgaggtcattgacgggctggaggatgaaagcggtctggtggagctggagctgcgggtaagcactatcctttgtactccctcaacgt

SEQ ID NO: 824564 - DNA, 102 bp, Homo sapiens
accagtttgattcagcgacttatgtctgttgcttatacgtatgataatctggctcctagggtggtatttccaacattttggaggaactggttgtccagcctc

SEQ ID NO: 824565 - DNA, 51 bp, Homo sapiens
tctggacacagaagtatttgtgacagacagcccacctgaggatattgacca

SEQ ID NO: 824566 - DNA, 100 bp, Homo sapiens
agataatcaactttatcaaatttgatacaggcctccccatggccacccatggaccagtcggcattcacttcctcccttctgcggcccataaaagccctgg

SEQ ID NO: 824567 - DNA, 98 bp, Homo sapiens
cgctggcagagctgggcaggagaggcctgttgctgccgtctcgactcgtggatgtgaaaatgcctcgtgtaaaagcagctcaagctggaagacagagc

SEQ ID NO: 824568 - DNA, 100 bp, Homo sapiens
atgctgttgcctcggctgtttctggtctgatgcacatcacagggcctgagtaatggtaacagcagtagctggagcagtcttggtttagaaggagatttgt

SEQ ID NO: 824569 - DNA, 100 bp, Homo sapiens
acgcgaattggagaaaaagttcagtgggaagcatgtcgtctttatcgctcaggtaatgtggaccgaactaccatgtacaaatttccatcttcttctctgt

SEQ ID NO: 824570 - DNA, 99 bp, Homo sapiens
aaataaagctgctgtttttgaagagatttctttaaagactcgtgcagcacatcattatcgctggatgcccggacatgtaatacacctgacagcatgtga

SEQ ID NO: 824571 - DNA, 100 bp, Homo sapiens
tctggggtacacctggacaggtgtatgatgtggaggaggtggatgtgaaagatcctaactatgatgatgaccaggggtatagaacaggctatgcttacag

SEQ ID NO: 824572 - DNA, 100 bp, Homo sapiens
ccagaaacgtggtcctttctcttgcctgtgagctggtgcagaggtgttggagcgggccggagagaagtagagtgggctgcgaggagaaggaaacaggcct

SEQ ID NO: 824573 - DNA, 100 bp, Homo sapiens
ataacttggaggcagagaagttcgacctgcaggagaagttcaagcagcagaaatatgagatcaaccctgaccaccccattgtggagacgctgcggcagaa

SEQ ID NO: 824574 - DNA, 75 bp, Homo sapiens
cctcctccaccagaggactgggaggagcatgtcaacagaaaatatttacaccagcagctccagttcataccaata

SEQ ID NO: 824575 - DNA, 109 bp, Homo sapiens
agaagatgattccaacgccaccaattccaacctggtatgggaaggtcggtggcgagtgatccctcatgatgtactaccagactggctcaaggataatgacttcctcttg

SEQ ID NO: 824576 - DNA, 100 bp, Homo sapiens
gggaagtgcattgctatcgagtgctataaacaaggagcttttataactctggttgcacgaaatgagtcggatatgttgcggtcactatctaacacaaaac

SEQ ID NO: 824577 - DNA, 98 bp, Homo sapiens
ctgaacttcctgaaatccagcaaacttccgaagttatagtgaagaaatacttggtcccatttcttttcgcctgggaggtatctttccactattagcaa

SEQ ID NO: 824578 - DNA, 100 bp, Homo sapiens
gaaaacttcccttggaggggatgcaccagaagagccagaggaaaatggctttgtaaagaagtttgaacctaaatctggctggatgacttttctagaagtt

SEQ ID NO: 824579 - DNA, 100 bp, Homo sapiens
ctggtgtcctgaacctggaagttgtgctttttaagaatgtatgacaacatgtccacaatggtgtacataaaggaagacaagttggagaagcttacacagg

SEQ ID NO: 824580 - DNA, 100 bp, Homo sapiens
cacagccctgaggaggagataagccatcagaagacctggtgccctatgacacggatctataccaacgccaaacgcacgagtattacccctatctcagcag

SEQ ID NO: 824581 - DNA, 100 bp, Homo sapiens
agaagttagctgtagctattaaaaaaccatctggtgatgatagatacaatcagtttcacataagataaccttctgttcggtgatgaaattatcactaatg

SEQ ID NO: 824582 - DNA, 99 bp, Homo sapiens
tccaaaggcagacagtacgggctcccttcgccaaactcttcattttctctactggtgatgtacatcgagagagacagcagaaagaccactccaggcaag

SEQ ID NO: 824583 - DNA, 99 bp, Homo sapiens
tggcctgttgcagccatggtgcattgcagttgcgtgttgttcagaaagacaatgcagatcttcgtgaagactctgactggtaagaccatcaccctcgag

SEQ ID NO: 824584 - DNA, 131 bp, Homo sapiens
agacaggggagcaggcccagcaagaggagcagtccagcggcatgaccattttcttcagcctccttgtcctaggtcaaaggccctttcagaagcaactccatttcattggataacttaaaaccctccagagt

SEQ ID NO: 824585 - DNA, 118 bp, Homo sapiens
tataaccgcgaaggagacctcctctttactgtggccaaggacccttaacagcgggaacatgaagccgccactcttggtgtttattgtgtgtctgctgtggttgaaagacagtcactgc

SEQ ID NO: 824586 - DNA, 100 bp, Homo sapiens
gcgcaagtcgagaggaaactgttgtgcctcttcatattggcgatcctgttgtgttgcagagaacacatcttagaagatgaaaaacctgaatctatcagtg

SEQ ID NO: 824587 - DNA, 98 bp, Homo sapiens
ccaggaagagcactcaggagaccaggaaaatggccacagggctcctgagagccaaaaaagaggtgcagcagtaccgcgtcgccatgactgccaaggac

SEQ ID NO: 824588 - DNA, 98 bp, Homo sapiens
agaagggcagtggctgtagctgccctttccgtttccagggttccgaccagggaatccgagcccgcattttagagactttggtcatgcttcttcttctt

SEQ ID NO: 824589 - DNA, 100 bp, Homo sapiens
gagccttgaaagagataaaagcggaagtttgccacacggtgctggagaatctggtaaaagcaccattgtgaagcagatgaggatcctgcatgttaatggg

SEQ ID NO: 824590 - DNA, 99 bp, Homo sapiens
ggaaagaaccctggctggggaaaagggaagtgaaaagagatctgttttcagactctgaagaagaagctatggagactacaccagccaaaggaaagaaag

SEQ ID NO: 824591 - DNA, 100 bp, Homo sapiens
gactacatcttgcctcaagtttctttcaccgcagtgggctaccataaacacatcaccttgatttttaatcccacgacatctgacccagatgtgatcctct

SEQ ID NO: 824592 - DNA, 98 bp, Homo sapiens
cggagcagaacggattgcaggaataaggatctgatttccgagttgcacatcatgagtcacatgctgctgtttgtctccaaaagctccgagtcatatgg

SEQ ID NO: 824593 - DNA, 100 bp, Homo sapiens
tcacaaaagatgcagatttgtctcctgttaatgccagcataatcaaagcactaagtcaggagattggaaaagcaaatgcttttacacaacagacacagag

SEQ ID NO: 824594 - DNA, 100 bp, Homo sapiens
caggcattttacccagccgcacgcccaggatttcttgcgtgcagtttgtgaagaaaaaattagctgcggttggatttctcacgatgtccagtgttatctc

SEQ ID NO: 824595 - DNA, 98 bp, Homo sapiens
cagctacagcttccttaatggtccttcgtttcactgaagaaacttcttagagattcattgcacttctgagatttaatgtttacaacttggagttgtcg

SEQ ID NO: 824596 - DNA, 100 bp, Homo sapiens
agaacgcggtctactttgtctgcaattattctccaaacagaagatggctgtgccacccacgtatgccgatcttggcaaatctgccagggatgtcttcacc

SEQ ID NO: 824597 - DNA, 99 bp, Homo sapiens
ttgcacagacacggagaaaatcagcggagttcttgctccgaatcttcctgaaaatgccagacagtgacaggtctctcgggtattgaggcagaagaaaac

SEQ ID NO: 824598 - DNA, 100 bp, Homo sapiens
gctctttgtccgcgcccaggagctacacaccttcgaggtgaccggccaggaaacggtcgcccagatcaaggccggcaagcgagtgctcattgcagcccac

SEQ ID NO: 824599 - DNA, 100 bp, Homo sapiens
ccatcctggagacagtcactgctgtggctgcgggaaagcctctctcttgcccaaaccacgatgggaatgtgctgttacactaccaaactgtcagtgaacc

SEQ ID NO: 824600 - DNA, 100 bp, Homo sapiens
cggagacccagtcgctacgggagcagccagacacatggattaattgatgtatgttgagtttatggagctgccttttggtggcttgctttatctgcagttt

SEQ ID NO: 824601 - DNA, 101 bp, Homo sapiens
gcggcgagttcatacagcagctgaagctgtctatggaggactccaagagccctccccccaaagagcagtcattatggcgaaccttggctgctggatgctgg

SEQ ID NO: 824602 - DNA, 99 bp, Homo sapiens
tggtaggaactcctctgatgtcctggtttatgttaccagcaatgacactacgatatgaagatcaatgatgcagactgatggttttgatgaagctgggca

SEQ ID NO: 824603 - DNA, 99 bp, Homo sapiens
tcatttccatctttttctggatgaacctgggcggatgtcagaccagagaagagcacagaatgtaccagagaggggactgtcaaacaactcctccttttc

SEQ ID NO: 824604 - DNA, 98 bp, Homo sapiens
tttgagcaggaaattgaccctgtcatgcagtcccttggatattgctgtggacgcaagattatgtttgagaccttcaacaccccggccatgtacgtggc

SEQ ID NO: 824605 - DNA, 100 bp, Homo sapiens
gttcaccaatcaatctgaagattctgaaaggagcttgaagaaatccgcaaatgtgggatgaaaaacttccgtaacatccaggttgatgaagctaatttat

SEQ ID NO: 824606 - DNA, 98 bp, Homo sapiens
ggaatcataggattaacaacttggaaaaggcctatgatactcctgaccatggcaaaagttataaccaccgtactgaagttccctgatgatcagactca

SEQ ID NO: 824607 - DNA, 98 bp, Homo sapiens
ggacctcgttcagcagtcatgtaactataagcagcttcggaaaggagccaatgaggtgcaccaattccagctggacatcactgtgaaaatgggacggg

SEQ ID NO: 824608 - DNA, 100 bp, Homo sapiens
ccacttctcgtttgcctcctcccgaaggtaattgcagccacaaacagggtggacatcctggaccccgccctcctccgctcgggccgccttgaccgcaaga

SEQ ID NO: 824609 - DNA, 98 bp, Homo sapiens
acagtgtgttaaggttctgcttcagatgccgtgcgcgaaattcggaagtatgatgatgtgacggaaaaggtgaacctccagaacaatcccggggccat

SEQ ID NO: 824610 - DNA, 100 bp, Homo sapiens
tttaatggcaacctgcccttcctcttcaaagtgctctcagttgaaacacccctgtccatccaggcacaccctaacaagggcaatagtctgaccttgattg

SEQ ID NO: 824611 - DNA, 100 bp, Homo sapiens
cctgcggcgaggatggagggcctggcagtgcggttgctgcgcggcagcaggctgcgccatcatgaccgggtcctataacaacttcttcaggatgtttgat

SEQ ID NO: 824612 - DNA, 100 bp, Homo sapiens
cagatgctcgctcgtccctgggccagtcagcgtcagagactgaggaggacacagtgtccgtatctaaaaaggagagggtaaaactgattattatgctcgg

SEQ ID NO: 824613 - DNA, 98 bp, Homo sapiens
acggaagaggccctgcggaggcggcggtgcagcgctccgtttgcctgagaatacagatcaacccacagaacaaagcggatttccaaggcatctcccca

SEQ ID NO: 824614 - DNA, 114 bp, Homo sapiens
gttgaaatacgggacagaattgaatcagggagatatgaagcctccaagctatgattctgaccactttacctgcattgtgaaggtactttttaccctactgtacacacaggctct

SEQ ID NO: 824615 - DNA, 100 bp, Homo sapiens
gaagcttcaccacaaaagcgaaatgggcacaccacagagtactgggatttaatgaatttgtctgaaaaacatgataagataccagaaatctgggaaggcc

SEQ ID NO: 824616 - DNA, 100 bp, Homo sapiens
cagaaatacaaagcaaagattgtttttgcaggtggcagtgctccttttggacttttctctaggtttggcgctaaactcttcttgtgagctcactccaccc

SEQ ID NO: 824617 - DNA, 100 bp, Homo sapiens
gaaagtcaatcgtaggaagaacacagtacaggatttcaataacgagagtgacagctgacatttctcttgctaagaggtctgtcctaaataatcccagcaa

SEQ ID NO: 824618 - DNA, 100 bp, Homo sapiens
ccagcggagttagcgcctgctctacctcctcctgctttcacctatcccgcttcactgcatgcccagctccgacagttagttaatatgtgcatcaacccag

SEQ ID NO: 824619 - DNA, 100 bp, Homo sapiens
gctcggcccgagagctgcggccacttctcgttttcatctgggccaagatcctcgcagtggacagcagcagcccgacggccatggaggctgaagagacgat

SEQ ID NO: 824620 - DNA, 100 bp, Homo sapiens
acccacagtggaaaacagattcctgccaggattccttagcaaaatcaccttctgtaaaaaatgatcctctgtcttcagtaaaagagttggaagaaaaaat

SEQ ID NO: 824621 - DNA, 98 bp, Homo sapiens
ttaaactgtatctggagacacacttgggagactcatgcatctgtatgccgtgtgcgtggactgcctggaaggggttcacaagatcatctgcatcaagt

SEQ ID NO: 824622 - DNA, 100 bp, Homo sapiens
cagaacctctaggggagggcccagccatcgcgctttgaaaaatctcctcagtatccggagtgtgatgcagaagtaccttgcagagagaaatgaaataacc

SEQ ID NO: 824623 - DNA, 100 bp, Homo sapiens
tcaagctgtctggccacccccaaagacaaaagacacagaagaaaaagtgggactgaagtacactgaagcagaaaacaagcatcgttgtgggtccaaggag

SEQ ID NO: 824624 - DNA, 100 bp, Homo sapiens
atacaactcagatcttaagtagtgatatttctcttttgtctgcccctattgtaagtgcagatggaacacaacaggatacctgcccactatgtctatccgc

SEQ ID NO: 824625 - DNA, 98 bp, Homo sapiens
cggattaaagctaaagacatagttcctggtgatattgtagaaattgctgagtgatggtgatgattttaattacatcattgcatttttccttggaacag

SEQ ID NO: 824626 - DNA, 100 bp, Homo sapiens
tggcataggttatgaagctaatcctggcgttccaccagcaaccatgagtggttccatgatgggaagtgacatgtttgtcccatgaggagcacccccatag

SEQ ID NO: 824627 - DNA, 100 bp, Homo sapiens
ccggcagtgctcgcctaaaggtggagaacgaggagtagaggagccgcaggccagagcctgtgagcaggtgctggagaatctggtaaaagcaccattgtga

SEQ ID NO: 824628 - DNA, 100 bp, Homo sapiens
atggcacttcattggccacctacagaaacaaaatgtcaacaaattgatgggctaaatggctctctccccaagggtgtggaggcccagaacagaaccctct

SEQ ID NO: 824629 - DNA, 100 bp, Homo sapiens
cccagtctgccttcaagaaaagacagaagtagaaagggtggtggctgactgtctgacaaattgttatcaggtacaggtttgcagattccgccagcagcac

SEQ ID NO: 824630 - DNA, 98 bp, Homo sapiens
caaagcattctttgtatgccaattaagaatcatagggaagaggttcgtgggagtaagggagaagttttgtacattttggatgctaccaacccacggca

SEQ ID NO: 824631 - DNA, 98 bp, Homo sapiens
ggtgcagggagtgatggtcagctaggactcatgactactgaggattctgtggcagtgcccaggtggttatcactaggctaaaactggacaaagaccgc

SEQ ID NO: 824632 - DNA, 100 bp, Homo sapiens
cttgaatgactggaaactgattggaaactctttgggaaagccactcgaaaagtgtgcaaagatccaccttacaaagtagaagaatctgggtatgctggtt

SEQ ID NO: 824633 - DNA, 98 bp, Homo sapiens
attgtaagaacaatgagagatcagcgagccatgatgatccaaacacctgaagactatgaccgtctgaggcctttatcttacccaatgaccgatgtctt

SEQ ID NO: 824634 - DNA, 100 bp, Homo sapiens
agccccgggccaggccgcggccggggcaggagcgcaggaaaaagctcctcaatttctgaagagaaaggtgactctgatgatgagaaaccaaggaaaggag

SEQ ID NO: 824635 - DNA, 98 bp, Homo sapiens
actctggaagaatgagaatggcggagtggaaaagagtcctggatttgaagtaaacagatgagaattctagtgttcaagaaggaagtgtatcttcatac

SEQ ID NO: 824636 - DNA, 100 bp, Homo sapiens
ggagcccaaagacccctggagacatgggtccgcaagcaggtggtgaacatcccgtccttcattgtccgcctggattcccagaagcacatcgacttctctc

SEQ ID NO: 824637 - DNA, 98 bp, Homo sapiens
agaagcttgggaaggagctggaaaatttggattatttagccttcaaacgtcagcagggtccaaattccaagcctgtagtgtccttcattgctggttta

SEQ ID NO: 824638 - DNA, 100 bp, Homo sapiens
gcgcagccaccccgcgggatacgcctcagcgcggtttggtgcacctcgatttggaggaagtagggcagggcccttatctggaaagaagtttggaaaccct

SEQ ID NO: 824639 - DNA, 100 bp, Homo sapiens
tactgcagatgtgcaaccctagagaaggcaagcaggcaaatccaccctgtttgctgtctactgtgcagtatatcagtagcttttatgctagctgtctgtc

SEQ ID NO: 824640 - DNA, 98 bp, Homo sapiens
ctccttgtctttgcaaacaaacagattgctcgctgtaagcagctcatctgtgaccccagctacgtaaaagatcgggtagaaaaagtgggccaggtgat

SEQ ID NO: 824641 - DNA, 101 bp, Homo sapiens
tgaagatattagcctaacaagatggaagcaggtttaaaattttacataagaagttacctttttcagagtcaagggtccagagaaggaggagaagttgagac

SEQ ID NO: 824642 - DNA, 100 bp, Homo sapiens
aacggggatttccaccatctgtcccaggtgctggagaatctggtaaaagcaccattgtgaagcagatgaggatcctgcatgttaatgggtttaatggaga

SEQ ID NO: 824643 - DNA, 110 bp, Homo sapiens
aggagttgagccttccaagaagaggcagctttcaacattatgacctggggactccagcatccttcaagcaagccatttccgaagaaggtgaaaagaagccaggatgattg

SEQ ID NO: 824644 - DNA, 100 bp, Homo sapiens
tgccctgtggccacacccatcaaaccacctgtctacaactcccggctggatgtgaaggtcttccgggccctgatcctgggggagctggagaaggggcaga

SEQ ID NO: 824645 - DNA, 100 bp, Homo sapiens
tccttctcaaccttgtgggatgtgaaaactctgttactgaagtttttcagtttccaagatggaatagttatagtgcatatcttcctcatggttgtgagga

SEQ ID NO: 824646 - DNA, 100 bp, Homo sapiens
actgtgtgaggcccaacagcggaatcatcgatgcaggggcctcaattaatgtatctggacttctgccatgggcaagtgatgtggccacccctcagcgccc

SEQ ID NO: 824647 - DNA, 100 bp, Homo sapiens
ctgcaaggtggagcactggggcctggaccagcctcttctgaaacactgggatgttcccacaagcctgcatttccagagcatgctgaaatctcagtggcag

SEQ ID NO: 824648 - DNA, 98 bp, Homo sapiens
attactcttcactggtgagagtcttgggatcagacatgaagaccccagaggatcctgcagtgcaggaccattgtagcactggtatacaatgtgctgaa

SEQ ID NO: 824649 - DNA, 100 bp, Homo sapiens
gccatagctaaagatgttttccagcattcacagggagagtcccgtattctcagagtaaaagttgtttctggaattgatctcgccaaaaaggacatctttg

SEQ ID NO: 824650 - DNA, 100 bp, Homo sapiens
cttggacttccatgagaagtataatgatttatataagttccagcaggtcacctcatcatctcaaggaggagcattcccctgggctaaggcactggggccg

SEQ ID NO: 824651 - DNA, 101 bp, Homo sapiens
gttggaacatgctttcttcaagatggaacaaagactgttgagtatgctccatgtagatcacctgcagaaccttggcctgaaaatgctacattatatcagca

SEQ ID NO: 824652 - DNA, 98 bp, Homo sapiens
cctgctcctgctcatggacgaccgtcgtcccccagactacagtaatactcaacaatgatcggcagaacgccattgtagccaagatggaagaccccttg

SEQ ID NO: 824653 - DNA, 100 bp, Homo sapiens
gacagccttcatttctctgaacatactgccttatgggacagatcaactctagccggcccggtccttggactgaaagaatgcaccaggggctcggcagtgt

SEQ ID NO: 824654 - DNA, 99 bp, Homo sapiens
ggcacagatcagaaccttcacagaaatggattctcatgaggagaaggtgttcagagccgtcagagagatgcttgctctgtcaaggcacagcctattgtc

SEQ ID NO: 824655 - DNA, 100 bp, Homo sapiens
aacctggttcagcagttcagggagctcacatttctcatattgctcaacagcaacatggctgacaaggccaagcctgccaaagctgccaacaggacgcccc

SEQ ID NO: 824656 - DNA, 100 bp, Homo sapiens
ttgaagggaggtagcatccgttggatatccacaccatccttctcgctgcaggttccatgccattgcagtgtcaactaggcctcagttacttttcagtttg

SEQ ID NO: 824657 - DNA, 105 bp, Homo sapiens
gtgctaagccatcactggaatacattagcgaaaaacttgtatcagaacctatctacaagacctcttgtgctttgactattcatgctattggacgatacagccctg

SEQ ID NO: 824658 - DNA, 98 bp, Homo sapiens
gaaaatgtatggatacaacttacgtttgatgaaagatttgggcttgaagacccagaagatgacatatgcaagtcctcgaggccacacgggttaatcga

SEQ ID NO: 824659 - DNA, 100 bp, Homo sapiens
ggtggcagagggaattggttccactgtgtttcgagcgattctgggctctctaaatacgtacagattctgcgataatgtgtggacttttgtactgaatgat

SEQ ID NO: 824660 - DNA, 98 bp, Homo sapiens
tttctgaacttcctacacaacccgtgtattcatcccccagacgtttaaattgtgcggaaatatctagtatcagcttctccaaacaggctggtgtacag

SEQ ID NO: 824661 - DNA, 100 bp, Homo sapiens
atttctgttccgcacaggcctgctgaactgggtgctttatatagggcttcaacggaccacaccaaaatgccatctcaaatggaacacgccatggaaacca

SEQ ID NO: 824662 - DNA, 100 bp, Homo sapiens
ctctactgtgacttcagagacactgccaagcagccttagccctagtgtagagcttatagttgcaacaacatgtatgggaataaaccatccaatattttcc

SEQ ID NO: 824663 - DNA, 100 bp, Homo sapiens
agcttcagtggcctgtcgttggaagagtacaagctgatcctgtccacaggttatacattggctcttcaaagacgttcacctcatcagagaaatccctgac

SEQ ID NO: 824664 - DNA, 98 bp, Homo sapiens
tgagcaacatccgcgagttcctgcgcggctgcggggcttccctgcggctggaggaacaagcacatcatgattgacttggggactggcaacaacaacaa

SEQ ID NO: 824665 - DNA, 98 bp, Homo sapiens
tttcctaaaaggattgtacaccttagaagtgcttaaggaagagtgatgaagtatatcagttacagcaagaggcacctcgtcccaagagaatcatttgt

SEQ ID NO: 824666 - DNA, 60 bp, Homo sapiens
gcggcggcggcggaacgccaggcaggccagggagctggagagcagagaggcagagctaag

SEQ ID NO: 824667 - DNA, 115 bp, Homo sapiens
atgtgtttcactgtgaggcacacagaattctctacatttgtgaaagtcagtttctgaggaatttcatcaggaggagaacatttgcctgcactgggcggcgttctccggctgcgtg

SEQ ID NO: 824668 - DNA, 98 bp, Homo sapiens
gcaaatgtgactgccatggagtgaagggacaaaagatacagcaattttggcaataactcttatcactcctcaagaccctcatctggatccagtgtgcc

SEQ ID NO: 824669 - DNA, 99 bp, Homo sapiens
gtacattaccattgactggaaagcaatgtgtcaaccgcattattactgaaaaggcaatgaatcgctccctggctaatgtgattcttggaggctatggca

SEQ ID NO: 824670 - DNA, 99 bp, Homo sapiens
ctacagacacttctggatgttggttctctttgtcattttcaacagtctgcaggtttcgacacagccccaactgctggtacctgagaaactggactatcc

SEQ ID NO: 824671 - DNA, 99 bp, Homo sapiens
tctatgacaacgtctctctgccgtgaatcattcctgcagatgaaaaagtgtgacttggcagctggtctcctctgagcctccggcctccataagacccaa

SEQ ID NO: 824672 - DNA, 100 bp, Homo sapiens
aaaaaccagagaggaaaacacaaaaaacaggataaaatcttatgattatgaggcatgggcaaaacttgatgtggtgttcaaagctgaaacaggagagaaa

SEQ ID NO: 824673 - DNA, 100 bp, Homo sapiens
ccaagaacacgggcaggaaaatgatgacctcgtgcagagactaatggacatcctgtatgcttcagaagaacacaaagtgcaacagtatacgttaataatt

SEQ ID NO: 824674 - DNA, 100 bp, Homo sapiens
tactcctacttccacttcgtgttcttcctagcttccctgtatgtgatgatgaccgtcaccaactggttcaagaacctacaagcagcaattggcgcctatt

SEQ ID NO: 824675 - DNA, 100 bp, Homo sapiens
gggagaacaaatgatcatctgtccaacgcgcccatttacaggatgaagatgagctggattcccacaccatggtgaagactagtgtggagagtgtgggcac

SEQ ID NO: 824676 - DNA, 100 bp, Homo sapiens
accatccataaaatactcattcccctctcagctataaggaagaccagatggatgagaaactaatggaacctctgaaatatgctgaacaacttcctgtagc

SEQ ID NO: 824677 - DNA, 98 bp, Homo sapiens
agatttttaaagaaatgtttggagaccagaatgatgatactctggtgaatgaaaactttgccattgatttgatagcagagcagcccgtgagcgaggtg

SEQ ID NO: 824678 - DNA, 74 bp, Homo sapiens
tgagaacccactgaagcggctgttggtgccgggggaagggtatacagggagctaccctgtgtttctgagaccct

SEQ ID NO: 824679 - DNA, 98 bp, Homo sapiens
ccatgtttgatgatgatgctgaccagtttcctgacggaatatacagatgttgccacaggaatctaatctgaaatcgtacaaatggaaatgacgctaca

SEQ ID NO: 824680 - DNA, 99 bp, Homo sapiens
gatgatgttcactggaaggaaaatgggacattagttcaagtagcaactatatcaggtgtgtcaaggatgccacaatgccatcgacccagaagtgcagcg

SEQ ID NO: 824681 - DNA, 98 bp, Homo sapiens
cacttctcacccctgagaatctgggacctcaacaggtctccatcatcaccagttccagtagtgaaaaacagaacccaacaaactcaaaatacattaca

SEQ ID NO: 824682 - DNA, 100 bp, Homo sapiens
ttaaagacgctctaccggaaatcggcatcactagacagtcctgtcctattggtcatcaaagatatggataatcagagcgacctgcgggttgggctgagtc

SEQ ID NO: 824683 - DNA, 100 bp, Homo sapiens
gcgaagacgagatccagttcctgcgaactgtggtgcccaggcaacatgggtgactggagcgccttaggcaaactccttgacaaggttcaagcctactcaa

SEQ ID NO: 824684 - DNA, 100 bp, Homo sapiens
gtctcccagttgccttggaaaaattgccacccaactactccatgcattctgctgaggatctcatagatcagaacatactggagcctgtaacccgtgcaca

SEQ ID NO: 824685 - DNA, 98 bp, Homo sapiens
ggatgacggcaccttcccattggataatgaagtgaaggcctttatgagaggacagaggctatatgaaaagttttttgcatgtctgacacccatgactc

SEQ ID NO: 824686 - DNA, 100 bp, Homo sapiens
atcggcagcggcatgccagggaagcccaagcacctgggcgtccccaacgggcgcatgatcatggaagggaagtggttgctgtgtatgttactggtgcttg

SEQ ID NO: 824687 - DNA, 100 bp, Homo sapiens
gtgaatctgcacagaaggcccttaagacatgaagccattattatatcaggaaccgaaatggccaagcatatccagaaagaaatacagcgaggtgtggaat

SEQ ID NO: 824688 - DNA, 98 bp, Homo sapiens
cttctgcctgcatcatccgtggcctgaccattttcagcatcagcctgtgcaacagcacatagccaacataaggagggtgcatctgcccggaagactca

SEQ ID NO: 824689 - DNA, 99 bp, Homo sapiens
ccagaataaagccaagctcatctctgagacccggaggaggttcgaagctgagtatgtgacagttgtgattccaaagaatccctatcctgcctccgatgt

SEQ ID NO: 824690 - DNA, 100 bp, Homo sapiens
cgaaaactgaagcagatgttgaacaacaagggaaaggaaaacctcttcagcgcaaggtgaaaccacctaagaagcaagaggaaaaggagaagaagggaaa

SEQ ID NO: 824691 - DNA, 100 bp, Homo sapiens
cgaacgcatcgatggtggaatcactgggaacatgcggcaagaggccattgaccgcttcaatggtcccgttcaagaagttcttccagttcgcagtcaagat

SEQ ID NO: 824692 - DNA, 100 bp, Homo sapiens
gaagtcactgcttctcaagaaaccccttcgggttgacctcatcctcgagaacacatccaaagtccctgcccccaaagatgtcaacagcatctccaccctg

SEQ ID NO: 824693 - DNA, 116 bp, Homo sapiens
ggacctttactgtgcagctcctgaaaggagagacacttgtgaacattcaagtgaagcaaaagcctttcatgattatccgttttcagctcaaatggctgggttggatgaaaaatctg

SEQ ID NO: 824694 - DNA, 100 bp, Homo sapiens
ccaagacctcgctggcccccatcattgtttacatcaagatcacctctcccaagctatgctaagaaggaatctgatcttaatggcgcccagatcaagcttc

SEQ ID NO: 824695 - DNA, 100 bp, Homo sapiens
cctcaggagtcatttctgttccgcacaggcctgctgaactgggtgctttatataggggtctcactcttgcccgggctggccttgaactcctgggctcaag

SEQ ID NO: 824696 - DNA, 100 bp, Homo sapiens
ggctccacctcagcagcctcaacagtatggtattcagtattcagagtttgacctgcaggtggacaacagaaaagcagaagctgaagaagccatgaagaga

SEQ ID NO: 824697 - DNA, 100 bp, Homo sapiens
cagatttccccaaattggatgaatgtatcctgtcaggtataatgtcagtgaatggcaagaaagttcttcatatggatcgaaacccttactacggaggaga

SEQ ID NO: 824698 - DNA, 74 bp, Homo sapiens
aggacaacccagatgtgcaacaaagtgcgatgatatcacagtgatttgtccatgggaggcattcagccacctgg

SEQ ID NO: 824699 - DNA, 99 bp, Homo sapiens
tgcaatcgtgttatagaaggtgatgatgttttactgtgcctggctaactatagtcgagggggtgatggtcctatgtgtcgcccagtaattctgttgccg

SEQ ID NO: 824700 - DNA, 100 bp, Homo sapiens
ggattctgtttcactgaggccatctatccgatttcaaggaagccaaggggatcctgagaggacaagacaggtgtatcaagcctctttggaactaattcct

SEQ ID NO: 824701 - DNA, 100 bp, Homo sapiens
cggctgaaagttgctatgatttctaaggtacccactgatggtaatgctggcctgctggctgaaccccagattgccatgttctgtggcagactgaacatgc

SEQ ID NO: 824702 - DNA, 98 bp, Homo sapiens
gcagacggcgacagtggcggcggcgccatggcagggcttgcagggatcgcttacacctgagacgaactacagaacagcacgtaccagaggtggaagtc

SEQ ID NO: 824703 - DNA, 100 bp, Homo sapiens
cgtctctgctcttcagtacaatcctagttggagaggaaatgaaccagaagagtggatccctcggacataccaagatttagacggtctaccttgtattgtg

SEQ ID NO: 824704 - DNA, 99 bp, Homo sapiens
gcgaatatttggcttgttgatgggtacccttcaaaaatttaaacaagaatccactgttgctactgaaagggtcctggacccaagccagaagcctctgca

SEQ ID NO: 824705 - DNA, 99 bp, Homo sapiens
gacgctggggccgaagcagcatgtgacaccgaccagctcaaccatataccctcagattgttcagccaactttgatttttctaggaaaggtttgttagtg

SEQ ID NO: 824706 - DNA, 100 bp, Homo sapiens
gggagcatagctgctacactgaagatgaagcaaggcccaatgacccaggcggatcattttacttctccagatgaatatgatgaccctactgtgctctatg

SEQ ID NO: 824707 - DNA, 100 bp, Homo sapiens
tttgggagctctcatctctatcaagttgtcttctattaattcctcaggtcatgactgtccaaagtatgataatcacatgagagtgctcgttgctacggat

SEQ ID NO: 824708 - DNA, 100 bp, Homo sapiens
gatctaaagtcacccggcggccaaaggccagtgactaccaacgtttggaccagaaggtcccagtagggatggcacaatcagcgaggacaccatccgagcc

SEQ ID NO: 824709 - DNA, 98 bp, Homo sapiens
tccccactgtccccgggttttcccttgggccagctccctacagaggcacatgctcacacacactggtattcaggaaggaacacaatgtaccaaatgta

SEQ ID NO: 824710 - DNA, 98 bp, Homo sapiens
aggattccaagtaactcttatttggaagccaagggagattataccaggtaatgcttttcttttctgatattactatgcaaaataaccctaaagaatca

SEQ ID NO: 824711 - DNA, 100 bp, Homo sapiens
tgattaccaccaggagattgcaagggctgctcacagtatttggggccagagcctacgtgaatatatgtgtgtggacagatcagctgccatgttggttttg

SEQ ID NO: 824712 - DNA, 100 bp, Homo sapiens
gtgggctccaacaccaacgagaccatcaccatgccccacgcgggaaactactttgcttcgcactttttcatgggaggagagaaattcgacaccccccacc

SEQ ID NO: 824713 - DNA, 100 bp, Homo sapiens
agccaaaccaaacagaagctcaatattgagatttccgatgaatgatatcatcaagttgaatcgaaaggaagggaagaagcagaattttccaagactaaat

SEQ ID NO: 824714 - DNA, 98 bp, Homo sapiens
aaaagacaaggaagatgagctgtcctttcaggaaggagccattatttatgtcatcaagaagaatgacgatggttaaacccatccagagtaatggctgc

SEQ ID NO: 824715 - DNA, 98 bp, Homo sapiens
ttccatgtacagtgcccccagttcacttgtatatacttctgcaactgacatgggttttgccagattattcaattctcctctaaagccactagcagatt

SEQ ID NO: 824716 - DNA, 100 bp, Homo sapiens
cactctgctctccagtgaaacaaactcatattgatattaattccaaaatcagcgagttgaagaatttctcagcaaagatatcagttatcttatttcaaat

SEQ ID NO: 824717 - DNA, 100 bp, Homo sapiens
cggagaaccagtatggacgtggtccttttgttgaaacaccaaaaccaatcaaggctttggatcctctcctgccctgggagctgtcattgccctcctgctc

SEQ ID NO: 824718 - DNA, 100 bp, Homo sapiens
gagaatagacacggcagcgcagtgcagatccgcaggcgcaaggcttcaggcgacccgtactgggcctactctgggaatgggtactgttcaaaaaggaatg

SEQ ID NO: 824719 - DNA, 100 bp, Homo sapiens
ggggtattctcacagctctgcggcccaggcccaagttgctgccaaacaaggtgaatccgacccagagaggaaagaaacaaggcagaaagtagacgacgac

SEQ ID NO: 824720 - DNA, 98 bp, Homo sapiens
cagaggggagtcatcatgagcgatgttaccattgtgaaagaaggttgggttcagaagagggttttgagtatccgaggagcccaggaggaggaacccac

SEQ ID NO: 824721 - DNA, 98 bp, Homo sapiens
tcaacttgccaatgtgcaaagctgcagaaaccacagtggtagagggatcagagaaggctgaagaaggtggagaaactgaggcacaaaaagagggcagt

SEQ ID NO: 824722 - DNA, 100 bp, Homo sapiens
tatcagacgccatctatgacagtagtttgaaaagcagagatgatgtcccaaaactagtgactgagttcctggcaaagaaatttgacctggaccagttgat

SEQ ID NO: 824723 - DNA, 50 bp, Homo sapiens
gcaatcctggagccccccagtgagggaattgaaagatgttggccatcgtg

SEQ ID NO: 824724 - DNA, 100 bp, Homo sapiens
ggcgactcctctgagtccagcagcgaggacgagagcgaggatggggatgagaatgattacggacctgaagccaaagaacaagatgcgctagtggacagat

SEQ ID NO: 824725 - DNA, 100 bp, Homo sapiens
aacgtggaattgctcgcttagggttgaaaacgttagcggaagaacttatgcaaacacagcagatgcttttaaacaaggaggaggctgttttggagttaga

SEQ ID NO: 824726 - DNA, 137 bp, Homo sapiens
ttccgaagcctgcatttttttgtggagtggtttgaatatcgtaagcgcacgtttaaacatctcaagaaactgctggagcgaacccgtgccaggcgagagaatcttcagagaaaaatggctgagaggcccacagcagc

SEQ ID NO: 824727 - DNA, 100 bp, Homo sapiens
catgattctttggctcaaaggagttgtatttagtgtgacgactgttgacctgaaaagaggactactgagcccagccaggctgtatgccattgctgccaaa

SEQ ID NO: 824728 - DNA, 98 bp, Homo sapiens
tgcgacgttcacagaggaacactgccggggcccaaccacaagacgactcaataggaggaaggcaaaggcagctcgagcatctcatctgacgtgagttc

SEQ ID NO: 824729 - DNA, 100 bp, Homo sapiens
gctgactaagttgggagaagggaaggctggaggaactttgcatacaggtccatcgccatcatcttggcttatgctggccaattccagatacttacatgaa

SEQ ID NO: 824730 - DNA, 98 bp, Homo sapiens
aggatttggcaacagactttgtttcttggagtccacttccaattccaaggaaggaaaatcacctcggcagtgtttgaaggaaggatactgcaactctt

SEQ ID NO: 824731 - DNA, 100 bp, Homo sapiens
gccagatcaacctggagctctacgcctcctacgtttacctgtccatgaccctgtgttgggctatttgatgaaaggcctgtgtgaaaagcccctggcttct

SEQ ID NO: 824732 - DNA, 98 bp, Homo sapiens
acgagctgaccctgggagacatcgacggatgccttccgcgccttccaccctgacctggaattcgtgggcaagttcttgaaacccctgctgattggtga

SEQ ID NO: 824733 - DNA, 99 bp, Homo sapiens
ggatcatcaactcgcgggtcctcgtggatcagactacagattaccccggaagctttcgagaagctgggattccctgcagcaaaggaaatagccaatatg

SEQ ID NO: 824734 - DNA, 98 bp, Homo sapiens
atcttgttttccctaacatcaagaatgattgcttgcacacatttagatgtggatttagtctgcataactgtaacagagaaactaccattttacttcaa

SEQ ID NO: 824735 - DNA, 99 bp, Homo sapiens
ttttggaaaaaaacaagaaagctcatgccccagacccgtgaccaaggtgtagactaagaagtggagtcatgcttcacacggccatatcatgctggcagc

SEQ ID NO: 824736 - DNA, 100 bp, Homo sapiens
cgcttttcatctttttggatggctgcttgtcgcaatattgtcttcttcgctttagacaaatgggcttaggtcacgagcaaggatttggagccccttgttt

SEQ ID NO: 824737 - DNA, 98 bp, Homo sapiens
attgcagcagtatgtgccacaactgcaaaacaacaccatcctccgccttctgcagcagatacccttcagtgcattgcagagatgctgcagatcaccaa

SEQ ID NO: 824738 - DNA, 101 bp, Homo sapiens
ggaagttttaaagacagaggagcttttgcgagaattgaagcaccctaatgtgattgcattgcagaaggtgttcctttctcacagtgacaggaaggtatggc

SEQ ID NO: 824739 - DNA, 100 bp, Homo sapiens
ctggcctctcattctcccccgagaaatggaaactagaattcctcttcccccagatagaagagtgatggatgtcatttctcgttcacagctttacttggat

SEQ ID NO: 824740 - DNA, 99 bp, Homo sapiens
aggaagatggtggccgcaaagaagacgatggtctgtcttctgctgatcccaactctgattggaatgcaccagcagaagagtggggcaattgggtagacg

SEQ ID NO: 824741 - DNA, 100 bp, Homo sapiens
tgcgctggttcaccccgtggtcgaggagtcgacagaaccaagttgtattgttagacacactggaacaagagatttcaaaatttaaagaatgtcattctat

SEQ ID NO: 824742 - DNA, 100 bp, Homo sapiens
gatcatgctcatggacatggacactttcattctcatgagaagatggcgaattagaagatggtgaaatagacgatgcaggatttgaagaaatacaagaaaa

SEQ ID NO: 824743 - DNA, 100 bp, Homo sapiens
tgacaaagatgcaagcctggcattttttgatgattgtgtagataaaatgggaataactgggaacacaagtccatttggacagccctttagtcaagctgga

SEQ ID NO: 824744 - DNA, 100 bp, Homo sapiens
cttgtgggatgtgaaaactctgttactgaaggcagagacccgtgctgagtttgctgagagatcggtagccaagctggaaaagacaattgatgacctggaa

SEQ ID NO: 824745 - DNA, 98 bp, Homo sapiens
ggaccaagaatcgccttcagccctgtctggtgcatccttggcagaaagtgaggaggaaaacacccccattccagaagtacaacttgctgaaggctttg

SEQ ID NO: 824746 - DNA, 100 bp, Homo sapiens
ctgaagctctttgtggcttcaagaagacgataaaaacattggacaatcgaattcttgttattacatccaaagcagccgctcctgacatcactggccataa

SEQ ID NO: 824747 - DNA, 121 bp, Homo sapiens
acaatttcacctttgaattcagccagtggtcacagctggatgtttgcgacatcccagagagcttccagaaaaagaggcacagttagatgaagaaggacagtttcttgtcagaataatatat

SEQ ID NO: 824748 - DNA, 100 bp, Homo sapiens
ctgggagttcagtcaggacgtctacctgtccaccattgtgaccgagatcatcacgaagtatgtatatgagctcctggaaaaggattgtaatttgaaaaaa

SEQ ID NO: 824749 - DNA, 98 bp, Homo sapiens
tacaatttgactgaagaacagaaggcgatcaaggccaagtatccgccagtcaataggaagtacgagtgtaaaaccttgttagccaaagcagtagcaaa

SEQ ID NO: 824750 - DNA, 100 bp, Homo sapiens
ctcaccaagtcacatgacaagcaggccaaaagagaaacattggctactttgacaaccttaaagcggactccaggaatatcaccaacagcatgacctttgc

SEQ ID NO: 824751 - DNA, 98 bp, Homo sapiens
ggcactgcagtgaaagatagcccagagatcgaacgagtgaagaaaaatcagcagaatattagttcacgggtcacagaaagtcgagagagccaaatgac

SEQ ID NO: 824752 - DNA, 98 bp, Homo sapiens
cggcaaagttttgcagatcttcaacaagaggacccaggagaaattcgccctcaaagcactgaaggatagcacagaagtagaaattgtggatgagaaaa

SEQ ID NO: 824753 - DNA, 99 bp, Homo sapiens
ttcaggagacggtggacacacaaatgctgctcatggattctcccttattcaggtggacaacacaaaggttaccatgaaggaaatcttactgaaggcagt

SEQ ID NO: 824754 - DNA, 98 bp, Homo sapiens
ggaaaacaagttcagggctcccactgattctacattatgtcctgtgcctcctgattgctgagtgttcacctggaccttctgactaccttccctgtgct

SEQ ID NO: 824755 - DNA, 100 bp, Homo sapiens
tgagatgtacgctaagactgaacaggatattcagagaagttctatttgggttcacagtgcccacaatgccagcggttatttcactatttacggagacgaa

SEQ ID NO: 824756 - DNA, 100 bp, Homo sapiens
tcacctgcagtcagtccagagctgcccagtgcgagaagatgtactaaattcattgaataacaactttcttcaaacgctaaatcaagcttggaatgatcat

SEQ ID NO: 824757 - DNA, 100 bp, Homo sapiens
attctcattacaacagtgccacccaatcttcgaaaactggatccagaactccattggtgtccgcaatgttgccagtgtctgtctgcagattggctaccca

SEQ ID NO: 824758 - DNA, 112 bp, Homo sapiens
tgggcgcggtcctgctcagcccagctcaccgcgcgccggccctcggcgccctggttctgcggatcagcctaccaggacatcctcggaaagtatttattctaggccaggctcc

SEQ ID NO: 824759 - DNA, 100 bp, Homo sapiens
acccacatcccccataggtcactgtgtggccatctaccactttgaagtgcaccgtccaggtgaggttagagctggggcatcgcgcccaactgcgcaagaa

SEQ ID NO: 824760 - DNA, 98 bp, Homo sapiens
ggaacaagagagaaagagtggatttcagcctgcacggatggtcttgaaacacaaatggtttttgcttgcctgggaccagtggcagggaccccggaacc

SEQ ID NO: 824761 - DNA, 100 bp, Homo sapiens
tactgacgaagcttggaagttgcagaaggggccgttgacatttagggatgtggtcatagaattctctcaggaggagtggcaatgcctggacactgctcag

SEQ ID NO: 824762 - DNA, 100 bp, Homo sapiens
tagaatgagaatgaagtatggcacatggattaattgatgtatgttgagtttatggagctgccttttggtggcttgctttatctgcagtttttaagaagaa

SEQ ID NO: 824763 - DNA, 100 bp, Homo sapiens
cgggagctgagcaaagtgatcattgttgacaattcccctgcctcatacatcttccatcctgagaatgcaatgctggcatcaccatctacatcaggtcagc

SEQ ID NO: 824764 - DNA, 99 bp, Homo sapiens
tggaatctatgggattttcagctcgatacaatttcacacctgggacactccggacgcaggcccggccaggagagttcgtctgcatcgagtgcggaaaga

SEQ ID NO: 824765 - DNA, 100 bp, Homo sapiens
gtgcattcataagaattcggaatgtctgaaagagcagcagaaacgctactttccagtacgctggggaggaggaggaggaagggagcggcagcagtgaagg

SEQ ID NO: 824766 - DNA, 114 bp, Homo sapiens
cagagaagaacttatcagagattgagaatgtccatggatttgtttctcattctcatatttcaccaataaagctatatgttctcctttcagccaagacctttcaccagtgcaggg

SEQ ID NO: 824767 - DNA, 100 bp, Homo sapiens
agatggtgttgctaacaatgatcgcccgagtggcggacgggctcccgctggccgcctcgatgcaggaggacgaacagatggagtctccctctgttgccca

SEQ ID NO: 824768 - DNA, 100 bp, Homo sapiens
agaggaacgaggattatacagaaatttgaaatttgactgatgaattagctcagaagttatttgatgtttcagaaataacttcagcagcaatggttcattc

SEQ ID NO: 824769 - DNA, 98 bp, Homo sapiens
aaatcgtgtgagcgtcgccgacacctctgagataaaagggcccctttcgactagcctctgctgaaagaccatcatggagcagttcaaccctagcctcc

SEQ ID NO: 824770 - DNA, 100 bp, Homo sapiens
gaaagatatggaattatttcgtgatatccaagaacaagcactgcaggaagaggagcaggacttggatggtgagaaggggccatcatcggaagggcctgag

SEQ ID NO: 824771 - DNA, 98 bp, Homo sapiens
gcaaggtcgccctcaaggccatgatcaaaacacattcactactttcactgcctaagaatcctggaccttctcaaaggcacagaggcctccacgaagaa

SEQ ID NO: 824772 - DNA, 98 bp, Homo sapiens
ttctcttttcccgttgaaggtgctaccgctgacgacacccctggtggatggcgaggatgagaggaatgatgatgtctcagtataaactttctcagaat

SEQ ID NO: 824773 - DNA, 98 bp, Homo sapiens
tttgcgctgccatccgcaaaggctttctcgcttgtcaccttgccatgtggaagaaactggcccatgactgaagagttgctgaaacaacaaaagctgaa

SEQ ID NO: 824774 - DNA, 99 bp, Homo sapiens
agacatttgtcagccaaggaaagaagttccatgccattgcagtgtcaactaggcctcagttacttttcagtttgcccaaattgagcccatctcaacatt

SEQ ID NO: 824775 - DNA, 100 bp, Homo sapiens
tatccactccctgcgccgcctcctcccaccctgagcagagccgccgaggatgataaacacccaggacagtgcacgcgttactttggctaaaaggaggtga

SEQ ID NO: 824776 - DNA, 100 bp, Homo sapiens
taagccttctgggagaaaacttctttttaatgcattaaagcacatggaggaagaaggcacctacgatcaaactctggagttccgtaggggaggtgatggc

SEQ ID NO: 824777 - DNA, 100 bp, Homo sapiens
tcaatgaactgcagacacccccgcgcggccctgacttagccagagggattccctggttggagctggttgccattgccccaaatggagccttacagttggc

SEQ ID NO: 824778 - DNA, 112 bp, Homo sapiens
ccagcagcagttccccctgtacagcctgatcactccccagacgtggtcagcaacgcacagctatcttgacccacccttgcttattgcaggagtgaccaggacactacctcct

SEQ ID NO: 824779 - DNA, 99 bp, Homo sapiens
gccagaagaggctgagccacacactgagcccgaggagcaggttcctgtggaggcagcaggaagatgatttgaagtgggtagaagagaatgttccttctt

SEQ ID NO: 824780 - DNA, 100 bp, Homo sapiens
gcaagactctggagccagtcttgaggtcctacatctccgaaagcaagctcttctagaagttgatggagtttcactcttgtctcccaggctggagtacaat

SEQ ID NO: 824781 - DNA, 116 bp, Homo sapiens
cacagctacatttggaatacagattctataagcagttaggatctggagatttgcttggaacggtagaagaaatccttccaagcctctcagaaaatatcagtgtttgggggatgaaa

SEQ ID NO: 824782 - DNA, 100 bp, Homo sapiens
aggattcgttggctgccgtccccgctgctgtgcattgggtgaatgaaaactttgccattgatttgatagcagagcagcccgtgagcgaggtggagactcg

SEQ ID NO: 824783 - DNA, 100 bp, Homo sapiens
caagtgcgctgtgtccaacgacctcacccagcaggagatacggaccctggaggagttcattgccgttagccagctccgcggctccacccagggcaagatc

SEQ ID NO: 824784 - DNA, 100 bp, Homo sapiens
aggcctcttatatgccgctttggataccagatggatgaaagcaaccaatgtgtgggtgctgtgattgtctccacgccccaggacatcgcattgatggatg

SEQ ID NO: 824785 - DNA, 100 bp, Homo sapiens
tgaaagaggaggaagccatagcactcgcagagaaatatgggatgtacagttacccagcacgtgtacctcctcctcctcctattgctcgggctgtagtgcc

SEQ ID NO: 824786 - DNA, 100 bp, Homo sapiens
taaacaacagaagaactgagctatttttgaaagaacatgaccaccttcgaaaggatcagacttgttataacataattccactttataattcaatgaagaa

SEQ ID NO: 824787 - DNA, 100 bp, Homo sapiens
aaaagagccctggaatgtgaagagacatgagacagtagtcagcttctcagactgtgagtcgacacttcaggaacatacctgtgaatgaaaaagagaccct

SEQ ID NO: 824788 - DNA, 99 bp, Homo sapiens
caaatttggggctacatggaatcacaaaatttagctgactttccccgacctgttcatcacaggatacccaactttaagacctgctgaaactcagcctgc

SEQ ID NO: 824789 - DNA, 100 bp, Homo sapiens
caacaacgacgccgagctctggggcgtcttgcagccctatgagcatctcatctgcggcaagaacgccaatgctcatctttgggtgaaaaattgtcgggat

SEQ ID NO: 824790 - DNA, 100 bp, Homo sapiens
cggaggcagcggctggaggagcgcgagcggcggtttccttgcccggggccgcgggaaggccgaccgactgccgcgatgtctccaagcggtatgagtgtgc

SEQ ID NO: 824791 - DNA, 98 bp, Homo sapiens
gccaggaccatctacaagagccaaatcaagattgcgtttctcaaagtcctacaggtttgttcggacagtgttaccattttctcaggaatttcaaagag

SEQ ID NO: 824792 - DNA, 100 bp, Homo sapiens
atgtgactggcttctatcaaagtttgcaaggttcatttatgttcatggtgtggtcactcacctgtctaccactcccgtgaaatggcagctcgtgccttgg

SEQ ID NO: 824793 - DNA, 100 bp, Homo sapiens
tcttagaaaagtcctgagactgagttttactggatgttgaaacatttgtagcagatatactgaaaggagaaaatttatccaagaaagcaaaggaaaagag

SEQ ID NO: 824794 - DNA, 100 bp, Homo sapiens
cttgagctccaggagttcgtctcttacgtctgcggaagtgcagctgcctcagttcttagcgcagtcaagtatatgaaggacgtctcaccgtatttcaaga

SEQ ID NO: 824795 - DNA, 100 bp, Homo sapiens
ctagtctcaagagatcctccagcctcagcctccctggctttgtatgtggcaaattttgcaaaggttcaagaaaaaacccagatcctcaatgaagaatgga

SEQ ID NO: 824796 - DNA, 100 bp, Homo sapiens
cggagcagggccttggaccccgcggcgcccctcggcctcggagcaacgagcgcagcgccgatatgaggccccaggattcctggcgaggtcctcctcccct

SEQ ID NO: 824797 - DNA, 98 bp, Homo sapiens
cggcagtgaccgtgtgtcagaacaatcttgaatcatgaagctactaaccagagccggctctttctcgatgaagcaaactttaattagatcccaatttg

SEQ ID NO: 824798 - DNA, 100 bp, Homo sapiens
cagttcacctaatgttgccaaaaaatttcatgttggacatttgcgttctaccatcataggtacactgaggaggggacggctccgtcttcacattgtgcac

SEQ ID NO: 824799 - DNA, 100 bp, Homo sapiens
tggatctcagccttgtcaaagatgccagatgtgggagacacgccaaagctcccaagcatattcctaaaggagctggaaaaatatgaacagttgccagagg

SEQ ID NO: 824800 - DNA, 134 bp, Homo sapiens
gtgttcctattagatgaggttgacaaactgggaaaaagtctacagggtgatccagcagcagctctgcttgagcacaaacatttcactgaagatattcaaacaaggcaatatcgttccttggaagttctaatcgg

SEQ ID NO: 824801 - DNA, 100 bp, Homo sapiens
gggatgtatggggacccttctgaaatgggtgctggaatttgcctgctaatcaccattcaggcatcctctggtatcacgattccaaaacccccaaagccac

SEQ ID NO: 824802 - DNA, 98 bp, Homo sapiens
gcagaaccagatccgggagcacgtcatctccatcgagggccaagtcatcaaggcatgggacattggggtggctaccatgaagaaaggagagatatgcc

SEQ ID NO: 824803 - DNA, 101 bp, Homo sapiens
cccagcaatctgttcctgcttgcagtcctcggggccctcgcatcagcgagtgcgacagtgttggcgtggagacgattcgtaccgccctggccatgggtgca

SEQ ID NO: 824804 - DNA, 98 bp, Homo sapiens
tccccgccccgcccgcctggctctctcgccgcggagccgccaagatggggattatgtttgagaccttcaacaccccggccatgtacgtggccatccag

SEQ ID NO: 824805 - DNA, 50 bp, Homo sapiens
ccggagactttggggcctaactagggccctcatctttgtgtcccatggag

SEQ ID NO: 824806 - DNA, 100 bp, Homo sapiens
tctatgctgcagaaatcatttcggctctcatgttcctccatgataaaggaatcatctatagaattaccgaattgatgggatatgagccagaagaactttt

SEQ ID NO: 824807 - DNA, 98 bp, Homo sapiens
gagtgaggaaaaacgagccaaacttcgtgaaattgagatgcgctggctccctccctccgaggctacttctcagggctggaagtcccgtcagttctgct

SEQ ID NO: 824808 - DNA, 98 bp, Homo sapiens
tgaagtgcaaggcactgcaggaggagaaccgcgacctgcgcaaagccagcgtgaccatcaaatctatcctttgaagatggcctctgaatggaaatgta

SEQ ID NO: 824809 - DNA, 100 bp, Homo sapiens
aggaaatcaaagcctttcttgccaatcggaggatttcccaagcagttgttgcacaggtaacaggacctgctgaagttcccatgatgtcacccaatggatc

SEQ ID NO: 824810 - DNA, 100 bp, Homo sapiens
gttgtaactaatggccttgggcattccaaaatatgcccggtgctatccgcccagctgctcctagaccaccatttagtactatgagaccagcttcttcaca

SEQ ID NO: 824811 - DNA, 99 bp, Homo sapiens
agaagaaggggacttgggcccagtttatggcttccagtggaggcattttggggcagaatacagagatatggaatcaggcatgaggtactccttaagccc

SEQ ID NO: 824812 - DNA, 100 bp, Homo sapiens
cttgatcctcctcctaattgcaggtagcctttccagtaaatatatgactcagggaaaagcctcagcgaagaggacccagcaggaatcatgagggaaggaa

SEQ ID NO: 824813 - DNA, 98 bp, Homo sapiens
gggtgtgcggccaaggagggggactggggacccagccccttccagcccaagagtacggccacgccgcgccgggtacggactccggcaaggtcttctgc

SEQ ID NO: 824814 - DNA, 98 bp, Homo sapiens
gaagctggaggccggcaaagccaagtctattgcgtctgcagacatggatttcaaccagctggaggcattcttgactgctcaaaccaaaaagcaaggtg

SEQ ID NO: 824815 - DNA, 100 bp, Homo sapiens
gtctcggacgtgcggggcctgggcctcccggtccgcaagcaggttttaccaattcttgagattctgtatcatgttgaagaaaggaattcacaccatgtgt

SEQ ID NO: 824816 - DNA, 100 bp, Homo sapiens
ctccgggctgaagattgcttctcttctctcctccaagccttatgtttgatcatcggccaaggtcctggcgagaactgcctctgcggctagctgattttgg

SEQ ID NO: 824817 - DNA, 100 bp, Homo sapiens
atgtaccctggcattgccgacaggatgcagaaggagatcactgccctggcacccagcacaatgaagatcaagtgggacctgatgcagaacatcatgaatg

SEQ ID NO: 824818 - DNA, 98 bp, Homo sapiens
tcttggtctttaaagaacatataaacaggcctgccgatgttatccagtggaatgcagtagccctctgggcctgggatattgtggttgataactgtgcc

SEQ ID NO: 824819 - DNA, 100 bp, Homo sapiens
caaggttgaaaagcagtttttttgataaagcagctgtttctggcaaagcctgccgtgtcttacatttgtctctctatccggattagatgttgctatatga

SEQ ID NO: 824820 - DNA, 50 bp, Homo sapiens
ctgaacattactcttccagaagagcacaacattctgaaattttttggtta

SEQ ID NO: 824821 - DNA, 100 bp, Homo sapiens
aagtggaagaatgtggccaggcagctgaaagaagatctgtccagcatcatcctcctatcagaggaggacctccagatatcttaccatggatgaaacacgc

SEQ ID NO: 824822 - DNA, 100 bp, Homo sapiens
ttttgggtgtacaggcatcacaagatggcctaccctcctgtacttgttccaactcaacatcagaggctccttgaaatgctagatacagagaaggaactgt

SEQ ID NO: 824823 - DNA, 100 bp, Homo sapiens
cccaacaatgtgtcagtgacgtcacctggggtgcaggctgcagagaaggctggtatgtctgcagaacaagcccagggacttctggaaaagatcgcaacgc

SEQ ID NO: 824824 - DNA, 99 bp, Homo sapiens
cgagacccccagcgctaccttgtcattcaggaacaccatgaagaagacttctttctctacattgcctacagtgacgaaagtgtctacggtctgtgaagc

SEQ ID NO: 824825 - DNA, 99 bp, Homo sapiens
agaagttgttctaacgctgcctttgctttaaaacagtattacttgcgcttcctgcctgacacagctcacttcaagaagtgcacaatgtcagaacgtgga

SEQ ID NO: 824826 - DNA, 100 bp, Homo sapiens
cagactcgccgtggtcaagttcaccatgagagggtaagccgtaactttgagctggttggacgggttaacttggatcagctggaacagatgaaggagaaaa

SEQ ID NO: 824827 - DNA, 100 bp, Homo sapiens
cctcttgccaaagtgtcccttttaaaaggttaccttccgaacaagaatctatcactgtaatattaacagccaaggtgtgatctgtctggacatcttaaag

SEQ ID NO: 824828 - DNA, 98 bp, Homo sapiens
caagtggagctccttttcctccacctaccttcccgagtgcaggtcttctgaacaaatgcctcctgaggatttctgtgcctggaaaatatctgttaaca

SEQ ID NO: 824829 - DNA, 100 bp, Homo sapiens
gattaagcagagaatggagaagaaggttgattccagatgaaattatgcagcaggaagtcagacccctgatggcggtggagataatagaacaacttcacag

SEQ ID NO: 824830 - DNA, 99 bp, Homo sapiens
cgcagctggctggcttcagtggaccagcagtgaaatcaactgtgcagaccatcactgttggaggagtgagcacatcacagtttaagacaattattcctc

SEQ ID NO: 824831 - DNA, 100 bp, Homo sapiens
gtgatcaagtaccttgagacactcctttactcacagcagcagatccagacatttaatgtggatgcaccatgccagaccgtggaagatttaacgaatgggg

SEQ ID NO: 824832 - DNA, 98 bp, Homo sapiens
gaaagtgaaccccaaggcggagaaattatggatccggatgagcaattggaaacccttcatgaagcactgaaactactgccacctgctcactgcgaaac

SEQ ID NO: 824833 - DNA, 98 bp, Homo sapiens
ttaatcagagtgaagcttgtgcttcggaaagtcaacctcactcctcagcactcacagcacctagctctccaggatccctttgtggccttccacatcaa

SEQ ID NO: 824834 - DNA, 98 bp, Homo sapiens
attaccaaatcacaggcctcggcttcctgaaggagttgttccgaagagcaaaccccaactcaaccgaaagtctttatctcttgcaaggttcagtagtg

SEQ ID NO: 824835 - DNA, 100 bp, Homo sapiens
cagaacctccacagtcaagaggacggctgtattcatcaccaaagaaaaaacttacaccaatgcagaaatcggttagtccattagtttggtgcaggcaagt

SEQ ID NO: 824836 - DNA, 98 bp, Homo sapiens
gtcatatgccaaagatgatgaggtcatctgcacttcattttactccaagatacaccccttagaaaatggagaggggaaaaataaagtgaggcgagtga

SEQ ID NO: 824837 - DNA, 100 bp, Homo sapiens
cttagtgcagtttgccttttactccatatttggcctaatagaacttcagcttattcaggacaaaaggaggagatgggcggaagccatttccaattaacca

SEQ ID NO: 824838 - DNA, 100 bp, Homo sapiens
gtagaggagctttaccgcaattatggcatcctggccgatgccacggagcaagtgggccagaacccttaggagaaatcttgagagtggacagcaattgtga

SEQ ID NO: 824839 - DNA, 100 bp, Homo sapiens
gctctaattctgcaactctttagccagattggaccttgtaaaaactgcaaaatgattatggatcatcatggccagcccaagaaccaggaaggttcttaaa

SEQ ID NO: 824840 - DNA, 100 bp, Homo sapiens
ggcactcaacatgaacaactacaaaggctatgaaaagaagccctattgtaatgcagaaagcaaccagcgagatgaatactgctgaggactggggcctcat

SEQ ID NO: 824841 - DNA, 98 bp, Homo sapiens
tccagtcagcaactacaaggctatattccttctaactacgtggctgaggacagaagcctacaggcagagccatttgcctgcaatggataacccagtgt

SEQ ID NO: 824842 - DNA, 98 bp, Homo sapiens
gatccacttctacttattaaataaggaggaagaaggtgggaaaggtgaaaagaggaagagagaaacagatgatgaaggagaagatgattaagacccca

SEQ ID NO: 824843 - DNA, 98 bp, Homo sapiens
gggtttgtactatcctcggtgctgtggtgcagagctagttcctctccagctcagccgcgtagatgagattgtggggaacctgggtgaaggcacctttg

SEQ ID NO: 824844 - DNA, 138 bp, Homo sapiens
tatctttctcccggaagtcaccattggagctcatcagactgaccgtgtcttacatcagttcagagaggcaatgaatcgctccctggctaatgtgattcttggaggctatggcaccacttcaacagctggtggaaaacc

SEQ ID NO: 824845 - DNA, 98 bp, Homo sapiens
gtaatgcgactcaaagctgcacggcagtctgtttatgaggtgtcatttacaggaaaacaaggtgaaatgagagaaatgcaacagctttcaggtggaca

SEQ ID NO: 824846 - DNA, 98 bp, Homo sapiens
caatgcatcttcccaccaccttaaaccactggttctgcggcatgaggaatttgaagaaggctgcaaagctgcctgtaatgggtatgataccttgtttc

SEQ ID NO: 824847 - DNA, 99 bp, Homo sapiens
aactgatccaggggacaaaagaggggaaactgagagttcccaattaataatgaagcagcatttcagaacatgaactcaaagaggaaagcagaaacttgg

SEQ ID NO: 824848 - DNA, 98 bp, Homo sapiens
tggctattggaaggaggagattctgaagataaggagatacttccaggctttggtgaataatatgtcctttgtaagatataaagaagtgtatgccgctg

SEQ ID NO: 824849 - DNA, 50 bp, Homo sapiens
aacgcctggtgctcaagactttctccgagattacaacagcagtgaattga

SEQ ID NO: 824850 - DNA, 98 bp, Homo sapiens
cagcccgacgaccccgagtcgcagatggcctgccacgttttccgcgccacagaccccagccagggtttagaactagtaaccggcagtgcgaaaaatgg

SEQ ID NO: 824851 - DNA, 98 bp, Homo sapiens
gagcaggcggtggaggcgaggcagatgaggagcaggagaagggcagcagcagtgagaaggagggcagtgaagatgagcactcgggcagcgagagtgaa

SEQ ID NO: 824852 - DNA, 100 bp, Homo sapiens
aaactcctctctatagtcaactccttcaagcatataagtggtcaaacaagctgttccaaagacctaatgcgcttgctgtccagcagttgacagctgctca

SEQ ID NO: 824853 - DNA, 99 bp, Homo sapiens
gagtggctggataacatggagtcgggcaagatggcgcctcccaagaacgctccgagagatgccttgcttctccaggcagccaccaactaccacaacggg

SEQ ID NO: 824854 - DNA, 100 bp, Homo sapiens
aagccattgcttttgaagttattaaagtctgttggtgcacaaaaagacacttatactatgaaagagacaggggttgatttgactaaagacaacatggcac

SEQ ID NO: 824855 - DNA, 100 bp, Homo sapiens
gttccttcagccaaagaaacaagccgtggaataggtgtatcaagtaatggtgcaaagcctgaagatgcacctgctgccactcgacagcagttctacactg

SEQ ID NO: 824856 - DNA, 99 bp, Homo sapiens
caggacagaaaagacagtgttctgctttcatggagttcacagaagagtcgaggagcaggggaaatgctgtctgtagctgagcacttcctggagcagcag

SEQ ID NO: 824857 - DNA, 100 bp, Homo sapiens
acttcagagggtacgggaagctgctgaaaaggctaaatgtgaactctcctcatctgtgcagtcttatgatgtaatcagcgcgatttcacttcctgaattt

SEQ ID NO: 824858 - DNA, 98 bp, Homo sapiens
cagatcacagtgggtgaaaatatgttgatgggcttagcgtgcaaaatggcaactcttaaggaaaaactcattgcaccagttgcggaagaagaggcaac

SEQ ID NO: 824859 - DNA, 100 bp, Homo sapiens
gcaggacatcttcatttacagagcaacttgatgaaggtacacccaatagagagttgcctgtctcgggaaacttgattgatctttatggaaaccaaggtct

SEQ ID NO: 824860 - DNA, 100 bp, Homo sapiens
gatcagactgctcatatctggagatacgcggtgcagctgccgacaccccagcctgttgctgacactagtgttatcaatactctggctgaccatcatcatc

SEQ ID NO: 824861 - DNA, 129 bp, Homo sapiens
acactgtttaccggatctcagctccgacgcccgaggagaaggaggagtggattaagtgcattaattacctcgtgggagatgagctgtgggttgttatggaatacttggctggaggctccttgacagatg

SEQ ID NO: 824862 - DNA, 100 bp, Homo sapiens
agattggtgccgcaatacaggaggagttagggtacaactgccagactggaggagtcatagctgagatcctgcgagagctgtaggtaaaacttgcctactg

SEQ ID NO: 824863 - DNA, 100 bp, Homo sapiens
ccaccaccgtgcaggtcgtcatcttcataggctcgctgctcgatgttcctcctgctgatcaagagaagctttttatccagaagttacgtcagtgttgcgt

SEQ ID NO: 824864 - DNA, 98 bp, Homo sapiens
tctacaaatgaggcagcctggggcagatacacaccccttgattatgctttgcttggtgagcgccatgaagtgatccagttcatgttggagcacggtgc

SEQ ID NO: 824865 - DNA, 100 bp, Homo sapiens
gaagctttaacagcagtccaaagtggaaatgttagtgaaccggagggtgatattcatgaggatttttgcagcgtttgcagaaaaagtggccagttactga

SEQ ID NO: 824866 - DNA, 100 bp, Homo sapiens
tgtctgggaggataattgggatgatgacaatgtagaggatgacttctctaatcagttacgccccattgacaaaccttcagattctctcagtatagggaac

SEQ ID NO: 824867 - DNA, 98 bp, Homo sapiens
gtgttttcaaaactggatatggccaggatgctatagcattgtcagtaggacgtcggtgatgaaggagaagaagaaaaagaattcatttcctataacat

SEQ ID NO: 824868 - DNA, 100 bp, Homo sapiens
atggatattaatcggcttagggcagttgttttcagagacatattggtggctaaaggagttaagagttctgatgtttctccacctttgggacagcatgaaa

SEQ ID NO: 824869 - DNA, 100 bp, Homo sapiens
agccgcccagccctgccagctgcgccgggacgttctggtcagcctatgtgccatgccagacccaggaccgggatgccctgcgcctcaccctggagcagat

SEQ ID NO: 824870 - DNA, 100 bp, Homo sapiens
cctcagcctggtgagggtgatgttcgggaggaggccttgtccacagctccctgtgctgtcaggaatctacaggacttggctcgtatttacattcgacgca

SEQ ID NO: 824871 - DNA, 98 bp, Homo sapiens
gacgccctggtgctcaccaagcaaggtcacaccgacaaatctgaagcgggtttgccaggggagtgtacccgtctccccagcctgggccacccggtcca

SEQ ID NO: 824872 - DNA, 99 bp, Homo sapiens
tatgagcttgctcacccaccagaggagtggaagactctgtctactagtgacgatgtcgaagacagggaaaatgaaaagggtcgccttgaagaagcctac

SEQ ID NO: 824873 - DNA, 100 bp, Homo sapiens
tctgccttctggacaatctttccgggtgagttctgcatcctggtacttcctcaatgtatttgggcttcggagcatttactctctgattctgggccaagat

SEQ ID NO: 824874 - DNA, 100 bp, Homo sapiens
ctgacccatttcagatggagaatacagactgctacctccccgatgccttcaaaattatgactcaaaggtactaccattaaagataccttcttctcagcaa

SEQ ID NO: 824875 - DNA, 100 bp, Homo sapiens
aactatggctaaattacatattccagtaatggtggatgaagttgttcattgtttgtcaccacaaaaaggacaggtccctccttgtggtccatttctgggc

SEQ ID NO: 824876 - DNA, 100 bp, Homo sapiens
gtttcttatatgtgatgccattccagcactggactcatggaggctgagcatttattcagcgtgtccggagcggtgactggaaggggtacacaggcaagac

SEQ ID NO: 824877 - DNA, 100 bp, Homo sapiens
ccgcggagcagtagccgccgtgggagggagccatgaagcattacgagaacccagcgggtgccgcttctccacccgaggcttccacctccaacgagccatg

SEQ ID NO: 824878 - DNA, 100 bp, Homo sapiens
gttttggattacataaaccagtcacccaagtgcattgcctttggaaacgaggtgctgctagctgaggaggggatagctcctctttcttctgcaggaccag

SEQ ID NO: 824879 - DNA, 100 bp, Homo sapiens
gtacgaccaaaactgccgcttttgaagattttgcatgcagcaggtgcgcaaggtgaaatgttcactgttaaagaggtactttaattatcggactaccagg

SEQ ID NO: 824880 - DNA, 100 bp, Homo sapiens
ggacagggactgctgcaacctacggggtgtacttgggaacgaggggtgaagcggcccaggtgaggcccatcacctcttcatgaccactgcctgccaggag

SEQ ID NO: 824881 - DNA, 99 bp, Homo sapiens
caggccccaatggcagctggaagtgcactgtctgtgacaaaatcgcgtggctttctagaagatgaccatagaggaccttccagattttccattagaagg

SEQ ID NO: 824882 - DNA, 100 bp, Homo sapiens
aaagagaacaatatatgacaatatacactccttggaatgaagaaagtccaaacaggagctttacagaaatgcactgtatgagtggccattccaattttgt

SEQ ID NO: 824883 - DNA, 100 bp, Homo sapiens
cgctacggatctcaagaaccttttcagcaagtatgggaagggtccgcaagcaggtggtgaacatcccgtccttcattgtccgcctggattcccagaagca

SEQ ID NO: 824884 - DNA, 99 bp, Homo sapiens
aacgcgcagctggatgggatcatttcggacttcgaagaatacagttatggccacccaggtaatggggcagtcttctggaggaggagggctgtttaccag

SEQ ID NO: 824885 - DNA, 50 bp, Homo sapiens
gcgagctcgccgggcgccctttagacattcagaccaggatgtagcactca

SEQ ID NO: 824886 - DNA, 98 bp, Homo sapiens
ctggctaaggaaaccctattacctccagggcatccgcttcgatcctgaaattccgcaaacactacgactagagtttgctaaggcaaacacgaagatgg

SEQ ID NO: 824887 - DNA, 98 bp, Homo sapiens
gtcggttgagcggcggcgaacatgcgcttttgacacattggaggtctgccatgtgaatctggaggggcagccgttctactccaagaaggacagacccc

SEQ ID NO: 824888 - DNA, 100 bp, Homo sapiens
ctcagagtccgactctcccacctgctaaggctgtgggtcatcttattgctgcagtcctaaaggaaaatggtttttcagaaaagattcaccaatctacaaa

SEQ ID NO: 824889 - DNA, 100 bp, Homo sapiens
gccccgggacagcgaggagctgagggaccctggattgtgggactttaccaaatcggtttgtaataacacctagaagacgctatccgatccatcaggccca

SEQ ID NO: 824890 - DNA, 100 bp, Homo sapiens
agttgaaccagctgtgggagaaggcccagcgagacctgctgaagctcacacccgtggaccacccagactgcctgccgctacaggatgccctccgcatctc

SEQ ID NO: 824891 - DNA, 100 bp, Homo sapiens
gatgaaggaatctgtcttgaaaccaatagtggaactgaaaagatctcaaaatctggacttgaaaagttgccaccttccagagaagaggtacgagatgaca

SEQ ID NO: 824892 - DNA, 100 bp, Homo sapiens
gaagcccagaaagggaaaaactaccagaacggagatgtgtttggcggaactccatctcaggaaacttggccaggtatttcttcaaatgaggagttcaaga

SEQ ID NO: 824893 - DNA, 100 bp, Homo sapiens
tgaaaccatggtaaactttggacggcaaggtttaaaccttgcagctactgctgctgttactgcagcagtaaaggtaaatcagaagactgaagcacggcat

SEQ ID NO: 824894 - DNA, 100 bp, Homo sapiens
gggggcagccgctgagacggtttttcacaagggaggacatgtatgcccaggactctatagagctactaacaacatctggtatccagtttaaaaaacatga

SEQ ID NO: 824895 - DNA, 100 bp, Homo sapiens
atttagaacgatgtgaacatcgaatcatggaatcccttgcatggctctcacaactcacagctgactttcagagcagtgttttttccaaagctggaatagc

SEQ ID NO: 824896 - DNA, 98 bp, Homo sapiens
agggcccagcagggacccagaccagaaaggcaagccgagtcgtccggaaatccattgcccgtgttctcacagttattaaccagactcagaaagaaaac

SEQ ID NO: 824897 - DNA, 98 bp, Homo sapiens
ggaacccaagatggctgcgctgttgctgaggtgttttcatgccgactagggaatgagcatgatacagctctttcaattgtggatcccgtacaaattca

SEQ ID NO: 824898 - DNA, 100 bp, Homo sapiens
cttgtacccctatgatggcatccacccggacgacttgtctttcaagaaaggagagaagatgaaagtcctggaggaggtatgttagagcccaccaaggaac

SEQ ID NO: 824899 - DNA, 100 bp, Homo sapiens
accacagtcatcgagaggaccttccacgtggattctccagacgagagcaatgtctcaggctgtgcagacaaacggaactcaaccattaagcaaaacatgg

SEQ ID NO: 824900 - DNA, 117 bp, Homo sapiens
agtgtttccacaatggaaccaattgttttacagtctgttccacatgatcattgtaataaggctctgccgacttccagttctggaacaagatggttaaactcatttttccctgctctg

SEQ ID NO: 824901 - DNA, 98 bp, Homo sapiens
tttttcccaagaagagcaggaaatggccaaaccccaggaaattgagagtcagattgacagaatctgtgaaatgggagaagtgatgaggaaagcagttc

SEQ ID NO: 824902 - DNA, 100 bp, Homo sapiens
gagtatgcgctgtatagaccactgcagggctttttccgcagaagtattcagaagaatatgatttacacttgtcaccgagataagaactgtgttattaata

SEQ ID NO: 824903 - DNA, 137 bp, Homo sapiens
tggcctcaccagcctccagcagcagaagcagcgcctgatcgagtccctccggaactcacactccagcacaacattctgaaattttttggttattgtaatgatgttgatcgggagttgagaaaatgcctgaagaatga

SEQ ID NO: 824904 - DNA, 98 bp, Homo sapiens
gctcgactgtgaggatggagtggctgcaaacaaaaaggtgttacacataatattgcattacttcgagaggtgataatcaactcacgctttgtaaaagg

SEQ ID NO: 824905 - DNA, 98 bp, Homo sapiens
gactactgatgactttgtaaaaatgttttcagaacactgagctgaaggttgaagtggagagcttgaaacgagaactccaggacaagaaacagcatctg

SEQ ID NO: 824906 - DNA, 100 bp, Homo sapiens
gatggagttcctcctggggaacccgttcagcacaccagtggggcagtgcctcgctgatggtgagaccattctaaaaggcctccagtccattttccaggag

SEQ ID NO: 824907 - DNA, 100 bp, Homo sapiens
catgaatagcaatcacagagactcggagagcatcactgaggtcctcaaagagggcagcgggctgttcccagatctcctggtgagggagacggaggccgtc

SEQ ID NO: 824908 - DNA, 98 bp, Homo sapiens
ttggaactgttcctctcctgtgcacagaaacagtgctatacttggtagatcagaaactcaggagtgtcttttctttaatgctaattgggaaaaagaca

SEQ ID NO: 824909 - DNA, 98 bp, Homo sapiens
gcagagggtgatagaagaggccaagactgcgttcctgctcaacatccagcaaatggttatgagccttagagtttctgaactccaagtactgttgggct

SEQ ID NO: 824910 - DNA, 100 bp, Homo sapiens
cttagcgtggactgggctggccccggaagcccccacgggctctacctgaccctgcagtgccggtggtggtgtgcacattgagccccggtatagacagttc

SEQ ID NO: 824911 - DNA, 100 bp, Homo sapiens
gcaccaatggcttccgtgctgtcctacgaaagcctggtccacgccgtggccggagccgtggctggagcattggatttgctaaaggagcttaagaatattc

SEQ ID NO: 824912 - DNA, 100 bp, Homo sapiens
actccaaggacaactgcaagggggaagtagagagataacaaaagctgctcagagtctcaatgaacttggttctaaatggcttctaagaagttgggtgcag

SEQ ID NO: 824913 - DNA, 100 bp, Homo sapiens
gtgtcctggacagcaaggggcaggagctggcgaatgttggctaccagggtatttagcctagttggcaagcgagcaatttccacctctgtgtgtgtacgag

SEQ ID NO: 824914 - DNA, 98 bp, Homo sapiens
ggaatgcagccaaatgtctcctttgtgaggataaacagctcgttggcagtagcagcttatgaggatgacttcctctgctaaattacctcgctgccgac

SEQ ID NO: 824915 - DNA, 100 bp, Homo sapiens
ccttgttaactacaacagaccatctgagattaaaagctgctttgacccagcaacatcctccagttaccaatggtgatactgtcaaaggtcatggtagcgg

SEQ ID NO: 824916 - DNA, 98 bp, Homo sapiens
gatcaccaccagccggggactgggcgctaccaggtgattatgtttgagaccttcaacaccccggccatgtacgtggccatccaggccgtgctgtccct

SEQ ID NO: 824917 - DNA, 100 bp, Homo sapiens
atgccccctatgggagggccaccaatgggacaagtatggcatttcaaatatagatacaaccattgaaggaacgtcagatgacctgactgttgtagatgca

SEQ ID NO: 824918 - DNA, 98 bp, Homo sapiens
gaaatgaaaaagttctggaaaggtaacagctatcagccttccttgaatccagaagctggcaaacagcatcagccatgcagacctattgggacaccttc

SEQ ID NO: 824919 - DNA, 98 bp, Homo sapiens
ttcaagctcatctacaacgagtactgtgggcctggagccaagcccctcttcaggagtaagattcgacggaggcgccttgcacgacttgctggtggaca

SEQ ID NO: 824920 - DNA, 100 bp, Homo sapiens
gtccacccaccgccgccgcctcccaggagccctgtaatggccggactgcccttcacctcgcagtggacctgcaaaatcctgacctggtgtcactcctgtt

SEQ ID NO: 824921 - DNA, 100 bp, Homo sapiens
tgacctcgcccacgcccagcagcagcagcaacagtttctgtagaaaatgtttcctgactgcaatgagggaaagcggagcacattgtcccctatgtcgtgg

SEQ ID NO: 824922 - DNA, 98 bp, Homo sapiens
ggcaagtaacatgactaaaaagaagcgggagaatctgggcgtcgctctagagataaacaggggtcacatgacgacagaagccaagagggctgcaaaga

SEQ ID NO: 824923 - DNA, 100 bp, Homo sapiens
ccagtgcggcaagcgcttcctgctggagagcgagctgctgctgcacaggcagacagactgcgagcgcaacatccaggtagagcagctgacagaagagcag

SEQ ID NO: 824924 - DNA, 100 bp, Homo sapiens
aactgtatgtaccctaaatatgggagataagaagtatgaagacatggaaggaccatccgtgatgaccatgagctgcacatacaccctgcgtcagtcctct

SEQ ID NO: 824925 - DNA, 99 bp, Homo sapiens
gaattcctcgcctggagaggatattacttgcaaaggaaaggattcgttttgtgattaagaagacacatgacggaagtgtgtatttttgggccactccac

SEQ ID NO: 824926 - DNA, 98 bp, Homo sapiens
cgttttggcattgctgctaagtacatgctggattgtagaacttctctctctgtcattaaacagctgatgaaaaaggaattcactctagagttttcacg

SEQ ID NO: 824927 - DNA, 100 bp, Homo sapiens
ctggacatccttggggctgctgagacagctggttatattctgggcactaaatgaaggcgtttctaggcaatttgattcgttcagagatggatttgaatca

SEQ ID NO: 824928 - DNA, 98 bp, Homo sapiens
gtgtctcaagcactgtttgcaaaggttgcagcaaccaaaagccagaccgcccaggtttgctgaatgtgaagcccattgaagacattcaagacaacctg

SEQ ID NO: 824929 - DNA, 100 bp, Homo sapiens
gcggagggaagacgccctggtgctcaccaagcaagggagaaacaaaggcagcgctgccctcgggggagcattggccctggcggaacgcagcagccgcgaa

SEQ ID NO: 824930 - DNA, 100 bp, Homo sapiens
ctaagaacgcattgccgccggtcctgaccaccgtgaacggacagtcccccccagatgatgatgtgcctgcagatatggttgcagaagaatcaggtcctgg

SEQ ID NO: 824931 - DNA, 98 bp, Homo sapiens
gctgttcgactctggtctaaaaagggtccagaaggggttgtagaaggtgatttagctgccatagaagcatacaagtcatcaggaggagacattgcacg

SEQ ID NO: 824932 - DNA, 98 bp, Homo sapiens
cagctctccaatctgggaagcaccgagactctagaagaaatgccctccgggtcacaggataagatttggagtccaggaatgagactaagcatttatct

SEQ ID NO: 824933 - DNA, 98 bp, Homo sapiens
gcggacctagacctggaatcgcccaagtccctctactcgcgaggtgacagagctgaatgaacctctctccaatgaagatcgaaatctcctctctgtgg

SEQ ID NO: 824934 - DNA, 100 bp, Homo sapiens
ctctgaaagatgacagctggctcaagggagaatttgtcacgatctcccctgcgaccatgtcttccattaagattgagtgtgttttgccagagaactgccg

SEQ ID NO: 824935 - DNA, 127 bp, Homo sapiens
gacggtgattttgggcctattgaagacacctgctcagtatgacgcttctgagctaaaagcttccatgaagaaaattttaagagcttgcattgaacaagtgaaaaagtattcagaattctatactctc

SEQ ID NO: 824936 - DNA, 98 bp, Homo sapiens
acgtaatcaaagacggcaacgcgcttatcagcgctatgagaaggatctgaaacttgcccacccttcgggatattgcaggacgctgcatcatgagcgac

SEQ ID NO: 824937 - DNA, 135 bp, Homo sapiens
tctgcaaatactatgagaaaaggttattggaattctgttcggtgtttaagccagcaatgccaagatctgttgtggacttgtttacactgggcatgtaaacgaaaccatggtcaggtggtctcttacctgttaaaa

SEQ ID NO: 824938 - DNA, 99 bp, Homo sapiens
ttttccaagctggcttcatggtttgctcagaattctcggggcggcacagttccagggatgctgggcagttttatgctaaatataaagaaacaagattga

SEQ ID NO: 824939 - DNA, 132 bp, Homo sapiens
atttgccgaagattaggaagaatccactgatagaaatcatttccatcaataccggaaaccaccatcatgggttcgggtcccatagaccccaaagaacttctcaagggcctggacagcttccttaaccgagat

SEQ ID NO: 824940 - DNA, 99 bp, Homo sapiens
ggacttcggcactgcctatgcccactacctcctcgtgctcagcctggcgccggagctgaaacacgacgtgaaggccctggagagtgaatttgtttcctg

SEQ ID NO: 824941 - DNA, 100 bp, Homo sapiens
tgagcaccgccaccatggggaagggggtcacaaggcacttaaagcattgttgaggtcattggtaggtcttcaggaagagttgcttttccagtacccagac

SEQ ID NO: 824942 - DNA, 100 bp, Homo sapiens
cgcggtcacggcccagcgcgttcggttaatttggagtggcccctggagtcagtttcctacaccatccgaggccccacccagcacgagctacagcctccac

SEQ ID NO: 824943 - DNA, 100 bp, Homo sapiens
cgcggggacagcagccggccagccggggggcactgcccgcccgggctctgacaatgcagatcttcgtgaagactctgactggtaagaccatcaccctcga

SEQ ID NO: 824944 - DNA, 98 bp, Homo sapiens
ctgagcgcgtccaggcctgacagctctgcggctcgggccctgagggaactctaatgatccaggacaaagaagttaccctggagtatgtatcaagcctg

SEQ ID NO: 824945 - DNA, 100 bp, Homo sapiens
gatgattcaattgtcagaggcaataccatctcacctataataaaactgctcaaagaatctggtgcaaaagagcaaaatgatgcttcaacacccaggccag

SEQ ID NO: 824946 - DNA, 100 bp, Homo sapiens
gagattcgggccgtcaccctgcctcccctgcgtcccgccaccggccgcttctgtcctcggtgacttaagagattaaaattaatttggttgctgttggttc

SEQ ID NO: 824947 - DNA, 100 bp, Homo sapiens
agcatggaggacgatgcaccagtgatctacgggctggagttccaggctaaagaattacctccaaagccattgtcaagaccacagcagtcatctgcaccag

SEQ ID NO: 824948 - DNA, 100 bp, Homo sapiens
ttgcatctgtgcgtcacagcttagagatcaataatatggctcaagcctggaagatgacgtggtgggggacacttcagggtactaccagcggatgttggtg

SEQ ID NO: 824949 - DNA, 98 bp, Homo sapiens
ctagaacagtgccctctgcagctgaataacccttttaacgagtattccaaatttgatggcaagacaacagaaaccagtggtaggactctgccagacaa

SEQ ID NO: 824950 - DNA, 100 bp, Homo sapiens
tggtggcggtggaaatttcggaccaggaccaggaagtaactttagaggaggatctgtggaggtgaagacagaaagcaagagaagtgtcactccccattcc

SEQ ID NO: 824951 - DNA, 100 bp, Homo sapiens
cgcttttgtggaactactctacggcatctggagcaactgggcagaaatttagcatctggagaggttggattttttccaagtgatgcagtcaagccttgcc

SEQ ID NO: 824952 - DNA, 100 bp, Homo sapiens
ctaggcataaggaagaatgtctcatgttcgagtctggggctgtcgctgtgctctggaccatggctaaacctcctggatcattagccagaagcagcagcct

SEQ ID NO: 824953 - DNA, 100 bp, Homo sapiens
cagtgtgtgttgatcttggcttgattcagtctgccttgtaacagccatcgacgagtacaagccccaggatgctaccaccaacccgtccctgatcctggcc

SEQ ID NO: 824954 - DNA, 100 bp, Homo sapiens
cccacaccaccccgtccatgtgcctcaaccctgacctggagggaccacctctagaggtccgtttgaatcctgaggagtgtgccgatgttttaaggcggtg

SEQ ID NO: 824955 - DNA, 100 bp, Homo sapiens
tgcaccactggatgttgtttactggaaatctggcattttttaaagtttgcgccccacaaagaggaaatattccaaaggtactcaggatgtaaaaggggag

SEQ ID NO: 824956 - DNA, 100 bp, Homo sapiens
ggatatagttgctgctatacaacacaattataaaatgtcagcttttaagggaatagcgggttttgcagcaattgttgcatatggattatataaactgaag

SEQ ID NO: 824957 - DNA, 100 bp, Homo sapiens
gcctgtgcgaactgccaagtccctcgtcactgtgctaggggagttggcgggcctgcggcagcaaataatagctacacaggagaaagccagtctagacaag

SEQ ID NO: 824958 - DNA, 99 bp, Homo sapiens
actcacatcaatggagaaccagtgcatggacttgtccacacagaagttatagaactcctactgaaggttgtcccagttttggtgcatctcctgtctgct

SEQ ID NO: 824959 - DNA, 98 bp, Homo sapiens
aagtttggacaaattaggaaactccttctctttgatgtttctgccgaagaagcagggaaaaccatggtgcgggagcttgttcataacttcctgatgga

SEQ ID NO: 824960 - DNA, 115 bp, Homo sapiens
cagaaggagaaggacgaagcgctggaggagaagctgaggaacttaactttccggaagcaggtctcgtacagtgccggtggtggtgtgcacattgagccccggtatagacagttcc

SEQ ID NO: 824961 - DNA, 100 bp, Homo sapiens
ctaaccagtatattggggaactgaaagatcagatagcagagctgaatcatgagttggaccctgggcgttttttacacatggggacccaggctcgccaaag

SEQ ID NO: 824962 - DNA, 100 bp, Homo sapiens
tgaaatacaatacagagcgcattcatgttcttagtggctctcaagaggcagaatttatataataatcctttcaactctatgagttacaccagtccttaca

SEQ ID NO: 824963 - DNA, 50 bp, Homo sapiens
cgctggttggtgaaacagagatgtcaggttctgctccagacgagccctta

SEQ ID NO: 824964 - DNA, 99 bp, Homo sapiens
ttcagctccacccctgtgttaggctaccccagccctccgggaggcttctctacagctctttcgacgtgtagcagcagctttgccgggaatggaaagcac

SEQ ID NO: 824965 - DNA, 100 bp, Homo sapiens
agaattcctcactaatgagctctccagaaaattgatgcagcgaagaaagctaccgtgaatttactgggtgaagaaaagaagagcacctaaaccagactgg

SEQ ID NO: 824966 - DNA, 98 bp, Homo sapiens
gtttgggaggcccaggcggcggagcctccgggacggcgagcggcgggcggcggaggaggagacggcagaatgattgaagatagtgggaaaagaggaaa

SEQ ID NO: 824967 - DNA, 100 bp, Homo sapiens
cgagggcgaagacgagatccagttcctgcgaactgatgacgctgtcagtatagaaagtggtacaaacactgaacgccctgatacacctacaaacacgcca

SEQ ID NO: 824968 - DNA, 74 bp, Homo sapiens
tctgggaccttctccctgcctggacccctactattgcaacaaggacttaaccaccaccatgtcgagcaaaagaa

SEQ ID NO: 824969 - DNA, 99 bp, Homo sapiens
ccaagagagggaaggtcttcattgttgggggagcaaatccaaacagaagcttctcagacgtgcacaccatggatctggagacggggtttcgccatgttg

SEQ ID NO: 824970 - DNA, 98 bp, Homo sapiens
aacatggcggagagagaggtggagtccggcccccgaaagagggcctgctgaattagccaccaagtacgcaaacttttcagagggagcttgcaagcctg

SEQ ID NO: 824971 - DNA, 103 bp, Homo sapiens
gggaactccccatcgcgttttgccagcgataatacgcctcagagtttgctctccaaagctcggggaattgattccagctctgttaaactccggggtagttctc

SEQ ID NO: 824972 - DNA, 99 bp, Homo sapiens
cagctgtgagcagagtgttctgttcttcacttccagcaagccaggtaaaataccatgaagattttgaaaaaacaaaggggagaggctttactcccgtcg

SEQ ID NO: 824973 - DNA, 98 bp, Homo sapiens
aactggttatcactaccgctgtatcacttgtgagggctgcaaggtgaagatcccggatctgttttgtggcctagagattgtccccgcgttgctccacg

SEQ ID NO: 824974 - DNA, 98 bp, Homo sapiens
taagcactattattcatgaggcaaatgaggaacagggcaatagtatgatggtttttcgttggaatatacgttgcacatttatggcgattctgagtgtg

SEQ ID NO: 824975 - DNA, 98 bp, Homo sapiens
ggacatcctggaagctgggaaatgatgacaagagcacctcaaaggcagcagcctcaaggagcagccatggccccagacttgtcgcacggatgcagaaa

SEQ ID NO: 824976 - DNA, 98 bp, Homo sapiens
cgttgcttcggtttccctccagacaggaaacaccgggctggagttgacatccactcctgttcgcagtttttgcttgagttgtacagccgctggatcct

SEQ ID NO: 824977 - DNA, 98 bp, Homo sapiens
tcttcatgtgttcctgtagctctgatgagtgcaatgacaacatcatcttctcagaaggagcggcctattgccaattcatggacatgctcttccctggc

SEQ ID NO: 824978 - DNA, 109 bp, Homo sapiens
ccgggcagtaccttcttcaagagaaatggagcccttctccaaggagctctttctgagatgaagagaattctcaatgtcaagatttgaacaagaagagaatggaatacac

SEQ ID NO: 824979 - DNA, 100 bp, Homo sapiens
ggtggcagtggggatggctataatggatttggtaatgatgggtgtcttttatgaataatcaaaagcagcaaaagccaacgctatcaggccagcgttttaa

SEQ ID NO: 824980 - DNA, 98 bp, Homo sapiens
atggtgcagacctcaggacagtagatccagaaacacaggctagactggaagctttactagaagctgcagatgaaggatttgggggcagagcacttggc

SEQ ID NO: 824981 - DNA, 99 bp, Homo sapiens
gagggtgacgctcgctccgctcgtcccgctcgtcatggcctacccgggatacggaggaggggctctgattgtactttctccacaagcttcagcatggca

SEQ ID NO: 824982 - DNA, 100 bp, Homo sapiens
cattgaatactacatatgtcgagggaatgcagaaagagttaaggaaggcaggtaagaatgattgatgttggctgatattggagtgctcattcacatgaag

SEQ ID NO: 824983 - DNA, 99 bp, Homo sapiens
ttgaatacactgagacccggaatcagttccttgatgagctcatggaggttgttccaggctatggccatgcagtactaaggaagactgatccgcgatata

SEQ ID NO: 824984 - DNA, 137 bp, Homo sapiens
ctcgtggacaagtttgcagatcgggagcgcaaggtcgccctcaaggccatgatcaaaacgtacaagcaacagctgtccctggcagtggaaagggagcggagcctggagcgtgatcaggtgcagctgggcctggactg

SEQ ID NO: 824985 - DNA, 51 bp, Homo sapiens
tggagattgatggggagcgcatcaaggttgtttgcattcgctccacttgga

SEQ ID NO: 824986 - DNA, 100 bp, Homo sapiens
cgataacttgcagactgtggcgcaactggtcttggtagcggaggcacccgaatgctgcccgggtgagcttgcccgctacaccaaggaaggcttcctgcac

SEQ ID NO: 824987 - DNA, 98 bp, Homo sapiens
gatgaccgaggcctctataaacaaggacaacattggctagagaaaaaagatgttgtggggagagccagggggtactaactagggagctctggcagtga

SEQ ID NO: 824988 - DNA, 100 bp, Homo sapiens
atgccccagatgctggctggggaaatctggtgtatgttgtcaactatccaaaagaattgaagatgttcctgctccttctacatctgcagataaagtggag

SEQ ID NO: 824989 - DNA, 98 bp, Homo sapiens
atgacatcagcagtggcacagtcctctccgattatgtgggctcggggcctcccaagggcacagcttccgcaggttcactcgatccaacagtgtgacga

SEQ ID NO: 824990 - DNA, 98 bp, Homo sapiens
cctgagtttgagccctatgagcagtggaacctagggtcaccatcagaaaagctaagtttgctgtatagtgaggatcaggagatctgatcctgattgca

SEQ ID NO: 824991 - DNA, 100 bp, Homo sapiens
aaaaagtggaagcaccaccacccaaagtcttaggaaaagtcctcagtgctgtgggcagtgcccagctactgatgtcccagaaattccagcagttccgggg

SEQ ID NO: 824992 - DNA, 118 bp, Homo sapiens
aggatctggttacagctgagaagcccataccactatttgttgagaaatgtgtggaatttattgaagatacaggtatgcaaccactcatgtattcggttcaggaagcattaaatgccag

SEQ ID NO: 824993 - DNA, 99 bp, Homo sapiens
tgacctgcaggtactgggagatccatagggaggacggcggaacatctggaggctgggaaatgggattgtgggactttaccaaatcggtttgtaataaca

SEQ ID NO: 824994 - DNA, 100 bp, Homo sapiens
aggaggctcactccgatttaaggtgcccgagtccacgctgatggactgccgtagactgtgggaagttcactttcacccatccaacccagaacatcttttt

SEQ ID NO: 824995 - DNA, 99 bp, Homo sapiens
gcgggttgttcacaggcttaactccaagactgtgttcgggagtccttggaactgtggtccatggtaaagttttacagctctttcgacgtgtagcagcag

SEQ ID NO: 824996 - DNA, 100 bp, Homo sapiens
tgtcccctacgtcctacatgagttgagccccatatgggggttggcaggcagcagagaggcccctttcaaggtgttcgggtaaagaactcagtgaaggaac

SEQ ID NO: 824997 - DNA, 100 bp, Homo sapiens
cctcccctgctgatgcggcacgggcagtgtgtgcctacctgtggggacggcttctaccaagatcgccattcctgtgcagatgcctttgaagatgagaaac

SEQ ID NO: 824998 - DNA, 100 bp, Homo sapiens
cttgttaaatggagcaaaaagcttttttagagatcttactgcaatatatgagccccctggccactgttctaggtgctgttgttctactaaacaaggaaac

SEQ ID NO: 824999 - DNA, 100 bp, Homo sapiens
agatgttccagatcctgggatggttaacgaaggcacaaaatgtggtgctggaaaggaccccaaaatgtatgtacagacagtgcttgatgttcataaaaaa

SEQ ID NO: 825000 - DNA, 100 bp, Homo sapiens
taaccggatctatgattacaacagtgtcatccgcctgtacctggagcagcaagtgcaattttacgaaacgccaactgggtcctgaagtagctgaaatgcg

SEQ ID NO: 825001 - DNA, 100 bp, Homo sapiens
cagccactgcaagagtcaggttccgatgatcgcgctgcagcttcctgcctgacacagctcacttcaagaagtgcacaatgtcagaacgtggaattaagtg

SEQ ID NO: 825002 - DNA, 98 bp, Homo sapiens
cgggtcaagtgcagtacctggatctcatcaaaaaggacaccagcaagctgttcaatgaggaggtctcctacaccgccaccatgccattcggtaacacc

SEQ ID NO: 825003 - DNA, 99 bp, Homo sapiens
gacacggctgtgtttgatgtccggctgagtgggaagaccaagacagtgcctggataccttcgaatagggcagtggccattcaccaccgagtagcagtct

SEQ ID NO: 825004 - DNA, 98 bp, Homo sapiens
aaatagcaacaaaatataaaattatgaagttcaagtctaaggtggataattactgtaccttcctcatggaaaaagttttatttaaagtgttatttctc

SEQ ID NO: 825005 - DNA, 98 bp, Homo sapiens
cctttcaccaaggagccccactggctgtttgggaccatggagcgcctcctctcaagtcctcactgccatctcttccaaacactttctgatgactgcca

SEQ ID NO: 825006 - DNA, 99 bp, Homo sapiens
acaggtgctaaagagagcagtaccctgatggagtcccttgcaggctccaaccaggaatggagacgccattggatgttttgtccagggcagcatctctgg

SEQ ID NO: 825007 - DNA, 98 bp, Homo sapiens
cgtcaagtgaagatctggcgcatgaatggaggatcagctgatttattcggaggatttgctgactttggctcagctgctgcatcaggcagtttcccttc

SEQ ID NO: 825008 - DNA, 98 bp, Homo sapiens
gaacgactgcggcgcgctgctggacgaagagctctcctccttcttcctcaactatctcgctgacacgcaggcctgaccttcataagaagacccagagt

SEQ ID NO: 825009 - DNA, 100 bp, Homo sapiens
gaatactttgtggcctgaagttcaaaaactgaactgtctatcttgaccatgcaggtgccaccttgttctcccagagccagctcgaaagcttcactagtga

SEQ ID NO: 825010 - DNA, 100 bp, Homo sapiens
cgtgacaaggaagtgaattcacaactatatagcaagcttacagtaagaggtatgcaggtgccttgagagcttcaggggaaatggcttcagcgcagtatat

SEQ ID NO: 825011 - DNA, 98 bp, Homo sapiens
tacaacatggcagacattgacaatggccgctggatttccagctggacagactcatttgaagacacgattagaagagatcagattggctgtggaagatg

SEQ ID NO: 825012 - DNA, 100 bp, Homo sapiens
ctatgaatctctgttccaaatgctttgctggtgtaccttgaaagacttttaacatacgcagagatagatatctgtccggccaactggaagcggattgttt

SEQ ID NO: 825013 - DNA, 100 bp, Homo sapiens
ggcctgcttatggtcccccaccgtcacttcatgcacgagaaggacgttatgagcggagacttgatggatctgaacagaattaagacgaacgagctttcac

SEQ ID NO: 825014 - DNA, 100 bp, Homo sapiens
tcatctgattttgatgcgtgtctcattaccaaagctgaggcggggtttcaccatgttgcccagactggtcttgaactcctgagcttaagcaatccacctg

SEQ ID NO: 825015 - DNA, 100 bp, Homo sapiens
accgccccctcctgccccttcatgcatgcgcggaggccgcctgctagcaaggtgacgcatccaaagaagacattgacactgctatgaaattaggagccgg

SEQ ID NO: 825016 - DNA, 98 bp, Homo sapiens
tgaactcagtagaaaacttcaagtttcaccagtgatcattaaagaatgggcagcttacaaaggaaagtctcctcaaaccccggaactggttgaagctc

SEQ ID NO: 825017 - DNA, 98 bp, Homo sapiens
gagctgtgggctgtgttccacaagttcaaaggaatagccaggccagaagaaggaaggcctgtggtgagtgggacaggaaatgacatcaccaccccacc

SEQ ID NO: 825018 - DNA, 99 bp, Homo sapiens
gagaaactggctgcagcagagcgagtacttcgttccaacatggacatcctgaagccaatcctgggcatctttcacttccagctgggccggggtgagccc

SEQ ID NO: 825019 - DNA, 100 bp, Homo sapiens
atcactacaatttctagctttgtaggagcatggcttggagcacttcctattccactggattgggaaagaccatggcagggaggaagaaagggaagatttt

SEQ ID NO: 825020 - DNA, 100 bp, Homo sapiens
aagtggtattacaaagatcctcagggagaaattcaaggtgctggagaatctggtaaaagcaccattgtgaagcagatgaggatcctgcatgttaatgggt

SEQ ID NO: 825021 - DNA, 130 bp, Homo sapiens
cgccgccaccgccgccgccggggccgggccccctcgccgctgccccgggaaggagaattcatctcctcctgctagcagccgcgtcctggaggagcagcggatggggaatccattctgtttcttcctggtg

SEQ ID NO: 825022 - DNA, 100 bp, Homo sapiens
gatgccaatgggatccctgtggaccagcaggatgatgacaaaggcaactgtgaggactaccttatgatttcctgctcagaagtgacaaaagagaattatc

SEQ ID NO: 825023 - DNA, 138 bp, Homo sapiens
gggcgggagtttgtgaggcaatattatactttgctgaataaagctccggaatatttacacagtgataacattcagcaatatctgatgaccaataatgtaccggaggcagcctccactctagtgtctatggcagaactt

SEQ ID NO: 825024 - DNA, 100 bp, Homo sapiens
caagctactgtgagttgctgcaaaataaagtccctttgctcgaaattgcaggtgctgcagtgtctgaaatttccgggcctttctcaacagaggatgtagc

SEQ ID NO: 825025 - DNA, 98 bp, Homo sapiens
ctggagaggcactcggacctggcgcatattaaatttcctattgactacccctattcaccacctaccttcagattcttgaccaaaatgtggcaccccaa

SEQ ID NO: 825026 - DNA, 98 bp, Homo sapiens
gcagctggtgggtgtacacactgctgtttaccttggcgaggcctttcaccaagtccatgatttattcaggagattgagcatgctctgggtcttggccc

SEQ ID NO: 825027 - DNA, 124 bp, Homo sapiens
ccctgtcctcaggcacacagtacaacagagtcaacctcaccttggatctggggcagctttgtgcctcactcttctcttacacctggggagtcaagtctggatcctctgctccatatttatttag

SEQ ID NO: 825028 - DNA, 98 bp, Homo sapiens
cgagggcgaagacgagatccagttcctgcgaactaatcgagagctccagatcatgagaaagctagatcactgtaacatagtccgattgcgttatttct

SEQ ID NO: 825029 - DNA, 100 bp, Homo sapiens
agcaagatacattccctcaagtgtccagaatttccaattacagacgacaaagtagcactggtatgatctcgtgaaatcttgagagaaactgaatgacgaa

SEQ ID NO: 825030 - DNA, 100 bp, Homo sapiens
ggtaggagtctgagaggcgtggagaattttgcttgtgcaagattatttcagagcaaggtcgtgcggtgtgtgtagaagtatctcctatagggctcttcaa

SEQ ID NO: 825031 - DNA, 153 bp, Homo sapiens
ttgaggaagagtactacagattttatacaccaccaaactttgttcttgctcttgttttgccctcaattgtaattctggcttcagagacctggtatagaagatgttgccgtgctaaagaaagaactggtccaagttcaaacactaatggataac

SEQ ID NO: 825032 - DNA, 100 bp, Homo sapiens
ctggaatctcccaacagagaaattattattttacacaatccaaaggtccaagcatctcattttgaaggcctaatcacaaccatagttgggtatatacttt

SEQ ID NO: 825033 - DNA, 100 bp, Homo sapiens
ccccagcgggtgaggctgcaacacgaggctgccgttcagcacccgtcgagcgttgactatagtcaatggggccaatggagccaagtgtatggaaacccac

SEQ ID NO: 825034 - DNA, 100 bp, Homo sapiens
ttggaagttgttttcaaccatatccagcctttgccgaatacatcctatctgccacacatccagcgtgaggcctggttgcagtatgcttgaaatctgggat

SEQ ID NO: 825035 - DNA, 100 bp, Homo sapiens
ccacgggcggcgctggcttctgcatcagccgtgggctggctctgaagatgagcccgtgggccagaggcatttcatccttcatgaagccattcaggatttt

SEQ ID NO: 825036 - DNA, 99 bp, Homo sapiens
ccaggagctgcggccccgtccggcccgggctggaggagacatcacagctttcccagatcgggaggaaaaatatggaatgtgttttaccgctgactgaac

SEQ ID NO: 825037 - DNA, 100 bp, Homo sapiens
tgttcagaaagaaggacagggatcacaaacactcagagtggaaaaagtaccatcatttgaaacagttgcctttccccatcttcctggttctgctccttcg

SEQ ID NO: 825038 - DNA, 100 bp, Homo sapiens
gtccttcagacccctccagacatccaatcagagcattcaagggatggtgaaatggatgatagtcgaggataaagatgattcagttgatgctcaaaatatt

SEQ ID NO: 825039 - DNA, 100 bp, Homo sapiens
aggatccgccgcggagaaccgctcccggactggaggcgcccgcggcctcgggtgcgtccgctgcgccaggtttggtgcacctcgatttggaggaagtagg

SEQ ID NO: 825040 - DNA, 117 bp, Homo sapiens
agatgtcaacaagtttcaagatgtttcttgataattggaatattcagacagctctttggctcaaaagcttcgagagcatgcagaggctctgcgacaagtacaaccgtgccatcgaca

SEQ ID NO: 825041 - DNA, 100 bp, Homo sapiens
ttcaaggttgggcattgggtggaggagcagaatttactacagcatgtgatttcaggtgtatgtggaatttgatgatcttgaatgggataaacgagagtgg

SEQ ID NO: 825042 - DNA, 99 bp, Homo sapiens
aggaatctatacaaagaagtgatgctggagaattacaggaatcttctctcattggataagcatggattcctggttcattcttgttctgctcggcagtgg

SEQ ID NO: 825043 - DNA, 98 bp, Homo sapiens
gaagctcaagtatatcaagcattcaaattgctcacagctgatcctaaggccagaagcctgtcttagatgttcatgcagaactagacagaattacacga

SEQ ID NO: 825044 - DNA, 98 bp, Homo sapiens
gagggtgaagtggcaggaggaggaggaggggctccggctggtctgtggtgagatgtcgacactacgcagtggtcggaagaagcagccagccagccctg

SEQ ID NO: 825045 - DNA, 98 bp, Homo sapiens
caacggactcctcaagcagtagtagcttgagtttgaagaaacagaagaacctgattttactgcattatgtcagaaattaaagataccagatcatgtca

SEQ ID NO: 825046 - DNA, 99 bp, Homo sapiens
aaggcggctcgaagggatactggttcgtccttactgcggaaagcttgtcctggtataaagatgatgaggtggtgactatcctgttgagaagcaaaagat

SEQ ID NO: 825047 - DNA, 99 bp, Homo sapiens
cgaatggctatgaatgccagtgtgccacagcagatggtgagctatatgtgtttggagaacctgagaatgggaagttaggtcttcccaatcagctcctgg

SEQ ID NO: 825048 - DNA, 50 bp, Homo sapiens
cgtgtcctccgtgggagcccgagggggctgttgtggttccgactataaac

SEQ ID NO: 825049 - DNA, 100 bp, Homo sapiens
tggaacgcaagggaaaacaaatttgtaaatattttcttgaaaggaaatgtattaaggagccatgtgttcacatgtcatgtggaccagtatttaactgtgg

SEQ ID NO: 825050 - DNA, 98 bp, Homo sapiens
cttccgactagtggagtttttagccttttaacattcaaggattaggcaagtatatcgcgtcaacacagcgacctgacgggacctggcgcaagcagcgg

SEQ ID NO: 825051 - DNA, 50 bp, Homo sapiens
cgccagtcaataggaagtacgagtcacaatcctggaggaagagaaggctc

SEQ ID NO: 825052 - DNA, 100 bp, Homo sapiens
tgtattcaggaggaggtgctgacggactcacctttggcaaagggactcatctaatcatccagccctacatctcgagatctggcgtgttttatacagtttg

SEQ ID NO: 825053 - DNA, 100 bp, Homo sapiens
gtgcttttgaaccactggaaagtgaggaattttgaagtacaccgtggtgacattgtatcattggtctgctggaggaggtgaagtggcatcgatgtcatct

SEQ ID NO: 825054 - DNA, 99 bp, Homo sapiens
tttttaactaccgggaagatttacacagatggaaccagaaaagatacgaggctctaggagagctgttcaacggttttgtgtatagcatttgaggttctt

SEQ ID NO: 825055 - DNA, 99 bp, Homo sapiens
cctggagcggccgccttccagcctagcattggatatgtggaggaaattgatggttgaaccacttcaggccatccttatccgaatgctgctccgagaaat

SEQ ID NO: 825056 - DNA, 100 bp, Homo sapiens
ctgcaggacaacctggacaagttgcaggcgcaccctccacccctgtgatccgcgctgaggactgtactgtgtgttggaacacagccactatccgatggcg

SEQ ID NO: 825057 - DNA, 100 bp, Homo sapiens
accacttaaggacattgtggcaatcatcctgaatgaatttagagccaaactgtccaaggctttggcaatttcctttgacctcgctgagtacactgcggac

SEQ ID NO: 825058 - DNA, 98 bp, Homo sapiens
aacccagaagaggaagaagaggaaggaaaaggagtcagtgatggctactcagggtcattatcgttattgtgatgctctttctatgctgggggaatatg

SEQ ID NO: 825059 - DNA, 99 bp, Homo sapiens
ttggacaacatgtcccaacattacatcccattcgtgccctcgtgaggctggcatgcaggatggcaggacagcccggccacatgccccatggagggagtt

SEQ ID NO: 825060 - DNA, 98 bp, Homo sapiens
ccgccgatattcaccaagcgcttcgctacaagatacgtaggtaacctttccagagatgtgacagaagtccttatacttcagttgttcagtcagattgg

SEQ ID NO: 825061 - DNA, 100 bp, Homo sapiens
gcgggtttcccaggacctggaagtgaatgacattttcctcagacattatgacaaagggccatgcaggaataaacttggccactcaagagcatcagtgatg

SEQ ID NO: 825062 - DNA, 98 bp, Homo sapiens
ttgaaaagcgtgaaaaaagaagcttattaaacaagaatttagaggagaaactgacggcactactgcagtcttcagttaagcaacaagtagaagctatt

SEQ ID NO: 825063 - DNA, 99 bp, Homo sapiens
ctattcatacaccatgcaaaacagaaccttccaaatttccttttccaactaaggagaagaaatatcaggctctgatatcagtgggtcagaggaagatga

SEQ ID NO: 825064 - DNA, 98 bp, Homo sapiens
ggggttcgctggctgcggccccggctccggcccccgcaggagcaggaattcattgaagagttgctgtctcccccttttgggggtttagtggcatttgt

SEQ ID NO: 825065 - DNA, 100 bp, Homo sapiens
gagcagcagtctttctgatatctaccagaaaaagcttgtggtgaaggggggcaaaaaaaagaagcaagttctgaagttcactcttgattgcacccaccct

SEQ ID NO: 825066 - DNA, 98 bp, Homo sapiens
ggaagctctacgctactgccatgataataacataattcacagggatgtgaaggatccttcaaaccaaaaatgtggtggaagaaagaaaaccgtgtctt

SEQ ID NO: 825067 - DNA, 98 bp, Homo sapiens
caaggagttcccgtgcctgggtcaggagggcctggacaagatcctagaggctacagaagaagtttccaaaaatctggttgccatgaaagaaattctgt

SEQ ID NO: 825068 - DNA, 100 bp, Homo sapiens
aaagatgttgtccaccttgacagtgaaaaggaattactcaaggtgatgaggacaattgatgacagaatagtacatgaattaaacactacggttccaacag

SEQ ID NO: 825069 - DNA, 98 bp, Homo sapiens
agaagaattttgtctaaaaacattttcgaagtttggatcacagcctataccagatttgtgaagctgggaatcatttcatcaatgtaatgttgtctcat

SEQ ID NO: 825070 - DNA, 100 bp, Homo sapiens
caagagcaagtgtcagaactgcttcaagccccgcgagtcgcatctgctcaacgacgaggacctgacgcaggtgacagccaagagtggcctagacgaactg

SEQ ID NO: 825071 - DNA, 100 bp, Homo sapiens
gcttggataacacctttcctcctgcacactctacgattgccttcatagtggaaagacttgggcagattccaggctgatcagctgaccgaagaacagattg

SEQ ID NO: 825072 - DNA, 50 bp, Homo sapiens
tgaaaacaaccagcctatctcagagcatgagaaagaccacctgtgtaaaa

SEQ ID NO: 825073 - DNA, 100 bp, Homo sapiens
ggaagcctttcagcacgctgtcagtggagacttcatgcttaaccagtacaccaagacatttgtgcagcggaactgctgcctgacgctctgcaacttcagc

SEQ ID NO: 825074 - DNA, 98 bp, Homo sapiens
aaattagccggacccaggatgaagaggttggagatgggaccacatcagtaattattcttggacttaccacattacaggacagaccacagtgcatgtct

SEQ ID NO: 825075 - DNA, 100 bp, Homo sapiens
gttgtcctcatgatgtcctttctggaactggacctcccgaattccctggtaacagtgttcattctcttcaccttggatcattggtatgcactgcttcagg

SEQ ID NO: 825076 - DNA, 98 bp, Homo sapiens
cactcatgccttagtgtgcttactggaagacaatgattgagaggatccagaatccagatctctggaatagctaccaggcaaagaaaaaaactatggat

SEQ ID NO: 825077 - DNA, 99 bp, Homo sapiens
agctctgcggctcgggccctgagcaggactctggactgtcttcacactaggtggtgtgggcagcaaagcggctgcctctccagagctttcttcccctct

SEQ ID NO: 825078 - DNA, 100 bp, Homo sapiens
aacttcactgggattttcaaagctgggttggaccctgggcgttttttacacatggggacccaggctcgccaaagcattgctgctcacctagataaccagg

SEQ ID NO: 825079 - DNA, 98 bp, Homo sapiens
tgagagttcaaatacaacaattgaggatgaagatgtgaaagattcccttggagtgttcttgttgtggatgaagctcacaggttgaaaaaccaaagctc

SEQ ID NO: 825080 - DNA, 100 bp, Homo sapiens
agcagaatttgtatagagatgtgatgttggagaactacagaaacctggtctccctagattctgaaggaagatttccattaggtaatttgtttaatcagtg

SEQ ID NO: 825081 - DNA, 100 bp, Homo sapiens
cctacaggggcctttgttcggtctcaagctgttccgtaatctcacaccaagatggttcaactccttccacccggacacgcgcaagccgatgcacagagag

SEQ ID NO: 825082 - DNA, 100 bp, Homo sapiens
aattcgcattgagaatgttgtccttgtggttcctgtgaagaccaagatcagccggcagtccattgatgcactcaaagactggttcagagatgaaatgcag

SEQ ID NO: 825083 - DNA, 98 bp, Homo sapiens
atctccttccggaatcctggtcaatactaagatcaacctgaacgagagcatgcaggtggtgagcaggcgggtggtgactgtggcctatggggagcccg

SEQ ID NO: 825084 - DNA, 98 bp, Homo sapiens
aacgcctcagccgtggtcatcttcaacgtgggctccaacaccaacgagaccatcaccatgccccacgcggatatttcacattttcaggaacaaaatga

SEQ ID NO: 825085 - DNA, 132 bp, Homo sapiens
gcaacttcaagtagtggaaggagtacagggaagtctataagctttgcaacagaattacagagtatgatcatatagcactttctacattgtgggtttaatattatcaatgcagataccttttgtgggattcca

SEQ ID NO: 825086 - DNA, 100 bp, Homo sapiens
tttctattgtgccagacctgacgaagagccttttgtgaagctcctgtccaaatatgacccccagaaggaggcagagctccgcacctggatcgagggactc

SEQ ID NO: 825087 - DNA, 98 bp, Homo sapiens
cgtatcctcctgtgttttttcagactccttggaaattaaggaatgcaattctgccaccatgatggaagtatatgaaaatgatgatcagctcctgtggg

SEQ ID NO: 825088 - DNA, 100 bp, Homo sapiens
gaacagtaggaaaccagatcttcgagttgtcatccccccttcaagcaagggcatgatgcctccactagtcctcagaatggttggaatgaccctccagctt

SEQ ID NO: 825089 - DNA, 100 bp, Homo sapiens
cacagaaccaaaagccaccacagttgatgtgtttcttccaggatcaaatgaggctggaggctctcaggtcatttttaccaacccattggagatagtgaag

SEQ ID NO: 825090 - DNA, 100 bp, Homo sapiens
gctccctggattgacctcagtcatataatttcttgtcttaacaagttgaccactgaaaaacacacatactatctgactgcagattctcccaatatattgg

SEQ ID NO: 825091 - DNA, 100 bp, Homo sapiens
accacttcacttcacctctttctggaaaccagatgacaagagcacctcaaaggcagcagcctcaaggagcagccatggccccagacttgtcgcacggatg

SEQ ID NO: 825092 - DNA, 100 bp, Homo sapiens
gttctaagtgatgtccaggaaggaggaggaataatatttatggagcatatattatggaacacaggatcacaactgtgctgacaatgacaaccatcaacac

SEQ ID NO: 825093 - DNA, 98 bp, Homo sapiens
ccacacccttatcacagcccagtgccaatggagtccagacggaaggacttgactatgacaggctgaagcagaggaagctcaccagtgtgggaaggggc

SEQ ID NO: 825094 - DNA, 98 bp, Homo sapiens
ttcatttgccagtctcaacaacattatcagatgttcttgacagagtgtcagtggccataaaatgcagtaaaaacaaatccagttcccaagaagctgta

SEQ ID NO: 825095 - DNA, 100 bp, Homo sapiens
tgaaaattcctactggacaagaatatgctgccaaaattatcaacaccaaaaagctttctgctagggagtaaagccaatcccagctgaaggaatcaagtca

SEQ ID NO: 825096 - DNA, 100 bp, Homo sapiens
cctccgcagccgcagaggaggagcgcagcccggcctcgtctgagggaaaaggccataccaatgctggagatgcaatatatgaggtggtgagtctacagcg

SEQ ID NO: 825097 - DNA, 100 bp, Homo sapiens
taaaacacaaatacagtttcctggtgggatgtgcctcaatctcagatgtcatagctcagatttgggaatggatgatgaaggagatgatgacccagttcct

SEQ ID NO: 825098 - DNA, 100 bp, Homo sapiens
caatgagaacagcacctcggacaaccagcaaaaggaagagctgagcttctgaagatcaaccttcgtgaggtcgaattagatcctgatattcaactggaag

SEQ ID NO: 825099 - DNA, 100 bp, Homo sapiens
acggagagcgtgaagcagttacaccaacatcaatcaaggaaaacccacaggctgagctcacacggttgaagcaggtcactctgtgagactgctgggtcag

SEQ ID NO: 825100 - DNA, 100 bp, Homo sapiens
cgatgcatcccagacccccgatgtcgtgttcgcaagcatcctagcagccttctccaaagccacatgaggctgagctccagagggtccagaaggtccgaga

SEQ ID NO: 825101 - DNA, 98 bp, Homo sapiens
ctcccagatcaagctgcagatgatcctgggcatggccttctccatgaccctcttccagcacatccaccggactggtaagaagtacgacgcatgagcgg

SEQ ID NO: 825102 - DNA, 134 bp, Homo sapiens
attgaaatcatgaaagtagacaggactaaactgaagaagacacctactgaggctccatttcagtcaagttaagaacaagtactgtggaactcatgcagtcatttggaagtaagcatctgctggactgaaggagc

SEQ ID NO: 825103 - DNA, 100 bp, Homo sapiens
cttgaagtccaatatgaatgtgtcccttacattgttgacctcctgtactggagagacattaagaagactggagtggtgtttggtgccagcctattcctgc

SEQ ID NO: 825104 - DNA, 100 bp, Homo sapiens
aagggctccgtcagtcagcaccttggcggcccactacccaccgtccacctggttttgctgttactgctcagtgtagtcacaccttgaataagaaatggaa

SEQ ID NO: 825105 - DNA, 99 bp, Homo sapiens
aaacacctcaggacacggcctacaacaccaagagactgaggctgatgtgaatccaaaggcctatccccttgccgatgcccacctcaccaagaagctact

SEQ ID NO: 825106 - DNA, 100 bp, Homo sapiens
tcattgatgttaatgaatggtgctatacttgaattttctaaggtgtcattagacacatctttgccatcgtggcatcagcctatgacctggctcagaatac

SEQ ID NO: 825107 - DNA, 100 bp, Homo sapiens
ccaccagtatgttggatttttccaatccttcagcaagggcaagtattttgtaaccttcccatatccatatatgaatggacgccttcatttgggacacacg

SEQ ID NO: 825108 - DNA, 98 bp, Homo sapiens
aaatatctagtccagcaagaccttgctcttttgaagaggccatgaaaggaaccagcacctatgacagaagatctgctagaagagcagtctgaagtttt

SEQ ID NO: 825109 - DNA, 99 bp, Homo sapiens
aagatactaccagatgtaaatcttggatggtctgacaccactgcactgtggagcaaggagtggccacgagcaggtggtagaaatgttgcttgatcgagc

SEQ ID NO: 825110 - DNA, 98 bp, Homo sapiens
ttctccttggatctgtggtctctggagctgtggttgctgctgtgatatggaggaagaagagctcaggtggtcttactctgcagcagctgaaactgaag

SEQ ID NO: 825111 - DNA, 100 bp, Homo sapiens
tgttcatcgtgatttaaaagctgaaaatttacttctggatgccaatctgaatatcaaaatagcaggctgttaaattccaaaagtttcaagcctttgactg

SEQ ID NO: 825112 - DNA, 100 bp, Homo sapiens
tcaagaaccacgtgatcaagtaccttgagacactcctttactcacagcagcagggcttccagcggctgaaggctgcccacgcggccctagaggaggagta

SEQ ID NO: 825113 - DNA, 100 bp, Homo sapiens
gcatgcagcagccagaaagctcagatgtggttgccctgcttggctttccttatgcctccagtggagaaaacacaggcattgtcaagaagttcccgaggtt

SEQ ID NO: 825114 - DNA, 100 bp, Homo sapiens
ctgcttctccgtgggcagcattggcgaccagcgcttcacgggacagagcagaatgggctgatatagatccggtgccgcagaatgatggccccaatcccgt

SEQ ID NO: 825115 - DNA, 123 bp, Homo sapiens
cagcactgcccgaggacctgaagatggcctgggccaagaaagcccatgccctgcagagtgaggaggcaaaaccttcaactgaggacttgggggataagaaggaaggtgaatatattaaactca

SEQ ID NO: 825116 - DNA, 98 bp, Homo sapiens
aaaatctgcccttttatgatgtccttgatgttctcatcaagcccacgagtttagagttgtcaggggagtgtccattggcagcacctgcctcctgagtg

SEQ ID NO: 825117 - DNA, 100 bp, Homo sapiens
taaagcccagaagaatgtggctaccagcgaagtgaatttgggtggtttgaaggatcacataaaggagatccagagatgccggcgtttgattcttattgct

SEQ ID NO: 825118 - DNA, 99 bp, Homo sapiens
gccgcttcagttctcccggtgtggccacgagtcggcaaatgaagaaacacccctgccgccagtgtgacaagtctttcagctcgtcccacagcctgtgcc

SEQ ID NO: 825119 - DNA, 100 bp, Homo sapiens
ggatggtgccacaggaggctgtgcgggccccgctccgcttcgaatgggtaaagcttcagcgactgaaggagtgtggactttttgaatttcaagaacagta

SEQ ID NO: 825120 - DNA, 100 bp, Homo sapiens
ttatttgggacgcacatactggtgaagccaagcaacagtttccttttcattcaggaaccaaagaggttgttgtaaatgtggatgatgatggagtcatttc

SEQ ID NO: 825121 - DNA, 100 bp, Homo sapiens
agccaaggaaggaggcctgcaaattcatgacaggattattgagattattctggaaaactatgcgtaccctggtgttcttctgattggcactgactcccac

SEQ ID NO: 825122 - DNA, 100 bp, Homo sapiens
gtcatgccttggcgtttcagctcctcgttgtctaggaaacctgtaggaagtgtcagggactctggaaagaacataatggcctcacctgtgaagagctggc

SEQ ID NO: 825123 - DNA, 99 bp, Homo sapiens
agcttggttaacttgggagaaagtttcatctgtggatggagtattggttcaaaccttgtactactcagctgatcacaagctgcttgatgggaacctact

SEQ ID NO: 825124 - DNA, 100 bp, Homo sapiens
ttgcactttactgggggatttgcctcagatggagttacagattatgtttgagaccttcaacaccccggccatgtacgtggccatccaggccgtgctgtcc

SEQ ID NO: 825125 - DNA, 100 bp, Homo sapiens
acaggatgaccaccaccctcgtgtctgccaccatcttcgacttgagcgaagttttatgcaagcagtcaaagccaaagatgcgaagtcactcttacctctg

SEQ ID NO: 825126 - DNA, 98 bp, Homo sapiens
ggagcagcagctccccacgctgcatcatgagtgcagccggctgcaggagcagctagcgcaggaggtgctcctgtaccctggccacagcccaatcctgc

SEQ ID NO: 825127 - DNA, 100 bp, Homo sapiens
catcagcagattccctggagcatgtccttcactttatcaccattttcactggaagcatagaaagtcttgccacttgcctagtgaggcttttccgaacctg

SEQ ID NO: 825128 - DNA, 98 bp, Homo sapiens
gatgttaatgaatggtgctatacttgaattttctaaggtgtcattagagaggaagaagctattcagttggatggattaaatgcatcacaaataagaga

SEQ ID NO: 825129 - DNA, 98 bp, Homo sapiens
tggaggtggccgtggaggcagaggtggcatgggaggattgcggcctgttggcagaagagtagtgtcttgggccccagctgacctgatgaatatcaaca

SEQ ID NO: 825130 - DNA, 100 bp, Homo sapiens
ttttcaaagggggtggcttgcaaagcaacgagctctatgccctgaacgaaaacatcagagcaaagactcaggtggactgaaggccgctatgatcgaattg

SEQ ID NO: 825131 - DNA, 100 bp, Homo sapiens
gcacgtgctggcggtgaacggcatgctgattcgtgaggcccggagctacatcttgcgctgccatggctgtttcaagagctgctgctcaagaggtcatcaa

SEQ ID NO: 825132 - DNA, 99 bp, Homo sapiens
gccaaacaagctcgaaatctcatcactgatatttgcacagaacagtgtacccttagtgaccagtttaaaattggtggtgaatggtggacatggatcgat

SEQ ID NO: 825133 - DNA, 99 bp, Homo sapiens
gaaactcagggcggccccttagctcctatgactggaaccattgaaaaggctcttgcagccaatgccggaacaggatttgctgttgctgagcctcaaatc

SEQ ID NO: 825134 - DNA, 98 bp, Homo sapiens
ggggaagtcaacgatgctagaagaattggaaagtattgtggtgatagtccacctgcggcatcttctctgcattcagtttcatccaagtcattccggga

SEQ ID NO: 825135 - DNA, 100 bp, Homo sapiens
ctttcaattaaaagcacatcttcagagtacaggggctcaggtccaggtggcaggggatatgctacccaactcaactgagcgggccatcactattgctggc

SEQ ID NO: 825136 - DNA, 100 bp, Homo sapiens
taatggtctagcatttccttttaaacatcctgatgaatggagagcataagctggataagaaatcatctccatccacaggaagcctagattctggaaatga

SEQ ID NO: 825137 - DNA, 98 bp, Homo sapiens
agagacatgagacagtagtcaaatactcagctgaaatcagaagccatccagacctctcattttcaaggcagacttaatgaagtcattagaaccttaac

SEQ ID NO: 825138 - DNA, 99 bp, Homo sapiens
caaaaaggataaggagatcatagcagagtacgatactcaggtcaaagacagcccacctgaggatattgaccataaggactcatatctcattacaagaag

SEQ ID NO: 825139 - DNA, 100 bp, Homo sapiens
agggcgccgcggggcagccgccgctcctccgggaacactgatatttgcatttaatggggaacaaaagatgaagaaggaaaaggaatatattcactaagga

SEQ ID NO: 825140 - DNA, 100 bp, Homo sapiens
gtctgtgccgacaagatggcggacggggagctgaacgtggacagcctcatcacccggctgctggagggtgttggagagcacaatggctgaacaagtcctt

SEQ ID NO: 825141 - DNA, 100 bp, Homo sapiens
atacgtggttggagagctcatctggaattttgccgatttcatgactaaccagttcaggtgacacacagtcttttgcacagaagctccagctccgggtgcc

SEQ ID NO: 825142 - DNA, 99 bp, Homo sapiens
gcctttagactttatgagctaaacaaggattctgaactcttgattcatggttatgatgtgattgctcaagcccaatctgggactgggaaaacggccaca

SEQ ID NO: 825143 - DNA, 98 bp, Homo sapiens
gaaactaggaagaggaaattaactatctgtacttataagtgtttctaagacctcagagaaatttggaatctatagacccgcagtttacaatccggagg

SEQ ID NO: 825144 - DNA, 100 bp, Homo sapiens
cagattacaaatgagaagctggctatggttaaagcggaggtatttaactgaaaggaatatctgcttcactgttgcaaccaaaccagatgccttcttccac

SEQ ID NO: 825145 - DNA, 99 bp, Homo sapiens
cgcgctccctccgccgccgccgccttgctgctgctcaaagctgctgccgccccttgggctaaaagtcgcccatgtttgatggaaaagtcccacactggt

SEQ ID NO: 825146 - DNA, 98 bp, Homo sapiens
tgctactagtggagagaaaggggtgcgcatcaaggaggtcacagaagatgtgaattcaagtatcaagacatttttttgtcccaatgatacctacaatg

SEQ ID NO: 825147 - DNA, 100 bp, Homo sapiens
ttcatgccaatcgtgtacacgcctaccgtggggctggcctgtcagcactatggcctgactttccgcaggccccggctaattcacctaaataagattgatc

SEQ ID NO: 825148 - DNA, 101 bp, Homo sapiens
caaagcccagctgcccaaagaggaactggaaattgtggtcatcctagaaggaatggtggaagccacaggtgaaaaggagaacagcttgaagacagatgatt

SEQ ID NO: 825149 - DNA, 100 bp, Homo sapiens
aagaagccatgaaataccttactgtgggagacttagaagattgcctactgaataaggtagacgcaccctctgaagatggtgactccctcctgagaagctg

SEQ ID NO: 825150 - DNA, 100 bp, Homo sapiens
tgtgaaactcaaatgtcaacactgtaaccgtctttttgccacaaaaccagaacttcttgactataaggccatctggctgctgtgcacaggcgctcgtgag

SEQ ID NO: 825151 - DNA, 100 bp, Homo sapiens
gtggatttggctctcggcactcccaggctgggagctggatacctgccctggcagcatggctcagactgcatgacagaattcgacaccaaattttggaact

SEQ ID NO: 825152 - DNA, 150 bp, Homo sapiens
aaacagagtgcctgagagagcctctgaggaaagcatcggcttgcagcacctatgctcctgagaccatgatgtttctgcaaattcaacacccaacagcttccttaatagcaaaggtagcaacagcccaggatgatataactggtgatggta

SEQ ID NO: 825153 - DNA, 100 bp, Homo sapiens
atttggaaatcaggaaggcttgtgtctcatatatgagggaaaatcaacaaacttttgagtctcgtttgctgccaattgatggggcaaatgatctcttttt

SEQ ID NO: 825154 - DNA, 100 bp, Homo sapiens
ggaagaatcctgagttccgtgtgcagttccaggacatgtgtgcaaccattggcgtggatccgctggcctgtgggtgacatcaccatcctggtgaacaatg

SEQ ID NO: 825155 - DNA, 127 bp, Homo sapiens
ctgcctcagtacacctcctctgatagcgacgtggagagcccctacacgctgatcgattctatggcccactgcgtgaccttggttcagctgtccatttcctgtgaccatctcattgacaaggacatcg

SEQ ID NO: 825156 - DNA, 98 bp, Homo sapiens
ggttaagaaccaactggttgaggttcaatgcagacaagacggatgtgatgctgggaattgacataggggatagcttaactattccagatgaattcacg

SEQ ID NO: 825157 - DNA, 100 bp, Homo sapiens
gacctgcaggcagcaccggaggcccaggtctccgtgcagcccaacttccagcaggacaaggatgctgttcgcatcatggcaaaagacttggtgcgcaccc

SEQ ID NO: 825158 - DNA, 99 bp, Homo sapiens
tggcagctcctagtggagacctcgggcatcagcatctaccggctgctggacaaggttcagattcagaacaagaaagtggacatctctaaggtctcctcc

SEQ ID NO: 825159 - DNA, 100 bp, Homo sapiens
agtttcccacttgattacccgttaagtcccccaaagatgagatttacctgtgagatgtttcatcccaacaatcttagaaaccaaccatacagacgagccg

SEQ ID NO: 825160 - DNA, 98 bp, Homo sapiens
tttgtggcaagacaagctcagaactgagaagctgtcaccacagggtgataaaagaaaatgtggctgaagttacccgaagttcagcttgcagtgtaatt

SEQ ID NO: 825161 - DNA, 100 bp, Homo sapiens
cttccctctgccataaggagtttgattctacaaaagaaaccaaacatcagaaatacatccagcatggctggagtctccctctccctctctttccaccgtc

SEQ ID NO: 825162 - DNA, 100 bp, Homo sapiens
tggacaccacacacatcatcagtctggatttgctcgaatatttgggtacccagtaggtatcgttggaaacaacggagttctcttttctgaatctgcaaaa

SEQ ID NO: 825163 - DNA, 100 bp, Homo sapiens
gtgcatgttagtgctcaagagcctcattatctaccacccgagatgccccaagattttcacccgatggaagactaattgtgtcatgtagtgaggataaaac

SEQ ID NO: 825164 - DNA, 98 bp, Homo sapiens
atgagcagttaaccagagccatccttcgggagaggatatgtagcgaggaggaacgcgctaaggcaaagcacctggcagcgattattagtagagttcag

SEQ ID NO: 825165 - DNA, 98 bp, Homo sapiens
ctccgagctgaagctaaagcggctctgttgcaggcacgggagccccaccctggtgaagaacatgatctctggcctcagctatggagcacttaatgcca

SEQ ID NO: 825166 - DNA, 98 bp, Homo sapiens
ttgctcccaaaggcgcaccaatgaccaacatttgccccccggaggaaagaactggaaccagaccatggtgaatccgggcagcagctcgcagccgcccc

SEQ ID NO: 825167 - DNA, 98 bp, Homo sapiens
ctcggtgcagggctccaccccgtcgcctcgacagttttgcgtttggctccctaatatctgctgtcgatccagtggccactattgccattttcaatgca

SEQ ID NO: 825168 - DNA, 100 bp, Homo sapiens
cagcactggactcatggaggctgagcatttattcaggtaaagagaaatgtgtatgaccttacaagtatccccgttcgccaccaattatgggagggctggc

SEQ ID NO: 825169 - DNA, 100 bp, Homo sapiens
ctcatcgaacagctggagcaaggcgacgaaccttggagagaggagaacgaacatcttctggacctttgtccaggtgcagcagtaccgcgtcgccatgact

SEQ ID NO: 825170 - DNA, 100 bp, Homo sapiens
aaagcaagtgaatacgagtcagaagctccctgggctctgtcagctagcagagcatttggtggaagaaagacagcccagctcttgccatgattgggagccg

SEQ ID NO: 825171 - DNA, 100 bp, Homo sapiens
cccgcactgagtcaacagactgagcgcgtccaggcctgacagctctgcggctcgggccctgagggtaaaccagacttgaatacaacattgccaattagac

SEQ ID NO: 825172 - DNA, 98 bp, Homo sapiens
agctggtgctgagacagatgttgtcaactctgtgggaagaacagcagctcagatggcagcctttgtggtggcttttcatggcctgccactgaaaatca

SEQ ID NO: 825173 - DNA, 100 bp, Homo sapiens
cagaaagcagttaacagtgccaccggtgttccaactgtttaaaggtttcccaaactctcgattgcctcttgcaagcagatgacctgggagcaaatgttat

SEQ ID NO: 825174 - DNA, 100 bp, Homo sapiens
gccttctctaaagaagtattcctctccaaagagctgcaggccttcaacagccttattagaaaccgaaacttcattgccccttcaatgtgggaatccagcc

SEQ ID NO: 825175 - DNA, 98 bp, Homo sapiens
cggatgctgcggcgcccgctggccgggctggctgcggccgccctgggccgggccccaccggacgaacatccaccagtggtgtggttccaacagcaatc

SEQ ID NO: 825176 - DNA, 98 bp, Homo sapiens
ggagtttgacgaagaggtggtttttgagaagttaatattatgtgggccggacaccaaacacatcatagttctgaagactataacttatccacagcact

SEQ ID NO: 825177 - DNA, 98 bp, Homo sapiens
gaaccgtggctcacgagctgcagggagtgcaccaggcctgtttaaagaagaaaacccgtatgctagatttgaaaacaactaaagcgctccagcacatc

SEQ ID NO: 825178 - DNA, 98 bp, Homo sapiens
aggctcgtgctgtcttggaaagagaatttaacaaccttttggtcatggggactgatagaaggtttgatgaaccacctgtctttaccagtttccaagac

SEQ ID NO: 825179 - DNA, 99 bp, Homo sapiens
aagaacctggcttttagctgaactaaggagaaagtcctacaacagtttggcgtgcaacatggggcttgagaaagggtgcactacatcctccaggaggtg

SEQ ID NO: 825180 - DNA, 100 bp, Homo sapiens
tgtttatagtagactgaatccacatagagaaagtgatggggtcattcactggaactcccccaagaagctccgggtgaagaacaagcatgtggagtttttt

SEQ ID NO: 825181 - DNA, 98 bp, Homo sapiens
cgcatcgaggacttcatccagtttgctacggtctacggggcagagcagagttttgcggcctccaggtggtggatccaatttttcattaggttttgatg

SEQ ID NO: 825182 - DNA, 100 bp, Homo sapiens
cacagaaaccaaacagcagtattggacagagggagtgattgattcggaaagaatggattttgagctgttgccagatgatgaacgtcagtgtgtaaaatgc

SEQ ID NO: 825183 - DNA, 118 bp, Homo sapiens
aagagcagttgaaattcttaaggatgctttcaaatcaaatgactcacagcaggaaattgcccggcatttacgccctggaactctcagagcaatctttggtaaaactaagatccagaat

SEQ ID NO: 825184 - DNA, 98 bp, Homo sapiens
tggatggatatgggagctgtggccctcagaatttaaacttaaggaaagagtgggaaagtgagggtgctatggtctttagaattgggtcactggatttc

SEQ ID NO: 825185 - DNA, 99 bp, Homo sapiens
ctgtcaagggacaccactgaaactgatctcaaacagcgacgagagatccgtgcaggcacagccttttacattgatcagccaacagaatcctggatttga

SEQ ID NO: 825186 - DNA, 100 bp, Homo sapiens
tgaacgcaaatactggaagaacctcacctttgtctccccgatctacggggctgacatcagcggctctttgtatgatgactcaccttcaggccattcagag

SEQ ID NO: 825187 - DNA, 100 bp, Homo sapiens
ctgaggaggagaggacagaggtgcctggggcaacctccaccttgacggttccaggaaaagcaggtgatattctcagtggagaccaggacaaggaacagaa

SEQ ID NO: 825188 - DNA, 100 bp, Homo sapiens
taatgctctgcatcatgctgcactaaggggaaatcccagattgtctttggctatagagtttttttttttaaagattactaaacatacaggaagtgataag

SEQ ID NO: 825189 - DNA, 98 bp, Homo sapiens
ccaatgtgtggtccaatgtagtgatgaagaatggtctacaggtccaactgctgccactggcagtaatcgaagacttcagcagacacaaaatcaagtag

SEQ ID NO: 825190 - DNA, 100 bp, Homo sapiens
gacctgaatgggcttgaccatctcacaactgctcgcgtgacgaccgcattcgtggcaggtgttgggctggatcttgatagcagttgttatcatcattctt

SEQ ID NO: 825191 - DNA, 100 bp, Homo sapiens
ctttggtggaccaaaaatcgtgacaccagaagaatattataatgtcacagttcaatactgaagtactctttcccagtgggactaagaaccagcagaacag

SEQ ID NO: 825192 - DNA, 100 bp, Homo sapiens
cgccggccatcgactttcccgccgagggcccggaccccgaatatgacgacagtcgaccggcccaaggactggtacaagacgatgtttaagcaaattcaca

SEQ ID NO: 825193 - DNA, 100 bp, Homo sapiens
tatgaagctaatcctggcgttccaccagcaaccatgagtggttccatgatgggaagtgacatgtattctaccttgtaaatactgttatttgtatatactg

SEQ ID NO: 825194 - DNA, 98 bp, Homo sapiens
taagccaagggattcaggtgtggtgccggtgggaactgaggaagcgcccaagtaaggaagagcccaacactgctggaagtgagcatgccccatttcat

SEQ ID NO: 825195 - DNA, 100 bp, Homo sapiens
ctgactcctacttcctctgtatagagcaactgttgaactcagctgcctgtagaacgaggtcactcggacactatggtgttcttttacctgtggattgtct

SEQ ID NO: 825196 - DNA, 99 bp, Homo sapiens
aagaaactgtgttccccccttgggttgctatcgatgtgttcagagcaacattgttttgttgacacaagcatttagaagaaagtttgtgattcctgactt

SEQ ID NO: 825197 - DNA, 100 bp, Homo sapiens
agtgccctattccttcacatgtaattcagaaattagggacagatatttcagcagttgaatcagttgaattcacttcatcaagaaactatcatgaaatgcg

SEQ ID NO: 825198 - DNA, 98 bp, Homo sapiens
cacttctatgagcttgtggaagacacaaaagatggcatctggctggttcaggtgaaaaggagaacagcttgaagacagatgattatggccgagacctg

SEQ ID NO: 825199 - DNA, 99 bp, Homo sapiens
tgctaatggtggaaacccacaacgcaatggctgccatccggaagaaactggtgattgttggtgatggagcctgtggaaagacatgcttgctcatagtct

SEQ ID NO: 825200 - DNA, 100 bp, Homo sapiens
tccaggcccagtacatggatgcttgttggatgaattaatgaaccttgacccacaccaaggaagtttatctcgacaatgctagttgcagtctgtgtgaccc

SEQ ID NO: 825201 - DNA, 98 bp, Homo sapiens
tcgtcatcgtcatcttcctgtcagtctgcagctactcaggttactcaaatgagtcgtccagacttgattctctttctgatgaaatacctgatggctct

SEQ ID NO: 825202 - DNA, 100 bp, Homo sapiens
tatcaacttgagaagacaaaccctgcctggaacaagtacagttgactctgaacaagtcaggtttgaactgcatgggtccactcatatgaagatttctttc

SEQ ID NO: 825203 - DNA, 100 bp, Homo sapiens
gtgggggaacggggccgcctggactcagagctgagaaacatgcaggacctggtggaagacttcaagaacaatgagttattctccccacctcagaagtacc

SEQ ID NO: 825204 - DNA, 98 bp, Homo sapiens
agtgtggcatgggcatgtaaggtgcgcggagggactgcaccttctccatcaggtgcagaagtgcgatgtatgatgtatggctttggggatgaccagaa

SEQ ID NO: 825205 - DNA, 132 bp, Homo sapiens
aaacaaccgatgtccaacttcaagcctttgattttgaagatgaccactttggaaatggacgctgtgcagagctgcaagtccgtatcactgaggctgtggccacagccactgagcagagagagctgatcgccc

SEQ ID NO: 825206 - DNA, 98 bp, Homo sapiens
ggactgtcaaactgtggaccaccaagtacacattttggaactttatacccaagaatttatttgaacaattcagaagagtagccaacttttatttcctt

SEQ ID NO: 825207 - DNA, 129 bp, Homo sapiens
ggaacatgtctgagtcggagctcggcaggaagtgggaccggtgtctggcggatgcggtcgtgaagatagatgtgtcttgctgaatcagggctctcttatccctgccatcgacttacagtgggaagaaga

SEQ ID NO: 825208 - DNA, 106 bp, Homo sapiens
agaagctgaaacgaaagggagccgccagcgcgtttggctgtgacctgacggagtatctggaaagctcgggacaggatgggtgtatcaaggtcagaagaagtcaaaa

SEQ ID NO: 825209 - DNA, 100 bp, Homo sapiens
tcctcaactttatgattgctgcatatgacagtatcgtcgtcctccccgcagtcaggctgcccatcacccaccattccagcaggtaaagtcatttctccat

SEQ ID NO: 825210 - DNA, 100 bp, Homo sapiens
agaggagattcttccagggtttatactttgtgatcctaataatctttgtcattctggacgcacatttgatgcccaggaaatttcaagagcaggaatgtcc

SEQ ID NO: 825211 - DNA, 98 bp, Homo sapiens
aatacctcacccttcaaagtaccaacaagttggatggcttgaggactggtactaaaaggaaacgtgactgggaggccattgccagcagaatggaggat

SEQ ID NO: 825212 - DNA, 51 bp, Homo sapiens
cgcggggaccgctgtgctctcgttgggccggtgcacaaacagcgtggtcaa

SEQ ID NO: 825213 - DNA, 99 bp, Homo sapiens
gttcctcaaactccgtgaccagatctgactgcagccatgagcagcaatgagtgcttcaagtgtggacgatctggccactgggcccgggaatgtcctact

SEQ ID NO: 825214 - DNA, 100 bp, Homo sapiens
ggaggatccggacccccgcaaggtcaacctgggagtgggagctactgccttcctcatcaacaaagtgccccttcctgttgacaagttggcacctttacct

SEQ ID NO: 825215 - DNA, 100 bp, Homo sapiens
aagatgagcgggtggcagcgacagagccaaaatcagagctggaacctgaggagagagccactgaggcggctcccagctgcgttggcgacatggccgacac

SEQ ID NO: 825216 - DNA, 99 bp, Homo sapiens
ggaaaaatcccttattgatgctgccaaatttcctcttccaatggaagtgtttaagtgccaggtcatgctggccgactggtgtttgggttcctgaatggc

SEQ ID NO: 825217 - DNA, 98 bp, Homo sapiens
gggcatcgagatgacggcatggagggctgtaggttccatgaggacaggccttgagtctgtcctggtctctggaatcacggtgtctagtagaggccagc

SEQ ID NO: 825218 - DNA, 100 bp, Homo sapiens
tgccttgtacagttcccatcacgttaccccatttgtggtgttccaaccattcgatctgacattcctgctccccgaattcgtcgcatcagtgacagaacta

SEQ ID NO: 825219 - DNA, 99 bp, Homo sapiens
gccaagcgcccgtcggacggggaggaggagcaggagctggaggaggagccgccgccgccagtgttgaatatgaaacattcgatatattggaggatgaag

SEQ ID NO: 825220 - DNA, 100 bp, Homo sapiens
ccctttgatcaacccaatctcccataggcactcagtcaaggaactggaagaggaggcaacagtatttggggcaagaagtttgaggatgaatacagtgaat

SEQ ID NO: 825221 - DNA, 124 bp, Homo sapiens
tccgctgtgcccgggcctgcaccatgagcgtcccggccttcatcgacatcagtgaagaagatcaggagatatagcttctcagccttctgatgaagaggagctgttaactagtactggttttgag

SEQ ID NO: 825222 - DNA, 100 bp, Homo sapiens
cccctttcccggcgggacgctttgagccgccccgaactaagcagggcggtcgggggtgggcttatctaaatcagatcccaaatagtatttaaaaagcctc

SEQ ID NO: 825223 - DNA, 100 bp, Homo sapiens
cggtggcgatgctcttcttggaaaaccagatccagaaactggaggagtcccgctcgaagctagaccatgccagatgatgtccaaggcactgttgcaacca

SEQ ID NO: 825224 - DNA, 50 bp, Homo sapiens
cctgggcatcacgcgcatcctagcactgctcagcacgcaggcatgtgagg

SEQ ID NO: 825225 - DNA, 98 bp, Homo sapiens
ccgctccgccgcccgcaggctccggcttccgtcccggacagagcccgtggtcgcgcaggcaagaaaattggatgtatattttgaatatgaagaaaaaa

SEQ ID NO: 825226 - DNA, 99 bp, Homo sapiens
cccctgtccggcagccgaggagaccccgcgcagtgctgccaacgccccggtggagaagctgagggcaatttgcatatttctccaaagaaccatccagaa

SEQ ID NO: 825227 - DNA, 100 bp, Homo sapiens
tttatttggcagatctgaagggaaagctccagatactagagctctttgttcaatgcctagccacctattcctacagacacggcagtggaaaggaaaagaa

SEQ ID NO: 825228 - DNA, 98 bp, Homo sapiens
tcccctcaggaacgtgtcccggggccgacccggcccgtagtgtggaagcagcttcagggatatcagtatgaacaacattactcagttgccagaagatg

SEQ ID NO: 825229 - DNA, 100 bp, Homo sapiens
agaacgtgagggtgtaacttacaaaaaggtgaaagttacacaagaactgaaaaacattcaagttgagcagatgacaaaacttcaagccaaacatcaagca

SEQ ID NO: 825230 - DNA, 107 bp, Homo sapiens
ggggactatcctctggaggctgtgcgcatgcagcacctgctgctggagccagttctgcttctcggcaaggagcgatttgctggtgtagacatccgtgtccgtgtaaa

SEQ ID NO: 825231 - DNA, 100 bp, Homo sapiens
tggaatcaagacagttatagtcaacatggttgacgttgcaaaggcgcttaatcggcctccaacgtttgtcacaacttggacaaaagtaacacagaagaac

SEQ ID NO: 825232 - DNA, 100 bp, Homo sapiens
gacctcaaggacatgttggatgtgaaggagcggaaggttaatgttcttcagaagaagattgttgccagcaaaggaggttttgaaatggtcaccaaagaga

SEQ ID NO: 825233 - DNA, 98 bp, Homo sapiens
gaggagctgggggtcgtcaccatgcaggagcaggacatcgagactttacatggctctgttcacgtcacgctgtgtgggactcccaagggaaaccggcc

SEQ ID NO: 825234 - DNA, 100 bp, Homo sapiens
agcacttaaaagtggaaagatgacggatgaaaagaatgaacactgtccttcaaaacgagaaacccagcgtttgctggcagaaccagttcctggcatcaaa

SEQ ID NO: 825235 - DNA, 113 bp, Homo sapiens
taagcaggttcatgccagcccagaacagagaatcagtttcaccagtgatcattaaagaatgggcagcttacaaaggaaagtctcctcaaaccccggaactggttgaagctctt

SEQ ID NO: 825236 - DNA, 100 bp, Homo sapiens
attgaatttatttgattcttctgtatttgatacagaaatctcatcagatcaggtgatgacgaacagagtgattggttctatgaaggagaatgtgtcccag

SEQ ID NO: 825237 - DNA, 98 bp, Homo sapiens
gctctgctcttccaacaccagtggaagatgatcacatcccaggtatatgccctcattttgcttaagacctctggccagagcagggcatggaagattcc

SEQ ID NO: 825238 - DNA, 121 bp, Homo sapiens
gaagaaagtgaggaagggaaagcagcaatttcacaactcaggagttttccgtctgatgaaggttggccatttgcaaagtatcttggagcttgtggaagaatggtggctgtaaattatgttg

SEQ ID NO: 825239 - DNA, 100 bp, Homo sapiens
taaaagttatagaaattttaatctcaactgaatggaatgaacgacagcctgcaccagtagtcgtgaaaggtgccaaattggcagaggctcacgtttcttc

SEQ ID NO: 825240 - DNA, 98 bp, Homo sapiens
gactttgaggatctggaggacggagaggacctgttcaccagcactgtctccaccctagagataagaatgtgccttttgatgaaagaactttatctttc

SEQ ID NO: 825241 - DNA, 141 bp, Homo sapiens
tgtacgtgggtgctcgagaggccctctttgcactcagtagcaacctcagcttcctgccaggcggggagtaccaggaggctatttactgaggacccactggatgtcaagcattgtgcatagttttcttcgattgttgcaaca

SEQ ID NO: 825242 - DNA, 100 bp, Homo sapiens
gcctggcgtgcactccgcacctcggggacattattgcgcgtggaacggctgcttttggaaggccttcctgggctatgtgctgtatggagagtgccaggag

SEQ ID NO: 825243 - DNA, 101 bp, Homo sapiens
gtgatcttggcctgcaggaacatggcaagggcgagtgaagcagtgtcacgcattttagaagaatggcaatacctgaacaccttctatggctgccccaagga

SEQ ID NO: 825244 - DNA, 100 bp, Homo sapiens
aaaatacagccaagatcttggcaaagcttctccctcagtatttagaccagatgtaaccttctgtaatggaagatgattgaagacaaggggcctcgtgttg

SEQ ID NO: 825245 - DNA, 100 bp, Homo sapiens
ccctatcctatccgcaaacaggcctactgcagtgcatgaaggtggtatggactcagaactctgaagtctgaggagacaaatacatgcccaccataacaac

SEQ ID NO: 825246 - DNA, 104 bp, Homo sapiens
ggtgccagcacctttcggcttctgagacggcggcagcagcggcattcagcatccaggatattgcagtcctcttcaacatcatcatcattttcctcatgttcttc

SEQ ID NO: 825247 - DNA, 100 bp, Homo sapiens
gagcttcagccaacagcttcacagcctacagaggttggaaagaaccatgactgtattcaggaaggcacatgaactgaagcttctgtcagaatgccaatac

SEQ ID NO: 825248 - DNA, 147 bp, Homo sapiens
gattgtggaaaagggatattacagtgagcgagatgctgcagatgccgttaaacaaatcctggaggcagttgctgtcacgagaagagaatgccttctagatgcaaaatcacctccaaaccagaccacttttcttgacttgcctgtttt

SEQ ID NO: 825249 - DNA, 98 bp, Homo sapiens
cagaagttgcttacgccttgtacaaacttgcagcccaagagaacaggctgaaggtgatgtggccgccctcaaccgacgcatccagctcgttgaggagg

SEQ ID NO: 825250 - DNA, 100 bp, Homo sapiens
atggaggtgatggacgtgttctccactgatgacctcaccggatttttacaggacgacatagacagcctaaacccagttctcagggacaacccgcagcttc

SEQ ID NO: 825251 - DNA, 100 bp, Homo sapiens
ataacaccaccttcaaaaatttctatttggagcaagaggtggtggtggccttcccccgaagaaatttggtaatcctggggagcgtttgcgtaaaaaaaag

SEQ ID NO: 825252 - DNA, 106 bp, Homo sapiens
ggtggccacggccgccgcgctgctggtcggctccagcaccctcttcttcgtgttcacagattttgattcgctttccaaggacaatgtcttcgagaataaccgtttg

SEQ ID NO: 825253 - DNA, 102 bp, Homo sapiens
cgagggcatcctgggcaccatcaactccatcgtgatggcctttttaggagttcagatcacttatgtgaaaggagacctttttgcatgcccgaaaacagactc

SEQ ID NO: 825254 - DNA, 100 bp, Homo sapiens
ggttcgaggcctacagaacctagcctatcagctggggctggatgagtatgctgatgcagagattgaaggagccccagctgctcccttggatgtgaagtgc

SEQ ID NO: 825255 - DNA, 100 bp, Homo sapiens
aaatccattgctgctaagtactccggttcccagcttctgcaaaaggtgcactgctactatgtcactgtgaagggttttacagaagctctggagaaactag

SEQ ID NO: 825256 - DNA, 99 bp, Homo sapiens
tttccgcttcttgaatttctctctgtaaaggaggcatgggtagcaagaaactaaaacgagtgggtttatcacaagagctgtgtgaccgtctgagtagac

SEQ ID NO: 825257 - DNA, 98 bp, Homo sapiens
ggaaccgccgcctctagggatggacggtgggaatggaagtggccccacatctcaaagaaaccctaaataagaacttttttgacttcctccttacgttc

SEQ ID NO: 825258 - DNA, 98 bp, Homo sapiens
acagagttagagagagggatggtgatggggaaattgaggcagagaagccaagacatgtgctaaaggtcatgcaggctatgaatggagctggaatgtga

SEQ ID NO: 825259 - DNA, 98 bp, Homo sapiens
aagcagcagtgaggacaccaaagtcccggcccaggcccctgagctggagggatggaaaactcctctgcagcatcagcctcctcggaggcagggagcag

SEQ ID NO: 825260 - DNA, 98 bp, Homo sapiens
taaactcagcacgagccattttgcagggatccacaaatgctaaagagctgtcttccaagggagtgaaaatctgggatgccaatggatcccgagacttt

SEQ ID NO: 825261 - DNA, 100 bp, Homo sapiens
ggaagtggaaccggatatttaagtacaatggtgggcttaattttaggtctggatgtaccgactgcttttggaataaaaagattcccaggatgtgagcaac

SEQ ID NO: 825262 - DNA, 100 bp, Homo sapiens
gattttgattgatttccatgctctgaaagacatccttgggcccccgatgtatgaaatggaggtctcctttacagaaaggggcttggataaggaggaaaga

SEQ ID NO: 825263 - DNA, 100 bp, Homo sapiens
acttaatggtgatagaaatccccgtccaaggctgggaccatggcacaactcatctcatcaatgccgcaaaggtcaaggatgcagtgtgcacttcccattt

SEQ ID NO: 825264 - DNA, 98 bp, Homo sapiens
atggctgcggtccagaacccggccctcaccgccctcaccacccctatccagacggctgcccttcaagtaccagtctgtgcagacttttgcagacaaat

SEQ ID NO: 825265 - DNA, 100 bp, Homo sapiens
gacctggatctcgcgccacaaggagatggattttgtgaaaatggaaaattatgaggcattggtaggctttgatctctgtaatacaccgctctccagtgtt

SEQ ID NO: 825266 - DNA, 95 bp, Homo sapiens
aacttataatcgtcactggattgatgctaaagagcaggtaagccctttggaaacaacattggaaaagttccagcaagaaaaagaagaattaatca

SEQ ID NO: 825267 - DNA, 98 bp, Homo sapiens
ctggaaaacttccagaacctggcctcactagatcataacagaatccatgccactgatgttttacatgctgtttggtatcttactacacagcctattcc

SEQ ID NO: 825268 - DNA, 99 bp, Homo sapiens
gtcacctctatcatgtttctagtagcgcttagtgaatatgatcaagttctcgtggagtcagacaatgaggtagtgctcatagctctctttgtccagtgc

SEQ ID NO: 825269 - DNA, 100 bp, Homo sapiens
ttttcaaggcctggagagagacggagtggctgcttaatagataaatgagatgtcgaaggaagtcaccaaattgaaggaggccttgaacagcctctcccag

SEQ ID NO: 825270 - DNA, 98 bp, Homo sapiens
gcaaagaggaagaactgaaccggactaaggccaccatgaatgccatccgggaagagcgggaccggctccggaggaggtatcaaaggtgcagaatctgg

SEQ ID NO: 825271 - DNA, 98 bp, Homo sapiens
tttctctagctattgccttattttttctcatggatgttcttcttcgagtatttgtagaagggtgtggaatatcaaacaaatgattaagttgacacagg

SEQ ID NO: 825272 - DNA, 146 bp, Homo sapiens
gggagtttggctggccaggaacttgagtgacattgacctcatggcacctcagccaggggtgtagccaagtagtggatgaggatcgcagtacggaacctgaccgattgcaggtgtttcacaagagagccatcatgccttacggtgtt

SEQ ID NO: 825273 - DNA, 75 bp, Homo sapiens
gatcttgcccgtcatggtgaccctggtgccctactggatggtctacttccagcctttagaagaagccacactctc

SEQ ID NO: 825274 - DNA, 100 bp, Homo sapiens
tagacgactgggagaattggtacataatggttgcattaaagcattaaaggatagttcttcaggaacagaacgaacaggagtctacatctaccatctgcgc

SEQ ID NO: 825275 - DNA, 98 bp, Homo sapiens
agaccacgctcaagtcccggtctgtgtccgaggacagcgacgtcaggttcacctgcatcgtcacaggacatcctcaatttcgtcgatgaccagcttgg

SEQ ID NO: 825276 - DNA, 99 bp, Homo sapiens
caattgttgccattgaaaaccctgctgatgtcagtgttatatcctccaggaatactggccaggcccttgcttgtgattggtggttcctctgaaagaaac

SEQ ID NO: 825277 - DNA, 99 bp, Homo sapiens
ggatgaatttgcttttctggaagcaataatgacgatgaggacctgacaccagagcagaaggcagagcgtgagaaggagcggaggatggccaacaatgcc

SEQ ID NO: 825278 - DNA, 98 bp, Homo sapiens
cagcggctctcctgcgcacgccgagtcctactccagcggcggcggcggccagcagtgtaaggcaaacattggtgggcaccgatcttcctgttcattct

SEQ ID NO: 825279 - DNA, 99 bp, Homo sapiens
aaaggatcatgaactagtgacctggaaagcaaaaaatcccagaagtgggatgaaatgaacatcttggcgacgtatcatccagcagacaaagactatggt

SEQ ID NO: 825280 - DNA, 100 bp, Homo sapiens
gcaactatgtttggatgttggatctacactttctcaagcactgtgatcttcaaatgggctagtgacatttgaagatgtagctgtggatttcacccaggag

SEQ ID NO: 825281 - DNA, 100 bp, Homo sapiens
cgagcagaagttgatcaactcagggaaacactggaaaaaattcaagtcccaaactttgtggctatggctccttcctcagagaagcttcctgttatgtacc

SEQ ID NO: 825282 - DNA, 100 bp, Homo sapiens
catcgtggaagttgcaggccaggatatcagccactggtttgatccaaagaccagagacgacagtgaggaggaatttggttctgagcgagatgagtaccgg

SEQ ID NO: 825283 - DNA, 100 bp, Homo sapiens
acaacatgaccatggaagctgaggtgatctgcccgcctctgcctcccaaagtgctgggattacaggtgtgagccaccgtgcccggcgcattgctgtcttc

SEQ ID NO: 825284 - DNA, 100 bp, Homo sapiens
gaggttgtttcttatctattatataagcacacagcaagcaccttctgagggcctgttcacaatgagcttgcattccagcctcccatttccaatcatcctg

SEQ ID NO: 825285 - DNA, 100 bp, Homo sapiens
ctggcattcaagaagggacctcggcggagcaggagggccttcaagaaggagaccagattctgaagatcttcccagacccgtcagattttgaccgctgctg

SEQ ID NO: 825286 - DNA, 98 bp, Homo sapiens
aagatgcaagtatgacccaagccctttgcagaacttcagatggtggcaaagtggttggcaccatagaagtcagtgtcgtgaagatgggggagattgag

SEQ ID NO: 825287 - DNA, 100 bp, Homo sapiens
ccgagatggaccttgggcagctcagttcacaagaacgccaatctgaattgccaacgcaaagcaaagcgagcttccccagtattctcagtgacccagaccc

SEQ ID NO: 825288 - DNA, 99 bp, Homo sapiens
ggctgatgcagcaggcatcatccgctatgcaattgggggagcagatagcagggacttacagatgaaccaggccctgcgatttttggaaaatgagcacca

SEQ ID NO: 825289 - DNA, 100 bp, Homo sapiens
aagatggcggcggtcggggccgaggcgcgaggaggcattggaatggatacttgtgtcattcctttgaggcacggtgggctttccttggttcaaaccacag

SEQ ID NO: 825290 - DNA, 98 bp, Homo sapiens
cagaggccagctgtttttgaggatcctgctccacagagaatgctctgcacccgttgatggggtcctgatgacaacttaattgaaggtggaggaacaaa

SEQ ID NO: 825291 - DNA, 99 bp, Homo sapiens
tttttaggatagaaggaagagagattcctatagttcaccgagtcttgaagattcatgaaaatgagatggaagattttcgaggtatagcagaagaatcat

SEQ ID NO: 825292 - DNA, 100 bp, Homo sapiens
aacacaacaatcagatggcaccagggactggcagctccactgccgtcaactcctgttctcctcagagcctgtttgacaacttaaatgctgcgcatgaaac

SEQ ID NO: 825293 - DNA, 102 bp, Homo sapiens
cgtactttctatgagaagcgtatggccacagaagttgctgctgacgctctgggtgaagaatggaaggctgtggatgagatgaacggaaaggagctcaatgga

SEQ ID NO: 825294 - DNA, 100 bp, Homo sapiens
gctaccacactctgggacagtgggagatttggaacagctttgagaagagcaagggatcgactacaagaccaccaccatcctgctggacggccggcgcgtg

SEQ ID NO: 825295 - DNA, 100 bp, Homo sapiens
acgtcttctctgcattttgtccacatgagaggattacctttccaagccaatgcccaagacattataaacgttatcaatactctggctgaccatcatcatc

SEQ ID NO: 825296 - DNA, 74 bp, Homo sapiens
cgagtgcgcctcctgcccgcggaccgcggcagcccagagcaggtgttgactttaaggtgaaaacaatttcagtg

SEQ ID NO: 825297 - DNA, 98 bp, Homo sapiens
gtggttcactgtgcatcgcccactccagaagtagcatggaaatggagggcatcttcaaccacaaaggaatcagtttagacttgaaattcagtttttcc

SEQ ID NO: 825298 - DNA, 98 bp, Homo sapiens
gccgactcagtggaacaatcttttgttggattgaaacagctaatctgagcatgtttttgaacacattaacaccgaagttctacgtggccctaacaggc

SEQ ID NO: 825299 - DNA, 98 bp, Homo sapiens
tgggggaccctataaagccccagtctctcagtattgcctcaaatgctgctcatggaagatccaaatccggctgggaagacgccgatggatctggtgct

SEQ ID NO: 825300 - DNA, 51 bp, Homo sapiens
gccaccgcgcccggcccactaactgctggccttgctctattactgtgaagc

SEQ ID NO: 825301 - DNA, 99 bp, Homo sapiens
cttctttgacagagagcaagtctgctcatgtgcagactcagactggccaaaattcaatccctgctttagctcagcaatggctgccatccggaagaaact

SEQ ID NO: 825302 - DNA, 98 bp, Homo sapiens
accttaaaggatacaatatagaggcagaaggccttttttcaaaggagatatctgaagagattataggatcacccatcccagaacctaggcaacgctca

SEQ ID NO: 825303 - DNA, 100 bp, Homo sapiens
catgacaatcagatagttcaccgggacataaagttgcccagcaggaggctgaaatgttcaaacgctacaatggaacatttccattacctggaatacacca

SEQ ID NO: 825304 - DNA, 100 bp, Homo sapiens
gggctctgaaagctagaagaaaaggtgtacttgcaagaaacctcaggacttgagtaacagcaacatgagcaggttgttgccctggatgcccaaaatattg

SEQ ID NO: 825305 - DNA, 98 bp, Homo sapiens
cactggatgatgcaatcaaagctcgacttctcaatcccaagtggccaaagttgattatggaagattcccacaagagtaccacgtcagagacagcacct

SEQ ID NO: 825306 - DNA, 100 bp, Homo sapiens
ccacctgaacagaatggcaccctcacctcccagcccaacaacaggtattgaagcccctgggtgataatttgatggaggaaaacataaggcagtctgtaac

SEQ ID NO: 825307 - DNA, 100 bp, Homo sapiens
ggagctttttcaaaatacacatgtctggtttccagacccagagattctgattggagtatgccaagatggaaggaagcctcatacagtgagattaataatc

SEQ ID NO: 825308 - DNA, 98 bp, Homo sapiens
cgagatccagttcctgcgaactgagggccgcaagaacgagatgctgctgtccaaggtgaaagcgaaggcctcctgaacatccccagccgtggctgtat

SEQ ID NO: 825309 - DNA, 98 bp, Homo sapiens
cgaggggcgcgcggagatggcagcgtccagcaactccagcctgtccggctcgtcggtgtcctccgacttaattcagtgcacaaatgagatgaatgtga

SEQ ID NO: 825310 - DNA, 100 bp, Homo sapiens
atgtcatccaggcctcttgaaagtccacctccttacaggcctgatgaattccggaccatatagtggtttaggtgaaataatccatcgggagagcgttcca

SEQ ID NO: 825311 - DNA, 100 bp, Homo sapiens
ttctctgatggttgccatacaccaaaaagtgtaatgtgtacaattctggccaacggcggaagctattgctgttcaagaccttctctcggaaagtggtggt

SEQ ID NO: 825312 - DNA, 100 bp, Homo sapiens
tggactctagggaccctgctgaatagctggggctacaggcgtgtgtcactgcgcccaggaagatcagccaataattattaaaaggaaaagaggaagacct

SEQ ID NO: 825313 - DNA, 99 bp, Homo sapiens
ttgactactcgcatcgcgcactttttggatcggcatctagtctttccgcttcttgaatttctctctgtaaaggagtgggcctttggagtgacgctgtgg

SEQ ID NO: 825314 - DNA, 100 bp, Homo sapiens
cggagactttggggcctaactagcctctaaagagagcaatcactacacttatggctgggattttgcgcttagtagttcaatggcccccaggcagactaca

SEQ ID NO: 825315 - DNA, 100 bp, Homo sapiens
tctcgtttgaggagactaacaattcctgttttcgccaggtgtttgtaaaatgtatgaagaacatctgaaaagaatgaatcccaacagtccctctatcaca

SEQ ID NO: 825316 - DNA, 98 bp, Homo sapiens
ccttgaccatggacttcccagcctccagaactgacttgaactgccatgtcctctgaagaaggaaagctcttcgtgggagggctcaactttaacaccga

SEQ ID NO: 825317 - DNA, 98 bp, Homo sapiens
gctcatggacggaagacccctggctctataagctgaattatggcagcccagtcaaggttgaaatcacaaagattagacacctttttagataggtgttc

SEQ ID NO: 825318 - DNA, 100 bp, Homo sapiens
gaatttcagaagtactgtgaagatattgtaaacacagctgcatggggaggtcagcttgagttgacaacactaaatctgggaaacaaccttttagaagaag

SEQ ID NO: 825319 - DNA, 100 bp, Homo sapiens
ccaccaccaccaccacagagtctgtggaagaggtggttcgagatgcacacttgactgaaggaggacagggaatctgaagactccggatgacatcagagct

SEQ ID NO: 825320 - DNA, 101 bp, Homo sapiens
atgatgattcagactctgatggtgatggcaaaggagtggtgaaaggacataggaaggagtctggggaactgtactacagcattgaaaaagaaggccaaaga

SEQ ID NO: 825321 - DNA, 99 bp, Homo sapiens
caaaggcagggcaaggaaactggccacaaatgggaatttcttagccataggctcacatgacaactgcatctatatatatggcgttagtgacaacgggag

SEQ ID NO: 825322 - DNA, 100 bp, Homo sapiens
cttggactttgtggaacagaaatgtgaaggaatttagataatgggctgtgtgcaatgtaaggataaagaagcaacaaaactgacggaggagagggacggc

SEQ ID NO: 825323 - DNA, 99 bp, Homo sapiens
ccgggagcgagcccaggcggcaggatttggtgctatggagaaatttttggtagaatataagagtgcagtggagaagaaactggcagagtacaaatgtaa

SEQ ID NO: 825324 - DNA, 100 bp, Homo sapiens
tgagctccgtattctctgaagcctggaaacgaggcactcagttggaagagtccagcaagaaaagcacttggttctgcttcgagatggaaggacacttata

SEQ ID NO: 825325 - DNA, 99 bp, Homo sapiens
cttctgcctcccatggagggcagactgacgcttacctgactctgaccagagtgttgcggagataggaacatgggagagaaacaatctgggtaacatgaa

SEQ ID NO: 825326 - DNA, 98 bp, Homo sapiens
tcagagagaaggacaacaaggtcccagtggcccctcctcagtggaatgcagtagccctctgggcctgggatattgtggttgataactgtgccatctgc

SEQ ID NO: 825327 - DNA, 100 bp, Homo sapiens
tcgggagctacactgtcatccacgtggttcaccctgacctgtttgaacagcatcacacacctacctttaaccacagatatgccctgcgtccaagcccaat

SEQ ID NO: 825328 - DNA, 100 bp, Homo sapiens
tgcaaaagatacaccttgcgaaaagtgatggacgggctctacgagtgcattctctgtgcctgctgtagcaccagctgccccagctactggtggaacggag

SEQ ID NO: 825329 - DNA, 51 bp, Homo sapiens
aagttctcgtggagtcagacaatgaggtatcatcagtttctcatgaaaatc

SEQ ID NO: 825330 - DNA, 98 bp, Homo sapiens
gacgctccgtggatgaggctctgcggctggtccaggccttccagtacacagacgagcatggggaaggcggcgactgtgccaccctgctgaagaatatt

SEQ ID NO: 825331 - DNA, 99 bp, Homo sapiens
tttggaacaacggaagctacagaagccttctttgcaatgacgcgattgtttcaatctaatgatatgctattaactgagtacttggatatgaaaaatact

SEQ ID NO: 825332 - DNA, 100 bp, Homo sapiens
gagaaggaaacaacattcaactccctactttgtccatcagattgtcttcgcagttttaccgacttagaagaacttgatgagacagagttatatatgtgcc

SEQ ID NO: 825333 - DNA, 100 bp, Homo sapiens
tctgcctcaatggaacccctgctctggcctacctggcgctgctggagccagttctgcttctcggcaaggagcgatttgctggtgtagacatccgtgtccg

SEQ ID NO: 825334 - DNA, 100 bp, Homo sapiens
gtgctgcagcacgtggccaccaacctggggcgcatggaatcccccaaagaaggtaaagggagcaagccttccccactgtctgtgaagaacaccaagagga

SEQ ID NO: 825335 - DNA, 100 bp, Homo sapiens
caatgagagagagagagagggttactttgatgagtgagcagataccaggccagacggttttgctgtctcagcctactgtggtacaacttcaagcacctgg

SEQ ID NO: 825336 - DNA, 99 bp, Homo sapiens
tagagcaagaaaaagagccctggaatatgaagatatgtgagatggtggatgaatccccagtgtaatgaacaagtctggggtgaatcgtgtagtttggaa

SEQ ID NO: 825337 - DNA, 100 bp, Homo sapiens
ttcagagaggagatgtgacaatagaccgcagacacagggcccatcaccctaagcataagcagtactataatggatgtagacagcacaatttccagtgggc

SEQ ID NO: 825338 - DNA, 100 bp, Homo sapiens
ttcgggcaaacaggattccacagtgtcctctggaaaatggatctccaaagatgggtaaatggtgctaatgaacatggctttgtcttggtgtcttttggag

SEQ ID NO: 825339 - DNA, 100 bp, Homo sapiens
cgctcatgcatatttgagacaacatctggatggttggggagaacggagctgtgactgatgagaattaaaggccatggatgaagatgggcttgaattacaa

SEQ ID NO: 825340 - DNA, 100 bp, Homo sapiens
cggccggcggcggctgcgggctgagcggcgagtttccgatttaaagctgagctgcgaggaaaatggcggcgggaggtaaaatgtcggttccaggacctta

SEQ ID NO: 825341 - DNA, 100 bp, Homo sapiens
cgagatgtctcgctccgtggccttagctgtgctcgcgctactctctctttctggcctggaggctatccagcggcgccatgttttggaagtttgacctgca

SEQ ID NO: 825342 - DNA, 99 bp, Homo sapiens
aacctctcgtacatcggcgagggcgcctacggcatggtgtgccccaccatggctgcaatccgaaagaagctggtgatcgttggggatggtgcctgtggg

SEQ ID NO: 825343 - DNA, 100 bp, Homo sapiens
cccgcagactccttctccagcatgggctcgcctgtcaacgcgcagagtgcctggtgaagaatgtgatgggatcactagcatgtctgcggagagcggccct

SEQ ID NO: 825344 - DNA, 100 bp, Homo sapiens
atttgatgctcaaacaaggaaacagatatgtattctggataaggttctcatcccaggccttgtggagggatctaccaaaaggaagcgggttctgagtcca

SEQ ID NO: 825345 - DNA, 98 bp, Homo sapiens
gccacagctgattttggtgaatatggccagcttcccagaggcactcttaaaagacccattttacatgggcttgtaccagaaacgagatcgcacacaac

SEQ ID NO: 825346 - DNA, 99 bp, Homo sapiens
gacgcaacggcggcgggagcatgaacgcccctccagccttcgagtcgttcttgctcttcgagggcgagaagaaaaccaagatcattatgcagttcttgg

SEQ ID NO: 825347 - DNA, 149 bp, Homo sapiens
ccggcggcggctgcgggctgagcggcgagtttccgatttaaagctgagctgcgaggaaaatggcggcgggagcggcccaggaggggctattggctctgcagagtgagctgctcaggatcacgctgcctgacttcaccggggacttgagg

SEQ ID NO: 825348 - DNA, 99 bp, Homo sapiens
tcgaagagattgtagagaagctaaaaggagaacttgaaagttcggaccaggattccagtggaatgacactggtgatgcttgccgccgccggagggcagg

SEQ ID NO: 825349 - DNA, 100 bp, Homo sapiens
agctacaaagtgatagcagtggccctgaagaagaaaaccaagaattatctcttcaggaagggtttgctggtgaggcccatgacccgctagttgaagcact

SEQ ID NO: 825350 - DNA, 98 bp, Homo sapiens
tcgtgcagctcttggcaggagtagctgatcaaaccaaggatggggaagcagctcgagagtgtcgtagaaagaagaaagaatatgtgaaatgtttagaa

SEQ ID NO: 825351 - DNA, 98 bp, Homo sapiens
ctgcgttttgatgatggagggctactacagaggacaagaattttgggcagatttgaatgccatgaacgtgtatgaaacaactgaatttgaccaactac

SEQ ID NO: 825352 - DNA, 100 bp, Homo sapiens
gccatttcccatccagtactgaagtgttaaagttagaagacatttgctaagtcaaatcacttcagatggtttatgggagaaatattagccagtgtcttca

SEQ ID NO: 825353 - DNA, 99 bp, Homo sapiens
tgctgtcagccctgtgtggtcaacgaatactactacaggaagaagtgcgagtccattgtggagccaaagccgtaggagagaagtttgctgaggaatgcc

SEQ ID NO: 825354 - DNA, 100 bp, Homo sapiens
aaaatattggatcatcagatcatgacggtcagaaatgtgaattccaggatgcctatgttctgttgagtgaaaagaaaatttctagtatccagtccattgt

SEQ ID NO: 825355 - DNA, 113 bp, Homo sapiens
gaaattacatgctgacatgttctgccacaggcggcgtcatctacaaggaatcaaagatcaactcccactgaggacaaatggacctgtaattccgggtgtgacgagagaacgag

SEQ ID NO: 825356 - DNA, 100 bp, Homo sapiens
acagaaacaaaatgtcaacaaattgatggggtgttcctgaaaagccccatagtgattgagtcttcaaaaccaccgattctgagagcaaggaagattttgg

SEQ ID NO: 825357 - DNA, 100 bp, Homo sapiens
ctgctgctggcgctcctgtcgttgggttcagattcagaacaagaaagtggacatctctaaggtctcctccaagtgtgggtctaaggctaacatcaagcac

SEQ ID NO: 825358 - DNA, 100 bp, Homo sapiens
tcctcattggattactgtgttttaaacagaatttcgtgaacagccttttatctccaagcggaaagaaagatggggacccagagcctgctcttgggaacag

SEQ ID NO: 825359 - DNA, 100 bp, Homo sapiens
ggcaggcgaccttggctggcacgcaaacatgcagatctttgtgaagaccctcactggcaaaaccatcacccttgaggtcgagcccagtgacaccattgag

SEQ ID NO: 825360 - DNA, 98 bp, Homo sapiens
aaagttgccaaagaagccaaagatcttgcacatgaagctacaaaactggttcctgatatggcaggctatcctcacatccgttacatttcatcaggatt

SEQ ID NO: 825361 - DNA, 98 bp, Homo sapiens
gacatcaaaagctggattcgaggcctttctgagaaaagtctacagcattctttctctgcaggttctcttaactacagtgacttcaacagtttttttat

SEQ ID NO: 825362 - DNA, 100 bp, Homo sapiens
acgcggggagagcactggggaccgagacccggcaccacctcccggtccgccctccagagcccacaggcggttttgtgagctgcttccccaggagcagcgg

SEQ ID NO: 825363 - DNA, 99 bp, Homo sapiens
cggggggcagccgctcgcccggacccctcagattttaccaaatgttgcaagaactctggagttcttatggtagtaaaatgccggaaagaaaattctgca

SEQ ID NO: 825364 - DNA, 100 bp, Homo sapiens
taactccagaatcccccattggaacacatataactgtggtttcccattcaagacctgtgggccactgcttagaagctgcagcagtgctatctaaagaagg

SEQ ID NO: 825365 - DNA, 100 bp, Homo sapiens
agcttgggtcaggacaattccatttggggaccagagatggacggtcactcagcctatggaggcctcaactccatatagcatagattcagattctttggga

SEQ ID NO: 825366 - DNA, 100 bp, Homo sapiens
ccaccagcccaggaagcctgcggaagcagaggcagagagagatcatcattgcctgaatttagctttgtgactgcaagagcaagaccagttcctgtctgga

SEQ ID NO: 825367 - DNA, 100 bp, Homo sapiens
cccgggaccgtttaaaaaactggttcctactatctgaccaccacctacggggccctggagcacatcaagagctacgacaagatcacggtgacccggcagc

SEQ ID NO: 825368 - DNA, 100 bp, Homo sapiens
agccatgaggccaaaggcagttgtattgatactgtggatggtagggaagaaaagtctgcttctgattcttctggaaaacagtctactcaggttatggcag

SEQ ID NO: 825369 - DNA, 98 bp, Homo sapiens
atcaattgcaaaggtacttctttagaaaatctcatcatggaaatcacagcacctgattcccaaggcaagacaggagcttgcaagtttttgaagaaaca

SEQ ID NO: 825370 - DNA, 98 bp, Homo sapiens
gccaaactcattttttgatggaatagataaaaatttccaatgggcaaatactggagcagctgtgtttggaacacagtcagtcggaacccagtcagccg

SEQ ID NO: 825371 - DNA, 100 bp, Homo sapiens
ccctgggtcccctacctgagtatcgtgggcattctggccatcatcgcctctttctgcagtgggccagaagcatgttgtggagacattttttggatttgat

SEQ ID NO: 825372 - DNA, 98 bp, Homo sapiens
caaactgtgtcgcaaagcttctttagtgaaatctctcgtggaagaggaagaccaacacatgaaattgtcccttggaggcagcgaaatgggcctctcat

SEQ ID NO: 825373 - DNA, 98 bp, Homo sapiens
cgtgcgctctcgggccactcggccgcaggaagcgagcagctgcaaagcatctaatagaacgctactaccaccagttaactgagggctgtggaaatgaa

SEQ ID NO: 825374 - DNA, 100 bp, Homo sapiens
agtcgctgcaacactcctctacagtttgagagaaatccaagaccagtgacttatcaattccatccaaatttagattattacaaagcacgaggagcagacc

SEQ ID NO: 825375 - DNA, 100 bp, Homo sapiens
ccgcaccaggctcatcctgtccatcgtgtgcctgatgatcacgcagctggctggcttcagtggaccaacttttggaacagcgatcgtaatcaatcctgag

SEQ ID NO: 825376 - DNA, 100 bp, Homo sapiens
agacaaaaaatgatttggtggtcagcttgcctgaggagacagatttgaccagttttgggccatcaatcggaaactcatggaatatcctgcagaagaaaat

SEQ ID NO: 825377 - DNA, 98 bp, Homo sapiens
caccatggaggaggacgacagctacgatggagaaactgaggccagaagaggtgagcttacctgcccaaggcatctagtgaccagaggggcagccaggg

SEQ ID NO: 825378 - DNA, 99 bp, Homo sapiens
gggaacagaaagaaaagtccgaaagagctgataggaaccaaggctttagccttctcaactcattgactggaacaaaccatagcattgggtcagcagatc

SEQ ID NO: 825379 - DNA, 100 bp, Homo sapiens
cctggattataaggatgtcatccccatggctgatgcagcaggcatcatccgctatgcaattgggctatcagttgagggatttgcagttgataaaatggct

SEQ ID NO: 825380 - DNA, 100 bp, Homo sapiens
cagcaaccactccagaaactttccctccttcaggtggttcagtacatcggggagatctgccgctacctgctgaagcagccggtgcgcgaggcggagaggc

SEQ ID NO: 825381 - DNA, 100 bp, Homo sapiens
tgagcctgacgcgggccgcgcggattctctaaccatggcacaggtagagaaacgtggaggtttgctccggaaatcttcagcctccaaaaaaccactgaag

SEQ ID NO: 825382 - DNA, 100 bp, Homo sapiens
gcgctgtggctgctgctgctgctgctgccccggacccgggcggacgagcacgaacacacggtgacccatgggctgagggcatacgatggcttgtctctgc

SEQ ID NO: 825383 - DNA, 100 bp, Homo sapiens
aggcccctgactcggatgctgagggctacgtggagggcctggatgatgaggaggaggatgaggatggtccatttgtgatgaacaccaatgaagagatttc

SEQ ID NO: 825384 - DNA, 100 bp, Homo sapiens
cttctgcaggtggatcagaactgtgttcgcaattcttacgatgtcttctctttgctacgggttgatccattttctaagaaagattggtatgatgtgaaag

SEQ ID NO: 825385 - DNA, 100 bp, Homo sapiens
acatgttgaatccttgcagcactaaaatttggggcataaggaaatggtggcaggcacttcctcctaacaagaaggaagtagttaaagaaaatataaggaa

SEQ ID NO: 825386 - DNA, 100 bp, Homo sapiens
tactttgttggaccctcgtcaatctctttcgaagccattcagtcctcaatctccttttccttggctacccgcaagcagtagttattgctttgttggtaaa

SEQ ID NO: 825387 - DNA, 101 bp, Homo sapiens
tccaccagcaaccatgagtggttccatgatgggaagtgacatggactatgacttgagccagctgcagcagcctgacactgtggagcctgatgccatcaagc

SEQ ID NO: 825388 - DNA, 98 bp, Homo sapiens
aaatgagactccatcggacccagtcataattgacaggagttcgcagcacttactaaagaactcaatgtatgcagggaacagctccttgaaagggaaga

SEQ ID NO: 825389 - DNA, 145 bp, Homo sapiens
cgatttccgcgatggcgagagggggcaccggaggtgacaacaataacaagactgtccttcggacaagttttagctataaggaagaccagatggatgagaaactaatggaacctctgaaatatgctgaacaacttcctgtagctca

SEQ ID NO: 825390 - DNA, 100 bp, Homo sapiens
ctcgctgcagatgtggcccggccagataagatttcaggagctgatattaactccatctgtcaggagaggccccacagtatcaaatatccgcctggctgga

SEQ ID NO: 825391 - DNA, 99 bp, Homo sapiens
cccggggctcaagtggcttaacaaggtggaagtttagctgatgctataagtgaaaactacagaatcatgagttactttaaagaagcagagttgaaggat

SEQ ID NO: 825392 - DNA, 98 bp, Homo sapiens
cggaacggcagcctctacaagaagagtgacgggacctgatcccaaccttgaagaaagtcctaaaagaaaaaatattacatatgaggaattaaggaata

SEQ ID NO: 825393 - DNA, 99 bp, Homo sapiens
tggtggtggtgtcttcctgtctcaacgatacctattttctagtgctgagatcctgagacaatgtttttccactactcccaagggcaagtgtaccttggg

SEQ ID NO: 825394 - DNA, 100 bp, Homo sapiens
agggcactggtaatttggctagaggaccgcgcggaggcagcggggtgcagacccacctcgaaaaccccaccaagtaccacatacagcaagcccaacggca

SEQ ID NO: 825395 - DNA, 100 bp, Homo sapiens
ttggaactagcagatgctggcgacctatccagaatgatcaaggcactactgcagtcttcagttaagcaacaagtagaagctattgaaaaacagtacattt

SEQ ID NO: 825396 - DNA, 114 bp, Homo sapiens
tttcaccgcaacttttgagctaagtgatgatggccgctttgaggtgtggaatgcgatgactcgaggctgacaagtctgcctacctcatggggctgaactcagccgacctgctca

SEQ ID NO: 825397 - DNA, 100 bp, Homo sapiens
gggcgggaagtggcgtggccaagattcgcattgaagatgacgggagctacttccaaattaaccaatgggtaattccagaattgattggccataccattgt

SEQ ID NO: 825398 - DNA, 98 bp, Homo sapiens
aacaagtctttaacactcttacagagtatattcagggttcagcaccacccccttctccaacacctaacaaagagatgaagaacaaagcagttctttgc

SEQ ID NO: 825399 - DNA, 100 bp, Homo sapiens
agccctttctcctcggcactgtattctttacctgcttcccaatcccactgatgaggatcagcccatgggtctaaaattcccaggactccacagctttgca

SEQ ID NO: 825400 - DNA, 100 bp, Homo sapiens
gagatccggaagcacagccccgaggtgtgcgaagccaccaagtaaaataccatgaagattttgaaaaaacaaaggggagaggctttactcccgtcgtgga

SEQ ID NO: 825401 - DNA, 99 bp, Homo sapiens
tgtgcagtggcacctgcgcgaagctggccaaagcctgcccagacggctcacctgtgcgggatggaacaaaaggttctcgcaaccttgggattaatcttg

SEQ ID NO: 825402 - DNA, 99 bp, Homo sapiens
gatgattcagaaacacaaagctgttcttttcaaaatgggcttatcaggagggcagacttcaaaagctactaaaaatgaacggccctgaagatcttccca

SEQ ID NO: 825403 - DNA, 99 bp, Homo sapiens
agagtattcagcacggactggaatcctgcatacatatctgagctctgtgttctggtggtcaagaagaatacgtcttatcttatgaaccagtgaatcaac

SEQ ID NO: 825404 - DNA, 100 bp, Homo sapiens
ctccgccaccgtcttcaggccaggtacttcacatgatttcaagtatggtttgatgcctggtccttcaaatgatttcaagtatggattgataccaggtact

SEQ ID NO: 825405 - DNA, 98 bp, Homo sapiens
gagctctaccgcgcctggtatcgggaggtgccgaacactggtcctactgctctgttggctcatgaaataggttttggaagtaaagttacaacacaccc

SEQ ID NO: 825406 - DNA, 99 bp, Homo sapiens
atcacccgacccggggcgccgagccggaggaaggaggagccactggaagtggggaaatggtctgtacaatatgtcaagaagagtattcagaagctccca

SEQ ID NO: 825407 - DNA, 99 bp, Homo sapiens
atccattcctcccattcatgtgcctccaggttatatctcacaggtacagcagggaagaactggaaactcagagaaagaaactgcccttccatctacaaa

SEQ ID NO: 825408 - DNA, 100 bp, Homo sapiens
acctggcccaaccgtgaccaaagtgatggagtctttggaatgctgggagagattctgccttttgatcctgcagctgttggagccagcagacctgactgga

SEQ ID NO: 825409 - DNA, 100 bp, Homo sapiens
tccctgccgacatcggcctcctgcagaacctccagaacctagccatcacggccaaccgggagcagtagagaactgtggactattctgcttggaaggtcag

SEQ ID NO: 825410 - DNA, 98 bp, Homo sapiens
tcggatgaagataagacactttctcagttacagagaggtgttggtaaatcatgcttattgctacagtttacagacaagaggtttcagccagtgcatga

SEQ ID NO: 825411 - DNA, 98 bp, Homo sapiens
ggcattttaggtgtcggttgggtagccgggcccctcagatgagagctgcacccaggccagcaccagtcgctcagccaccagcagcggcacccccatct

SEQ ID NO: 825412 - DNA, 99 bp, Homo sapiens
cgccgagtcggctgccgtggctgtgctgagggtggcggccggatagaacactctgctccagccaaggtggtgagggcagctgttcctaaacagcgcaaa

SEQ ID NO: 825413 - DNA, 100 bp, Homo sapiens
acgatggtcccccaggtcgcgatggtcaacccggacacaagggtgattccgggggacccctgtccagcgtggaggcggatgggcggatcttccaggccgg

SEQ ID NO: 825414 - DNA, 98 bp, Homo sapiens
ttgcgggcacttctcacccctgagaatctgggacctcaacaggctccatggtccccttctcgatgcgcatcttgcacgcggagcttcagcagtacctg

SEQ ID NO: 825415 - DNA, 100 bp, Homo sapiens
gctgctctgaaccaggacctggacccggacccaaagtgccatgtctttaatgctggcgcccatgcggctctacacgctctccaagcgccactttgtcctc

SEQ ID NO: 825416 - DNA, 100 bp, Homo sapiens
gccatctcttcagttaattttggatccgtctaacacagcttgtgatgaatggaaaatactaccaaaaccaaatcttcatagagatgtcaacagatttgga

SEQ ID NO: 825417 - DNA, 98 bp, Homo sapiens
cgaaatggattggagtgaaccggagaccccgaaaacggaagcgcagggagaaggaagaggtgtttgaaaaggaactttatattgctgttggaatatct

SEQ ID NO: 825418 - DNA, 100 bp, Homo sapiens
catggctctgctattggatcctgcacagcttggaactgctagatgaacccatcccccagatagtggctacagacaagtttatttctgatcgtgaaagtag

SEQ ID NO: 825419 - DNA, 99 bp, Homo sapiens
tcgccagcacgatcccaccgcacgttcagaagtcggatcagggagcagagaaacatgaaggcacaggtcagtcctctgggatcactgatcaagagaagg

SEQ ID NO: 825420 - DNA, 99 bp, Homo sapiens
aagctccggtgctggtgcggcgggggactgcggggccagcctcagggaaatcctcattgacgattcaatttgttgaaggccaatttgtggactcctacg

SEQ ID NO: 825421 - DNA, 115 bp, Homo sapiens
ttggcaacagcgagggcaaagagctggtggcctcaggtgaaaatgatggctgggctgacaggtatgatgtgacagatggatatcagcgagaagctgttggtggcatcacaatcaa

SEQ ID NO: 825422 - DNA, 100 bp, Homo sapiens
cctagagaagcgtttgcacaagtgggacctgatgcagaacatcatgaatgacatgccgatctacatgtactccgtgtgcaacgtgatgtctggcgaccag

SEQ ID NO: 825423 - DNA, 100 bp, Homo sapiens
ggaagagcgctcccaggagaaacaaagtcctgtgtatggaaactcacatgagtcagctcagtctagaagggtagtaatttctcataatatggataaagct

SEQ ID NO: 825424 - DNA, 99 bp, Homo sapiens
cgaccacaagatcaaccacctgggctgcctggtcttcagcaggcttgaacatgacaagcagatttgggagtccaaggcccagacagaggtccagcttca

SEQ ID NO: 825425 - DNA, 100 bp, Homo sapiens
agcatagagaatgagatagccgtcctgagaaagaatgtatcctgtcaggtataatgtcagtgaatggcaagaaagttcttcatatggatcgaaaccctta

SEQ ID NO: 825426 - DNA, 98 bp, Homo sapiens
catcaagaccatcaggcgcgatatcttgtgtctgtaaccctcgagacctttcaagatctgtccttgccaattcctggcaaggaagaccttgctaagct

SEQ ID NO: 825427 - DNA, 98 bp, Homo sapiens
agtagctgtaatagaatgccagcaaccagaagcagacttatacagacacgaatgcagagtttgagtccagatcccaaagcccagtacacaagtatcta

SEQ ID NO: 825428 - DNA, 100 bp, Homo sapiens
gctgggaggcaaaggctacaagctgtccccagaggactacacgctcaagacaatgcagatcttcgtgaagactctgactggtaagaccatcaccctcgag

SEQ ID NO: 825429 - DNA, 100 bp, Homo sapiens
gaaaatggattcagtttgcatctctccctcctttaaacagcttctccgggtctcagcatgatggaatcttgctctcttgctcagactggagtgcagtggc

SEQ ID NO: 825430 - DNA, 100 bp, Homo sapiens
cttgactgtatacagaatcttgaatcagaaattgagaagctggttaccttccgaacaagaatctatcactgtaatattaacagccaaggtgtgatctgtc

SEQ ID NO: 825431 - DNA, 101 bp, Homo sapiens
gctctttcaagacacagatttgaccccaccaacaactgaacgctttggtcaggctgctacaatggaaggaattggggcaattggtggaactcctcctgcat

SEQ ID NO: 825432 - DNA, 98 bp, Homo sapiens
cctccagaacctagccatcacggccaaccgggccttttccctcagaggagaccacagagaatgacgatgacgtctaccgcagcctggaggagctggcc

SEQ ID NO: 825433 - DNA, 100 bp, Homo sapiens
gtgttggaccttccggagcttctcagaagacagagggttttcttttgagcagagagagatcatcattgcctgaatttagctttgtgactgcaagagcaag

SEQ ID NO: 825434 - DNA, 98 bp, Homo sapiens
tgctgctcttctccaggctctgtggtaatcccgtttgttggcaccattcctgatcagctggatcctggaactttgattgtgatacgtgggcatgttcc

SEQ ID NO: 825435 - DNA, 100 bp, Homo sapiens
gaccatgtccagccctctccagtgtatccacagccccgacctttgatgagaactcagctgtccaggtgaaaggtgtagcagtcactcggcctacacccac

SEQ ID NO: 825436 - DNA, 100 bp, Homo sapiens
ctccctcttcctctgctcccgcggggtctgtgctgagaataatggcccggttggcccgggacgagtggaatggttatcaatactctggctgaccatcatc

SEQ ID NO: 825437 - DNA, 98 bp, Homo sapiens
catccttcagaaaaagcatccccgaggaggaagacgaatcgttaaacatctgaaagggtcaggtttctgtcaggatgaattggcagagcttgacccag

SEQ ID NO: 825438 - DNA, 98 bp, Homo sapiens
atgcgcccgtggctggaggagcagataaactccaacacgatcccggggctcaagtggcttaacaaggttctgcaaatttctgcaagaatggaaccaaa

SEQ ID NO: 825439 - DNA, 98 bp, Homo sapiens
ggtgcatctgtttgccggagggtccaggtcaagacctcgtctccgttctcatagtcgtagcagtgaaaggtccagtcacagaagaacgcgtagtcggt

SEQ ID NO: 825440 - DNA, 98 bp, Homo sapiens
aagacatctgtatagattctgcttcatccgtgagagagaataagcaacctgaaggtttggaattaaaacaaggtggtactgtgaaggcaaggagcttg

SEQ ID NO: 825441 - DNA, 98 bp, Homo sapiens
gaacctgggatggttgtgagggaagggacaagaagatactgccctggttttgggcggaaagacgtagttgaatatttgcttcagaatggtgcaaatgt

SEQ ID NO: 825442 - DNA, 100 bp, Homo sapiens
atagacatgccgcccttcttcccctccgaaagagtgttcagcctgggtgttcctgtagatgctctcttctttattggtaaccagttggtggccacgagtc

SEQ ID NO: 825443 - DNA, 100 bp, Homo sapiens
actggttggtgaagagtataagagtatcccttgcagtgttgctgcttatgtgccaagaggtagtgatgaagggtgtggtggagcacgtggaggcagcgac

SEQ ID NO: 825444 - DNA, 100 bp, Homo sapiens
gttcgcgtctctctgctgcggcgcggggaccgctgtgctctcgtgggcatccccaccatcagatggtgcggggcagagggggactacaacgtcatggtga

SEQ ID NO: 825445 - DNA, 100 bp, Homo sapiens
aggaaacatccaagaaaaatgtccttaaagcaattgagcaggctgatctactgcaggagaagacatctgttaaagacatggctgaccttcctgtccctaa

SEQ ID NO: 825446 - DNA, 100 bp, Homo sapiens
ctttctgacaatgcagcttctcttgcagtgcagatggacacttttgtaaatccacttcgcaattcaatgaggaatgtttcaaatgcagttaaatcccttc

SEQ ID NO: 825447 - DNA, 99 bp, Homo sapiens
gcccagtggccccgaggagcctggggagaagcgccccaagtttgtgacttaagagattaaaattaatttggttgctgttggttctgaacaaataatgag

SEQ ID NO: 825448 - DNA, 149 bp, Homo sapiens
cacccccgtgccccgaagacataaatccctgagtgcccgggaggagccttaacaagcgcacggagccctcaaggagcaatttttgatgaatctgccaaaaaggatgatgaggtatttcgcactgcggttggtgaccttaaccagaatga

SEQ ID NO: 825449 - DNA, 100 bp, Homo sapiens
tttgctgacgtgtcatttctaagtactttctcctactccataaagacttcaagtgccgtggccagcacagaagtgaagatgaagttacaagaatttgtcc

SEQ ID NO: 825450 - DNA, 98 bp, Homo sapiens
ttattacgccgtctccaagatgtagctaatgaccgtggttcccactgagagcaaacgaggcccctgagagctccacctagttcacaggataaaatccc

SEQ ID NO: 825451 - DNA, 100 bp, Homo sapiens
ttctccagcatgggctcgcctgtcaacgcgcagtggtgatttacaagtcaagttaaaatgtccccagaagtggccttgaaccgaatatctccaatgctct

SEQ ID NO: 825452 - DNA, 98 bp, Homo sapiens
gttcaataggttccacatcacagtatagatctgccaaacctattcattcatctgattctgttaaagggagttcatttatgggacttgcaagacagagt

SEQ ID NO: 825453 - DNA, 100 bp, Homo sapiens
gtcagttcgttgggggtgaaaaaggtgtctgtgcagctgactgtaaaacccaaagcaagaaggacctcaccagatgctgcccctcaatcttggatttcct

SEQ ID NO: 825454 - DNA, 100 bp, Homo sapiens
agagttctctaaaaaaactggctgtgaataatatagctggtattgaagaggctgctgacttgagtaaaccaatagataaaaggatatacaaaggaacaca

SEQ ID NO: 825455 - DNA, 100 bp, Homo sapiens
gtcctctgcgctggaatcagtcactgtcagcgacagacccctcggggtgtccatcacaaaagccgagatgatgataattccgaagaaggcttccacacta

SEQ ID NO: 825456 - DNA, 50 bp, Homo sapiens
gagtatttgcaactcagcctagaagagaaatgaccatggttgacacagag

SEQ ID NO: 825457 - DNA, 100 bp, Homo sapiens
cggatctttgccatgatggataagctgtaccgcctgtgctgggttcttcggaacagtacagaggagcgaatcgatatagatgcagaagagaaaagtcagg

SEQ ID NO: 825458 - DNA, 100 bp, Homo sapiens
agataccaggcactcctggggcaggaggtcgtcttagccctgaaaacaatcagatccgctttatcctcatccagaaccgggcaggcaagacgcgcctggc

SEQ ID NO: 825459 - DNA, 101 bp, Homo sapiens
ctgggcgctccgggaagggcgagactggagcagagccgctgggcgccggagccgaggcgagcgccgcgcgcaccactgacaccaaatcctactgcaagcga

SEQ ID NO: 825460 - DNA, 100 bp, Homo sapiens
tggggctgctgcggacgctggtgcggcgcggggtgagcgtcgaggaggcgcaggagactgaccgcaacggcaggggaaggaaactgaaaaggccaaggaa

SEQ ID NO: 825461 - DNA, 100 bp, Homo sapiens
tacgcagaacccgggagtaggagactcagaatcgaatctcttctccctccccttcttgaggcggggtttcaccatgttgcccagactggtcttgaactcc

SEQ ID NO: 825462 - DNA, 132 bp, Homo sapiens
ctgggattatctcctgaagaagattccactcgtggtatgagagtggataatataatcaactcctctgcctggcttgctatcagaggaagtggagaatgtgccttcctgaatgacaatggagtcaacagtggc

SEQ ID NO: 825463 - DNA, 100 bp, Homo sapiens
ccatgggactctacctggggatatacatgcatgcaccaaaacgaggacagatacagtttatgtaacttgatggaagaaaatggaattactccaaaaagac

SEQ ID NO: 825464 - DNA, 100 bp, Homo sapiens
ggcttggcaacatcgctcggttggaacttaattactgcgtccccatgggagtacagacaggcgacaggcagcctgcttctgcaaagtggtacgatcgaag

SEQ ID NO: 825465 - DNA, 99 bp, Homo sapiens
ctgtccctgcggcttctggggatatggagtctggagaacggttaccatcctcagcagcctcctctactacaccaacttcatcttcgacaccttctgtgg

SEQ ID NO: 825466 - DNA, 100 bp, Homo sapiens
tcttcttgaactggtgctgtctgggcttcatagcattcgcctactccgtgaaggtgtggacggagaatgcagacgggtcaggcgctgtgaacttcctgac

SEQ ID NO: 825467 - DNA, 98 bp, Homo sapiens
aagctaatcaagcaattaatcccaagttgcttcagttggtcgaagacagaggttcaggtgcagattcactttataggaacagcttcagcttcagtgat

SEQ ID NO: 825468 - DNA, 100 bp, Homo sapiens
ccaacattcgcaccgtcatggtcacagcggctgcggcagcagacatggcttaccaccacatcagacctcccattggctattccattcccaagcccatatc

SEQ ID NO: 825469 - DNA, 100 bp, Homo sapiens
cgggtccccgcgttcacagccccagcgcagctctctatcaatatcagctcacatcattgaaaagataattttgaagacatgttttgctgaaaagacacta

SEQ ID NO: 825470 - DNA, 100 bp, Homo sapiens
tgaccctccaataccccacagctattctagtgataggattcacagcttgagctcaaataagctccctccttgggcctgtggattcataatggatacaaat

SEQ ID NO: 825471 - DNA, 100 bp, Homo sapiens
cgggccaccggcgccatgggccagtgcggcatcacctcctccaagaccgtgctggtctttctcaacctcatcttctggattttatttggagagaagcaag

SEQ ID NO: 825472 - DNA, 98 bp, Homo sapiens
ccgcctctgcttcaatgtgggccgggagctgtacttctatatctacaagggggtccgcaagggtctcactctgtcacctgagctagagtgcagtggtg

SEQ ID NO: 825473 - DNA, 100 bp, Homo sapiens
acgggctgcaacctgcagcacatcagcgaccgggagaacatagacggtgtggatgaggtcaccattgtcaacattttgaccaaccgcagcaatgcacaga

SEQ ID NO: 825474 - DNA, 100 bp, Homo sapiens
catgaacagaatttctaaaactccttcatcatcctaaagctgggagacacagtggacaaactacattcatgggtggcaggatcgttgggtagttttgaaa

SEQ ID NO: 825475 - DNA, 128 bp, Homo sapiens
cgccggaggcgcctgcctaccgcctgcaggactgcgacgcgctggtcaccatggacaatgcagatcttcgtgaagactctgactggtaagaccatcaccctcgaggttgagcccagtgacaccatcga

SEQ ID NO: 825476 - DNA, 100 bp, Homo sapiens
ccatgcacaagctgcacttcctgcacaggacctagatgtgaaggctggtggaggctgtgtaatgaccattggagaaatgctacgatcttttctcacaaaa

SEQ ID NO: 825477 - DNA, 98 bp, Homo sapiens
acaaactccagctgaactaacttggaggaggatcttccctgacagctctggatgactgtcttttgaaggtttggtataatgtagaaaactggcggaca

SEQ ID NO: 825478 - DNA, 100 bp, Homo sapiens
tcctatcccatccccatcatcctcttcacagggttctgcatcttagcctgctgattgctgctaaaattgattcaattcctcacttgaataattccacacc

SEQ ID NO: 825479 - DNA, 101 bp, Homo sapiens
gtccagcagatggcggatgccctgcagtacctgcagaaggtctctggagacatcttcagcaggtacctactgtcaacaacgggaagtggaggccattactg

SEQ ID NO: 825480 - DNA, 100 bp, Homo sapiens
gccccatgactgggcagtgccgctcccggacctccacagaggtggtgggacacacgcaggggccactagatgggagcctgtatgctaaggtgaagaagaa

SEQ ID NO: 825481 - DNA, 100 bp, Homo sapiens
gagccctggactgtgaagagtgaggagaccatagctgcacagccagaaccccaggctggagaagcccgtgctactctccgaatttcctaccaagatccca

SEQ ID NO: 825482 - DNA, 100 bp, Homo sapiens
ggagagacgccggccgtggacatcggggcagctgacctcgcccacgcccagcagcagcagcaacaggtgtgcaactgaggaacatggctcaagaaactaa

SEQ ID NO: 825483 - DNA, 98 bp, Homo sapiens
tcctgcatgaccgacctggtcagctgcacatcattgactcctgggcccaactgtgaccgatttaaactgcacataccatatgctggagagacattaaa

SEQ ID NO: 825484 - DNA, 98 bp, Homo sapiens
gacggcgagacgcgcagcgccggcgcccgggagacccaggaggagcccgcaggtgagtggtttaccgcccccggagctgacatggctactcaatggcc

SEQ ID NO: 825485 - DNA, 98 bp, Homo sapiens
ggcctgtgttgagcaaccacgtttgaccacaatggtgcgcatgaatgtcctggcagatgctctcaagagtatcaacaatgccgaaaagagaggcaaac

SEQ ID NO: 825486 - DNA, 100 bp, Homo sapiens
gtgtctcgccgcagcctccggagaggaacagaccctcactctctctgtcagaaaaattgccagactcttcaggtatccgtggctgatgcagagcagcgag

SEQ ID NO: 825487 - DNA, 101 bp, Homo sapiens
taaagccagaaaagactgctgctccctcgccgtcactgttgtataaatgttatgagtgccagtgagccgccttagatagaagcatcgtcagcactttatta

SEQ ID NO: 825488 - DNA, 99 bp, Homo sapiens
aaaaaataagcaaaagcgtcccaggagtacacaagaccagcttccgatgtcaacatgttaggggaaatgatgtttggctcagttgccatgagttacaaa

SEQ ID NO: 825489 - DNA, 98 bp, Homo sapiens
tacgagcacaacaccagcgtcgtcaagaagatccacattgaggtagtggacaaaggaacccgaggtctgcaggccgcattcgacaccggcacggctca

SEQ ID NO: 825490 - DNA, 99 bp, Homo sapiens
ctcccaagagggcggcggcagcgggtcctacgaggagggctgtcagagcctcatggagtacgactgggctggcttagatgaagatgaagatgcacatgt

SEQ ID NO: 825491 - DNA, 100 bp, Homo sapiens
tcagttccatccgaagagttcctctcccacctgaacttgttgagcagtttggaccagccccgggctcagctcctggttcccagtatggcacaatgaccag

SEQ ID NO: 825492 - DNA, 98 bp, Homo sapiens
acagtcctcttaaatgaatctttagaacttggcaagtctcactagataccttcaatcatcattttgagctcaaagtcctgtgcctcctgattgctgag

SEQ ID NO: 825493 - DNA, 98 bp, Homo sapiens
gagtttgaaggttgtgaccaaaagaggctccgtcacatgacacaggcaatcccttttgacgaccctcggttagagagctgccaaatcatccctccggc

SEQ ID NO: 825494 - DNA, 98 bp, Homo sapiens
gggctcctgtttctctccgccgcgctctcgctctggccgacgagtggagaaaggctgagccggttctatcccgcatccaggaaaaccggaagcgtgtg

SEQ ID NO: 825495 - DNA, 98 bp, Homo sapiens
ctagtacctgtattcttaccattgaaaatgtttccattcctgaaaaacccaagcttagatttattgaaagggcaccacttgtgccaaaagtaagaaga

SEQ ID NO: 825496 - DNA, 100 bp, Homo sapiens
acagaattaatggaactacaggaattctatgacccagatacagtggaacttatgacctggataaagtacaggctgagaggctgagaaatcatcccctgaa

SEQ ID NO: 825497 - DNA, 98 bp, Homo sapiens
tcaggctgcaccacgtggaggccaacaggagctgaaaccaccaatgggtgaggtcgtcacccctacggccccccaggagcctcctgagtctgtgaggc

SEQ ID NO: 825498 - DNA, 100 bp, Homo sapiens
ccaagggagccatgtccacccaacagatcaagaaggctgaagagattgctaatgagatgattgaggcagccaagacccctgacctggagcagctggagcc

SEQ ID NO: 825499 - DNA, 98 bp, Homo sapiens
ttcactcgagagatgaggacactgaaattcagagaggggaagtgatttgcctcagcttgtactgtctcaccaacggctttgggggtgcgaggagcgag

SEQ ID NO: 825500 - DNA, 98 bp, Homo sapiens
gccactgccgctgccgccgccctccacgctcagctgtctgtgatcctggaaacatacgtgtgactgaagctcccaaacacccaatctctgaagaactg

SEQ ID NO: 825501 - DNA, 98 bp, Homo sapiens
cagtgtgggagcctcgtctcactggagagtccgttcaggctttgatgaactaggtggacttctcaaaccaacagtggcctctcagaaccagaaccttc

SEQ ID NO: 825502 - DNA, 100 bp, Homo sapiens
tgacgattcagagactgaaaaacctgaggctgatgacccaaagtgaattttgaagattgcaccggtcgacaaaggacagcctatttttccctcgacaccc

SEQ ID NO: 825503 - DNA, 98 bp, Homo sapiens
agaggagcagcccccggagacagcggcacagaggtgcttctgccaggatgctagacatgcagctgaagaagagatttataccaacttaaaccagaaga

SEQ ID NO: 825504 - DNA, 99 bp, Homo sapiens
tggcttctaagaagttgggtgcagattttcatgacttcaaatctcaacctgagccatccccagttcttagccagttgagccagcgacaacagcaccaga

SEQ ID NO: 825505 - DNA, 98 bp, Homo sapiens
ttgtacccaaaacactgctggtataaactgcgagacatgtactgatggcttcttcagacccaaagggacctctgtgagtgaaagccttcagagggaag

SEQ ID NO: 825506 - DNA, 148 bp, Homo sapiens
aacgaaaggaacgcaagaacagaatgaagaaagtcagggggactgcaaaggccaatgttggtgctggcaaaaaggaccagtggctgtaggacaatttcaccggtcatttcgtcgagatagtttgtctccttactcctgtgtatcaact

SEQ ID NO: 825507 - DNA, 100 bp, Homo sapiens
ttcatccttgttaacttaccctcaggtccaacaatgcagagatgctgttcagttaaatgtgattgcaacgcgacagcttattctccttgcacaacaaatg

SEQ ID NO: 825508 - DNA, 100 bp, Homo sapiens
ccccggtccattctcctcgcgctgcaaggatgctcctgggatttcggagaggccgcaggagtcatttcagctccgagtgcagcagatggtgtccatgggc

SEQ ID NO: 825509 - DNA, 100 bp, Homo sapiens
cagagtgtcatgcagctaaacttctggaagtcatcattcttcagtgcaaaggaaggggaattgatcagattgttgtaggagataaagttgttttgatgcc

SEQ ID NO: 825510 - DNA, 100 bp, Homo sapiens
cgacgacctgttccgcttcaacaacatatcagcttgaacgggtctttttacgacttggccatgctgaaacagatgaacaattacagaatattatatctaa

SEQ ID NO: 825511 - DNA, 98 bp, Homo sapiens
agcaccggctccagtgggctctgtggcccatgtgagcaagtttagtgagaacagtggattggggataagcctggaagcgacagtgggacatcatttta

SEQ ID NO: 825512 - DNA, 100 bp, Homo sapiens
gcgtcgggaggtagagcggaggctgcgagggatcattgaccaaatccaaggccaatggaagcagtgctgtgatgaaatcatgaaaattgaaactcctgct

SEQ ID NO: 825513 - DNA, 100 bp, Homo sapiens
atacttcagttgttcagtcagattggaccctgtaaaagctgtaaaatgataacagaggcaatggtggcttgctatccgggaaatggaacaggttatgttc

SEQ ID NO: 825514 - DNA, 100 bp, Homo sapiens
ccgagtcctagcgcctggcctgcgcgccgctgcccgcgccacagatggggaaattgaggcagagaagccaagacatgtgctaaaggtcatgcaggctatg

SEQ ID NO: 825515 - DNA, 100 bp, Homo sapiens
acaatctcattagttgagtcactggttggctttgagatggatattactcacttggatggtcacaagctatatgttctcctttcagccaagacctttcacc

SEQ ID NO: 825516 - DNA, 75 bp, Homo sapiens
cgcagatgttgtcaaggtggcctaccaggaggccaggggtgtcgccatgatcacttcagcatcggtgaggttggt

SEQ ID NO: 825517 - DNA, 98 bp, Homo sapiens
ctactttagttactatcaccaataacattggttctgtggcacgaatgtgtgctgttaatgaggtgtctgatgatttgtgagcctcaagtgactactct

SEQ ID NO: 825518 - DNA, 99 bp, Homo sapiens
ggagggacggcagtctcgcgcgatgtcatggcacccccagtaccggagctccaagttccgtcatgtctttggcaaaccagccagcaaggagaactgcta

SEQ ID NO: 825519 - DNA, 100 bp, Homo sapiens
caaaagtgtcccccccaccatcaaagttgtacaatggtagatggagtgatgattcttcctgtgcttatcatgattgctctcccctcccctagtatggaag

SEQ ID NO: 825520 - DNA, 100 bp, Homo sapiens
ggcggcagtcgggccagacccaggactctgcgactttaccatgccaatgaagatgtggaaagaatgttactaggaaacaagtgtgatatggacgacaaaa

SEQ ID NO: 825521 - DNA, 100 bp, Homo sapiens
cgggccttctccagggacagctggatctggagtgggagagcaggatgggggactgatcggtgccgaagagaaagtgattaacagtaagaataaagtggat

SEQ ID NO: 825522 - DNA, 98 bp, Homo sapiens
acaagtgcagacagcagcttcatgatattactgtaccgttagaagtttttgaggtggctgtgccagtgtcattgtgtcattaactactcagtgtcctc

SEQ ID NO: 825523 - DNA, 50 bp, Homo sapiens
ctcgatctaaggatgaccctggaaagggtgcggaggcagcaaatgttaca

SEQ ID NO: 825524 - DNA, 100 bp, Homo sapiens
tgatctacctaccaatcgtgaaaactatattcacaggattgaatatgatgcatatcgcactgatttggaagaactgaatcttggaccacgtgacgcaaac

SEQ ID NO: 825525 - DNA, 100 bp, Homo sapiens
accaagggacccctcaaacaaaaacagccaagcttttctgccaaaaaggtcgtcagcttgttctggaaactctttatgctttgacatcgagtacaaaaat

SEQ ID NO: 825526 - DNA, 100 bp, Homo sapiens
ctgcaagactctggagccagtcttgaggtcctacatctccgaaagcaagctcttctagaagttggtttagcagtttccttacagctattgcacggagaca

SEQ ID NO: 825527 - DNA, 148 bp, Homo sapiens
ttgaactccctggctccagcagtcttcccgcttcagcctcctgcctgagcctcccaagtagctaggactagaggaaactaaatatattttgccaactttggaaaaagaattattcttggcagagcacagtgaccttgaagaaggtgga

SEQ ID NO: 825528 - DNA, 100 bp, Homo sapiens
gaaatagacaaggggaaatggagcaagcgcggcatagggttgattggctgcataatcgggcgtcaaggcgccaaaatcaatgagatccgtcagatgtctg

SEQ ID NO: 825529 - DNA, 98 bp, Homo sapiens
tcaaacttctgttggtacattgttagccaaaatgaagacctgtgttgatacctataccaaccgtttaagaaagtggagctgttccaaaaagaaaagac

SEQ ID NO: 825530 - DNA, 98 bp, Homo sapiens
gaaggagcacccaggagctgaagaagcccctgaatgtgacagtgatccgcaggggggaaaaacaccagcttagacttgttccaacacgctgggcagga

SEQ ID NO: 825531 - DNA, 98 bp, Homo sapiens
ggcacggtgggcgcctacctggatatgtgatggcgtccagtttggagctgggataaggttcctgtagccgacacccctacaggagaagctctgggact

SEQ ID NO: 825532 - DNA, 98 bp, Homo sapiens
tgcattttgtccacatgagaggattacctttccaagccaatgcccaagacattataaacagctctccttcagggtgtggatgtgtggtggcagtctgg

SEQ ID NO: 825533 - DNA, 51 bp, Homo sapiens
gaggaccttacattgacattcagccccatctgctttgatatgattgaagaa

SEQ ID NO: 825534 - DNA, 100 bp, Homo sapiens
agctggcggacatcactttagaccctccacctaattgcagttttgcagaacactgaaatctatggactctaaaatggacttcatttaaagaaacccacgg

SEQ ID NO: 825535 - DNA, 74 bp, Homo sapiens
caggaaaaaaatttgctggatattgatgcgccagtcactggaatgttttaaaggaagttgggctactcacaagt

SEQ ID NO: 825536 - DNA, 100 bp, Homo sapiens
tgacgaagcaggagatcctcctaacccgagcaacttcccgagaagagaagaacctccaaggctttctggaacagcccaaggagaagtgggtggagagtgc

SEQ ID NO: 825537 - DNA, 100 bp, Homo sapiens
aaaccccaacatcatggcctgctacaatgaactgctccagctggagtttggagaggtgcgatcacaactgaaactcagagacggggttttgccatgttgc

SEQ ID NO: 825538 - DNA, 100 bp, Homo sapiens
catcctgacatcgaaaacccggacctcgcttacctgcatgctggctgcaaggtgtgactgttgtaaatctcaaggaactcttaaagagcgagttcagtgg

SEQ ID NO: 825539 - DNA, 100 bp, Homo sapiens
agaaggtggagctccctgtggccttggtctcacctctcttcagagcaaacgccctggaggagcagctgaaggagcaggagctgagagcctgcgagatggt

SEQ ID NO: 825540 - DNA, 119 bp, Homo sapiens
ctcctgcaacacctgcggcctcactgggacccccaggaggtgaccctgcagcaggaacgaatttcatatacacctccagagagcccagtgccgagttacgcttcctcgacgccacttca

SEQ ID NO: 825541 - DNA, 100 bp, Homo sapiens
tgcgtgctcagcactgcccgacagtcctagctaaacttcgccaactccgctgcctttgccgccaccatgcccaaaacgtttgcaggcctttcagatatat

SEQ ID NO: 825542 - DNA, 100 bp, Homo sapiens
gtgcaccgctccctgggcgtccatctgagcttcatcagtcctggaggccctcaatgtgctggtgaatagaccgaatatcagggagcccctgcggatggac

SEQ ID NO: 825543 - DNA, 79 bp, Homo sapiens
cagcacggcgtggcctctcagcctcggctccatggtccccttctcgatgcgcatcttgcacgcggagcttcagcagtac

SEQ ID NO: 825544 - DNA, 50 bp, Homo sapiens
gaggaggggggacatgtggcggtttttctattgggaaagctactgatcgg

SEQ ID NO: 825545 - DNA, 100 bp, Homo sapiens
cgccttcttcctggacatgaccaactggctggcagtgatggtgaaagcataggaaactgccccttttcccagaggctcttcatgattctttggctcaaag

SEQ ID NO: 825546 - DNA, 100 bp, Homo sapiens
caggaggaagaattcccaagccaaagctttccaggttagcatggcctcattgaaagaactagatcaaagactctttgaaaattacatcgagttgaaagca

SEQ ID NO: 825547 - DNA, 100 bp, Homo sapiens
gagctgtggtccagcctgcgcggcgggaagcggcggcggcggctccagcgtcctaagaggtcatcaccgagtggtcttctcacatcatccttcaggcagc

SEQ ID NO: 825548 - DNA, 122 bp, Homo sapiens
accatttggcaagtttaacatcaaaggccaagattccattagactactggaccatctctttgcaaatgtcattccaaagtttgcagacaaattttcattccacttaaaaggccgaaaacttg

SEQ ID NO: 825549 - DNA, 98 bp, Homo sapiens
acaaatgcacgcgacaggaaccagatgtcctaaacgatgctatatttgatgaagatcatgatgagatggtgattgtgaaggacatagacatgttttcc

SEQ ID NO: 825550 - DNA, 100 bp, Homo sapiens
agaatggatagaaattgaagcacggatcagattatcatttgcacaacatgcgtcgggatgtccaggaaatttttcgcatgaccccccacgagaagcaggt

SEQ ID NO: 825551 - DNA, 100 bp, Homo sapiens
ttgcacacgaggagcctgaaatatggaaaaaagcccttcagcggccagtagcatctgactttgagcctcagggtctgagtgaagccgctcgttggaactc

SEQ ID NO: 825552 - DNA, 98 bp, Homo sapiens
tcagagacatcaaaacctggaccttctggattacaggccaaattagcaaggacaaaagtggctctcaatccagcacatgcacattgaagcaagttaaa

SEQ ID NO: 825553 - DNA, 98 bp, Homo sapiens
ctcctggaggctgccgacatgaagtgctttttcccggtgctgagctgtctggctgtgctggggttgaaaggaggagcaggaggtactgatggacaagg

SEQ ID NO: 825554 - DNA, 100 bp, Homo sapiens
tattacctcaacctggtgctgatagacgaggaggagcggcgctacttcaagcagcaggaagtggcggtgcgagggctgctgcacagcgagcggagccgcg

SEQ ID NO: 825555 - DNA, 100 bp, Homo sapiens
atgaccattgctgcccttgagtctaagttggcccaggctgaggagcagctagagcaagagaccagaagccctcggatggtggcccttgcatgcttcagtt

SEQ ID NO: 825556 - DNA, 98 bp, Homo sapiens
gacgggttcagttcgtcatggggctgtttggaaagacccaggagaagccgcccaaagaactgtaccttccactggaagaatctcaaacagcgctactt

SEQ ID NO: 825557 - DNA, 123 bp, Homo sapiens
accgacctcgtcccggcccctgcagtccggatactcacgccagaaggcacatcttcacaatgaaatcttcacaagctcagaaccatcaacttgctacactgtgttcctccagtgcccagttca

SEQ ID NO: 825558 - DNA, 100 bp, Homo sapiens
atcatcgtgtttggcacccggatcctggatgaggaggtgtttgaggcctccggtgtggctgtctctgatggtgtcatcaaggtgttcaacgacatgaagg

SEQ ID NO: 825559 - DNA, 100 bp, Homo sapiens
ccaacatgccctggctgaaggccttaccgaggaggagtatcaggtgaactccagtttgcttttgtgtgcttcctgctggggaatgtgtacgaggcatttg

SEQ ID NO: 825560 - DNA, 99 bp, Homo sapiens
aaagatccagaaagcattgggagaatatctggaaagagagcggtcatctttccccaggtggtgaagcagtattttccaatttgaagattcatttgaagg

SEQ ID NO: 825561 - DNA, 100 bp, Homo sapiens
attcagttgcacatccccacatcaatgcactgccaatggttggacgtgataagtatgagcctgcagctgtttcagaacaaggtgataaaaagggcaaaaa

SEQ ID NO: 825562 - DNA, 100 bp, Homo sapiens
aggaggagtgcctcaagaaatgtgccactgtcacagctgcattcatccgggtcgtgggctcggagtttgtacagaagtatctgggtgagggcccccgcat

SEQ ID NO: 825563 - DNA, 100 bp, Homo sapiens
agcgtgggccccgtatgctgccgtggatctgatcagctgaggcctgagacacaggaccaggatatggaccctccacatcccttccccaaggagatcccac

SEQ ID NO: 825564 - DNA, 100 bp, Homo sapiens
atctcccagctggagcaagggaccgagctatgggtggctgagagaggaaccacccagggctgccatccagactggaaagctacccttgaggagaataggt

SEQ ID NO: 825565 - DNA, 98 bp, Homo sapiens
aaaagaagaccagcgacaaatttagagaaacctcggcaggaatttatcaaagagctgctttctcggataagaggcatgaggaaactgagccctccgca

SEQ ID NO: 825566 - DNA, 122 bp, Homo sapiens
ctttaggcagcttacaactcacaagtgcatgggagattcctgcatcttttgcgctctcaagactctgttgacgttcagggatgtggccatagaattctccctggaggagtggaaatgcctgg

SEQ ID NO: 825567 - DNA, 100 bp, Homo sapiens
ctggtacgcggcactcagcggccagaaagactggcatcagtactatgacatagtttatatgaagcctcatgggagactccagaaagtcatgaaccacatc

SEQ ID NO: 825568 - DNA, 100 bp, Homo sapiens
gagctgggtggtctggagaccatggagaccctcacggagctgggcgacgagctgaccctgggagacatcgacggcagcagcccagacgcggcacagagag

SEQ ID NO: 825569 - DNA, 98 bp, Homo sapiens
aaaatgttggataaatatatctatggagcacagggttgccacaccatttggaggttttgaaaaagcatcaagaatggttaaatttaaagttccagatt

SEQ ID NO: 825570 - DNA, 99 bp, Homo sapiens
tgcattgttggtgggattctgctcgtgttccaaatcatcgcctttctggtgggaggcttgattgtgctgtgctgtggctttcattgagaagctagacgc

SEQ ID NO: 825571 - DNA, 100 bp, Homo sapiens
ttggtgtctttagtgcttggattggtgggatgtttcggaatgggcattgtcgccaattttcagatggcctctccagaggagaagtgtcaacaagtcttgg

SEQ ID NO: 825572 - DNA, 100 bp, Homo sapiens
attttccccaagcactctcaggaacctggcaacagaacacaccacagccatcagcactggaatgcaaagaccagaacaaacagaaggaagccagcagcca

SEQ ID NO: 825573 - DNA, 100 bp, Homo sapiens
tgagtgcctggaagtttacgcctgatagatttttacataccgttgctcaaaagagggctgcaagaagaaagagatgctgcagatggtatgtgcccaatgt

SEQ ID NO: 825574 - DNA, 99 bp, Homo sapiens
cgtggagtagaacagaatcatcagagtaatcaagtcagaggattatatgacttttatctgcctagagaagaactatggatctacaacatggagactgga

SEQ ID NO: 825575 - DNA, 100 bp, Homo sapiens
caaagttgtgtcagtgaatacaaacagttttagaaagagcgttttcgctacgtaaagcacattcgataaaggatatggaaaatactttgcagctggtgag

SEQ ID NO: 825576 - DNA, 98 bp, Homo sapiens
caccctcgagagcggcctgattgggaagaaactcttagcgcaatggttctgatctacaatggccaactggacatcatcgtggcagctgccctgacaga

SEQ ID NO: 825577 - DNA, 99 bp, Homo sapiens
tctcctgccaggtgtgtggctgcacaggagtcttgctgatggaactgcaagcacatgttgaccagataactgaaatggcagcagtaatgaggaaagcca

SEQ ID NO: 825578 - DNA, 98 bp, Homo sapiens
tgaacttcaccttttggctttcttggcctgatgctgaactctcgagggatcttgacattggtgccaagaacgtgaagctttacgtcaacagaaacctc

SEQ ID NO: 825579 - DNA, 100 bp, Homo sapiens
ctggatgacacccaggatgccctgaaggaagacagagatgtcaatgaccccatgcccaaccgaggcggcaatggactagctcctggggaggacagattca

SEQ ID NO: 825580 - DNA, 100 bp, Homo sapiens
ttcaaagcccacagagcagtgcttgctgctttttctaactatttcaagatgatatttattcaccaaacaagttcattccttggaagaagctgtaccatcg

SEQ ID NO: 825581 - DNA, 100 bp, Homo sapiens
gaaaaaggccctcttcaagcctgggcaaggaggaggagctacaggatgtacgggatcagctcgagcaggcccaggaggagcgggactgccacctgaagac

SEQ ID NO: 825582 - DNA, 98 bp, Homo sapiens
cgccgggagctggtacacagcctcagtggatatgctgctgatgaaatcactcactgcatacggcctcaggacatcaaggagcgccgagcagtcatcat

SEQ ID NO: 825583 - DNA, 100 bp, Homo sapiens
gcaatcatggtgcagaaataccagtccccagtgagggtgtacaaatacccctttgaattaattatggctggtatttgaagtataccatacaactgttttg

SEQ ID NO: 825584 - DNA, 100 bp, Homo sapiens
gtggtcagacatgtcatcaactcagctggcgcgggcggtgatgaactttgtggttcgctaccggccagacgagcagccgtctctgcggccacaccacgac

SEQ ID NO: 825585 - DNA, 98 bp, Homo sapiens
ggaaggtggtgatggccaaggtggatattgatgaccacacagacctcgccattgagtatgagacacatcccactcaaactgcatttttatccagcgtt

SEQ ID NO: 825586 - DNA, 100 bp, Homo sapiens
ggaggagcagaatttactacagcatgtgatttcagacactatgtggcattgtgctttggagaagtgcgtatcagaacggacctacagaaagtttctgacc

SEQ ID NO: 825587 - DNA, 100 bp, Homo sapiens
gtggaggaagaggcattgaggactttccttacctgtttttccagctcacccactgccagcagaggtctcctctgagcctccggcctccataagacccaaa

SEQ ID NO: 825588 - DNA, 100 bp, Homo sapiens
taagcgtggcttttgaggaagatgtgacaactaccggaggcatgcccaagagaatcgtaaatgcaaaaattgcttgccttgacttcagcctgcaaaaaac

SEQ ID NO: 825589 - DNA, 98 bp, Homo sapiens
accaaaaaggcctcgcacattcagttggacagatactatggcgggactgagtttattgatgaactggagaccctctgtcagaagcgagccctgcaggc

SEQ ID NO: 825590 - DNA, 100 bp, Homo sapiens
ggacatgcacaccatcggctttggcatctatgagggagctgtgatacacaagttgggcatcaccttggtgtctctccttttgtttttgacgctaacgaag

SEQ ID NO: 825591 - DNA, 98 bp, Homo sapiens
aggagtcagggatggctcttcctcagtttgggatatgagattgaaaatgacgactcggaattttcctgagagagaagtaccctgtgatgtagaagtgg

SEQ ID NO: 825592 - DNA, 98 bp, Homo sapiens
ctgggcaggtcttcagccctgacggaccctcaagattccggaaagcgtacaagccagaggaaaaaagcagcaagccttcaggtgttccagtgatgcct

SEQ ID NO: 825593 - DNA, 98 bp, Homo sapiens
aaaatgatcacggagtttgggcatcctgcagccattaatgatcccaagataattatgtttgagaccttcaacaccccggccatgtacgtggccatcca

SEQ ID NO: 825594 - DNA, 100 bp, Homo sapiens
tggactgcaaaccgagctcccgtctgccttgcaggtgttacagggtcttgattatttacataccaagtgccgtatcatccacactgacattaaaccagag

SEQ ID NO: 825595 - DNA, 100 bp, Homo sapiens
tcaggcgacccgtactgggcctactctgaatcctgctgcatcacagaagctggaagttctgatgttccactgaaatcacaatggaaagtcttgacttgac

SEQ ID NO: 825596 - DNA, 116 bp, Homo sapiens
agcaatcagctggcctggtttgatactgacctgtaaatcatcctttagcctgtgcccctgtaggatgcagtgaagaccttggaagagacagcacaaaactgcacttgatgaatttt

SEQ ID NO: 825597 - DNA, 106 bp, Homo sapiens
ggcaaaatgtcactgaggaacttcggagaagatggggacaaggcgtcgggcgggggagccagcgctcaggttcctgacggagacttcgcccttcatgtggtccaac

SEQ ID NO: 825598 - DNA, 100 bp, Homo sapiens
ctccaagttgacccccctgcacctcgctgtccaagcaggctcagaaattattgtccgcaatttggagcgagcccagggcgtggtgctgaaagtgctcaca

SEQ ID NO: 825599 - DNA, 100 bp, Homo sapiens
agcaatctcattaaattactgatgtcagaagattattttacacaagcaatggaagtgaaagcattagagcacgttttcaatatcataggagcatttgata

SEQ ID NO: 825600 - DNA, 100 bp, Homo sapiens
gatttaacattccaacacataaaaattatttatccaacagctcctcccaggttacttcctcagaatgttggcctcctgtatgttggaggttatgaaagac

SEQ ID NO: 825601 - DNA, 98 bp, Homo sapiens
ccgctacgtgactcttttctccaggaagccattaatttgctagaaccaatgacaaacgaccccgtgaactacgtgaggcaaggggcactcatagcttc

SEQ ID NO: 825602 - DNA, 100 bp, Homo sapiens
tctggagtgtagagtcactggaaaccccactcctcgagtcagctgtgatgcagatccatccgccctagcaaaatatgttctggctttggtaaagaaagac

SEQ ID NO: 825603 - DNA, 100 bp, Homo sapiens
caggacttctttccggcatcagtgtggacattgaccccactggactgcagtcacagtggactcccaaggggcaggtagaagaagctctgatccagatcca

SEQ ID NO: 825604 - DNA, 100 bp, Homo sapiens
gtgtgatgcagctcttcggcctggttaacacccttctggccaatgacccaacatctcttcggaaaaacctcagtacaagattctgctgtactcattggat

SEQ ID NO: 825605 - DNA, 100 bp, Homo sapiens
aactgcggtcacttaagttttccgtgtgcgggttgcaaggagcgtgcgtgcgtctggtatggagagtgcaatcacgctgtggcagttcctgttgcagttg

SEQ ID NO: 825606 - DNA, 99 bp, Homo sapiens
actgcctgcgcagctccggccgcctggctccccatactagtcgccggaccctgatgctcccataagacagaaaatgccccttgatgatctggatagaga

SEQ ID NO: 825607 - DNA, 99 bp, Homo sapiens
tcttcctgacagcccctttacaggttacatcattgcagtccaccgaaaaatggtggtttcctagaaacatgattgtttattggcattgatctcacagtc

SEQ ID NO: 825608 - DNA, 100 bp, Homo sapiens
cctcagcagccctgctgacagctacaacgagggtgtcaaggtgttggatcccagaacaagaatgattttattcaagatgttgactagaggaatcataaca

SEQ ID NO: 825609 - DNA, 99 bp, Homo sapiens
caggactctagtaacccgcgaaatgatgggatagcgttgcaaatccttaaaagagtcttaacggttggcactgaattcacgacagtcttgtacaatttc

SEQ ID NO: 825610 - DNA, 100 bp, Homo sapiens
ctgggccctgggccagaggcagaaaacggacggaagaaaaggtctggccgggtccaaattccaagcctgtagtgtccttcattgctggtttaactgctcc

SEQ ID NO: 825611 - DNA, 99 bp, Homo sapiens
aactgttacatcttcaactggggcatgacagagaaggcacttccttcggccaaccctggaactgaattcggactactgttcgaagatttttggaagaat

SEQ ID NO: 825612 - DNA, 98 bp, Homo sapiens
ggcgagcctattcagacgtttcactttcaggacccggctgcccagtccctcatgatcatgaacaagatgaagaactttaagcgccgtttctccctgtc

SEQ ID NO: 825613 - DNA, 99 bp, Homo sapiens
ctggactgaaacgatcctctcatctcagcctccaaaagtgctggcattacaggtaaagtgaatgccgaagacagaagatttggatgatacaccactgac

SEQ ID NO: 825614 - DNA, 99 bp, Homo sapiens
atatgggatgctggaggacatctgggggccacaaatgctccttctcctggagacgcaactcaagtgctcttgtacgtgaggaaggagactgacgatgtg

SEQ ID NO: 825615 - DNA, 122 bp, Homo sapiens
cgcgtcttcagggcccagtccctcggacccatcgccgcttctagaccctactgcggtctcggatattgccgggaaaacggacgatgtattactaagctggaaaacatggggtttcgagtggg

SEQ ID NO: 825616 - DNA, 98 bp, Homo sapiens
agattttggagagaatttaatgaagaggctgtttaccaagctcccagttgtgggcagagtctggttaaggtacagccttggaattattttaacatttt

SEQ ID NO: 825617 - DNA, 133 bp, Homo sapiens
ctggtggcttcccactggcgaagagaagctacaaaatatgctcgatggatagcattcactggaagtggaaaatgagcttatatatgaagaagtcagcgagtggacaaagccaggcgcaatggatagcaaagat

SEQ ID NO: 825618 - DNA, 100 bp, Homo sapiens
ccttctcttccatgcccactgcctacaacacaggtatgggcactaggaaaagacttcttccatcaagcttaattgttttgttattcatttaatgactttc

SEQ ID NO: 825619 - DNA, 100 bp, Homo sapiens
tacttggaaatggctgcaggttcagacatgctgatcccattttcaatgaagaattgcttccagttactttgtaactgccaggtcccagcagctggcttta

SEQ ID NO: 825620 - DNA, 100 bp, Homo sapiens
gggcagaggcgaagggctggtgggcgatgggcccgtggacatgcgcacctcacacagttacccagcatgccacaatctgattgctgacctggatggaaca

SEQ ID NO: 825621 - DNA, 98 bp, Homo sapiens
cctgatctcttttccaaggaagaggtgggagattttattcaacgctaccaggatattgagaaagaatctgagtcaggtgcttggattcgccctcatag

SEQ ID NO: 825622 - DNA, 98 bp, Homo sapiens
ggacatcaacaaggatgcctgtttgttccggagctgggccattcacacaggagaaggcacaatccctgtggaatccagtgacattgtgcctacgtggg

SEQ ID NO: 825623 - DNA, 100 bp, Homo sapiens
agaaacccctactcatgatccggaccctgagactcccctaaaggccagaaaggaaaatgtttataggaggccttagctgggacactacaaagaaagatct

SEQ ID NO: 825624 - DNA, 99 bp, Homo sapiens
atcagtccaagttgacggacaggaggcgaaatgtgcaaatgtttatgggtgtgatgaatgcagactctgctaccattttggctgtttggatcctccttt

SEQ ID NO: 825625 - DNA, 109 bp, Homo sapiens
cgtgaacatctccacagcacctcccaggcgctcgatgccagccgtcatcggtttccagacagctggtgctgttccagaattcaaagaagagaaactgcagctgcaacca

SEQ ID NO: 825626 - DNA, 100 bp, Homo sapiens
tagaggatgacttctctaatcagttacggatggcttaaattccttggtccttgatttagattttcctgctttgaggaaaaacaagaacatagataatttc

SEQ ID NO: 825627 - DNA, 100 bp, Homo sapiens
gactacaattatttgggacgcacatactggtgaagccaagcaacagtttccttttcattcaggtaaaagtgctgtttgtacgcaaccttgccaatactgt

SEQ ID NO: 825628 - DNA, 100 bp, Homo sapiens
atgtatgaagcatacagacaagcccttcttacagagttggaaaaccgaaagcagagacagcagtgtgtggacaacagtgagtatatgcggaatggagact

SEQ ID NO: 825629 - DNA, 99 bp, Homo sapiens
ttctggactcactctgcctcagcaacactggtccctgttgccccaccaatatgccagacctgtcatttactccatcctttatagtgatgctacaggacg

SEQ ID NO: 825630 - DNA, 100 bp, Homo sapiens
cctattcctgctagtgcaggcctccagagtgcctggtgaagaatgtgatgggatcactagcatgtctgcggagagcggccctgggacgagattgagaaat

SEQ ID NO: 825631 - DNA, 100 bp, Homo sapiens
tgaacattcagtggagacaccccttgtcagagccgacccgtttcaagaccttaggtataatattgagcccagcctatattgcccgtttttctctcttgga

SEQ ID NO: 825632 - DNA, 100 bp, Homo sapiens
cttcagctcaagatggtggcctgccgggcgattggcatcctcagccgcttttctgccttcaggatcctccgctcccgagattccagatgagatgatccag

SEQ ID NO: 825633 - DNA, 98 bp, Homo sapiens
gagttcatcagtgcctatggagccagaggcagtgcaaacataaaagtgacattcatctctgtgggggatgttggaaattactattatggacaaggcca

SEQ ID NO: 825634 - DNA, 100 bp, Homo sapiens
tggcacagtggatgggacaagggacaggagcgaccagcacagttgctgaaaagccaggagtcaaaatgactgagcgctttgactgccaccattgcaacga

SEQ ID NO: 825635 - DNA, 99 bp, Homo sapiens
gggaggggacctggatcatggctgccgcgccgccgctacgggaccgcctgagctttctacaccgggtattgttgcagcatctggcagtgagactgagga

SEQ ID NO: 825636 - DNA, 132 bp, Homo sapiens
cccgggccctgcgccctggggcttcaggctctcagggggcatagacttcaaccagcctttggtcatcaccaggccccctctcccaacaactccgacacctgttccaagggaacctggccggaagcctctttc

SEQ ID NO: 825637 - DNA, 99 bp, Homo sapiens
ctttttgtggatacagatgcggacacccggctctcacgcagagatttgatggtagagtggtggcaaagcttccttttacccctctttcttacatccaag

SEQ ID NO: 825638 - DNA, 117 bp, Homo sapiens
gtgcacgtgcagatcgcctggcagatctaccgtcaccagcagaagataaagtgcacgacctgcgacagcagatgacagccttgcagagccagcttcagcaggtgcagctggagcgga

SEQ ID NO: 825639 - DNA, 51 bp, Homo sapiens
acagaagcagatggattcgtccttttagattcccaaatgctggaaaatcct

SEQ ID NO: 825640 - DNA, 99 bp, Homo sapiens
aatccttccagctacgtatcttaaaggatgtgatggagaagttatcaactggtgttttcagagatgacctgatcagagccatcaagaaactaaaggcac

SEQ ID NO: 825641 - DNA, 100 bp, Homo sapiens
cgaggctgaaggaagatggcggacggcgtggaccacatagacatttacgcggatgtcggcgaagagttcaaccagctgtcccctttcctccaacccaacg

SEQ ID NO: 825642 - DNA, 100 bp, Homo sapiens
ggcctcgccatgtcctgctgcccgccaagtgcaaggtggttatcaccttcaaccaaggactccggggtgggcgcgtggtggagctgaagaaaatagtgga

SEQ ID NO: 825643 - DNA, 100 bp, Homo sapiens
agaagatgaaaatgaacagctaaagcaggaaaataaaactcttttgaaagttgtgggtcagctgaccaggtatgcttcagaagtgtccttctgttgatga

SEQ ID NO: 825644 - DNA, 100 bp, Homo sapiens
tcaaacgagagtcagcctttaacggggaacttatgacattttagtaacaaaagataatcaaacccgctctgttggtcaatatgacaaccgtggcagtttt

SEQ ID NO: 825645 - DNA, 100 bp, Homo sapiens
gatcgtgaccgagaccgtgaccgagagcgtgaccgagagcgcgaatatcgtcatcgttagaagggaattggctcgggaaaaggtaatgcgagaagttaaa

SEQ ID NO: 825646 - DNA, 100 bp, Homo sapiens
ctcttgataaaaagagatgtggggggattctcgacctgctaacagaactggaccttttcgcgtgtttccttgactcaatggctaccttgggcctggcagc

SEQ ID NO: 825647 - DNA, 98 bp, Homo sapiens
cgagatccagttcctgcgaacttcctattttgtaacggattatgatccaaccattgaagattcttacacaaagcagtgtgtgatagatgacagagcag

SEQ ID NO: 825648 - DNA, 98 bp, Homo sapiens
tcaagaagtggccggagagttctgcatgttgattcgaagtctgcggtcttgcagttcttcagactgctttaataaagtgatgccaccaaggaaaaaga

SEQ ID NO: 825649 - DNA, 99 bp, Homo sapiens
ctgccagccaatcatcctctgttgactggccagagagtccttgatgccctttttccgttgatccaaggattagttttggatcatggtgcccgtcatcca

SEQ ID NO: 825650 - DNA, 99 bp, Homo sapiens
ccatgtaacgcctgtggtgaccagtgccctgggttcgccttgcataaatggagacatggctccttactatgaagccttgtgcaaatccctcgactggca

SEQ ID NO: 825651 - DNA, 98 bp, Homo sapiens
gttacatcagaggaaggagacaatgaatctagaagtgcaggcgatggaacagactgggatgatgattcagatctgtactctcccagatactcattttc

SEQ ID NO: 825652 - DNA, 99 bp, Homo sapiens
cttgaacaccttcgggatatctttgaaacagaacagattccacctgctcctacgaagcccgactttgatggtcctcgagagaagatgcagaaactggga

SEQ ID NO: 825653 - DNA, 100 bp, Homo sapiens
cagaaatgcacgatgaactggacagtgcaaagcgatcggaggacagggagaagggagctctgattgagcacttttcaggattagaagaggctgtgtatag

SEQ ID NO: 825654 - DNA, 100 bp, Homo sapiens
gctgaatcctgccaatacccgcagcatttccaacatggtgtattttgattacatgagaagctggatccaaatgctacagcaattacctcaagcatcgcat

SEQ ID NO: 825655 - DNA, 100 bp, Homo sapiens
gacaataccacaacaacacattttgcagaggagcactcactgtgggcctcgtgcgacagtgtcaaacaatccatggacgagaccggacgtgcatccctcc

SEQ ID NO: 825656 - DNA, 98 bp, Homo sapiens
atcccaaccaggagggacgataagctgatgttccgtaaaatgcgaggcttaagtgaatttccagagaatttctcagccactggagacgtcctgtctca

SEQ ID NO: 825657 - DNA, 100 bp, Homo sapiens
agccagtactctatatgaacaatccgtctggatcacggatgtaggaagtggttccagcagcactgatgtgaaggaaaaccgcaatctggacaacgtgtcc

SEQ ID NO: 825658 - DNA, 98 bp, Homo sapiens
cagcagactcaaccctatgctgtctaccctcaggcaacccaaacgtatggactacctccttttggtcagtatgacggtaggggaaagccattgccaga

SEQ ID NO: 825659 - DNA, 136 bp, Homo sapiens
gtagactttcagatcatctccctcttctgtgtcagggaatgctcctggctggtgcggacacaacccaatagcccagcccgtgttgtactggtgtgcccgcaacatgtctttctggagcagcatttcgtttaacctg

SEQ ID NO: 825660 - DNA, 119 bp, Homo sapiens
tgaacttcgaccacttccagatccttcgggccattgggaagggcagctttggcaaggtgctgatagtctgcagcacaggtttagctgggattatgctgctcaactaccagcaggactac

SEQ ID NO: 825661 - DNA, 99 bp, Homo sapiens
ctagacccacagctgttaaagcaacagacaatgcagatcttcgtgaagactctgactggtaagaccatcaccctcgaggttgagcccagtgacaccatc

SEQ ID NO: 825662 - DNA, 100 bp, Homo sapiens
gttgtctgccccctacatgagaagcatgatgcagtcactaagccagaatcctgaccttgctgcacagtacgagctcaactggaggcagtcctgtgcggaa

SEQ ID NO: 825663 - DNA, 98 bp, Homo sapiens
caaaattgtggaaaagtcactctgggacccagacatggagctgcgggaagaagcctggtctccggggccgctggattctgaggaccagcagatggcca

SEQ ID NO: 825664 - DNA, 100 bp, Homo sapiens
atggagaagctctaagtacactcgtcttgaataggtccaggaggcccaggaggtcctgggggacccatgggtcgcatgggaggccgtggaggagatagag

SEQ ID NO: 825665 - DNA, 100 bp, Homo sapiens
ccgttgcctcaaaccagtcagagatggagttctcttcacttcaggacatgcctgggccgagccagtggcccccagaggatgagaaggaggtgatccgccg

SEQ ID NO: 825666 - DNA, 100 bp, Homo sapiens
cagcctgtggccagctgggccctgtccttcgagcggctgttgcaggacccgctgggcctggcttacttcactgtttttcttcccccagtccctcagctgc

SEQ ID NO: 825667 - DNA, 100 bp, Homo sapiens
gacaaaaatttccacccaaatttgtgcagcctgcctgctccaggctgagctggtaaactatgaacgagtcaaggaatattgcctcaaagtcttgaagaag

SEQ ID NO: 825668 - DNA, 100 bp, Homo sapiens
cttgcagggccaagatctcttcaacagggcttcaccactggaacaagcacaagaatttcagaaactgtggaggagtgtcactgtagattccatggacgag

SEQ ID NO: 825669 - DNA, 100 bp, Homo sapiens
cctcatctgatgcctgttaggctccctttgctgctgaggtcctgggtgccatcccagcacttgaatcaggaaacccaggcccaacggcaggtggatgcaa

SEQ ID NO: 825670 - DNA, 100 bp, Homo sapiens
aaccagcatggctacttcatattttggaaagcagtttttaagacaaggtattacttatgaccatgtcgaattaaatgtatacttgaatggaaaaaacatg

SEQ ID NO: 825671 - DNA, 100 bp, Homo sapiens
caagcaaagaaggtgataaccatgtttgtacagcgacagggccaaggagatctgttgaagaatgccaagaatgaagctatagaaaacatgaagcagatcc

SEQ ID NO: 825672 - DNA, 100 bp, Homo sapiens
ccgcaattcgagaatcaaagggccgggagcgatgctgatcatcctggccaatggtgggccccaggccctcgtgcagatcatgcgtaactacagttatgaa

SEQ ID NO: 825673 - DNA, 98 bp, Homo sapiens
tggagcgcgccggctccctatctgggaaacaaactgcagcaaaaaattattcctgatcaggaccaactgatggcaatagcactagagtgcatctatac

SEQ ID NO: 825674 - DNA, 100 bp, Homo sapiens
aaactgatggacgatgatgccaatggtgatgtggatgtggaagaaagtgatgagggagtgttgacattcagggatgtggctgtagaattctccccagaag

SEQ ID NO: 825675 - DNA, 100 bp, Homo sapiens
aacagcctggtcaatttgtacctgcaggcctcctacacctacctctctctgctctgcttatgataatgtcaacaaagttcgagtagctatcaagaaaatc

SEQ ID NO: 825676 - DNA, 100 bp, Homo sapiens
ctttttgtgtgttttatcatctaaaatccaatccctcggcaggcaatccatggaccttgtggaacttgtgtctctttttcccacgctggctggacttgca

SEQ ID NO: 825677 - DNA, 98 bp, Homo sapiens
gattgagtccaagttcaaccaagccattcacaagctccgggtggataaggcagctgctgcagcagcggcactacaagccaaatcagatgagaaggcgg

SEQ ID NO: 825678 - DNA, 98 bp, Homo sapiens
cagcgcagcgctgccatggagcccagcagcaaggacatccaggcagaaattgatgcccacaatgacatatttaaaagcattgacggaaacaggcagaa

SEQ ID NO: 825679 - DNA, 99 bp, Homo sapiens
gatgttggagaactacagaaacctggtctccctaggtcctcatgctgataccgccagtggatgccagaatttgcagtgtggttttcgagcctgctgccg

SEQ ID NO: 825680 - DNA, 100 bp, Homo sapiens
gcagggcgggcacaccaccctcacactcatcttcatcatcttctatatgacagctgcactgctccagattaagatgttctacgaggagcatttgcacttg

SEQ ID NO: 825681 - DNA, 99 bp, Homo sapiens
ggttcccaaccccgtcccacacccggagaggccgggacgtcccagggacctcctctcggtgaggggctgtccccaggtggatctaggatccggcttcca

SEQ ID NO: 825682 - DNA, 100 bp, Homo sapiens
attacctcggtgccgatcagcggaagaccaaagaggatgagaaggacgacaagcccatccgaggctgaagtttctctttggctcatcagccacccaggcc

SEQ ID NO: 825683 - DNA, 98 bp, Homo sapiens
agatgccccttttaaactccctcttcaaaactcatctcctgggtgactggaattcattgaagagttgctgtctcccccttttgggggtttagtggcat

SEQ ID NO: 825684 - DNA, 100 bp, Homo sapiens
gaggacaacgcagatatagaacatttcttttatcacacaacagccaactcagtttataaatccagaaacacctggctatgttggatttgcaaacctcccc

SEQ ID NO: 825685 - DNA, 100 bp, Homo sapiens
cgcgctgcacacgcagagacaggccgaggagacgcgggccttcgagcagctcatgaccgacctcaccctgtcgcgggacactggggttgggaaatcaagc

SEQ ID NO: 825686 - DNA, 100 bp, Homo sapiens
agcagaagagaagtcaagattccgccaacgccgaggagtgaccttcctatttcctatacaagcaaagacattccatcatgtttacagcgggaaggactta

SEQ ID NO: 825687 - DNA, 98 bp, Homo sapiens
attttcctaggtgtcattacagtgatcatcataggcttatgtcttgctgcagatagtgtgtgtaccatatcagtggcgtgtaactatgctcatcattg

SEQ ID NO: 825688 - DNA, 100 bp, Homo sapiens
cttaaaccagttataggggtaaacactgatccagaacggatttaagtgccctgtatgctcaaaatttgtatcctcagatgaaatggatttgcatcttgta

SEQ ID NO: 825689 - DNA, 98 bp, Homo sapiens
ggacagttagtcacccacctacatgttgagcaattctgtggtgttcttggtcacacatttatggagtttctgaagggcagtggagattactgccaggc

SEQ ID NO: 825690 - DNA, 98 bp, Homo sapiens
ccagtgatgtggcagccggaatgcttattcctcacacttatccaggcagagaaagctgatggatttgtcaacctgcctgatttcactgtggaaagagc

SEQ ID NO: 825691 - DNA, 100 bp, Homo sapiens
cgcggaaccatggccgatgggggcgagggcgaagacgagatccagttcctgcgaactgccaatggtggcagagtctacatagaactatgcttcgtggtgt

SEQ ID NO: 825692 - DNA, 98 bp, Homo sapiens
aaatcccacagaggcatctgagatcagatccagactgtgaagacatgaaaagataatagttggaaacctcagcaattttcaattcaaggaatctatct

SEQ ID NO: 825693 - DNA, 100 bp, Homo sapiens
cctaccggaaacctaggaaaagagctggaagtcgagtgtgctactcaactcaggagatttggagacaaactgaacttccggcagaaacttctgaatctga

SEQ ID NO: 825694 - DNA, 100 bp, Homo sapiens
gaaaattaactataaaggagagcgccaaaccattactgatgatgtggaggttaacagctatctttcttgtgtatgtacagagaaccatcgctacatgaaa

SEQ ID NO: 825695 - DNA, 98 bp, Homo sapiens
tggatctgctgcagaatcttataaagtattaccatgcacagtgcaaatgatggaccatttggattgtgcaacaaatgaagaaaaccctgtgatatctg

SEQ ID NO: 825696 - DNA, 126 bp, Homo sapiens
aagggccaagaaaatttgaagaaggatcttgtgaggaggatcaaaatgttggagtatgctcttaaacaggaaagggtcctgtgcttggattgtggggaacagactccccggggggtgctgcaagag

SEQ ID NO: 825697 - DNA, 100 bp, Homo sapiens
taccatgcttggtgcatggaggtctatgccagtgaaaaagagcaacatggagacctgtgcagaccagattactccaaaggtttcggcggcaaatacggta

SEQ ID NO: 825698 - DNA, 100 bp, Homo sapiens
atatttacttatatcaattcctggacacagagtttctgatgaagaattgaaaagaagagtagctgaggagctggcattggagcaagccaagaaagaatcc

SEQ ID NO: 825699 - DNA, 98 bp, Homo sapiens
agagcctcgcctttgccgatccgccgcccgtccacacccgccgccaggcccctggccccaacatggcccgtcgctctcagagctcctcgcagggggac

SEQ ID NO: 825700 - DNA, 100 bp, Homo sapiens
gaaggcttaaagtaggacaaccatggagccttcctgtggcaggagagacaacaaagcgctattatcctaagccgcagggccgtaggcagccatggcgccc

SEQ ID NO: 825701 - DNA, 98 bp, Homo sapiens
caacaccaagtgcatcaccatccccagattctggaacttttcaaagcctgactctcttcttgaaacagtggagcatcatacagagtttacttgtggtt

SEQ ID NO: 825702 - DNA, 100 bp, Homo sapiens
ttcctttggaagttattccgtagcataagagctgaaacttcagagcaagttttcattgggcaaaatggggatccatcagttacacaagtgacaagaaatg

SEQ ID NO: 825703 - DNA, 106 bp, Homo sapiens
ttgtgaagcacatcatgtccagctaaacctcgtgcccaggtgagccataccgacccgaggaggattccagaatgaccccggcaagcccagaagcccggacgtctcc

SEQ ID NO: 825704 - DNA, 100 bp, Homo sapiens
gaaattcaaaatctaaaactctttcgtcatcctcatattatcaaactgtcttcaggtcaagttactcttggagatgcttgttctgcaagtaccagtcgaa

SEQ ID NO: 825705 - DNA, 100 bp, Homo sapiens
aaagcccaatattgaaggtgccccaggggctcctattggaaataccttccagctggcataaccttgacaacagattgccttgaagatagcctccttacat

SEQ ID NO: 825706 - DNA, 98 bp, Homo sapiens
cgcgttacgggcggtacggaggaggtcctgacctgagggctgcatcaagatcttgtcattccacatcgtggtttcctttgaggatgtggctgtacccc

SEQ ID NO: 825707 - DNA, 98 bp, Homo sapiens
aacgccaagcagcccaccgacatggcccggaggcagcagaaggaaccttgggtaatgtggaacatgggaaccaatgtcagatgaaattgatgtatgaa

SEQ ID NO: 825708 - DNA, 100 bp, Homo sapiens
cagaagttgttctaacgctgcctttgctttaaaacagtattacttgcggcaccaagtatagatgagaaagtagatcttcattttattgcattagttcatg

SEQ ID NO: 825709 - DNA, 75 bp, Homo sapiens
gagaaattcagaacctcaagcttttcaggcatcctcatataattaaactccaagacagtcaattccagcatcttg

SEQ ID NO: 825710 - DNA, 98 bp, Homo sapiens
gaagatggtggcggctactcctcctgggcagcgggtggcatgagacgtgggaacatgggccacctcacacggatcgccaacgcggtggtgcagaacct

SEQ ID NO: 825711 - DNA, 100 bp, Homo sapiens
aagagagaggtttggaaacagaaggcctcttacggatccctggagctgccattagaatcaagatgacacccccaaccatggttgtgaagatgctagcgac

SEQ ID NO: 825712 - DNA, 50 bp, Homo sapiens
cgaagagcttctgtcgccgctctagggtctatgttaacaatgaatgggca

SEQ ID NO: 825713 - DNA, 100 bp, Homo sapiens
ccctcctggaaggcaagaacacggatgaggagatagtggaatgctggcacaaaggacaaggagtaactattcccagtcagaggcgctatgtgtattatta

SEQ ID NO: 825714 - DNA, 100 bp, Homo sapiens
ttgaagattgtgaagcaatagcctaaggtgtcgtgaaaactacccctaaaagccaaaatgggaaaggaaaagactcatatcaacattgtcgtcattggac

SEQ ID NO: 825715 - DNA, 98 bp, Homo sapiens
aagcagtctggatccctgccacttagctcccttactcatgtcttacgaagccttacccctaatgcaagagacttatttttgagctcgctgtaagactg

SEQ ID NO: 825716 - DNA, 99 bp, Homo sapiens
acctccacagcgtggcacctgactgcgtggagaagctcattatgacgctgggaaaaacgcacagatccccgaggcaggttttactatgtggatcacaat

SEQ ID NO: 825717 - DNA, 98 bp, Homo sapiens
aagacccgcgccgccgggacccccaggacgacgtgtacctggacatcaccgcttcttccagaccagctggtcttgcttctggagcatctcttggagca

SEQ ID NO: 825718 - DNA, 99 bp, Homo sapiens
ctcagatgacgaagacctcaattttgatactaagactcagattgatggacaacttttcttaattaagcaccttttgatacttcgtgaacaaattgctcc

SEQ ID NO: 825719 - DNA, 100 bp, Homo sapiens
aagggagaggggagcgaccctggggaccgactctggggaccctcgccgaagagacatctccagttacagcccgaacactggaaactctgattcgactggc

SEQ ID NO: 825720 - DNA, 98 bp, Homo sapiens
gctgacttacatggaggagacgtgtcgtcactatgtggcccatgtgaagaacaagttgaaatcatcgcagaaggataaagttcgtcagtttatgatct

SEQ ID NO: 825721 - DNA, 99 bp, Homo sapiens
ctcgatcagggcatacatctttcttcgacaaagggttatgatgtgattgctcaagcccaatctgggactgggaaaacggccacatttgccatatcgatt

SEQ ID NO: 825722 - DNA, 98 bp, Homo sapiens
gactgtcctccacatttagctgtgggagactggtcgaaggagttggaattgtacaaagaggaacttcagacaaaacctgcactcttggcagttaataa

SEQ ID NO: 825723 - DNA, 104 bp, Homo sapiens
gcgactcgagggtgacgctcgctccgctcgtcccgctcgtcatggcctacccgggatacggaggaggggtagtcggtcttctcttgcccaaccagacactggca

SEQ ID NO: 825724 - DNA, 100 bp, Homo sapiens
aaataaatagagtacaagtgcatttttgttacatgaatgtactacatagtgttggagtcattcgttgcccagtttgcagccaagaatgtgcagagagaca

SEQ ID NO: 825725 - DNA, 100 bp, Homo sapiens
actcttcgccgagatgcaagcaatcacaagcgtcgtgagccagtgggacaggatgctgtggggctgaatctatgactttgaaagaagccatcaagtcttc

SEQ ID NO: 825726 - DNA, 100 bp, Homo sapiens
ggagggggtgctgtacaagtggaccaactatctgagcgggaaatctgcttcgccactgaaggtactctgcaccccagaaggaatacgacttcagtgtttc

SEQ ID NO: 825727 - DNA, 98 bp, Homo sapiens
cgaaatgttcaagtttaccaaaagagaggcaccgctggaacactaatgaggcagcttcggtcacctctctgtccaacctggcatgcatgcacatggtc

SEQ ID NO: 825728 - DNA, 99 bp, Homo sapiens
agctggaaccatcatatgcaccagcacgcctggctaagttgtgtccaagtacatcgaaagtcccgtgttgttccttcgagaagacgtgggaaaggtcaa

SEQ ID NO: 825729 - DNA, 100 bp, Homo sapiens
cagaggacacacctacatcaaagtttttgttccatcctggaggaaggacccaccaagagctgacacccctatcagaggcttgtccaaaaggaaacatcgg

SEQ ID NO: 825730 - DNA, 98 bp, Homo sapiens
ccctcacctcgatgcagccagtagcttggatccttgtgggcatgatccataatcggtttcaagatgttgggggaaaggttatccacctggtggaacgg

SEQ ID NO: 825731 - DNA, 134 bp, Homo sapiens
cgagacagaagctgttctggccattgatgatgatatcattatgctgacctctgacgagctgcaatttggttatgagaccggttggagggtgacagatcagaaggctctggtcaagagaatgaaaatgaggatga

SEQ ID NO: 825732 - DNA, 100 bp, Homo sapiens
gaactacaagaacagagggattctttgactcagaaactacaggtcctaatcaaacaggaaattcaaaggaagagtggttatgccattcaggctgatgaag

SEQ ID NO: 825733 - DNA, 99 bp, Homo sapiens
agaggccaagactgcgttcctgctcaacatccagacctcaaaggaagaccttctgcaggctgattttgaaggtgctttaaagttctttagagttcagct

SEQ ID NO: 825734 - DNA, 105 bp, Homo sapiens
atggaaagaagttcctaacagacaaataaaaggctgcttaaaggtaaaatcaagatggggcattctcttctcccaccctcgggactttaccccagtgtgcaccac

SEQ ID NO: 825735 - DNA, 100 bp, Homo sapiens
aactgtttaaccggatcccattgtacccagagtgcagagccgcctttccagcatgcaggggctgctcaggtgggaaagcagtgccactctccgcttcaca

SEQ ID NO: 825736 - DNA, 100 bp, Homo sapiens
tccagcaggcggtgacccgctaccggaaggccatcgccaagtatttggcatgatcattactatcggccagtctatcgtgtatgtgatgaccgggatgtat

SEQ ID NO: 825737 - DNA, 100 bp, Homo sapiens
taatgctctgcagagacagaaagagagattggaaggagaaaatgataataatcatgtacatggacagccatatacaggaccagcagcacatcacttgaac

SEQ ID NO: 825738 - DNA, 100 bp, Homo sapiens
ctagccactttgcattgactggaaacaatggcatttacagaaagagtcaacagcagtggcaacaggagtggctgtaaggtgaagaagcatgaaactcagt

SEQ ID NO: 825739 - DNA, 100 bp, Homo sapiens
aaatagaggctttcaaagataattcgcagtgatgtgaaactggcctcccaagccctgataagagaccaagacacattccaccccagtggggggtcccata

SEQ ID NO: 825740 - DNA, 100 bp, Homo sapiens
cactgagtgggcactgtgctcctgttctggcttgtgctttttcccatgatgggcagatgctagtctcagggtatcttcaaagaacagtaaaacatccaac

SEQ ID NO: 825741 - DNA, 98 bp, Homo sapiens
aagggaatacaaaatggatttgtatgtgttgagactggcagaagatggaccagcaataaggaatgggaggatgaggaccagtcccagtgctgaccagt

SEQ ID NO: 825742 - DNA, 99 bp, Homo sapiens
aaggctttgccgcagttcatcttcctccctgtgtactttccatttgccttcctggaccattcctcaagaattttgtatccaaggcccaaaagtttgtta

SEQ ID NO: 825743 - DNA, 99 bp, Homo sapiens
gaattgggaggtcggcggccccaaaagttgtgatcaattattcaatcgtgaaagggctgaagtacaatcaggccacgccaaccttccaccagtggcgag

SEQ ID NO: 825744 - DNA, 99 bp, Homo sapiens
tggaatcctgcatacatatctgagctctgtgttctgcctacaacacagcagtcccctcaggatgagcaggaaaagctcttggatgaagccatacaggct

SEQ ID NO: 825745 - DNA, 100 bp, Homo sapiens
tgacaagggaatgtgcagaccaatatggccagatgtatgagaactttgtggaggaggtggatgctgtggacaatgggatctcccagtgggcagaggggga

SEQ ID NO: 825746 - DNA, 100 bp, Homo sapiens
gaagggctacgccagcggcgtcgagaggaccatcctgggtgctggccctgtgctggaggtaatctttagatggtggaagatctctctaaggagtgagtat

SEQ ID NO: 825747 - DNA, 100 bp, Homo sapiens
cggaaggggacgaggaaggaaacatggaactcaggcagaaattcgagggagaaaactggttgtcctggatgtttgaaaagttggtcgttgtcatggtgtg

SEQ ID NO: 825748 - DNA, 98 bp, Homo sapiens
aggaccagcagatgaatggacaccttgaagcagaggagcagcaggaccagactgaaggagcattaggttatgcgtattgggtctgcacaacattgcaa

SEQ ID NO: 825749 - DNA, 100 bp, Homo sapiens
catgactgtggcggcgggtggagcctcatctttcgctgtgtattctctttggaaaaccgatgtgatccaccaattaccctagttatgggcccatcatctc

SEQ ID NO: 825750 - DNA, 117 bp, Homo sapiens
gctttccaaaatggcgcgggtgctgaaggctgcagccgcgaatgccgtagatcacccggaagttcaggctgaattctgaaggcaaacttgagcagacggtctccatggcaaccacga

SEQ ID NO: 825751 - DNA, 100 bp, Homo sapiens
agagaattggaagctaaagctaccaaagacgtagaaagaaatcttagcagattctggaaaccaaaatggaggaaatgatgataagactaagaatgctgag

SEQ ID NO: 825752 - DNA, 98 bp, Homo sapiens
aggcccaccctggagtaaccctcactggagaatccagaggcttctcgtcagtgcctcgcaggatggtaaacttatcatctgggacagctacaccacca

SEQ ID NO: 825753 - DNA, 100 bp, Homo sapiens
gtcgccgttactccgaggagataccagtcggtagagggacctgagagtcagtatactaagactgcccaggagattgtgaacgtctgttaccagacattga

SEQ ID NO: 825754 - DNA, 98 bp, Homo sapiens
ttccacatggagattggcacaggaccagactcaagacacacaactcataacagttgatgaaaaattggttgaagaaattgtggatattggagcatttg

SEQ ID NO: 825755 - DNA, 99 bp, Homo sapiens
gtggacagaaagagtttgtatgccgcaagacaatattttgttcagtggtgtgcagacagaaatttcaccaagccgcagagtttaccacctaggatgact

SEQ ID NO: 825756 - DNA, 98 bp, Homo sapiens
gcagcctggcctgttcaccagagatctcccacctcagtgtgggttccatcttacttgtcactccacaggtcctggctaccctgggaagagacaagaag

SEQ ID NO: 825757 - DNA, 100 bp, Homo sapiens
tcactgtcctggctgtgctggccttagtgccccaggatcagggaggactgctccactttcaaccctggcaattgtggctctgggcacaggaatcaccttc

SEQ ID NO: 825758 - DNA, 100 bp, Homo sapiens
aaaacaaataagttatgctatgaggatgacaaactctggagtaattggagccaagaaatgagtataggtgtagatttggaaaatggtacttgcagtcatc

SEQ ID NO: 825759 - DNA, 99 bp, Homo sapiens
atattttgatctgccgtgatcaatatcaggaaaggccccatcttcccttcacacctggctttttcttctggggtggatctttccatggcttctccaaag

SEQ ID NO: 825760 - DNA, 111 bp, Homo sapiens
gaaaacatctaccaagactggcttgagagttccggaataccaaaggtggatgagaatggcaaaattagtcgccttcgtcgagagtgcccttctgatgaatgtggtgctggg

SEQ ID NO: 825761 - DNA, 100 bp, Homo sapiens
ccaaatggagctggaagcagtccagtggtgggagctggtgaggtggccaacttcgctgcgtatgcgtttgcaccagccactctagtgactccactaggag

SEQ ID NO: 825762 - DNA, 100 bp, Homo sapiens
tggcttcctggacaccaaccctgccatccgggagcagacggtcaaggacactttgccaccatcaccttgaccttcatcgacaagaacggagagactgagc

SEQ ID NO: 825763 - DNA, 98 bp, Homo sapiens
cggaacggtcgtggagaagaagagctgctgatgaggactgggacagtgtgtcccggcatggatatccggaacaacctcactaggttgcatgagctgga

SEQ ID NO: 825764 - DNA, 100 bp, Homo sapiens
attcgtcttcatgtggaaaatgaagataagaaaggggtgcagctacagtacaagttgtgcaaagtgaggaagattactgtgggagtgaagggaatccctc

SEQ ID NO: 825765 - DNA, 100 bp, Homo sapiens
gtgagatttcatgaagatggcgccaggacgaaggccctactgggcaagggcaaagtgcaattgctggggaagaacatcccagaggttcaattctgcggga

SEQ ID NO: 825766 - DNA, 117 bp, Homo sapiens
tctaggtaccatccctgacctggtcctcatgctgccgaggctgttgctgttgatctgtgattcgctgacccttgtggcgccctcttctgtcttcgaaggagacagcatcgttctgaa

SEQ ID NO: 825767 - DNA, 100 bp, Homo sapiens
atattattgcgatatatgccatttgtttgacaaagataagaagcagtatcactgtgaaaactgtggaatttgtaggaaactttgagggaaattttgagtc

SEQ ID NO: 825768 - DNA, 101 bp, Homo sapiens
tacaactacaaccagctggaaggcagattcaagcagctgcaagatttttggagcatatgcaactcatcctttcaagttcagtgaccactattatggcacag

SEQ ID NO: 825769 - DNA, 99 bp, Homo sapiens
aaaaagaaaaaaaaacaagattatttgcaaggggcaccgtattacttgaaagacggagatactattggtgttaagactaagaaaaatggctttgtcagc

SEQ ID NO: 825770 - DNA, 98 bp, Homo sapiens
gcgccgcgccgagccacccgcccgcccaaggtctctcgcgggcgggagaacggaaaactcccaacttcctgacgaaagtaggcggtacgaaccctaat

SEQ ID NO: 825771 - DNA, 51 bp, Homo sapiens
agaactggttctacacgcgagctgctgctacaggagctgagagaccctacc

SEQ ID NO: 825772 - DNA, 100 bp, Homo sapiens
gtgaccgaaatgaacgagctgctgaccaggcttgatgacctcacacaagatctgactgtatcccagctcagtgatgttgcggattatctggaagatgttg

SEQ ID NO: 825773 - DNA, 98 bp, Homo sapiens
ccgcgcccggggccgtgcgctctcgggccactcggccgcaggttcaaccttaaagtgcaattgcagattctggcaagcttcatgctcactggtgtttc

SEQ ID NO: 825774 - DNA, 100 bp, Homo sapiens
agagaagtttacaggccctctattgccaactgttaagagctggaagctatcaaagctcgagtcagggagatggaggaagaagctgagaagctaaaggagc

SEQ ID NO: 825775 - DNA, 117 bp, Homo sapiens
cccccaaagacaaaagacacagaagaaaaagtgggactgaagtacactgaagcaggtcatcatcagatttgaaatatttaaagtggatacaaaactatttcagcaatgcagacaatt

SEQ ID NO: 825776 - DNA, 99 bp, Homo sapiens
tcacagctccaagaatttctaggactgaattatgaaacttttggaaggtgtgatgaatgcagactctgctaccattttggctgtttggatcctcctttg

SEQ ID NO: 825777 - DNA, 100 bp, Homo sapiens
gaagttacctgattgtttaattagaatgactaccacctctgtctgattcaccttcgctggattctaaatgtgactctggaaaatcccaagtatgaactga

SEQ ID NO: 825778 - DNA, 98 bp, Homo sapiens
cctgcgggtgcctttgaaaatcaacgacaacttgagcacaggtgtggccgacgacgatgccctcgctgaggagcgcatgcggagaggccagaacgccc

SEQ ID NO: 825779 - DNA, 100 bp, Homo sapiens
cccctgaattgtacccttgtttcagagcctaacagtgtatcgcattaagttcaaggagagctttgctgagatgaacaggggctcgaacgagtggaagacg

SEQ ID NO: 825780 - DNA, 99 bp, Homo sapiens
ccccgtcctccttcgccgccgcgcacaaccgcacgtgcaggtactccaaagattcaggtttactcacgtcatccagcagagaatggaaagtcaaatttc

SEQ ID NO: 825781 - DNA, 100 bp, Homo sapiens
accgccctcaccacccctatccagacggctgcccttcaagtaccagactacaaatccctccaggatatcattgccatcctgggtatggatgaactttctg

SEQ ID NO: 825782 - DNA, 98 bp, Homo sapiens
gcatattttgcgagtactcaacaccaacatcgatgggcggcggaaaatagcctttgccatcactgccattaaggtccaggaggtgcagcccatcacca

SEQ ID NO: 825783 - DNA, 100 bp, Homo sapiens
gacctggggaacctgctcaaagccctgggtcgcttggaagaagccaagtccctcaacaccttacactaagtcaaagcgtggccacagagaagaggagcaa

SEQ ID NO: 825784 - DNA, 98 bp, Homo sapiens
cctgctgcacaggtggcctccgaacccgggaaaagaggaactaaggcggaggaactgagacgtttcgaattccagtttcatgatcaacatgggagact

SEQ ID NO: 825785 - DNA, 99 bp, Homo sapiens
gggcttctgcagcgccgatggctccgacccgctctggtgagaaagatcagtctaaagaaaaggagaagaaagtgaaaaaaacaattccttcctgggcta

SEQ ID NO: 825786 - DNA, 100 bp, Homo sapiens
ccccttgcacacctaccctaaggacagggtgtgggccaatgtggggaagagcctgaactgcattattgctatggtggacaaactgattgaaagagatggt

SEQ ID NO: 825787 - DNA, 100 bp, Homo sapiens
taccattttgccaaaaattcttcaggagctctgccagtgccggccgggagaaggcaattgctcctgctgtaaggagtgcatgctgtgtcttggggccctt

SEQ ID NO: 825788 - DNA, 100 bp, Homo sapiens
ggcgacggaggaaacagaagatggatgttctgctgcttagccagttcatccggcctcatggaggcatgctgccccgaaagatcacaggcctatgccagga

SEQ ID NO: 825789 - DNA, 100 bp, Homo sapiens
acttgattacccgttaagtcccccaaagatgagatttacctgtgagatgtttcatcccaacaagtcctgttcgatttgatacctttgatagcctttcact

SEQ ID NO: 825790 - DNA, 100 bp, Homo sapiens
tcttccaacaggtcgtcagcaagatggacaacatcagccgagccgcggggggtctccatctgttgtccaaggctggagtgtagtagtgctatcacagctg

SEQ ID NO: 825791 - DNA, 100 bp, Homo sapiens
tgagtgggatggtggaagggaaacacacttggagacaaacttcactttaaaatctgaatgagcagcagaggtgagaactcagaagagaaatacagctggc

SEQ ID NO: 825792 - DNA, 120 bp, Homo sapiens
acatgagctacttgaagaggctatgtggtaccttcctgggtgggcccaagccaccccagagctcacggatgattgatatccagaccaggatggctgggcgagcattggagcttctttatc

SEQ ID NO: 825793 - DNA, 100 bp, Homo sapiens
gctcttcgagaggataatgcctactgtgaaggtcatccatctccagccccacctgaccagctcaacaccagcagtgcagagagtgagctctgggagccag

SEQ ID NO: 825794 - DNA, 100 bp, Homo sapiens
gggacatggccacctgggacgaaaaggacataagcagctctatgaccaatagcacagctgccagtagacccccggtcaccctgaggctggtggtccctgc

SEQ ID NO: 825795 - DNA, 99 bp, Homo sapiens
ggggcctggcccccgggactccctgtgccttgcttggagctgacgccgacggaaaaggtgtgagcggtactgggcccaggagcaggagccactgcagac

SEQ ID NO: 825796 - DNA, 113 bp, Homo sapiens
cttgattgtgacctctgtggaaaatgagccatgaaccaaccaataatgaacagccccatctgatttaatcactgtgcaatgaccgtgaactgtacagttacctccgtgtgtca

SEQ ID NO: 825797 - DNA, 100 bp, Homo sapiens
cgatagttccctttctagaaaggccaaatttgagtttcatcatggtgactatgaaaaacagtttctgcatgtactgagccgcaaggacaagactggaatc

SEQ ID NO: 825798 - DNA, 100 bp, Homo sapiens
aggatcacctgctaatacacgatacctttttcttggcgattatgtggacagaggttattttagtatagaggtgggaccatccagttgcaggaaaacaagc

SEQ ID NO: 825799 - DNA, 100 bp, Homo sapiens
agcttaactctggctactatgtatctgggagctcctcaggcttccaggggggccagatcacactcagcatgcagaaggaaacagagcaaatgcagcgtta

SEQ ID NO: 825800 - DNA, 147 bp, Homo sapiens
gcacacacacatccctaggttaatacctgtcataacaagcaactgtacctctaagtctgtcgcagttagaagaaaatccaagagaggtcccaagcaactagcccctcaccccaacatcatccgggttctccgcgccttcacctcttc

SEQ ID NO: 825801 - DNA, 100 bp, Homo sapiens
acggaggggactggagctggagagtgactgtagagcctcagggcagcaggatgggtgtggaagcagtgatggcacttttggaggggaccccagatacccc

SEQ ID NO: 825802 - DNA, 98 bp, Homo sapiens
tagaagagtcaataactgaagacttaagaattccttgtgtggatatcagatccggatggaatctcgagcttgtgaatctaccaggttactctattgta

SEQ ID NO: 825803 - DNA, 99 bp, Homo sapiens
tgcagacaactaagcgaggggatcctcatgagttaagaaacatatttctacaggccgggtgtggtggcccatacctataatccctgcacttcgggaagc

SEQ ID NO: 825804 - DNA, 99 bp, Homo sapiens
ccaaggagctactgcaaatgtctttcgtggaagacataagatgaagcattttttgactctgaaaatgaccctgaaaagtgctgcttgctgttgcagttt

SEQ ID NO: 825805 - DNA, 98 bp, Homo sapiens
gtctgacaacgtggatcgttgttttgaaacattgttaccagcgcttagaattcctgggagatgcgattttggactacctcataaccaagcacctttat

SEQ ID NO: 825806 - DNA, 100 bp, Homo sapiens
tgcgacacaacttcatgcagttagaaagacccggaggcctcgatacactctacaagatgttgcttcagagtgtgaagtcaaatgcatgccaacattccag

SEQ ID NO: 825807 - DNA, 100 bp, Homo sapiens
cgggcctgatcaaacttgccttcctgttctccaagaccaggaggcatacacggaatacctgaggagcatccactatatctcccaggtgttactagaagaa

SEQ ID NO: 825808 - DNA, 98 bp, Homo sapiens
ttgtctctttttcttggatggttgggagcagatcgattttaccttggataccctgctttggctccacctgaagaagattgtacatcagtcacagacct

SEQ ID NO: 825809 - DNA, 99 bp, Homo sapiens
acccgttcttgcctcaggccagtcgcctccaggccaagagggatccttcacccgtgtctgattcctctctttggtgctgacactattggccagagaagt

SEQ ID NO: 825810 - DNA, 98 bp, Homo sapiens
tgtaatacatcatgaactgcaggatactctggatgaatattttgaatatgatgcagaggagttcttggtctctttggccttgctgataacagaaggac

SEQ ID NO: 825811 - DNA, 100 bp, Homo sapiens
tccatttatagacacccttcattgcaagttcttatttgtaagctaaacatgaattcagctccaactttcatcaactttcctgcaaaagggaaacccaaac

SEQ ID NO: 825812 - DNA, 99 bp, Homo sapiens
gtggcgtcccccatggacgacgggtttgtgagcctggactcgccctcctatgtcctgtacaggctgtgaggatatcattgctgagagcatctcattaga

SEQ ID NO: 825813 - DNA, 98 bp, Homo sapiens
agacagatcgctgtcaaaaccctagcataagcttaaatcgtctcagaaggacaaggtccgccagtttatggcgtgcactcaggctggcgagagaactg

SEQ ID NO: 825814 - DNA, 100 bp, Homo sapiens
gaaggtccttccagcctggcaggttttaccaattcttgagattctgtatcatgttgaagaaaggaattcacaccatgtgtatatggcccttataatattg

SEQ ID NO: 825815 - DNA, 100 bp, Homo sapiens
cggcgatggagctgttatttttagatacttttaaacacccgagcgctgaggaaactgttaaggcagcaataatagaagagcagaaacgaagtgaaaaggc

SEQ ID NO: 825816 - DNA, 100 bp, Homo sapiens
gattactgcgagaacaactacatacagatagatggctccccaataccagaagtgagttcggcaaagagaaggccacggagaatgaccccattttggagag

SEQ ID NO: 825817 - DNA, 98 bp, Homo sapiens
ccccatcctccccgccccatcggttgttgtctgggcggggcatccgcttcgatcctgaaattccgcaaacactacgactagagtttgctaaggcaaac

SEQ ID NO: 825818 - DNA, 100 bp, Homo sapiens
aaggaccacgccggatggcagtgttggtgaggcagagcatatggaaaatgaaccttctgataacttaagagagattctccaaaatgtggccagattgcag

SEQ ID NO: 825819 - DNA, 100 bp, Homo sapiens
cgaggatgtgtacgagctgtgcgaggtgatcggaaaagatcctgcagatcattcagctggacctagacctgaagtttaagaccaacatccgggagttgtt

SEQ ID NO: 825820 - DNA, 100 bp, Homo sapiens
gcccgagccctctaccagcacgccaacgttgtcttcttgctctctggaccttcctgtggtttgttggtttctgcttcctcaccaaccagtgggcagtcac

SEQ ID NO: 825821 - DNA, 100 bp, Homo sapiens
gccagactcagggatcaaagagcaaacagattcagtggcctgcattggtggaaaaatgctaatcactgaaagaaaacattttcggtcaggaagaattgca

SEQ ID NO: 825822 - DNA, 99 bp, Homo sapiens
cgagagcgtgaccgagagcgcgaatatcgtcatcgttagaagagcaagtggaattacctgctgtggcatcagtcagtgcttcagtaattaaatctccat

SEQ ID NO: 825823 - DNA, 100 bp, Homo sapiens
ataaaaacagtcgccttgcacaggcctggtttaacactcatagggagcttttggagagcaactttactttagtggcttctccaaacaggctggtgtacag

SEQ ID NO: 825824 - DNA, 100 bp, Homo sapiens
ccaaatctgttttggatcaagatgatgtggacacctcaatggaagaatctttgaagttgattatggaagattcccacaagagtaccacgtcagagacagc

SEQ ID NO: 825825 - DNA, 100 bp, Homo sapiens
tatgttcaggaccatttagtctactacacttgctgctttgaaggatgaagttgtatctgttgaaaatgaactctcagaattgcaagaagtagaaaaaaaa

SEQ ID NO: 825826 - DNA, 106 bp, Homo sapiens
agtaacatacagcactttgtggagaaagtcgtcttccacttgcacgaaagctttcctaggccaaaaagagcacacttccaccctgggcagcgtgtttggggacgcg

SEQ ID NO: 825827 - DNA, 100 bp, Homo sapiens
tgtatctggggcagatgatcgtcaagtgaagatctggcgcatgaatgggtggcatggagaaatcgttgtcaaaacagagatgtccgtcagtatgttcaag

SEQ ID NO: 825828 - DNA, 101 bp, Homo sapiens
agaaggaaagcaccatgacgtccatccatttcgtggttcacccgctgccgggcaccgaggaccagctcaatgacagtgaacagagtatctgccaagcccgg

SEQ ID NO: 825829 - DNA, 98 bp, Homo sapiens
aaaagcacatttacagcctaatgcgtgaaagtgatcctgggcgaggatcgggaagccacgggcgtcctactgagcattgatggtgaggatggcattgt

SEQ ID NO: 825830 - DNA, 99 bp, Homo sapiens
agatgtgaacttccagggcaagaacctggacaccgtgaaggtggcagtgctccttttggacttttctctaggtttggcgctaaactcttcttgtgagct

SEQ ID NO: 825831 - DNA, 100 bp, Homo sapiens
gtgaaattcaagcttctcgccagcattgtgaggttcaagcaataaatgcgggagtgtttttctttaggtgtacaatatgcaataatagtgacatctttca

SEQ ID NO: 825832 - DNA, 100 bp, Homo sapiens
cgccgctcctccaactaccgcgcttatgccacggagccgcacgccaagatgaactgcctctcctcctccctgcctggggagcccagtggccagggagggg

SEQ ID NO: 825833 - DNA, 98 bp, Homo sapiens
gcttcacctcttcgccggcgggtcatcatcagatttgaaatatttaaagtggatacaaaactatttcagcaatgcagacaattaagtgtgttgttgtg

SEQ ID NO: 825834 - DNA, 98 bp, Homo sapiens
cgtttctcgggagcagttcatgcagcacctctacccacagtgagaaagatcagtctaaagaaaaggagaagaaagtgaaaaaaacaattccttcctgg

SEQ ID NO: 825835 - DNA, 99 bp, Homo sapiens
gggacgcgcgtacgccctgctgcttctcctggcatctaataggattcaggaatcaaagaatcagtgtactcaggtggtacaggaaagagagagccttct

SEQ ID NO: 825836 - DNA, 98 bp, Homo sapiens
ttgtcatgcaagccgtccagtggcaaacacgtctacaaaagaagatgggaaaggaatctaccatggcaaaagttataaccaccgtactgaagttccct

SEQ ID NO: 825837 - DNA, 50 bp, Homo sapiens
cagccagctggcccccagggccctgcaggcagaactggggctcccttgca

SEQ ID NO: 825838 - DNA, 100 bp, Homo sapiens
gtggctgctggcatggtgttggacatcgtgcaggtggtgaaatacagactaagagcagggacttgcctccagtcaagaagcttccagaaaaggagcatgg

SEQ ID NO: 825839 - DNA, 98 bp, Homo sapiens
aactggttgaaggggaccaggaggttggacacagaccattgcaatggaaatgttaatgaaggagttcccccttctgagtatgttcaatatccatgaaa

SEQ ID NO: 825840 - DNA, 100 bp, Homo sapiens
aggagttgccgcagccccaggctgagacaggttgtcccagttttggtgcatctcctgtctgctatcagcagtgttaggctttacattcctaaagaccttc

SEQ ID NO: 825841 - DNA, 99 bp, Homo sapiens
tggaccctggagtacaccccgcagcacagccgcgacttcaagatctgactgcagccatgagcagcaatgagtgcttcaagtgtggacgatctggccact

SEQ ID NO: 825842 - DNA, 100 bp, Homo sapiens
gccgccgccgccacccccgggctcggggtggcccccgcttcagtcccagggcagttagaacctggcccattagatgaaacccagatcgctactatattaa

SEQ ID NO: 825843 - DNA, 100 bp, Homo sapiens
taacagtgatggtcatcactgtagccacgcttgtgtcattgctgattgattgcctcgggatagttctagaactcaatgaacccaagccagaccgtctcct

SEQ ID NO: 825844 - DNA, 100 bp, Homo sapiens
cagacggcagggagtgcatcaaaggtgtgaacacagattttgaaatcagaatggacactaacaggaatcaagtgctaccactttctgatgtggatacaac

SEQ ID NO: 825845 - DNA, 100 bp, Homo sapiens
tcccattatgtgattgccatctttgccctgatgagctcctgtttagccactgcagatagaagcagatttgggatatcctggaggtaaagcaagaattatt

SEQ ID NO: 825846 - DNA, 99 bp, Homo sapiens
tccagtatatcacgcgcttctgcaatccaagccgactgatgactggagaggatggctactatttcaccaatctggtccatgtgaaatctgaggtccttg

SEQ ID NO: 825847 - DNA, 98 bp, Homo sapiens
cccggcagcgggaacacagagagcgaagccaggctgtgctactcatggacgccgaaaagcgtatccggttactgcagtttgtcacagggacatcgcga

SEQ ID NO: 825848 - DNA, 100 bp, Homo sapiens
atgggacactgagctttgtggaagcatttggcggcataccaccctgcactgtgagctctggttgaagaagtgtattttgcgcagaaggaacgtgatgaag

SEQ ID NO: 825849 - DNA, 99 bp, Homo sapiens
accccacgcgctctgaggacctactggattatgggcctttcagagatgtgcctgcctatagtcagattcgggaacaaaatcgatatgacttgaaaacag

SEQ ID NO: 825850 - DNA, 99 bp, Homo sapiens
ttgtctccgatccagaggatctgcaagtacccgctcctccttaagttgatattcactgatggactccaaagaatcattaactcctggtagagaagaaaa

SEQ ID NO: 825851 - DNA, 100 bp, Homo sapiens
cacatcgaccggcgacagcagccaggagtcatgagcgacagcggcgagcagaactacggcgagcggagagtccggagggctgtgctaccccaagaagagg

SEQ ID NO: 825852 - DNA, 100 bp, Homo sapiens
tcagaccgtacaggttgagggatgggactggaaatcaaatgttacagaggcatttcatccttcatgaagccattcaggattttgaattgcatatgagtgc

SEQ ID NO: 825853 - DNA, 98 bp, Homo sapiens
ggcgggaagatggcggccgcgaccccggccccggcctcggccgtggcgagcggtgctgaagctgctgaaagatggcagaagaagtggtggtagtagcc

SEQ ID NO: 825854 - DNA, 98 bp, Homo sapiens
gcctagcacctcttatactgatgaattcgaatttagagtttaatttctcagagcattctctccaggaagaatttttacagtatctcaaagacttcact

SEQ ID NO: 825855 - DNA, 75 bp, Homo sapiens
ctggatgaaaactacaaatcccaggagcacttcacggtggacccccaaaagtacaagggcatatttaacggattc

SEQ ID NO: 825856 - DNA, 100 bp, Homo sapiens
tgttagaaaagcagaggctatactttaagactgtgaaagagttcaaggaggatttctggtaggtcctactttaggacaagatgtggtaccgttgaagcgt

SEQ ID NO: 825857 - DNA, 100 bp, Homo sapiens
aagcgaaaacatgaccgctgagcccatgagtcctattttgtaacggattatgatccaaccattgaagattcttacacaaagcagtgtgtgatagatgaca

SEQ ID NO: 825858 - DNA, 100 bp, Homo sapiens
tgttgttactgatgcagagatacagcaaaagagtctacataggccgggtgagagcaaaactttcagcaccacttgctggcatgggaaatgccaaggcaga

SEQ ID NO: 825859 - DNA, 100 bp, Homo sapiens
aaaccgactggaaagtcattgccattaatgtggatgatcctgatgcagccaattataatggtcacggtctagatcacattctcgatccagaggaaggcga

SEQ ID NO: 825860 - DNA, 99 bp, Homo sapiens
tagcagctcttgagcaggcagcttacaagttggatgcatattcaaaaaaactggactattgcccagaagaaaagatgtttggttttcacaagccaaaga

SEQ ID NO: 825861 - DNA, 100 bp, Homo sapiens
tcttctggccctgggggccgcagctccagcagtacccgcggctacgggaggagatggagcgcatcgtgaccacccacatccgggagcgcgagggccgcac

SEQ ID NO: 825862 - DNA, 102 bp, Homo sapiens
tttaattgacccagctgagattgatctcctattaattagtcaatgagaatcccaagcagcacattcccctggaggagtacgctgcgaacctaaagagcatgg

SEQ ID NO: 825863 - DNA, 98 bp, Homo sapiens
acaagaattacagcagccaacctatgttgccctgagttacataaatagggtgcctttagccgtctggacccaactggaacatttgagaaagaaatgat

SEQ ID NO: 825864 - DNA, 98 bp, Homo sapiens
tctgctgcaaggaactgatagcttatggttctccattgtgatgaaagcacatggtacagccaagtgcaaggtggttatcaccttcaaccaaggactcc

SEQ ID NO: 825865 - DNA, 98 bp, Homo sapiens
cgatcgcaggcttccacctggcggccaggcaacacaactatttatgtgctggaagaaatgattgcatcattgataagattcgacgaaagaattgtcct

SEQ ID NO: 825866 - DNA, 98 bp, Homo sapiens
tcagtcttctgctgcatgacagctatgactacgacctgcaggaacaggctcagtttatgaacctcttaaaagcattaatcttccaagacctgataatg

SEQ ID NO: 825867 - DNA, 98 bp, Homo sapiens
gagagtcttggaaatccattctgaattctctgtatgagttgctgggttataatcaccaacagatgagtgaaggacacaggcagaaatctgaattttat

SEQ ID NO: 825868 - DNA, 99 bp, Homo sapiens
gcgggggacactgcagccggagcccgggaggggccgcgccgccaccgtctgaactaggatgtcccgacatgaagatacttgccagaactaatacagctg

SEQ ID NO: 825869 - DNA, 100 bp, Homo sapiens
aggaacaaggaaatgcatactatgccaagaaagattacaatgaagcttataattattatacaaaagccataggccataggaaaaggatacagagtagagt

SEQ ID NO: 825870 - DNA, 101 bp, Homo sapiens
ccagctcccccgcctcggggagggcaccagaattatatccagatcgagagacagaagattctgaaagggttcaatgaaatgagagtcatcttggacaatga

SEQ ID NO: 825871 - DNA, 100 bp, Homo sapiens
ctcacgggcaccagggcttcgccagcgggccagcaacaaagtgcaaggtcaagagcaatctgaatccaaatgcaaaggagtttgttcctggggtgaagta

SEQ ID NO: 825872 - DNA, 100 bp, Homo sapiens
tgttgaaggatgggacagatggctgtgcattagctgcccttattcatttttactgtcctgatgttgtcagattagagggaatgtttacccttgcggaagt

SEQ ID NO: 825873 - DNA, 100 bp, Homo sapiens
aaggagctgattcacgaaggagagcgtttcaaccgtggcatttgctctctgcattccagttagcaaatgggtatgccagtactgaggttgatggagagcg

SEQ ID NO: 825874 - DNA, 101 bp, Homo sapiens
ttaacaacgttaccagcatccattgcaaaccttattaatctcagggaactggatgtcagcaagaatggtggatactttaatactgataagccacaccccag

SEQ ID NO: 825875 - DNA, 99 bp, Homo sapiens
agtccagaagacaggccacagtgtcctgggactccggagggtctgatgaagcaccgcccaagggggcagtacccaaaggaaacgctacgaaagaataca

SEQ ID NO: 825876 - DNA, 123 bp, Homo sapiens
acactgatgacggcctagaagccatcatcttcacggcccagggagacatgaggcaggcaatctgaaagcaaatcctgtttagatgcaggcgaaggttcctggtgacccaggctctcaccttac

SEQ ID NO: 825877 - DNA, 100 bp, Homo sapiens
gcgcagcccggaaatgtccggcaagatcgagaaagcagatccaggaggctgcaagccagggcctgaaattcgttggtgttatacctcagtaccattcctc

SEQ ID NO: 825878 - DNA, 98 bp, Homo sapiens
gaagccctttctcctcggcactgtattctttacctgcttcccaatcccactgatgaggatcagcccatgtttaagctatgaagaaggacatccctcac

SEQ ID NO: 825879 - DNA, 100 bp, Homo sapiens
cgtgacccgcgtgtgccctaagcacacctggagcaacaacctggcggtgctcgagtgcctgcaggatgtgagggaggtaatggtaactcgggatttgaag

SEQ ID NO: 825880 - DNA, 100 bp, Homo sapiens
tgccgtcatgtctaagtcagaggagtatgctgctgctgttccgctttgcgtcctcgctacaaacgcctggtggacaacatattccctgaagatccaaaag

SEQ ID NO: 825881 - DNA, 100 bp, Homo sapiens
tgttataaaaaggaaaaacatcttgatctggagaaaaactggatgttggtagaaaaagcaagagtttgttatatagcaacagcaccagttgcccttgaag

SEQ ID NO: 825882 - DNA, 100 bp, Homo sapiens
gcctgaagttgatccgctgtatgcagttttatccttttctgtacaacatcacttcttctgtttgcagtggtatctgctgtgcgtttcagtcaacaataca

SEQ ID NO: 825883 - DNA, 133 bp, Homo sapiens
gctgagttccaggcactgtgcagcagtgggcttggcattaccacggatggtcgagaggtggaatggtgcaaaccagtgagcagtatgaatttgtgcaccatgctctgtgcctgtatgagagcagactttcagc

SEQ ID NO: 825884 - DNA, 98 bp, Homo sapiens
atattcttctcctggttaatcaagaattctctatttctgctccgtcatccatgccactgcttgaatgaagagttggtccagctgcttctcatccgaga

SEQ ID NO: 825885 - DNA, 100 bp, Homo sapiens
tggggatcttcgcactatcccaagggaccagttactctccacaagaaaattcacacaaccacagtgctcttcatagttcaaattcacattcttctaatcc

SEQ ID NO: 825886 - DNA, 99 bp, Homo sapiens
gaagttactgccgcgccaccgagtccggaccggagactttggggcctaactaggcccacagcagcagaacttttaaaatgcaaattcttccagaaagcc

SEQ ID NO: 825887 - DNA, 98 bp, Homo sapiens
aaggatttggcaacagactttgtttcttggagtccacttccaattccaagatttgtgaagctgggaatcatttcatcaatgtaatgttgtctcatccc

SEQ ID NO: 825888 - DNA, 98 bp, Homo sapiens
aaagtggcacaattcggctggactgtttcactcattgccttatagttaagtgtacagcagatattttgctgaaatcagaagccatccagacctctcat

SEQ ID NO: 825889 - DNA, 100 bp, Homo sapiens
agagtttgtggacagatttatattgggagttcccattagacttgaagttgggccacgtgatatgaagagctgtcagtttgtagccgtcagacgagatact

SEQ ID NO: 825890 - DNA, 100 bp, Homo sapiens
ctggcaaagtcatcagttgccaattgttacatacgaaactaacatccatgatagcagtcttctgtaaatcgaacttttcaagaattctctgaaggaacca

SEQ ID NO: 825891 - DNA, 100 bp, Homo sapiens
gaggaaccaccggatcgaagacagtcaagtgtagactctcgccaaagccgctctgggcaagagttgtctgctggttctcagcttgaagaagattctgcag

SEQ ID NO: 825892 - DNA, 100 bp, Homo sapiens
ctgcagcccgcgcacagctgctcccttcgccttcgccctttccacctcgcggcagttcggcatctaataggattcaggaatcaaagaatcagtgtactca

SEQ ID NO: 825893 - DNA, 100 bp, Homo sapiens
gagctccagcgtctgcattgctccggactcagccaagttccccaacggctccccgtcgtcctggtgctgcagcggtgctgactgggttacttttttaaac

SEQ ID NO: 825894 - DNA, 98 bp, Homo sapiens
gagctctcggaggaggacctgaagcagctggttggcagtggcaatgacccctggtcagcctggagtgcctccaaatctgggaactgggaaagctcaga

SEQ ID NO: 825895 - DNA, 100 bp, Homo sapiens
ccaattatgggagggctggccaacttctgctacagacgactcagaacctgatgaaatgcctggtctaacaggaggatgcagagaaagttatgaagagagg

SEQ ID NO: 825896 - DNA, 100 bp, Homo sapiens
ttaaagctgagctgcgaggaaaatggcggcgggaggtgaccttgaggaaccctgggagctcaggaaggaaggagcgcccagaagcagggacagggagctg

SEQ ID NO: 825897 - DNA, 99 bp, Homo sapiens
caagatctcagtcagagtaggaaataattttcacaaccttcaagaaattcgggtttgtggtaaatatgccagctctagaacacatgaatcagattttac

SEQ ID NO: 825898 - DNA, 99 bp, Homo sapiens
acagagtcagcatcagagcagcaggagggaaaatgaagaaggaacgatctcgtaagaaggattcagacgccaggaaagcatgtgcagatgcaactctct

SEQ ID NO: 825899 - DNA, 100 bp, Homo sapiens
cagattttgaaaccgatgagaagattgtaaaatgtaccgaggcctggttgcagtatgcctgaaatttgggatgtagaagatcctgccaatgctgggaaaa

SEQ ID NO: 825900 - DNA, 100 bp, Homo sapiens
tgtgctgccagcaagaaatgatcagtagcaccagtgtttatgtggctgtgtggagtggtgtgaatgtggcaggtgtttctctccaggaattgaatccaga

SEQ ID NO: 825901 - DNA, 99 bp, Homo sapiens
tggagcccaaagacccctggagacatgacttgtgcaccatggacaattttgctgagggagatttcactgtggcggattatgccttgttagaagattgcc

SEQ ID NO: 825902 - DNA, 100 bp, Homo sapiens
agctactgcagacgacgagctgagcttcaaaaggggggacatcctcaagttcccagtgacctgacagcagaggagcgtcaagaactggagaacatccgac

SEQ ID NO: 825903 - DNA, 98 bp, Homo sapiens
tggcccctccaagagccccagggcccctgagcaagcagggctctggcagcagccaggtggatgcccagctgacgggaagaatcagccagaaggcagaa

SEQ ID NO: 825904 - DNA, 98 bp, Homo sapiens
gtttcccaacagtgatgtcacaagattgaccacattgatcacagcagataaaacgtcactgtgcagagccttttacagaatattggacttgcattgat

SEQ ID NO: 825905 - DNA, 100 bp, Homo sapiens
ccagtgggcacactggccttagaggtgaagggacagtgctgtccagactgcacatcagggtggttctcttcccaaagtggaagccaaattcatcaattat

SEQ ID NO: 825906 - DNA, 99 bp, Homo sapiens
tttttatgctgtgtgctggagttacgcttgtacagtggaaaccagcccaagctacaaaagtggtggctttggatctggctgccctctccacagaacatt

SEQ ID NO: 825907 - DNA, 99 bp, Homo sapiens
tgcaatcctggagccccccagtgaggatgatgctcttgcacttgagatgacatcttcttgcagcaagagtgctgatatcccaagaggagagattcatgg

SEQ ID NO: 825908 - DNA, 98 bp, Homo sapiens
tgggggctgcggtcggcaaggaagcggagggggccggagaagagagctctggggtcgacacgccacataaagaagatccctaatagtcatttctcaac

SEQ ID NO: 825909 - DNA, 98 bp, Homo sapiens
actcaatatttcacctgatacaagccatgccttgtgttcaggcgcagtatgggtcctcgcctcaaggagccagccccgcttctcagagctacagttac

SEQ ID NO: 825910 - DNA, 100 bp, Homo sapiens
ttaaacaagaatccactgttgctactgaaaggactccaaccgggaagactttgacccagcacctgtaaagagcaaatttgattctcttgactttgacaca

SEQ ID NO: 825911 - DNA, 98 bp, Homo sapiens
gcaagcgggtgctgctcatctgcctcgacctcttctgcctcttcatgggaggagatgaccgccgggttctgctatggcacatggaacaagccatccac

SEQ ID NO: 825912 - DNA, 100 bp, Homo sapiens
ggacatcaagattaaaagagcgaataaagtttatcacgccggggtgtgatgaatgcagactctgctaccattttggctgtttggatcctcctttgaaaaa

SEQ ID NO: 825913 - DNA, 98 bp, Homo sapiens
cccaccattgaagactcctacctgaaacatacggagattgacaatcaatgggccatcttggacgatcattgagactgaaaatatgatggaccgaattg

SEQ ID NO: 825914 - DNA, 100 bp, Homo sapiens
tggcagccgctgagcccgacccccaggcagctcgccgctccctagcaccttctccagtcgacactctcgcgcccggagtgatggaatggggagaagatat

SEQ ID NO: 825915 - DNA, 51 bp, Homo sapiens
caatgcagagctcagctacttcatcacagacatcacggctgcagccctggc

SEQ ID NO: 825916 - DNA, 99 bp, Homo sapiens
tggacccggacccaaagtgccatgtctttaatgacatggacatcttccagcaacagatctcgagaagacagctggctaaaatccttatttgtccggaaa

SEQ ID NO: 825917 - DNA, 100 bp, Homo sapiens
ttgtagaacagctatctcgggagaaacaacaactgctacatctgttggaggagccaactagcatggaagtgcagaacatacatatgatagttgagaaaga

SEQ ID NO: 825918 - DNA, 100 bp, Homo sapiens
tgcttgcctgtgcgcgcgtgcgcggacatggcctcaaacgggagtggacatccgccataacaaggaccgaaaggttcggcgcaaggagcccaagagccag

SEQ ID NO: 825919 - DNA, 98 bp, Homo sapiens
tacccaggcctctgccagtccccgttcctggattctagcaggacccttcgcagctccttcctgctgcttctgctggtcagtgcctcctggctctttgg

SEQ ID NO: 825920 - DNA, 100 bp, Homo sapiens
aaatgcctatgaagagtgtccttctggaattcccatagatatgtggaatacctcagaaagtactactacagtaaaaagcaaagttgatgaaagagaaaaa

SEQ ID NO: 825921 - DNA, 99 bp, Homo sapiens
cactgatgaggatcagcccatgcaatcatcctcttccagtggtagcgtgtttgggtctggaaacactggaagagggggaggtttcttcagtggccttgg

SEQ ID NO: 825922 - DNA, 100 bp, Homo sapiens
cttccctgtgggctggtgttccttgactggagacaacctgcagcctcctggcaccaaagacttgtgtgcgagacagagccactctttctatcctggctgt

SEQ ID NO: 825923 - DNA, 98 bp, Homo sapiens
cgagacgcactgggggccggatgagaaccatggagtctggcagtaccgccgccagtgaggaggcacgcagccttcgagaatgtgagctctacgtccag

SEQ ID NO: 825924 - DNA, 99 bp, Homo sapiens
tcctgaagcagctgctctagtgaaaactcccccactggaaaggattctgaaagaaatgaagtcagccctcagaaatgaagttgactgcctgctggcttt

SEQ ID NO: 825925 - DNA, 100 bp, Homo sapiens
tttgaaggagaatacacacatcacaaagatcctggaatatataaatgtgttgtttgtggaactccattgtttaaagcatctgctgcacccaagcctgagc

SEQ ID NO: 825926 - DNA, 100 bp, Homo sapiens
ctcatctgtgagaacagaagctttatctgtgatagaattgctgcttaaaaaacttgaaggttcatgcatgggagatctcagaccagttgttacagatccg

SEQ ID NO: 825927 - DNA, 100 bp, Homo sapiens
gtcgtgatccagaagtccagagctgaggactgcctgtttgcaggtgctatcagtgctaaagcattcattgctgtccttcaagcaacccagagtcatggac

SEQ ID NO: 825928 - DNA, 99 bp, Homo sapiens
ggcaacaaacgcaagctctctacagccatggctttgatcggcgggcctcctgtggtgtttctggtgacttaagagattaaaattaatttggttgctgtt

SEQ ID NO: 825929 - DNA, 99 bp, Homo sapiens
ggcatttcagtcactggtttgcagagtccaggaattcctcctgatcagcagagactgatctttgctggcaagcagctggaagatggacgtactttgtct

SEQ ID NO: 825930 - DNA, 98 bp, Homo sapiens
tacctcccagcggtgtttgaggaggttctggatttggtggacgccgtcatccttacggaaaaggaaatttacctgatcctggtaaggctcaggatttc

SEQ ID NO: 825931 - DNA, 100 bp, Homo sapiens
gaagaactcgcaaaagctcagaggtttaaggaagaaatctctaaacgttttaaatcacatactgaccaacttgtgttgatatttgctggaaaaattttga

SEQ ID NO: 825932 - DNA, 100 bp, Homo sapiens
atcgtctggtacagcagcttaagcagcagactgccagtgtgacctcaccctctccagtcacccctcctcagttccagctatgagttcctgcaacttcaca

SEQ ID NO: 825933 - DNA, 100 bp, Homo sapiens
gtcagatcctctaccttttacagaatttgtgcggtacatttctacaacagccttatgggggattttggcaattgcttggagcatggcagatcctgaattg

SEQ ID NO: 825934 - DNA, 124 bp, Homo sapiens
gatctgtaattacagctactccagcaacatcttgtccataaggctgaaccggcaaactgaacattcttcacgatctgaaaggaaaagaagagattctttcgggatgtttgacggttatgatagc

SEQ ID NO: 825935 - DNA, 130 bp, Homo sapiens
tggacttggtgtgcattaacctgccgccgcccctcaccagacagatcgctgtcaaaaccctaggtggtttttccccatcatcggccacatgggcatctgcacatccacaggagtcattcgggacttcgcg

SEQ ID NO: 825936 - DNA, 98 bp, Homo sapiens
tccgggccccgtacccggagagcggcaactcgcgcactcaaagcccaggccagacccgatcgtctatggtccagtggcttaacccacagtctccaacc

SEQ ID NO: 825937 - DNA, 100 bp, Homo sapiens
aaggaagctgccttgtacccacatctcccgccagatgttaatttcaaaactggagaaaaacaaaacaatgaagtctgaagataaagcagaaataatgaaa

SEQ ID NO: 825938 - DNA, 98 bp, Homo sapiens
tgtgtcttggggccctttgggacgagtgctgtgactgtgttggcatgtaatgaatttactacacatgtgatgaaccttctccgagaacagagtagaac

SEQ ID NO: 825939 - DNA, 100 bp, Homo sapiens
caaactcggcctcatcagcccggcctacctcttcctctggcccgaagccttcctttatcgctttcaggctaggcagctggaagagaaagaccgagtgcta

SEQ ID NO: 825940 - DNA, 100 bp, Homo sapiens
aaaatgggaaggtttccccaaagtcagtattctcctcagaaaaatggctacaaacttcctagcacatgagaagatctggttcgacaagttcaaatatgac

SEQ ID NO: 825941 - DNA, 100 bp, Homo sapiens
acggacagcccatcgtgtgaactatagagtttgtggacagatttatattgcaccagaaagtttgatgcaggcattggaagacttagattatctggcagca

SEQ ID NO: 825942 - DNA, 100 bp, Homo sapiens
tctgatcgagcggctggggacccctcaggttccctgctccacctctactgctcctcccaagaagtcctgtgccagattgtcaatgacctcagccctgagg

SEQ ID NO: 825943 - DNA, 100 bp, Homo sapiens
ggccgaggagattcaggatgaagttgctattgacctgaaaagtggttctggaaaagtgtaccaaggccctgcaaaaggtgctgctgatacaacaatcata

SEQ ID NO: 825944 - DNA, 100 bp, Homo sapiens
acagttcctccgtgattcttgaagatggaatcaccaagctaaacaccattggccactatgaggctgaagccgacgtagcttctctgaacagacgcatcca

SEQ ID NO: 825945 - DNA, 98 bp, Homo sapiens
tggaggtggtgtccccactgagctcttggaagagaggggaaggtgctattaacctggctttggctcagaaccgaagccaagatgtgagaatgaatgga

SEQ ID NO: 825946 - DNA, 98 bp, Homo sapiens
aggcctctatgtggctcgggcccaaaactctagcggcgctctctcttccaatgtcatcctccacgtgacaggcgatatgaaaggtgaggtctatccat

SEQ ID NO: 825947 - DNA, 100 bp, Homo sapiens
ttctgctttttttctggctagaccgaagtgtactagccaaggagttgaagtttgtgactttggggcttcacaaaggtcagagttcacattcggcaggtcc

SEQ ID NO: 825948 - DNA, 98 bp, Homo sapiens
tatggcagagttagctaaagaactccctcaagtttcatttgtgaagggaaacttcgtggcttgcatgacagctattttacgacaaatggaagattacc

SEQ ID NO: 825949 - DNA, 100 bp, Homo sapiens
tgatgctggagaacttcaggaacctgctgtcagtgggtgctggagaatctggtaaaagcaccattgtgaagcagatgaggatcctgcatgttaatgggtt

SEQ ID NO: 825950 - DNA, 98 bp, Homo sapiens
taaagcaagaaacccctgcagtacttgaagatttgcataaagccaacattcgcaccgtcatggtcacagaacctctgtattactggcaacagactgaa

SEQ ID NO: 825951 - DNA, 100 bp, Homo sapiens
ggctcggggagccggtctatggactttccgaagacgagtatcagatgtagaaggtggtgatggactgcagctcagaaaggaacatactctcaaaatattt

SEQ ID NO: 825952 - DNA, 99 bp, Homo sapiens
gcgccggagcggctgcggagccgggcgctctccgccttcaagttgcggggcttgctgctccgtgggtattgggagagttgctgctacatctttaggaaa

SEQ ID NO: 825953 - DNA, 100 bp, Homo sapiens
atttagcagcaaatgctggcaattcacatgccatggcctttttgggaaagcttcttggacacttaatgattgttggcaagaaatgtgctgctgatctggg

SEQ ID NO: 825954 - DNA, 98 bp, Homo sapiens
cgggggcttcccctgaccccttaggccctccccctgcaggtgccctcgcgcccctcccggggtccccagacttgctatggagagactctatgcagttt

SEQ ID NO: 825955 - DNA, 101 bp, Homo sapiens
cggcaacccagggctcggcgtcgctgccaccatgacgggaaggcacattcaggaccccgcgagccagcggctgacgtggaacaagtccccaaagagcgtcc

SEQ ID NO: 825956 - DNA, 98 bp, Homo sapiens
aaggaatggctggaaggagaagatctttctgaagagctcaaaaaggaaaatcctttcttgaggcaagaggctcttgcagccaatgccggaacaggatt

SEQ ID NO: 825957 - DNA, 98 bp, Homo sapiens
tatcacatatgacatcagtcagttgtttgatttcatcgatgatctggcagacctcagctgcctggtgtcatcaccgagtggtcttctcacatcatcct

SEQ ID NO: 825958 - DNA, 99 bp, Homo sapiens
tcaatcccactctggagtctctgtgtctgagcatgacagaacacgccttgggtgggccagccaagtctcgggatggtgaacgtactgtctattgcaacg

SEQ ID NO: 825959 - DNA, 98 bp, Homo sapiens
tcattgcaacacagcgccatttccgctggcacccaggtgcccattgatcagggccaaagcggtcagtgagaaggaagtggactctggaaacgacattt

SEQ ID NO: 825960 - DNA, 100 bp, Homo sapiens
gatgacaactccgcagcaaacaactccgcaaacgaaaaagaacgacatgatgcaatcttcaggaaagtaagagggaaaatgtttcaacgtgcgcaagagt

SEQ ID NO: 825961 - DNA, 98 bp, Homo sapiens
ctggtgcgagaaattgctcaggactttaaaacagatctgcgcttccagagcgcagctatcggtgctttgcagtcaccaggagactaaagtccatcaaa

SEQ ID NO: 825962 - DNA, 98 bp, Homo sapiens
agatgaggctgacattctggcggggatgcccgggtagttaaagacatggcaactggaaaatccaaaggctatggttttgtatctttttataacaaact

SEQ ID NO: 825963 - DNA, 100 bp, Homo sapiens
gcgaggagtgcctcaaagtctacctgagcgcccagtcacccacaaaagctgtatataatgccagacattggaatcatccagattcagaagaactgcctgg

SEQ ID NO: 825964 - DNA, 50 bp, Homo sapiens
gaggaatgggcctggcctgtgggcagccatctgttgaatcttcaagtcca

SEQ ID NO: 825965 - DNA, 100 bp, Homo sapiens
agtcaaaaatgaaaagatgggaacagcagaaaatcaaaacaagctctttatgagaatggcatctaagctgggttaacaactttggccatgaaggtcttgg

SEQ ID NO: 825966 - DNA, 100 bp, Homo sapiens
ctgtacttgttccaactcaagttttcaaaattcacttctacagatcgtaattccagagaaaatccaaacaaatacaaatgacagttcagaaatagaatat

SEQ ID NO: 825967 - DNA, 99 bp, Homo sapiens
gaaattgcgctggaccgtcgccttgctcctcgccgcggcggggactgcaggctcccagccccattgccaataccttcctccactatcgaaccagcaagg

SEQ ID NO: 825968 - DNA, 98 bp, Homo sapiens
tcaaggcctgccgttggctatagcaaatgccccaggccataggaaaaggatacagagtagagtttcatgaacctgaaacttggtggaaatttgatcct

SEQ ID NO: 825969 - DNA, 100 bp, Homo sapiens
tcaatatgtgccgccagtgtttccgtcagtacgcgaaggatatcggtttcattaaggtgtgaagatgccttaagaaaaaataagagcttaattgggccgg

SEQ ID NO: 825970 - DNA, 100 bp, Homo sapiens
ggccctatgatgaggtggtcctcccaccacagagccaggagcaatttacagcaatgagggatttatacatgaaaaatggacaaggatttgcattagttta

SEQ ID NO: 825971 - DNA, 134 bp, Homo sapiens
cagatagaaaacggcgagagtgggcgagaacgtccactgcgggccggcgaaagctgcattgatatgaaccatggacaagtatattctgctgccacaaagactgtaaagtgcttcatttcaacagctgaggcaag

SEQ ID NO: 825972 - DNA, 98 bp, Homo sapiens
tcccttcttctttgccttggggaagatcctctctgtggaggtaatcgtgctgtccacacgactcctgaagccacttaacattcctgagctgttatttg

SEQ ID NO: 825973 - DNA, 101 bp, Homo sapiens
agactccttctccagcatgggctcgcctgtcaacgcgcagatacttctcaccactgcatgaatggacatttgaaagtgccatagccaaacacttgcaagca

SEQ ID NO: 825974 - DNA, 98 bp, Homo sapiens
cgactgtttgagcccggaagcgcagaagctggtgaaaggtgtagcagtcactcggcctacacccacagcatcgaccttgtgaacccagcgacctgact

SEQ ID NO: 825975 - DNA, 98 bp, Homo sapiens
agaagccaacagcgaggctttcagttctttggaattccattcttttccttattcttctgatgtggatccagaagacccttttgaggacttctttggga

SEQ ID NO: 825976 - DNA, 100 bp, Homo sapiens
ggctaagctcatcattgttactggctgaagccgacgtagcttctctgaacagacgcatccagctggttgaggaagagttggatcgtgcccaggagcgtct

SEQ ID NO: 825977 - DNA, 100 bp, Homo sapiens
gggagcggggccttccacaccccctccgtgggtgtgtggttgttggaggaagagtcttccaagagggctgaactagaaaagtggcacttggagcagcagc

SEQ ID NO: 825978 - DNA, 100 bp, Homo sapiens
ccggggcggaccgagggggtccttgaaaggcaaggagcgccgccagctgcaggccagggagtggcagtgaccctggacccagacacagcacatcccaaac

SEQ ID NO: 825979 - DNA, 100 bp, Homo sapiens
ccaatggcacggaggcctgcgttatgacgccgtgcccatccagtccagcgtggtgttatgttcctgcccatccccatcaatggtgaggacccagactgag

SEQ ID NO: 825980 - DNA, 98 bp, Homo sapiens
gtgctggccccccgcttgccgcagccgcctcagaacccgaccaacatccagaacttccagctgcccccaggtgcagacccacctcgaaaaccccacca

SEQ ID NO: 825981 - DNA, 100 bp, Homo sapiens
cttgaaattaccaactgctttcctttccctcagcacacagaggatgatgctgactttgatgaagaacccagtgacttgattgtaaaaatttacagagcgg

SEQ ID NO: 825982 - DNA, 122 bp, Homo sapiens
accggttcccaccaaagttcaccctgaaggctgggcaggtggtgacggggatgaacgtagggcacttagcttcttccaccagaagggcctccaggattttgacactctgctcctgagtggtg

SEQ ID NO: 825983 - DNA, 100 bp, Homo sapiens
acttgagaaaatgcggagtggcaagatggcacccaagccccagtctcgctgcacctctacccgctcagcaggtaagttcgaggatcgggaagaccacgtc

SEQ ID NO: 825984 - DNA, 101 bp, Homo sapiens
caaggaattcgaccaactcaccccagaggaaagccaggcccgtctgggggatatcatgataacacattttgaaccttccatctcctttgagggcctttgca

SEQ ID NO: 825985 - DNA, 100 bp, Homo sapiens
tggtgtcacctatcagtaaaagaccagagggtggcatccttctgcaccctgacagatatgcagcatgggcaggacctggaaggggcccaagagctgccct

SEQ ID NO: 825986 - DNA, 101 bp, Homo sapiens
gccaaccgcaaccattgacgccatgtcgggttattcgagtgaccgagaccgcggccgggaccgagggtggttctgctgggcatggacatcctgtccgccct

SEQ ID NO: 825987 - DNA, 98 bp, Homo sapiens
ggcgggcccccgcctgcgttcgcggcgccattgagacatttgggaaatgatgaagtgcacattgtttggtcagagcatactagagactacaggagagg

SEQ ID NO: 825988 - DNA, 99 bp, Homo sapiens
ctcagggctgcggccgcccgaagaggagagagcgcgggcctctaggaaggcctgttacatgaacagaatatggcaaaaatgagactacttacttttatg

SEQ ID NO: 825989 - DNA, 98 bp, Homo sapiens
gaaaacaaatgtttttctggtcttcacttttttgaggcaggaagaaacaggtgggtgagatgaaattacaacttgaaaatgtcatcaaggaaaatgaa

SEQ ID NO: 825990 - DNA, 99 bp, Homo sapiens
cactgagcaccgccaccatggggaagggggtggacttgaggcgccagcagatttcccaggctgtggaggaggtgcagaaagtcgttcatcatttgacca

SEQ ID NO: 825991 - DNA, 100 bp, Homo sapiens
atgtatggtgttgacctacatcatgccaaggaatgtatagaggccagctgtatctgcagtcatcagtcagaatttcagaaaagtttccttcaagtcccaa

SEQ ID NO: 825992 - DNA, 98 bp, Homo sapiens
tgatttctcagaccaagaagaagcagtgggtgcaggctgccccatggatgccacacgtggcagcggggagaaaagaagtgattcggtccctgccgagg

SEQ ID NO: 825993 - DNA, 100 bp, Homo sapiens
ctcctgcagtctctctgtgtggctgtaacttacgtgtactttaccaacgagctgaagcaggtccaagaggctaaatgtgagaatccagaatttgagagaa

SEQ ID NO: 825994 - DNA, 98 bp, Homo sapiens
gacatgtctgatcccttgctcccatccctgcagcatgaacaaggaagacagtgacccgcccattcatgaaagtctcagcatagaaaatacattgtggg

SEQ ID NO: 825995 - DNA, 100 bp, Homo sapiens
aagacttgtgccaactgcttttgaaaaacaaggaacggcaggagcagctgatgggatatcggaagagagggccgaagcccaaaccgctagtggtgcaggt

SEQ ID NO: 825996 - DNA, 98 bp, Homo sapiens
gcccgcgcggagcggacgcgcgtggcgctgcccggggatggagaagtttatgtttgggatgtgaactcaaggaagtgccttaacagatttgttgatga

SEQ ID NO: 825997 - DNA, 98 bp, Homo sapiens
gacggccactgttctctgggacaatgcttttgcagagcctgccaattttgagaagattgaaaatgaactgaaggaaatcaacacaaaccaggaagctc

SEQ ID NO: 825998 - DNA, 100 bp, Homo sapiens
gagaagtatcaactctacctgtcatcattaaaaggggcgtttgtggtatgctggaccccgggcctggtggttctgctcctcgacggcctgaactgcaggc

SEQ ID NO: 825999 - DNA, 100 bp, Homo sapiens
ctgtgacctacagcaggaatccagtggcatcgcggtttgcaatggattttggataaacaagatctgttgaaggagcgccaaaaggatttaaagtttctct

SEQ ID NO: 826000 - DNA, 100 bp, Homo sapiens
gtttatataactcaagttgtttggctaaattcttcagatgacctgtgtagaaaaagcaggaacagatgagaaaatgcttatgaaggtttttcgctgtttg

SEQ ID NO: 826001 - DNA, 98 bp, Homo sapiens
cgccaaggagaccaggaagcgagcactcagcaggctgaccggttccctgatgtgttacctgcttctgctactgatccaaactgcagaacttctcattc

SEQ ID NO: 826002 - DNA, 98 bp, Homo sapiens
tcagaatgctccaggcagtgtaatctcattccatcttcattcatgactccagacagggttgtgagtcccggcccagcccctccacccccctgcccccc

SEQ ID NO: 826003 - DNA, 100 bp, Homo sapiens
tgtgaatttggaagggatcgtgtggcatgaaacagaagaaggaactgtggaaggtgcatcagtgaagaaatggaccaatgtgtataatcatggaatctcc

SEQ ID NO: 826004 - DNA, 100 bp, Homo sapiens
ggccagctctgcgtctgcggtcaccaccaaggaaagaccacagcaagattctttcattcgtctcctcctagcctgggggaccaggctcgaactgaccctg

SEQ ID NO: 826005 - DNA, 98 bp, Homo sapiens
gcgccaccatccacgccagccgcaccatgccgctcctaagcctgcacagccgcggcggcagcagcagtgagaggctcttgtcaggatggtgaagctgt

SEQ ID NO: 826006 - DNA, 98 bp, Homo sapiens
taaagttaggcggcactccagccccagctcgggttctctataaaggtgtcttaaaaaggttgattttgttatatgagcctttgtttggattgcttcaa

SEQ ID NO: 826007 - DNA, 98 bp, Homo sapiens
atgcaagagtcaccttctcaactgttgtcctcatgatgtcctttctggaactaacatccatgatagcagtcttctgtaaatcgaacttttcaagaatt

SEQ ID NO: 826008 - DNA, 100 bp, Homo sapiens
cgggtccccgcgttcacagccccagcgcaggtatgagggtgctggttgatgctcgagagaagcttcatattccctggggagacaactcaaaccaacaaca

SEQ ID NO: 826009 - DNA, 98 bp, Homo sapiens
tgtttgacttcttggggagcttgctcactatgtgctcctctgacgtgccgttactcagaggtggcagtgctccttttggacttttctctaggtttggc

SEQ ID NO: 826010 - DNA, 100 bp, Homo sapiens
aagtagtgaagaagcattctcagttcataggctatcccatcaccctttatgatcagttcttaagagcagccccggtaactggaggaatgggagccgtttt

SEQ ID NO: 826011 - DNA, 133 bp, Homo sapiens
atatagtcatttggaataattttaagtattgatcttaaaacttgtaccacaacaagagggcacacgtgtttcacgttgacaggtttgcttgggacgctagtaaccatgggcttgctgacttagccaaagaaga

SEQ ID NO: 826012 - DNA, 98 bp, Homo sapiens
ttttgccctcaaaagaaatggcagtgaggtctgccagtctttagtgaaacacagctctggaataaaaggaagtttaccactacaaaaactacatctgg

SEQ ID NO: 826013 - DNA, 99 bp, Homo sapiens
agtacttcaagagcacagtcttatgtaagagttacactgttagaccttatgatagccaagataacgagtgatgagccactcaccaaggatgacatccct

SEQ ID NO: 826014 - DNA, 98 bp, Homo sapiens
ggaacctggagaaggcagctgccatttagctgaagtgtggaggggaaatgtgtacgacacctgttctacctgggaatgcaaaccctgagctgcaaata

SEQ ID NO: 826015 - DNA, 99 bp, Homo sapiens
gggttttaactacagacccagtctctgccaactatgtgatgatgatgccatttaaacgacaggctctagtggaatttgaaaacatagatagtgccaaag

SEQ ID NO: 826016 - DNA, 100 bp, Homo sapiens
gttcttcctactaacaactctgtcagtggcgagctcattctggaggagctggaagtctttaaggacacagcattgttggttttgccatgtactattttac

SEQ ID NO: 826017 - DNA, 100 bp, Homo sapiens
gaaatactcctttacaccttgctgtgatgttaggaaataaaggctccttctcctgaaaaagccgaggaggagagtgagaggcttctgagggaactctatt

SEQ ID NO: 826018 - DNA, 98 bp, Homo sapiens
tcctggacccggcctgggagaagcagcagagaaagatgtggacgagtgcctggaaccaaacgtctgcgcaaatggtgattgttccaaccttgaaggct

SEQ ID NO: 826019 - DNA, 98 bp, Homo sapiens
ggggatctgtgagtcttctggcaaacagtgtttgcctctggttcagctcatacaacagcttcttagcagcaagatgaagagcgacgtcggcagctgag

SEQ ID NO: 826020 - DNA, 100 bp, Homo sapiens
acatgcttgattttggcttggctcgacaatttaccaattcctgtggtgacgtcagaccaccgtgcagtcggaggtccttgtgcatgaagacagatttgtt

SEQ ID NO: 826021 - DNA, 101 bp, Homo sapiens
caaattgcctccctgagtcggaccagctgcccgtggatcctacgctgcagtcacaccagactcctcatgttgtgggacagttaaatctcacacagaaacag

SEQ ID NO: 826022 - DNA, 100 bp, Homo sapiens
tgagtggcttcagcctcgctggaaaaccaattctgtgtcctcggaggaccacagcccagttgggccccaggcgaaacccagcctggagcttgcaggcagg

SEQ ID NO: 826023 - DNA, 100 bp, Homo sapiens
atgtgatggaaaattatactcagtggctgcaaaaaaggcggggtttcaccatgttgcccagactggtcttgaactcctgagcttaagcaatccacctgcc

SEQ ID NO: 826024 - DNA, 149 bp, Homo sapiens
aggccactgtgcccttcatcactgtgaacgggtctgagttcctggaaatgtttattggcgttgggccagcaaggagtgggaaactgtgaaaagctcagaacctgttaaagagacggtccagacaactcagagcccaactccagttgaaa

SEQ ID NO: 826025 - DNA, 109 bp, Homo sapiens
tggccactgtggccttctgcgacgcgcagtccacgcaggagatccatgagaagaattaaacaaccaccatgtcgagcaaaaaggcaaagaccaagaccaccaagaagcg

SEQ ID NO: 826026 - DNA, 100 bp, Homo sapiens
acttgctacgaaacagaaatttcatgttgcaccctgaagcattcagaattgtctgaattgaatgttaaagtcctggaagctctggaactatataacaaat

SEQ ID NO: 826027 - DNA, 100 bp, Homo sapiens
gtgggctttggggtgacctgcctcattcccaacctgcctctccaggtggaagcagggaaaggcctggagatgaggaagctggttctctcggggttcttgg

SEQ ID NO: 826028 - DNA, 98 bp, Homo sapiens
agaagccttttgggaacagcctcttccacatggaagacggggagccctactgcgagaaagggaacctactcactgcccaagagcgaattcgttgtgcc

SEQ ID NO: 826029 - DNA, 99 bp, Homo sapiens
gaggcttcacttccctcggtctgggcttctctgaggcggcgagagatggtcaggtctggagctcgaccgggccagacaaaacttacctggggtccctac

SEQ ID NO: 826030 - DNA, 100 bp, Homo sapiens
aatgatgggatagcgttgcaaatccttaaaagagtcttaacgatagttcatttaaagcccccatccctgcaaggtggtgctttctaccaatatgaatctt

SEQ ID NO: 826031 - DNA, 98 bp, Homo sapiens
tggaagtagaaaagttatctccagccgctgagctacatctaatcttcaacaacaaggagatcttcagctcgccgcccctttgatgccaagaatccgtt

SEQ ID NO: 826032 - DNA, 98 bp, Homo sapiens
taggtcgtcgactgtaggaaatcagtactactttaggaacagaatgcagtgcgtcataatcttagtcttcacaagtgttttgtgcgagtagaaaacgt

SEQ ID NO: 826033 - DNA, 99 bp, Homo sapiens
gcagcttcaccagtctcgactggattacaattgaacagatctcggcccctttccaaacactcctgatgcctcatttgcctctcgcctcttttcgaccac

SEQ ID NO: 826034 - DNA, 98 bp, Homo sapiens
cctgcctcagcctcctgattagctgggattacagactgcatcatctgctattaaaggtgctattcagctgggaataggatacacagtgggtaatctca

SEQ ID NO: 826035 - DNA, 98 bp, Homo sapiens
acttcatcttacctatcagtgatgtccgggccagcataggtgctgggttcatttaccctttggtcggaacgggctgttacacggtgatcctcaacacc

SEQ ID NO: 826036 - DNA, 100 bp, Homo sapiens
ggagatggagcttcacagacctctggtgaagtgggagttgtgaagcaaactgaaactgcagcattaaaggccattggagacaacagaagttcactctttt

SEQ ID NO: 826037 - DNA, 100 bp, Homo sapiens
tgccacaccaaccatttctctccagctttgtgtccctggtgatgttggaacattaatgatggaacatggccaaacttcagtcatgatcctgaagccatgg

SEQ ID NO: 826038 - DNA, 98 bp, Homo sapiens
ttaataaatcttcctgccaattcaacaatcaaaaagaaagctgctgttatcatcatggctgtagagggtgttggacctcaggaatatactttactcaa

SEQ ID NO: 826039 - DNA, 51 bp, Homo sapiens
cgcggactctccccgcgatgatgccgttttcggctttgtgagaaaccttac

SEQ ID NO: 826040 - DNA, 98 bp, Homo sapiens
ctctttgccgaaatgctagagaaatgcccaaggagctggatccctctgctgtgctccccttagactgtctgcttgcttttgtgttctttgatgccaac

SEQ ID NO: 826041 - DNA, 99 bp, Homo sapiens
gtgactccaccaacagcaaaggagagggcccagccccagccaccaggaatacagttctctgccagggccacctacagatgctcctgcagtggacacagc

SEQ ID NO: 826042 - DNA, 98 bp, Homo sapiens
cgaggaagaggaggtttctgaggaattgaaagatgttggccatcgtgatcagatggctgcagctagaggaatcctgcagaagaacgttccgatcctct

SEQ ID NO: 826043 - DNA, 98 bp, Homo sapiens
atgaatgccaaatgggacacgttgtccaatctggagattccacatcaaggagtgcaagtggaaggtgatggcttcagccatgcaattcgcttattaaa

SEQ ID NO: 826044 - DNA, 98 bp, Homo sapiens
gaagatgtttacagtgcagtcttatcgaaggatgtgcatgaaggacagcctcttctcaatgaaaagggagatttcattgccctggatcttggtgggtc

SEQ ID NO: 826045 - DNA, 100 bp, Homo sapiens
agttcccaattaacaatgaagcaggtactccaaagattcaggtttactcacgtcatccagcagagaatggaaagtcaaatttcctgaattgctatgtgtc

SEQ ID NO: 826046 - DNA, 100 bp, Homo sapiens
tcctacatccgcattgctgataccaatatcaccagcattcctcaaggtctctcaggcagctgcagagcttcaacagtactgtatgcagaatgcctgcaag

SEQ ID NO: 826047 - DNA, 100 bp, Homo sapiens
cattctccagggaaaggatgacatatttttggacctgaaacagaaattctggaacacctatatgatttgctttgtcagctatggacatggaacagcggga

SEQ ID NO: 826048 - DNA, 100 bp, Homo sapiens
gtttttctaagccctttttgtgccaggtgtcccgttaacgtctctgttagttcagaggttgtaaggatgcgaggcagcgggaggcagtgctggatgacgg

SEQ ID NO: 826049 - DNA, 100 bp, Homo sapiens
caaggacttctttatccgagcgctggattgcatgagaagatttgagttctgtgaacctgcatttgttgttggtaattgcctccagatagcttctgacagt

SEQ ID NO: 826050 - DNA, 98 bp, Homo sapiens
ccgttagaactcgcgtttccacttcagagatctgggtgtttgtgaaccgaagtttagcaatggaaaagataaagtgttttggttttgatatggattat

SEQ ID NO: 826051 - DNA, 98 bp, Homo sapiens
ctctggctgggctgctgcctctgcttctcgctcctcctgcccgcagcccgggccacctccaggagggaagtaatgccatcggtcccctggtagccttg

SEQ ID NO: 826052 - DNA, 98 bp, Homo sapiens
cctatcaggacatggagtatgaaagacggaatgaatctgaagtctgctgcagtaaaacacagaaggctttaaaatgttttcttgcataaaattcaaaa

SEQ ID NO: 826053 - DNA, 100 bp, Homo sapiens
tgcagaagatgaccttaacacagtagcagctggaaccatgacaggcatgttgtataaatgtacagtcttgccacttgcctagtgaggcttttccgaacct

SEQ ID NO: 826054 - DNA, 100 bp, Homo sapiens
catgatgcagtcatctcctcagcaggaacgcactctgttgctatggttactgctgagggtacagaaggggaacaggtggaagtttagctgatgctataag

SEQ ID NO: 826055 - DNA, 100 bp, Homo sapiens
gaggggcaaagctcaagatggcggacaaaacgccaggcggatctcagaaggccagttcaaagataacttctttgtggatgattatgctagatttactatc

SEQ ID NO: 826056 - DNA, 98 bp, Homo sapiens
tgagcgggtccgccagagcgccgacttcatgccccgctggcagatgctgggacttctgcctggggtgagccctccgtgccccctgcagctgccttcca

SEQ ID NO: 826057 - DNA, 100 bp, Homo sapiens
tttaagaggtctgcctggttctgggaaaacaacattgtctcgccaaacaggcaggactcgtgaaattgtgatgccttctaggaactacaccccatacaca

SEQ ID NO: 826058 - DNA, 121 bp, Homo sapiens
tgcaaggcactgcaggaggagaaccgcgacctgcgcaaagccagcgtgaccatctgaggtcaccaagaattccctggagaaaatccttccacagctgaaatgccatttcacctggaactta

SEQ ID NO: 826059 - DNA, 100 bp, Homo sapiens
catggagagaatttcactatattcaggtgaagtacatttttaccttaggggatatagcccagctgtgtccagccagggtggagaagcgcatcttccttct

SEQ ID NO: 826060 - DNA, 98 bp, Homo sapiens
acagagaaaatgaaaccagcagacagaatttgtcaggtggaatttcagtgttggccactttgaacttcggtatattccagacatggaaacgagagccg

SEQ ID NO: 826061 - DNA, 100 bp, Homo sapiens
ggatattgataaagtaacacgccctcaagagctggatttgacacatcaagggcagccaattactgagattttggaaataatcagggttattttaaaacta

SEQ ID NO: 826062 - DNA, 100 bp, Homo sapiens
taaaggagggaatggatatgaactacattatccaaaggaagaaagaatttcggaaccctagcttcagtgcgatcaaagttctacgtgcgagagccgccga

SEQ ID NO: 826063 - DNA, 100 bp, Homo sapiens
ggccttcaggaaaagcatcccggaggaggaagaagaagtgttatatgtcctaaagtaaggtttcagatgtgaatgaatgtgaactgctcagtggggtgtg

SEQ ID NO: 826064 - DNA, 100 bp, Homo sapiens
tcattgcagtcgtcaacaagatggtgagcatgatggagggtgtcatccagggcgaactttctgaccaagtatacaactacccagagggcctaggagaagt

SEQ ID NO: 826065 - DNA, 100 bp, Homo sapiens
ggacttccctttggatgtagcaaggaagaaattgttcagttcttctcaggtcatcatcagatttgaaatatttaaagtggatacaaaactatttcagcaa

SEQ ID NO: 826066 - DNA, 100 bp, Homo sapiens
gcatcagtagtagtactatttaattatgaggagagaactcagcgacactacctgggccatacagactgtgtgaaatgctggactctgactcagaccgcat

SEQ ID NO: 826067 - DNA, 98 bp, Homo sapiens
ttgatcgacagtccatcaccttaatctcatcacccagtggaaggcgtgtttaccaggccagcgagaccgaggagaatggctccgacagcttcatgcat

SEQ ID NO: 826068 - DNA, 100 bp, Homo sapiens
cagactccctgtcagctgctgaaggagatctttccagcatctcgggatcagaagactcagactcagccagtgaggaggacttgcagacactggatcggga

SEQ ID NO: 826069 - DNA, 100 bp, Homo sapiens
aggagattgacagtcacaattttgtaataagcgggacgaccctgggacagtctccactggggcagatccagctgaccatccggcacagctcgcagagaaa

SEQ ID NO: 826070 - DNA, 100 bp, Homo sapiens
ctcatttgaggagtgggaacaggcttcggcgaacacaaagcttttatgatggtcaacagcctgtgctggctatcacagatcctgacatgatcaaaacagt

SEQ ID NO: 826071 - DNA, 101 bp, Homo sapiens
aaggagttcaaaccaagctgtacttggcaatgaacagtgagggatacttgtacacctcggttgcctgcctgattcgagttccatctgaagtggttaagcag

SEQ ID NO: 826072 - DNA, 98 bp, Homo sapiens
cacaatcaggaagaaacatctccaaagacccatctttagtatgacttctctttggaaaagaaaaccattgagtgggctgaagagattaagaaaatcga

SEQ ID NO: 826073 - DNA, 100 bp, Homo sapiens
agtcttcagggacatgaaaaggagccactccttacaaaaagttggggagccctggtgtattgagtcaggccttgaaaagaggatagaccaggctgtggag

SEQ ID NO: 826074 - DNA, 124 bp, Homo sapiens
gcagcttccttcatcactggacagtcggtggatgtggatgggggccggagtctctatactcactcgtatgaggtaccagcgagtaaccagctcataaatcacatcgaacagtttttggatacta

SEQ ID NO: 826075 - DNA, 100 bp, Homo sapiens
ctgaggcagcaggagtgaaacctgctggagtgaggcctgatgccatgcagcatgctgcagagtcgcgggatgctgagctggcccagaagttgctgcagtg

SEQ ID NO: 826076 - DNA, 99 bp, Homo sapiens
aaatgctctctctgtgggcatcagctgagttctgcatcatgttgctttccactgacaggacagaaatgggaagatgcgcggttttggttttgttcagtt

SEQ ID NO: 826077 - DNA, 100 bp, Homo sapiens
cataagccaggtcttagaggctcccggagtgtatgtctttggagaacttctggagctggccaacgtgcaggagtgaccacggaccccccgcccgacgtgc

SEQ ID NO: 826078 - DNA, 100 bp, Homo sapiens
ggccgaggccctgagccgctctgccttgctgcccccaggtgggccgccaccccctgacctgcctgggtccaaagaggaagcagaccagcccactacagag

SEQ ID NO: 826079 - DNA, 100 bp, Homo sapiens
aaccttgtcaagcaagctgggatctatgagtggaaaggtgaccaagcccaaagaggagaaagatgcttctaagggagataaacctgttgaatcaatgcag

SEQ ID NO: 826080 - DNA, 100 bp, Homo sapiens
gtgatagaagctgttggagataatgcatctgctttcaagccatccagtccaatggatcagatgggcaagatgagacctcagccatatggcgggactaacc

SEQ ID NO: 826081 - DNA, 100 bp, Homo sapiens
gacgtgaagctggagttcccttcccttccacagtgcaaggaagacgccgagctgaacactttccaggcagttttggcatctgatgggtctgatagctacg

SEQ ID NO: 826082 - DNA, 100 bp, Homo sapiens
gtgtgcccactgaggagtccaacatcaccatgcagcaacagcatttgatcgagctgatccgccagcgggagacagaggcggcgctggagtttgcacagac

SEQ ID NO: 826083 - DNA, 100 bp, Homo sapiens
atctggcaatgggggcaggagctgttggagctttgcagctgacctacatctcgaagataattctgaaataatcagcagaaacggaatggaatgccaagaa

SEQ ID NO: 826084 - DNA, 100 bp, Homo sapiens
ggagaagtaccaggaggcgttggccaaggaacactgatatttgcatttaatggggaacaaaagatgaagaaggaaaaggaatatattcactaaggattct

SEQ ID NO: 826085 - DNA, 99 bp, Homo sapiens
gtcccctcagcgagtggcagcagctgcctcaagaggagcaggtgcccctgaccccacagctggggccagcattgacgatgagaactgttggcatttgga

SEQ ID NO: 826086 - DNA, 100 bp, Homo sapiens
ctggaaggcatgttcaaggacatggagctttcgaaggacatcatggttcatttcaagcaggagggccacacagaagagccggaagcagaggagcaagccc

SEQ ID NO: 826087 - DNA, 100 bp, Homo sapiens
cagcatggcttacatacaccgcacacccagaggtgccatcgcctgcaggattctttattcagctctgacagtggcttcagcaactaccgtggcatcctga

SEQ ID NO: 826088 - DNA, 100 bp, Homo sapiens
ttgataacactggagatcagcaccaaatcccacagaggcatctgaggatgagacctgcacgcagtggctcacagcagcacgatttgtgacagcccgaggc

SEQ ID NO: 826089 - DNA, 100 bp, Homo sapiens
ttcaacaaaagatggacaaaaaggcatatttcttggggatgatgaatggagagagactgcatggggagcttctctgattcgcctttgccagtctcatctc

SEQ ID NO: 826090 - DNA, 100 bp, Homo sapiens
tcgtccagtaaagaagataacctcaatcatggccataccgagcaggaccctccgatatgttccagaggaatccaaagacaaagttatctcagatgaagat

SEQ ID NO: 826091 - DNA, 100 bp, Homo sapiens
taaccctgctaaccttagcagaagaaaggacggtagacctgcccaagtctcccaagatgtgaatttcttcggagtaagaaatcctcagaggaaattaccc

SEQ ID NO: 826092 - DNA, 99 bp, Homo sapiens
ttcctgccaccggcctgcctgagccactgcgtgaggctagcactcatccgcttccgggtcaagggctggttgatatgtgaagagccaacctgtcgcaat

SEQ ID NO: 826093 - DNA, 99 bp, Homo sapiens
ctggacacggcatgatgttcgtccgcaacgattgcaagcattttgaaagcgaagcagaagccgtagaatcagcggcgagcctgttgaaagaacccacag

SEQ ID NO: 826094 - DNA, 98 bp, Homo sapiens
ttgacgagatcatcctctccactgcccgcatgaaccgggtcctcagcttccacagcgtgtctgggtttgccttcccggattgggcctacaagccagag

SEQ ID NO: 826095 - DNA, 100 bp, Homo sapiens
ctcgcgctactctctctttctggcctggaggctatccagcaaagtgaatggcttggaggaaggcgtggagttcctgccagtcaacaacgtcaagaaggtg

SEQ ID NO: 826096 - DNA, 99 bp, Homo sapiens
gggctgactgcaaaggagacccaaggaacagtgccaagttagatgccgattacccacttcgagtcctttattgtggagagaatggatcttggagaatgt

SEQ ID NO: 826097 - DNA, 100 bp, Homo sapiens
cgctggtgcatctgtttgccggaggtcaatgatacacttgatgacatctttgacggttctgatgacgaagaagaaagccaggatattgtgaatcaagttc

SEQ ID NO: 826098 - DNA, 100 bp, Homo sapiens
aacctaatgacttttatttgaaaaacactacatgggaggatgtaggactgtgggacccatcacttacgaaaaaccaggcggcttggatgtgaagtctcag

SEQ ID NO: 826099 - DNA, 98 bp, Homo sapiens
ctctgatatcacgttgagaggggggcgtgaagatcctaattatctcatggctaatgaacgcatgaacctcatgaacatggccaagctgagtatcaagg

SEQ ID NO: 826100 - DNA, 100 bp, Homo sapiens
ccttgctctgggctgctccaggccaggccatgcgggcacattcaggaccccgcgagccagcggctgacgtggaacaagtccccaaagagcgtccttgtca

SEQ ID NO: 826101 - DNA, 98 bp, Homo sapiens
aaagaacctctggtgttgaaagattgccgtatccctcaaatcgaagatgctgagattcataacaagacatatagacatggagagaagctaatcatcac

SEQ ID NO: 826102 - DNA, 118 bp, Homo sapiens
cagaatatagaatggaacccttttgatcaagatgcggtgaacatgtgaacacttgtcctgctccttcacctttttcttgcatggagacagcaatgtttgtaccagtgtggaaattaac

SEQ ID NO: 826103 - DNA, 100 bp, Homo sapiens
ggtacctctccttttccctctccctttccctaagaattctgagacttatggttggtcatatagaagagtaccttgaacctatagtttcctgaagaatcag

SEQ ID NO: 826104 - DNA, 100 bp, Homo sapiens
gaagcaatgctggaatgccaacaatttttgttgtaaggctcctctctatgatctggctgctcatgaagacaaagttctgagtgtagactggacagacaca

SEQ ID NO: 826105 - DNA, 100 bp, Homo sapiens
aaattacaaaacaagatattaaagtggcaatgtgtgctgacaagggtcttactgaagtaacacaaagcttaaaaatggaaaatgaagagtttaagaagag

SEQ ID NO: 826106 - DNA, 100 bp, Homo sapiens
aacttggtcggctcttccagctacaaactctaggtttgaaagttccatgccattgcagtgtcaactaggcctcagttacttttcagtttgcccaaattga

SEQ ID NO: 826107 - DNA, 100 bp, Homo sapiens
gtcctttcaggaaggagccattatttatgtcatcaagaagaatgacgatgaggatctgaagaggcaaaatgcagtattacaagctgcacaagatgatttg

SEQ ID NO: 826108 - DNA, 98 bp, Homo sapiens
gaccgccgccactggggcagccagcacaatcgggcggaggtggcgctgccccttcaggtaccagacgtgctccaacaatgggctggtggcaggattcc

SEQ ID NO: 826109 - DNA, 100 bp, Homo sapiens
tattagagattgtgaagaagaatttcgatctccgccctggggtcattgtcaggtcagtttaggggctggtgcaaaggatgagttgcacattgttgaagca

SEQ ID NO: 826110 - DNA, 127 bp, Homo sapiens
ggctttagtggcagcatgaagcgcaccccgactgccgaggaacgagagcgcgaagctaagtgtaaacaggaacatcgataagtagtgtaaaaacttgcacaatgaaatccgaagccaaggatggaga

SEQ ID NO: 826111 - DNA, 101 bp, Homo sapiens
cagaagtcagcagcaaccatgtcttgatttaccttgataagatgtttcatgaatcacgtatcctgcatttgtgggctgccttgttccttgttgagttgttg

SEQ ID NO: 826112 - DNA, 100 bp, Homo sapiens
gctgctggatggaggggattttgtcagcttgtcgtcaagtcatggctccgatcttcatcttgaagaagagtgacattgggtgactgctgcttggaaaact

SEQ ID NO: 826113 - DNA, 98 bp, Homo sapiens
tttgcattgtttgtttgaaattgcattgacgactggtagcccagccatgacccataggaatctgacttcctccagtctgaatgacatttctgataaac

SEQ ID NO: 826114 - DNA, 100 bp, Homo sapiens
taagaaaggacagcattcctgtgacctctgcctaccatccataaaatactcattcccctctcagacatgacaatggatgaagtccgagaatttgaacgag

SEQ ID NO: 826115 - DNA, 100 bp, Homo sapiens
cactgagaaacctggctgtggatgctcgcaacaaagaattaattgagctgtaggtaaaacttgcctactgatcagttacacaaccaatgcatttcctgga

SEQ ID NO: 826116 - DNA, 100 bp, Homo sapiens
ttcacaataagagcagaggatggaacacttcagtgcattcaaggaatttgctgattcccttggaattccgtttttggaaaccagtgctaagaatgcaacg

SEQ ID NO: 826117 - DNA, 100 bp, Homo sapiens
ctatgtccagcctatttgcacaccatccaggagtcagtttattactggaaaatacccgctctggaaattgctatttggatattcgacctcgaggagacaa

SEQ ID NO: 826118 - DNA, 100 bp, Homo sapiens
cgacgtagctttaggcagcttacaactcacaagtgcatgggagattcctgcatcttttgcgctctcaaggtgctagtcctatgggagtaaatggaggtgt

SEQ ID NO: 826119 - DNA, 100 bp, Homo sapiens
cagatatatgctgctgttattgaggctgttttggctggcattgcatgttatgctaaaacttccagtctaacaaagagtttgacaggaggagtcaatggag

SEQ ID NO: 826120 - DNA, 100 bp, Homo sapiens
tcagtgagccaacaaccaagagctgggagtcatatggccttgaacccacagtgaattgaagagagaaagaaatggatatgtctgaccccaatttttggac

SEQ ID NO: 826121 - DNA, 98 bp, Homo sapiens
ttcctccaggacagcacctagtcgtggccggaggagtctcagagctgtcagaaagtctggggagcagggaggagccctgtgccctgtcccaggatcca

SEQ ID NO: 826122 - DNA, 99 bp, Homo sapiens
aaaagaggtggtgatgcagggatgcctggaatagaagagaatgacctagcaaaagttgatgatcttccccctggatatgcatgtatccccaagggcagc

SEQ ID NO: 826123 - DNA, 99 bp, Homo sapiens
gaggcgttcgctgcgcgtgcacattccgtctcccctctgctattagagtgaagcaggagttccagcccagccagagttaccgctatggcaactggtatg

SEQ ID NO: 826124 - DNA, 135 bp, Homo sapiens
aatcacctccgctgtgaaaagctaactttcaacaaccccacagaggactttaggagaaagttgctgaaggcaggagggggaagactaggagagctggagttgcagttaaaacatggaaaagaagaacctgaggag

SEQ ID NO: 826125 - DNA, 100 bp, Homo sapiens
caaggacttggcctccatggtgtcagagcaaggagaagctgttgcgaggaagaaaggacccggtttcaggagctgctggccagtccggcctacagagcca

SEQ ID NO: 826126 - DNA, 142 bp, Homo sapiens
gatatttcctggcttactggagaagaattgcatgtggaagtgttggagaatgttccacttacaacacacaactttatcattgagaagcagccaggccacattcggagcagggttttcagggaggtggagatgctgtaccagt

SEQ ID NO: 826127 - DNA, 100 bp, Homo sapiens
aaacacaaagccggctacgcgctgcgaggtgacatgtacagccatgatgggaatactgatgagccagaatgggtaaagacagagcgagagcagtttgttg

SEQ ID NO: 826128 - DNA, 133 bp, Homo sapiens
agacaggccagatctacgagctagagttgccatttcgctgggatttttgggtggtgcaaagattatccagaaggctcatcatctcttgctgtggaaacggaaacatagcagttttcacatttcctgcatctct

SEQ ID NO: 826129 - DNA, 139 bp, Homo sapiens
tcactagtgtcgtcttcaacatctgcttactcttccttccctgtagatgttgtggtttatgtacgagttcagcttaacagagcgttccaaaaagaggactctccagctactttttattgcatcagtatgcagtggttta

SEQ ID NO: 826130 - DNA, 120 bp, Homo sapiens
gaagcttcagacccgagaaagggaatttcaggaacaaatgaaagtagctcttccttcatctcgaaattctgcctcagcaacaacccctctaagtggaaactcatccagacgaggaagtgg

SEQ ID NO: 826131 - DNA, 100 bp, Homo sapiens
atcttacccgtgacaaaatgtgttccatggtcaaaaaatggcagggaatcttttaactgagccagtcggctacttggaatcttgtttctcggccaagaat

SEQ ID NO: 826132 - DNA, 100 bp, Homo sapiens
ttgacaaccaagggcctccgtctggatttccaaggaagaatttcctctgaagcaccgccatggccatgcagaaaatctttgcccgggaaatcttggactc

SEQ ID NO: 826133 - DNA, 100 bp, Homo sapiens
cccccctcccactgcaagtccaggatactcccccgtgctgatcccattccaatatgtagcttctgtttggggactaaagaatcaaatcgtgaaaagaaac

SEQ ID NO: 826134 - DNA, 98 bp, Homo sapiens
gatcagaactgaggaacaaaaacccccatcctgggaaaaatggggaagctgccaaaccaaacaggaagcttacttttctctacctagccaatgatgtc

SEQ ID NO: 826135 - DNA, 100 bp, Homo sapiens
tacattaaaaactactcatgtggtaactcaactggacccaaataaatcattattggaggtaaagttgttccctcaagaaacccttttccttgaagcaaaa

SEQ ID NO: 826136 - DNA, 100 bp, Homo sapiens
gctaagacgccaggacccactggaagcctagaaatggctacagatgcacatgttgaatggagctcttctggcattgctgtttcctgtggtaaacactcgg

SEQ ID NO: 826137 - DNA, 100 bp, Homo sapiens
gagatgcagctgatgcagtccgagagctagatggaaggtgagaaaccttaccactgtgactgggacggctgtggatggaaattcgcccgctcagatgaac

SEQ ID NO: 826138 - DNA, 100 bp, Homo sapiens
tctgaagaccctggactttgtgaagttgttagagtacatgagcattacttgggtgcctaagcctgtgcatcagcctgtaggttcttcctctacccttccg

SEQ ID NO: 826139 - DNA, 98 bp, Homo sapiens
ccccacttcgacctgagctgggaggccactagcagccagttccggcccgaggacaccgactaccagcagatgagcagcaccagcagtaagagggctcc

SEQ ID NO: 826140 - DNA, 98 bp, Homo sapiens
ggagtgcctgggattggcatcacttcctgatagcaagttcatctgcatggaatgtaaaactggattcgctaaatattgtaatggatcaaggagataca

SEQ ID NO: 826141 - DNA, 99 bp, Homo sapiens
cggcttcctagtgagtcggcggctgatttagaaggaggttcaggctacggtgagccgaagcaagccctggatgaaaacatggacctcttggaaggtata

SEQ ID NO: 826142 - DNA, 100 bp, Homo sapiens
ttgcacaggaagctataagtgatcatctgactgagacaggcttagaagatacttcaactcattctaaatgctgcacaatgaataaaatcaaatttatcct

SEQ ID NO: 826143 - DNA, 98 bp, Homo sapiens
aaagcatgggagtgcagctgcctgacaacaccgatcacagaccaacaagatctatctggttcaatagatgacctccccatggggacagaaggagctct

SEQ ID NO: 826144 - DNA, 103 bp, Homo sapiens
gccaattttgttacttttatggaaggaaaaggaagctgagaccaagaccaaggacgagatggctgctgctgaagaaaaagtcggtaagaatgaacaaggggag

SEQ ID NO: 826145 - DNA, 100 bp, Homo sapiens
gaaggatcaaggtggagagctgttgtccctccgctatgaccttactagcgacaccacaggcaagctgggctttgaggaattcaagtacttgtggaacaac

SEQ ID NO: 826146 - DNA, 106 bp, Homo sapiens
cgcagcccggcggcctcccggcgggagcgagcagatccagtccggcccgcagcgcaactcggtccagtcgggcagctcctgcagcccccaccatggcctccccccg

SEQ ID NO: 826147 - DNA, 98 bp, Homo sapiens
tcaacatgcccctcactatctcccggcaccgaacaagatttgtgatgaaatggagcctggaacaaactcttttcgggtagaatttcctgatttttcca

SEQ ID NO: 826148 - DNA, 98 bp, Homo sapiens
atactaaattattccatttgcaacttatccccaacaggtggtgattctagatgtccgggttccctgcacacctgtcgccaggttaaacaaccatcgag

SEQ ID NO: 826149 - DNA, 98 bp, Homo sapiens
tcaattacacttcgactctcaaagcaataccaggatagctgttgtttcagagaaagctcctcagtgggtagtgcacttccacgaagacgctgctgtgc

SEQ ID NO: 826150 - DNA, 100 bp, Homo sapiens
tggcggtgaccggatattcagttgcacatccccacatcaatgcactgccaatggccaagatcaaggctcgagatcttcgcgggaagaagaaggaggagct

SEQ ID NO: 826151 - DNA, 100 bp, Homo sapiens
gactgaccctcagccggagaatccgccgggcccagcttgcccactacaattttcagtttgctttgtgtccctggtgatgttggaacattaatgatggaac

SEQ ID NO: 826152 - DNA, 100 bp, Homo sapiens
gatgtgttccctgatgcctgcaaagagtttcaagatgcaggtgaacaggatcacctgctgttaccagctaccacccataacaagaccacaagaccaaaaa

SEQ ID NO: 826153 - DNA, 98 bp, Homo sapiens
gcacgactgttacagaggtctccagagccttctctctcctgctgtcacaagatgaaggtagaggcacattatacaaatacagacctgaagaagtagat

SEQ ID NO: 826154 - DNA, 100 bp, Homo sapiens
ttccctaacatcgacagagagaaggcaatgagccgacccatcttgtacagcaactggctgtcaaagctgacacttcctccatggcccatctatcgccggc

SEQ ID NO: 826155 - DNA, 100 bp, Homo sapiens
acaatggaagtagtagttgttgagcagagggaaagggataggagaaggatgtggactgcagtgctgcagtgccaggtggatattccatctattataacca

SEQ ID NO: 826156 - DNA, 100 bp, Homo sapiens
attaggagcaagttcagatcagatgccacttcaaatgaacaacaagagcttttctgtcagaagttgcagcagtgttgtatactgtttgatttcatggact

SEQ ID NO: 826157 - DNA, 100 bp, Homo sapiens
ccttctgcgatcccctgatgtcgtggactgatctgttcagcaatgaagagtactaccctgcctttgagcatcagacagacccgagagggactcacttatg

SEQ ID NO: 826158 - DNA, 100 bp, Homo sapiens
gcagagaaacctaagtggcaaggtgatcttgagagtgacaggtactctttctaatcctgaggttttcaattatggagtggaaacccacgaagcctacaag

SEQ ID NO: 826159 - DNA, 100 bp, Homo sapiens
ctgcacttgacaaccagcatgccgagatgggctgatcccttatccaacatggttctaaccttcagtactaaagaagatgcagtttcctttgcagaaaaaa

SEQ ID NO: 826160 - DNA, 100 bp, Homo sapiens
tggactttattgccagcaaaggcgtcaagctggtctccatcggggcagaagcgagggtgggtcctgggccccaacaactactacagttttgccagccagc

SEQ ID NO: 826161 - DNA, 100 bp, Homo sapiens
gagaagttccttcagcaacagtggaaatgttctgtttagaagctatagtaaaacattctgaggtcaaggttttaaatggcatctgtgacaaaacaatccg

SEQ ID NO: 826162 - DNA, 98 bp, Homo sapiens
tcacccgggctccgctcttgccttctccacacttgtttggtccttccatagtgacgccccccaaggacatctggaatgtcactggtgcccaggtgtac

SEQ ID NO: 826163 - DNA, 98 bp, Homo sapiens
cggctaatttgatggagaaggttcgaggcctacagaacctagcctatcagctggggctggatgagtttgtcgagatgtccacagaaggaggatttggt

SEQ ID NO: 826164 - DNA, 98 bp, Homo sapiens
ttaacggatgctgccctgacttgctccaatgaggctgtattggtggccaccttccaccccacggaccccactgtgcttatcacctgcgggaaatctca

SEQ ID NO: 826165 - DNA, 100 bp, Homo sapiens
ttcctttggaagttattccgtagcataagagctgaaacttcagagcaagttttcattgggcaaaatggggaaattcagtgaacattatcactccttgtgt

SEQ ID NO: 826166 - DNA, 100 bp, Homo sapiens
ctacttcatcctgcagcggcgccgcgggcacggcgaggggggcggccgcctcaccgctgcagaaccttggcctgaaaatgctacattatatcagcaattg

SEQ ID NO: 826167 - DNA, 100 bp, Homo sapiens
cttactgttaatgtagtagcagtgattgttgcttttacgggcgcctgcattactcaaggctatggcatttcctctgtgccatctgcttccaattctaaat

SEQ ID NO: 826168 - DNA, 100 bp, Homo sapiens
gccgctgctggttgctgtccctgcccatgacagacctggacacaaagatccaagaaaaggccatgaaggtggacatggacatctgccgccgaatcgatat

SEQ ID NO: 826169 - DNA, 100 bp, Homo sapiens
gctctctaaattgactcagctccaggtgtttgatcagtatgtaaagaccagggcagaggaagaacgcagggaaaagaaaaataaaataatgcaagccaag

SEQ ID NO: 826170 - DNA, 100 bp, Homo sapiens
ggcacagattagaggaaggaagagtttctatgtgctctgccaagaagggaaggttatgagttttttgtaggacaatggacaggtactgaactccacttca

SEQ ID NO: 826171 - DNA, 100 bp, Homo sapiens
tccgggcccagggagaggcctgtgtgcagttccaggttctgacaacaaaggagattgtgacatattgctgggcctaacactaaggtgatgttagttattt

SEQ ID NO: 826172 - DNA, 100 bp, Homo sapiens
gcaccttatctcagctccctggggataagtccaaagcctttgatttccttagtgaagagttagcatacgtatcaaggacagtaactaccatggctcccga

SEQ ID NO: 826173 - DNA, 98 bp, Homo sapiens
gaatctaggcttctcaatcaggaaaaatcagaactgcttgttgaacagggaatttgctgattcccttggaattccgtttttggaaaccagtgctaaga

SEQ ID NO: 826174 - DNA, 100 bp, Homo sapiens
aactttttaaatattgacccgataaccatggcctacagtctgaactcttctgctcaggagcgcctaataccacttgcctttcctcccagcaagcatctgg

SEQ ID NO: 826175 - DNA, 101 bp, Homo sapiens
ccgcctccagcttgccaccaaagacctgcgactttgctcaggctgcaagatcaaggccctgcgggccaagacaaacacctacatcaagaccccagtgcggg

SEQ ID NO: 826176 - DNA, 100 bp, Homo sapiens
caggatttcctggaagcagagaaatggaattttggagagtaaaaggctgaaccttgttaaagagaaaaccattaatcagaccatcggcaacgtcgtctac

SEQ ID NO: 826177 - DNA, 100 bp, Homo sapiens
cgagcccgctactgcagggacctatgtacatcgacgccatcagcaacaagcagggcgagctggagaattacgtgtccgacggctacaagaccgcactgac

SEQ ID NO: 826178 - DNA, 99 bp, Homo sapiens
tttcactggcctccagccccctcctaggaagggcccagtctgactctgtctgtaatacctgattgcattggagaactctagacacgcataaacatggac

SEQ ID NO: 826179 - DNA, 100 bp, Homo sapiens
tcaacttggaaagtcaaattacgtgtggcatatggactcctgacgaccaacagatcttggacatgatacctggatgtgcagcagccatctggtaattatg

SEQ ID NO: 826180 - DNA, 100 bp, Homo sapiens
ggacaagcgcgggacccgctatgaggaggcctcatgggacctgtcaggatgatttcatctggacacgagttaacaacagattatgatgaaaaagcacttc

SEQ ID NO: 826181 - DNA, 98 bp, Homo sapiens
gcgggaagtccatctacggaagccgctttcctgacgagaactttacactgaagcacgtggggccaggtttatgatgataaagactacaggagaattcg

SEQ ID NO: 826182 - DNA, 98 bp, Homo sapiens
gagaccttcgagcaccccaacgtggtcaggaaaaatgaggaagctgtgagtaccagtggaaggaacgagccaggaagagggactggaaccatctcaga

SEQ ID NO: 826183 - DNA, 100 bp, Homo sapiens
gctcgacctgagagacccatggcattcctcagggaatactttgagaggttggagaagagagacaagagagacacctccaacttcgacaaagagttcacca

SEQ ID NO: 826184 - DNA, 100 bp, Homo sapiens
gaccctctctggaacccctgaagaacccaacgtcttcctcatcttcagccatggactgcagggctgcctggaggcccagggcgggcaggtcagagtcacc

SEQ ID NO: 826185 - DNA, 98 bp, Homo sapiens
aaaatccattgctgctaagtactccggttcccagcttctgcaaaagaaccccagctcaaagggattgtgacaaggttattcagccagcagggatactt

SEQ ID NO: 826186 - DNA, 98 bp, Homo sapiens
ctacaagttggcccggtggacctgctgtgctttgctggctggatctgagtacctcaagcttgggagctgttgtcaccatcaccacgcccgtgaacatg

SEQ ID NO: 826187 - DNA, 50 bp, Homo sapiens
aataaagtttatcacgccgggcagatataatttctacagtagaatttaat

SEQ ID NO: 826188 - DNA, 99 bp, Homo sapiens
gtcacccgcactgagtcaacagactgagcgcgtccaggcctgacagctctgcggctcgggccctgagggcatggactggaactcccaatacccctgaca

SEQ ID NO: 826189 - DNA, 100 bp, Homo sapiens
cctgagggagcaatgctgaggcttggcatgacaaatccgccctatattttagagcatctggagaagatattgatgctgatggacagggattttgtcaagg

SEQ ID NO: 826190 - DNA, 100 bp, Homo sapiens
aagatgtccgacttattcgagagcagcatccaaccaaaatcccgtcatcagtgagttctgcctcagtcagctcccaagtgaggacgcagtcacctttgaa

SEQ ID NO: 826191 - DNA, 100 bp, Homo sapiens
ccttaaaacttcgagcgtggacgctgaatgggtttgtaaagtttcggctactgcagcactggggtgtcagttgttggtccgacccagaacgcttcagttc

SEQ ID NO: 826192 - DNA, 100 bp, Homo sapiens
cccaggacaaagaatgccccatcactgccctccagaacatgctacaaaactgctccaggaaaatcagttggagtggaaatgaacacccagaatgaactga

SEQ ID NO: 826193 - DNA, 99 bp, Homo sapiens
tttggacttttgtttcaggaaagccctgagcagaaagtgttcctggctctatgccaaatgcatcctggactggaaacctcagagctataaagtggagtg

SEQ ID NO: 826194 - DNA, 104 bp, Homo sapiens
atgatagaccacctggttaccatgaagatcagccactgggatgggaagaggagcaggacttggatggtgagaaggggccatcatcggaagggcctgaggaggag

SEQ ID NO: 826195 - DNA, 98 bp, Homo sapiens
aaagctttcctaggccaaaaagagagtgcctggtgaagaatgtgatgggatcactagcatgtctgcggagagcggccctgggacgagattgagaaatc

SEQ ID NO: 826196 - DNA, 100 bp, Homo sapiens
gaaacatggcggcggcgggtgttgtgagcgggaagactctaaaatagagctcaagcttgagaagagagaaccactaaagggcagagcaaagactccagta

SEQ ID NO: 826197 - DNA, 98 bp, Homo sapiens
gggtcctttatatagaagggagagtagggactgcccatgaattcaagaagcattttgaattgccaattttgaagggtcgagacgctgctgctagtgag

SEQ ID NO: 826198 - DNA, 100 bp, Homo sapiens
aatccaggactatgacttcaagactcggatatgcaaaaaagtctgtggccactacactcagagtcctgtgtatggaaactcacatgagtcagctcagtct

SEQ ID NO: 826199 - DNA, 100 bp, Homo sapiens
taaccagttctgtttgcctgttttggatagcaatgatcccaatttccagatgccttgttcaacagcctttctgagaaaagtctacagcattctttctctg

SEQ ID NO: 826200 - DNA, 98 bp, Homo sapiens
acccaggtgttgcagcgctgtgacctcgagcatcactttcaaaccagtgtaaacaggaacatcgataagtagtgtaaaaacttgcacaatgaaatccg

SEQ ID NO: 826201 - DNA, 152 bp, Homo sapiens
aggaactggagaggaccaacaaattcatcaaagacgtaatcaaagacggcaacgcgcttatcagcgctatgagaaggggcagctggcattttatgctatgtgggagcctatgtcttcatcacttatgatgactatgaccacttctttgaaga

SEQ ID NO: 826202 - DNA, 100 bp, Homo sapiens
ggcgaccactgcttctccgtgggcagcattggcgaccagcgcttcacggtggtattaaagataatcaaacattatcaagaagaaggacaaggaactgaag

SEQ ID NO: 826203 - DNA, 100 bp, Homo sapiens
gcggcgttagtattggccgtgtacccgaaaaactgattgactgggctggcgttaactgtgcggaggcaggccgcaccagcttctatgaggagtacggtgt

SEQ ID NO: 826204 - DNA, 100 bp, Homo sapiens
gtctcttatttagttctggggagcgcctcgtcgacatgagtgatgtggaggaaaacaacttcgagggcagagagtggagtcaacatatcaatggagcaag

SEQ ID NO: 826205 - DNA, 98 bp, Homo sapiens
cagctcagtgctgtgcgggccagaaatgactgctgtccatgcaggcaacataaacttcaagtgggatcctaaaagtctagagatcaggactctggcag

SEQ ID NO: 826206 - DNA, 100 bp, Homo sapiens
ctcagcttgcaaaagcccagggccatatatctcagcccacaccagttatcctattgaaagaggggactgatagctcccaaggcatcccccagcttgtgag

SEQ ID NO: 826207 - DNA, 99 bp, Homo sapiens
gagtctccgcgtcccgctcgctgggagagaggtacctctccttttccctctccctttccctaaggaacttgctactaccagcaccatgccctaccaata

SEQ ID NO: 826208 - DNA, 50 bp, Homo sapiens
agattattcacgaagctctagaaaggtctatcatatgcaagtcacacggt

SEQ ID NO: 826209 - DNA, 100 bp, Homo sapiens
gtaaactctccacaccacagtactcagagtgacacatgtccgctggcccaggaagaaattttagaaattaacagagcagctgcagatctgggacacggcc

SEQ ID NO: 826210 - DNA, 100 bp, Homo sapiens
ttaacacattctgcagttttaattcaggtagctacagcaagctgggtagcaggcagatccaaaggatatcatgaagtttccagggcctttggaaaaccag

SEQ ID NO: 826211 - DNA, 100 bp, Homo sapiens
acaaaaggtcccggaccccccggatctgacggggcgggacctggcgccaccttgcagcaaatccagtttgctgatgacatgcaggagttcaccaaattcc

SEQ ID NO: 826212 - DNA, 100 bp, Homo sapiens
atgagggacaacctctttgaaattgtaacaacgtctcgaactttctatgtgcagttatcaggaactgttgccgttattacatcagatgggagaatgattg

SEQ ID NO: 826213 - DNA, 99 bp, Homo sapiens
ctcagtctgcggccaagactccgtcctgcaaggaagctgcagtaaaggaagatgaagaagaagtttcagataagggcagtgattctgaagaagaagaaa

SEQ ID NO: 826214 - DNA, 99 bp, Homo sapiens
ggcggtaaaccaacagctcacaaaggagaaagagcactaccaggtgttaggtgtggagccggagccttttgaagttggagaccacctgactgaggctag

SEQ ID NO: 826215 - DNA, 100 bp, Homo sapiens
cgaagctcatcttaaatatatcaaagaggctgtccgactggatgacgtcgctgttcattactacagattgtataagggcaacagcgattttaggatatct

SEQ ID NO: 826216 - DNA, 116 bp, Homo sapiens
tgggggttcgcgcccgccgacccgcgccctgctccctctcagcacctgggcggacgaaactctataaaacaggtcgggagatgcaggagaggatcatggacctgcttgtggtggtg

SEQ ID NO: 826217 - DNA, 98 bp, Homo sapiens
tcccatgcagtttgggatcatccagaagcatctgaagaccatggatcacaaccggaaccgcagggcaaaatacatatctcagtgcattgatgagatca

SEQ ID NO: 826218 - DNA, 98 bp, Homo sapiens
ttggagaggctgtgagccacaatgcatcgctggaagtagccacccaggagttaaagtcactgtttgaaaaaaaatctctcaaagagaagcctccaatt

SEQ ID NO: 826219 - DNA, 100 bp, Homo sapiens
catgatctcctactcaccctacatcagccactctgcaggggacaggcagagctacggcgagggcagctggtggaatttttgaagaaaatggaatctcgag

SEQ ID NO: 826220 - DNA, 100 bp, Homo sapiens
ttatgaagtattaattcttccactgatatctcaaaaggtgatctggacaaaggaacaggtatctcagtcctattttgtaacggattatgatccaaccatt

SEQ ID NO: 826221 - DNA, 100 bp, Homo sapiens
tcagccaccagccccgaagggaagaagctgccacgcaccttctgccagctgatcctggaccccatcttcaaggtcttcagataatctttcctcagtatct

SEQ ID NO: 826222 - DNA, 98 bp, Homo sapiens
cgagcgccccgccatcgtcccggtgatttgatgaaggctgctgcaggagagttcgcagatgatccctgctcttctgtgaagcgaggcaacatggttcg

SEQ ID NO: 826223 - DNA, 133 bp, Homo sapiens
cctgttcagcagcattggtgaagttgaatctgcaaaacttattcgggataaagtagcaggttctcttgctgcaaatggccctaccaccttggttgataaagtttcaaatcccaaaactaatggggacagtcag

SEQ ID NO: 826224 - DNA, 98 bp, Homo sapiens
gggattttctactgcatctcgacagcatctcgggtaacaaccgagcccctcctcgcagcatgcctgtgaggagccaccaacatttgaagctatggagc

SEQ ID NO: 826225 - DNA, 98 bp, Homo sapiens
aactagcagtggacagtatagcattatcctgcactgaaaactctggaacatctagagcatacctacctgcctcaagtaagccactatcgattctgcaa

SEQ ID NO: 826226 - DNA, 99 bp, Homo sapiens
tgaggagaccaggaggaattttgaagccaccttaggttggctacaagaacatgcttgctcaagaacttatggtctaggcttggtggagccagtgaacgt

SEQ ID NO: 826227 - DNA, 100 bp, Homo sapiens
ccgttggagtagaagtgtccagcgacagcttctgggagatggatttgcagccgctgcaagtgtgtggaagggccgtgttcgtgttggcaaagaaggtcgg

SEQ ID NO: 826228 - DNA, 100 bp, Homo sapiens
cttggatcccattcacctgaggcacccgaagaagagaccatccatatttccagctgtccagaccaaaacgaagaagacgttagccaaacccaatataagg

SEQ ID NO: 826229 - DNA, 99 bp, Homo sapiens
aaagctgtggaaggctctggataaggaccagtacctgcccaggaaactggctcaagttggtgacccaagcctattgtaaacaagtgattatctcaaagg

SEQ ID NO: 826230 - DNA, 98 bp, Homo sapiens
agcgatggccgggatcctggagcactcggtcatgtacccggtggactcggtgaagatgcaggacagctggagcacacattgatgaatcattgttccct

SEQ ID NO: 826231 - DNA, 100 bp, Homo sapiens
cgggctgggctttcctcacccggaggaagtggcttttaggaagaagaggctgtgcattaaatttattccacgggattcaacggaagctgcgatttgtgac

SEQ ID NO: 826232 - DNA, 99 bp, Homo sapiens
cgggacagagcggtcggtgacagcctcaagggcttcagcaccgcgcccatggcagagccagaccacaatgcagatcttcgtgaagactctgactggtaa

SEQ ID NO: 826233 - DNA, 98 bp, Homo sapiens
cctctcctttccctttgagaccgtgaagagaaagatgcaggctaaagaacgtgccaatggaatggagcttgatgggcgtaggatcagagttgatttct

SEQ ID NO: 826234 - DNA, 100 bp, Homo sapiens
attatattagttggattatggatcacccagtggctgtttctgagatacaagtgtcattccacacatccacaaatctctgattgggaagaaaggacaacag

SEQ ID NO: 826235 - DNA, 100 bp, Homo sapiens
ccatccttcgggagaggatatgtagcgaggaggaacgcgctaaggcaaagcacctggacggagaacgtgaccttgaagaagccagaaacttttccaaaaa

SEQ ID NO: 826236 - DNA, 100 bp, Homo sapiens
aaccttggtatgaagtgtggcatccaaaatcagacactgactcatatattgaagtccttgatggttcccgtgtccaccctgagacttatgagtgggctag

SEQ ID NO: 826237 - DNA, 99 bp, Homo sapiens
tggctgcaacaaggttttcatgatcgaccgctacctgcagcgccacgtgaagctcatccacacaggtgaaaggtgtagcagtcactcggcctacaccca

SEQ ID NO: 826238 - DNA, 100 bp, Homo sapiens
tattctcaggatatgacaggggtaacacccttccagatgatttttgaggctgaaagaatattctcagaggttagaaggattgagaattatagagttgaag

SEQ ID NO: 826239 - DNA, 99 bp, Homo sapiens
gaatattttccttctgaaccagggttctgcatccactacaacattgtcatgccaatgcacaaagcagggtcatcagaagcctctcgattcaaaagatga

SEQ ID NO: 826240 - DNA, 100 bp, Homo sapiens
aagtcttcatcatcagtgtggagactcatgctgtagagatatggctcgtggacagcagaaaattcagtctcagcagaaaaatgccaaaaagcaagctgga

SEQ ID NO: 826241 - DNA, 100 bp, Homo sapiens
cgctgcagcggccctggcgggtgccctggctaccatggaccatcctgctggtcagcactgcggctgcattcacagctctgatggagggcaaaatcaataa

SEQ ID NO: 826242 - DNA, 100 bp, Homo sapiens
cgaggtataccttaagccgtacttcctggaagcgtatcgacccatccggaaagatatggctcgtggacagcagaaaattcagtctcagcagaaaaatgcc

SEQ ID NO: 826243 - DNA, 117 bp, Homo sapiens
catataatatgcatacgacaaaatattgaagcaaactttattaaaccaaactttcagcagttatttagtgtggttggtattgggggccaatgaattgggaagatgcagagatgaagc

SEQ ID NO: 826244 - DNA, 99 bp, Homo sapiens
tacagagaagcaagccagccaagtaacaaagcagcaaaatgatgcttcaacacccaggccaggtctctgcctcggaagtgagtgcttctgccatcgtcc

SEQ ID NO: 826245 - DNA, 100 bp, Homo sapiens
ctgaccacgtctatctctgggggtcgcacgttgcgggcagagcgcaaggcatacaccagaaaacgctgtcctgtgggaagaaactttttggtgagggcta

SEQ ID NO: 826246 - DNA, 100 bp, Homo sapiens
aggagcacgtgggcacggaccaattcgggaacaaatactactacatcccgcagtacaagaactggagagactctgaacaggaagtgcctcctggaaccac

SEQ ID NO: 826247 - DNA, 98 bp, Homo sapiens
gaaacatgaatttgatgcagacttacaggctgaagccgacgtagcttctctgaacagacgcatccagctggttgaggaagagttggatcgtgcccagg

SEQ ID NO: 826248 - DNA, 98 bp, Homo sapiens
ccagcaaacgtctacactgtacatgctttttattacaagactacggagcataggaggaaaattcatcatctggcatccgtgtcattctggaccttact

SEQ ID NO: 826249 - DNA, 100 bp, Homo sapiens
cctcaacaccagcaccgcagatgttgtcaaggtggcctaccaggaggccaggggtgtcgccatgttcctgctcattttccacaaggccgcggcaggggag

SEQ ID NO: 826250 - DNA, 98 bp, Homo sapiens
ctcgaacagtatcttcttcttcgctccctagcttagaagaggcaaaatacatatctcagtgcattgatgagatcaagcaggagctgaagcaggacaac

SEQ ID NO: 826251 - DNA, 100 bp, Homo sapiens
ggatactcccatgctgccaaagatccaaacgatcaaagatgttgctggagataaataggcagaaggaagaagaggacctcaaattacaattgcaacttca

SEQ ID NO: 826252 - DNA, 99 bp, Homo sapiens
gcaggaggaggaggaggggctccggctggtctgtggtgaggcgttggagaccagggccagccctggccacaccccaggctgtgtcaccttcgtcctgaa

SEQ ID NO: 826253 - DNA, 100 bp, Homo sapiens
caccgatcttcttgtgtcaccatgctattatgcatagaaaggtttgacagtgctctggaagacctacctaagagtggacctcaccctcctgcaactcctc

SEQ ID NO: 826254 - DNA, 100 bp, Homo sapiens
tgagcgtgtcctgcggaaaacagagaggttccagaaatggctgcaggccaagcgcctcacgccggacctggtgcaggaaggacttttgactagatctgct

SEQ ID NO: 826255 - DNA, 100 bp, Homo sapiens
taaagaatcagataaagaagatggacgggaatctccttcttatgaagctgaacatggttatgcctccatgttaccatacaataacaaggacagagatgcc

SEQ ID NO: 826256 - DNA, 100 bp, Homo sapiens
aaggctgaaatcattgaagtgcttggagtgcagaactgaaagaggccttcactatcatggaccagaacagggatggcttcattgacaagaacgatctgag

SEQ ID NO: 826257 - DNA, 98 bp, Homo sapiens
cacatcctgaaatgcttcatgggatggcccctcagcaaaagcatgggcaggtggtcttcgagggatagcacgaggtggtctgacaggactaacactta

SEQ ID NO: 826258 - DNA, 100 bp, Homo sapiens
catgctgatggcgataagtcattaccacagattggatttgaggctcctcccctccagggacaggctgcagctccagcgagtggcagtggagctgattctg

SEQ ID NO: 826259 - DNA, 101 bp, Homo sapiens
cagaagaagaccgaagggaagacttccagtagctccaaggaggttaaggtcgggtcacaaatcttcgaagagtgacatatgttgttttagatgaagcagac

SEQ ID NO: 826260 - DNA, 100 bp, Homo sapiens
aaaattctgcagatgaacatttgattccacagctgggctatgtggcaacaagccagaaggaaatatcagttgaaaaaaagcacacctggaatgcatcact

SEQ ID NO: 826261 - DNA, 107 bp, Homo sapiens
agtcggcctgatggcttagaggactctgaggatagcaaaatgtaaccttctgtaatggaagatgattgaagacaaggggcctcgtgttgctgactactttgttgtag

SEQ ID NO: 826262 - DNA, 98 bp, Homo sapiens
tgaagccatctctcaacttcacagccactactttaacccatgagatcggacacatatttggactgcgacactgccagtggcttgcatgcctcatgcaa

SEQ ID NO: 826263 - DNA, 100 bp, Homo sapiens
ttcaagtcaatctgaaagtcccagccagccaagtgacgctgacattaaggaccagccagaaaatgattcaaggcctcttccagatgtagccctgactggg

SEQ ID NO: 826264 - DNA, 134 bp, Homo sapiens
atattttgatggctactatgctgaacggtgcagcagtgatggatgcagctcttctgttgatagataatcccagatccagctggaaagctgaagtatttcgataaactgaattgagaaatacttcttcaagttat

SEQ ID NO: 826265 - DNA, 98 bp, Homo sapiens
actgcgttttgatgatggagggctactacaggctaccaaagtgacagcagatggcgagcagaccggacaggatgctgagaggaccaacacaagagcaa

SEQ ID NO: 826266 - DNA, 100 bp, Homo sapiens
cggagttcccgtcttatgagtcatcagagaactcacacagaggcccccagaatgagaagtgacaacaaggaaaatccacaacaggaaggggctaaaggag

SEQ ID NO: 826267 - DNA, 99 bp, Homo sapiens
ctgatctcggctgtcggagtgggtgtcctcaagaaagggactgctgagatgtcctctattcttgaagagcgtattcttggagctgatacctctgttgat

SEQ ID NO: 826268 - DNA, 100 bp, Homo sapiens
gctcatagcagccaccttcattccccaagggctcgctcagccagttgctctaggtcgtaaccagcctttgaaaaaggagaaaccaaaatggaaaagcgat

SEQ ID NO: 826269 - DNA, 98 bp, Homo sapiens
cgagtacctcatgcgggcagaaagtatctctagtctttatgggaaacctcagcttgatgatgtatctcaggcccttgatgagcctccctatttgacag

SEQ ID NO: 826270 - DNA, 127 bp, Homo sapiens
aaaggaagatggcccaagtgtctttggcagtttctttttacaacactgtgtgactatgaatacggttatcaatactctggctgaccatcatcatcgtgggactgactttggtggaagtccttggtta

SEQ ID NO: 826271 - DNA, 100 bp, Homo sapiens
ggaacggctcgctggagctgcccggggcggtccctggctgcgtgcacagcgccttgttccagcagggcctgatccagggaagacatgtaaggaatttgca

SEQ ID NO: 826272 - DNA, 100 bp, Homo sapiens
ggtttaacactcatagggagcttttggagagcaactttactttagtggcatccagttttggatgaaccaatagcagaagctgtctgtattatagctgaca

SEQ ID NO: 826273 - DNA, 99 bp, Homo sapiens
tcttgagtagctgggattacagactgcttttcaggaagccttggacgctgcaggtgataaacttgtagtagttgacttctcagccacgtggtgtgggcc

SEQ ID NO: 826274 - DNA, 98 bp, Homo sapiens
agagcattttaagaaaggacagcattcctgtgacctctgcctaccatccataaaatactcattcccctctcaggttcatcgtgaagaataaatgagat

SEQ ID NO: 826275 - DNA, 100 bp, Homo sapiens
cctggagttgaaaggtgacattgagaaatgcctcacagctatcgttttgtttggctatgccaccacagtcatccccagggtctatacatactatgtttca

SEQ ID NO: 826276 - DNA, 100 bp, Homo sapiens
cagggattggtgaccaaccagaaggctcagacatctgattgctgacctcaagttgtcctcgaagaaggtacaattgcttttaaaaattgggttaaaacag

SEQ ID NO: 826277 - DNA, 98 bp, Homo sapiens
cgacggcaccgtcaccgaggcgccgcgcacagtcaagaagtctgaagatgatgagaaactgaaaaagaggaaggagcgatttgggattgtcacaagtt

SEQ ID NO: 826278 - DNA, 100 bp, Homo sapiens
gaggccggcagctggcgctggggatccctgctcttcgctctcttcctggctgcgtccctagccaggcggcactccagggtccggcccaaggtgactgtcc

SEQ ID NO: 826279 - DNA, 100 bp, Homo sapiens
tagagcacagtgatgagcaagcagtaataaagtctcccttaaaatgcaccctccttccacctggccaggaatcaggtacatggtaaagcataaatcgcac

SEQ ID NO: 826280 - DNA, 100 bp, Homo sapiens
aagcccaaaggctagggcgggtgcttcgagctaaaaaagcttgaagtacatctggattccttatgtgtgcatgttagcagcatttggtgtatgttctccc

SEQ ID NO: 826281 - DNA, 99 bp, Homo sapiens
ctaccgggccctgtctgtgccggccgtgagctgcggcaggacggctggaggtggtaaagactatcggcctccgggaagtgtggtactttggcctccact

SEQ ID NO: 826282 - DNA, 98 bp, Homo sapiens
atgtgttcctcaatgaatcacgcagctgttgtgctgtgtatggacgtgggctttaccatgagtaactccattcctggtatagaatccccatttgaaca

SEQ ID NO: 826283 - DNA, 98 bp, Homo sapiens
caggcaatgagatttaccgcaagggcaccatctccttctttgagattgatggacgtaagaacaagaagggagagaaggtacccaaagggaaaaaggga

SEQ ID NO: 826284 - DNA, 98 bp, Homo sapiens
gtaaattgggatattcacaatgtatggaaacagaggaaaagtgggttgaagttgcctcaatgaaagtgcctagagcaggcatgtgtgttgtggcagtc

SEQ ID NO: 826285 - DNA, 99 bp, Homo sapiens
acaggtcacagtaaggccaaaaatgtgcatactcacagagttagagagagggatggtgccaactgggtacatggaaaactcagtctcctacagcgcaat

SEQ ID NO: 826286 - DNA, 100 bp, Homo sapiens
caaaactagaaacagtcccgggagctcaagaagaaactaccacacaacaagatcaaatgcacctaagttatgaaaagggctaccagagaccaagtcatta

SEQ ID NO: 826287 - DNA, 98 bp, Homo sapiens
agtccatgctgctgccgttaatggagataagggtgctctacagaggctcatcgtagtttctacagcagtataatcactacaaatccaatgtggagatt

SEQ ID NO: 826288 - DNA, 100 bp, Homo sapiens
cactgaaatctcttttaggggattctgcaccaacactgcacttaaataagggcacacctagtcagatttctcgaatgctggcagccaaaaccgttttggc

SEQ ID NO: 826289 - DNA, 100 bp, Homo sapiens
atttctcttggatttggctacacacttatagatcttctgcactgtttacaggcacaggtgagccagccatgagagggtatcttgtggccatattcctgag

SEQ ID NO: 826290 - DNA, 100 bp, Homo sapiens
atcgtgaccgagaccgtgaccgagagcgtgaccgagagcgcgaatatcgtcatcgttagaaggtacaggtgaacaaaggcagagtaaactgtcaccccag

SEQ ID NO: 826291 - DNA, 100 bp, Homo sapiens
tcaagaaatttgcctcgaaaaccaagagcaggacatcgagactttacatggctctgttcacgtcacgctgtgtgggactcccaagggaaaccggcctgtc

SEQ ID NO: 826292 - DNA, 100 bp, Homo sapiens
ctcatgtcttttcagacattcctgggataaacagtgtgaccgatgtcatatgctaggccactatacagattgtgtcccggcatggatatccggaacaacc

SEQ ID NO: 826293 - DNA, 120 bp, Homo sapiens
gaatctatgatgctgatggtgatggagattttgatgtggatgatgccaaagttttattagttctgtggaagcaaatcattgaacgcaatggaggagtcctcaccagtgccttgaatgtca

SEQ ID NO: 826294 - DNA, 99 bp, Homo sapiens
tgcaggtgctagcgctgctgggggccgcccatgaaagcgcagccatggcggaatatctaaatacacaccttccatgagttctgtcgaggtggacaaagc

SEQ ID NO: 826295 - DNA, 100 bp, Homo sapiens
gcagatttcccaagagcagcggaaaatgatccagtcacaggacacattcagctaacgtattttagcaggtggagtgaggttgaagattcctgtgacagcg

SEQ ID NO: 826296 - DNA, 100 bp, Homo sapiens
gcacctgcgcgaagctggccaaagcctgcccagacggctcacctgtgcgggatggaacaaaagcagtcctgcgttaactgcggccgggaggctatgagcg

SEQ ID NO: 826297 - DNA, 100 bp, Homo sapiens
tgcaagaactcttcaggcacatatggaagatctcgaaagataagcacattgaagaagtgcggaagaacaaagaatccaaagaccctgctgacgagactga

SEQ ID NO: 826298 - DNA, 100 bp, Homo sapiens
ggaagaccctggaccctacctacatcctgagctacatggccccctggtttagggaggtaccttctccaggcaaattccgttcccctgcagcaccatctcc

SEQ ID NO: 826299 - DNA, 98 bp, Homo sapiens
cccctggacatggaggagaaggtccgcttcaagcattatcctgcactgaaaactctggaacatctagagcatacctacctgcctcaagtaagccacta

SEQ ID NO: 826300 - DNA, 100 bp, Homo sapiens
ccatggtgttgctgctgtactccttctccgacagatgtgctggtgctgagctgtgatctgataacagacgttgccttacatgaggttgtggacctgttta

SEQ ID NO: 826301 - DNA, 100 bp, Homo sapiens
gccaatcgtggtattttcttggaagaaattccatgagtgaaaccgtcagactggtcagtggaatgcagcaccctggctctgctggaggcgtctatgagac

SEQ ID NO: 826302 - DNA, 100 bp, Homo sapiens
agccccagacaacctattgataccacagctgaactttcttctaagtgccacagtgaaaaggcaattctcaagttcaactactcagtgcaggaggagagcg

SEQ ID NO: 826303 - DNA, 100 bp, Homo sapiens
caaggaagctattaatggcagtggaaacgcagagatgatttacacaatgaagaaagtacatgcactttgggcttctgtatgcctgctgcttaatcttgcc

SEQ ID NO: 826304 - DNA, 100 bp, Homo sapiens
aacgaccggggcgtcggcatgctcacccgcctctacaacatcaagaagacttgggaagatccccatgaaaaagataagagcacgaactgctttggagata

SEQ ID NO: 826305 - DNA, 100 bp, Homo sapiens
gacaccttgagcatcgcatccacggattcctttgcttccgcagcagagattgcagcaaaaattggaggtgatgcagggacatcactgaattcaaatgact

SEQ ID NO: 826306 - DNA, 100 bp, Homo sapiens
ctcttccgtactagtcagttttcgaactagagggggctttgggatcaccagtcggagcccttcgtgttacaggtgtgctgatgtatcgggactaccccct

SEQ ID NO: 826307 - DNA, 100 bp, Homo sapiens
acagtgtctacacaaataactcatgcaacatgctgtatcttttgaatttcagatacaccacctccaccgccacctgtggaagaaccagtctttgatgagt

SEQ ID NO: 826308 - DNA, 100 bp, Homo sapiens
tgagattgtaccccacgagctgccacacggcctgcactctgcgctttgagctactgggctgtgagctgaacgatggtttatgggagaaatattagccagt

SEQ ID NO: 826309 - DNA, 100 bp, Homo sapiens
gagtccaccagatcatccatgtgagtgaccatgcagcaaaagaaggagggtcctctcagtgattaagggagagtcccgtattctcagagtaaaagttgtt

SEQ ID NO: 826310 - DNA, 98 bp, Homo sapiens
cattggcaccagctacatcaatccttgagtatcctattgaacctagtggtgtattaggccgcaccaggatgtcggacaccgaggagcaggaatatgag

SEQ ID NO: 826311 - DNA, 100 bp, Homo sapiens
gtgaaacagagaaagataggcggccatggtccaaccttgaaggtatttctgggaaaagccagcttctgtttgcactggtcttcacaactcgttacctgga

SEQ ID NO: 826312 - DNA, 99 bp, Homo sapiens
tttgtaaggaaagaaaaggaagcaacaacataatgcccagagttggagccaattaaaccagtcagcactggcactggccagggcccctgcagcctgcct

SEQ ID NO: 826313 - DNA, 110 bp, Homo sapiens
tgagtatggcagtgtcagctgtacagccacactaactgtgacagaaggcacagatcattcatggggatgtataaccgaaaccagtcctctccaccgcctggggatcttca

SEQ ID NO: 826314 - DNA, 100 bp, Homo sapiens
aagatgaccttcagtgtgctgctcaaaaacagcctaccgtatgtgaacgggagctgtgtgtgtttgcttttcaaaccctgggagtaatgaatgaagctgc

SEQ ID NO: 826315 - DNA, 98 bp, Homo sapiens
cgcgggacctggcgctgcagcgagccacagtcagacttgttggggcttattcaggtcatgattgtggtatttggagatgaacctccagtcttctctcg

SEQ ID NO: 826316 - DNA, 99 bp, Homo sapiens
agcgctgcactgctgaacaggctcttcagtgcgagttcctccgagatgtggaaccctcaaaaatgcctccaccagaacggagtctcactctgtctccca

SEQ ID NO: 826317 - DNA, 100 bp, Homo sapiens
catccgggaacgcttcgacaatgagacgttccggatcagcgtttatcaggtgctccaggagcacttgggcaggaccccagccaggccacggggacaacag

SEQ ID NO: 826318 - DNA, 98 bp, Homo sapiens
caggatttacttgaaatgaaaggagattccaacctacttcagggtttgaatgccggtgtggaaatgtttactgtggtgtacaccgttactcagatgta

SEQ ID NO: 826319 - DNA, 100 bp, Homo sapiens
gcctgatcgcgatggggacaaaggcgcaagtcgagaggaaactgttgtgcctcttcatattggcgatcctgttgtatcatccccccgaaggagtggaagc

SEQ ID NO: 826320 - DNA, 100 bp, Homo sapiens
agctctgctgaggagtacgtgggcctgtgtggcaggacaaattgcgcccatttagaggatgtggctgtaacctgctggatgggactccatagctccttcc

SEQ ID NO: 826321 - DNA, 100 bp, Homo sapiens
gccggtgcagtacacacactggaacacacaccagccgccggtctgtatggacccaggcttgtcaaactgtactatacacatcgtgacagtcaccattaac

SEQ ID NO: 826322 - DNA, 100 bp, Homo sapiens
ccaccaccagaagagctgcttgactgtgagaccctcattgaccagtatttaaggaggtgtcctgtgggacctggagagccctcccgtgtgcctgactgtg

SEQ ID NO: 826323 - DNA, 100 bp, Homo sapiens
aagacatggagtgtgtgccttgtggagaccctcctcctccttacgaaccgcactgtactttgaattttatgaggggccttttgaatataactccacaaga

SEQ ID NO: 826324 - DNA, 100 bp, Homo sapiens
gaggagcagcccccggagacagcggcacagaggtgcttctgccagaaatcaagatgactaccagctggttcgaaaattaggccgaggtaaatacagtgaa

SEQ ID NO: 826325 - DNA, 100 bp, Homo sapiens
gcctcccttctagagattactatgaatgcactggaatctataaagaggaaaactgtggtatgtctgtgtgtaatggtaaaatatatatcctgggcggaag

SEQ ID NO: 826326 - DNA, 98 bp, Homo sapiens
ggccgggccctcgagacggggacggtaagttcggggagacttcaggccagggcagtctcctgtcttctcttggaaaccacagcagcccatgcacacag

SEQ ID NO: 826327 - DNA, 100 bp, Homo sapiens
cattatctgcaaattctagcaatgtaattcagttgatcattgatgcatacaatgtaaaataccatgaagattttgaaaaaacaaaggggagaggctttac

SEQ ID NO: 826328 - DNA, 100 bp, Homo sapiens
tagttcgatatttctctgcgtgggcagaagatgatcatatgcttatacagaatgaatattgtaatggagatgttacagcccagatagctcttcagcctgc

SEQ ID NO: 826329 - DNA, 98 bp, Homo sapiens
ggtcttcacttttttgaggcaggaaggtcaacatgattgtgtgaccataatcaacaatttctttcctcgagagagactggattattacactaagcccc

SEQ ID NO: 826330 - DNA, 99 bp, Homo sapiens
gttactcaggccatgcactgttacttaaaggaacctaaggtacttccagtgcccacccaagtttggtctcttcgcgcccatccacaaagtgatccgtat

SEQ ID NO: 826331 - DNA, 100 bp, Homo sapiens
cagccttcccagtagctgggaccacaggagccgcaaagacagcctggaaagtgacagctccacggccatcattccccatgagctgattcgcacgcggcag

SEQ ID NO: 826332 - DNA, 98 bp, Homo sapiens
aaagtcaaggatcaggaagaagagctggatgagcaggcagggaccatccagatgctggaacaggatgtggatgaggcccactatgcctattccttcaa

SEQ ID NO: 826333 - DNA, 98 bp, Homo sapiens
taaaggaacaaatacagaaatccactggagcaccttgataggtgttgatcccaagagcattccctagtaaaaacgcttcatgctgaactctatctctg

SEQ ID NO: 826334 - DNA, 100 bp, Homo sapiens
tgagatgaggaggcgtcgcgcgcgcctgtagctcgcgggcctcgcagagtgatcagcagctggactgtgccttggacctaatgaggcgcctgcctcccca

SEQ ID NO: 826335 - DNA, 100 bp, Homo sapiens
tagagacatatggaccacatgttcctgagcttgagatgctaggaagacttgggtaagaatgattgatgttggctgatattggagtgctcattcacatgaa

SEQ ID NO: 826336 - DNA, 100 bp, Homo sapiens
cctaactgaagatgatgtatgaaggagttggagttgttgaaaccaagttaatcagctgtgttcagcgaatacttatgaacagaaggctccagcagcagta

SEQ ID NO: 826337 - DNA, 99 bp, Homo sapiens
gcgaaggatcacagtgaccattatccatgagaaggggagcgagctccattggaaagatgttcgtgaactggtggtagagctaaaaaagtccctgtacgc

SEQ ID NO: 826338 - DNA, 99 bp, Homo sapiens
cgaaatgcccggtcccagagaggagagcgaggaggaagaggacgaggacgacgaggaggaggaggaggaggaaaaaggacctggcaatgcccagacatc

SEQ ID NO: 826339 - DNA, 99 bp, Homo sapiens
gaaaatccacctcgcagcttgtaaatctacaggaatttagataatgggctgtgtgcaatgtaaggataaagaagcaacaaaactgacggaggagaggga

SEQ ID NO: 826340 - DNA, 99 bp, Homo sapiens
cttcatctacaacccgaccaccggagaattcctggggcgcaccgccaagagctggggttatttcacagttgaggattttgggcagatccataacagctg

SEQ ID NO: 826341 - DNA, 100 bp, Homo sapiens
tattcaccagagaaagtggaagaatacaggaacagaaatttttatgaactgagccctcacatgtggaatgcatccttgggacatctttgcatagccccat

SEQ ID NO: 826342 - DNA, 102 bp, Homo sapiens
caccctcagacacggccagctgaccccagaagaaagcaatctgcacatcgtgctgccacacgaggcttcattcgttatggctggcgctggggttggagaact

SEQ ID NO: 826343 - DNA, 100 bp, Homo sapiens
cgctcccggccgccgcgctccggtacacacagcggaccatagcaaaatatgctcccaagtttgatgggtttcagcaacaagactcccaagaacttctggc

SEQ ID NO: 826344 - DNA, 98 bp, Homo sapiens
tgtccttgctggtgcatgcgtcgtcggcctctgggcagcagaagttccacctggtgccaagcatcaacaccatgagtggcagtcaggagctgcagtgg

SEQ ID NO: 826345 - DNA, 100 bp, Homo sapiens
cttagtgaacaacactcagccaaagaggatagatttatacttggcactgttatctgctgtttctgcttcaaaatatgacagatacctagcatctagcaaa

SEQ ID NO: 826346 - DNA, 98 bp, Homo sapiens
ctccagtctgcagctcccagcgtgatcgacgcagaagacaggtgatttctgcatttccgactgaggcctgtatccggtgtccgaggcgaactcagtaa

SEQ ID NO: 826347 - DNA, 100 bp, Homo sapiens
tcggaggacctccctgccctgtataccgagggaacagtcaggtcaattcagtgaagatatgatacccacagtgggcttcaacatgaggaaggtaactaaa

SEQ ID NO: 826348 - DNA, 98 bp, Homo sapiens
tagcaatgaaagtcccaaatgtgctcacctttgacttcatgtcgaagccatctccagcttcgttccagagcccagcatgaatggatacgcggaatttc

SEQ ID NO: 826349 - DNA, 115 bp, Homo sapiens
tattggatttcccacccagaatctttaggtaaatgaggctggtgagattggagagatgaaggatggagtcccagagggagcacaacttcagggaccggttcatcgaaatccaact

SEQ ID NO: 826350 - DNA, 98 bp, Homo sapiens
gcagagttgttatttttcagcgtgaacaagaggtgaatgcgtccccgtctctcacgtccagcactgccaatgaccgaatcctcaagtacaacctgatt

SEQ ID NO: 826351 - DNA, 100 bp, Homo sapiens
actcccggccgttccggaaaggagaaaaggatccagacaatgaatttgctctctggattaatcgaattacagctgctagccaggaacatggactgaagta

SEQ ID NO: 826352 - DNA, 98 bp, Homo sapiens
aacaccatggctgcggcggcccagctctctctgacacaggagcctttgatgaagtgacctcatgcctggtgaaggtgccagagaagacagaaggtggc

SEQ ID NO: 826353 - DNA, 100 bp, Homo sapiens
caactgcttttcccagaacacagagagcagaggctttgatgcggcctggaagaattgatagaatcatctatgtgcctttaccggatgcagcaacaagaag

SEQ ID NO: 826354 - DNA, 100 bp, Homo sapiens
gaagtataggctgaggctacctgtgaacagtacgcagtgaatgttagtatggtgtttgcgaaaacttgcggaagctggagatcacaggcgtgtcttgtcg

SEQ ID NO: 826355 - DNA, 100 bp, Homo sapiens
ccagcccccaagagccgccgggcccaccgttcaacttctgctgactctgcttcctcctccgatacttcccgcagtcggatttggagattgaaaatgaaga

SEQ ID NO: 826356 - DNA, 100 bp, Homo sapiens
agattcttaagctgcctcattcttccatcctcagaacggagaaaatcctccacctccgggtttcataatgcatggaaatgttaatccaaatgctgctggt

SEQ ID NO: 826357 - DNA, 100 bp, Homo sapiens
tgatcctggtatttcaagcattggtcttccaggtcttcctggtccaaagccttgcatccaagggtccttaagccgttgtcttcattgattcatcttcagg

SEQ ID NO: 826358 - DNA, 100 bp, Homo sapiens
aaagctgtgaaataccagagtcaggcccggaagggaactgctgttttctggtataatctgtttgccagtggagaaggagattatagtacacggcatgcag

SEQ ID NO: 826359 - DNA, 100 bp, Homo sapiens
acacttcaccctctcgcctcgggtctcgggggccgctctgggatcccggccaccagcaattgtccgattttaggtgatgggcaagtcagaaagtcagatg

SEQ ID NO: 826360 - DNA, 98 bp, Homo sapiens
catccatgaccacagtggaccagctcgagtctcaagtggacaatggttgagcaatgtttaaagcgtttgaaaaacatgaatttggagggctcaattca

SEQ ID NO: 826361 - DNA, 74 bp, Homo sapiens
aggacatggagtatgaaagacgcccttgccctgttggatgaataggcacctctggaagagccaactgtgtgaga

SEQ ID NO: 826362 - DNA, 101 bp, Homo sapiens
tcatttctgatgagttacgaagagttgaaggggcccggccaggactcggggaagggtggcctgagagcagcgatgacctctggggtcactgtcccaggagg

SEQ ID NO: 826363 - DNA, 100 bp, Homo sapiens
ctgtaccatacattaaagggagcagcggagcgtgctttggacaccatgaattttgatgttataaagggcaagccagtacgcatcatgtggtctcagcgtg

SEQ ID NO: 826364 - DNA, 100 bp, Homo sapiens
tgtgctctgagggagggtccgagccagccgctgttttgccggaggagcccctcaggccgtctgccatcatggatgttctcgcagaagcaaatggcacctt

SEQ ID NO: 826365 - DNA, 98 bp, Homo sapiens
tggtggaagtggttggaaatggcacctatggacaagtctataagaattcccgtactgattagtcaacagtggaaaatctgaagagatgcaagcaggaa

SEQ ID NO: 826366 - DNA, 99 bp, Homo sapiens
tggccgccgccgccgcgagcgctcccgttacgccccatggtgtccatcctgccagcagactgattcagaatgggaggcttttgcaaagaatggtgaaat

SEQ ID NO: 826367 - DNA, 100 bp, Homo sapiens
tgctcatcttaagcaagtggctggaacaggtgtacccaagaatggcagcaaagacaactctctggacatgctgggcacggacatctgggcggccaacacc

SEQ ID NO: 826368 - DNA, 100 bp, Homo sapiens
catcagcaactcctataaacacagtggacgtcaataatgaaagctcttcagagttggctggggaacagaccagggaattggtggatttggagaagagccg

SEQ ID NO: 826369 - DNA, 100 bp, Homo sapiens
agaaaccttcaaagacattattaagccgtattgcagaaaacctacccaaacagcttgctgtgaacagctgctttgtgaagccagcacagtactgaagtat

SEQ ID NO: 826370 - DNA, 99 bp, Homo sapiens
tgaaatccatcttcatcctaccgctccgcccgtggaagcagggaaaggcctggagatgaggaagctggttctctcggggttcttggccagcgaagagat

SEQ ID NO: 826371 - DNA, 100 bp, Homo sapiens
ttggactcagagtttccattgacactgatatggtacagcctgactatttggactggaaaaaatgataactattccgttgaagatttactttacattagag

SEQ ID NO: 826372 - DNA, 100 bp, Homo sapiens
gagcgccgcggccgccgcagccatgaccgtggagttcgaggagtgcgtcaaggactccccgcgcttcaggcgggcgctaatattgacacctgctcagaag

SEQ ID NO: 826373 - DNA, 99 bp, Homo sapiens
cgggcgcctgggtccccagcatgatcctcgggaagtcctcgctggggatggccctcttccgtctggtggagttatctggaggctgcatcaagattgatg

SEQ ID NO: 826374 - DNA, 99 bp, Homo sapiens
ccggctcctccaatgtgggcatcaacaggtggcgaacaaattggagctctggcagatcagcatatcattcatgtggcatgtggcgagtcccacagtctg

SEQ ID NO: 826375 - DNA, 98 bp, Homo sapiens
tcctatggaaccaatgatagaaatgaagaaaagagaagaaccagaatttcctgagccttccaaacactgattttggagactataatcagtttgattct

SEQ ID NO: 826376 - DNA, 98 bp, Homo sapiens
ggccgaggcggtgctgcaagagaaggcactcaagtttatggattcactggcaaaatttgctggcagaaaactgaaagactgtggagaagatcttcttg

SEQ ID NO: 826377 - DNA, 100 bp, Homo sapiens
atgatactgtgcaccttccatttgaagggggaagtctcttgcaaattccagtcaaggccctaaaatatagcacgtgttatagccttagcagattctgttc

SEQ ID NO: 826378 - DNA, 100 bp, Homo sapiens
ttcgagtgggtctacaccgaccagccgcacgccgaccggcgccgggagatcctgggaaaactcactaccatgagaattgcagtgatttgcttttgcctcc

SEQ ID NO: 826379 - DNA, 100 bp, Homo sapiens
attcaccagctcctcagaagtttggcgaaatatgcaattctgtggtgttcttggtcacacatttatggagtttctgaagggcagtggagattactgccag

SEQ ID NO: 826380 - DNA, 152 bp, Homo sapiens
ggacttcaaatctctgcactcccggccgggtggtgggcgcatatcctgggtagcctctaggaagcgctagacacattgtttgggaaatgggaagtaatgacagctggcacctgaactaagtacttttataggcaacaccattccagaaattc

SEQ ID NO: 826381 - DNA, 100 bp, Homo sapiens
cggctattgtggaaatattctccaaaaccccaatgtctggggcctgaagggccatctctattttctgagtggaaatcattctgaggccaaggcatgctat

SEQ ID NO: 826382 - DNA, 102 bp, Homo sapiens
ccaggcctcattggacagcattcgaggatgccggctccaggagcagcagtggaggtcgggaacgcctcattgtggagcccccgctccctcaggagaaggcag

SEQ ID NO: 826383 - DNA, 100 bp, Homo sapiens
atggtggagatcagacccagaaaattcttgctctctttgcacctgaagattcactgacagatgttgatgatggagacacagtgacagatttcatggccca

SEQ ID NO: 826384 - DNA, 98 bp, Homo sapiens
agcaggttggatacggtggcctcactgccctccatattgctacaatagctggccacctagaggtcatgaatgaaaaacttcagcactgcatggaacta

SEQ ID NO: 826385 - DNA, 100 bp, Homo sapiens
ctatggctggagattttgtgaatatggtggaaaaaggaatcattgacccaacaaaggtgctggagaatgccgaaggtgccagaaccaccccttcagttgt

SEQ ID NO: 826386 - DNA, 98 bp, Homo sapiens
ggcaggctattcaatatgaacttcagtcattgggggaatccaatgcacaaatgtttctacagcagtataatcactacaaatccaatgtggagattttc

SEQ ID NO: 826387 - DNA, 135 bp, Homo sapiens
ttctgctactggctactattatgaccccttggcaggaacttattatgaccccaatacccagacatagggtacctccaactttccggggtttcagaagagaattttttattgaaactggaagaccaaaataattac

SEQ ID NO: 826388 - DNA, 100 bp, Homo sapiens
atcatgcaaggatattcctcatatatcatatagctgatcagcttccttgggttttgctgatgacacaagagagctttgcctgaagatggaaacactggag

SEQ ID NO: 826389 - DNA, 98 bp, Homo sapiens
ggaggcagcgcgggatcccagcctcaggcgtgcgcggacggtgtgcggtgagtgatagttgcttcaggaatcttgcagaagaccgcagtgggataaat

SEQ ID NO: 826390 - DNA, 100 bp, Homo sapiens
agatggcaaaaattcagcgtctccgggaagtcttggtccgccgggagtctgagctcaggttcatggtctaggtgctggagtgcgcacggaggccgatgta

SEQ ID NO: 826391 - DNA, 98 bp, Homo sapiens
atgaggatgtaagtgcgtttgaaggcttccacaccctctactccaggcacgcactcctggctttaaagtttatacttgcatttgccatacctgataag

SEQ ID NO: 826392 - DNA, 98 bp, Homo sapiens
gctgggcatcgtggtcggctgcttcgtcctctgctggctgccttttttcttagtcatgcccattggctctccagcagaactatctcctactactcttt

SEQ ID NO: 826393 - DNA, 98 bp, Homo sapiens
cagccccagaagaagctggatcctgactctatccctagcccagctggctcacagttggaccaacgcttacaaatagcaactacaatgcagaaacatat

SEQ ID NO: 826394 - DNA, 98 bp, Homo sapiens
agaaccaaggatttccaagtgatttcttccaaagcacaggaatctcactctgttaaagctggtctgttctaactgagtttgagttcatgatcgagtcc

SEQ ID NO: 826395 - DNA, 98 bp, Homo sapiens
gggaccgggacctgctcctggacccggcctgggagaagcagcagagaaagggcaagctgcctgtcctgctgcttggccgctcctcagagctgcggccg

SEQ ID NO: 826396 - DNA, 99 bp, Homo sapiens
ctcgataaagtggagctgatgctgcccgagaaattgaggccgttgtacaaccatccagcaggcagagacatttgtttgggtgaacaatgcatctgcaca

SEQ ID NO: 826397 - DNA, 100 bp, Homo sapiens
cgagtttccgatttaaagctgagctgcgaggaaaatggcggcgggagctgtgttggggtggaagaggaggaggcgcccgacatcgacatataccactgcc

SEQ ID NO: 826398 - DNA, 100 bp, Homo sapiens
acaagaagcatccttaggagctctgcagaacctcacggccggaagtggaccaatgactgagatggagatatctcgagcagcagcagaacgcagtttgcgg

SEQ ID NO: 826399 - DNA, 98 bp, Homo sapiens
aaacacagagggttctttccattgtgtctgccagcagggtttctcaatctctgcagatggccgtacgtgtgaaggggtgctttccagacaggccaagg

SEQ ID NO: 826400 - DNA, 100 bp, Homo sapiens
ggcggacggcggaggcgcctcccaggaatgaagcaaagtcaggtggacgaagtgatttgataccaactatcaaatttcgacactgttctctgttaagaaa

SEQ ID NO: 826401 - DNA, 98 bp, Homo sapiens
ttttcttatttagccggagtgagaagcaagaaggccctggacacagcaatatctctgggctttcacagctcacagccagcgcctggtcaacgtgaagt

SEQ ID NO: 826402 - DNA, 98 bp, Homo sapiens
tggcatggcggagaaggatgacaccggagtttgacgaagaggtggtttttgaggtgcacttttcaaggagattgtgtacattcagagaacttagaaaa

SEQ ID NO: 826403 - DNA, 100 bp, Homo sapiens
gaatatgaagaaatattgaacacaaaacttgcagagtgcctggaagagctgggatgtctggttgagtcctatggcatgaatgtttgccaaccaaccccag

SEQ ID NO: 826404 - DNA, 100 bp, Homo sapiens
gtgtttttgacaggccttaggctactttcacagggcagaacaagaaagttactgtggcccatgtcctaaaaactggatatgttacaaaaataactgctac

SEQ ID NO: 826405 - DNA, 100 bp, Homo sapiens
gaacattataagaatttcaagcaggcctgaaggattaacatcaacaggccctgttaaacctggcagagcgactgggagaggcaaagcctcgtggactgac

SEQ ID NO: 826406 - DNA, 100 bp, Homo sapiens
aggaaccctttctatattacctcaaagggagatactgctatactcttctacagatgacagtgcagctgagaagaaagggggaaccctccacgctggcctc

SEQ ID NO: 826407 - DNA, 100 bp, Homo sapiens
tgctgtaattgctgaacttaaaaagcagtctaaacctgtgaccacccctgaagaaattgcacagtctcagaccagtatccttcaggggttctcttactct

SEQ ID NO: 826408 - DNA, 100 bp, Homo sapiens
gtgacctgtgtaattatgcagaagaatggagctggattacacacagcaagttcctgcttctgggacagctctactgacgacaaaagactgcatgctggcg

SEQ ID NO: 826409 - DNA, 100 bp, Homo sapiens
ctgtgttccaacaaatagcactttcttattccaaggaagaatcctgtaagtacaatcccaagtattctgttgctaatgacaccggctttgtggacatccc

SEQ ID NO: 826410 - DNA, 99 bp, Homo sapiens
aaagctgagctgcgaggaaaatggcggcgggagcccagcgatctgctcacgagctgcccatggttgaaagacaagacacagacagctgcctggtctatg

SEQ ID NO: 826411 - DNA, 99 bp, Homo sapiens
gcgggactccattccaaaaaaataagaaaaacagaaaaataataattacatctgcaaagaccttatttccaggtgtctgacttccagcaactgctggcc

SEQ ID NO: 826412 - DNA, 98 bp, Homo sapiens
acaaagttacctacgtgttagaaataaatctgatattgcaccttcacagcaacaagatatgattctataacagactcttccagaaatgatatgaagag

SEQ ID NO: 826413 - DNA, 100 bp, Homo sapiens
ctggtgcatctgtttgccggaggcttcttccagaccagctggtcttgcttctggagcatctcttggagcagaagactctgagcccccgaactctgcaaag

SEQ ID NO: 826414 - DNA, 100 bp, Homo sapiens
gctggcttgatattgggacaagctttggtgtcatccccagcactcctctggccatccatacaccactgatgccaaaccagagcattgatgtctccctgcc

SEQ ID NO: 826415 - DNA, 100 bp, Homo sapiens
ctttgaaacgtgtgctgaaaaagaagaatcagcaaatactactgaaagtgcaatatttgagtatcactgcgaggttcttccaggttggaaagagaatatg

SEQ ID NO: 826416 - DNA, 99 bp, Homo sapiens
ccaaaacttgctccacttaatgaaggtggaacagcagaactcctaaacaagggaagtcctcgctggggatggccctcttccgtctggtggagttatctg

SEQ ID NO: 826417 - DNA, 99 bp, Homo sapiens
ttggcttagagagcagagaccatttttcccaatactttatgtaataagacttattcgtctaatggaagagatcatgagtgagaaggagaataaaaccat

SEQ ID NO: 826418 - DNA, 100 bp, Homo sapiens
ggatgagagtggggtatttatctataccacaagcaaccacatcaaatatgctgtcaccactggtttatgtctagaaaattcgagtccttgaggctgagaa

SEQ ID NO: 826419 - DNA, 124 bp, Homo sapiens
tcgctgccttgatatacacttttcaaaatgctttggtgggaagaagtagaggactgttatctgactgcagccatgagcagcaatgagtgcttcaagtgtggacgatctggccactgggcccggg

SEQ ID NO: 826420 - DNA, 99 bp, Homo sapiens
ggacaggggcggggggcgggaggcttgccaccttcagcccccccgcgaacgcccaagcttagaccatgctcagcctccaagcagccttgtcatcgacaa

SEQ ID NO: 826421 - DNA, 98 bp, Homo sapiens
caacatcgactccgagacctccgaaaagcgtttccgcagacagaagtggggagaagcggaggtgtttgagaagtcccccctgcgggtgaagaacttcg

SEQ ID NO: 826422 - DNA, 99 bp, Homo sapiens
gggactttattaccgctttaccaggccctagcaacagaccacctatcagagccgaaggcagaaacttccccttgccacttccaaacaaacctcggcccc

SEQ ID NO: 826423 - DNA, 99 bp, Homo sapiens
tgcagagcgcgcagtacctccggactcgggtcaagctggaaagcctggaagacgcctacattctgcggggagatgatgattccctctccgacaagcatg

SEQ ID NO: 826424 - DNA, 100 bp, Homo sapiens
gagtctttagatgcactgttggcttgcgagacaaatatgatttgcttggaacggtagaagaaatccttccaagcctctcagaaaatatcagtgtttgggg

SEQ ID NO: 826425 - DNA, 100 bp, Homo sapiens
taaagtacttgattatgatacctctcatatttacactggacatatttatgacctcagtgtgaacagggctgtgtgggatggaggagggtgcatctcccaa

SEQ ID NO: 826426 - DNA, 98 bp, Homo sapiens
atgatattggacatggagtaaaggtttgcatcactggttgctgtttatgttgttggggggttcctataccagcgactggtagtgggagccaaaggaat

SEQ ID NO: 826427 - DNA, 100 bp, Homo sapiens
cctgaaaggagagacacttgtgaacattcaagtgaagcaaaagcctttcatgattatatctatgccctcaacagagtcatgacagaactggagcagcagc

SEQ ID NO: 826428 - DNA, 100 bp, Homo sapiens
gcccccaggtccagttggctctccaggtcttcctgtggatgagaatggcaaaattagtcgccttcgtcgagagtgcccttctgatgaatgtggtgctggg

SEQ ID NO: 826429 - DNA, 98 bp, Homo sapiens
cctgggagctcctaaaccccgccacttccggaagactcctggcccgggattatgccaagaaaccagggattgtcaatgaggcagatcagattccgatt

SEQ ID NO: 826430 - DNA, 105 bp, Homo sapiens
gagcagttgcgggactccacggccagagcctgggatctgctgtggaagaacgtccgggagaggcggctggcaggtactggtgaccccggccggggcaggccccgg

SEQ ID NO: 826431 - DNA, 101 bp, Homo sapiens
cttcatgtgtctcttctaagctgaataaagctgttttggaactgtcaggtacctcaaagcgttagcactctacgtatatgaatatctgctccatgtaggag

SEQ ID NO: 826432 - DNA, 100 bp, Homo sapiens
taactgaaagatacatggcttgcaaaaagtaaaccacgatcgttatgctgaaaaatgtggacacagacttgccaggcagcctggggcagagtgaagagaa

SEQ ID NO: 826433 - DNA, 98 bp, Homo sapiens
aagttccagctctgcgccgatctatgcacgcagatgctggagaagtccccttatgaccaggtccctggatggccggttgcaggtgtcccatcggaagg

SEQ ID NO: 826434 - DNA, 100 bp, Homo sapiens
ccgcagtgcttaatgctgtcttaactagtgtaggaaaacggctcaacccaccgctgccgaaatgaagtataaggcatgttttccacaaatcctgcgtgga

SEQ ID NO: 826435 - DNA, 100 bp, Homo sapiens
agacgtcaagttggctgaggcacaccagcaggagtgctgccagaaatttgaacaactttccgaatctgcaaaagaagacccaggggctgatgatgatggg

SEQ ID NO: 826436 - DNA, 100 bp, Homo sapiens
aaagtgtttggggaattggctattctttacaactgtacccggacagcgaccgtcaagaataaaataattgtgggtagctttatgggatacctaaggatct

SEQ ID NO: 826437 - DNA, 98 bp, Homo sapiens
cagtttggatcctacaagcaagctgaatggaggccagatagtaccatgatagctgtatcagagttgatccccctcatattgtgtacagcatgtctaca

SEQ ID NO: 826438 - DNA, 100 bp, Homo sapiens
atgaatcccagggggagatttatagatccattgaacatctagataaaatgcggagttagttacaaaactttatgaggcagctgtgaagaaagttcccaat

SEQ ID NO: 826439 - DNA, 100 bp, Homo sapiens
aacctgaaaaattcaagaagttgaaaaacgcttttcacgtcacctggagagatgcacagcatttttgaaacgttggggttgttggagtggttggattttc

SEQ ID NO: 826440 - DNA, 99 bp, Homo sapiens
ttgtgggagattcttttgccagacattactacttcctaggcagaatgcttggaaagaggttccctataaaagagaagaggaagccttagaggagaggag

SEQ ID NO: 826441 - DNA, 101 bp, Homo sapiens
gtggacatctggagcctgggagtcatcctgtacaccctcgtcagcggctccctgcccttcgacgggcacaacctcaaggtggggtggaagacaacccgtga

SEQ ID NO: 826442 - DNA, 98 bp, Homo sapiens
agcgcaggacaggctgcattggggccaaacacagaatcagcaaagaggaggccatgcgctggttccagcagaagattggcccccgccgcatccacaca

SEQ ID NO: 826443 - DNA, 98 bp, Homo sapiens
ctttgtgtctttttctgcctggaaaagtaggaatccatggtgaacactcctatgccaccttcaccagctgtacaagtgcagggccagcctaacagttc

SEQ ID NO: 826444 - DNA, 100 bp, Homo sapiens
tgcgagacatgtactgatggcttcttcagacccaaagggtatattccagaagatattcttaagaatttagtagaggagcttcctcaaccacgaaaaatac

SEQ ID NO: 826445 - DNA, 100 bp, Homo sapiens
ctgttaatgttgatattttgacctccttccatgaatcacaaatgttcttaatggcatctagaatgatgcttgctctgtcaaggcacagcctattgtctcc

SEQ ID NO: 826446 - DNA, 98 bp, Homo sapiens
tgctcaattcccatacatgcactagagatcaccggcgtaatcaacccagcgttggacaaatactttccgtcagactctggagtgagaatcatagctga

SEQ ID NO: 826447 - DNA, 99 bp, Homo sapiens
ccaggtgagactttcacaataagagcagaggatggaacacttcagtgcattcaagaggactgattacggtgagcagcaacctcagctacgtcatcgagc

SEQ ID NO: 826448 - DNA, 99 bp, Homo sapiens
gaagatggcggatctggaggagcagttgtctgatgaagagaaggtttttgactaaaggccagaatgcattggtagagctacagacacaaagaccaatag

SEQ ID NO: 826449 - DNA, 100 bp, Homo sapiens
cacaacgccaatctagaatactctgcgattccacctgctcctacgaagcccgactttgatggtcctcgagagaagatgcagaaactgggagaaggtgaag

SEQ ID NO: 826450 - DNA, 100 bp, Homo sapiens
agcagccccggctacgggtgcctggttggaggcccaggcatatgcagatgacaacagcttattgttcatggagacttcagccaagacagctatgaacgtg

SEQ ID NO: 826451 - DNA, 98 bp, Homo sapiens
cccaggtccccgcccgcaggtcccgggcaggtgtttgatcagtatgtaaagaccagggcagaggaagaacgcagggaaaagaaaaataaaataatgca

SEQ ID NO: 826452 - DNA, 100 bp, Homo sapiens
gagttttggctgcaagctggcgtggatgggttccaggttcgggacatagagaatctgaagatggaagtttactgttctgattttcatgctgaaagagcag

SEQ ID NO: 826453 - DNA, 100 bp, Homo sapiens
tacgaggtggacatcaagccggataagtgtccccgtagagtcaaccgcacacagatccaggtagtctctgctagtaatgagccccttgcctttgcttcct

SEQ ID NO: 826454 - DNA, 98 bp, Homo sapiens
ctgtacagccacactaactgtgacagttggtgtggttggtacgggaactggtgaagagtggggttctgggagccgatggtgtttgtatgacgtttatg

SEQ ID NO: 826455 - DNA, 100 bp, Homo sapiens
cctcatttgaggagtgggaacaggcttcggcgaacacaaaggtttccacttgagcggcacagtgacagaacctgcaatacaatcggagccagaaactgtt

SEQ ID NO: 826456 - DNA, 98 bp, Homo sapiens
tatcaacacgctttaaatcctatgtagcaatgggccaggtgtggtgtcttacacctgtaatcccagcactgtgggaagccagggcaggtggattgctt

SEQ ID NO: 826457 - DNA, 100 bp, Homo sapiens
cagaggaattttgattgatacatccagacattatctgccagttaagattattcttaaaactctgggaaaatgggaagtccctctgcctaaagtacgtgcc

SEQ ID NO: 826458 - DNA, 100 bp, Homo sapiens
atggataaatcgaaaggagagcccgtcattagcgtgaaaaccacaagcaggtccaaagagagagagcatggggaagtgattgactgtgtgcaggagctga

SEQ ID NO: 826459 - DNA, 99 bp, Homo sapiens
gaagcaaaagatcagcgaggagcagcagcagctccagcaggcgctggctcctgctcaggcaggtaaagtgaggaaacatgcaactgaacaggaaaaaac

SEQ ID NO: 826460 - DNA, 74 bp, Homo sapiens
agctcctacttccagaaaaagtgctcctgggactccaggataccaggccatggatcatctgcagtcattcattg

SEQ ID NO: 826461 - DNA, 100 bp, Homo sapiens
tgggaaagaattagctgggaccatggatggagaaggctctgcatacaaactggtctgctactacaccagctggtcccagtaccgggaaggcgatgggagc

SEQ ID NO: 826462 - DNA, 98 bp, Homo sapiens
tcatatatttaacccccctccaaaaattggtgctagcaatcccctactctgtctggcctctggatctagcttgaagttctggattcatttccttcttc

SEQ ID NO: 826463 - DNA, 100 bp, Homo sapiens
cgtcaccaatgggatgtcacaggtagctacagcaagctgggtagcaggcagatccaaaggatatcatgaagtttccagggcctttggaaaaccagagatt

SEQ ID NO: 826464 - DNA, 98 bp, Homo sapiens
tggatgggctccttcatggcttgacagttccacagctccctgtccacactccccaagggaaattcacctcttctatagaagagtttgttttgaactat

SEQ ID NO: 826465 - DNA, 100 bp, Homo sapiens
gcgccggcccagcagctgcagccgcagcctgtggctgtgcagggccccgagccggcccgggtcgagctgactcaggtgttgacaccttggcagtgtttat

SEQ ID NO: 826466 - DNA, 100 bp, Homo sapiens
ccagcaggctgcagatacgagtggacaagaattgaaacctgacatagtaactaaatctgctcttggtgatgatatcaactttgaaaaaatcttcaaaaag

SEQ ID NO: 826467 - DNA, 99 bp, Homo sapiens
agagctcccacgactgatgactcctgaaggaaaaccctggaggttcagctttagcttgaggtttcagatttccatcgttgcatttacaactgctacaaa

SEQ ID NO: 826468 - DNA, 100 bp, Homo sapiens
atcactacattcccaacactctcaacccagtctttggcagcacaccgttccggaaggcaaaagccttgtatgcctgcaaagctgaacatgactcagaact

SEQ ID NO: 826469 - DNA, 120 bp, Homo sapiens
ggcgagtggcgatgggcgagccggacttgcacgtggagaaagcgatgctcgtcagaagttccgctctgttctggttgaagcaacggtgaaactggatgaactggtgaagaaaattggcaa

SEQ ID NO: 826470 - DNA, 99 bp, Homo sapiens
tcgtgatccagaagtccagagctgaggactgcctgtttgcaggtacactgaggaggggacggctccgtcttcacattgtgcacagatctgaggatggga

SEQ ID NO: 826471 - DNA, 98 bp, Homo sapiens
cagaagtgaggcctcttagatcatccagccgccagctgaccagaaagataggtgaaaatggtgatcccaaagccttcttaatagagatttcctggaca

SEQ ID NO: 826472 - DNA, 100 bp, Homo sapiens
ggttcaggattgcactgctgtaaaaactcagttactcaaactgaaacgtctcctgcatcagtcaggccttgaaaagaggatagaccaggctgtggaggag

SEQ ID NO: 826473 - DNA, 99 bp, Homo sapiens
aggaagcctttaccaacgccatcaccgacctcatcagtgagctgtccctgctggaggagcgcttccggaagctgttgtgaaggcagagcagcatctgct

SEQ ID NO: 826474 - DNA, 100 bp, Homo sapiens
ccatcaatgaacccaaagataaatcatcagaattaacaaggcttgaatctgtattacccagaagccctgctgggatatcagtatgaacaacattactcag

SEQ ID NO: 826475 - DNA, 98 bp, Homo sapiens
gaccgcggtaccgcgcgccactaacagattgatctggatactattgatgtaagcaacctcaacagacagtttttgtttcaaaagaaacatgttggaag

SEQ ID NO: 826476 - DNA, 100 bp, Homo sapiens
tgttctcagaagctatacactcattatctgatacttgtaatcaggaatttactttgcaaaagatgccatctattcccacaaaaattgcccgtatgatgcc

SEQ ID NO: 826477 - DNA, 98 bp, Homo sapiens
ggtccccaagacccttgtgctcgttgtcgccgcggtcctgctgttgatgtccagctcgccgctgtccaagaaacgtcgcgtgtccgggcctgatccaa

SEQ ID NO: 826478 - DNA, 100 bp, Homo sapiens
cgaattcgcgcttgccgtgcacgccggcatcgagcctcaccaacaccgccgggcaacgtggctggagtagattgagaaaatcatgagttctattggagaa

SEQ ID NO: 826479 - DNA, 100 bp, Homo sapiens
tgcccggccaagaggcaaaggggaggttacgcagcaaaccatccagaagaaatgagccgtcagactgctacagcattacctaccggtacctcgaagtgtc

SEQ ID NO: 826480 - DNA, 51 bp, Homo sapiens
gtcggggaggtggtagaagaaggtgtgatccctcacatccacaaatctctg

SEQ ID NO: 826481 - DNA, 98 bp, Homo sapiens
gaatgcaacttggaccaagaactcaaactttttgtatctcgacactctgcaagattctctcctgaagtcccaggtggatatcatccagtgaaaattgg

SEQ ID NO: 826482 - DNA, 100 bp, Homo sapiens
tgctggacaacaccatggaaatatttgacattgagttttttgtagcatcagatccaacagttaaaacagatcgactgtggcacgacaagtatactttgag

SEQ ID NO: 826483 - DNA, 100 bp, Homo sapiens
ctcagttttgatcccctggcatcatttattctccgtactgatcactacatcatgaagctcatttcagaagtgaaagttcaggtggaaaaccaggtacaag

SEQ ID NO: 826484 - DNA, 105 bp, Homo sapiens
ttgttctaacgctgcctttgctttaaaacagtattacttgcgttgatgcggatgaaattaaaaggctaggaaagagatttaagaagcttgatttggacaattctg

SEQ ID NO: 826485 - DNA, 99 bp, Homo sapiens
cctcagaaagatggcgtcctcggagcaggcagagcagccgagccaggttcaggaacagagtcgcctgcctcaactgctgcactgaggaccactccctcc

SEQ ID NO: 826486 - DNA, 109 bp, Homo sapiens
gggtgggcaacttacccgagaacgtgcgggaagagaagatcatcgagcatttcaaacggattatatctgtccaagatgcgagtctggttttatcgaggagcttccggaa

SEQ ID NO: 826487 - DNA, 99 bp, Homo sapiens
tctcggaaaccatgggttattgcagtggcaggtgcacgcttatctttatctgtggcatgcaactggtttgttggagactgaaccgttgcaaggaacaga

SEQ ID NO: 826488 - DNA, 101 bp, Homo sapiens
gaggtgttcgagaacgaccccgagacgaactgtttgaggcgaagagatgctggtttgttgaatcagttgcaagagcttgacaagcagataagtgacctgag

SEQ ID NO: 826489 - DNA, 100 bp, Homo sapiens
cagggaagaaatgtggtacaatcatacttacagcagaggaattaaactgttgcaggttacaaagaagatgatgactttgagactgactcagatgatctca

SEQ ID NO: 826490 - DNA, 98 bp, Homo sapiens
cgtcttccttcccctcccttgcatgatggaaacaccatggctgcggcggcccagctctctctgacacagtgatgaaaatgccaggaaagatttaaaga

SEQ ID NO: 826491 - DNA, 100 bp, Homo sapiens
gttaaattctcaacagctcacaccattctgggattaccgccagcctcggaaatacctcaatattcttccttgccaggtgcctgtctggaaggccagatac

SEQ ID NO: 826492 - DNA, 99 bp, Homo sapiens
ctggagtctgcgaaggccgggacccggttccccggcccacagtgggggtgtgcaaacccgagagaactgggtatgatgagttcaaatttggctgtacct

SEQ ID NO: 826493 - DNA, 98 bp, Homo sapiens
atggaaaccctctcgtcagaggagagctgcgatagttttgactcactagagtcagggaaacagactggcatcagtactatgacatagtttatatgaag

SEQ ID NO: 826494 - DNA, 100 bp, Homo sapiens
aatctacaaggttccttccactgaagcagaagccctggcatctatttcagctcctggcatcagctctattcaaatctggttcagattttacagctctggg

SEQ ID NO: 826495 - DNA, 98 bp, Homo sapiens
attgcatattacacaaaagatgcaatgcctatcaacaaagctacaatcatgccacgggggccaacacttggacatacatgaagacatcttatccatcc

SEQ ID NO: 826496 - DNA, 98 bp, Homo sapiens
gaatcaattttgcatgagaggattgaacaagagattgagatggaaatgaaagcactgaacctaccagatgtatttgggttggtcgtcctcccattgga

SEQ ID NO: 826497 - DNA, 100 bp, Homo sapiens
ctatggtgatgattagagacatactaatgtacatggcaatgaagggctattggcctgtcagctgctcccatccatcccctgcttactgcattgccgagtt

SEQ ID NO: 826498 - DNA, 100 bp, Homo sapiens
gtcactcccctcaggcaaagcagtgacctgcaacagagccagccaagagtcgaagctaaaccagaagttcaatctcagccacctcgtgtgcgtgaacaac

SEQ ID NO: 826499 - DNA, 98 bp, Homo sapiens
ggaaagtatggcagaggaggaagtgttcagtcaagaatgggattctgaccatctcacatgccacaagtaaatgtgtcaaatactggcctgatgagtat

SEQ ID NO: 826500 - DNA, 98 bp, Homo sapiens
cttcacaatggtgctttttcctgattctccagcccctgttgggacacagacagtggggaaaaactgggccttctgctgaagggccacagaggaacacc

SEQ ID NO: 826501 - DNA, 98 bp, Homo sapiens
atagagatgtgatgttggagaactacagaaacctggtctccctagcaagtctggaaaagtttgaaattccagtaaaaattcgtttgagtcctgaaccg

SEQ ID NO: 826502 - DNA, 98 bp, Homo sapiens
atacttcaatatttgcaggacaaaatgatcccttgaaagacagttacgcatttcacaggacatgcaacgccagtttcgtcactgatgttcactaccat

SEQ ID NO: 826503 - DNA, 100 bp, Homo sapiens
tccagaggccagtcgtccacatcagtggcagacagatgaagaaggcgttcgcaccggaaaatgtagcttcccggttaagcaaatcctgaaggaacccaaa

SEQ ID NO: 826504 - DNA, 100 bp, Homo sapiens
caacagaaacgatatgagcaactgctgttctttcaaaatacccaggcagaggaaccggcagacgatgggcaggtgctttactccatgaactgtctaatga

SEQ ID NO: 826505 - DNA, 98 bp, Homo sapiens
ggtgcaggaagaggacatgctggcaggatcattcacaagctgtttgtgaatgcccagaggatataccatggggtatacagttagcagccgtgtatgct

SEQ ID NO: 826506 - DNA, 100 bp, Homo sapiens
tttaatggaccagatcaggatttgagcggaagaacgaatgtaactttaaggaccaggcttcctgtcagagactgaggacccaggaagaaacatgtctcgg

SEQ ID NO: 826507 - DNA, 99 bp, Homo sapiens
tctgagtggaggaactgcactattgtctcacctgatgctggtggagctaagagatttgggtctcgctgtgctagaatattccgtctagttttgcagaag

SEQ ID NO: 826508 - DNA, 100 bp, Homo sapiens
acaagtctctgaattttgtctcaacactgctccagattactatgtcggaacagctggatttacctgtgagacaggcagtcatcagtgagttctgcctcag

SEQ ID NO: 826509 - DNA, 99 bp, Homo sapiens
ttcacaataagagcagaggatggaacacttcagtgcattcaaggtgccacttcggataaaccctttggactcctaactccaatcaggtgtctgctttgt

SEQ ID NO: 826510 - DNA, 98 bp, Homo sapiens
gctcagctggagaacgcggctaaagttctgatggccgagcatgtcgggactccacctggtgaagaggggacgggaacacaagaagctggacctgcaca

SEQ ID NO: 826511 - DNA, 100 bp, Homo sapiens
gaacttccttggaacaaaagtacaactgtgtctggaggtcgcagccgcctgcatctcattgatctcggcagctgtgtgaaagctcttagcaaaaatcgag

SEQ ID NO: 826512 - DNA, 98 bp, Homo sapiens
atgaacccaacctagtgggtgtaatacatcatgaactgcaggaaatgcactcggtgatggaaagagagccactattctgaagaacacttggccaaagg

SEQ ID NO: 826513 - DNA, 98 bp, Homo sapiens
ggatttcttattttcccagttgcagtatctaccattttctaacaaagcccaagaagatgaaaggattgttcttgttgacaacaaatgtaagtgtgccc

SEQ ID NO: 826514 - DNA, 100 bp, Homo sapiens
tattgctttggatttgttgtgcaactgttgctacagctgtggagcagtatgttccctctgagctggtgtcctgtctgtcggagacgacggtgttggcggc

SEQ ID NO: 826515 - DNA, 100 bp, Homo sapiens
accaataggccaggactgtcctgtggacagacggggtgaggtttatacatggggcgacaatgatgagggacaactgggagacggaaccaccaatgccatc

SEQ ID NO: 826516 - DNA, 100 bp, Homo sapiens
gcgtgaccgagagcgcgaatatcgtcatcgttagaaggttgaaatcaaggaagcaggtggtactactacaagtaataatccggaagaagcaactttgcag

SEQ ID NO: 826517 - DNA, 100 bp, Homo sapiens
tcagaatatccggttttgcttgatgaccccaaccagcgtttttgagaagtgtgccacctgggcttgaaggcatgaaggaacaggacctgtgcaacaagat

SEQ ID NO: 826518 - DNA, 100 bp, Homo sapiens
tcggtgccgatcagcggaagaccaaagaggatgagaaggacgacaagcccatccgagcatgaagaggaaccacctcagaatatgaaaccacaatcaggaa

SEQ ID NO: 826519 - DNA, 100 bp, Homo sapiens
gggagtgagggctagtggagggccagctgcctgtgggggctggacatcgtaatatgagttggaagtaaagagggtgcaagacattctttcgggaatagag

SEQ ID NO: 826520 - DNA, 126 bp, Homo sapiens
agcctagattacggaagtaccgcgagcaaggagcgcggaatcggggagcgtccggagctagctggatcctctaggcagatcaggaagcaccatacctcctgcgaaacctcagtgatcacacagtgg

SEQ ID NO: 826521 - DNA, 100 bp, Homo sapiens
caagattccagatgttcctgtggaccccagtccaggtatgcaaccactcatgtattcggttcaggaagcattaaatgccagaccatggtggattcgtatg

SEQ ID NO: 826522 - DNA, 99 bp, Homo sapiens
tgagagccgggatatggacctcaattatagaggcatgctcagcagaagtcaattcatctggaaagactatctctgagtcagacttaaaccactcttttt

SEQ ID NO: 826523 - DNA, 100 bp, Homo sapiens
ccagcactcgaaagggaccgaaatggagagcaaagggcaaatcataccccttcagggggccattcccacctgtatggaatccaattacctacttagatca

SEQ ID NO: 826524 - DNA, 100 bp, Homo sapiens
gacaacgcgtacgagttcaacctcagcgctctgaacgccggcatcggccgcacaggcaccatcattgtcatcgacatgctcatggagaacatctccacca

SEQ ID NO: 826525 - DNA, 100 bp, Homo sapiens
ggtgctctcctagaaagtgggacttatgaagttgaatgcatgacctgcaatggggagagttatcgaggtctcatggatcatacagaatcaggcaagattt

SEQ ID NO: 826526 - DNA, 100 bp, Homo sapiens
gctgttgctgccgccatacgcgctctccctgtttaggtttgtgaaatggctgctgacatttctgaatccagcggggctgactgcaaaggagacccaagga

SEQ ID NO: 826527 - DNA, 100 bp, Homo sapiens
gccgcagcggcggctgtcccctgccggggccgccctactctggggcttcctgctccagctgaacactgttggagaatggcaaaccgtgttctatattgct

SEQ ID NO: 826528 - DNA, 100 bp, Homo sapiens
cgacctcgacgtcttgcctgtgtcccacttgttcgcggcctatagcttttagaaattaactggacaggactgacgaatcttctggatgtccctggattga

SEQ ID NO: 826529 - DNA, 100 bp, Homo sapiens
tgatgaactagtagatagagccaaacaatcttttcaagctctgagaaagtggccgaaagaaaagaaactgaattttttagctctttacccctgaagatga

SEQ ID NO: 826530 - DNA, 99 bp, Homo sapiens
tgacatgcaagttggacagacgggaaaaatagtagcaccagaagatcagcccatctacttggcagtgaagggagtggtgtttgatgtcacctccggaaa

SEQ ID NO: 826531 - DNA, 100 bp, Homo sapiens
gattgtccttgtgctgaaagcgaaagtacaatgtgaactcaacatcacagctcaactccaggagggaggaacggaaaacagttcttccttcaaagcatgc

SEQ ID NO: 826532 - DNA, 98 bp, Homo sapiens
ttaacccagaagtagctgaatgtgttactccattgctgaggagtggaagtgcacggctgtctataacgtgctgccgggtctcaggatggaggagtgaa

SEQ ID NO: 826533 - DNA, 100 bp, Homo sapiens
agtgtcacagcctggttggaaaacccaagatatttatcattcaggtcatcatcagatttgaaatatttaaagtggatacaaaactatttcagcaatgcag

SEQ ID NO: 826534 - DNA, 99 bp, Homo sapiens
tggaccagcctctttccaggtcccaggactttgcaagagatggagacagtggtctggaactgaaagtgatgcgtatttctgagttatgcctgtatttaa

SEQ ID NO: 826535 - DNA, 99 bp, Homo sapiens
tatgaacttggtcggctcttccagctacaaactctaggtttgaaagttggatatgtcaagtgaccagatagctgccaatctgcaagcagttattaatga

SEQ ID NO: 826536 - DNA, 100 bp, Homo sapiens
cgtgtctcagtccacccaaggtctcctcggatcgcctggagaggcactcggacctgcctaagaaagctgtcaagataaaacctcacccacctgtagctcc

SEQ ID NO: 826537 - DNA, 100 bp, Homo sapiens
cctgcgtaacgtcttatggcatgggtttgcgtcacctgaagaaattcctccaaagaaccacagaggacacattaataactggaagtaaaactgctgcccc

SEQ ID NO: 826538 - DNA, 100 bp, Homo sapiens
cccaggcatgcagtgggacacagagcacgtggccagagtcctccttcagcacatagaagtgaatggcatcaatctgaatccagactccaaaatgatgcaa

SEQ ID NO: 826539 - DNA, 100 bp, Homo sapiens
ctcagatcctgtactgtcgggacacctttgaccacccgactctcatagaaaacgagagtatatgcgatgagtttgatgtgtatatctcatgattgatatg

SEQ ID NO: 826540 - DNA, 98 bp, Homo sapiens
ctatatctgtaaagggtatctgatcaagccaacaacagtgacggaatgcctccatacatacttatgaaaatatgcatcagtttaatactgtcttggaa

SEQ ID NO: 826541 - DNA, 100 bp, Homo sapiens
tcgaacctgcactgtggacttttcggggttatggttttgtgaaattcacagatgaactggaacagaagcgagccctgacggagtgccagggagcagtggg

SEQ ID NO: 826542 - DNA, 98 bp, Homo sapiens
tagaagcagctgatggaaaagcccattaatattctatgtggtaatcatgagggactaccagcacgagaatgtggtggagatgtacaacagctacctgg

SEQ ID NO: 826543 - DNA, 98 bp, Homo sapiens
ataccgtgccctgaggttggacgtggggaatttctcctggggctcagagttggtggacttgctttgtgaagagacagttcatgaacaagagtctttca

SEQ ID NO: 826544 - DNA, 98 bp, Homo sapiens
gattcaccaaataagctatatactttggttacctatgtacctgttaccactttcaaaagtaaattcaactggaagggaactattaaagcaattctgaa

SEQ ID NO: 826545 - DNA, 100 bp, Homo sapiens
gctgaagacatgtccccaggaccaccaattttcaacagtgtgatggccaggaccaagatgaaacgcatgagggatttggctgtagcagcaattcctgaag

SEQ ID NO: 826546 - DNA, 100 bp, Homo sapiens
gtgtcagctgtacagccacactaactgtgacagaattcaaagaagctttttcactatttgacaaagatggtgatggaactataacaacaaaggaattggg

SEQ ID NO: 826547 - DNA, 100 bp, Homo sapiens
actcgtcggagccgcgggcggtcagagaccacagagctgggcagcaagaaggagctcaagtccatgcccttcatcacctacctctcaggtttgctgacag

SEQ ID NO: 826548 - DNA, 98 bp, Homo sapiens
atccacagtgatgttgatgctagttctagaggtgaactctggtttcttttataagactgcagaagagaaagagaaattggtaaaagctgaaagaaaat

SEQ ID NO: 826549 - DNA, 101 bp, Homo sapiens
aaattgaattggatgacacactggtgaaaatttttcgcaagcaagcagtcttcctattagaagctttgcagttcctgaccccttaatgcctgacccttcca

SEQ ID NO: 826550 - DNA, 100 bp, Homo sapiens
tttaaaagaaaaagaaaacagattattattgcaacaaaggtcaaaatgcagatcttcgtgaaaacccttaccggcaagaccatcacccttgaggtggagc

SEQ ID NO: 826551 - DNA, 100 bp, Homo sapiens
cagagcttgtgtagcgtcagatccttgagtgataaaggagtagaggtggtggacataatgcgagttaacgtggacaaggttctggaaagagaccagaagc

SEQ ID NO: 826552 - DNA, 100 bp, Homo sapiens
ggaaaggaattagtcaactggctaatccgaaatgggcatattgccacaaggaaactggagcacccatcctaactgatgatgttagcctgcaggtgttcat

SEQ ID NO: 826553 - DNA, 98 bp, Homo sapiens
ccgccggaagtattgacggaaagcttgaattacctacatgaggtgaaaacccccaagcgccggcagccatttgtcccctttgctctgaggaaccacac

SEQ ID NO: 826554 - DNA, 98 bp, Homo sapiens
tacagctgcatggcccagaacgagcggggccgggcctcctgcgaggcggtgctcacagtgctggaggtcggagaaatggtggagtcaatgaagaaagt

SEQ ID NO: 826555 - DNA, 98 bp, Homo sapiens
cctcaacaagaagaggaaaataccatttttaaggctcctgtgacgtttgatgacatcactgtgtacttactccaggaggaatgggtgctgctgagcca

SEQ ID NO: 826556 - DNA, 131 bp, Homo sapiens
ctttaaccccaaaattgagtcctacgctgctgtgaatcacatatcccaactgtcagaggagcagggcaaatcataccccttcagggggccattcccacctgtatggaatccaattacctacttagatcata

SEQ ID NO: 826557 - DNA, 100 bp, Homo sapiens
ttgagagaagccacagataaaatcagagaagctaatcgcctatttgcagtaaatcagaaaaacatgactgcattggaggctatggagttactagtagaga

SEQ ID NO: 826558 - DNA, 98 bp, Homo sapiens
tgacattgccagttttgtcaaagggaaggtaaaggtgattttctatgatagcgactggaaccccactgtggaccagcaggccatggacagggcccacc

SEQ ID NO: 826559 - DNA, 100 bp, Homo sapiens
atattattcggttgaccagaggtggctagaagtgaccccaggatttttttattatcaagagagactagaagaatcatgagacttttcctagttgcctttc

SEQ ID NO: 826560 - DNA, 100 bp, Homo sapiens
attcaaggatgatccagttggaccttttggacaggaaagtgtaacatcagttacagagttcctactatctgaccaccacctacggggccctggagcacat

SEQ ID NO: 826561 - DNA, 98 bp, Homo sapiens
aaaagcttaataggcaatgggcagtcaccagcattgcctcgaccacactcacctctctctgctcatgcaggctcacgaggcccagggaatcctctgga

SEQ ID NO: 826562 - DNA, 100 bp, Homo sapiens
tgcccagcgacggcaccgaggccaaggtggatgaggcccaggctgatgggaaggagcacccaggagctgaaggtttttctattgggaaagctactgatcg

SEQ ID NO: 826563 - DNA, 100 bp, Homo sapiens
gttatgaagctaatcctggcgttccaccagcaaccatgagtggttccatgatgggaagtgacatgatgtgaactatgaagactttactttcaccatacca

SEQ ID NO: 826564 - DNA, 98 bp, Homo sapiens
tgaccggtggaaaccagagcagtacctcgtgtatactacgctatcgttgctatcaagatcatagataagacccagctggatgaagaaaacttgaagaa

SEQ ID NO: 826565 - DNA, 100 bp, Homo sapiens
gccacatgtgtgcttgtgagagtgtctgacttccagcaactgctggcctgtgccagggtgcaagctgagcactggagtggagttttcctgtggagaggag

SEQ ID NO: 826566 - DNA, 100 bp, Homo sapiens
aggcttggaacccattggaaatgtccatccagttgggagctatgagtcctctgaaatgaacagcatactgtttgagatggagaacgtttttactgtgtca

SEQ ID NO: 826567 - DNA, 98 bp, Homo sapiens
actctccggccctgtgcagtctccagggcccacaacggcagtgtcctacatgtcggtgaaatgtgtggatgcccgtaagaaccatcacaagacaaaat

SEQ ID NO: 826568 - DNA, 98 bp, Homo sapiens
gacctagagggactcatgatctttgggatagcagattgtttgcctactccagatgaagctactgaatctttacatcaaacgtgcacaaacaggttctg

SEQ ID NO: 826569 - DNA, 100 bp, Homo sapiens
ctctcacctgcttaacaccctgtacaaggccattcttgaatatgacaatgttggagaagcctctgagcaaaccacccttggcttctgcgttcgaagagtc

SEQ ID NO: 826570 - DNA, 116 bp, Homo sapiens
ccgtacgtcactaccactgtctctgctcacagtgccaagtaacaaatgtggcaattattttggatctatcacctgtcatcataactggcttctgcttgtcatccacacaacaccag

SEQ ID NO: 826571 - DNA, 100 bp, Homo sapiens
gaggagctttgcagggctctgcatggcaggttagctcagccatgcctttcttggacatccagaaaaggttcggccttaacatagatcgatggttgacaat

SEQ ID NO: 826572 - DNA, 100 bp, Homo sapiens
aaggctgaagggcagtggaccttggaaatccaagatctgccatcccaggtccgcaacccggagaagcaaggaagacaactgttagttttgtggcttactg

SEQ ID NO: 826573 - DNA, 99 bp, Homo sapiens
gaggaggccgaactgtggggtccggctgcccaggatccggaggtggcgaaatgtcagacacaaacggacccagatgtggacgagtgctcactagcagaa

SEQ ID NO: 826574 - DNA, 99 bp, Homo sapiens
ttagacttgtttcttatatgtgatgccattccagcactggactcatggaggctgagcatttattcaggcagttaatagtatcatatctatcgtttttgg

SEQ ID NO: 826575 - DNA, 99 bp, Homo sapiens
gaatgaagaagcagtcaaaaagatgcttgtggaagccacccgggagtttgaggaggttgtgcagcacaagccagcgaggaggcagtgtcatttcgccgt

SEQ ID NO: 826576 - DNA, 99 bp, Homo sapiens
tcccaagtagctgggactacaggtcaaatttgagctgattgtgtcagaggcctcctacctgcgcagtctaaacatagctgtggatcatttccaactttc

SEQ ID NO: 826577 - DNA, 98 bp, Homo sapiens
agaaggtctctggagacatcttcagcaggctctcctggggtttgctctatgctggtttcatcttcattatggcccttttcttggcacttgttataaga

SEQ ID NO: 826578 - DNA, 100 bp, Homo sapiens
ctggggttggacttgatagctcaaatttgaaaacaacctttcaggtaccagggccacgtgggtgcatcgctgatcgtgggcggcgtagacctgactggac

SEQ ID NO: 826579 - DNA, 104 bp, Homo sapiens
ggcagtctctgcatatcatggggagatagacgctgctgccttgtgaaggaagaagtgttctggaggaactacttttaccgcgtctccctgattaagcagtcagc

SEQ ID NO: 826580 - DNA, 98 bp, Homo sapiens
gaactgggttctggactttgggcgtcccattgccatggtgcccctgggcgctgggattgctctagcctgtaagtataatggaaaagatgaggtctgcc

SEQ ID NO: 826581 - DNA, 100 bp, Homo sapiens
gcgggagccagcgagccacgggagcgagccagactgattcttgctattccaaatcctcttccacgttgacagcccttcagatatttcaacactcctctca

SEQ ID NO: 826582 - DNA, 98 bp, Homo sapiens
tgtacctggtccactgaaaaattcttcagattggaaaataccacaggatggagactacgagtttcgtatagcttctggcctgggcttggcctggattg

SEQ ID NO: 826583 - DNA, 98 bp, Homo sapiens
tcaggttctttgaaggattttgcctggctggaatcattctcaccttgtatgctttacggtctcccttgatctgagaatggctacctctcgatatgagc

SEQ ID NO: 826584 - DNA, 100 bp, Homo sapiens
ttaacacctctgccgctgctaaaagtcattttttgagaccagtactgttataatccctatttacagatgaagaaactgagcttcaaaatgattaagtgtc

SEQ ID NO: 826585 - DNA, 100 bp, Homo sapiens
gacccttcacctttgatcccctgacctgcattaccttgaaacccgggatggacgtggccgacgcctacgtgactttcgtccgccattctcaggatgtcct

SEQ ID NO: 826586 - DNA, 98 bp, Homo sapiens
gtctgatttccattctgggtgatgccaggatacctgcccactatgtctatccgcaggcttttgtgcagccgggagtggtcattccacacgtccagccg

SEQ ID NO: 826587 - DNA, 100 bp, Homo sapiens
catttcaggagtacctggaggctcaacggcagaagcttcaccacaaaagcgaaatgggcacaccacaggttcctttgcccaaagactcaacaggtgcagc

SEQ ID NO: 826588 - DNA, 98 bp, Homo sapiens
cttcagtctcttcgtaacagaacaatcctctgccttgtcaatgttagtcacaatggtgtgagtgaatcagaactgatggaactctatcctgagatgtc

SEQ ID NO: 826589 - DNA, 122 bp, Homo sapiens
ctttgatattgatgtgaacgcctctgtgtttgaaacaaacattcgagatgagacaccaattattgcggtgatggtggccctgtcctctctgctagtgatcgtgtttattatcatagttttgt

SEQ ID NO: 826590 - DNA, 100 bp, Homo sapiens
cagtttcaaaagaattggccaaagaagttgagaaaatgggagcagttttcatggatgcccctgtttctggtgagatgtgaagatgtttggcttggtatgc

SEQ ID NO: 826591 - DNA, 99 bp, Homo sapiens
ttttcattcctagtcattctctgtaaaggtgtgactgcacagaaaagttacaaaacaaatttgactttttgcgctcacagttgaatgatatttcgtcat

SEQ ID NO: 826592 - DNA, 98 bp, Homo sapiens
ctgaaatgtaaacaagaagccagaaacttacaggggataaaggaggattatactgactgtggtggtgtttctggattaaatccctccctgtggtatat

SEQ ID NO: 826593 - DNA, 50 bp, Homo sapiens
cgatctccatatttcattgcaaggtgagtgaagatggcagagaggacgtg

SEQ ID NO: 826594 - DNA, 106 bp, Homo sapiens
catcgagcacctcttgcccctcttcctggctcagctgaaggatgaggtggaacgtgtgatcaccattatgcagaatccacgccagtacaagatcccagactggttc

SEQ ID NO: 826595 - DNA, 98 bp, Homo sapiens
tgtgaacgcactgtctttcagtttgatgtccagaggaagtacttcaaggaagctcttgatagggaggaagaaagggaagattttgatactagcattga

SEQ ID NO: 826596 - DNA, 100 bp, Homo sapiens
acttcaaggatctactctgaagatccctgtggtagagagaaaaatcctggatctgtatgctttgagcaagaagttaccccccaagcgtccagaactccct

SEQ ID NO: 826597 - DNA, 100 bp, Homo sapiens
cgccccaagcgccgtcgcttccatgaaagctacaacttcaatatgaagtgtcctacaccaggctgtaactctctaggagacgcaggtcagaatggaaatg

SEQ ID NO: 826598 - DNA, 100 bp, Homo sapiens
cccattgcaaggagaagacgcagccgtcaggtaaagcttcagcgactgaaggagtgtggactttttgaatttcaagaacagtaaagttggaacacagcag

SEQ ID NO: 826599 - DNA, 100 bp, Homo sapiens
ctatctatacattcagagcccataatttctccacagacactacccaaagcagtccttcactacagtggcagacagacctgaaaattttcatctgaagcag

SEQ ID NO: 826600 - DNA, 98 bp, Homo sapiens
ctcacctgaccacaagcatcctggagcaatgagctaagtttggtgcgaacgccattctgggggtgtcccttgccgtctgcaaagctggtgccgttgag

SEQ ID NO: 826601 - DNA, 100 bp, Homo sapiens
acttagccagcctgggcagctgatgtctcagccctccacggcctccaacagcttacctgagccagccaagaagagtccatctgctgcaaggaagtttgta

SEQ ID NO: 826602 - DNA, 100 bp, Homo sapiens
actccaactgcatcgaggtctttcccgaagttatgcagctcccagagatcaagttccaggaccgtctgcagccctaacaacaatgcagctcttctccaag

SEQ ID NO: 826603 - DNA, 98 bp, Homo sapiens
ttcagcatggccaccttcatggacccagggattttccctcgagataagaaacctgatcgggaagaaattcagatgagcaatatgggatcaaacacaaa

SEQ ID NO: 826604 - DNA, 100 bp, Homo sapiens
tgcacccagaggaccaggcggcgggtctccgtctctccaccgggggcttcatccttccagggaggagaagagggactccagaatggctgaggagaagaag

SEQ ID NO: 826605 - DNA, 99 bp, Homo sapiens
tgaagaaaggtggatcctacatgtgccatagggaaagaaaccttgactggttccccaggatgagagccatgtcattggtcagcagtgattctgaaggag

SEQ ID NO: 826606 - DNA, 100 bp, Homo sapiens
gaaagcggcacagcatgaccttccagcttctgagggagaagtctggtccatgcctgtacctgttgaacgaagggcacacgtgtttcacgttgacaggttt

SEQ ID NO: 826607 - DNA, 99 bp, Homo sapiens
ttcacccagcatttcatccctcgtcgaaaggattggattggcatctttagagaaacaaacgtacttggatttaaaggtcctaggaaaatgtctgtgatc

SEQ ID NO: 826608 - DNA, 107 bp, Homo sapiens
ggagttcaaggaggtgctgaagagcgaggagccaatgttttcagttgcaccaagcttagccaccaatgcatcagcagccgcctttaatccctatctgggacctgttt

SEQ ID NO: 826609 - DNA, 100 bp, Homo sapiens
aatcccaactgttatgccaaagcaagagcagtatgaaagtaccatcggattcaaacttcccagttaccgagcagctaagaaattatggaaagtctgtgta

SEQ ID NO: 826610 - DNA, 99 bp, Homo sapiens
ccgtcttccgctttcttaaggtctgagagtgtgacgcaggaaaggaggcctcccaaacttgcctttatgtcaagaggtgttggggacaaaggttcatcc

SEQ ID NO: 826611 - DNA, 100 bp, Homo sapiens
ctggtgcgggccctctggaccctggagtacaccccgcagcacagccgcgacttcaaggttattcagcttctcaaggctggaaaagcgaaggaagtttcct

SEQ ID NO: 826612 - DNA, 100 bp, Homo sapiens
tccatgagaaggggagcgagctccattggaaagatgttcgtgaactggtggtagttggggaactataccgaggatatatgagcaatttaatccagaccat

SEQ ID NO: 826613 - DNA, 100 bp, Homo sapiens
gacaagttcggcttccacacggtgacgtgctgcggcttcatcccgcagtttgcagatggcgtgtacctggttctgctcatgggccttctggaagactact

SEQ ID NO: 826614 - DNA, 100 bp, Homo sapiens
caccacccatcttgagtatctggattggcagccaccatttgcatgtgatgttgataaacttcattttacgccacgtatccagagactgaatgaattggag

SEQ ID NO: 826615 - DNA, 98 bp, Homo sapiens
ttgagtcttctctgcatcccagccatcacctggatttacctgttttctgggagcttcgaaggtttggttttcctaaacaaatcctttcacagggaccg

SEQ ID NO: 826616 - DNA, 99 bp, Homo sapiens
agtgatgggtcagagccttctgagaagcgcacacggttagaagaggactacaaagctgatgaagacccagcattattccagtcagtcaagaccaagaga

SEQ ID NO: 826617 - DNA, 100 bp, Homo sapiens
aactggagaagagcttcaactctgttcacctgcttgcagcacaacattctgaaattttttggttattgtaatgatgttgatcgggagttgagaaaatgcc

SEQ ID NO: 826618 - DNA, 98 bp, Homo sapiens
cgccgccactgccgcaggaggcgtgaggaatagccaggccagaagaaggaaggcctgtggtgagtgggacaggaaatgacatcaccaccccaccgaac

SEQ ID NO: 826619 - DNA, 100 bp, Homo sapiens
tgacttccaagctggccgtggctctcttggcagccttcctgatttctgcagctctgtgtgaagaaagatgtgccggatggggtgaaagagctgtcagaag

SEQ ID NO: 826620 - DNA, 98 bp, Homo sapiens
gagctcattgagagaaccatgatggtcaattgccatgcacacttctgggatctcatagatcagaatatactggagcctgtaacccgtgcacagagggt

SEQ ID NO: 826621 - DNA, 100 bp, Homo sapiens
aatggtgtcttttcgatccaaattcaaggatctagaagataaaaaagtgaatcagcagccaaatacagaaatgggaagacatgatgacctttggtcctta

SEQ ID NO: 826622 - DNA, 100 bp, Homo sapiens
gagggacttctgcagagagagtgcgcagaaggattccgggagcacagttccgccgagttcagtaagaagaaggacagcatagatccttacatatacacac

SEQ ID NO: 826623 - DNA, 100 bp, Homo sapiens
agctactgtactggctattggaaggaggagattctgaagataaggaggcgcatattaaatttcctattgactacccctattcaccacctaccttcagatt

SEQ ID NO: 826624 - DNA, 100 bp, Homo sapiens
caccgaggctgaggatgatggtagattgccagggtttgccttcccggattgggcctacaagccagagtcgtcccctggctcaaggcagatccagctgtgg

SEQ ID NO: 826625 - DNA, 99 bp, Homo sapiens
attcttgaacctcccaactatggcattgtcacagtgagtctgccaaaaaagaggtggttgctgaagtggtaaaagccccgcaggtagttgccgaagcag

SEQ ID NO: 826626 - DNA, 100 bp, Homo sapiens
ggaagaaccattgttagtgaacgtggacaaagctgttgtctcagggagcacagaagttggcagtggcaatgacccctggtcagcctggagtgcctccaaa

SEQ ID NO: 826627 - DNA, 100 bp, Homo sapiens
gactggtagaagcattcgtgcagacagggcaaagaaaatgggactggttgaccaactggtggaacccctgggtgacagtatgttgactgctgtctctgtg

SEQ ID NO: 826628 - DNA, 98 bp, Homo sapiens
acacagttgctgatatagaaagtgaaccagtggtagaaagcacagaaactgaggggacataatcatcactcagtaggctcgcgcggccggacattgtg

SEQ ID NO: 826629 - DNA, 98 bp, Homo sapiens
ttgcagccctcggccaaacggccagacgccgacgtcgaccagcagagactggttatcctcttcacgcccctgaagcctactttccttatttcaaaaag

SEQ ID NO: 826630 - DNA, 100 bp, Homo sapiens
tgaagactgccctcatccacgatggcctagcacgtggaattcgcgaagctgccaaagccttagacaacgacttgaggagattatgaaaagaaccaggaga

SEQ ID NO: 826631 - DNA, 98 bp, Homo sapiens
ggcatgaagaagaatatctatggcaatatcgaggacctgctgcacctgtggggggacctctcatgcagacttgcacatatgcagggagtattgcactg

SEQ ID NO: 826632 - DNA, 100 bp, Homo sapiens
ggagaaagaacggcagaacacacagcaagctgtgttggtgcaggactttcacatgtctttggagtagaataagatgtgccaatccagactcaaccccatc

SEQ ID NO: 826633 - DNA, 100 bp, Homo sapiens
agagcaatgacattgggggcctgtggaaattttcagcctggaccagtttcgaggcaactacctccatagccgggattataagaatccagaagccttcaag

SEQ ID NO: 826634 - DNA, 100 bp, Homo sapiens
cgagaatgtaactccgttgaagcagcagtgctgagccctctcatagccatcgcactgaaaatatcccagattcatgagagaactggccggaggggaccca

SEQ ID NO: 826635 - DNA, 100 bp, Homo sapiens
atcaagtattggtctgtgagcgaaaatatcccaggagagaatactactttgcaataacaatggaaaggtcatttcaaggaggtaccttcttccaaacccg

SEQ ID NO: 826636 - DNA, 99 bp, Homo sapiens
tcgccttgatacctccagcctgaagttgtcagagtacccaaatgttgaagagctcaggggaatcaaagactccatctggggtatttgtaccatctcaaa

SEQ ID NO: 826637 - DNA, 100 bp, Homo sapiens
cccaaccctcgtgcctccctgaaccactccactgcctttaaccctcagcctcagagtcagatgcaggatatccctcctaaatgtacaatcaaggatttgc

SEQ ID NO: 826638 - DNA, 100 bp, Homo sapiens
caggcctttctccaccaaggaaaaaacgagaagaccccaaaaccagcaacacagtcactcctggcggcaaaccaaacaaaaccagagtcatctggggaaa

SEQ ID NO: 826639 - DNA, 98 bp, Homo sapiens
atcgacaagtccgggagctgggcggccatttaccagttaatggagaatcatcctcatttgcaccaactgataatgcgtctgtcacgggtactccagta

SEQ ID NO: 826640 - DNA, 100 bp, Homo sapiens
gaggcaccacgtctctaccgagcacaaactccacgaagccaacgcccagctcaaattgaaattattccatgcaagatctgtggagacaaatcatcaggaa

SEQ ID NO: 826641 - DNA, 144 bp, Homo sapiens
aggatattctcaacttataccaggacccagatggaacccgaaagctactgaacttcatgcttgacaatctcgcaggtagagatcttttcctagcaagctgttcacaagattgcctgataagaatatggaagctgtatataaagt

SEQ ID NO: 826642 - DNA, 100 bp, Homo sapiens
acaacccgcgcttctggccgcgggaaggagaggaaatggacaggctactagcatggtccaactgcagggtgggagattcctgatgggaacaaattctcca

SEQ ID NO: 826643 - DNA, 98 bp, Homo sapiens
agactgattacaagaatcctatagaccagtgtaataccctgaatcccatcactggggtgatcctgctggctgttggagtctggggcaaacttactctg

SEQ ID NO: 826644 - DNA, 100 bp, Homo sapiens
ggagcgctcgcctcgctgggcagcctcaacatcccctacaagatcgaggccgtgcagaattaagcctgatcaagatgacaacctcccaaaagcaccgaga

SEQ ID NO: 826645 - DNA, 100 bp, Homo sapiens
catcgccaacccggactggatcaacaccggggagtctgcggatgagggttactaccagggtggaaaatttcagtttgaaactgaagttcccgatgcgtac

SEQ ID NO: 826646 - DNA, 100 bp, Homo sapiens
gtgattagtgtaaaaacgtccgggtccaaagagagagtgtctgctttttcaacgtgggagaaggagttgcacaagatagtttttgatccccggtacttac

SEQ ID NO: 826647 - DNA, 100 bp, Homo sapiens
atggccgcagaccagcgcccgaaggccgacacgctggccctgaggcaacggctcatcaggtctgaaggggcgtctcgattacctgagctctctgaaggtg

SEQ ID NO: 826648 - DNA, 98 bp, Homo sapiens
agcccacgccaccccaagcatcccaggactcttctgaaactcttctgagttgacagagcagaagcttcgtgcctgtttagagggtagtataaatgagc

SEQ ID NO: 826649 - DNA, 100 bp, Homo sapiens
attgcaatgaaaatttcttctgatataaaaagccaaaatagattttatactgacctaaatgggtaccaggggaagatggtgaaaggaatgggaggtgcta

SEQ ID NO: 826650 - DNA, 98 bp, Homo sapiens
gagaaacaagctatgtactctagcactgacacgtttacccacttgaaacaggtacaggtttgcagattccgccagcagcacagcaagctctacagatg

SEQ ID NO: 826651 - DNA, 100 bp, Homo sapiens
ggggatttggaaatgtcatccgatggcacaatcaggcggagacagcagccaatcgcatctgcaaggtgttggccgtcaaccaggagaacgagcagcttat

SEQ ID NO: 826652 - DNA, 100 bp, Homo sapiens
tgttgtaggccctgaaggcatggagaaattttgtgaagacattggtgttgaaccagaaaacattctcaagtccaaagatttaacatctccaacccagcgc

SEQ ID NO: 826653 - DNA, 100 bp, Homo sapiens
gacacgctggtgcatctgtttgccggagggaccctctttgcaagttcagtgcttaacctgaccgaactggctgcccttcggcctgaccttgggaaactga

SEQ ID NO: 826654 - DNA, 100 bp, Homo sapiens
ggttttgaaaagttcatgctgtcccttcattgaattttaggttctgaatgatgactgacgcgggtttgggtgatacccctcacagcccctgtcattccgg

SEQ ID NO: 826655 - DNA, 101 bp, Homo sapiens
catgaacttcgaaacgtgataagaagcacctggatgagacatttgctacagcatcccacattaagtcaacgatattgatgaatgttcagaacaaccctcag

SEQ ID NO: 826656 - DNA, 100 bp, Homo sapiens
gtacaatttgatagtcattcgtaatcagcaggccaaagactcagagctttcagaagaattattagataaatggctctcctacccagagacccagcacgtg

SEQ ID NO: 826657 - DNA, 100 bp, Homo sapiens
tctgaatgtttaattaatcaggaatgtgaagaaattctacagtttaatcccatggaatcaatcaaattaaatcatcatgactacattgattccccatcgc

SEQ ID NO: 826658 - DNA, 98 bp, Homo sapiens
acaccctccactccaggggacacgcagcccaacactcctgcacctgtcccacctgctgggtggagatctgcctagtgttactgatattcgaagacctc

SEQ ID NO: 826659 - DNA, 100 bp, Homo sapiens
ataatgttgctgagatctttgcttatgggatttcttccagaaagcatgtatgaacgtattctcactggtcccgttgtgagagaggaagtaagcaggcggg

SEQ ID NO: 826660 - DNA, 98 bp, Homo sapiens
gcgatgagctaagacgctgtttcagagcgtttgggtcctctgaggccccttgaccagtgctggacaatattcctctcaaggtctgtctttggaggaga

SEQ ID NO: 826661 - DNA, 98 bp, Homo sapiens
ctgatgttaatgaaggagagaaagaagtgatgaaactctggaatctccatgtcatgaagcatgggagcagacgcctccgcctagacctgaagcctacc

SEQ ID NO: 826662 - DNA, 100 bp, Homo sapiens
tggacatgtcctgtgtgtgacaagaaggctccctatgaatctcttatcattgatgggtcaagagcaatctgaatccaaatgcaaaggagtttgttcctgg

SEQ ID NO: 826663 - DNA, 100 bp, Homo sapiens
cctgactggggaaaatcagcaagagctttctggaagaaaggaaatgttaggatcactttattctgctattgacctgaaaagtggttctggaaaagtgtac

SEQ ID NO: 826664 - DNA, 98 bp, Homo sapiens
aaacagatatccagatgctaaaatggacccaatgaacatctgggatgacatcatcacaaatcggtgacagtatgttgactgctgtctctgtggccaga

SEQ ID NO: 826665 - DNA, 99 bp, Homo sapiens
gatggacatggacatgagccccctgaggccccagaactatcttttcgctgcagccccctaaacccaggaggcgccctggcccgcgctcgccccccaggg

SEQ ID NO: 826666 - DNA, 51 bp, Homo sapiens
tggcggcggcgcttgggctctttgtggaagaaggactctgggaaaatggcc

SEQ ID NO: 826667 - DNA, 100 bp, Homo sapiens
cacgcggcctacgtgaacaacctgaacgtcaccgaggagaagtaccaggaggcgttggccaagggcaggccagaaagcagacccagggaggatagcacat

SEQ ID NO: 826668 - DNA, 98 bp, Homo sapiens
gctgatttggatggaacgtttgcagtcagcatcctagtagaaagagcaatgcacttgagcttgaaagtgaaacaaagagtcctcttcgtggaaaagaa

SEQ ID NO: 826669 - DNA, 100 bp, Homo sapiens
gcagagccaggaggcggaggcgcgcgggccagcctgggccccagcccacaccttcaccagattgcagatctgactcagaagatctttgaccttcgaggca

SEQ ID NO: 826670 - DNA, 100 bp, Homo sapiens
ctgctgtgccccaggctgcagagcccatagccaccttctatgggttaaggcaacaggccatgtttttggtatactgtgcactggagaaagaacctgtgcc

SEQ ID NO: 826671 - DNA, 98 bp, Homo sapiens
tttcttcgttgcattgcctgagaggagcggagtctgccaggtggtgtccatcatggtgtaaagaagaagcccgccgggcatgccgagcaggaaagaag

SEQ ID NO: 826672 - DNA, 100 bp, Homo sapiens
cattcagggagcccttaatgcctcagaaaccacacccaaaggtgcccaagggccgccgggatggcctgcctgcccacattggctccatggcacagcgggc

SEQ ID NO: 826673 - DNA, 100 bp, Homo sapiens
gcctagggcccaagagctccgtgctgatagcccagcaggtggccaaggtggaatacgtcaggaagaagccaaaattaaaagaagtccaggtgaggttaga

SEQ ID NO: 826674 - DNA, 100 bp, Homo sapiens
gagtgaactggattccatgtagagacccctggagaatttacatagtacatgacgaagttaaggataaagcttttgaactagaactcagctgggttggtga

SEQ ID NO: 826675 - DNA, 100 bp, Homo sapiens
attcaacctggcacactgttatctggaaggcatcaactgtgaaatctgtgttagaattgattcctgaattaaatgaaaaggaagaagcatacaattccct

SEQ ID NO: 826676 - DNA, 100 bp, Homo sapiens
ccagcccggcctacagtgcggacacaggacagaggggagccaggtgcccagctaagacctgaatgccatcaccctccccagggctctgcagttttctcgt

SEQ ID NO: 826677 - DNA, 100 bp, Homo sapiens
ctctctctcttaagaaaggaaaatatcccaaggactaatctgatcgggtcttccttcatacagtatgctggctatgactattcgcagcaaggcagatttg

SEQ ID NO: 826678 - DNA, 105 bp, Homo sapiens
aggcgcgctccctgcggccccgggatgacttctcagcgttcccctctggcgcctttgctgctcctctctctgcacgacagcaccagttgcccttgaagcagaaaa

SEQ ID NO: 826679 - DNA, 98 bp, Homo sapiens
ggtatccaagaaagttcttcccccagcccggttcaatcttatgatccagaaaccaattcttggctacttcgtgcagctatcccaattgccaaaaggtg

SEQ ID NO: 826680 - DNA, 100 bp, Homo sapiens
aaaagtcaaggcttggttcaagccagatagcacctgaggacagaacatatcagggtctccgtctctccaccgggggcttcatccttccagggaggagaag

SEQ ID NO: 826681 - DNA, 98 bp, Homo sapiens
agccctaggaaagcatcctgtttcttgcaagctggcagccacctgcaacgtggagccctcacttttcaccaactggttcagcgggcacctcaacttcc

SEQ ID NO: 826682 - DNA, 100 bp, Homo sapiens
cttcgagaggactcctgtaatgctgggcctgaggacatccagtctcgaataggacactgcatgttattccactcagtattgccatcagagagtcagcaaa

SEQ ID NO: 826683 - DNA, 100 bp, Homo sapiens
tccaaatgatgacactttggatgaaggagtaggacttgtgcattcaaacatagcaactgaggcatcagtgtcattcaaggacgtgactatagaattcacc

SEQ ID NO: 826684 - DNA, 98 bp, Homo sapiens
gatctcaacctgtgattgtgacatcacccctacctgaggaagcctcttccagcctgctcaaggtgctggagaatctggtaaaagcaccattgtgaagc

SEQ ID NO: 826685 - DNA, 100 bp, Homo sapiens
aacttagatggtctggaatacaagttacatgattttggctacagaggagtctcttcccaagagtttaaaattggtggtgaatggtggacatggatcgatt

SEQ ID NO: 826686 - DNA, 100 bp, Homo sapiens
ccagccagtccccacagcataacaggctctgtgtggctgcacagtgaacgtccccactctggacggcaggacgatacccgtcgtattcaaagatgttatc

SEQ ID NO: 826687 - DNA, 100 bp, Homo sapiens
ttaatacgattggaaacattgaagagattgcatataatgctgtttcctttacctgggacgtgaatgaagaggcgaagccatcagtggcctatgtacatac

SEQ ID NO: 826688 - DNA, 99 bp, Homo sapiens
tcaggatggacccaagctctgccggacatggtggtgtcccacctttttgggaagcaaagaatggctcaagaagtactgacacatttaaaggagcatcct

SEQ ID NO: 826689 - DNA, 98 bp, Homo sapiens
catgtcagggaacttgctgagcaactattcaaaaatattcaagatggaaaaggtgatgtaaccattacaaatgatggtgctaccattctgaaacaaat

SEQ ID NO: 826690 - DNA, 98 bp, Homo sapiens
gagccccaaacaagtggtggactggactagagtgggttgtatcccctgcagaaaaagctaaatatgatgaaatcttcctgaaaactgataaagatatg

SEQ ID NO: 826691 - DNA, 100 bp, Homo sapiens
aacctcaccgagggactgaaaggtacggttcctggagcagcagaacaagatgctggagaccaagtggagcctcctgcagcagcagaagacggctcgaagc

SEQ ID NO: 826692 - DNA, 112 bp, Homo sapiens
ctggctagaagcagagacaccaggacagaaaagacagtgttctgctttcatggagttcacagaagagtcgaggagattgattataccggaacagagccttccagtccctgta

SEQ ID NO: 826693 - DNA, 100 bp, Homo sapiens
agtcaagttgtaaactgaaaaagaacgtgttgaaacaaggaattgccccatagccttcacagtttctgccactgccttctacaaagcacaacctgtaatt

SEQ ID NO: 826694 - DNA, 100 bp, Homo sapiens
gtcttctgattccctgtgttctgcttttttcattgttccactggacgctcatcagagggaagatctttttcctcaattgtctcataaccctcagtagatg

SEQ ID NO: 826695 - DNA, 98 bp, Homo sapiens
ctgtacaaactacacagctcatggcattgacaagactccatcaactgaaacttttaggtcatactttagtcgttgaatttgcaaaagagcaagatcga

SEQ ID NO: 826696 - DNA, 98 bp, Homo sapiens
agggatattgagaaacttctgagcaacagatctaaagccctggtggctcacattctacttgactgtggtgaagacaatgtctgtaaacccaagctgga

SEQ ID NO: 826697 - DNA, 98 bp, Homo sapiens
aatttcgatctccgccctggggtcattgtcagggtgtgggccgaagatatgctcatgtggtgttgaggaaagcagacattgacctcaccaagagggcg

SEQ ID NO: 826698 - DNA, 99 bp, Homo sapiens
cgtgggcggcggcaacggggcactgacctgggtgggactatgttcggagtgaactggagtttgcctatgagggaccaatgtatttagaacctctctcta

SEQ ID NO: 826699 - DNA, 98 bp, Homo sapiens
catgaagtcgagtagttcagttgtggaattggttatgctactgtgttctcaggacaccgagtttccaggtgtggttgcaagacccattggagaattca

SEQ ID NO: 826700 - DNA, 98 bp, Homo sapiens
tttttgatgcatctctacctggaactttgccggtcacttttgaaatacacaaagaaaaccttgccaatatatttagggaacagcaaggaaaagttgat

SEQ ID NO: 826701 - DNA, 100 bp, Homo sapiens
gcctcagcaacctgacaattctgtcgtgtcccggcagcacacttctgcttttgttccttcatcaggacgaatttactcttttgggcttggtggtaatggg

SEQ ID NO: 826702 - DNA, 98 bp, Homo sapiens
ccagctcctgcgaccgccctgcgcttcgtgcaccggggcggtccgttgccaaagccagacaaagccctggacttccctgggttcctggacatgatggc

SEQ ID NO: 826703 - DNA, 100 bp, Homo sapiens
agaatcgcgaggcagagcgggagcgcgcagccaggttttaaaatcaaagatgggaaaatcggagaaaattgcccttccccatggccagcttgttcatggt

SEQ ID NO: 826704 - DNA, 100 bp, Homo sapiens
gttcaccatcacaccacctacagcccaggtggttggcgtgcttaagattcagatattttatgacctggtcagacagataaataggaaaacaccagtggaa

SEQ ID NO: 826705 - DNA, 98 bp, Homo sapiens
accagtgacccagtcagtgcccttcagttaaagaccaccaggagcacacttgaaactgttaaggcagcaataatagaagagcagaaacgaagtgaaaa

SEQ ID NO: 826706 - DNA, 98 bp, Homo sapiens
ttggttaaaggagctgccgtcaggtatgcagtggaactgatgaagaccctgatgataaaaacgcaccctttcggcaacggccattttgcaaatataaa

SEQ ID NO: 826707 - DNA, 100 bp, Homo sapiens
ccaaaatgccctttagaggtgacaccgtaattgccagagtcctggtggaggacgatgagatcatgcagggattcatcagggctttcaggcccctgcccag

SEQ ID NO: 826708 - DNA, 98 bp, Homo sapiens
ccttttataataaagacacttatcttgcccaagagctggaaatctggatggagaagcagtatttatctcaaagagaagtggacctagaggcttatttc

SEQ ID NO: 826709 - DNA, 100 bp, Homo sapiens
acccggagctgggaatcgggagccgggcgcggggagctgcgcgaagccggggcggagcacgcgagctatgaagttccacctggtgccaagcatcaacacc

SEQ ID NO: 826710 - DNA, 100 bp, Homo sapiens
ctctgtattcagcatagctattcctgttgatggtgatgaagacagggttttttgattaactcaaaaccagagaatgcctgtgaacccatagtgcctccac

SEQ ID NO: 826711 - DNA, 98 bp, Homo sapiens
tgaacggagtgtgcgacggattgggaggtgagtgaagatggcagagaggacgtgaccagcactcacccttgtccacctgcccagtggcaccgccatgc

SEQ ID NO: 826712 - DNA, 98 bp, Homo sapiens
aaaggatgtgaccattttggcagctactaaccgtccagataggatagacaagttttggcaagcgttctgcaggaagttttaggcgtggctgtgaatgc

SEQ ID NO: 826713 - DNA, 100 bp, Homo sapiens
gtatattcaaggaatggttccccaaataagttcagatcttcttcaaattcgcttcaagctcagcttatcaatatgggtgttattcctaccttagtgaaat

SEQ ID NO: 826714 - DNA, 100 bp, Homo sapiens
ggtcagagttctgagacctgctctggagaaatggcagcagtgtctgcttttcttcaaccaggagcacctaggccatatcctgctcattacatggatacag

SEQ ID NO: 826715 - DNA, 100 bp, Homo sapiens
gaaacaagttcttggcaagagaggcatcctccttgaagtatttggctgaggagttttcaatcccagaacaggggaaaattggagttgtcttcaacattgg

SEQ ID NO: 826716 - DNA, 100 bp, Homo sapiens
gtctatttctctggcccagcttacaaagggtccagattatagactctacaagagtgaaccagagttaacaacagtggcagaagttgatgaatctaatgga

SEQ ID NO: 826717 - DNA, 100 bp, Homo sapiens
cccacctggacctgatggaaagcgagggcctccaggaccccccgggctccctggaccacctggacctgatggtcccagtagggatggcacaatcagcgag

SEQ ID NO: 826718 - DNA, 100 bp, Homo sapiens
cagatggtaatgaggggccaccgagatacctctatggttcatgagcttaataggacactgcccatctctaagataagaacctggaaaggggactctgttg

SEQ ID NO: 826719 - DNA, 100 bp, Homo sapiens
aaagatgctgtccgtgcgcgttgctgcggccgtggtccgcgcccttcctcggcgggccggactggccaacatgcaaaagtcttctgtaccaagacctcgg

SEQ ID NO: 826720 - DNA, 100 bp, Homo sapiens
ccagcattggtgacatggaaaaggagccaggaattcccagtttgacaccacaggctgagctccctgaaccaggattgggccgagcctatgccctggcttt

SEQ ID NO: 826721 - DNA, 98 bp, Homo sapiens
gaaattcatcacctctctggagtcttcaaactgaccaagcattgaaaaggtctcttgcagctgaatggggtaaatatggaatgcgattcaatgtgatt

SEQ ID NO: 826722 - DNA, 98 bp, Homo sapiens
tatcactcacatcaatggagaaccagtgcatggacttgtccacacagaagttatagaactcctactgaagtctttcccagggaactccgatgaagtgt

SEQ ID NO: 826723 - DNA, 98 bp, Homo sapiens
tgacatctgacgacgtgaaggagcagatttacaaactggccaagaagggccttactccttcacagatcgccctgtatgatgagattcgtcagtttcgc

SEQ ID NO: 826724 - DNA, 98 bp, Homo sapiens
ctgccccagctcctgaggctcccaaggaacctgcctttgaccccaagagtgtaaagatcaatatgcttctcaattttaaggatgacaaaagtgaatgt

SEQ ID NO: 826725 - DNA, 98 bp, Homo sapiens
gagagaacagagagggtgataaggaagaagaccatgctgggaccttccaggtactccaaagattcaggtttactcacgtcatccagcagagaatggaa

SEQ ID NO: 826726 - DNA, 100 bp, Homo sapiens
gtgggtagagaagcacttggcgcctcggggaggggaccgcgcccgcctcatttgcgccttgcagcactgctggaccagggattatttggagtaacccaag

SEQ ID NO: 826727 - DNA, 100 bp, Homo sapiens
acaatgtctttgttccaccagagtcattgcaggaagtggatgagttccacctcattttagagtatcaagcagagccaacatgccatctcccagcagtatc

SEQ ID NO: 826728 - DNA, 100 bp, Homo sapiens
taattattcagcaggcagtaccttcaccaacctcaagtactgtaatcacccaggcaccatcctctaacaggccaattgtaataactgaagtgaagtgatg

SEQ ID NO: 826729 - DNA, 100 bp, Homo sapiens
ctcaagctgagacactggcagtggtggcggctgtttaccaagcttctgcagaaagccgtcattacacctgattttgaaaaaaaccactgtgttccaccat

SEQ ID NO: 826730 - DNA, 100 bp, Homo sapiens
tccgccccccaggaggggcgagagggagccgcagctgatgtcaggtggaatgaggtaccatctactgtctccagaggaccgagaagaacttgtagatggc

SEQ ID NO: 826731 - DNA, 98 bp, Homo sapiens
tcaaatttgtcagcaactcgtcaggaagatgagaatgtgcctactgctcctgatcctccaagtcaacatttacgtgggcatgggacaggcttttgctt

SEQ ID NO: 826732 - DNA, 100 bp, Homo sapiens
aatttcttcgaaaaaagcttattgggaagaagagaggatctgacgaactactctcaggcagtgttctcagtagtccgaactctaatatgagcagcatggt

SEQ ID NO: 826733 - DNA, 98 bp, Homo sapiens
gagcacggggaagggcagccagatcttgtcgcccatccctgctggggcgatcccgggctgaaagaggcgtcagggcagctgcaatgactctccgcacg

SEQ ID NO: 826734 - DNA, 100 bp, Homo sapiens
tctagaagagtgtgaacagaggaagtacacatcggtttcccttccagccattggaacagagcacgaacttccaggagccggtgcagccgctgacacagca

SEQ ID NO: 826735 - DNA, 100 bp, Homo sapiens
gcacggactgctggagatggtggagtccgtcaaattctggggagacattgccaaggaattttactggaagactccatgccctggcccattccttcggtac

SEQ ID NO: 826736 - DNA, 100 bp, Homo sapiens
atcccagggggatataatgctttaaggcgcatgtacacagatattcaggaaccaatgctgagtgctgcacaagagcagagacagggtcttctatgttgcc

SEQ ID NO: 826737 - DNA, 99 bp, Homo sapiens
aaggctgcctataatcaagtaaaaacaatagctcaaggaaacctttccaacacagatgtccaagctgccaagtgtggacactgccagcggctgcagccg

SEQ ID NO: 826738 - DNA, 99 bp, Homo sapiens
ttagcgtctgcctgtctgcaacaccgggaggcaaggagcacctggtctggcaggttggtcaaagaaaaagtgatgtatgaaaaagaggcaaaacaacaa

SEQ ID NO: 826739 - DNA, 99 bp, Homo sapiens
gtgcccatcctgcaccgggacctcaagtccagcaacaaatttgcagtggtgtgctgcttctttcaaaggatttgtaaattcttttggcttgcctggcat

SEQ ID NO: 826740 - DNA, 98 bp, Homo sapiens
gaagaaatcctcttttactgcctgtggacaaaatccatccttcgttgaaggcccttccatactttgaccggctagactatgtgtccatgatgtgtaac

SEQ ID NO: 826741 - DNA, 100 bp, Homo sapiens
ccaggtgttggtgtcccaggagctgggattccagttgtcccaggtgctgggatcccaggtgctgcggttccaggccctcgggaccaaggatcacgtcatg

SEQ ID NO: 826742 - DNA, 98 bp, Homo sapiens
aggagaaacaagctatgtactctagcactgacacgtttacccacttgaaacagaacaccttccaccatgaccacctcagcaagttcccacttaaataa

SEQ ID NO: 826743 - DNA, 100 bp, Homo sapiens
ctactgaggatgcactcaggcaggtcatcagctggtcacattacaaatctgttgcagaaaatatgggtattttagaatggactcttctgcaacccagttt

SEQ ID NO: 826744 - DNA, 100 bp, Homo sapiens
caagcacgtgatctggcgggatgggcgtttgcctaacgtatttaatggaggtgccttagctggaccaattattgtggagccacatgtcacagcagtatgg

SEQ ID NO: 826745 - DNA, 100 bp, Homo sapiens
caaatgaatggtaggaaaattactctgaaaagagaacaagagagtgagaaaccaagccaaggcaaaagatgtgattgaagagcatggtccttcagaaaag

SEQ ID NO: 826746 - DNA, 99 bp, Homo sapiens
tttgatacttccagatttcatcctcagggttatgtggtccgaatcagtggtgggaacgacaaacaaggtttccccatgaagcagggtgtcttgacccat

SEQ ID NO: 826747 - DNA, 100 bp, Homo sapiens
agccacaaatgtacccccagtacacttactactatcctcattatctccaaaccaagctctttcagtctcacatggcaacgaaaacaacttgtatgtcttc

SEQ ID NO: 826748 - DNA, 100 bp, Homo sapiens
aggggaagatctcaatgaatgggttgcagttaacagtttttggaaatgctccgccgaatacaatgacagaaaaattttctgatcttctgcagttcacaac

SEQ ID NO: 826749 - DNA, 98 bp, Homo sapiens
agcccatgaagagatggtggattctcactgagttttgactagcggaagaaaaggtatcgccgggcaggtgtccatagatgccaacggagaccgatatg

SEQ ID NO: 826750 - DNA, 100 bp, Homo sapiens
tgagggaattgatgatgttcactggaaggaaaatgggacattagttcaagtagcaactatatcagggaaaatatttatccccaaacagaaacctgtacag

SEQ ID NO: 826751 - DNA, 98 bp, Homo sapiens
gaagatctgagatctaaagctaaaattgcctttggacagtctatggatctacattataccaataacgaggttattgaagaaattgaagaaatgatgca

SEQ ID NO: 826752 - DNA, 100 bp, Homo sapiens
caggaggggctcggcggttcctctgcggtgtggtggaaggctttctgtgaagaattggaatcaatgatacaggagcaatttaagaaggggaagaacccca

SEQ ID NO: 826753 - DNA, 101 bp, Homo sapiens
ggtgaatggagatgcagctcagcagtgcagaaataccataccatcaatggtcataatgcagaagtaagaaaggctttgtctagacaagaaatgcaggaagt

SEQ ID NO: 826754 - DNA, 99 bp, Homo sapiens
ctgcccagaggtccctcagcaaagatggtacaaaagagtctttggaggatgcggctttgatgggaggaagagctgcgcaaaggtggagaccccaaatat

SEQ ID NO: 826755 - DNA, 99 bp, Homo sapiens
caaaagaaggaccgagaggaggatgagagcgttattgttgcacacttaagtcaaggagagctacagtccatggccgaccaagaaaagatctccccagct

SEQ ID NO: 826756 - DNA, 100 bp, Homo sapiens
ggacagactgctccctactacgctgccctgggtgctgtaggagcccatctgactcaccagcatggactggaggaaacagctgccaaatgcaagggactgg

SEQ ID NO: 826757 - DNA, 100 bp, Homo sapiens
cagagctctgccaggcagaaggcctctctcctgatacagcaggcgctcaccatgttccctggagggggtccactggacggggcctgagctacaacttcac

SEQ ID NO: 826758 - DNA, 100 bp, Homo sapiens
aaaagttaggaagcaactacgactaaagccattttaccttgtacccaagcatgcaaaggaaggaaatggtttccaagagacggggtgtcgccgtgttgcc

SEQ ID NO: 826759 - DNA, 100 bp, Homo sapiens
atgtgatggatgtcttcatccccaagccattcagggcctttgcctttgttacatttgcagatgatcagtaccaaattttcattccaatggtgaataaagt

SEQ ID NO: 826760 - DNA, 98 bp, Homo sapiens
acgtgctgcagcagagcgcggcgcagaagatgacaagagcacctcaaaggcagcagcctcaaggagcagccatggccccagacttgtcgcacggatgc

SEQ ID NO: 826761 - DNA, 98 bp, Homo sapiens
agcttgaagaaacagaggtcaaaggaaaaagaaaaaggggtcgtcctggccggcctccagatatcaatgcttacaattgtgaagagcccacagaaaag

SEQ ID NO: 826762 - DNA, 50 bp, Homo sapiens
tcctgtccggagacagcctaagggtgaagctttgttctaagaatatttgt

SEQ ID NO: 826763 - DNA, 100 bp, Homo sapiens
actatggctaaattacatattccagtaatggtggatgaagttgttcattgtttgtcaccacaaaaaggacagtcggcagcctctgtgaagaagattttat

SEQ ID NO: 826764 - DNA, 100 bp, Homo sapiens
aacgaggccgtctttgatgtggtgtccctctgccctaatctggagcacctggatgtgtcaggtaaagtcagtgataaatcttttgtttgctgcatatact

SEQ ID NO: 826765 - DNA, 100 bp, Homo sapiens
tttgacaagacgcggctgccgtacgtggccctcgatgtgctctgcgtgttgctggatagtgagacacagctccgtagagacatggttttctgccagactc

SEQ ID NO: 826766 - DNA, 100 bp, Homo sapiens
ggaggggccatggccagcgacggggccaggaagcaattctggaagcgcagcaacagcaagctcccgggcagcagggaatacagcagacagcccctcctca

SEQ ID NO: 826767 - DNA, 100 bp, Homo sapiens
ctggactccctggagaagcagatggaaaaggtggggaagctgaggcaggaagccctttagtcacttgccgaaggccacgctgttacccatgggaccggtt

SEQ ID NO: 826768 - DNA, 98 bp, Homo sapiens
gctgttcatgagtggaatccatgtttctggacgcggatttttggcctcatactctgttatagataaacaaggacctggagttgctggctaccttaccg

SEQ ID NO: 826769 - DNA, 100 bp, Homo sapiens
atcaagtatgaggccaggctgcatgtgctgaaggtgaaccgtcagacagtactagaggctctgcagcagggtgagtcagatgattccattctccgattgg

SEQ ID NO: 826770 - DNA, 100 bp, Homo sapiens
aaagatgaacctttggagtttaaaagggttctggacaacatcaaaggtgttcatttagaagaaagcaacactaatgattcaaacagcttcctgaatttta

SEQ ID NO: 826771 - DNA, 100 bp, Homo sapiens
cttggcactcgcctcggatttgggggcttcctcactcgtggctttccgaaggctgctggtggcaatttgtaccatacggatgtctcactctttggagaac

SEQ ID NO: 826772 - DNA, 113 bp, Homo sapiens
tctgtcttggcacctgcaggaaacaagctcctacttccagaaaaagtgctcctgggactccaggataccagctcgagatttctgtggctcctcaagatattggtcataatcct

SEQ ID NO: 826773 - DNA, 98 bp, Homo sapiens
ggctggagctctcggtcctatacaaggagtatgctgaagatgacaacatctatcaacagaagatcaagtacctccctgcacttggctattcaaaacgg

SEQ ID NO: 826774 - DNA, 100 bp, Homo sapiens
ttttggggcagaatacagagatatggaatcaggcagttcttatggagcttcaggctgcccggggaggcgcagaagattgatcgcatgatggaggctttcg

SEQ ID NO: 826775 - DNA, 100 bp, Homo sapiens
atatttcatatgttttagctacaaacatttatctaaggtcatcaccgagtggtcttctcacatcatccttcaggcagcaccaagagtcactggcagcaga

SEQ ID NO: 826776 - DNA, 100 bp, Homo sapiens
gaagaagagccagaatgagaagtaccggctgaagtacctgcggctgcgcaaagcggccaaggccacggtgtttatgttgaccagaatttgatggatcgcc

SEQ ID NO: 826777 - DNA, 99 bp, Homo sapiens
ccggctttcgcatttgggaccctgcaggtacgctggggaggaggaggaggaagggagcggcagcagtgaaggatttgacccccctgccactgataggca

SEQ ID NO: 826778 - DNA, 100 bp, Homo sapiens
tgaaaaggctttattgccaaactattgaggaaactcggcttaacattgacaagatctcagaacatgtagaggaggctaagaaactctacagtatcattct

SEQ ID NO: 826779 - DNA, 100 bp, Homo sapiens
tttcagtcagcctcagaggttgacttctacattgataaggccttcactatcatggaccagaacagggatggcttcattgacaagaacgatctgagagaca

SEQ ID NO: 826780 - DNA, 98 bp, Homo sapiens
ccggcccccgagagccgccgacatgaagaaagacgtgcggatcctgctggtgggagaacggccacccgttcatcgtgcagttcaatgatggaaatgcc

SEQ ID NO: 826781 - DNA, 100 bp, Homo sapiens
aaaaaatttattggatacacctgtcaagactcaatatgatttcccatcttgcagatgtgtagggccatcgatgcacccctcggagctaatagcggagatg

SEQ ID NO: 826782 - DNA, 100 bp, Homo sapiens
gggacacgctggtgcatctgtttgccggagggtgccaatgggtcatgtttggttagaaggtgacaatctacagaattctacagattccaggtgctatgga

SEQ ID NO: 826783 - DNA, 100 bp, Homo sapiens
ccgctgcggacggacgctcgcctgccggctgagaatccagcaactatcacaagaatactccttagccacttcaattgggataaagagaagctaatggaaa

SEQ ID NO: 826784 - DNA, 100 bp, Homo sapiens
aacccctccagcggcaaagccaggctctccccagatgtccacagtttgcagcctcagctagactgtgggcccagggagatcaaggtgaaggtggacaaat

SEQ ID NO: 826785 - DNA, 98 bp, Homo sapiens
agcaattatgaaagaagtcattccttttttgaaggaaatgggtcctgatgaatatgaagagatggaagaagaggaggaggaggaagaggaggaagacg

SEQ ID NO: 826786 - DNA, 100 bp, Homo sapiens
agacatgtacagataatactggtgattctgatgatagtgcttcaggaattgaagacgtatcggacgatttaaacaaatttacatgtattggagaccagac

SEQ ID NO: 826787 - DNA, 98 bp, Homo sapiens
aaccagagccatccttcgggagaggatatgtagcgaggaggaacgcgctaaggcaaagcacctgatcattgagactgaaaatatgatggaccgaattg

SEQ ID NO: 826788 - DNA, 99 bp, Homo sapiens
gaaaataatccagagatttccacagaaggactgggatgatacaccttttccacagggaattgagttgagtcaagggtccagagaaggaggagaagttga

SEQ ID NO: 826789 - DNA, 100 bp, Homo sapiens
agggggtgatcaagtacatggggccggcagaatgcggattgtggatgatgatgtgagctggacagctatctccacaaccaaactagaaaaggaggaagag

SEQ ID NO: 826790 - DNA, 100 bp, Homo sapiens
gcaaaagcttctatcatttttgttactcttcagtacaatgtcaccctcccagcaacagattgcagagggaatggcatacatcgagcggaagaactacatt

SEQ ID NO: 826791 - DNA, 50 bp, Homo sapiens
atcaaaatgaagttgaagcatcaggttttcctttggaatatggataaata

SEQ ID NO: 826792 - DNA, 137 bp, Homo sapiens
gaaatctggcacaacggctgggagaggaaacttgatgcttctgggccaccatttgccagggcctcgctcgaggaaatctgctcggtccccggcagccgccgcttcccctttgatgttttggtacgccgtgcgcatgc

SEQ ID NO: 826793 - DNA, 100 bp, Homo sapiens
ggagcagctgatcaccatgtcctgcacggacaagatcgccagtcccaagaggaattacaagagtactgcagacatcatgaaatcacctatgtggcccttg

SEQ ID NO: 826794 - DNA, 100 bp, Homo sapiens
catggcagatgagaaattggagaaggacgagatcatcaagttgtatagctgtatcattggcaacatgatttcgagcctcattggagacattgacaatgcc

SEQ ID NO: 826795 - DNA, 100 bp, Homo sapiens
gaagatagagccgaaatgactgtgtttgtacgatctcattgcccaccagaaaggacagatagagaagcagccaccgtttgagatctacttatgctttggg

SEQ ID NO: 826796 - DNA, 98 bp, Homo sapiens
tgcagaagaagcacacctgaaacatgaatttgatgcagacttacaggtatataatgtttacatggcagggaggcagctgtgttctaagcggtaccggg

SEQ ID NO: 826797 - DNA, 100 bp, Homo sapiens
ctagtgcttggtgggtgtaccatcatcaggaaacttggctgtaacttcaaaagaagatttgattctttatttctggactgcatatatatatataacaagg

SEQ ID NO: 826798 - DNA, 100 bp, Homo sapiens
tgcacttcgcattttggcattgacatttaattttagggtcctttatatagaagggagagtaggttttgatacttatagaggactcccttcaatttccaat

SEQ ID NO: 826799 - DNA, 99 bp, Homo sapiens
atggaaccacttgctgaatatgtagttaggacattcaccctggaaagggttaatgactccagagagtaagatcagattcgtccacaaagagatgggcat

SEQ ID NO: 826800 - DNA, 100 bp, Homo sapiens
ccaggataatattctctcattgattaatgtcaatgaatcaacaggatgtttatttcctatgctgattctggaggagttaacctcctgcaaaaaaggcatc

SEQ ID NO: 826801 - DNA, 51 bp, Homo sapiens
cagtcctcggtgcggcgcggccagttacaggtcggttcacccagaagccag

SEQ ID NO: 826802 - DNA, 100 bp, Homo sapiens
cttctggggagaccccgacgtggagtgccgagcaacttgagttggtggaaccaagtggctggattcatgttcccttaactgacaatcataagaagccaac

SEQ ID NO: 826803 - DNA, 100 bp, Homo sapiens
atggttgattgcattgacttctcaccatataatattaaatatcagcccaaagttaaatttgagtggtgattttatgcaatggcttcaagccacagttctt

SEQ ID NO: 826804 - DNA, 98 bp, Homo sapiens
tctgcagcctctctgacaagtgtctttcccataaaggtaatgaattttggggcactacacaaacactgaatgttaaatttctgccttcagatcctaat

SEQ ID NO: 826805 - DNA, 100 bp, Homo sapiens
gataatgaaattcagcggctccctccagaaatagcaaacttcatgcagctggtggaactagatgtgtctcgaaatgctgagtcatccaatggtggctatt

SEQ ID NO: 826806 - DNA, 100 bp, Homo sapiens
ctgaaccctgctcagcagaatttatatatgaatgtgatgttagagaactacaaaaacctggtcttcttggggggtcctgatgacaacttaattgaaggtg

SEQ ID NO: 826807 - DNA, 98 bp, Homo sapiens
agagctccaaggagaaaatccagaagagcaaaggcgatgatgccacattacctgttggttcttacttgaaatctccaaaattccctatttggattgtt

SEQ ID NO: 826808 - DNA, 98 bp, Homo sapiens
agcctctggagccagccatgtttggcactgaatcttcatagctagcaacatggaccacagatatactggtgactccgctctcctctggccaagctaca

SEQ ID NO: 826809 - DNA, 100 bp, Homo sapiens
gtgaagcctttaaagcagaagcaaattggaatgaaagctactggttgattttaaagtgcctgggcctcacaggtttggagatgtcccagaataaggcaca

SEQ ID NO: 826810 - DNA, 98 bp, Homo sapiens
ggactctgagggaggagctggggacggcgaccctaggagaggaattttcaacgtccggttcatctaatacagacactggtaaagttactgggaccttg

SEQ ID NO: 826811 - DNA, 100 bp, Homo sapiens
aaggaactcaggcgcctcttcttagttgatgatttagttgattctctgaagctcctggtaacgtttttatccatggatgacttgcttgggtaaggacatg

SEQ ID NO: 826812 - DNA, 100 bp, Homo sapiens
cgcatcctatggctcaaagaaagatgattatgtgaaactgaaattggctgtatcatctgaaacttcatctgtgaagtccctggtggtttcctagatgact

SEQ ID NO: 826813 - DNA, 100 bp, Homo sapiens
agaacagaagggtgggaagccagagccgcctgccatgccccagccagtccccacagcataacagatgcttgcacataccacccaggtgttccggtctttc

SEQ ID NO: 826814 - DNA, 100 bp, Homo sapiens
tcgacggcgagcccttgggccgcgtctcctttgagggatacccacccaccatcccagggtctacaacatccacagccggaccgtcacccgctatcctgcc

SEQ ID NO: 826815 - DNA, 100 bp, Homo sapiens
ttgaataaaagtggagcctggaaaataatgggttttgatttttgtgtatcatcaaccaatccttctgaacaagagggaacagctgccaccaacaatatat

SEQ ID NO: 826816 - DNA, 126 bp, Homo sapiens
tgcgaagcatcacgtccgcttcccgacgctgagggcagccccgtccaggaccttacacataggaagctcacacctggctccgccaaatccagacaagcagtttctgatctcccctcccgcctctcc

SEQ ID NO: 826817 - DNA, 99 bp, Homo sapiens
gaagatcacaccactcacgctcaaggtagtatccaggggacagttggtggctgtaggaaaacaaaattcaacaatgttctctttaacaccagaaaattc

SEQ ID NO: 826818 - DNA, 100 bp, Homo sapiens
tgtgatgaaaaggaacttaatttgatattaacaactggaggaacaggatttgcaccacgagatgtcactccagaggtggtagaaggacagcccccctgcc

SEQ ID NO: 826819 - DNA, 99 bp, Homo sapiens
tgcagtggcgcctaaagtctgagagagggaagtcgcctctgtgctcgtgagtgcatggggtataagatatccttggaacagaagatcttattgtggaag

SEQ ID NO: 826820 - DNA, 100 bp, Homo sapiens
gaggaatggcgtgacctgcaaagtgctgagaaggaagagaaaggcctaaagaatgtatttgacgaagcaatattggctgccctggagcctccagaaccga

SEQ ID NO: 826821 - DNA, 98 bp, Homo sapiens
acaacaatcatactttcagatgaagatttcatggaggtggtcctgggcaagcttgaccctcagaagacctgtcgcgaaatcgcctttcagaaattcct

SEQ ID NO: 826822 - DNA, 98 bp, Homo sapiens
gaaaaatttagccttgttcaaaaagagaagagaaaggatgcacgtcccaggagggaggaactactccaacttttcctattcagaaacaaagaaaaaag

SEQ ID NO: 826823 - DNA, 100 bp, Homo sapiens
accatccataagaaatataatgacacagcagaaggactccttcgaaatggaagagctcatcatgtcactacagtgaacagtacaaattgtaagaagacac

SEQ ID NO: 826824 - DNA, 100 bp, Homo sapiens
accacgccggatggcagtgttggtgaggcagagcatatggaaaatgtttgtacaatgacgacagaaacctgcttcgaattagagagaaggaaagacgcaa

SEQ ID NO: 826825 - DNA, 100 bp, Homo sapiens
tggatttgggggccctgggctccctagccggctgcggtgtgagaatggagtgggcaggaaagcagcgggactttcagattacatgaagcagatgacattt

SEQ ID NO: 826826 - DNA, 100 bp, Homo sapiens
agatgaaaatggctctcgccttccagcaattccccggtatgtgacgcattcccagactcttcagccaactgagcatcagcttcttcacagcaattgggtc

SEQ ID NO: 826827 - DNA, 99 bp, Homo sapiens
ctttaagaaattttatcttttgaaacacgttctgattaaccaagggtacatcaggaacgtctctatcaagaatacaatttcagcaaggctgagggccat

SEQ ID NO: 826828 - DNA, 98 bp, Homo sapiens
cggattgtggagatcgcccggctgcgtgcggtccagcggaaggcccgctttgccaagctcaaggttgctgaaaagccaggagtcaaaatgactgagcg

SEQ ID NO: 826829 - DNA, 98 bp, Homo sapiens
taattgaagccatccggttgtatctgggctacgtgggtaacctacaggagaaggtcacgagaagagaatgccttctagatgcaaaatcacctccaaac

SEQ ID NO: 826830 - DNA, 101 bp, Homo sapiens
aaaatttcagtgaagaagaaagtaaagttggaagttaagggagacaaagttgaaaacaaagtgctgacggtctggaaaatcccgaagcagaagcccgtatt

SEQ ID NO: 826831 - DNA, 100 bp, Homo sapiens
ccccaccacgcctctgcaatcatgggtcaccaagagaggctgagagaccagttgctgatagtccaactccaccgccaccacctccaccagatgacattcc

SEQ ID NO: 826832 - DNA, 98 bp, Homo sapiens
agccatcacctggatgcctacgtgggaagggacctcgaatgtgggaccccagcccctctccagctcgaaatcgtaccgtacagagtggatttgcaggg

SEQ ID NO: 826833 - DNA, 100 bp, Homo sapiens
gaggcatgaagggattggtctatgaaacatcagttcttgatcctgatgagattcaccagaccagagcacttgggcagcagcgccaagatcaagtgcagcg

SEQ ID NO: 826834 - DNA, 98 bp, Homo sapiens
caacacttaggcaggaggatcactcgagcccagaagatcaagactagtgtgagcaacaaaacgcatcttctctccagactgccgatcccagaaagcca

SEQ ID NO: 826835 - DNA, 99 bp, Homo sapiens
caggcagccggtggcagatgacacctgtttggagaagctcctggactggtttaaaacggtcactgaaggaggtccctagctgttggtagtaagtccggt

SEQ ID NO: 826836 - DNA, 98 bp, Homo sapiens
agggaccgaaatggagagcaaaggaatagccaggccagaagaaggaaggcctgtggtgagtgggacaggaaatgacatcaccaccccaccgaacaagg

SEQ ID NO: 826837 - DNA, 99 bp, Homo sapiens
aagcacaaagagcttgctccctacgatgagaactggttctacacgcgagctgaccattcctcaagaattttgtatccaaggcccaaaagtttgttaccc

SEQ ID NO: 826838 - DNA, 100 bp, Homo sapiens
cttgccattgtgaaaggagagacagttccacttgatgtcttgcagatcaagatggggaaattgaggcagagaagccaagacatgtgctaaaggtcatgca

SEQ ID NO: 826839 - DNA, 100 bp, Homo sapiens
tatcaaaagtagagaaaatgaaaggagagcaagaatctcataggtttgtctgccattgtggatttcctgggcagagtggagtgaaggtgccaaaagccaa

SEQ ID NO: 826840 - DNA, 100 bp, Homo sapiens
ctagtcttgagacaacaatttgatgatgcaaaatacaggcgatggaatataggtgtgatgaaccaaggagtggcccctatggtagggactccagcaccag

SEQ ID NO: 826841 - DNA, 101 bp, Homo sapiens
tggtcctgctggtccccgaggggccaacggtgctcccggcaacgatggtgctaagggtgaaggtggtgcccccggacttccaggtatagctggacctcgtg

SEQ ID NO: 826842 - DNA, 100 bp, Homo sapiens
tttgttaaaaagtgtttggtgaagaatcctgagcagagagctactgcaacacaacttttacagtttcgtgtggctgatcaaagaaagaaggcatacgcag

SEQ ID NO: 826843 - DNA, 100 bp, Homo sapiens
actacagaaacctggtctccctagacggcgaggggaccgacctgtttgccgtggctgtccatgagtttggccacgccctgggcctgggccactcctcagc

SEQ ID NO: 826844 - DNA, 99 bp, Homo sapiens
ttgtccccgcagttttcaatcatgattcaagatggaaaaggtgatgtaaccattacaaatgatggtgctaccattctgaaacaaatgcaagtattacat

SEQ ID NO: 826845 - DNA, 100 bp, Homo sapiens
gtcgagaggaccatcctgggtgctggccctgtgctggaggaaacgagcagatgaaagtggaaaactttgaagctgccgtgcatttctacggaaaagccat

SEQ ID NO: 826846 - DNA, 98 bp, Homo sapiens
caaatccccaactactaactattccggaggcagcaaccatcttactggcgtcccttcagaaatcaccagaaggcctggttgcagtatgcttgaaatct

SEQ ID NO: 826847 - DNA, 100 bp, Homo sapiens
agcattcctttccttgaagtcttcgtttttaccttagtctcggagctcatcagtcaatcagtcagcttctcagagtagcaatccatgtgtccagagaaaa

SEQ ID NO: 826848 - DNA, 101 bp, Homo sapiens
cagtctgtgtttttccagaggtgccctgaggagcagggaagcatggctattgtggatgtaaaagccatgttcaagtgtcgagttatagcagtgctggattg

SEQ ID NO: 826849 - DNA, 99 bp, Homo sapiens
tcacatctgaaactcatctgtacctcacttagaaaggcaaaatggcaatacctgtgctttggaagtttctggagaagtatccttcagctgaggtagcaa

SEQ ID NO: 826850 - DNA, 100 bp, Homo sapiens
caggcccctgtcaagaaggtgccggtggtgcgagtcttcggagcgaccccggcagaactccatccggcacaacctgtcactgcatagtcgattcatgcgg

SEQ ID NO: 826851 - DNA, 98 bp, Homo sapiens
aaaactcagttactcaaactgaaacgtctcctgcatcaggtctctgctggtggttctgaagccaaacctctgatcttcacatttgtccccactgtcag

SEQ ID NO: 826852 - DNA, 100 bp, Homo sapiens
aggattcagaagtgtatttagcatctctaggttttggagaaggtggatgtagaacagaaaatgagcatccgatttcttcactaaaggagaccaaactgtt

SEQ ID NO: 826853 - DNA, 98 bp, Homo sapiens
tgccatagctgctgccgaagctgccgtgcaacaactccgcattcaaccaagtgccagcgagatttcagattcctgtaaacctctaaagaaaaggagtc

SEQ ID NO: 826854 - DNA, 99 bp, Homo sapiens
cgaaggtgacttcagaactggagatgttctcagtgcagctgagtcttggtgagcagacatgggaatccgaaggcagcagtataaagaaggctcagcagg

SEQ ID NO: 826855 - DNA, 98 bp, Homo sapiens
aaagtcaagctggagcagcaagtggatgatgttggacagagacttgaaccggctcccccaggacctgtaccacgcccgttgcctgtgcccgcactgcg

SEQ ID NO: 826856 - DNA, 100 bp, Homo sapiens
gatcttctcatccacgggagttttctaaggatgcaggcgaaagagctattcctgcaccaactgacctgaagttcactcaggtcacacccacaagcctgag

SEQ ID NO: 826857 - DNA, 100 bp, Homo sapiens
ttcagctcaagggacacatggcccgattccttctggatatgggccctcacattttccaaacctgtccatctgctaactattttgactgcagagccatgtc

SEQ ID NO: 826858 - DNA, 99 bp, Homo sapiens
ggagacctgaagctgtattccctagagggttacgggacagatgcagttatctacattaagagttttcaaaaggccatgggacttaagaagacggtcgac

SEQ ID NO: 826859 - DNA, 75 bp, Homo sapiens
aggactgttccatttttgccaaagtactctgctggattagaattacttagcagagttcctggaataactattgct

SEQ ID NO: 826860 - DNA, 99 bp, Homo sapiens
tggtgatggactgcagctcagaaaggaacatactctcaaaatatttacttatatcaattcctggacacagagatctgctgatttgggtcctactttaat

SEQ ID NO: 826861 - DNA, 100 bp, Homo sapiens
attagggaaagatttatcttttctccactcatataaaatgactttgcctcccgggccaaactggcagttcaaaaactagtacagaaagttggattttttg

SEQ ID NO: 826862 - DNA, 98 bp, Homo sapiens
ttctacaacatcacagtgtgtcctgtcctaggtgacatcgagggcacgccgggcttcctccaagtgcacacccaataccctctaccatctgctttggt

SEQ ID NO: 826863 - DNA, 98 bp, Homo sapiens
ccgggaacaggatgtcatcacctgttatgagaaagcaggggacatcgcactcctgtatctccaagagatagaaaggggcaactccaacaacattgcca

SEQ ID NO: 826864 - DNA, 100 bp, Homo sapiens
gagtttgtggatcggatattccttcctcatgagatgggacgaggagctggccgccttcgccaaggcctacgcacggcagtgcgtgtggggccacaacaag

SEQ ID NO: 826865 - DNA, 100 bp, Homo sapiens
tcgcactgcgcggagaaggggtccgagggcagtctgtgtcaaacgcaggtgaacaatgactttattctagcaatagagagagagtcgtttgtggatcaag

SEQ ID NO: 826866 - DNA, 99 bp, Homo sapiens
tttaagcggcaggtggaactgaactcagagaaagtctatgctgaaatgaaagagcaggcccatctgcccctaggacagagtaacagctgtggaagtgtg

SEQ ID NO: 826867 - DNA, 99 bp, Homo sapiens
ccgctgccgccctgagtcactgcctgcgcagctccggccgcctggctccccatactagtcgccggtgaagcatatatgcgtttaagcaaactccccgaa

SEQ ID NO: 826868 - DNA, 98 bp, Homo sapiens
gaagctgtcctggaactccggaaaaagaacgggcccttggaagtagctggagggtggagagcccgacttgcagactgtgggtaagatggtcctcaatg

SEQ ID NO: 826869 - DNA, 100 bp, Homo sapiens
atgcccctcctccaccagaggactgggaggagcatgtcaacaggattttgaatgtggaaatgacgtggaactgtcttttaccaagaatggaaagtggatg

SEQ ID NO: 826870 - DNA, 98 bp, Homo sapiens
tgttgtctcatcccaatcacacagatgctgttgcatgaaaaagcagaagccctgcaagaagaggtagaagagttactaagattgccttctgatttccc

SEQ ID NO: 826871 - DNA, 99 bp, Homo sapiens
catacttcagcactcgtgaggtgtactgctgctagaatgtttgagaacaactctgctcatggtgattacatgcaaaataacgagagcagcttaatagag

SEQ ID NO: 826872 - DNA, 98 bp, Homo sapiens
tggagctgcctcagtacacctcctctgatagcgacgtggagagcccctacacgctgatcgattctttattaaagagggtgtacgggagtttcttggta

SEQ ID NO: 826873 - DNA, 101 bp, Homo sapiens
cccgccgctgccgcctccgagcagcccgccagggtgctgacggccaacctggtgctaaaggcgaacctggtgatgctggtgctaaaggcgatgctggtccc

SEQ ID NO: 826874 - DNA, 99 bp, Homo sapiens
tgaagactgcctttcagaagcaagctgggaacctgttgataagaaagagactgagctttccccagacatggccaacaagggtccttcctatggcatgag

SEQ ID NO: 826875 - DNA, 134 bp, Homo sapiens
atgcttttgtgcgagaagaccttgcccgccgggtgaacctcaccgaggcgagagtgcaggttcaggggttacatgtgcaggtttgtaaattgcctgacatggggatttggtgtacagatcatttcatcacccag

SEQ ID NO: 826876 - DNA, 98 bp, Homo sapiens
aggttaactgaagtccaaaagatgtctagactcatgaaatggccacagatgataagacgtccccaacactggactctgctaatgatttgcctcgatct

SEQ ID NO: 826877 - DNA, 100 bp, Homo sapiens
ggcggttggtcagtgtgaatttgtgacagctgcagttgctccccgcccccgagcagccgagggcgcaacctatatcctggtgatggtggatccagatgcc

SEQ ID NO: 826878 - DNA, 98 bp, Homo sapiens
caggaaatggagatcttatacaaaaaggagaaggaagaagcagatcttcttttggagcagcagagactggaacagctggaggaaatggaagaacgcca

SEQ ID NO: 826879 - DNA, 145 bp, Homo sapiens
acaaaatccacaaaatattggtgaccatatgttgacctgctcattatctccaaagatagacttaccagagagctccttaataagcatttatagtcagtttttggcagcaatagaatcactaaaggcattctgggatgttatggat

SEQ ID NO: 826880 - DNA, 100 bp, Homo sapiens
cagatgctgttgtactcccaggaagtagaagaagactacaacccttgtgaagaggacctcttcgtgctgataaaagaatcagagtgtctcaacccttgac

SEQ ID NO: 826881 - DNA, 100 bp, Homo sapiens
caactgctttcctttccctcagcacacagaggatgatgctgactttgatgaagttcgttcccacatgcagggcagcacaaggagaatgggcgtcatgact

SEQ ID NO: 826882 - DNA, 99 bp, Homo sapiens
aattattctgcaagacaaagggaagaaataaaattttcccatactgacaaaagctgatgaagcattgaaagccaaagaaagaaatgaggaagaagcaaa

SEQ ID NO: 826883 - DNA, 98 bp, Homo sapiens
aatccatacatcatcagcgctgctcccccagggacggacccctacacagctggattggctgcagcagcgacactagatcgacgtaattaacacattcc

SEQ ID NO: 826884 - DNA, 100 bp, Homo sapiens
accagggcttcgccagcgggccagcaacaaagtgcaagctacatccgatactcccagatctgtgcaaaagcagtgagagatgcactgaagacagaattca

SEQ ID NO: 826885 - DNA, 100 bp, Homo sapiens
ggacttcgagcagcctctcgccatttcccgggtcactctgactgctgagacctcatgtagctacatttcctggccccggaaaagtctccatcttcttctg

SEQ ID NO: 826886 - DNA, 100 bp, Homo sapiens
tttgaaatgtttcttgcccttcctggagcagaggagccattatttatgcagaaggcagggagtgtgtgaactgtggggcaacctcgaccccactgtggcg

SEQ ID NO: 826887 - DNA, 100 bp, Homo sapiens
ggcaccagccctttgcacctcgcagctaaaaacggccacatcgacatcatcaggtaaatgggcttgatactgtgagagtgcctatgtctgtcgtgaactt

SEQ ID NO: 826888 - DNA, 100 bp, Homo sapiens
aacttggtgctgctagaatgcaggaacagcaggaaccctcacccagaatgaaatgatatttaagcggctgcacctgggcaccgtgtcctatggcgccgac

SEQ ID NO: 826889 - DNA, 100 bp, Homo sapiens
ctgctccgtcatccatgccactttctcaattttgaaccatatggactctccttttcttcatctggcttcactggacgacagtctcctgctggcatttctc

SEQ ID NO: 826890 - DNA, 98 bp, Homo sapiens
atcctccagctttgccgccgcgctgcgcaagctcgccaaacaggcggaggagcccagagaatttcgctaaggagtttgtgatcagtgatcggaaggag

SEQ ID NO: 826891 - DNA, 100 bp, Homo sapiens
tatccacagcgtcctccaaggcttcatccccctcttccagaagtttaggctgacagctaggacttctctcaaacttgtgtgctgaggagactcagatgtt

SEQ ID NO: 826892 - DNA, 100 bp, Homo sapiens
ggtcataactcctggagaagggattgcccagtcagcaaaggttcagccctccaaggctgtggatctttccattgatgagtccagcttgacaggtgagaca

SEQ ID NO: 826893 - DNA, 100 bp, Homo sapiens
gcatcctgtgaggcctgcaaagccttcttcaagaggaccatccagggttctagagccttctttccgccaggcctttcccaataccaaccgctggttcctc

SEQ ID NO: 826894 - DNA, 101 bp, Homo sapiens
tccacgccagccgcaccatgccgctcctaagcctgcacagccgcggcggcagcagcagtgagaggagcacagaaaatggttctgccccctccacagctccc

SEQ ID NO: 826895 - DNA, 100 bp, Homo sapiens
catctcagacttctttcccagatgtttataatgagggcacacagactctttttgatcagaacaatgctgcaaaaaaagaagagtcagaaactgccaacaa

SEQ ID NO: 826896 - DNA, 98 bp, Homo sapiens
taagatctagagtatctcctcgaggaagtacaactggagggatttgttcgtgttgaccgagattatgtgctgaagtctgcagagctggcaaaagctgg

SEQ ID NO: 826897 - DNA, 100 bp, Homo sapiens
ggacaccttgttagatggaacctacaagcagctctacattaatcatactcctccaccactgtccaagagtaaggagagagaaatggacaagaaagatttg

SEQ ID NO: 826898 - DNA, 100 bp, Homo sapiens
acatcaccgtactgcatgtgaagctcaccgagacggcgatccgggcgctcgagacttaccagagccacaagagcagcccgacggccatggaggctgaaga

SEQ ID NO: 826899 - DNA, 98 bp, Homo sapiens
cctggtgggaggcccagagtacgtgcactgcctgctgtcggtggtggggagcggcagctggcagagagtcaacgcccagacggctgtgagatccccga

SEQ ID NO: 826900 - DNA, 98 bp, Homo sapiens
gaaaatcttcacagtgctgttactaaagcctgcctttccagggtgataaaagaaaatgtggctgaagttacccgaagttcagcttgcagtgtaattca

SEQ ID NO: 826901 - DNA, 101 bp, Homo sapiens
catacagcactttgtggagaaagtcgtcttccacttgcacgaaagctttcctaggccaaaaagagtgctgggcctaaaggagataacatttatgaatggag

SEQ ID NO: 826902 - DNA, 100 bp, Homo sapiens
tgaaggattactcgcccccacctgtggactctgaccgcaaacaaggagagcctactgagcagcctgagtggatgttgatggcatggacctgggcaaaaag

SEQ ID NO: 826903 - DNA, 99 bp, Homo sapiens
cgacccctggaagctgatgctgctggacgccactttccggggtgcacagcaagtggcaaaagatgtgattgaagagcatggtccttcagaaaaggcaat

SEQ ID NO: 826904 - DNA, 131 bp, Homo sapiens
aggattctcaccacgtactggctagacttatacttctcaaatcttaatttcctaaaggtacaggtttgcagattccgccagcagcacagcaagctctacagatgagtggctctttggcatttggtgctgtg

SEQ ID NO: 826905 - DNA, 98 bp, Homo sapiens
tgctttttagccacaggaagatccaattccacatcttcactgaagactctctgaagcccgagtttgataagcaggtcaacggcagagacttatccaga

SEQ ID NO: 826906 - DNA, 99 bp, Homo sapiens
ctaaatttgtgaatgctgtgtatgataccttacttaatactcatctgtccgatctttcctgtttcccccactccattcccttcctatccatcccacagc

SEQ ID NO: 826907 - DNA, 100 bp, Homo sapiens
ctgtctggaattggcaacatctctgagagtgcaaccagaggtgacagtgtacccagagaggaccccactcctgcaccagcataatctgctgcactgctct

SEQ ID NO: 826908 - DNA, 100 bp, Homo sapiens
gttagacaaggagagccaggaggagctgggccccaacctcatccaaaagcacagatcatcactgttgaagaggcaaagcgcaggaagagcacatgcagct

SEQ ID NO: 826909 - DNA, 98 bp, Homo sapiens
ttactctggggtcccggctgccctgtggcctcgctcctcggagggtcctgaatctgtgcctccttcccttcttaaagtagtgatgaaacccatagcaa

SEQ ID NO: 826910 - DNA, 98 bp, Homo sapiens
agaacgcagatcagaggtagtcggacctttcccgctggcgcgcagcctcagctagaatgcgataagttgcggcatgatggctaccgcagttctcagta

SEQ ID NO: 826911 - DNA, 98 bp, Homo sapiens
tttatgacaagaatgactgtcaccgcatagcaaaactcatggctgaaaccaatttagaacttgaattgattcatcgaggaggcaatttgtgttcaggt

SEQ ID NO: 826912 - DNA, 98 bp, Homo sapiens
tggaggaccgattctttgagcacgaggagccggcatcatggattccttcaaagtagtgctggaggggccagcaccttggggcttccggctgcaagggg

SEQ ID NO: 826913 - DNA, 100 bp, Homo sapiens
ctcagagctctcaagcatgaacttgcctttaagctgcaggttctcctgaaaagaaagctgaacattcatctataaatcaagaaaatggcactgcaaaccc

SEQ ID NO: 826914 - DNA, 99 bp, Homo sapiens
atgaagatgaggagtttttccccaaccatggtaatggaacttaatcgatctgagagtttatgtcatgaaaactcattcttcatcaatgaagctttagta

SEQ ID NO: 826915 - DNA, 100 bp, Homo sapiens
actgcacccatcccggctgcttttgctgcgccctctcagcttcccaagaaaggtcttgatgcagaactttattatgtgagaaatgaccttattagtcact

SEQ ID NO: 826916 - DNA, 100 bp, Homo sapiens
tcttggtggagcgattcaaaccatactgcaactttgataactccaatactgttggcactagtggcaggagaagctgctggtatcatggaaaacataagtg

SEQ ID NO: 826917 - DNA, 99 bp, Homo sapiens
ttaatctgaggtgaagcaaacagaaaattgtggaggttttgttgattattcctgattctaagataaatgtgccagagttacccactcctgatgaggata

SEQ ID NO: 826918 - DNA, 100 bp, Homo sapiens
agcccacgaaggggagattgaagacctggctttagggcctgatggcaagctttactcctgaagccagcgagatcacgaacccactgggagaaacgaacaa

SEQ ID NO: 826919 - DNA, 100 bp, Homo sapiens
cggaccgcccaaccccaaaagagccaaactcagctcgcccggtttctcggcgaatgacagcacaggcagtagcagaatcccatggtagccaggtgggtga

SEQ ID NO: 826920 - DNA, 100 bp, Homo sapiens
ccccgataacttcgtgaagttacttccaccggactttgaaaaggaagggaataatggacagcaaattatggatgaacctatgggagaggaggagattaac

SEQ ID NO: 826921 - DNA, 98 bp, Homo sapiens
tcatggaaaagcagttgctcgaagaactcgagcgacagagacaagctgagcttgccgcacaaaaagctagagagcccaccaagaaaacacattgtgga

SEQ ID NO: 826922 - DNA, 100 bp, Homo sapiens
gggcctttcctgtgccaacctgatgccccttccccaagaagctaacaacacagatcccatgtagttggagaaccaaaggccacatacatgacaaaaagac

SEQ ID NO: 826923 - DNA, 100 bp, Homo sapiens
agggaggaaggcggcccgggtcctgggcagcgaaggggaagaggaggatgaagcccttagccctgctaaaggccagttacgttatgatgatgaagtgaag

SEQ ID NO: 826924 - DNA, 100 bp, Homo sapiens
gtggaccacatagacatttacgcggatgtcggcgaagagttcaaccaggtgttgacttcaaaatcaaaactgtagagctaagaggaaagaaaattagatt

SEQ ID NO: 826925 - DNA, 98 bp, Homo sapiens
acaaggtgtcaacaatgtgccggggtttatgccctggacagcatcatgcagacctggtttacactctttactcccaccgaggccacaagtatagttgc

SEQ ID NO: 826926 - DNA, 100 bp, Homo sapiens
cggacggcccggatgagtacgataccgaagcgggctgtgtgccccttctccacccagaggtgttacagttcgagtgcctcaaacaaccacatatgttgta

SEQ ID NO: 826927 - DNA, 99 bp, Homo sapiens
tgatgatgatattgtgaataacatgttctttgcccaccagtgagcctgctcagtgcctggattgttgcccggctccggatgagaaatttcaagaggctc

SEQ ID NO: 826928 - DNA, 100 bp, Homo sapiens
ttcggaatgcactacaacaggaaaatcatattatagatggagtaaagtcatcagtgagttctgcctcagtcagctcccaagtgaggacgcagtcaccttt

SEQ ID NO: 826929 - DNA, 100 bp, Homo sapiens
cagatcaacgtcctccgggaccggagtcagaaccctccgcagagtaaagcttctttgtgatattggccacagtgaagaaaaactgggctttcactatgag

SEQ ID NO: 826930 - DNA, 100 bp, Homo sapiens
tggaaggatcataggtggcactcatgtctcactgccccactcaggtctcagccaatttcttctccagtcatcctccagtttggtcatgcagagactcttc

SEQ ID NO: 826931 - DNA, 100 bp, Homo sapiens
gcctcacggaacgtcagcaacgatcccgatgtcatcaagttgcaagagattccaaccttccagccccttttgaaagggctgatcccttatccaacatggt

SEQ ID NO: 826932 - DNA, 100 bp, Homo sapiens
gaacaagagaagacctcagatgtgaagtccattaaaggagacagagctactggatctcagccttgtcaaagatgccagatgtgggagacacgccaaagct

SEQ ID NO: 826933 - DNA, 99 bp, Homo sapiens
ataaagacaggagtggagtgatatcagacaccgagcttcagcaagctctctccaacgattcatgatgttgctatcaaaagttgagaaattgtcagaaga

SEQ ID NO: 826934 - DNA, 100 bp, Homo sapiens
ttagagacagcagaccattaagtccaatccttcacatagtaaagtggtgaagcagtattttccaatttgaagattcatttgaaggtggctcctgccacct

SEQ ID NO: 826935 - DNA, 100 bp, Homo sapiens
ttgcaagaaacctcaggacttgagtaacagcaacatgagtccctgtgaagcaggaagagtgagggcaggttcactgcagctcagcagcatgtctgcaggg

SEQ ID NO: 826936 - DNA, 100 bp, Homo sapiens
ccgaaaataagcttctgctacagcaaagatcagatgctaagattacctttccaggttatgcaatggtctctgcaagatggtttattcttgaattggacct

SEQ ID NO: 826937 - DNA, 100 bp, Homo sapiens
gttttcagtacctcatagtggcaattgccttttcaaaaggaaaacccttcaggcaaccttgctacaaaaattatttgcctactggctgggaagaagcata

SEQ ID NO: 826938 - DNA, 100 bp, Homo sapiens
caggaaatgaaggaccatatggtcagcccaacagccgtagcatttttggagaggaataacagagaggacagttctgcagatcgatttctcaacagcttgg

SEQ ID NO: 826939 - DNA, 99 bp, Homo sapiens
ttgtgcctccattcccgggaggggggagcggcgttggaggccaccgtttccagagagaagaagaaggaggttcctgctgtgccagaaacccttaagaaa

SEQ ID NO: 826940 - DNA, 100 bp, Homo sapiens
ctttaatcctgaaagccatgcagcggtactatactggcaattgctggagaagattttgcaattgttgcttctgatactcgattgagtgaagggttttcaa

SEQ ID NO: 826941 - DNA, 100 bp, Homo sapiens
ttcatcaaaggaagttttccaggcatctgcgaatgcattgtcaactctcttagaacaaaatggccaagctataacatcagaaatggtgaatgaatacaag

SEQ ID NO: 826942 - DNA, 100 bp, Homo sapiens
tcacttcaacctcaaactcctgggctcaagcggtcctcccacctcagcttcccaaggagctgacactacaggactgtaacgagattaaaggggagcggtt

SEQ ID NO: 826943 - DNA, 100 bp, Homo sapiens
agaggattggaggtgtcagtgttaaaggaacctctacaacgaaggtgaagccacggaagataagcccagggccttgctgccgccatgactgaggaatcag

SEQ ID NO: 826944 - DNA, 100 bp, Homo sapiens
cccaaccaagtgcgagatctgcgtgaaaaggcggcaccttcctacttctgcccagccacagccctcccctcacagttgagcacctgtttgcctgaagtta

SEQ ID NO: 826945 - DNA, 100 bp, Homo sapiens
gttggagcaacagtccaagctcaaatttgtgatggacgcctctgaccccacccagctctctgcatcctgtgtgcagctcttaggtctcctttctgcagaa

SEQ ID NO: 826946 - DNA, 98 bp, Homo sapiens
tggcctgcccggacgagttcgatgacttcgtcacctatgagcccgtggaccgggagcccgtggaccgggagccggtggtgtgccaccccgacctggag

SEQ ID NO: 826947 - DNA, 100 bp, Homo sapiens
cataggacaggctgaggctgagtctcagtgttgccctgttcagtctgaggctttacaggaagtatggtgctggcatctgcttggcttctagagagtctta

SEQ ID NO: 826948 - DNA, 100 bp, Homo sapiens
ccgcgcctgcacttagccccgcgcccgagggaatgacagaggaagaggaagacaaacttctggcactgaaagacttcatgatgaaatctaataaagcaaa

SEQ ID NO: 826949 - DNA, 100 bp, Homo sapiens
accagcggctgcaggactgggcacagcatgagatccaaaggcagggcaaggaaactggccacaactgatatgcattcaagatggttacctttccctgctg

SEQ ID NO: 826950 - DNA, 100 bp, Homo sapiens
aatatgctgccaaaattatcaacaccaaaaagctttctgctagggaattttcctgcatggagtgctacatcctcttgttccagtctcagctggctgctcc

SEQ ID NO: 826951 - DNA, 100 bp, Homo sapiens
gagagcgagagcgcgaaggaaatctggccgccgccgccgcgagcgctcccgaacccagcgggtgccgcttctccacccgaggcttccacctccaacgagc

SEQ ID NO: 826952 - DNA, 99 bp, Homo sapiens
gagaacttctcctcccaggttgtggaacgacacaacaagccggaagtggaagtcagatttcaggtatgctgctgaaagtgggaatcctctacattggtg

SEQ ID NO: 826953 - DNA, 100 bp, Homo sapiens
attcgttacagccagagattgcattactctactgactggcagagacaggagaggtagatgtccacgcccacagaccctggtgcgatgccccacccagggc

SEQ ID NO: 826954 - DNA, 98 bp, Homo sapiens
ggcgagtatacatgcaaagcttccaatgagtatggcagtgtcagctgtacagccacactaactgtgacagactcattctgatgaaggaaagagcgtcc

SEQ ID NO: 826955 - DNA, 99 bp, Homo sapiens
agaactaaaaatggctgttcttcaaagaatgatggatgcatctgtatatttacaaagagaagtttttttgattgcgcagtctctttgtggagaggactt

SEQ ID NO: 826956 - DNA, 100 bp, Homo sapiens
gaggatgtactccgacatcattgcctatggagtggatcagggagcttccaaggcatttgatacctttttgatgggaagaagggctctgaggagctccaag

SEQ ID NO: 826957 - DNA, 100 bp, Homo sapiens
tgaagactattttggagggcatagatccggccaagcatcaggatattggtgctggaaaaggcaaatactatgctgtcaattttccaatgagagatggtat

SEQ ID NO: 826958 - DNA, 98 bp, Homo sapiens
ttcacgatcctgtaactgccaaacccaagttggttggagatgtggattttgaaggttgaatgatcctaaaatgtctgaaacggagcgccagtccatgg

SEQ ID NO: 826959 - DNA, 100 bp, Homo sapiens
ctcgctgccccgaggaaacccgagccgcgcgccgcggggccacccccagaacctcaaagatgtgactggagtgatttgcacccggatgcctagactcgcc

SEQ ID NO: 826960 - DNA, 100 bp, Homo sapiens
gtccccgcccacagacaacaggccaggcccatcatcctggatccggccgaccccaccctcaacgtggcagaagggtacagatgggacatcgttgctcaga

SEQ ID NO: 826961 - DNA, 100 bp, Homo sapiens
aatatttatacatctcactggagacttatgaaaacaagattttggacagatcccttgggacccatggatggaaagtgaatgaggagaaacctgtgcaaat

SEQ ID NO: 826962 - DNA, 98 bp, Homo sapiens
ttgactgccatttttggctacttgacattctatgctcttcttcaagtgacaatttcacttagcaaagtagagcttagtgttggagaatctaaattctt

SEQ ID NO: 826963 - DNA, 100 bp, Homo sapiens
gccaacccatgagagtcgaattggagaacttgttggagtgctggtgaatcatttcaagaggtataccaagcttggctacgcaggcaacactgagccccag

SEQ ID NO: 826964 - DNA, 99 bp, Homo sapiens
gtttctggctccgggctgagcttcctggagaagaggaaggtgcccgtggttgacacgagctgtgtccccagctgttcccgtctacaatggcatcatctt

SEQ ID NO: 826965 - DNA, 130 bp, Homo sapiens
agggaagaaggcatggagttcatggtgttagcgcaaaagttctgaatggcatccgtcctaccggaaacctaggaaaaggagtcaaattgactttatcagctttaatcgatgggaagaacttcagtgcagg

SEQ ID NO: 826966 - DNA, 100 bp, Homo sapiens
atccagtgaggacattgctgacatgcatagcaacctctccaactatcaccaggtggttgctgtatatggaactttatctgatttgctttctgtggccagc

SEQ ID NO: 826967 - DNA, 100 bp, Homo sapiens
atcgcgcactttttggatcggcatctagtctttccgcttcttgaatttctctctgtaaaggaggaccaaaagatctcagattgctataactgaaggtata

SEQ ID NO: 826968 - DNA, 99 bp, Homo sapiens
tttaaagtacagaagagtattttgaaaaagcattacaaatatgaagaggcattatttatgaccttttctatggaaagatcatcagaaaagcccttactg

SEQ ID NO: 826969 - DNA, 100 bp, Homo sapiens
accaagcgggagctggagaacttcagacactacgagcaggccgtggagcaggtcacagctctcatcaagctgaaggagtgtgaggatacccaccttgggg

SEQ ID NO: 826970 - DNA, 98 bp, Homo sapiens
agcttgaccgcatcgtgaaggaatctggaggaaagctgaccaggcggcttgtgaacagtcagaaatctcctgcaaagaagctgagccatgcaattagt

SEQ ID NO: 826971 - DNA, 99 bp, Homo sapiens
agcctgagctcctgctttgcacagctttgccacaaagcccagtctgtgtctcaaatcaaccacaagctggagacagccgctcaggaagcaatcttgcat

SEQ ID NO: 826972 - DNA, 100 bp, Homo sapiens
gtgcgggcgggcggtgagcgcccatatgggggttctggagagcggggtgtggggctgaccccgcactacatctacccaccagccatcgtgcagcccagcg

SEQ ID NO: 826973 - DNA, 100 bp, Homo sapiens
aactacgtcttctctgcattttgtccacatgagaggattacctttccaagccaatgcccaagacattataaacgaagatgagaatgtgcctactgctcct

SEQ ID NO: 826974 - DNA, 99 bp, Homo sapiens
acattcctgattacctgccacccattgtgtcttctcaagaaggtgtgactgcacagaaaagttacaaaacaaatttgactttttgcgctcacagttgaa

SEQ ID NO: 826975 - DNA, 100 bp, Homo sapiens
accatgggccgggatcacattctgattgcagcagtgaggatgccagagttcatgggtttctagaagacaagttttcaactgcagatacaaacatcaggac

SEQ ID NO: 826976 - DNA, 100 bp, Homo sapiens
gggctgtattctgacgtttacaaaactacagaattctctcgggcctagccgtccttggaacccgatattcgggctgggcggttccgcggcctgggcctag

SEQ ID NO: 826977 - DNA, 100 bp, Homo sapiens
agaaggaacttgcagaaatcacattggaccctcctcccaactgtagaatggctattcaagtggacaagttcaactttgagagtttcccggagtcccctgg

SEQ ID NO: 826978 - DNA, 98 bp, Homo sapiens
ctgaatgggtacaggtcacattcttggagctcaaggtgacaggccagagcccaggtccccaggacagtgcagaccaagatcactccatggatgaaatg

SEQ ID NO: 826979 - DNA, 98 bp, Homo sapiens
tttggtgtggacatctgctgccggaaggggtcccgaagccccctgcaggaactctacaacccaatccaggacttcccgcacatctctgagttccccag

SEQ ID NO: 826980 - DNA, 98 bp, Homo sapiens
caaaggaaggagttttttgcgaaacttagagaattactgcttagatttgatggtagagtggtggcaaagcttccttttacccctctttcttacatcca

SEQ ID NO: 826981 - DNA, 100 bp, Homo sapiens
gtttgttcagtttaacgaccaattcttctggggccagctggaggccgtcgaggtgaagtggagcgtgcgaatgaccctcgatgatattggaaaaattgat

SEQ ID NO: 826982 - DNA, 99 bp, Homo sapiens
gcagggcccagaacagacacacttagttttgttcttcgtgaacatgaaattggagagggaatgtggatgaggagcccacttcagtcactggtcgaaaag

SEQ ID NO: 826983 - DNA, 100 bp, Homo sapiens
caccggctggctgaggaaatcgcctcccgagaagaagttgaggcgctatatcctgaggaggatgaaggggctggccctggaggccgagagtgagctggag

SEQ ID NO: 826984 - DNA, 100 bp, Homo sapiens
aaaaatggctctgtcggcagtgtgtttttgcaacaacaacaaaggccaaacagcagttgaatctgcgtacgcatatggccgatgaaaataaaaatgaata

SEQ ID NO: 826985 - DNA, 98 bp, Homo sapiens
aagaaatgtcttctagtactttaaatttagtggttgctggagcacctaaaagtcagattggaatcactctgcatgatgaacctgtcgactgggcggca

SEQ ID NO: 826986 - DNA, 98 bp, Homo sapiens
agaatatgctaaacttttggccaagagaatgaaggaggaagccagtgaaggtggaggaaatgatcgtgtgcggaacctgcaaagtgaggtggagggag

SEQ ID NO: 826987 - DNA, 99 bp, Homo sapiens
ccgagcgctcgagaaagtcctctcgggagaagcagcgcctgttcccggggcagatccaggttcagctcatgatggagcagtccaagaagtcctccctca

SEQ ID NO: 826988 - DNA, 100 bp, Homo sapiens
tttgatttttgtgaaacgtgtttcaagaccaaaaaacacaataccaggcatacatttggcagaataaatgaaccagtacactcagaagaagccttgtttt

SEQ ID NO: 826989 - DNA, 98 bp, Homo sapiens
tcgaccccggcccggaggaggctcatgcgggatttcaagcggagcaatttacagcaatgagggatttatacatgaaaaatggacaaggatttgcatta

SEQ ID NO: 826990 - DNA, 105 bp, Homo sapiens
ctgagcgttctcaacttggttattgtaaaaaaaggttgtcatttagtaaaaacggagtagttagaatagatggtttctcttctcctgaccaatatgatgatgaag

SEQ ID NO: 826991 - DNA, 100 bp, Homo sapiens
acaaagtttggatgtcatatttactgaaagacaagcgttgcacataggcaaaggtgtgcagttggaatgtaaaggtgaaggtgatgtttgggtcaggtgc

SEQ ID NO: 826992 - DNA, 99 bp, Homo sapiens
tttgtttgagtacgaagggtgcaaagtgggacgcggcacctacggtcacgtctacaaggcgaggcggaaagatggactccagcgggaggaagaagaggc

SEQ ID NO: 826993 - DNA, 98 bp, Homo sapiens
attatcaactggcttgataagaatcagattctcgctgaagtctgttaattctactttttgagtacttatgaataaccacgtgtcttcaaaaccatcta

SEQ ID NO: 826994 - DNA, 100 bp, Homo sapiens
catgcacttgatgctggaccacattcctcaggtaccacagcagaccacagttctctcggattctgaaggtaattttgagactcctgaagctgaaaccccg

SEQ ID NO: 826995 - DNA, 100 bp, Homo sapiens
gaaaacccatatatccgaatggtccctatgttaactacttgagacaaaaataaatatggccttctacagttataattcagttctggctattgctcgaaca

SEQ ID NO: 826996 - DNA, 99 bp, Homo sapiens
gatgtctacctggtaatagaggacttgaagcagaaagcaagtgaatacgagtcagaagaaactaattctgaagcaagcccttatagttgtgctgcagtg

SEQ ID NO: 826997 - DNA, 98 bp, Homo sapiens
gcagcatgtcggtggcggggctgaagaagcagttctacaaggcgagccagggagtggagcttggtttcgggatctcggtgctgcagacggcgagacct

SEQ ID NO: 826998 - DNA, 100 bp, Homo sapiens
ggaaaacctaaccatgaagacttgaacttaatacagcaagaaagaccatcaagtttaccagtcaacattggcatcctcatcgctgtgaccagagtcatct

SEQ ID NO: 826999 - DNA, 100 bp, Homo sapiens
agcaagccggagagaagagagagcccggccagacccactgcgatgagacagaaatgtccaatcagggaagtaagtacgtcaataaggaaattcaaaatgc

SEQ ID NO: 827000 - DNA, 100 bp, Homo sapiens
gctaatggagcaatacgtttccattgtgatcccaccttctgggcaaagaatgtagtcaatttagttaccaattggtgaagccaaaactttcaaaggagtg

SEQ ID NO: 827001 - DNA, 100 bp, Homo sapiens
cctcaatggattggtttacataggtcaaggtgtttgtgaaccgaagtttagcaatggaaaagataaagtgttttggttttgatatggattatacccttgc

SEQ ID NO: 827002 - DNA, 100 bp, Homo sapiens
tcgaccctcgcacactctttgtcactgagatacactactgctgcagctcacaaacacctctgcatattacatgtacctcctcctgctcctcaagagtgtg

SEQ ID NO: 827003 - DNA, 98 bp, Homo sapiens
acaatggcatttacagaaagagtcaacagcagtggcaacaggatcctcggttcaatgcagaagttgaccaaattacaggctacaagacacaaagcatt

SEQ ID NO: 827004 - DNA, 100 bp, Homo sapiens
ccgacgcaaaccaaggatctggggatcttcgcactatcccaaggtctctgagcggcccctgatgttcctgttggacactcctggcgtgctggctcctcgg

SEQ ID NO: 827005 - DNA, 100 bp, Homo sapiens
cacagtcgggggtgtaggttatgggggtttctcctgccccagtgaccggtccatcttgctgcctctcatcatcggcctgatccttcttggcctcctcgcc

SEQ ID NO: 827006 - DNA, 98 bp, Homo sapiens
aaagaatgaaggaatttattggaattgtttggaatgcagtgaagcatctcacactacagaacatccatgatagcagtcttctgtaaatcgaacttttc

SEQ ID NO: 827007 - DNA, 99 bp, Homo sapiens
agcactcccagctgcgcagggcctgccaggtggcgctcgttgggacccctgattttagcaggatggcccaatggaatcagctacagcagcttgacacac

SEQ ID NO: 827008 - DNA, 100 bp, Homo sapiens
gggcccacatcttccggccaacttccattgaacttcccagcactcgaaagggaccgaaatggagagcaaaggtggtgaggtttctgaagaattatccctg

SEQ ID NO: 827009 - DNA, 100 bp, Homo sapiens
tgatagccagtccctggagctggtgcacaggttccaggaaacccagcgtttgctggcagaaccagttcctggcatcaaagccgaaccagatgagagcaac

SEQ ID NO: 827010 - DNA, 100 bp, Homo sapiens
caggaaagtttgaagaaagtgaattacatcaaaatcttggctgtgtacatgatgccaaccgagggggatgattcgtctaaaagcgtccctttagcattac

SEQ ID NO: 827011 - DNA, 99 bp, Homo sapiens
agaggaggtccgcgagatcctaggggaccaggacttcttccagtggcctcagctgttgaagaacgctctgcagagagcagtagagaggggccagttaga

SEQ ID NO: 827012 - DNA, 99 bp, Homo sapiens
cgccctggattttgcatcagaaacagcccaggcggtgagagacacagccacactcagcggccccagaagggcgctatattcctcctcatttaaggaacc

SEQ ID NO: 827013 - DNA, 100 bp, Homo sapiens
tccaggactatactttattgatcaacatccttcatagcccgatgcatatgacatgatggttcgcgagcttggctttgaaatgaaggcgcagccctctaac

SEQ ID NO: 827014 - DNA, 100 bp, Homo sapiens
agcccccggcctgagaaagaaggaggagtgggggaggcgaacagtctcgttgctgcctctgtgtacgctgaggggggagagatgcgctggcagctgagcg

SEQ ID NO: 827015 - DNA, 98 bp, Homo sapiens
ctggtcctgctcggctgcctcctggcctcgctcctgttctcaggacaagcagagggtattgtgcctggccccccgacagacctctctgtcactgaggc

SEQ ID NO: 827016 - DNA, 127 bp, Homo sapiens
tggggctttgtgagatagctagggtcgacttgtgtggattctagtagaacggagctgaccctatccgaacaggcgatatttcatgtctgaatcgggacccagctcgagtagtagttgtggactgcaa

SEQ ID NO: 827017 - DNA, 100 bp, Homo sapiens
tggagaaggccatcaccacgcagaacgtcaacaccaagtgcatcaccatccccagtgccagatccgctttggagggagaaaggagattgcctcggattcc

SEQ ID NO: 827018 - DNA, 100 bp, Homo sapiens
tcaaacttacagggttgccaccaggtcgtcaaagtcctacattttagctttcagtgctgaacttccttctcccttaaattattataaacttttgctgctg

SEQ ID NO: 827019 - DNA, 100 bp, Homo sapiens
aagaaactgaggcctggaatttgattaactcattcaaggttacccagttggtatcattgcccagtgcctaagatcttttatgttcagctcactgtaggaa

SEQ ID NO: 827020 - DNA, 100 bp, Homo sapiens
catcagctgccacgcctggaacaaggaccgcacccatgtacctgtgtggtctaagctggaatctggtcaccttccatccatgcaacaacttgttcaaatt

SEQ ID NO: 827021 - DNA, 99 bp, Homo sapiens
gggaccgcttgcagcggggacgcgaggacccgggctgggctttcctcacccgggcagtggagctactgctgtggttcaggcagccctatgcaaacccag

SEQ ID NO: 827022 - DNA, 123 bp, Homo sapiens
ctgtgctctcaaactttactttgcctcatttgaggagtgggaacaggcttcggcgaacacaaagggaatgaaagctactggttgattttaaagtgcctgggcctcacaggtttggagatgtcc

SEQ ID NO: 827023 - DNA, 100 bp, Homo sapiens
gagagagagacaacatgttacatctgcaccattcttgaatcttcagctagatgaagaaacccaataccaaactgctgttgaagaatcttttcaagtaaac

SEQ ID NO: 827024 - DNA, 100 bp, Homo sapiens
acatggccacaaggccctactcaatacatgcccatggggtacaaacagagagttctacagttactccaacattaccagctcccatcccagatctcaaagt

SEQ ID NO: 827025 - DNA, 100 bp, Homo sapiens
cccagagcggagacaacagcagtgagcaagctccttctgctccagtcataaatccacaggtccctaactcagccacaggttcctcagtccgagtgtgctg

SEQ ID NO: 827026 - DNA, 100 bp, Homo sapiens
tgaggacacttgtggagagctcgaattccagaatgatgaaattgtgatggatagaatgacagaagatgctcttcgcttgaatctgttgaagcggagcttg

SEQ ID NO: 827027 - DNA, 100 bp, Homo sapiens
gcttcggcattagagaaagagattggtccagaacagtttccggtcaatgagcactattttggattagtcaatgtcaggttgccaaaaaggaagatctcat

SEQ ID NO: 827028 - DNA, 100 bp, Homo sapiens
aaagaaagttcgcaaattacttccggaacgtaaacctgaaccaaaggaagaagttgttctgaaaagcgtcaagagaacaatcggatgatgagactgagga

SEQ ID NO: 827029 - DNA, 100 bp, Homo sapiens
cggatcctatatgtgccaagcccataactcagccactggcctcaataggaccacagtcacgatgatcacagtctctgactgcttttggcttctggatgcc

SEQ ID NO: 827030 - DNA, 100 bp, Homo sapiens
tcttctcatttaaaagctcacctgaggactcacactgatcactaaggaggaagagcgagagaagaagttttctagaaggctaaatcacagtcctccccag

SEQ ID NO: 827031 - DNA, 99 bp, Homo sapiens
tgccaaatacatcagcttgtaggagacagagactcacagatgaatgcttctcacccggaaacaaacttgccagttgggtatcctcctcagtatccaccg

SEQ ID NO: 827032 - DNA, 100 bp, Homo sapiens
caagcagaaagttgaacagaacgcggctcccagccacaccaagttcaggtcattaatagcatctgggctctatggctacaatgccaccctggtgggagta

SEQ ID NO: 827033 - DNA, 100 bp, Homo sapiens
gccggaatctgaggtgtgagtagagcctgggggagagtggatccaggtgaagggggcagaggtgaccctggcaaagatgagagtgcacatttcgtcctgc

SEQ ID NO: 827034 - DNA, 102 bp, Homo sapiens
ttccaggaacctgaggtcggctgctgcgggaaatacttcctgtttggcttcaacattgtcttctggtaagactttgaccccgacgcaggcttcagtgattgc

SEQ ID NO: 827035 - DNA, 98 bp, Homo sapiens
ggctctgctgaccttgtgccttggtccggcctctttggcctacccccgttggctccgctgccccaggtcgatgagtcccctgtcaacgacagccatgg

SEQ ID NO: 827036 - DNA, 100 bp, Homo sapiens
caagttagtggattaaaatctcccaagaggaatgacaaacaaccagctcttcagcttggttctacagccattgggatccagacatcagagggtgtgtgcc

SEQ ID NO: 827037 - DNA, 98 bp, Homo sapiens
cgactcggtgattgaggacaagaccatcgagctcatgcactcctgtaggaggcctgctgatggcatttcagaagtactctggtgagactgttcaggaa

SEQ ID NO: 827038 - DNA, 100 bp, Homo sapiens
tgaagaccggtttcgacttcaacatcatggtcgttggaaagggcactggtgtcctgcaggaagagatgaaactctgcagctggtttaaacacctgccagc

SEQ ID NO: 827039 - DNA, 98 bp, Homo sapiens
tccctgggctggtgaagtacatgaactcagggccggttgtggccatggttttgcacactagggaccaagaagccctcggggacactgctgagaaaaga

SEQ ID NO: 827040 - DNA, 98 bp, Homo sapiens
gctggatatccaagcctctcagcttcggagaatggagtcttccatcaatcatatctcacagttgctttgaattacggaatttataagcaggatctccc

SEQ ID NO: 827041 - DNA, 100 bp, Homo sapiens
gatagcaatgatcccaatttccagatgccttgttcaacaggtggaggcctgaattttgatctatgttctacctacatccagctggctgaaagtacttgag

SEQ ID NO: 827042 - DNA, 100 bp, Homo sapiens
tcttgatatcatcttccaaactgatctaacagggcaaaaaaagggctggaaacttcgctatcatggagatcgtttttctattgggaaagctactgatcgg

SEQ ID NO: 827043 - DNA, 100 bp, Homo sapiens
ggaaatcgggctgaagcgactgagtccgcgatggagcatcaacaacagcaacttgtgattggcggtgaccggatattcagttgcacatccccacatcaat

SEQ ID NO: 827044 - DNA, 123 bp, Homo sapiens
ctggacatcgatagggatgcagaggatcagaaccggtacctggatggcatgaatttcttcaggttgaattacctagaagtttgtcactgacttgtgttcctgaactatgacacatgaatatgt

SEQ ID NO: 827045 - DNA, 99 bp, Homo sapiens
acaaatttattcaagtcaattaccatcctttaccaggaccagaatccgtagaagctagccctgtggtagttgagaaatccaacagttatccccaccagt

SEQ ID NO: 827046 - DNA, 98 bp, Homo sapiens
ttacgagcacggcctcttgcgctacgccctggatgagatgtttcaagccacagtcgaggaaggagctgtgggagttattgtcaatttgacagttgaag

SEQ ID NO: 827047 - DNA, 99 bp, Homo sapiens
gagagcgagctgagtggttgtgtggtcgcgtctcggaaaccggtagcgcttgcagcatggtcgatggccaggtggtcttcataaactatactgccttgt

SEQ ID NO: 827048 - DNA, 100 bp, Homo sapiens
ccggcagctggagatgtccgagcccaaggcaattgatcccaagttgtcgacgaccgacagggtggtgaaagttggaggacgagtaagtcgtgaattaaat

SEQ ID NO: 827049 - DNA, 100 bp, Homo sapiens
ggaatttgattaactcattcaaggttacccagttgccccatggctgggggttatggagtgatgggtgacgatggttctattgattatactgttcacgaag

SEQ ID NO: 827050 - DNA, 100 bp, Homo sapiens
agactgactcatgatccaaagtacaggaaatgggcctgggaagccgtagaggttggaatgttgcatcagcaggtagaagaacatgaaaaaatcaagcaag

SEQ ID NO: 827051 - DNA, 100 bp, Homo sapiens
aaaacacccagacgggtaaccagcaagaaccatcgccaaacctttccagagagaaaaccagaggtttgaattcctcagcaacatctacagcaaataatag

SEQ ID NO: 827052 - DNA, 100 bp, Homo sapiens
gttgctggtgacagcaaaaatgacccaccaatggaagcagctggcttcactgctcaggttatacgagggacaagtcgttcctggccatggtggtggacat

SEQ ID NO: 827053 - DNA, 100 bp, Homo sapiens
gcttacgtaccacttaaggacattgtggcaatcatcctgaatgaatttagagccaaactgtccaaggctttggcagcttttatcttgagaacatggtgtc

SEQ ID NO: 827054 - DNA, 99 bp, Homo sapiens
ccactcttgggagaaacgtatgaattaatcagatcttcagtcgtgctggtgaagcctgcaaaaaggtgatacttaatgtaccttctaaactagaggcag

SEQ ID NO: 827055 - DNA, 122 bp, Homo sapiens
ggccgcaggatccccaaggacgtggttgaggaattcagcgatttatacaacgagcctatatatgcaaacagatttgcagtaccaacctatgcagccaagcaacctcagcagttcccatcaag

SEQ ID NO: 827056 - DNA, 100 bp, Homo sapiens
cctcaggcagctgctccccatgcttcttcagggaacaagtatcttcactgcccctaaggagatcgcagagatcaaatgagtgatgtgtctgcaggaggag

SEQ ID NO: 827057 - DNA, 98 bp, Homo sapiens
aaggagttccaggcacgttaccggcagctgttaaaagatgttgatactcggaaaatcataaaagcaatgctttcttatgtgtggcccaaagacaggcc

SEQ ID NO: 827058 - DNA, 100 bp, Homo sapiens
ctcaacaccggggaaagttttgtgatgtactataagactttgccaataccattcctggccatggaggcatcatggatcgctttgactgccagtatctgat

SEQ ID NO: 827059 - DNA, 99 bp, Homo sapiens
aatgatgggaaggtggatcccgccgggaggtactttgctggaagggccatactgatgcagagattgaggcaatattcacaaagtacgaccaagatggag

SEQ ID NO: 827060 - DNA, 98 bp, Homo sapiens
ctggatgtggtagtgtctttagctgagagacattattataactgtgattttaaaatgtgctacaagcttacttctgttgaagcagccgacacgagtcg

SEQ ID NO: 827061 - DNA, 100 bp, Homo sapiens
aaaatctgcaaagaactttcctgcttacaacctcaagtaaaagagaaaaggaacagttccgtaagctctttattggtggcttaagctttgaaaccacaga

SEQ ID NO: 827062 - DNA, 100 bp, Homo sapiens
ggtggacgaggtggactacaagacggctgaggagaagtacatcaaggggccttcgctgagctaccggaggggaccctccccacacctgtgccacctgctg

SEQ ID NO: 827063 - DNA, 98 bp, Homo sapiens
gaagtcctggaggtgttccacccgacgcatgagtggcaggcccttcagccagatcagaatcaagctttgcgactctgtctgggtagcactagtgttgg

SEQ ID NO: 827064 - DNA, 100 bp, Homo sapiens
cttccaatgagtatggcagtgtcagctgtacagccacactaactgtgacaggacttcctcgttctgcccatcttcctaacaaggctatggctgataacag

SEQ ID NO: 827065 - DNA, 100 bp, Homo sapiens
gacacggtcctgatacttttttcaatttccctggttgtagcgctgcgagcaaatttttcagaacataaaacaagaatatagtcgttatcagaggtggaga

SEQ ID NO: 827066 - DNA, 100 bp, Homo sapiens
caattttccaagtggcagattatggaatagttgcagatttatttaaggtgtacctgaaggaaatcttaaaagaaattggtgttcagaatgtaaaagggat

SEQ ID NO: 827067 - DNA, 100 bp, Homo sapiens
cactggtcgcactgagggtgaagtggcaggaggaggaggaggggctccggctggtctgtggtgagcgtcaagaactagaatcagaaaacaaaaaactgaa

SEQ ID NO: 827068 - DNA, 101 bp, Homo sapiens
gtccaaatgaattatgtcagcaacgtatccaagtcgggaacatgccctgtgtgccgccgtcatttcccacctgcggttattgaagcatctgcagctccttc

SEQ ID NO: 827069 - DNA, 100 bp, Homo sapiens
tgacaactttttaagcagatgttattatcaacccttactttgctaagcaagaaactgaactgttacaagattacccttgaatgtctaccacaaaatgttg

SEQ ID NO: 827070 - DNA, 51 bp, Homo sapiens
ggcagacagcgagtggcgacgatgattttttatcaagcagaaatgcatcga

SEQ ID NO: 827071 - DNA, 100 bp, Homo sapiens
ctactgcacagcagaagctctgaatcgtgttcctgaatgaaagaagtcaggtctcctctgagcctccggcctccataagacccaaaacagatgacacctc

SEQ ID NO: 827072 - DNA, 100 bp, Homo sapiens
ctgagagcgcctggaggctcgagcggagggaatggaattctgctgttgagaagctgaagagtgaggcactgagaattctgctgtcaaaggactacgtgga

SEQ ID NO: 827073 - DNA, 100 bp, Homo sapiens
tgttaaaagctatggaaggaaaatggataacagatcagttggatttggagttccatggagtgatgagattttattttcaagataaagctgctggaaactt

SEQ ID NO: 827074 - DNA, 99 bp, Homo sapiens
gcacgggcagccggaaggacaccaagatgcggatccgggcctttccgctttgccctttcggatgaagcatacagatccctacgagatcaagataaggac

SEQ ID NO: 827075 - DNA, 100 bp, Homo sapiens
tgagctgcagcgaagcacctctttacgctctgaaaattggaaaaccaagaaggttttgatgttttgtgtgacgccacctgaattagaaaccaagatgaac

SEQ ID NO: 827076 - DNA, 100 bp, Homo sapiens
cagaatcctgaaaatgtgatctcccttaaaaaggagtctcgctctcagtcaaaatctccaacgggaactcctgctcgtgtaaaatcggagagcaggtcag

SEQ ID NO: 827077 - DNA, 100 bp, Homo sapiens
cacctgcttcacagcttcgacaggaatgggagaacaatcgtgagtctttgatcacattgattgaaaaggatatgggccctcacattttccaaacctgtcc

SEQ ID NO: 827078 - DNA, 100 bp, Homo sapiens
aaatcagagaagctaatcgcctatttgcagtaaatcagaaaaacatgactgcattggagattgtggatgaaaactcaaatctcctgcctccaggggaaga

SEQ ID NO: 827079 - DNA, 100 bp, Homo sapiens
tcgtgcgtctgaagcctacaagaaagattgtttttcagcaagggacaacaaagctcagtgtagaaaacaacaaaacttctattacaagtgacatcggcat

SEQ ID NO: 827080 - DNA, 100 bp, Homo sapiens
agagactttccgttacatgacaaaacaagctatcgatcagggaagatctccagttataatagataacactaatatacaagcttgggaaatgaagccatat

SEQ ID NO: 827081 - DNA, 99 bp, Homo sapiens
aaacaccccgtactggcaggcatggagccaacaaggagaacctggagctcaacggcagcatcctgagtggaggcctagaaggagagccagagtgcgatc

SEQ ID NO: 827082 - DNA, 100 bp, Homo sapiens
ggggcctcggaccccggcgccgcggcgacctcggaggaaccggctccttgcgtcccgcctccctgggagctccgcacggttacctagaaaagtacgagaa

SEQ ID NO: 827083 - DNA, 98 bp, Homo sapiens
cagagccgggagttcaagaagaacactccagaggtggaggcctgaattttgatctatgttctacctacatccagctggctgaaagtacttgaggatca

SEQ ID NO: 827084 - DNA, 100 bp, Homo sapiens
ttactctgcgtacaaaacgattgaacaccagattgcagttcagtgtttctacacctgtgggttatgacaaagacaactgccaaagaatcttcaagaagga

SEQ ID NO: 827085 - DNA, 99 bp, Homo sapiens
gataaggagatcatagcagagtacgatactcaggtcaaaggttcgtttaccaagcaaaagttgggggtcgctggttcccagccgtctgcgcacacagca

SEQ ID NO: 827086 - DNA, 100 bp, Homo sapiens
tctcttcttactggttttgcaccataacttcctcagcttgagcagtttgttaaggaatgaggttacagaagacaaaactgctaaggccaaggtccaacag

SEQ ID NO: 827087 - DNA, 100 bp, Homo sapiens
gacacatccaacttcgacgtggatgacgacgtgctgagaaacacgcctaccaggacatcctcggaaagtatttattctaggccaggctccagtattcctg

SEQ ID NO: 827088 - DNA, 74 bp, Homo sapiens
ggcccttaatgctacaggacaagcaaacctcagcctggaggcacttttccaggaatgatgagaagacagcagct

SEQ ID NO: 827089 - DNA, 100 bp, Homo sapiens
caagggttcaggtgcaagcagatgctgactcagcctgttccattaagagccagcccctgggcaacaaagtggaaatggagattgtgagcatgttggaaaa

SEQ ID NO: 827090 - DNA, 121 bp, Homo sapiens
caacttgagaaacccaaacctgtaaaaccagtgacgttttccacaggcatcaaaatggataagttctgaacgtcgaaaagaaaagtctcgagatgcagccagatctcggcgaagtaaagaa

SEQ ID NO: 827091 - DNA, 98 bp, Homo sapiens
aaaacttcaagccaaacatcaagcagaatgtgatttgcttgaagatatgaggctgtaaggaggcaaaagttgcttgaacagagcatccagtctgccca

SEQ ID NO: 827092 - DNA, 107 bp, Homo sapiens
gtcgattgagctatccacatccaggaactgacaatctgttgatgttaaatggagtcagaaataccatcagaggaggggtactgtgactttaatagtaggccaaatga

SEQ ID NO: 827093 - DNA, 100 bp, Homo sapiens
tttgagaagagcaatgacattgggggcctgtggaaattttcagtcatcatcagatttgaaatatttaaagtggatacaaaactatttcagcaatgcagac

SEQ ID NO: 827094 - DNA, 100 bp, Homo sapiens
acgagatccagttcctgcgaactcatatcgcacggatgactgccatccctgggttttgccagtagtgaagaaagtggagcagaagattgctaatgacaat

SEQ ID NO: 827095 - DNA, 144 bp, Homo sapiens
ggccatctgatctataaatgcggtggcatcgacaaaagaaccattgaaaaatttgagaaggaggctgctgagagtcaccatcatgtctcttctcaccaccctctgaatctgcattagccagtcaactagccctttcagcgtcat

SEQ ID NO: 827096 - DNA, 99 bp, Homo sapiens
ccacttcccgcttgggcgcccggacggcgaatggagcaggggcgcgcaggaagtgtttggattgtgagctatttcagaactgttctcaggactcattat

SEQ ID NO: 827097 - DNA, 99 bp, Homo sapiens
cgaactcgatctgggggagccagggatgaacgatatcgatcagactggtcgaattgacaaatcttaccctacagtatgtggccacacaggaccagtgct

SEQ ID NO: 827098 - DNA, 100 bp, Homo sapiens
acctgaacgtcaccgaggagaagtaccaggaggcgttggccaaggagcagcccgacggccatggaggctgaagagacgatggaatgccttcaggagttcc

SEQ ID NO: 827099 - DNA, 100 bp, Homo sapiens
gtgagggcaaacatgtggtcatgcaggttaccagatgtggtggtttacccaacaacattgtggatgtctgggagtttttgggcaaacctaaacattgcca

SEQ ID NO: 827100 - DNA, 100 bp, Homo sapiens
tagacccgtttcctatagatgagaaaccatacaagctgtgcaatgtttttggaacagtgccagtggttgcttctgcacagacacagcctgcttcatcaag

SEQ ID NO: 827101 - DNA, 100 bp, Homo sapiens
cctgtcgggggcagcgacttgcttctatgccttcgtgggctttgactgcatcgccaccacagtgacgagtagcacagcccctctatggtttagatggcag

SEQ ID NO: 827102 - DNA, 100 bp, Homo sapiens
acttttatggaatcctgcaaagtgatgcctcaggttctgccattactgcaatagccacatctgtgtgtcacggcccaccctgtcgccagcttcatcatgc

SEQ ID NO: 827103 - DNA, 98 bp, Homo sapiens
gtaccttggatgctgctgtttaaaccattggtccttcgccgtcagtatttgaggagaaagcatttggtcatcatggtcacaggagaccatccaatcac

SEQ ID NO: 827104 - DNA, 100 bp, Homo sapiens
tgtttctgctcttggtgcaggatctgcagctactgctgcatcagaagaaatgataaaaatctggataatgccgcagaagcagctgaacaatttaaattaa

SEQ ID NO: 827105 - DNA, 100 bp, Homo sapiens
ctttccctctcccaacatggcggcctcaggtacggaaaaaggaccagatcaatattgaaacaaagaataaaactgttcgttttataggagaactaactaa

SEQ ID NO: 827106 - DNA, 98 bp, Homo sapiens
tcagtttgtgcaggacaccgacatggaacagggactcactggggatctagaaatggccattgcctactggaacttagtgcttaatggaagatttaaat

SEQ ID NO: 827107 - DNA, 100 bp, Homo sapiens
aacagtctggccacctctgtattcagcatagctattcctgttgatggtgatgaagacaggggccatgctggggggtgacctgaacagtgctaacggagcc

SEQ ID NO: 827108 - DNA, 98 bp, Homo sapiens
tgggcggactctttccggacagacaggagagggatttgtcatcagcgtgtctcatggagaaccactctgacattccattattgttccattgacctttc

SEQ ID NO: 827109 - DNA, 100 bp, Homo sapiens
gttcttatttctctccctggcaaggtctgaagacgggtaggagaataacaaatgttgcagtctcttgcacagcgcccagctccagcaaacaccaatcgtg

SEQ ID NO: 827110 - DNA, 100 bp, Homo sapiens
tacaacctcaaggatcgctacggctcctggatgatctacaatgcagactataccactggtcaggtctttgatttgtctgaaaagttagagcagtcagaag

SEQ ID NO: 827111 - DNA, 98 bp, Homo sapiens
cggccatgagtccttctactggcagctgccggagacataccagggagacaagaccccaccaacaactgaacgctttggtcaggctgctacaatggaag

SEQ ID NO: 827112 - DNA, 98 bp, Homo sapiens
ccaaattggttttgtagaagacaagtctgaaaactgtgcttctgtatggcatttcaaatatagatacaaccattgaaggaacgtcagatgacctgact

SEQ ID NO: 827113 - DNA, 100 bp, Homo sapiens
ctgaaggacttgctgaaatgggtcttagaggatgtaacagtccctcccaagcctgtctcgctccatcctttatatcagactaaactctatcctcctgcta

SEQ ID NO: 827114 - DNA, 100 bp, Homo sapiens
tgtccgtgctatctccaccagcagggccccgcggagctccccccgctgccccctaccaccccttcactgaaacctggacaagcatgaagaactagaggag

SEQ ID NO: 827115 - DNA, 100 bp, Homo sapiens
cagctccctttttggaagctcctcttctcattcctcagcccagggccttgctgccgccatgactgaggaatcagaggagacagtcctgtacattgagcac

SEQ ID NO: 827116 - DNA, 108 bp, Homo sapiens
tggaaaccacttggatgactgcagttggtctttcagagatggcagcagaagctgcatatcaaactgtttcaaatcgccactgtcaccgaaaaaggtgttgaaatagag

SEQ ID NO: 827117 - DNA, 98 bp, Homo sapiens
gtgatgaagatatttagcattagcatcattgcccaaggcctccctttttgtcgaagacgggaatccaaccacccaggtcaaacaggaggttttgtgcg

SEQ ID NO: 827118 - DNA, 115 bp, Homo sapiens
ggctataccgtgaagggcattcagaaatacaaagcaaagattgtttttgcagccaccaaagtccttggcactgtcaaatggttcaacgtcagaaatggatatggatttataaatc

SEQ ID NO: 827119 - DNA, 100 bp, Homo sapiens
cgcctcccgggttcaagcaattctcctgcctcagcctcctaagtagctgggactacagatcattaagcagcttcgagtctggaaaatttgttgaatgtac

SEQ ID NO: 827120 - DNA, 100 bp, Homo sapiens
agcctcctgagtagctgtgattacaggtcctagcttactctgccaccactgcccggcaggaggaagttccccagcagacagtggccccacagcaacagag

SEQ ID NO: 827121 - DNA, 99 bp, Homo sapiens
ccatcacggcggccgcagtggcgtcctggagccctcctcagctttgaagattatgaaacagatgaacctgcctctccctctgaatttggaaacaaaagc

SEQ ID NO: 827122 - DNA, 100 bp, Homo sapiens
cttcagcttttggcagcatgaaagttagcagtggggaccaaggcatactgaacacattttttagcagctgggcaacaacagatatcagaaaacacctgcc

SEQ ID NO: 827123 - DNA, 99 bp, Homo sapiens
ttgaaacgctgcctggaaaggaagtaccaggacttgcacaggttccagcaacagatagaaatgctttaagttcactctggggaaagctggcctctgaaa

SEQ ID NO: 827124 - DNA, 100 bp, Homo sapiens
gtggactcaagtggtgcagtgaccaatcagaaataatatccaatcagtacaacaatgagccttcaaacatatttgaggagtcacatgccataggaaaaaa

SEQ ID NO: 827125 - DNA, 100 bp, Homo sapiens
agttgtttggattggtcatctcagaacagtgcccaaacctcgtgttaaaaagcagccgaagactcagcgtggaaagagaaaaaagcaagattcttctgat

SEQ ID NO: 827126 - DNA, 100 bp, Homo sapiens
gttgcagcacatcctcatccgagcctttgatttgagtgggaagacggaagaaagtgccgggaagaaagaaaaccccgtccggaccatccgcaaaaagtaa

SEQ ID NO: 827127 - DNA, 99 bp, Homo sapiens
cgctctgcagagagcagtagagaggggccagttagaacagataactggcaaaggtgcttcggggacattccaggtcatcatcagatttgaaatatttaa

SEQ ID NO: 827128 - DNA, 100 bp, Homo sapiens
cttggggttcatatatccagggtcaaatcagtcaacctagaccaatggacagcagaacagatacagactgcacagcaggcatcttcatcctcacccagcc

SEQ ID NO: 827129 - DNA, 100 bp, Homo sapiens
gtcaggccacggtggaagacgcgtgccgcggcgcctggttgcctgcagcggcccggacccgagaggttgcctgcaggagggaaggcggtgaacacagccc

SEQ ID NO: 827130 - DNA, 100 bp, Homo sapiens
aattcttgaatattctgtttcatcatattttaagggtagaacctttgctaaaaataaggccaaatttgagtttcatcatggtgactatgaaaaacagttt

SEQ ID NO: 827131 - DNA, 100 bp, Homo sapiens
gtgtggttcttcatcgtgctattcctggtctacatcctgcgggtgcctttgaaaatcaacgacaacttgagcacagagtcctgtgtatggaaactcacat

SEQ ID NO: 827132 - DNA, 132 bp, Homo sapiens
aatgatggctttgtacggcttagaggacttccctttggatgtagcaaggaagaaattgttcagttcttctcagtgtgtgctgacttgataagaggcgcaaaagaaaagaatctcaaagtgaaaggaccagtt

SEQ ID NO: 827133 - DNA, 98 bp, Homo sapiens
acgacgaggaagaggaggtttctgaggaacattttagtggacaaaccaaatgaccaatcttcaagatggtcttcagagagcaactatcctccccaggt

SEQ ID NO: 827134 - DNA, 100 bp, Homo sapiens
ttttggaaaccagactacaattatcccagctggtggtgctggtgttggtaaatcatgcttattgctacagtttacagacaagaggtttcagccagtgcat

SEQ ID NO: 827135 - DNA, 98 bp, Homo sapiens
tttcttatgcttataagagtggaacagctccgctctgcattggataaaacagaagagctcgaggtgagcaacggccacttagtgaagcgtctggaaaa

SEQ ID NO: 827136 - DNA, 98 bp, Homo sapiens
ctgaaaaggaagttttctggaatggttgcatgctgctgtcaccaagatccaggttccaaggcctggttttaattacacgtttgcccatatatgtatcc

SEQ ID NO: 827137 - DNA, 100 bp, Homo sapiens
aggatgctctgtgatcagtattatttatcatctccagaattaaagcttacacaagtgaatggaggaagaacccttcgagagctccagtgaagaagagttt

SEQ ID NO: 827138 - DNA, 120 bp, Homo sapiens
agcacatcatgcagtacatcgctgctgtcaccaatccaagccagagggctgaggtggagagcgattgtaactgcctatgagaatagctctcagcatgatcccagttcaaataacgctatg

SEQ ID NO: 827139 - DNA, 98 bp, Homo sapiens
gaggatgaagattcaccaaataagctatatactttggttacctatgtacctgttaccactttcaaaaggtgaaaatcctatttataagagtgccgtaa

SEQ ID NO: 827140 - DNA, 98 bp, Homo sapiens
gacaggagaagggtcactatggttcctgggaaatgatcactggggatgaaatccaggtgaattacaagaaaggctttgaacactcaaaggcgcagttc

SEQ ID NO: 827141 - DNA, 99 bp, Homo sapiens
gggaatttccttgtgcctccattcccgggaggggggagcggcgttggaggccaccgtttccaggctggacgtaaagaaagaagtgatgcactcaattct

SEQ ID NO: 827142 - DNA, 101 bp, Homo sapiens
ttccaattacagacgacaaagtagcactgtacctccaaatggtctggttgtatactgtggaacaattgtaacagaagaaggaaaggaaaagaaagtcaaca

SEQ ID NO: 827143 - DNA, 100 bp, Homo sapiens
caaacttgccagttgggtatcctcctcagtatccaccgacagcattccaagtgccacaccagaggaatataatacagttgtacagaagccaagacaaatt

SEQ ID NO: 827144 - DNA, 100 bp, Homo sapiens
gcaggcctggttttgagctggccaagaaccagagagactgcatctaggagaaggcagagcccccccaggctatgaatgccctgatgcggttgaaccagct

SEQ ID NO: 827145 - DNA, 99 bp, Homo sapiens
agtgccctctagaggtcaatgagtgcactggcaacctcaccaatgcagagaaccgctggtgtgaagcaaaaatgcctgcgcagccagacctcgttccgc

SEQ ID NO: 827146 - DNA, 100 bp, Homo sapiens
agtacaacctgcaaaagagttactccattgtctaaaaatgcaaatgagaatttccaaatatacaaaatgcctccaaggtgctgggtaggccaggtttcag

SEQ ID NO: 827147 - DNA, 100 bp, Homo sapiens
cagcattggaaactctgtttacgttattatcaacacaggaccagaaaggagcgagtgggactgtgctgctggccggctcctctttgatggcttcacccta

SEQ ID NO: 827148 - DNA, 99 bp, Homo sapiens
acaagaccaaggtcaacaaggacaacaatgagatcgtggacaagatcatgggcaaaggacagatccaggaaatttgcgagaatccccgatttatcattg

SEQ ID NO: 827149 - DNA, 100 bp, Homo sapiens
tgtgtcttcagaaagatccttccaaaagttcattagaactaccatatactccccctttggaaagtaagcaacgtagaaatctcccaagcaagattcctct

SEQ ID NO: 827150 - DNA, 100 bp, Homo sapiens
aaacccatcgacaagaaggcacctgtggtataagttgaaatccaaaccaggaaagaaggacaaggagcgaggagaaattgaggttgacatccagtttatg

SEQ ID NO: 827151 - DNA, 130 bp, Homo sapiens
gcccttggtgggccgctgggtgccctttgccgctgtggctgcggctaactgtgtcaatatccccatgatgcgacagcagatcacactgtgaattaaccttggagagaaagtgttttaaaaagaagaatgg

SEQ ID NO: 827152 - DNA, 100 bp, Homo sapiens
ccatgggcttgctgaccatccagaaactctactgcttgatcgaaatcgtccacagtgacctcttcacacagcatggtaatttcatctgtgccaaagcctc

SEQ ID NO: 827153 - DNA, 98 bp, Homo sapiens
aggtttggcatgtcgagttatggatccaacaaagattctgataactggcaaaacaaggataccatacttgcagagctccttcagatacataaagaaca

SEQ ID NO: 827154 - DNA, 99 bp, Homo sapiens
ggatcacctagtaacacacgctacctctttctgggtgactatgtggacagaggctatttcagtatagagggccctccagaatttccacagcatacacct

SEQ ID NO: 827155 - DNA, 100 bp, Homo sapiens
ggagttggaacgtcaacaggagcaacttgtaaagtccaaggtttacactcgcacaccaaccttatatttggacttcaaattggacccaggagccaaacat

SEQ ID NO: 827156 - DNA, 100 bp, Homo sapiens
cccaaaaggaatcctggagaggaggacagtgacaacagctcaatctgaaattgaagtgtctgtctctgcaaggaatatcagaaggctactaagtttccag

SEQ ID NO: 827157 - DNA, 99 bp, Homo sapiens
gggccttcgccgtggtcttccgggggcggcaccgccagccaatggagatcttcgtggatgatgagacgaagttgacgctgcatgggttgcagcagtact

SEQ ID NO: 827158 - DNA, 100 bp, Homo sapiens
ctagccagactcagggatcaaagagcaaacagattcagtggcctgcattggaaattgacaatggcccttcagctatgctaggtctataatgggaagtgtc

SEQ ID NO: 827159 - DNA, 98 bp, Homo sapiens
tcgaggaagccctggaaaaatatgggaaggatttcacggacattcagcaagattttaatgatctctgcctttcacaaagaccacctttgtgcatccat

SEQ ID NO: 827160 - DNA, 100 bp, Homo sapiens
agacccacagatttggatgtagatacgttagccagtttacttaaacctatgagaaccccaaagacattaaagattgctgaaatacaggcaagacggattg

SEQ ID NO: 827161 - DNA, 98 bp, Homo sapiens
caccagtcgggacttcagctgaacctctgagtgccaaggacaccactggaactcacaaaggagctggaggagggaatgatattcagtggtgtttttct

SEQ ID NO: 827162 - DNA, 98 bp, Homo sapiens
tcagagaatatcatgcttccagtctactgtaaaggatccatcagttacacaagtgacaagaaatgttccaccaggacttgatgaatataatccattct

SEQ ID NO: 827163 - DNA, 100 bp, Homo sapiens
ggacgggctttaggctggaagcgccttagaggagccatttttccagatgcaggccctgacttcctgtgagtgcaccatctgtcctgactgcttccgccag

SEQ ID NO: 827164 - DNA, 100 bp, Homo sapiens
ggatgtggaattctccgtccctttccagggagggaacaaagcccacagcaccgggtgagaaggactggcagaaatacgagactgctcggcggctgaaaaa

SEQ ID NO: 827165 - DNA, 100 bp, Homo sapiens
tgatggactgatccagggctggaataccactaatcccaacatcgacccctatgattcttatggcccaggctgcaagcacaaaggaagtttgctcagtctc

SEQ ID NO: 827166 - DNA, 98 bp, Homo sapiens
agtgcttgctgctttttctaactatttcaagatgatatttattcaccaaacaagacaagttggatggcttgaggactggtactaaaaggaaacgtgac

SEQ ID NO: 827167 - DNA, 112 bp, Homo sapiens
cctcagcccaagcgccggcagcaggacacatccgccagcatgcccaagctcttcctgcacctggaaaagagcggcttacagggagaacacagttggcctccaccgtttctgc

SEQ ID NO: 827168 - DNA, 100 bp, Homo sapiens
cgttcactctagctcaggctgtcaaacatattctgcagcaacaggagactagaagtgatgagagcctatttacaacagctaaggcaagagactggactga

SEQ ID NO: 827169 - DNA, 98 bp, Homo sapiens
ctacatctccgaaagcaagctcttctagaagttgcacctgttcttcccggagcctatcagcaaagccattcccaaggctatggctacatgcaccagac

SEQ ID NO: 827170 - DNA, 100 bp, Homo sapiens
ctcggtgaaatcctgtcctgaagactgtaaggcagcagaagatgtcgttttcattggacctgacacacatgctattcaagccatgggcgacaagattgaa

SEQ ID NO: 827171 - DNA, 100 bp, Homo sapiens
tgggaagtggttcctgaacctgttgccagatggtgcaatgttcaaagtactcaagatgaatttgagctgtatgcaggagctattcttgaagtttgtggat

SEQ ID NO: 827172 - DNA, 51 bp, Homo sapiens
tcaggaaccaccagtgacagatacgctggggaggaggaggaggaagggagc

SEQ ID NO: 827173 - DNA, 100 bp, Homo sapiens
aggatgacagagctgaggcagagggtggcccatgagccggttgcgccacccgaggacaagaggtcctatacgttgcttgtggaggcgtgggattccagta

SEQ ID NO: 827174 - DNA, 100 bp, Homo sapiens
ggtccctgagcctccctcctcccattcacaaggcagtggtcccagcagtggttccccagagagaggctccttcctcagagaagcttcctgttatgtacct

SEQ ID NO: 827175 - DNA, 100 bp, Homo sapiens
gtggtgggggaactgctggggaaggcgattggcatcgatctctccatcccttccgaggcccgacttcggaaggatatggagtaatagtactaaatcccaa

SEQ ID NO: 827176 - DNA, 98 bp, Homo sapiens
ttcaaacatctgaagatgacaatttattagatggtgacactgcagttgccacagcagctatccttagcagagcaccctggagtctgcaaagtgttaat

SEQ ID NO: 827177 - DNA, 98 bp, Homo sapiens
gagagccacactttcaagtaaaccagagtcttgctatggagatacacttcaattcctacttcagtggaagagtcgggaaagaaagagaaaggaaagag

SEQ ID NO: 827178 - DNA, 99 bp, Homo sapiens
gcaccggaagcaccccggcggccgcggtaatgctggtggtctgcatcaccaccggatcaacttcgacaaatagagaataaaggcagccccgttgatgac

SEQ ID NO: 827179 - DNA, 100 bp, Homo sapiens
aagaaatttggagtgtgcgtgcgcgccgagcggtctgagcagagggcggggtgcaggcggaatggccctcgtgccctatgaggagaccacggaatttggg

SEQ ID NO: 827180 - DNA, 98 bp, Homo sapiens
tatcaactgtaagaagaggaaagacttgtctcaggttcctaaaagtaaagctctagaggccgtcaaattggcaatagaagccgggttccaccatattg

SEQ ID NO: 827181 - DNA, 100 bp, Homo sapiens
tgtggacttcgagcagtcgcacctggaggttcagctgtacttcctcgcgtattgctaaaggaggagttgaccacaccaaaatgagtctacatggtgctag

SEQ ID NO: 827182 - DNA, 100 bp, Homo sapiens
tcaaattttcaagtgccaaacggaggaatacctcgtatgcaacctcaggcttcagccaaacgaaaagggtcttggtcagagaggaggaattctagtattg

SEQ ID NO: 827183 - DNA, 100 bp, Homo sapiens
aacgaacagccagcaaccctaaagtggagaatgaggatgagctccctccttgggcctgtggattcataatggatacaaattctgacccaaagaactgccc

SEQ ID NO: 827184 - DNA, 100 bp, Homo sapiens
gtccagaggtatttgagcagcgagcagaaatggcccctgagttctgcagcctcgaggaaggcctgccctatctggacatggtgattgcagagacgctgag

SEQ ID NO: 827185 - DNA, 98 bp, Homo sapiens
gaggcaccgggatcgtgaccgagaccgtgaccgagagcgtgaccgagagcgcgaatatcgtcatcgttagaaggtcttcatcctccaggtccaccttt

SEQ ID NO: 827186 - DNA, 100 bp, Homo sapiens
cccagttgcaagtgcgagcactatggagtagcgcagggtctcgagctgtggccgtggacttaggcaacaggatacattaattgtttggtcagaagcagag

SEQ ID NO: 827187 - DNA, 99 bp, Homo sapiens
aagctggatcttgatgcgggacttcagtcctagtggcattttcggagcgtttcaaagagagcctccattatggcatgctgaatttaccaaagaagaatt

SEQ ID NO: 827188 - DNA, 98 bp, Homo sapiens
agcggggcaaccactgcgagtactgcttcaccagatgaaggatttgggggcagagcacttggcaggtcatgaaggggtccaacttctcgggttgttga

SEQ ID NO: 827189 - DNA, 100 bp, Homo sapiens
ctggatgagggggaagggcctcaaagccagaagattagcctgaggcctgctcagtcgttcctaatgaataaaaatcaagtgccaaagcttcagccccaga

SEQ ID NO: 827190 - DNA, 99 bp, Homo sapiens
ggatctacattataccaataacgaggatgaagatgagctggattcccacaccatggtgaagactagtgtggagagtgtgggcaccatgcgggccacaag

SEQ ID NO: 827191 - DNA, 100 bp, Homo sapiens
caaaattggagagactgccatgaagcaagttatcaatactctggctgaccatcatcatcgtgggactgactttggtggaagtccttggttacatgtcatt

SEQ ID NO: 827192 - DNA, 100 bp, Homo sapiens
aagaccagtttaatgaccttgttatcagtgatggctcttctctggaagatcttgtggctggacgtaaagaaagaagtgatgcactcaattctgcaataga

SEQ ID NO: 827193 - DNA, 98 bp, Homo sapiens
cagaaggtcccattcagtaccgagatgaagaagatgaagatgaaagctatcagaccctgagtattccctctttgtgggggacctgaccccggacgtgg

SEQ ID NO: 827194 - DNA, 98 bp, Homo sapiens
tctttacacatctggcacaacggggttacctaaggtccataattcagcagccaaatctttccctcgaaggtttgttttgcctttaaatgtcagtttga

SEQ ID NO: 827195 - DNA, 100 bp, Homo sapiens
tcgacaggacagaaagagtgtgcagcggattaaagctaaagacatagttcctggtgatattgtagaaattgctgattgaccctcttgctggaatgacatc

SEQ ID NO: 827196 - DNA, 98 bp, Homo sapiens
ctctctataaaggcttcactatgtatggggtactcaatcctagtactgtgccctacaacattcactgatcttgcatctttaatggataaaacatttga

SEQ ID NO: 827197 - DNA, 100 bp, Homo sapiens
ggttcgttcccgggtcccgcgcgagctttcccgggataagtagctttagcgatcgggagacagccgggcgctgcaagagagctgtagtacacatggatga

SEQ ID NO: 827198 - DNA, 100 bp, Homo sapiens
agagaacaacctgacataaactagcaagccaacaggtgaagtttcgacacacctcctttaataaaggtatgtattgggtggaggagcattatgtatggaa

SEQ ID NO: 827199 - DNA, 101 bp, Homo sapiens
ccgattcctccattgcatatcatacacaagctgagggagaatgtctttcaagagcatcagacccttaaggagaaggaacttgaaacaggaccaaaagcttc

SEQ ID NO: 827200 - DNA, 100 bp, Homo sapiens
aaacgtaatgaggatgaagattcaccaaataagctatatactttggttacctatgtacctgttaccactttcaaaagtattgaagcccctgggtgataat

SEQ ID NO: 827201 - DNA, 100 bp, Homo sapiens
agttgtgtttggagctgacgtgagcgaggttggtcatgtgctcgggtccatgtgaaatctgaggtccttgctgtcaagttgtcacaagaaataaactacg

SEQ ID NO: 827202 - DNA, 121 bp, Homo sapiens
gcgagtatacatgcaaagcttccaatgagtatggcagtgtcagctgtacagccacactaactgtgacagaacttcgatatgacctgccagcatcatacaagtttcacaaaaagaaatcagt

SEQ ID NO: 827203 - DNA, 113 bp, Homo sapiens
gcttggagtgtcttgtgaagtcattgatctgaggactataataccttgggatgtggacacaatttgtaagaaccttttgatggaacaaatacagccagagcagtgcacgaaaa

SEQ ID NO: 827204 - DNA, 118 bp, Homo sapiens
aaacagtttacagtactcagcaaaagaacatggaatgcctgaaaaggtaatgaatttgggcatcctgaatggttagacttcccaagaaaaggaaataatgagagttaccattatgcca

SEQ ID NO: 827205 - DNA, 100 bp, Homo sapiens
tggctcccttgtatatttttctcaggaggcgtcacggtggggaacataggacgacagttagctatgaaatcaacgaccgggagcagaagttgcatgccct

SEQ ID NO: 827206 - DNA, 110 bp, Homo sapiens
gacgagcgggccctggctcaggaacagggacagcacctcatcccctggatgggggaccacaagatcctcatcgacagagattttgattcgctttccaaggacaatgtctt

SEQ ID NO: 827207 - DNA, 100 bp, Homo sapiens
ccgacccaagatacagatttatagagaagattgtgaggctcgtcgccaaaagattgaagagtcgggtcacaaatcttcgaagagtgacatatgttgtttt

SEQ ID NO: 827208 - DNA, 100 bp, Homo sapiens
caactcagtgatcctgattatattaatcagtatgtcatatggatgagtatgttggataaaggacattgttgtggcagtaactggagagaacatggaagta

SEQ ID NO: 827209 - DNA, 98 bp, Homo sapiens
cgtctcacaggggataagaagtttcagatcagtgtgcgtgtgaccaccatggatgcagagctggagtttgccatccagcccaacaccaccgggaagca

SEQ ID NO: 827210 - DNA, 100 bp, Homo sapiens
tatctatccaccatgtgggaggaggaaaatcatcttatcagacgaaggcaaaatgtatggtatctggaccttcgtcgatttggatctgtgccacatggag

SEQ ID NO: 827211 - DNA, 100 bp, Homo sapiens
ctgggaaaattgttgtgaacctcacaggcaggctaaacaagattattcttggagaaaccctgtctgtttactgtaaccttttgcactcaaattcctttat

SEQ ID NO: 827212 - DNA, 99 bp, Homo sapiens
tgatgaatccctctttcagactgctgcagatgcttgtacttagagtacttaacctgcatataagatgcaggacaagtactccaaaagtggcattgcttg

SEQ ID NO: 827213 - DNA, 98 bp, Homo sapiens
tctttcctaaatgtcttgaccagtgttcacaagaagtctggaaagtagatggtaacatgatgtggcaccaggataaccaagacaagcttaaaattata

SEQ ID NO: 827214 - DNA, 100 bp, Homo sapiens
gctgaatgtgccatcgtcaccctggctaaaataaatgaagctgtagaatgcttactgtccctgaaggctcagtataaagaaaaaactgggaaggagtaca

SEQ ID NO: 827215 - DNA, 98 bp, Homo sapiens
aacaaagaagaccacacactgggaaacatcattaaatcacagtgaccgtgaaggaggaccaggtgatgcagcagaacccacccaagttcgacaaaatc

SEQ ID NO: 827216 - DNA, 100 bp, Homo sapiens
acgtattggtcaacttcagggtgagatcattccaacttccttctaccatcaaggccgggtgattgactgcagtgagaaagatcagtctaaagaaaaggag

SEQ ID NO: 827217 - DNA, 100 bp, Homo sapiens
tggagttctgctgcaaagccgaagatggttctggcacgtggcatgacccacatgactcaacatcaggaggaagtaaaaatgttgagtagttcaaaatcta

SEQ ID NO: 827218 - DNA, 98 bp, Homo sapiens
tgtgcaggtgctgtgaagtgcctcttggagcagggagcaaatcctgcatttaggtgaaacaaagagtcctcttcgtggaaaagaaaaaaatacgctcc

SEQ ID NO: 827219 - DNA, 100 bp, Homo sapiens
tgatgattcaggctcagaactggctttcaaggactttgatgttggcgatgtgagtccattcttgcacaccgagaaaatatgcgacagatgataagaagtt

SEQ ID NO: 827220 - DNA, 100 bp, Homo sapiens
acttgggcgcctggtgtatttattgacagacaaaacagaattcctgcaggggagaaataaagagtgcatcattgaaggatttatgtcttgaagacaaaag

SEQ ID NO: 827221 - DNA, 60 bp, Homo sapiens
gggccagcaatcctcagacgcctcacttaggacaacacatgcagatgacaatccaggctc

SEQ ID NO: 827222 - DNA, 98 bp, Homo sapiens
cggaacaaagctggggaatggagtgagcctgtctgtgagcaaacaacccatgacggcttacctatttctactccatgtaccaccataaacaaagtttg

SEQ ID NO: 827223 - DNA, 101 bp, Homo sapiens
gagctggggagcccttctgcgccacagcgggacgaccctgggacagtctccactggggcagatccagctgaccatccggcacagctcgcagagaaacaagc

SEQ ID NO: 827224 - DNA, 100 bp, Homo sapiens
tgacttgattgggaagtgtctgccagatcgccccattgcagactcaagaatgaacaatccgtcagaaaccagtaaaccatctatggagagtggagatggc

SEQ ID NO: 827225 - DNA, 100 bp, Homo sapiens
cagattgcaaagagttatggatattctggtggggagatgaacccaacctagtgggtgtaatacatcatgaactgcagggatggatagaatgacagaagat

SEQ ID NO: 827226 - DNA, 99 bp, Homo sapiens
tatgtcatttcatccaccacattacttagggaaatcctcattgacgattcaatttgttgaaggccaatttgtggactcctacgatccaaccatagaaaa

SEQ ID NO: 827227 - DNA, 100 bp, Homo sapiens
ttgaagctttaaaagagaaatacttgaggccttctccaggattcttgtttcacccacaagttgatatgcatgacatgctcttggaagaactggcaccagt

SEQ ID NO: 827228 - DNA, 98 bp, Homo sapiens
attctggggacgctgggaacactgaatcaacatgggcaatgagaacagcacctcggacaaccagggatcagagaaggctgaagaaggtggagaaactg

SEQ ID NO: 827229 - DNA, 99 bp, Homo sapiens
aacaagatgttgtcctgtgctggggctgacaggaatttgagagcgtattttgcggtaaaactggccgaaggctaaagctgaccagaccggactccttgg

SEQ ID NO: 827230 - DNA, 100 bp, Homo sapiens
aaaatgtctgtttctctgtcgggagggagacggctgttgtaaaatgagttctaaagttcctgttgcttcagacaatggatgagcaatcacaaggaatgca

SEQ ID NO: 827231 - DNA, 98 bp, Homo sapiens
gtatgccccacttcaggagggaggacagcttcagtaaatgcactaggatccagagaggatctctatgacgctggagtgaagaggaaaggaactgatgt

SEQ ID NO: 827232 - DNA, 98 bp, Homo sapiens
tgcatagcgaatttgcccagctgcccgcgctttatgaaatgactgtcagaccaagagcagtgatgaccttttagctggaatggccagaggggtaacgg

SEQ ID NO: 827233 - DNA, 100 bp, Homo sapiens
gtgcagttcccaaggaggcttcaagacaaagggccccttacacaccagacaggacatagttgacggcaaggaaaaagaaggacaagaacttggaactgcg

SEQ ID NO: 827234 - DNA, 100 bp, Homo sapiens
cagagactgaaaaacctgaggctgatgacccaaaggaaggagtcaagactgagaacaacgatcatattaatttgaaggtggcggggcaggatggttctgt

SEQ ID NO: 827235 - DNA, 100 bp, Homo sapiens
gactggtgcgaggagaactactccgtgacctggtacatcgccgagttcttagctgctgctggtggtgacaatgtcaaataacggcctagacattcaagac

SEQ ID NO: 827236 - DNA, 98 bp, Homo sapiens
gagatgtgggaactggccagaagcttcgcagaatcaagaacggctatgtgcgtttaaagatccgtatcagcaagaccttgggataggtgagagtagaa

SEQ ID NO: 827237 - DNA, 99 bp, Homo sapiens
ggcaaggaaagcagcatagagaatgagatagccgtcctgagaaaatgctaatcctgaggtgacgatgacaatgcttcgctggatctatacagatgagct

SEQ ID NO: 827238 - DNA, 100 bp, Homo sapiens
aactaccccagtgccggggagggttctgctgcttcgaaagctggtaaggcctgagaaccacgaccatgcctgcatcgcctgtcggatcatctatcggtca

SEQ ID NO: 827239 - DNA, 100 bp, Homo sapiens
gggactccgaaaaaacaaaacaaatatgaactatgataagctgagcagagccctgcgatactattatgacaagatgccactgccgccaggagccctgtaa

SEQ ID NO: 827240 - DNA, 100 bp, Homo sapiens
cggccacccattgatttgatgcataaaggcagctttgaaacactgcatccagatctcattatgcatcagaaaaatgaaaaaacagaggaaaattctatgg

SEQ ID NO: 827241 - DNA, 100 bp, Homo sapiens
ctgctattgaaagagagtatgcacagattcgcttcaagctcagcttatcaatatgggtgttattcctaccttagtgaaattactgggcatccactgccaa

SEQ ID NO: 827242 - DNA, 98 bp, Homo sapiens
gctgagaaggacgcgcagtccatctctctcagaataaaagccgccctcattctaggggagaatataatgtttacagcacctttcaaagtcatgaaccg

SEQ ID NO: 827243 - DNA, 106 bp, Homo sapiens
cgattcctcctccttggtcgccgcgtccttggctggcgtgttcagcagactgtacaggatctttttggcagagccccaagtaaagctgtcaatcctgatgaggctg

SEQ ID NO: 827244 - DNA, 98 bp, Homo sapiens
ggaatttaagatgccaaagcagctcattcacatacagcggcctactgcagtgcatgaaggtggtatggactcagaactctgaagtctgaggagacaaa

SEQ ID NO: 827245 - DNA, 98 bp, Homo sapiens
cctcctgcactccgcccggacccccggccccgccgtggggtcatctagtagcaggcacccaaatcaggcaactcccaagaaaagtggtttaaagaatg

SEQ ID NO: 827246 - DNA, 100 bp, Homo sapiens
actcaaactttttgtatctcgacactctgcaagattctctcctgaagtcccagattccagaggggtgactaccatattgatgtctgtatcaatgactacc

SEQ ID NO: 827247 - DNA, 100 bp, Homo sapiens
caatatctgtcttcggtggactccttcggcagtccacccaccgccgccgcctcccagccactgaagatcctggtgtcgccatgggccgccgccccgcccg

SEQ ID NO: 827248 - DNA, 98 bp, Homo sapiens
gacttttggggtcctctggctgttgttcttttcttttccatgatatcattatatggacagtttaggcatctgacagatacgtctcatggtgtaagaaa

SEQ ID NO: 827249 - DNA, 98 bp, Homo sapiens
ataagctgaaggaaagagctcaaagatttggtttgaatgtctcttcaatctccagaaagaatttgaaagacatattggctgacctgatacctaaggag

SEQ ID NO: 827250 - DNA, 141 bp, Homo sapiens
gtgattcctccaccacctcactctgctccttccctgttgccaatgtctcgctgactaagggtggacgtgatcggggatcagtgtccttcagtgatgtggctgtgggcttcacccaggaggagtggcagcatctggactctg

SEQ ID NO: 827251 - DNA, 98 bp, Homo sapiens
cagacagaacagttaatcctcaatttaagcctgatctaacccctagaaacaggtgccaatgggtcatgtttggttagaaggtgacaatctacagaatt

SEQ ID NO: 827252 - DNA, 99 bp, Homo sapiens
ctactgctgcgggcagaaaaactgtacaactgatacaagctttggaagaggatgccggaccagatctctgtctcggagttcatcgccgagaccaccgag

SEQ ID NO: 827253 - DNA, 100 bp, Homo sapiens
tctggtggctccgcggattataacaggcctcaggagtgcaagtagctgatgaagtatgtcgcattttttatgacatgaaagttcgtaaatgctccacacc

SEQ ID NO: 827254 - DNA, 100 bp, Homo sapiens
cctggaggaggcatggagcccgaggaggagccaagtgtggcagcagttcgtgaagtctgtgaggaggtgtgggttgctgaccgaggaaataaaagaatcc

SEQ ID NO: 827255 - DNA, 100 bp, Homo sapiens
gtgggttttacttcaggttatgtacgcttctacactgaggccatttgtgtaggaccagaaaacatgcagataatgtatccagctatatttgaccagttgt

SEQ ID NO: 827256 - DNA, 100 bp, Homo sapiens
gattgaaagaagcccagcttttccatcctggagatctacaggatttatcaaatcgagtcactgtcaaattggcagattgctactctggctttactcctgg

SEQ ID NO: 827257 - DNA, 100 bp, Homo sapiens
caatatcaagcatgtcatcagatttgccagggtgaagcagtcagagctgttcgacaggtggaagagcctccagatgtgcaaatgggcgatgaacatctct

SEQ ID NO: 827258 - DNA, 98 bp, Homo sapiens
gccacgctgttccaggccatgagccaggctgtggggctgccgccctggctgcaggacccggagctcatgctggcttgcacccttgctcggaggaatgc

SEQ ID NO: 827259 - DNA, 100 bp, Homo sapiens
cgacatctgttgacagcctagagacatgtcaaaaattagaacctcttcgccaaagccttaatttatctgaaaggccaaagctgtcttgaaatttatcgag

SEQ ID NO: 827260 - DNA, 100 bp, Homo sapiens
gccgccgccgctgccgctgccgctgccgcacctccgtagctgactcgaggttgacggatatattcagacgttacgacacggatcaggacggctggattca

SEQ ID NO: 827261 - DNA, 100 bp, Homo sapiens
tgttggaagccacaggaatctttaagaaacttcctcaattacgtaaaatgatcttctggatgacctgaaatcagaactaactggaaaatttgaaaaatta

SEQ ID NO: 827262 - DNA, 100 bp, Homo sapiens
acagagtatggctgcagaggatccatctgtcttagcaaggctgtcatcacatttccatcttgctgctgcaaaaggacacgtggaatgcctcagggtcatg

SEQ ID NO: 827263 - DNA, 99 bp, Homo sapiens
tcgtcttgagccagctgcctaacttctggaaactctggatctcctacgttaatggaagcctcttcagtgagcttattctaccagattccatgaaagtat

SEQ ID NO: 827264 - DNA, 99 bp, Homo sapiens
cctcgcacagcctgcagggagagaaggcgagagggagatcggatgtggcactttgcggtgtctgtgtttctggtagagctctatggaaacagcctcctt

SEQ ID NO: 827265 - DNA, 100 bp, Homo sapiens
gaattccaacaacttcaaagtaaaatcagtttaatttcagaaaaggttgtctaccttcataacaacaatatctctgtagttggatcaagtgacttctgcc

SEQ ID NO: 827266 - DNA, 100 bp, Homo sapiens
tcaactacaacatcgtttcaggctttttagttggagaaggagcctacagatgggcagtagatcatggaataccctcttgccctcctaacatcatgaccac

SEQ ID NO: 827267 - DNA, 100 bp, Homo sapiens
ttgatttcagaggaatgagattagattggtttaggttacagccctctcaggaagtggtgaaggagatgatacaattctccaaggatacattggaaaagat

SEQ ID NO: 827268 - DNA, 98 bp, Homo sapiens
gtgatactcacacagtggcttctgctcaccaacagatgaagacagatgcaccaacgaggcaatatggtagcaaaaatcgtgtctcccatcgtatccgt

SEQ ID NO: 827269 - DNA, 99 bp, Homo sapiens
ctcaatgatgagactgtactcttctctgcttgcagggaaaaggggtcgaggccggtcctgacctgttacaatgaagactgacttgctatgtgggattac

SEQ ID NO: 827270 - DNA, 100 bp, Homo sapiens
cagagctgagtcggcagaaaagggagctggactgtgccatgttacgccgcctggagaagaggattctggtcgatctccccagccgggaggccaggcaggc

SEQ ID NO: 827271 - DNA, 100 bp, Homo sapiens
cggaatggagaaggaagaggagtcgggaccagttactctccacaagaaaattcacacaaccacagtgctcttcatagttcaaattcacattcttctaatc

SEQ ID NO: 827272 - DNA, 98 bp, Homo sapiens
tgaccacgtctatctctgggggtcgcacgttgcgggcagagcgcaaggcatacaccagaaaacgctgtcctgtggtggtgaagcagtattttccaatt

SEQ ID NO: 827273 - DNA, 99 bp, Homo sapiens
cttgcagttgaaggagtataacacaggttgtgcacagggacctgaagcccagcaacatcctgtatgtggacgagtccgggaatcccgagtgcctgcgca

SEQ ID NO: 827274 - DNA, 100 bp, Homo sapiens
gcggatctcaacatcaagaactgttgctatatgttccacatgtatgttggagttcgtgctggaggagggatcggggatgaaatcgaagacccagcaggag

SEQ ID NO: 827275 - DNA, 100 bp, Homo sapiens
ggatattgtccttttggagcagggcagtgtgccctatttggacttgacttgaacgtgaatgcagccatacaacacgtagacggttgtgtctgaattcgtc

SEQ ID NO: 827276 - DNA, 100 bp, Homo sapiens
aatcagcatttcacattcctcatggttggttcaaagcctgaaagaatagacccaagcgcatcacgacaaggatatgatgtccgctctgatgtctggagtt

SEQ ID NO: 827277 - DNA, 100 bp, Homo sapiens
aatgctgatgtccatggtctctagcagcctgaatccagacacttggcatttcacctgaagaaaaatttgttattacaacaacaagtaggaaagaaattac

SEQ ID NO: 827278 - DNA, 100 bp, Homo sapiens
tcagagggatctgcattagaacagtttgaaggtggcccctgtgctgttattgcacctgttcaggcttatcaggagggcagacttcaaaagctactaaaaa

SEQ ID NO: 827279 - DNA, 100 bp, Homo sapiens
gtcgtcgtagtccgcaggagtcaggagatcgtcatggagacgctgcagcggctgagtcccgctcatgcccacaaccacctgcgtgccccggccttccacc

SEQ ID NO: 827280 - DNA, 100 bp, Homo sapiens
cagagctgcttgcggccaagtacaaggtgggaagagtgcagtactcacagctctcatagtcggtcttggtggaagagcagttgctactaatagaggatcc

SEQ ID NO: 827281 - DNA, 100 bp, Homo sapiens
gagccttgcaagggtgaagtgcttcgggtccagaccaaacatttccacatcaagtgtttcacctgcaaagatacctttatcaatgaatgtgtcaaccttt

SEQ ID NO: 827282 - DNA, 100 bp, Homo sapiens
tacaataaagcaaatgactttgagatgcctgtgaggagccaccaacatttgaagctatggagctcattggtaaaccaaaaccctactatgagattggtga

SEQ ID NO: 827283 - DNA, 98 bp, Homo sapiens
ttgccagatgttggtatatcctactttctggatctgtgcttgtgaaaggctccatggtcttgcctccttgcagaaaagaggcacagttagatgaagaa

SEQ ID NO: 827284 - DNA, 98 bp, Homo sapiens
gcgagtcggcgcccggccgaggggctgcgtaggccccgcccggccaggcccagccgggccctggacagcgaatgacaacagagctgctcaaggcggga

SEQ ID NO: 827285 - DNA, 104 bp, Homo sapiens
cagtctctggacaagatgaccacactccaggaatgccagtgcatcttttgcacagctgtggagtggctgaaacttctcagcaggcgcatctacactagtgacct

SEQ ID NO: 827286 - DNA, 98 bp, Homo sapiens
tcccatcgaaccttctagttgcttattgcaggccatttgtgtaggaccagaaaacatgcagataatgtatccagctatatttgaccagttgttggcat

SEQ ID NO: 827287 - DNA, 98 bp, Homo sapiens
ggcttgaaaccaagataccattttgctgctttggaaaagacctattatgagaggcttccatatcggtgggcatatgtggtcgcactggcagtgggaaa

SEQ ID NO: 827288 - DNA, 100 bp, Homo sapiens
gaactggaaaggactggaattgatttgggaacaactggtcgtcttcagttaatggcaagacttgcagaggggaccctccattttccatatccaggaaaat

SEQ ID NO: 827289 - DNA, 100 bp, Homo sapiens
ctgagcttcttgacctgctggacagcagaacaatttcttcatcagcagctaaacaggaggaggcaaaacagattcagaatctgcagaaagcaggcactcg

SEQ ID NO: 827290 - DNA, 98 bp, Homo sapiens
caacagtgggacagccaggtcaccatgggccacctcttccagaagctgagcccacaggcggttttgtgagctgcttccccaggagcagcggagcgtgg

SEQ ID NO: 827291 - DNA, 100 bp, Homo sapiens
attagcacagcagaccttggtgatgtgctacaggtgttccagatcgcgtatgtgattgtgaaggcagctaactccccccggcctggaaactggattttgg

SEQ ID NO: 827292 - DNA, 100 bp, Homo sapiens
ctcaattaaatctgacgtctgggcttcgtgctctgtctgatgatggagtatctgatcttgaagacccaaccttgactcccctgaaagatacagaaaggtt

SEQ ID NO: 827293 - DNA, 100 bp, Homo sapiens
ggactattgtggttggcttctgttacgctaggaatatggcaaacgtctgagtgtacggtttgcagatatgcctggaaaatcaaggaagaaaaagaagaac

SEQ ID NO: 827294 - DNA, 100 bp, Homo sapiens
gaaaaatattagtggaagtgtcaccctaaaaatcttaccaagttatagagataccattactcctcaacagagcctggctagccgtctcaaggaaaacatg

SEQ ID NO: 827295 - DNA, 100 bp, Homo sapiens
caacagaagctatgcttggcagcagaaggatttggcaacagactttgtttcttggagtccacttccaattccaaggagtggagccccaacccacgcaggg

SEQ ID NO: 827296 - DNA, 98 bp, Homo sapiens
aatgagtatggcagtgtcagctgtacagccacactaactgtgacaggtcatcaccgagtggtcttctcacatcatccttcaggcagcaccaagagtca

SEQ ID NO: 827297 - DNA, 100 bp, Homo sapiens
gtcactcaaattagaaaatcgtcatctttctgaaatggtgatgaaattggaattgggtttacatgagggccgttgctccagggagaactgcaaatatctt

SEQ ID NO: 827298 - DNA, 98 bp, Homo sapiens
ggaaaattgctcttctctgcagacaataatgaagtggtagtaggagctgaaagattacgagttttagacaagttggatggcttgaggactggtactaa

SEQ ID NO: 827299 - DNA, 99 bp, Homo sapiens
atcagtcctttgtactggttggtgagactgggtctggtaaaacaacacaggcgccttggtgctgaattggggaagtctgttgtatatcaagagaccaat

SEQ ID NO: 827300 - DNA, 100 bp, Homo sapiens
aaaaaaggaattccttgaaacgcccacgtgatgtagatcatagcttgcaggagggttcctacttgttatctcatgcagcagaagattcttcactcctgat

SEQ ID NO: 827301 - DNA, 98 bp, Homo sapiens
ggtttggaggccagcggatccaggtctacctttcccttctgtccctgctgctctacattttcaccaagatctcgataaacaatcagattctgtatgga

SEQ ID NO: 827302 - DNA, 100 bp, Homo sapiens
ctacaataccaagtcttcacgagaaagagcaggtgatgttgatgactatagtgctgaagtggaggaacttcttcctcagcatctccagccatcttcaagt

SEQ ID NO: 827303 - DNA, 99 bp, Homo sapiens
tcaaaatatggattaaaaagtgaacttttctctggacttccccagaagaagattgtggttgaattcagtattggtaaaggttttcaaggtgtcatgaaa

SEQ ID NO: 827304 - DNA, 122 bp, Homo sapiens
agttccactcccaccccacacaacgcagacggtgcgcctgtgcagccctcccaggtggagtacacggcagactatgcatcaaattgcaatttggaggagaggcagcacaagcagaagcctgg

SEQ ID NO: 827305 - DNA, 100 bp, Homo sapiens
tcatggtaaaaagcagtgggatttggatgtgggatccggttccttggtgtcatccagccttagcaaaccagagatttgtgaagctgggaatcatttcatc

SEQ ID NO: 827306 - DNA, 100 bp, Homo sapiens
tgggggctgccctgctcacccaggaggggagaatcttcaaaggtctgtgcagacttttgcagacaaatcaaaacaagaagctctgaagaatgacctggtg

SEQ ID NO: 827307 - DNA, 100 bp, Homo sapiens
tgtcatcgttacagccggcgaagaagaagcagggttgatccattttctaagaaagattggtatgatgtgaaagcacctgctatgttcaatataagaaata

SEQ ID NO: 827308 - DNA, 100 bp, Homo sapiens
cagtttgaggatgcagatgttgatcactgaaaatgatttatgcaagtttaaggtttggaataccttgtagcaggacatgaggatataagaacaggcaaac

SEQ ID NO: 827309 - DNA, 99 bp, Homo sapiens
ccattctggatggcacccgaggtcatcaaacagtcggcctatgactcgaagaccctatcagatttggatatgtccttcatatttgattggatttacagt

SEQ ID NO: 827310 - DNA, 98 bp, Homo sapiens
acgccgccgtgaaagggctgaggaaaggggatgctgaggttgccatcacacgcaagctgcgaatattgtgcgtgctctggaactttttgtgaaagcag

SEQ ID NO: 827311 - DNA, 100 bp, Homo sapiens
caagatcatgcagtaggcaactttgcttccaaaagaagttaccaacatttagaatttctacttattctgaggggtttgttgcatcggaccagtgtcccta

SEQ ID NO: 827312 - DNA, 100 bp, Homo sapiens
tgcccctcgtcacagtaatctaagttggcaggtgactctggagaagaccttttgtttgggacatcagacggaaaacttgcgcttatacagattactacat

SEQ ID NO: 827313 - DNA, 100 bp, Homo sapiens
cggcaccacgacctccacagctggcacgccgagagctgctacgagaagtcttcatttctgtgtaaaagaaatcggcttcaccaccgaccctcggatggcc

SEQ ID NO: 827314 - DNA, 98 bp, Homo sapiens
gagggacacgctggtgcatctgtttgccggaggcaagtaactggcagaagttttggtgataaagattttcggacaggtttagaaaatggaatcctcct

SEQ ID NO: 827315 - DNA, 100 bp, Homo sapiens
agaactgcttcaagccccgcgagtcgcatctgctcaacgacgaggacctgacgcaggagactccatcctctgccaatggcccttcccgggagggctctag

SEQ ID NO: 827316 - DNA, 100 bp, Homo sapiens
ctcagaacactgttaaggtccagatattgcggtggtggagatgagcgatgccttccggcagccgtccttgttttaccaccttggggtgagagaaagtttc

SEQ ID NO: 827317 - DNA, 100 bp, Homo sapiens
caccttgactaaaccgacttctgatccatggatgccatcaggaatagccaggccagaagaaggaaggcctgtggtgagtgggacaggaaatgacatcacc

SEQ ID NO: 827318 - DNA, 100 bp, Homo sapiens
ggatttatgcccaagaagggggaccttggcctttctaaaaaggaccctttagatcctacaagatcagtgattgtgatccgctccctggtagcagatggtg

SEQ ID NO: 827319 - DNA, 98 bp, Homo sapiens
tatggtagcccacccagcattggagctatcgaaaaaccttgaactgagtactaacagtttccaacgacagttgcttgctgaaaggaaaagggcatatg

SEQ ID NO: 827320 - DNA, 100 bp, Homo sapiens
tatactcaattacacttcgactctcaaagcaataccaggatagctgttgtttcagagaaagacacctggatttcattagcatcatgacctacgattttca

SEQ ID NO: 827321 - DNA, 98 bp, Homo sapiens
cgcgccttggcccattgtcgggcttggaaaattcttgttaaaagttgatagcaaggatgctgacagacagcaccaagaagtaattgcaatttatcgga

SEQ ID NO: 827322 - DNA, 100 bp, Homo sapiens
ggccaccgcgactccggctctgcgctcggctgcctgacttcttcctgctgctgcttttcagggaaaagagtagttgaacagctacggaagaacctgatag

SEQ ID NO: 827323 - DNA, 100 bp, Homo sapiens
agcaaactttgggaaactttgcacagtccccctggacagcattcttgtagacaatgttgcactacaattttttatggaagacaatagatgtgcatcttca

SEQ ID NO: 827324 - DNA, 100 bp, Homo sapiens
aaaaagagaggtgcctttatctgatgatgatgaaagttacacagcttcctgcctgacacagctcacttcaagaagtgcacaatgtcagaacgtggaatta

SEQ ID NO: 827325 - DNA, 99 bp, Homo sapiens
gggcgccatggagggggtgctgtacaagtggaccaactatctgagcggtgatgcaggttctgaatgctgatgccattgttgtgaagctgaactcaggcg

SEQ ID NO: 827326 - DNA, 100 bp, Homo sapiens
acaaatgcttccgacaccccatcagcaaagtcagggaaacctatgagaatatcccaggccagtcaaagatcacattcctcttacaagccatcagaaatac

SEQ ID NO: 827327 - DNA, 100 bp, Homo sapiens
gcccatccccagaagatcctggtcccctgctttaaccatcgaaaatgaggaaggatttgatgccctggatccctttattcccatcctggtttccaactat

SEQ ID NO: 827328 - DNA, 98 bp, Homo sapiens
tgaaggtgttcttcggaatagaaagtcacaccattataagaaacattaccctaatgaggttaatggcacagatgcagattatgaatatgaagaaatca

SEQ ID NO: 827329 - DNA, 100 bp, Homo sapiens
gcaaacccggcgacagcgcagctcgcgtcgaccctggctcctctgcctgccccctcaggtcatcatcagatttgaaatatttaaagtggatacaaaacta

SEQ ID NO: 827330 - DNA, 100 bp, Homo sapiens
cagagattcaggccagagttgtgggccgccgtcggcagcaagaacagagagagaggtggacagatctgagagatactgagataccccacctggtggcccg

SEQ ID NO: 827331 - DNA, 100 bp, Homo sapiens
tgatgatagcagatcctatctgttcaattcttatagccattcttatagttgtaagttctcacgtttcagaatctgtgaacaattccatttttcatcagat

SEQ ID NO: 827332 - DNA, 98 bp, Homo sapiens
tgccacccatctctccaggaaggtactcaccaattccaaagcacatgcttgttgacgacgactacaccaggagaaggaagccaacatccttttggagc

SEQ ID NO: 827333 - DNA, 98 bp, Homo sapiens
ttttgctgaacaccgaagtgggctggttccgcaacaaatcaaagtgtggtcccggaacagcaagcccgtgcacaccaccatcctgaatccccacatcc

SEQ ID NO: 827334 - DNA, 100 bp, Homo sapiens
ttacacaccacatgcagcgatatgcagtttggtttggaggatcaatgctggcttccacgtcccagaaatcctggatagaaagcactttgaccaagaggga

SEQ ID NO: 827335 - DNA, 51 bp, Homo sapiens
ctgttggtgtagaagccaaaatcagttaaaggcattaggatttcctgaagg

SEQ ID NO: 827336 - DNA, 98 bp, Homo sapiens
gaaagtgtcttatgtctctggatcctccttgcttaccacacacccccaggagagtggtagaggcacagaagatgatgaggctgttgaactgtggaggc

SEQ ID NO: 827337 - DNA, 101 bp, Homo sapiens
gagttccacctcattttagagtatcaagcaggtaagtttgttcctgtcaattgggaaccccctcaaccacttccattccccaaatacctgcgctgctaccg

SEQ ID NO: 827338 - DNA, 100 bp, Homo sapiens
gcggcgatatggaagaggagggcaagaagggcaagaaggtgggtgtcccagagcaggcggctgcaacgagacaggcatgttggagaggctgcccctgtgt

SEQ ID NO: 827339 - DNA, 100 bp, Homo sapiens
tcgggcccgcaagggcggagggggcccgaaggacttcggcgcgggactcaagtacaactcccggcacgagggggggccctcagcctcttggccttgaacg

SEQ ID NO: 827340 - DNA, 101 bp, Homo sapiens
taaacatagttttggaactagcagatgctggcgacctatccagaatgatcaagatatcatggaaatcaggacagtggcagttggaattgtggcaatcaaag

SEQ ID NO: 827341 - DNA, 50 bp, Homo sapiens
taacctgacccgagctctgccacttgttgttacattatatgccactctag

SEQ ID NO: 827342 - DNA, 100 bp, Homo sapiens
cgcgacgctgctcaaaacctcgctccggaaaggggacacctgaacactcctatgccaccttcaccagctgtacaagtgcagggccagcctaacagttctc

SEQ ID NO: 827343 - DNA, 99 bp, Homo sapiens
tcgttcggtggtttcttgtgaggacgcggcagcccgtggagtcggctgagggaaaagcgaggcaaggcaggcggggtgcaaaaatgcagagtaataaaa

SEQ ID NO: 827344 - DNA, 100 bp, Homo sapiens
tcaagctgctgcaccgcggcgccgacatcaattacgccaatgtggacggactcactgccctgcaccaggtgagctcctgggtgacatggctgatcctcac

SEQ ID NO: 827345 - DNA, 100 bp, Homo sapiens
ctccagggcttcctggtttacctggcactcctggacaggatggattgccagggcttcctggcccgaaaggagagcctcttgtctttaaccgaactgtcac

SEQ ID NO: 827346 - DNA, 100 bp, Homo sapiens
atcgtgaccgagaccgtgaccgagagcgtgaccgagagcgcgaatatcgtcatcgttagaagttgttcccatgactttgccgactaaagttctaagtgcc

SEQ ID NO: 827347 - DNA, 100 bp, Homo sapiens
ggttcacagggaagtcgcctggaaaaaccaatagtattcttcaaacacctaaatgaaagtgataaattcaaaactgatccttttagttcctcattatatg

SEQ ID NO: 827348 - DNA, 100 bp, Homo sapiens
aaagcagggaggttatgaggcttaataaagaaggtatctcagatgaagacatcatcaacattactcttcctactggagtccccattcttctggaattgga

SEQ ID NO: 827349 - DNA, 98 bp, Homo sapiens
ttagaagtgcttaaggaagagtgatgaagagttcctgagttggaggtagaagaagaaacccaagttcaagagatgactttagatgagtggaaaaatct

SEQ ID NO: 827350 - DNA, 100 bp, Homo sapiens
ctacaatgaatgggatattcaggttcatgttgcaaatcacatgattgcctacaacacagcagtcccctcaggatgagcaggaaaagctcttggatgaagc

SEQ ID NO: 827351 - DNA, 99 bp, Homo sapiens
gcaagaagaggcacgagatgccccctcacatctatgccatcacagacaccgcctacaggagtatgatgcaaggtctctaattaacagaagatggcaaag

SEQ ID NO: 827352 - DNA, 100 bp, Homo sapiens
tgtggcgaaaagggacattatgcttatgattgtcatcgttacagccggcgaagaagaagcaggtcacgcatgaagggagcaccgtggagaagacagtggc

SEQ ID NO: 827353 - DNA, 100 bp, Homo sapiens
gtggatctgatccccgaatatgaaattgcatgtgaacacgaacactctaattgcctcctgatagcacacagaaaggtttttggctcttgtccaaggaaga

SEQ ID NO: 827354 - DNA, 98 bp, Homo sapiens
ggaacgaggattatacagaaatttgaaacttttggaacagcgatcgtaatcaatcctgagaaagacaaagacatggtccaagacctgttggacttcaa

SEQ ID NO: 827355 - DNA, 111 bp, Homo sapiens
ttgatgcaaaagaaggggaaatttgattacatactgttagagaccactggattagcagaccctggtcttatatccagatggccaggctcagatgattcaccccaagcctgc

SEQ ID NO: 827356 - DNA, 100 bp, Homo sapiens
gagtgaagaaagctggtaatagatgtctgacaaactaaagaaagacttgtgttacggtcaacatatttcactggcacctattcacaagcttgaagaagct

SEQ ID NO: 827357 - DNA, 100 bp, Homo sapiens
gagcatgcctttaccccgttggagcccctgctttccactgacaacagcagttctgtagagagtttaaatatgaaggaatggcaggacgggctaagggcac

SEQ ID NO: 827358 - DNA, 101 bp, Homo sapiens
gttttctccatgggaaggttgtgatggagtctctgggcatccaaagcctctgggatgtgttctgactgtaaaaactctgatgttgtgaaaaaagcttacgc

SEQ ID NO: 827359 - DNA, 99 bp, Homo sapiens
caagatccgcaaggccgcccgggaactgctgacgcttgatgagaaggacccacggcgtctgttcgaagagttgctggagaatgtaaccctaatccataa

SEQ ID NO: 827360 - DNA, 50 bp, Homo sapiens
ggcgtgatcacggccagcgaggacagacatgcacatgatggtgtccaagc

SEQ ID NO: 827361 - DNA, 99 bp, Homo sapiens
ttcctggtctacatcctgcgggtgcctttgaaaatcaacgacaacttgagcacaggatggacaaccggaaattttctacacattttggaattcagttac

SEQ ID NO: 827362 - DNA, 100 bp, Homo sapiens
gagtgtggaggcacagaaactgttattcgggcattctacggagggagatattcttgagaattcttccatctctatgacaacaagcccattttagctttct

SEQ ID NO: 827363 - DNA, 98 bp, Homo sapiens
ggactcctacgacaacttcagtgggcatcgagatgacggcatggaggtaccttctccaggcaaattccgttcccctgcagcaccatctcctttggctc

SEQ ID NO: 827364 - DNA, 100 bp, Homo sapiens
gcgacctgcacgccccgccgcgcagtcgcccggctcatggagatgggattttccagaggtgatgctttggaagccctgagagcttcaaacaatgacctca

SEQ ID NO: 827365 - DNA, 100 bp, Homo sapiens
ggaaatgacagtgatgggtcagagccttctgagaagcgcacacggttagaagaggtggactttgatgctcccctgggctacaaagaacccgaaagacaag

SEQ ID NO: 827366 - DNA, 98 bp, Homo sapiens
gggaatgaaattttttcgagtaaaaatgtatcctgtagaagattttgaagcatcatttcaatttatgcagacagtcgaccggcccaaggactggtaca

SEQ ID NO: 827367 - DNA, 100 bp, Homo sapiens
gcaagaccgaattcagaaggatatcgacgtcgtgatccagaagtccagagctgaggactgcctgtttgcagtgcctatgaagtcatcaagctaaaaggat

SEQ ID NO: 827368 - DNA, 99 bp, Homo sapiens
gacggctcacctgtgcgggatggaacaaaagttgaagaagctggatctggcagctgcggcagcacacaccttctttgtagcaaaccccatgcacctgca

SEQ ID NO: 827369 - DNA, 100 bp, Homo sapiens
gtttcagccagcagggactgatcagggcatgagccagaaggagagctctaagtctgccatgatgtatattcaggagttgaggtcaggcttgcgggatatg

SEQ ID NO: 827370 - DNA, 100 bp, Homo sapiens
aacaggacactgtgtacacatgcggggattaccttacagagctactgagaatgacatttataatgatcaagaattggttaaaatagttggaatacgatat

SEQ ID NO: 827371 - DNA, 100 bp, Homo sapiens
acgaaaggcatctgtcccaagcaggagaacattgcaggtctgatgaatacatgtaaagcttattgagcctcagaactctaactacagggtttcaatagca

SEQ ID NO: 827372 - DNA, 75 bp, Homo sapiens
ggaagaatggcagtgctcaaactcaccgaccaggtggtttgttctggatgcagaaaccagagatctagtttctat

SEQ ID NO: 827373 - DNA, 100 bp, Homo sapiens
gcccagaataaagccaagctcatctctgagacccggaggaggttcgaagctgagtatgtgacagatgaaacagtttcttctactttattggatacaaagt

SEQ ID NO: 827374 - DNA, 100 bp, Homo sapiens
cccacgccatggcggccactgccattgccttcaccctccttatctctactatggacagataccagatattctatattgagcgcattataccaataatcag

SEQ ID NO: 827375 - DNA, 98 bp, Homo sapiens
tgcctagacctcctggtagatcagccccacagcctcctgagtatcctggacgcccagacatggctgtcccaggtacaggtttgcagattccgccagca

SEQ ID NO: 827376 - DNA, 100 bp, Homo sapiens
tgtaaaatttacttttatactattgttatgtagggctgacaggacaactggatcagtttcattaaaaaggcctccggtgtggctgtctctgatggtgtca

SEQ ID NO: 827377 - DNA, 99 bp, Homo sapiens
ctgggggatcgggggcggcggtggcgccggcggcgggacagaaacgcttcgttaagggactcaggcagtacgggaagaacttcttcagaattagaaagg

SEQ ID NO: 827378 - DNA, 100 bp, Homo sapiens
actggaacacctgaatctgtccaggccatgtttatgagtggactaagtgaaagcaaacaaacccatgtacacctgaggaatgtcgatgctgccaccttac

SEQ ID NO: 827379 - DNA, 100 bp, Homo sapiens
aacaagaaacaggagaacgggaagcctcctgccgagataaagccaccacgtctgacatagggcctgattacattccaacagaggaagaaaggagagtctt

SEQ ID NO: 827380 - DNA, 98 bp, Homo sapiens
gagctccctcgcctggctctcggcggcctgatggagtaagaggggttggctgtgaattggacatttgggagcaataaaaataagaagaaaggaaaagc

SEQ ID NO: 827381 - DNA, 100 bp, Homo sapiens
catcatccttcgctttgctattcaggatatttcggttgaagcaagagtgagccatggagctacgtgtggggaacaagtaccgcctgggacggaagatcgg

SEQ ID NO: 827382 - DNA, 100 bp, Homo sapiens
atggccggaattacaggaagaatccagtccaagaacagacctatcaacatgaagaagatgaagaggacttctatcaaggacatggatttgattgacatac

SEQ ID NO: 827383 - DNA, 98 bp, Homo sapiens
aacccaggcaagaacgtgtagcaataaaacggatcaacttggaaaaatgccagaccagtatggatgaactattagagctccaaatggaccagcaggca

SEQ ID NO: 827384 - DNA, 100 bp, Homo sapiens
gagatccacagctaagactccaggaccctctggaagcctagaaatggtgccactgttcatcccagctttgttttccttcacatgcctcttcatggttgcc

SEQ ID NO: 827385 - DNA, 98 bp, Homo sapiens
atgaccctaattcagaaaagaagaagaagagggatactcccatgctgccaaaggaaagcgggcatgcctcggagaacagttggccaggactgagctgt

SEQ ID NO: 827386 - DNA, 99 bp, Homo sapiens
tccgtggtcgacaccctgaaggttgtgactgaggaggtcaccaccaccaccacatttgctgatggccgccaaagttggagttcgtatgttgatgacatc

SEQ ID NO: 827387 - DNA, 98 bp, Homo sapiens
cttctgtacagcagctgaaagaccagatgatgaataaggtatttggaggtactgtgcacaaaaaaagtgtcagagaagatggagttttcaacattagt

SEQ ID NO: 827388 - DNA, 100 bp, Homo sapiens
gggtggacggactgtcatctccccaaggctacggagtcgcttcaacattatcaacatgaccttccccacaagaacatcagttacttttatatgaagaaaa

SEQ ID NO: 827389 - DNA, 100 bp, Homo sapiens
gagctgggtcagtccgccgctcaccccgcggccgcaccttcccgccttctcagactgtggcacgtttcaggcaggattcctccttcattcaaactgcatc

SEQ ID NO: 827390 - DNA, 100 bp, Homo sapiens
ccgaacgaaggcggctccgtgcgggccatcccctatctccccgggcggggcaaaataacatggcagccagacgaattacacaggagacttttgatgctgt

SEQ ID NO: 827391 - DNA, 100 bp, Homo sapiens
aagggaccaggaaaagtggtgatggttgcaatttgcatgcgcagttgtgtagcagttgagtaatgctggttagctgttaaggtggcgtgttgcagtgcag

SEQ ID NO: 827392 - DNA, 98 bp, Homo sapiens
aaagccgggagatcgactgtttgagcccggaagcgcagaagctgcccgcgtgaccccaactctgccgaagcaggaccgtcctgtgcgtgaggggaccc

SEQ ID NO: 827393 - DNA, 51 bp, Homo sapiens
aaagcaggcgaacccgcggcgcaataacgcggggccttttccgaagtggtt

SEQ ID NO: 827394 - DNA, 99 bp, Homo sapiens
ttctacaacatcaaccagggccgcttccagccaccgcatgtgcagatattgaccctcttgctggaatgacatctcttagtataggtggttcagctgccc

SEQ ID NO: 827395 - DNA, 98 bp, Homo sapiens
gctgctgtcttcgtgggaggcgccgtgagttcgccgctggtggctccggggaggagctttatctttatatactgcccttaccacacagcagaaactgg

SEQ ID NO: 827396 - DNA, 100 bp, Homo sapiens
cttcggaccccccaacaccctctacgaaggcggctacttcaaggttaaagtattgcacaatcagctggtccttttccacaatgccattgccgcttacttt

SEQ ID NO: 827397 - DNA, 99 bp, Homo sapiens
ggagagcggtgctgaggctacgcgggctggagactcagggaattcttactgttgatgaacttttggccatcagaattccattgaatgacctttttagat

SEQ ID NO: 827398 - DNA, 121 bp, Homo sapiens
ggtatctacagactgggtcatcctatctacttgttttttacaattctcctctactgaggtcatcctttggtggaaaaatgctaatcactgaaagaaaacattttcggtcaggaagaattgc

SEQ ID NO: 827399 - DNA, 98 bp, Homo sapiens
tggatcgagtgaacgctgctgatgggagataccatgtcctgtttctcggaacaggttcactactgtgatagacaaagtggcaaagagtgtgtgacctg

SEQ ID NO: 827400 - DNA, 100 bp, Homo sapiens
cgcgaggtccgcgcagcccagcgcagccatggtcggcactcttcaccctcccgagccctgcccgtctcggccccatgcccccaccagtcagccccgggcc

SEQ ID NO: 827401 - DNA, 100 bp, Homo sapiens
ccaaggaagtgactcaaactgtgagaacttcaggttatgatgtgattgctcaagcccaatctgggactgggaaaacggccacatttgccatatcgattct

SEQ ID NO: 827402 - DNA, 99 bp, Homo sapiens
aagtccagagctgaggactgcctgtttgcaggaagcgttgttgacgaccatggacatcatccacgatggatttggattcatgctggcttttggagactt

SEQ ID NO: 827403 - DNA, 100 bp, Homo sapiens
gattggttgttttttcctgtatgaagcggttggcaccactgaagtgaccgaatgagagtgtgaacatggctacgcctcttcattcccgtccatgccgagc

SEQ ID NO: 827404 - DNA, 98 bp, Homo sapiens
ccgctgctcgctgggctgctcccgccggtgcccgctcagaagttctcggcgctcacggtggaagttgatgggtcgaaactaaatgtgaccagcacgtg

SEQ ID NO: 827405 - DNA, 99 bp, Homo sapiens
tcaagaccctgtgcacctctcagcaggcctttgctggacagatgaagagtgacttgtttctggatgattctaagagagctcacaatgtctctctgcacc

SEQ ID NO: 827406 - DNA, 122 bp, Homo sapiens
tactcaggaggaaattacagagacaattatgacaactgaaatgagacatgcacataatataggtgctgaccggatatctgaactacatggtccagctggggaagctgctgggcggcggggac

SEQ ID NO: 827407 - DNA, 100 bp, Homo sapiens
cggcagcaatcgatttgccaagctggttgcagtgtttgataagcaagatctacatcatggaggtgatgacatcagtgccagctccatgcatacccagagc

SEQ ID NO: 827408 - DNA, 51 bp, Homo sapiens
aactttcataactttgaacattttgggagtatgagcctgatgtgggcagaa

SEQ ID NO: 827409 - DNA, 100 bp, Homo sapiens
gtcatttccttcgtacccacagtgcttcatgagagaatctttggaagaactaccagaaacgagtgggaaaacaacccggagattcttctttaatttaagt

SEQ ID NO: 827410 - DNA, 101 bp, Homo sapiens
gttgatatatcttccaacactgccgggaagaccctggacgcatttgccgcaatggcctgcacggagatgctgacaagaaacaccctgaagcccagtcccca

SEQ ID NO: 827411 - DNA, 100 bp, Homo sapiens
ctcgctcctcgatcgaggacgacttcaactatggcagcagcgtggcctccgccaccgtgcacatccgaatgggaatgttacgttcataacttactaagga

SEQ ID NO: 827412 - DNA, 100 bp, Homo sapiens
cgaaatcctgcaaacagattagctgcccgaaaccatgttaatagaatgtgcctggcagctgatgttcctcttattgaaagtggaacagctgggtatcttg

SEQ ID NO: 827413 - DNA, 98 bp, Homo sapiens
ctaagcgaggggatcctcatgagttaagaaacatatttctacaggccagaagcggactcctagaagaggggagcagcaaggatggaatgacagccgtg

SEQ ID NO: 827414 - DNA, 99 bp, Homo sapiens
accccgccagctccagagccacgaggagttggatttgtcttctagttctcagatgtctcccctttccttatatggtgaaaactctaatagtctctcttc

SEQ ID NO: 827415 - DNA, 100 bp, Homo sapiens
caaagtgctgcttccaaagctcattgacttttctgctcagctgccaaatggtgtcacttaccacactggaacatatcaagaccggttaacaaagctacag

SEQ ID NO: 827416 - DNA, 100 bp, Homo sapiens
tgcagctgaataacccttttaacgagtattccaaatttgatggcaagaacaagttgaaatcatcgcagaaggataaagttcgtcagtttatgatcttcac

SEQ ID NO: 827417 - DNA, 100 bp, Homo sapiens
ccttgcagcctcccccagaaagcaatgataattcccaggacagtcagtctggtactaacaatgcaggcagtatttggcagtcgtattcagagataaaccc

SEQ ID NO: 827418 - DNA, 101 bp, Homo sapiens
ctatagagtcaacactgcaaactcaagcactgatacgtccggagagcacttgacctgccttagaaggtatgtcgagagtaccaacgtggcaattgcaaccg

SEQ ID NO: 827419 - DNA, 100 bp, Homo sapiens
ctgaaaaattcttcagattggaaaataccacaggatggagactacgagtttggggacttgatctcatcttcatgccaggccttgggtttgacaaacatgg

SEQ ID NO: 827420 - DNA, 100 bp, Homo sapiens
tgtagaaaaattcctcagaagaaaaatgggtcttgatccagcttgtcaggtaaatctcacctggctatcgtgcagcgggtaaacaatgagggagaagggg

SEQ ID NO: 827421 - DNA, 60 bp, Homo sapiens
ggccttcggaacagatgcacacccttcctgggtgatgctggagtatcagaggcagcagct

SEQ ID NO: 827422 - DNA, 100 bp, Homo sapiens
gcagcgggcggccccctgcagcctcctgcccaggctccgcctgtggtagctgttcctcttgttatgccagtttgtagaaggaaagaggatgaggtgtcta

SEQ ID NO: 827423 - DNA, 98 bp, Homo sapiens
atcctcccagatgccttccctctctgttttgtctgtgtgcacagaggaatcatcacctccaaatactggtcccacgcctctgcaaaggatagaaaatg

SEQ ID NO: 827424 - DNA, 99 bp, Homo sapiens
gtctactctgatgtcaatcttgagggctaggtgcctttgaacccttgtgcactttttagttagatctttattaacatgctatgccactgcagggaggga

SEQ ID NO: 827425 - DNA, 99 bp, Homo sapiens
aggtctcgttcccgctcaagatcaagacacaggcataggactagaagcaggagtaggacaaggagtaggagtcggtgctggagaatctggtaaaagcac

SEQ ID NO: 827426 - DNA, 99 bp, Homo sapiens
ctggatagtcgccgtcaggcactgaggaggccgagagatgaggccggagcccaccaagttctgggaacactccacctcagcactccagctcacagccag

SEQ ID NO: 827427 - DNA, 100 bp, Homo sapiens
tggggagatagacgctgctgccttaagcactatcctttgtactccctcaacgtggcctccatgtggttgaagctagggagactctacatgggcctggaac

SEQ ID NO: 827428 - DNA, 100 bp, Homo sapiens
ggtggagttccggaaccatttgaaggaacagcatcctgacatcgaaaacccggacctcgcttacctgcatgctgagctggaagtcgagtgtgctactcaa

SEQ ID NO: 827429 - DNA, 100 bp, Homo sapiens
gtctgattttaagctggcaaagtgggaaaaataaagtgttgagtaaacagaccaagttggatcctgccaagcttttccttgttgaccgctccttgtatgg

SEQ ID NO: 827430 - DNA, 99 bp, Homo sapiens
ggccgtgagtgcgggaggtatacgccaaggcggaagaattttgccactcactacctgtgtgacctcgggtaacagagattcaaaggtaccttcagaagg

SEQ ID NO: 827431 - DNA, 100 bp, Homo sapiens
gcctcaagtgcttctgcattacagtcaggatggctaactggttggctccccacatggtgccctacgtctatatcacaccttaaagaagctgaagagaaga

SEQ ID NO: 827432 - DNA, 99 bp, Homo sapiens
tgcccggccagctctcgcttctgcaagaccacgaacacagttctttaaggaaaaacagtagtgctctgcatagtttactgaaacgagtggtcagcacat

SEQ ID NO: 827433 - DNA, 98 bp, Homo sapiens
ggcattgaggtccaggaaatcaaaggtcgacggatagaccacgtactcctaaatgctgatggcattcgaggttttccagttgttcttcagcaaatcag

SEQ ID NO: 827434 - DNA, 98 bp, Homo sapiens
ctttttgtgctgccagcaagaaatgatcagtagcaccagtgtttatgactcacatttcaagacttcctcctggtgcggtggcaggacagtctgtggca

SEQ ID NO: 827435 - DNA, 107 bp, Homo sapiens
accatcccagttgaatgctgtcttccaagaacagaagaaaatgatccaggcccaggttggaaaagagactgttcaaaccactgaggatcagattttgaagagagata

SEQ ID NO: 827436 - DNA, 98 bp, Homo sapiens
gaaagtgattttgaaacgattaaattgattagcaatggagcctatggaatctctttgcattagctggtgatgaagaaccagaggtacggaaaaatgtg

SEQ ID NO: 827437 - DNA, 100 bp, Homo sapiens
cagcagactcctgtaggtaatgctgctgtatcctcagttgactcattcactcagatgaaaagtctggctactagagaacagaatcagaaaaatgctgcct

SEQ ID NO: 827438 - DNA, 99 bp, Homo sapiens
cgagagacaaagaagcatgcggtggcaatcatctttcacgatgaaacatcgaagacatttgcctgtgagtcaggtctcgtgggctgcctaaactaaaag

SEQ ID NO: 827439 - DNA, 100 bp, Homo sapiens
aagagccggtgctgttcagtggcactgtcaggagctgcgggcgtctttggagacacagcgtgctcagagcagtcgactctgcgtggcactgaaacacgag

SEQ ID NO: 827440 - DNA, 98 bp, Homo sapiens
aacccaaagagtcagctgttcttgttccagacggaggctggtgggacctcaaccccagctggtatccaggctcttgacaccatctggagaaggaattc

SEQ ID NO: 827441 - DNA, 98 bp, Homo sapiens
ggccgccgaggagcgggaggaggacgggaccccggcgcccccaccccatccccgggaggctctctatgagaacatgctggtggagctgccctttgcag

SEQ ID NO: 827442 - DNA, 99 bp, Homo sapiens
cagtgtctgagcctacaactgcgctatcttccctggatttttcttcaccttttccttactcatgagccagctgtatgacaaaattaacacaaagtcttc

SEQ ID NO: 827443 - DNA, 100 bp, Homo sapiens
ggaagaacctcatcgctgcgacgaaaagtaccaaccaagaagctgaagaaatatgagaaagaatatcagacaatgcgagagagtcagctgcaacaggaag

SEQ ID NO: 827444 - DNA, 100 bp, Homo sapiens
gcctcattcggtgactgtgagtgacacagcagaaagttggtatcagaatggcaaagcaacttaaccttccagaaaatacagatgattggacaaaagagga

SEQ ID NO: 827445 - DNA, 98 bp, Homo sapiens
ccgctccccgaggccggccgcctggtcatggcgcagccgggcccggcttcccagcctgacggccaaacaccagagcaccctagaaggtttaactaaaa

SEQ ID NO: 827446 - DNA, 98 bp, Homo sapiens
gacatgagaagattcatactgccaccaaccaaggcaactcagctgatgctgtaacaaccacagaaactgcgactagtggtcctacagtagctgcagct

SEQ ID NO: 827447 - DNA, 100 bp, Homo sapiens
cctggacccagcctgggagaagcagcagaggaagaacccttcttcttggcgagaccacgatgatgcaacctcaacccactcagcaggcaccccagggccc

SEQ ID NO: 827448 - DNA, 100 bp, Homo sapiens
cctaccatgggctggctgcactgggagcgcttcatgtgcaaccttgactgccaggaagagccagattcctgcatcagataaggatgacattcggctgctg

SEQ ID NO: 827449 - DNA, 100 bp, Homo sapiens
tgtgcatgagcctgggcaaggatacactgctccggtttgatgatcgtggacggagtgattacgatggcattggcagccgtggtgacagaagtggctttgg

SEQ ID NO: 827450 - DNA, 100 bp, Homo sapiens
tcttgtgcaagtaatcagtctttgacaagtgatgagaagctgtcggagcttcccaagaatacctaaaggggcaggacctggatgctatcttgcaggatcc

SEQ ID NO: 827451 - DNA, 98 bp, Homo sapiens
ggagccaggggcccgagggcggggaccggcggcgctggaggagcgaggcagctgtactaggactgggaacggagcatgcaagcggcaagatgtcctac

SEQ ID NO: 827452 - DNA, 99 bp, Homo sapiens
ggattctcgctgtgacagagacaacaccgagtatgagaagtgactgtaatcaatgagagactgaagacagatcaacatacatcttacccatgctctttc

SEQ ID NO: 827453 - DNA, 100 bp, Homo sapiens
gtttggagtgggtgatgatgatgacttcagagaccaagggttaacaaggcccaaggcaagataacccctgtgacagaaggctactgttgctgtaacaaag

SEQ ID NO: 827454 - DNA, 100 bp, Homo sapiens
gagctgaccctaggcctccaccctggcaggaatcccaatttgcctccacttagtgagcggaagaatgaagtgtatgctgacttgtaaagtgaagaagcca

SEQ ID NO: 827455 - DNA, 100 bp, Homo sapiens
ggctttatatcctaaacttttcaagcctgaaggaaaggcagaactgcctgattacaggagctttaacaggtttctactttccaggtccactggtgtttgg

SEQ ID NO: 827456 - DNA, 100 bp, Homo sapiens
tgccacatctggtactttccgactgcgacgagggagtcgatttacctggagaaaggagtgcctggctgttatggaaaggcatggacccatgctggcattc

SEQ ID NO: 827457 - DNA, 99 bp, Homo sapiens
agcagccgagaggggccccggccacagtgaccatggtggtactccaaagattcaggtttactcacgtcatccagcagagaatggaaagtcaaatttcct

SEQ ID NO: 827458 - DNA, 50 bp, Homo sapiens
acacagtctactatcaccgacagggtcgagcacgcacgcatgcatgccaa

SEQ ID NO: 827459 - DNA, 100 bp, Homo sapiens
ttgctggagggagacttggacaaggccattgaagtctacaagaaagcagtggatcaggtcaattcagtgaagatatgatacccacagtgggcttcaacat

SEQ ID NO: 827460 - DNA, 100 bp, Homo sapiens
ggaaaatatgtcaataacctgaacactgaccagctctcagttgcacttctcaaagattgttctctggggccggactgagaaatgcctgaaggagacgacg

SEQ ID NO: 827461 - DNA, 100 bp, Homo sapiens
tagaggacacgagcggcgccttctcagggctcgacagcctcagcaagctgcctttggaggagcctaaggtgatctccgccttctctggaaagcaggccgg

SEQ ID NO: 827462 - DNA, 100 bp, Homo sapiens
tttggtggagaattatccaacaagaaaaagacctgtggctattaagatagatgccttcaattaagttgcagagttctgatggagagatatttgaagttga

SEQ ID NO: 827463 - DNA, 100 bp, Homo sapiens
aaagccgagaaggagaacaccccgagcgaggccaaccttcaggaggaggagggtacttaccaaaagctgctacctctctacttcccaaggtcattaaaag

SEQ ID NO: 827464 - DNA, 100 bp, Homo sapiens
aaacaggctgtgcactgtatacacgccatattcacaaataaagaagtccagcttgcacagatttttgagtttgtgaagaaatatgggaacctttttagct

SEQ ID NO: 827465 - DNA, 99 bp, Homo sapiens
tgatgccaactttaaaataaaggacttccctgaaaaagctaaggatatctttattgaagctcacctttgtctaaataatttctgccactgccttctaca

SEQ ID NO: 827466 - DNA, 99 bp, Homo sapiens
agactgcagtgctagcaatgagcgagactccgtgggtgtaggaccctccgagccaggtgacttaagagattaaaattaatttggttgctgttggttctg

SEQ ID NO: 827467 - DNA, 98 bp, Homo sapiens
cttcaccaatgtcgtcttgtgccttttcttgttcctactgtaaaggagatgggttagatgttgacgtagacaagtttggcaacgagatcacccagctg

SEQ ID NO: 827468 - DNA, 100 bp, Homo sapiens
cacagctgatgtaaatgaaaagaacctcctcagttgttgcaaaaatcagtgccctaaagaggaactcgaatcatttatgacagaaagtttctgttggatc

SEQ ID NO: 827469 - DNA, 100 bp, Homo sapiens
ccactggcggccgaggtagaggcagtggcgcttgagttggtcgggggcagcggcaggagttggcatcctttggaagagttcgtgaaagctttctgcccag

SEQ ID NO: 827470 - DNA, 98 bp, Homo sapiens
aagcacttaagaaatgtcatgagattgagagacagagagagatcatcattgcctgaatttagctttgtgactgcaagagcaagaccagttcctgtctg

SEQ ID NO: 827471 - DNA, 100 bp, Homo sapiens
atgtggcacttgatgtacattcgcgttccatcttcgtaaaaagcctgtggaatagcaacgcacctcttgctttttcctccaaagtatgttatgttaagtt

SEQ ID NO: 827472 - DNA, 100 bp, Homo sapiens
aagcatgggttaaaatagaaaatctagccaaagccaatccccagatgttctcaaatagtgatgaagctgtaatcaataaaaaacttcccaaagaactcct

SEQ ID NO: 827473 - DNA, 99 bp, Homo sapiens
atgcaaatgggaagatatatcttccttatctacatgaatggaaacacgcaatcttgctgccaatgatctctccccgtcccgaatagccagactacagaa

SEQ ID NO: 827474 - DNA, 100 bp, Homo sapiens
gccttggaccccgcggcgcccctcggcctcggagcaacgagcgcagcgccgacatctgaatgggactccgagtgccttacatccctgcagccccttcctc

SEQ ID NO: 827475 - DNA, 99 bp, Homo sapiens
ttcggcgggctcgcgagcccggccgcggcctgctggtttcaggatggaactccaacctcgaaaacatttgaacacgtgaccagtgaaattggagcagag

SEQ ID NO: 827476 - DNA, 98 bp, Homo sapiens
acgcaaatagtcgagaatagcgatccggggagaagcaggtgtctgtggggcccaagagaagtaccatctcgagcagcccgacggccatggaggctgaa

SEQ ID NO: 827477 - DNA, 100 bp, Homo sapiens
accaatcagatcagtcttggctccctcagaagcatcgtgaaaagcctccttctggttccaaatggctacccacctttctgttctgagacccctcaagaga

SEQ ID NO: 827478 - DNA, 98 bp, Homo sapiens
gcgacaactgccctgctcttcatcccagaaatctcctgcaaagaagctgagccatgcaattagtaaatctttggggtgtgtacccacgagagaacccc

SEQ ID NO: 827479 - DNA, 100 bp, Homo sapiens
tgacctccagagcctcccaaacgacgtggcagttcaattaacctccagaagatggctgaacctgcaggaataccagagcaagaaactgatgtctgacaac

SEQ ID NO: 827480 - DNA, 100 bp, Homo sapiens
gcgtccgtggtaaaggtgaacaaagtgggccagctccgcgtgctcctcgccttcagacggctcccacatcaggacgagaaggagccctcgagttaccgtg

SEQ ID NO: 827481 - DNA, 106 bp, Homo sapiens
tcaacccctacaacttattcctgtccggagacagcctaaggccttacggacatccaaaaattgcttggaactgacttcatgggtaccataagtacagagaacaagg

SEQ ID NO: 827482 - DNA, 100 bp, Homo sapiens
aaatacatctactcatattgagagctgtcgacagttacgtcaacagattaatgcagtatcgaatggacaagtccgaggtgatagttacagtgaaggttgt

SEQ ID NO: 827483 - DNA, 100 bp, Homo sapiens
cccttctctcgcttcggactgcgcaacgctgcgctctgggctgacagggtcttactacggagcacatttgcagtgaattgaggaatttgaatattttgaa

SEQ ID NO: 827484 - DNA, 100 bp, Homo sapiens
ctcaaggaccccaacaacagcctcaccctctgggtcatcgaccaaggaacaggggagctctacacctggggctggggtaagtaaaaggattgtttttgtg

SEQ ID NO: 827485 - DNA, 112 bp, Homo sapiens
ttgaatgcagaagaaatggcggacttctacaaggaatttttaagtaaaaattttcagaagcacatgtattataacagacaagccaaacggctcctgggacagattgtggacc

SEQ ID NO: 827486 - DNA, 98 bp, Homo sapiens
agaagtggagtgaagggcgtgttctgtgcagacccagttcaaaatgtggttcaggtcctggagaaacaatacctagaagaaaagagaagtgccctaga

SEQ ID NO: 827487 - DNA, 99 bp, Homo sapiens
atgcttctgtcaaaaacaaggttctggaaacaactgggcatatggttgaggtactaaagaaaattgacattccatctgtctttattggtgaatcatcag

SEQ ID NO: 827488 - DNA, 112 bp, Homo sapiens
gtttttgcgaggatccgttgagatgaacctgaaggctctccggaaattgcgctaggttacaggagtgtaagggatgatgcagtgtgtgattgcagtcgcggacaaagtattc

SEQ ID NO: 827489 - DNA, 100 bp, Homo sapiens
acggatgctgccaaaggctttgggggcaagtacggagttgagagggacagggcagacaaggttattcaagaagcccaagcgaaagacctgctgagaagac

SEQ ID NO: 827490 - DNA, 101 bp, Homo sapiens
cgcagagggctcctccggcgccgccgagctgcgcccgctgccttcacaccccggacatccgcgccacacggcaaccttcgcccagaagaggcacttcaggc

SEQ ID NO: 827491 - DNA, 100 bp, Homo sapiens
tattttgttttgcagttcggggccaagctggagggaaggttcacagatgaagagtctagagtattcctgcttgataggggtaataccagggataaagagg

SEQ ID NO: 827492 - DNA, 98 bp, Homo sapiens
aacatttttggagaaagccagcctaatccaaagactgtggaacttttaagtggagtggtggatcagaccaaagatggaaatgggcaagttcatgaaac

SEQ ID NO: 827493 - DNA, 100 bp, Homo sapiens
gtcttctggcaaacagtgtttgcctctggttcagctcatacaacagcttcttagcaaaagcggcgccaggaaattgaacaaaaacttgaagttcaggcag

SEQ ID NO: 827494 - DNA, 100 bp, Homo sapiens
gtagacatggaggccgtcggggagacgctgtggtgtgactggggcaggaccatcagcaacatcccaggagacagccagactagcgtctgcatcaccatcg

SEQ ID NO: 827495 - DNA, 98 bp, Homo sapiens
agttcacataagaagttcttcgatgtatctaaacttggcaccaagtatgagaaacagcacccaggactatcttccaaagagttctggatatcctaaag

SEQ ID NO: 827496 - DNA, 98 bp, Homo sapiens
gaaaacccgatagggttgtagagtgcataaagatcatccttgatcttatatctgagatgctgggctcttgcactgtttggtggaaatggtgagacagg

SEQ ID NO: 827497 - DNA, 100 bp, Homo sapiens
gtcagtggaaggcacggcaatctatttaccagataatgagaagcccatgcgagtggtggatgatgaagacttggtagaccagcgtctcatcagcgagctg

SEQ ID NO: 827498 - DNA, 100 bp, Homo sapiens
aacctgcagtcattcttccgggcctccaaggaacttaagcaaagaccctctttcccagctgcccgctcctcagcacccgaagattcgcctgtacaacgca

SEQ ID NO: 827499 - DNA, 98 bp, Homo sapiens
gatcgtcatcacagtcaactatcgacttggagtactcgaaactccacttactgtatgaaagtatccatctcactgacagtgggtgaaaatgacactgg

SEQ ID NO: 827500 - DNA, 100 bp, Homo sapiens
tggggctggggctgccttccaggcccacggggcggccccgctcttttcggattggttacctttgggcagaatatggtgcacctgaagattgggaactcaa

SEQ ID NO: 827501 - DNA, 100 bp, Homo sapiens
ggacattgatgatatatttgttgggaaagagggaacaaggatgaatgtcaaagatgtgaagagtaagagggaccatctcctcatgaacgtcaaatggtac

SEQ ID NO: 827502 - DNA, 100 bp, Homo sapiens
gactgaaaatggggcggaagaaaatacaaatcacacgcataatggatgaaaggaaccgacaggtagtgggcagcagtcagtgacaggtgtaacctctgtg

SEQ ID NO: 827503 - DNA, 99 bp, Homo sapiens
tcaagccttattgaagagataggaactcttggttgggataatactatactggcaattgctggagaagattttgcaattgttgcttctgatactcgattg

SEQ ID NO: 827504 - DNA, 100 bp, Homo sapiens
gggaacccgtgcggctggagagagagatgtaagtttcaatgaattaacttcctttcctacggaaggcctgaatgggctaaatcaactgaaacttgtgggc

SEQ ID NO: 827505 - DNA, 136 bp, Homo sapiens
ggggcgcttcctggctccggaggccagcggccgggatagccccggcggagcccgcagcttccctgccgattgagatggccatcctgcggttcccttacgagtcctgggggaccccgttccagcagctgaagcaggt

SEQ ID NO: 827506 - DNA, 100 bp, Homo sapiens
ggagtgcagctttgtagttttgcgtgtgttgaaagtacaattctattgcacatcaatgatatcatcccaggtaccaagtgctggtgtgattctaggatgt

SEQ ID NO: 827507 - DNA, 100 bp, Homo sapiens
gcaacctcagccttccacatttgccccatggctgggggttatggagtgatgggtgacgatggttctattgattatactgttcacgaagcctggaatgaag

SEQ ID NO: 827508 - DNA, 100 bp, Homo sapiens
gccggagtgtaggcggcagaggattcgctcccagagcagctgcggccagtcatatttgatcagaaattggatgaaccttcgggatgctgagacagggaag

SEQ ID NO: 827509 - DNA, 98 bp, Homo sapiens
ttcaagatcttctgtctgaggaaaatgaatccacagctctaccccaggttctagcccaggcatccgtgtacaagatttgcagagaaatgtatgacgat

SEQ ID NO: 827510 - DNA, 100 bp, Homo sapiens
agcggtagatgctgtcgaagagttcctcaggagagccaaagggaaagaccaggagaacttgcgcctgtcaggggctggatccagaaacctgtggtgcctc

SEQ ID NO: 827511 - DNA, 98 bp, Homo sapiens
gcctctgtgctcgtgagtgcatggggtataaggaatagccaggccagaagaaggaaggcctgtggtgagtgggacaggaaatgacatcaccaccccac

SEQ ID NO: 827512 - DNA, 98 bp, Homo sapiens
gaaccttaaagatagattttgttggagagctgaatgacaaaatgaaaggtttctatagaagtcgttccaggggtagaggaggcatgaaggatgaccgt

SEQ ID NO: 827513 - DNA, 98 bp, Homo sapiens
cacctgctgacggcgcaggacgagaacggagacacgttggtgaaaattgcccctcaatattatgacatgagcaatttcccacagtgtgaagcaaagag

SEQ ID NO: 827514 - DNA, 132 bp, Homo sapiens
caagaagcccgaattgaacaacagaggcaagaaaaggaaaaagcccgtgaggatgcagcccgggaaagagctagaatctttagaacacgatgttcttgatgataatacagagcagacagatgacaaaatacc

SEQ ID NO: 827515 - DNA, 100 bp, Homo sapiens
tcagcctcccgagtggctgggattacaggataccttcttctactcattggtctatgacccctcattgaaaacactattagctgacaaaggtgaaatcaga

SEQ ID NO: 827516 - DNA, 100 bp, Homo sapiens
catttggtgatgaatgtagccaccacgcctacctgcatgaccagttctggagctactggaatagaagaagttggattccatgggttccaagagaagaaga

SEQ ID NO: 827517 - DNA, 98 bp, Homo sapiens
gagacttggttccaggtgatacagtttgcctttctgttggggatagagttcctgctgacttacgcttgtttgagaccccagaggaactggaggatgtt

SEQ ID NO: 827518 - DNA, 100 bp, Homo sapiens
cggccaccaagattgccaggatggccgggacgaggccaattgcccaataccaagtttccaggcccgaagagcatcccagactattgggactcctctgccc

SEQ ID NO: 827519 - DNA, 100 bp, Homo sapiens
taattccaggtggaattgctgatagacatgggggcctcaaacgtggagatcaactcctctctgttaatggagtgatttacactgactgggccaaccacta

SEQ ID NO: 827520 - DNA, 100 bp, Homo sapiens
atagcatggatttccgaaactctttgtattggttgtggtatctgtattaagagctcatcagtcaatcagtcagcttctcagagtagcaatccatgtgtcc

SEQ ID NO: 827521 - DNA, 100 bp, Homo sapiens
aaaaactaggatccctttttgttaaacacacccaactcgtttgtgatcatcacggccaaccgggtgctgcactgcaacgccgacacgccggaggagatgc

SEQ ID NO: 827522 - DNA, 100 bp, Homo sapiens
atcatgtcaagcgaagccttgaaaaagctgccctgagacggtgtcccgccgaaagttggcctttaccagagtttgatccaagccagattcgactgattgt

SEQ ID NO: 827523 - DNA, 98 bp, Homo sapiens
cttcatgggaacagaggtgtttaccatgacgataagcaaccagcatttagagctgtttatgaagcactgagaaataggaaggcatcaaccacgagtgt

SEQ ID NO: 827524 - DNA, 98 bp, Homo sapiens
gcaagtggccatggggagcctcagcggtctgcgcctggcagcaggcttcatccctccacccctcatcttcggggctggcatcgactccacctgcctgt

SEQ ID NO: 827525 - DNA, 100 bp, Homo sapiens
ggcctacagaacctagcctatcagctggggctggatgagtaccattactgggacttccacccccaccacgtgcacagcgagttcgagagcttcgccgaga

SEQ ID NO: 827526 - DNA, 112 bp, Homo sapiens
cagcaagcagacctctctgctctggaggacatgcttccaacaaagagaaagaaatggtgactagtgagttacctgagagagaagaaggcgaaggagaagaaactccaaattt

SEQ ID NO: 827527 - DNA, 126 bp, Homo sapiens
caagacccggcaggaccaggactccccgcacagtctgaccgacttgcgaatcaccaggctcggtcaaggagtgtgatgactggcgagcagatggctgccttccatccatcgtccacccccaacccg

SEQ ID NO: 827528 - DNA, 99 bp, Homo sapiens
agggaccaggcggaggcgtcgcgggagcctttggggcaccacagagatgcggctggagaatgctggaggagaccttaaggatggccaccaccactatga

SEQ ID NO: 827529 - DNA, 100 bp, Homo sapiens
ggtcctggaggtggggccgggcctgcgtagtgaaactgcgtaggaacctgggaagaagaaactggcgatggaatatgagaggagccctctggaaagaaaa

SEQ ID NO: 827530 - DNA, 98 bp, Homo sapiens
ctggcctcatttctgatcgggaagcctcatctagcccagaggatcggaatgacagatatgctgatggaaagttaagcgtgaaatttggggtcctcttc

SEQ ID NO: 827531 - DNA, 100 bp, Homo sapiens
acatttggatttggaacaacaaataaaccctcaggaagtcttagtgcagaatcgcatgtgtgagtgcccctagtgtttaccagaaactcagagagctgtg

SEQ ID NO: 827532 - DNA, 99 bp, Homo sapiens
gatgaggggcaactacgagacgctggtctccctggaatcaggaaacccaggcccaacggcaggtggatgcaagaagaaatgttccccaaaacgacccag

SEQ ID NO: 827533 - DNA, 100 bp, Homo sapiens
tcagttcctggaagctaaagagctcttcagggtctgcggaagagggagctgctgaaggagctgctaccagtcatcgggcagaacctccgattccagcgcc

SEQ ID NO: 827534 - DNA, 100 bp, Homo sapiens
cagacctgcagggttcgtggataataaactcaagcagcgagtcatccagatacattatggtgccgagtggtaacatgggagtgtttgatccaacagaaat

SEQ ID NO: 827535 - DNA, 99 bp, Homo sapiens
ccgcctcttccgccgccgggctcggggcctccgcagcgacaacatggaggccgtgaagaccttcaatagcgagatgtggacgagtgctcactagcagaa

SEQ ID NO: 827536 - DNA, 98 bp, Homo sapiens
caggacacaacaccgcggagccctgcaggcgattttgcaagaacgaggctcaaggatgtgagggacacagtattgacagctgaagaaatgatttacgt

SEQ ID NO: 827537 - DNA, 100 bp, Homo sapiens
ccccagggcccggggccgggcctcaaaggggaccgggaagcgaaggaagaagcgtccctccaggagccaggaaggaagtgtatctctggggaacgtgctg

SEQ ID NO: 827538 - DNA, 99 bp, Homo sapiens
tcgtgtcgtcgctgctggcacttcaggctctggagaccaggcacctggatgagatgaagtcggccatgcggaaaggccacaacctgctgaagaagaaag

SEQ ID NO: 827539 - DNA, 100 bp, Homo sapiens
ggggaagaagagttatccagaccatggggaaggatctgacaccgatcacaccctctagacaggtgatttggcttctgcacagttaggaggagcaccaaac

SEQ ID NO: 827540 - DNA, 100 bp, Homo sapiens
acccacagtgtggacagacttccttccgccctcactgcgaccgcgtgtaaatcggtgcaggtgaacggagccgccacgatcccggtctccagaatctccc

SEQ ID NO: 827541 - DNA, 98 bp, Homo sapiens
ttaattgatccagaagatgatgtaagagataatattttaaaatatgatgaagaaggtggaggagaagaagaccaggttggtacaggtcttgggcctac

SEQ ID NO: 827542 - DNA, 99 bp, Homo sapiens
tcaagatctaggtcagcatccagtttacttcactttaaggtcagcttttaatatcatgtcagcggagagagagaaactgaagcagctgatggagcagga

SEQ ID NO: 827543 - DNA, 100 bp, Homo sapiens
gcgggcggacttcgtcctggccgccaactcctacgacctcgccatcaaggctatcacctccagcgccaaaggggaggagccccagccccgcgacgaggag

SEQ ID NO: 827544 - DNA, 100 bp, Homo sapiens
cacctccctacagctccccacaggagtttgcccaggatgtgggccgcatgttcaagcaattcaacaagttaactgagggccgcccaataactccagtata

SEQ ID NO: 827545 - DNA, 100 bp, Homo sapiens
tgagagcattttggaagaggaaccacaagaaaatcaaaagaaacttttgcccttatcagtaacacctgaggtgctacagaatattttagaaacagaaaat

SEQ ID NO: 827546 - DNA, 99 bp, Homo sapiens
ttaagtggagtggtggatcagaccaaagatgggtggcagatgcctttgtgttccttgctgacctgcctgggcctcaacgtcttgttcctcactttgaat

SEQ ID NO: 827547 - DNA, 100 bp, Homo sapiens
tcttggtttgacactaaaaattgtcttggtgatcaaaaactcgtggaaagacttcatgcaatcccttcccactggaggcatgtgatgagaggaaatcacc

SEQ ID NO: 827548 - DNA, 98 bp, Homo sapiens
tcacggaacgtcagcaacgatcccgatgtcatcaagttgcaagagattccaaccttccagccccttttgaaagctcaaactggaggattataaggatc

SEQ ID NO: 827549 - DNA, 100 bp, Homo sapiens
accgcgtcgtggagattcccgagggagccacgaaaatcaacatcacggagatgtacaagagcaacaactatttggcagagtcacctgatatgaaaaagga

SEQ ID NO: 827550 - DNA, 98 bp, Homo sapiens
aaatccaagttacccatggaaaggtagacagattggaagtcgtcaacaagcgttttgttcgagtgacctttacaccaggaaaaactcctgttgatggg

SEQ ID NO: 827551 - DNA, 100 bp, Homo sapiens
cacccttggagaatgtgggctcatatccttttcagactacattttcctcacaactgttctttccagtgtcctggggaagtgtcgctacgtttactatggg

SEQ ID NO: 827552 - DNA, 98 bp, Homo sapiens
tttttcttcaaatactgttgaagtatatggttattcagggtgatcagtctggctgggtggtcccagtaaaaggatatgaacttgcagtcacccagcat

SEQ ID NO: 827553 - DNA, 98 bp, Homo sapiens
tgaacttaatacagcaagaaagaccatcaagtttaccagacaagattagatgcaccccggttggaaacaaagtccctgagcagctccgtgttaccacc

SEQ ID NO: 827554 - DNA, 98 bp, Homo sapiens
tacgcctacttctataaagtcatccagattgataaaggaagctggcaaacaagatccagagctggcttatatcagtagcaatttcataactggacatg

SEQ ID NO: 827555 - DNA, 100 bp, Homo sapiens
tgcgggcgggcggtgagcgcccatatgggggttctggagagcggggtgtgggaggaattcaagggctccacagtcgtcgagctgatgaagaaggaaggca

SEQ ID NO: 827556 - DNA, 99 bp, Homo sapiens
tcgggtcgccggagccgcgccccaccccgccagctccagagccacgtacgatttccagtgggttcaaggagatgtgtgtgaagttcagctgatggtata

SEQ ID NO: 827557 - DNA, 100 bp, Homo sapiens
gcggagtgggcgatgccagcgtgccagatccctaaagaagtggctgacatctttaacgcccccagtgatgatgaagagtttgttggcttccgagatgatg

SEQ ID NO: 827558 - DNA, 99 bp, Homo sapiens
aaaccctctcagatgatgatttcgtgaatgtagcttcaagccctatgagtttgtctctctggaatggctgcaaaagtggttggatgaatcaacacctac

SEQ ID NO: 827559 - DNA, 128 bp, Homo sapiens
cacaagctacaatccctcaaaaaagtgcttcagagtgagttttgtacagctattcgagagatccttatgtgaagattcatctgatgcagaatggtaagaggctgaagaagaaaaagacaacaattaaa

SEQ ID NO: 827560 - DNA, 101 bp, Homo sapiens
ctacgcattgattccatgtttgctcacaggtgctaactgccaaagaaaggaaaactcaaattgatgatagaaacaaattgactgaacattttattattaca

SEQ ID NO: 827561 - DNA, 100 bp, Homo sapiens
gaagccaacagcgaggctttcagttctttggaattccattcttttccttattcttctgatgtggatccagaaagggtgcttcattgaagaggtccaagtg

SEQ ID NO: 827562 - DNA, 121 bp, Homo sapiens
gcagcagtggtggctatgaacccagaggtcgtggaggtggccgtggaggcagaggtggcatggggcattcctagccgagtgtgacacagtggagcagaacatctgccaggagactgagcgg

SEQ ID NO: 827563 - DNA, 98 bp, Homo sapiens
gcggaagggggacagccgagcccggagcccggagcccgggcaagagctgggtatattactcgaggggtttttaaatattgtcaggaaaaagaaggaag

SEQ ID NO: 827564 - DNA, 100 bp, Homo sapiens
ttgacatctgacgacgtgaaggagcagatttacaaactggccaagaagggccttactccttcacagatcgaatccacattcatctcaatggaaggatcct

SEQ ID NO: 827565 - DNA, 100 bp, Homo sapiens
gtgcactccgcacctcggggacattattgcgcgtggaacggctgcttttggaaggttgaattgaccaaagcaatggtgatggagaagcctagtcccctgc

SEQ ID NO: 827566 - DNA, 100 bp, Homo sapiens
aggcgtgagcccccaagatttcacggtgtggcatgcagcattttggaaggaaaattgaagacgtgttcaagaaaacatgaacagaagcaaatgatgaaaa

SEQ ID NO: 827567 - DNA, 100 bp, Homo sapiens
ggtggaggaggtggaggaggtggaggaggcgccggaccgggggggattattcaagatcaggttgtagccattttcaacaaggatcactgatcaaaatttt

SEQ ID NO: 827568 - DNA, 100 bp, Homo sapiens
cgtacggcactgcagacccatctatgagttccatgggctgtacgaagagaaaaatctctccccaggcttcaacttcaggactgtccaacccattccgggg

SEQ ID NO: 827569 - DNA, 98 bp, Homo sapiens
tgcttaatgctgtcttaactagtgtaggaaaacggctcaacccaccgctgccgaaatgaagtataaggacgccaggaaagcatgtgcagatgcaactc

SEQ ID NO: 827570 - DNA, 100 bp, Homo sapiens
caaaaacaaaattctgaactcaggacttggcaagactcctctgatgatggcctgcacaaggaagaacctgggggtgatccaggagctggtggaacatggc

SEQ ID NO: 827571 - DNA, 118 bp, Homo sapiens
gagcgcctcgtaccacatttccaatttgctggaaaaaatgacatccagcgacaaggactttagcttggaagctcgaagtctggctgtggccatgggagatacagtagtggagcctgcc

SEQ ID NO: 827572 - DNA, 98 bp, Homo sapiens
ctggagccagtcttgaggtcctacatctccgaaagcaagctcttctagaagttgatttgggccaggcttagtcatctattggtatggatttatccagg

SEQ ID NO: 827573 - DNA, 98 bp, Homo sapiens
atgacatcttccgaatctacattaaagcttcagcgcctgctcctggtcatcactaaccagatttacttggagtacatgtgaaagaaaacgtcagtctg

SEQ ID NO: 827574 - DNA, 100 bp, Homo sapiens
tgcctcagcctccagagtagctgggattacagatgaaccaactagccctagcattgatcatgatattgcacatatccctgcctctgctgttatatcagcc

SEQ ID NO: 827575 - DNA, 100 bp, Homo sapiens
tatcagagggcattatgaacgaattctcaacccctacaacttattcctgtccggagacagcctaaggattgaagatctcaaacagacaaatcatggcttg

SEQ ID NO: 827576 - DNA, 100 bp, Homo sapiens
atgatcgatgaggtggacgaggacggctgcggcacgaggatgtggtcaactcagtggtcttcagtccccaggagcaggagctgctgctcacggccagcga

SEQ ID NO: 827577 - DNA, 100 bp, Homo sapiens
aaattccttatggatctctgagaaggcgcagcgttgaaagggaactttccgctgtactttttgccatacagaggtagaagaggatgaatcagcaatgccc

SEQ ID NO: 827578 - DNA, 125 bp, Homo sapiens
ctgtagcccacatctagtcttgtctgcactgacgtctgacaaccatggtgccacctatgccttcagtggagctgccaaggccatgtctgttccatcatcactgagccagtcggccattaatgcca

SEQ ID NO: 827579 - DNA, 100 bp, Homo sapiens
agaagagccatggaaacaggaggaagaattcccaagccaaagctttccaggctgtatgtttgaaaagggccccaggcagttttatgatgacacctgtgtt

SEQ ID NO: 827580 - DNA, 100 bp, Homo sapiens
aatggaaaatcgcttggttaaaacctgacacttttaacagtaacaaatgtggcaattattttggatctatcacctgtcatcataactggcttctgcttgt

SEQ ID NO: 827581 - DNA, 98 bp, Homo sapiens
aagaagaaatgctcatctgaaattcatcacctctctggagtcttcaaactgaccaagcattgaaaaggggtcctactgggcaatagacaccaatccga

SEQ ID NO: 827582 - DNA, 100 bp, Homo sapiens
ctgcaaagctgggagagactggaccagaccatgggcctgagcatcagaggccacaagaggaagctgaatgaagaggacgccgccagcgagtccagcaggg

SEQ ID NO: 827583 - DNA, 98 bp, Homo sapiens
ttgtccccaacttcatcacccctctcttccaaatcctgtagccataaatgtctggctaatggcatttacaggagtcaccaggagactaaagtccatca

SEQ ID NO: 827584 - DNA, 100 bp, Homo sapiens
tggtcctaaagtccagagacagagcactaattaggttagcatggcctcattgaaagaactagatcaaagactctttgaaaattacatcgagttgaaagca

SEQ ID NO: 827585 - DNA, 99 bp, Homo sapiens
gctaataatgcaattactgagagacaacttgacagcctactgaacttgacgcactggtatttggccatctatacaccattcttaccacacaattgacaa

SEQ ID NO: 827586 - DNA, 100 bp, Homo sapiens
gactatggttatgggggacaaaaaagacctttagaagatggagatgtggacgagtgctcactagcagaaaaaacctgtgtgaggaaaaacgaaaactgct

SEQ ID NO: 827587 - DNA, 100 bp, Homo sapiens
ttcagtgacgtttgttgatggcaacaaccctttccaagcagttcaagaaggctacatatcgaaatcgaattgtgagccaaaatctcagcacaagggacag

SEQ ID NO: 827588 - DNA, 100 bp, Homo sapiens
atgggcctgttcctggcccgcagccgccacctacccagtgaccatgatagatattgatgatgttaagaagttcaaaccgggttacctggaagctactctt

SEQ ID NO: 827589 - DNA, 121 bp, Homo sapiens
caaatattgtccaaaagaatggaagaaagaggccagcaaggtacgacaatacgaagtcacttggacctcgaagtagggggaaaactgcagtggaagatgaggacagcatggatgggctgga

SEQ ID NO: 827590 - DNA, 100 bp, Homo sapiens
ttaatgacctcttggagcagctgggtgcagagcgtgtaattaccttgaaaatggaaattcctggatcaatgccacctctcattcaagaaatgctggagaa

SEQ ID NO: 827591 - DNA, 100 bp, Homo sapiens
aggcagtatgattgaagtttctaagccagtttctattgctccaccccctccccctatgcctcagttgactccacagatacctctcacaggcttcgtggcc

SEQ ID NO: 827592 - DNA, 100 bp, Homo sapiens
gtgcatcaattcttcgacaggaaaaaaatttgctggatattgatgcgccagtcactgatactcatttcaaagaacttccaactcttctccactgtgcagc

SEQ ID NO: 827593 - DNA, 98 bp, Homo sapiens
caccaagaagatgaagaagattgtggatgccgtgatcaagtacaaggacaggtacatgtcccagagcaagcacacggaggcccgggagctcatgtact

SEQ ID NO: 827594 - DNA, 98 bp, Homo sapiens
tctttgttagttgacaaatacattttccgcattctctctataccctctgaagtggaaatgcaatgtaccttaaggtcctcttcctgatggatgggaac

SEQ ID NO: 827595 - DNA, 115 bp, Homo sapiens
gcaggcgccaattacagccagatgcctgcagggtccttcatcacaggatggttctaagcatatctttgagatggaaagtgttcggggtcagctccagaccatgctccaaacctca

SEQ ID NO: 827596 - DNA, 98 bp, Homo sapiens
ccagcaggctgaccccctcctgaggctggaccagctgcctctccgtctaggtgagggccagatgatgattcagatctgtactctcccagatactcatt

SEQ ID NO: 827597 - DNA, 100 bp, Homo sapiens
gatgaccttaaccctcaagccgaagccttcagtgggactcccccagcagatacattctcatattctaccttgtaaatactgttatttgtatatactgtaa

SEQ ID NO: 827598 - DNA, 98 bp, Homo sapiens
caatttgactgaagaacagaaggcgatcaaggccaagtatccgccagtcaataggaagtacgagtgttctttcagagcacggcttcggccccatcact

SEQ ID NO: 827599 - DNA, 100 bp, Homo sapiens
gggctgccagtgctaccctgagaaaggtggacgtgcacaacacacccatgacgccatcacagaggccgcccagttgatgaaggaagccgtggatgacatc

SEQ ID NO: 827600 - DNA, 98 bp, Homo sapiens
tagcttctgactccaggaacagccatgaactggggccctgccctgaggatgatgctgatgcagagattgaaggagccccagctgctcccttggatgtg

SEQ ID NO: 827601 - DNA, 100 bp, Homo sapiens
agaatgaccttccttgggaatttatggtcgatcgtcttcctactgtcttgttttttccctgcaacaggtggacccccaaaagtacaagggcatatttaac

SEQ ID NO: 827602 - DNA, 100 bp, Homo sapiens
gttcactctacctggatgcattttaactaatcctgaggacttcatccggtcaccatctacctattcttcaaatgctcctcagagaaattttgaaattgcc

SEQ ID NO: 827603 - DNA, 99 bp, Homo sapiens
cgggagatgccagccttggatttggcatgaggaaggagcatttctaccagaggcagcaccggctgcccgagccctcctgcccacagctggccacactca

SEQ ID NO: 827604 - DNA, 100 bp, Homo sapiens
cactgcccaattcccagaaagctgtcaaggctgcaagaaagcgtaagattgccattcgaaaagcccaggggaaaaatgtggaggccattcgggagctgaa

SEQ ID NO: 827605 - DNA, 100 bp, Homo sapiens
gggatgtggtttccgttaagctggacaacagccgcggcgagtcctttgcacatgttggcaacacacgcatccgcatcggcctccctgcccacaaagcgcc

SEQ ID NO: 827606 - DNA, 100 bp, Homo sapiens
tatcgacgtcgtgatccagaagtccagagctgaggactgcctgtttgcagttgcggagcaggagctggccaacctggagaagtggaaggagcagaacaga

SEQ ID NO: 827607 - DNA, 100 bp, Homo sapiens
gccttggggctgttctgtatgaaatgctgtatggattgtctgactgacagtactccacaagcttgcctgccatgggctgtcgggatgtccacgcagccac

SEQ ID NO: 827608 - DNA, 99 bp, Homo sapiens
gcggccggcgaaaggagctggtgcctgtgcaagttgttgaggtcacttatacatctcaagaggatctggtggagaaaaagtgcttagcaaaaaaatata

SEQ ID NO: 827609 - DNA, 50 bp, Homo sapiens
ggcaaggaaactggccacaatccaagtggtaagaagttcagaagcaagcc

SEQ ID NO: 827610 - DNA, 100 bp, Homo sapiens
accgagaccgtgaccgagagcgtgaccgagagcgcgaatatcgtcatcgttagaaggttgcacaccgatgctccagaattgtgagggagccatactctac

SEQ ID NO: 827611 - DNA, 100 bp, Homo sapiens
gaagaagcatcgttaaagtctctcttcaccctgccgtcatgtctaagtcagaggttctatttcaccaattggcatggaaccaacgacaatgagcagtcag

SEQ ID NO: 827612 - DNA, 100 bp, Homo sapiens
gccctgctccatggacagtggactctgctccaggccctgcaagagatgagagctctgcgtgcctcttgctgtgccctacctggacaaacccccaactccg

SEQ ID NO: 827613 - DNA, 100 bp, Homo sapiens
aatcgtctccaccgtcatggggggcggagacctgcttctgcagaaagccgtcattacacctgattttgaaaaaaaccactgtgttccaccatatagtgaa

SEQ ID NO: 827614 - DNA, 100 bp, Homo sapiens
atgagaaacagtgggtttgcactgaaacgaaatgtactggggagaaacttgaccgcaaatgatccatcacagatgtccagctcgccgctgtccaagaaac

SEQ ID NO: 827615 - DNA, 99 bp, Homo sapiens
gccggatccagcatctctccaccatcgactacgtggaggacgctccgtgcccgggaccctgccagcagaggagacaggtatatgctggtcactttcgaa

SEQ ID NO: 827616 - DNA, 100 bp, Homo sapiens
accctgagagtgaccggcgaggtgcacattggaggcgtgatgcttaagctggtggagaaactcggaaaggcagcaacaggtggaagctgttgagttggag

SEQ ID NO: 827617 - DNA, 100 bp, Homo sapiens
ggagcgcgagaaggatatcctgacggccatcgccgccgacctgtgcaagatcctgaggaggatgaaggggctggccctggaggccgagagtgagctggag

SEQ ID NO: 827618 - DNA, 98 bp, Homo sapiens
gtgcctttgaaaatcaacgacaacttgagcacagatgaacctctagtcttgctttgaaaaaatcattctgtgtaactcttgactgtgactaagttcct

SEQ ID NO: 827619 - DNA, 98 bp, Homo sapiens
aaatgcagcatctaagtggccaaaagtggaggatcctatgcctgaatctaaggatttgaagcctagcaacattgttgtgaaatcagactgcaccctga

SEQ ID NO: 827620 - DNA, 99 bp, Homo sapiens
ggagggcatcttcaaccacaaaggatatgttcaaggaatgagtgatttactttcccctcttttatatgtgatggaaaatgaagtggatgccttttggtg

SEQ ID NO: 827621 - DNA, 98 bp, Homo sapiens
gtggcaaggagcagaagcagcccttacaagttgcaaagatgttgatggcatggacctgggcaaaaaggtcagcatccccagagacatcatgttggaag

SEQ ID NO: 827622 - DNA, 100 bp, Homo sapiens
cagctcccggcactgctacctctgacccaaagcagattgtcagtggctgctatgcagcaggtgcagcctggtctctcactgagtctctactccacaaagg

SEQ ID NO: 827623 - DNA, 99 bp, Homo sapiens
cggcgccatggcagggcttgcaggaaatccaggatgagtcagctgtgttatggttggatgaaattcaaggtggaatctggcagtccaacaaagacaccc

SEQ ID NO: 827624 - DNA, 99 bp, Homo sapiens
agagatcaccgacaagatcaccacggacgagatgatcaaacgcctgaagctcatcatgtcactacagtgaacagtacaaattgtaagaagacaccacct

SEQ ID NO: 827625 - DNA, 98 bp, Homo sapiens
ccggtcccaggggaggcccccacctccccttctattgttctgtggcccaggttccctcggagacatggaggccagagaggaggtgcagttggtgggtg

SEQ ID NO: 827626 - DNA, 100 bp, Homo sapiens
tagaccagctccaacaggattccatggtagctgggatgttagggctcagatcgtaaagctgaaaattgaaatcatgaaagtagacaggactaaactgaag

SEQ ID NO: 827627 - DNA, 100 bp, Homo sapiens
aactcggcgccgccaaacagcccagctcgcgcttcagcgtcccggcgccgtcgcgccactcctccgaaccatggcaaaagttataaccaccgtactgaag

SEQ ID NO: 827628 - DNA, 98 bp, Homo sapiens
aagccagaagaggagtccttggccgcacccacgtggctggttcacctgcagcaggtggagcggcagattaagatgaggacggggacttggttgccttt

SEQ ID NO: 827629 - DNA, 100 bp, Homo sapiens
tttgagaattggtgtaagacatcacaatcccattattcagagcgcgtatggagtggaaacgcttgtagggtttcaccagcattccagttggcttttgagt

SEQ ID NO: 827630 - DNA, 100 bp, Homo sapiens
aaagttctaatctcttccctcctcctgttgctgccactaatgctgatgtccatggtctctagcagcctgaatccagacttcacagagaatgcagttgtct

SEQ ID NO: 827631 - DNA, 100 bp, Homo sapiens
cccagctgtacctctaattgtaaccttggatatgaccacattctgaagtgggaactcttccagctggctgacctggatacataccagggaatgctaaagt

SEQ ID NO: 827632 - DNA, 100 bp, Homo sapiens
gcccttcacgctccaggagctagaagccttgaagaaccaatgtactgatgtggggattaaagagggtccactttccccagcacaaacctcacaagtcact

SEQ ID NO: 827633 - DNA, 100 bp, Homo sapiens
ggagaaggcggaattcctgcgggatcatgtctgtgtgagcccccaggagctggagacgttgatccagccaattgcatgatttctggcgtttggattactg

SEQ ID NO: 827634 - DNA, 100 bp, Homo sapiens
gaaagtgaccaatctacatctaatgctacaggtgcgggcattctatgtgaacgtgctgaatgaggaacagaggaaacgtctgtgtgagaacattgccggc

SEQ ID NO: 827635 - DNA, 100 bp, Homo sapiens
ggttattggaattctgttcggtgtttaagccagcaatgccaagatctgttgtggcaaatgaagatgtgacacagattgtggagattctccattctggacc

SEQ ID NO: 827636 - DNA, 100 bp, Homo sapiens
aacaatccgtctggatcacggatgtaggaagtggtgtaaaaggaagagaatgtctcctggacctaattgccacaatgctggtactacagtttattcgcac

SEQ ID NO: 827637 - DNA, 100 bp, Homo sapiens
aaccacctttgactcttcctaagccttctctaattcctcaggaggttaagatttgcattgaaggccggtctaatgtaggaggactcagagagagtaatga

SEQ ID NO: 827638 - DNA, 100 bp, Homo sapiens
ctccgctggaaaaagggacaaaagattgcccaaaagaatcagtactatactggcaattgctggagaagattttgcaattgttgcttctgatactcgattg

SEQ ID NO: 827639 - DNA, 139 bp, Homo sapiens
ccgagatgtccggctgcagcagcaagtcccatcggaggacctccctgccctgtataccgagggaacagaaacttgtggtggagaatgttgatgtgttaacacaaatgaggaccagctttgacaaaccagaccagatggc

SEQ ID NO: 827640 - DNA, 134 bp, Homo sapiens
ttcaacagaataatgctacaaagacatttcgagaattttgtggacctgctgatcctgaaacaagattttggtgaagcagtcgcccatgcttgtagcgtacgacaatgcggtcaaccttagctgcaagtattcct

SEQ ID NO: 827641 - DNA, 100 bp, Homo sapiens
aagaaaccaagaccacctcctgctctgggaccggaggagacatcggcctctgcaggcttgccgaagaagggagaagctccaccatgaggcgaggtggatg

SEQ ID NO: 827642 - DNA, 113 bp, Homo sapiens
cactgaggctctggaacttctgcccagctctccttgtgtcgtgtgggagccaatgggagatgggaagaaaatcatttccttggctgataaccatatcctgctgtgggatttac

SEQ ID NO: 827643 - DNA, 107 bp, Homo sapiens
ccttgacacggatatcacctttgccactgacattgcagagctgtgggctgtgttccacaagttcaaaggtttcccaacagtgatgtcacaagattgaccacattgat

SEQ ID NO: 827644 - DNA, 100 bp, Homo sapiens
tggaagatgcagatgagaaggttcagttggcaaaccagatatatgacttgagtaaagccaatcccagctgaaggaatcaagtcaaatccttccaagcggc

SEQ ID NO: 827645 - DNA, 98 bp, Homo sapiens
ggggagcagagcagcaactcacccagcacacaaaatggatctcttacgggccccgtgaagcacgtgtacagagtcctgcagtgtcaggaagaagagct

SEQ ID NO: 827646 - DNA, 98 bp, Homo sapiens
tgtgcttttccagtttgcaagttttccacatatggtgctttctcttcatcagaagtgatcctgcagcatatcctgacatggagtctgatatacgttca

SEQ ID NO: 827647 - DNA, 100 bp, Homo sapiens
gctggggagtacagctgtgaggctgggggccagagagtctccttccacctgcacatcacaggtgagccagccatgagagggtatcttgtggccatattcc

SEQ ID NO: 827648 - DNA, 99 bp, Homo sapiens
gctcagaagagttcttctccagcacctgcagacatagctcagacagtacaggaagacttgaggggtcgtaagagtgaggctgaaaagctcttcttgaag

SEQ ID NO: 827649 - DNA, 50 bp, Homo sapiens
ttcgactgctagagccgagcgaagcgcagttaacatcactgacctgagcg

SEQ ID NO: 827650 - DNA, 100 bp, Homo sapiens
gccggccccggcgaggaggcgcggaaccatggccgatgggggcgagggcgaagacgagatccagttcctgcgaactatgcctgaggaaacccagacccaa

SEQ ID NO: 827651 - DNA, 100 bp, Homo sapiens
accattgaagcttgagagaaaagcccccaaaagcagctattcaggcgcatattaaatttcctattgactacccctattcaccacctaccttcagattctt

SEQ ID NO: 827652 - DNA, 100 bp, Homo sapiens
ccagtttgagccatcggatctaagatccaaaagttgtggaatacagactcacgttcaaaggtggctgattgcagaggacatttaagttgggttcatggtg

SEQ ID NO: 827653 - DNA, 100 bp, Homo sapiens
tctatgatgggctcttcccccgcgtgcagcagtggagccaccagcagcgggtgggcgacctcttccagaagctggttgacatcatggacatatgtgagtc

SEQ ID NO: 827654 - DNA, 100 bp, Homo sapiens
gttctggcccagctggggctgggctttagctgtgccaacaaggaacgtcaaggtcgtgggaaataaaaggcagttctacacagactgcagcaacggttgc

SEQ ID NO: 827655 - DNA, 98 bp, Homo sapiens
gggagcagaaatttctacagttcaaacttggagctcgcataacaggtgtgcaactgaggaacatggctcaagaaactaatcacagccaagtgcctatg

SEQ ID NO: 827656 - DNA, 99 bp, Homo sapiens
aattctccaacaatggaggccagtggctggtctcaggtattgttgcagcatctggcagtgagactgaggatgaggacagcatggacattcccttggacc

SEQ ID NO: 827657 - DNA, 104 bp, Homo sapiens
gggtggagaggcgcatgtggacgtgcacgggatccacttccgcaaggaccctttggaaggccgggtgggccgaggtggtgatctttgtgaagtctgtgcagcgg

SEQ ID NO: 827658 - DNA, 100 bp, Homo sapiens
tacaccttagaagtgcttaaggaagagtgatgaaggggtccagattttatggaaatgagctcaagaaagaaaagcaagtcaaccaacgaattgaaaatat

SEQ ID NO: 827659 - DNA, 98 bp, Homo sapiens
gcgcgagcgccccgccatcgtcccgatattaaggctaagacatactgcatttgtaataccaaagaaaaacgttcctacctcaaaacgtgaaacttaca

SEQ ID NO: 827660 - DNA, 98 bp, Homo sapiens
tgagactgagcagacgcctccaggatctgtcggcagctgctgttctgagggccctcgctcaggatgcaagattccggctggagatgccagagtccgtg

SEQ ID NO: 827661 - DNA, 98 bp, Homo sapiens
tcactttagcagacagcgtccacaatgtgaatcctacagtttccagggtcctcagaagtggaatacagagcggaggtcggtcagaatgcctatctgcc

SEQ ID NO: 827662 - DNA, 99 bp, Homo sapiens
cagtgacaccatgtcagcaaaacttcttttgggcacccagtcagcttgaagagtttcaaatggaccctaccactgagaaatcaagatggcagtctacta

SEQ ID NO: 827663 - DNA, 100 bp, Homo sapiens
acgagtacaatgacatcaaggatgtggggcagatgctgatgggcaaactaggaagcagaaaacttggtggccacagtggtccctacccatctggcagctg

SEQ ID NO: 827664 - DNA, 100 bp, Homo sapiens
tgatgaccgccggggcatccagcaactttatggtggcctgacggagcaagagctgatggaacagctggaacactgtgagctggccccgccggctccttca

SEQ ID NO: 827665 - DNA, 100 bp, Homo sapiens
cgcgcgtctgcgggccccaaattgcgtaactccaaggacttttcggagactttttgcccaaaaccgagaacgaggtgccctcgccagcctcctctcatca

SEQ ID NO: 827666 - DNA, 99 bp, Homo sapiens
ggctccagacaaataaacatggagtccatcttccacgagaaagaaaaccagcattggaatcagctgattcaggatgctcagaagcgtggtgccattatt

SEQ ID NO: 827667 - DNA, 100 bp, Homo sapiens
tgaactgggtgctttatataggttggttgaatctggcgatgtggaacccatggatatggagggctgactatatacaccatgttttttcctggcacatcac

SEQ ID NO: 827668 - DNA, 98 bp, Homo sapiens
ctgggctacggactatgggcgaatagctctgaccacccggcgaagcatgttacaccagacagctatattccatgccttgcagacctgtgcaaagcact

SEQ ID NO: 827669 - DNA, 100 bp, Homo sapiens
gttatagccagtgtgcagctccctaatgatgatgctcagtttgatgcgtcacactacgacagtgagaaaggaggttgcacaccgatgctccagaattgtg

SEQ ID NO: 827670 - DNA, 98 bp, Homo sapiens
ccagaagtccttcctgggtggaaaggaatgaggattaaagcctgtggtttccacagaagcaccacctatcatatttgccacaccaactaaactgacct

SEQ ID NO: 827671 - DNA, 50 bp, Homo sapiens
gcaaaatcgagcgggccattggtgaggtccagagatatatccagagagga

SEQ ID NO: 827672 - DNA, 100 bp, Homo sapiens
accagtctcggcaaatattacacttctctccttgtttatggctacaaatgatttgatgacggaactgcagaaagattccatcaagttggatgatgatagt

SEQ ID NO: 827673 - DNA, 100 bp, Homo sapiens
aacaggcacctgaagaagtttcagaagccagaagagaaaacaaaagaccaacccttgagggaagagaattatctctaagcactcccgatttggaaaaaca

SEQ ID NO: 827674 - DNA, 99 bp, Homo sapiens
aggaggcagtaaattcttcagctgctcggacagatgaagctccccaaggagctgcaggaagccattaatttgctagaaccaatgacaaacgaccccgtg

SEQ ID NO: 827675 - DNA, 98 bp, Homo sapiens
ttcttgagcaccaacctgacacttaaaggaagtgctcattggaggcaaggatggaacattactgtggacctggtcattggccctaaagggatccgcca

SEQ ID NO: 827676 - DNA, 100 bp, Homo sapiens
ggatggggtgaactaccttcacacaaagaaaattgctcactttgatctcaagaatatactgatgataatgctctgattcctaagaattcttctgtaattg

SEQ ID NO: 827677 - DNA, 98 bp, Homo sapiens
caaggacaagagccatggatggtggagggagcgaatccacacgagagctctccaggcggttcaggaccatcatcctccatagccatagcgggcaccaa

SEQ ID NO: 827678 - DNA, 100 bp, Homo sapiens
atggctgaaggaaaacctccttatgctgatatacatccaatgaggcggagcgtgctttggacaccatgaattttgatgttataaagggcaagccagtacg

SEQ ID NO: 827679 - DNA, 98 bp, Homo sapiens
ggcctgcttcagcagagtgagcaggtgccagaaccctgtggagcatcatgaactgggaagagtagctgagccccagagcctctctggaagagaaagga

SEQ ID NO: 827680 - DNA, 100 bp, Homo sapiens
aacctttctgaactcgaccgcctgctgctggaactgaacgctgtacagcataacccgccaggcttccctgcagcaactattggatgattatccgaaatgt

SEQ ID NO: 827681 - DNA, 100 bp, Homo sapiens
gagttaaaagaagctctggatgggaacagagttcagaggcagcagaaactggagttagtgaaaatgaagagaaccctgtgaggattatttcagtcacacc

SEQ ID NO: 827682 - DNA, 100 bp, Homo sapiens
agccacataggctgttgattgcttgaaatgtgactagtctgaattgagaaatactggtaaaggagctggaagtgcgaaaattgatgcatgtgagaggaga

SEQ ID NO: 827683 - DNA, 100 bp, Homo sapiens
tcttccaacaggtcgtcagcaagatggacaacatcagccgagccgcggggaattctgtagcaaagccaatacaaaaatcagctaaagctgccacagaaga

SEQ ID NO: 827684 - DNA, 100 bp, Homo sapiens
gagcgaaggcccaggagctgatccaggccaccaaccaggagggcatcctggctgtttcacccgtggacttgaacttgccattggactgagctctttctca

SEQ ID NO: 827685 - DNA, 100 bp, Homo sapiens
ctgtggtgcggcaccggcgagccagcggagcacagtgggctttctcctcaagatgacactaattctggaatgtcaattccccgagtaaatccctcggtca

SEQ ID NO: 827686 - DNA, 98 bp, Homo sapiens
ggacctccatgcctttgagaacctagaaatcatacgcggcaggaccaagcaacagacatggacatcttccagcaacagatctcgagaagacagctggc

SEQ ID NO: 827687 - DNA, 100 bp, Homo sapiens
caattctaggggcttatagctccaataatggaatgttttttgctccactcaagcctgttagaatcaccatggaatacagctccagtgggaaggccactgg

SEQ ID NO: 827688 - DNA, 100 bp, Homo sapiens
gagaagaatttttatcaagagcaccctgatttggctaggcgcacagcagctgctgagaaactaggtgaaactgagaaacttagtataatgattgaagaat

SEQ ID NO: 827689 - DNA, 98 bp, Homo sapiens
cgcccaccagttcgcccgtccccctgccccgttcacaatgcgtgagattcaacattttggggtgaaaatcagcatagttgaacctggctacttcagaa

SEQ ID NO: 827690 - DNA, 100 bp, Homo sapiens
cacagagaccctgttaaatacagtcaaagataatcttcctattcagattcagaaagcgtggatacccatcaacgaagttttgatattggaattcagattg

SEQ ID NO: 827691 - DNA, 98 bp, Homo sapiens
gccagtcaataggaagtacgagtgtctggtccatcgaactcatatgtcatcctgtcgggtggataagccctctgagatagtagatgttggagataaag

SEQ ID NO: 827692 - DNA, 100 bp, Homo sapiens
gagaagggaaaccggttcttcctctcaggggccaccacactggtgtgctgcgtttagatgccaaccatattacctcagtccccgaggacagttttgaagg

SEQ ID NO: 827693 - DNA, 98 bp, Homo sapiens
ggtggacgagcaggaagctgcggctgagtcgtgatattctaatggagttcctgctcaatgtcaccacagcaccagaatttcgtcgttgggaagtagct

SEQ ID NO: 827694 - DNA, 99 bp, Homo sapiens
tctgagccagagaataacaataaaaaacccaaaacctcaggctcccaggtccaagacaagctgctgctatctgcgtgccacttactggtctcactggcc

SEQ ID NO: 827695 - DNA, 98 bp, Homo sapiens
agaagaccgaagcgttcgtatctggaaggagctatcgaaaaaccttgaactgagtactaacagtttccaacgacagttgcttgctgaaaggaaaaggg

SEQ ID NO: 827696 - DNA, 98 bp, Homo sapiens
gcagggctccccgtcggagtgcactgcgccggacacttcaagtacttccgaagatcccagtttacagcgatcagtttcggttgcaacgggactgaaca

SEQ ID NO: 827697 - DNA, 99 bp, Homo sapiens
ttgatcgcctggactgtgcagtatttccagtctgtctcaggcatgttatgttacccagagaactttccaaacaagtacctaaaactcatctgatgtctg

SEQ ID NO: 827698 - DNA, 100 bp, Homo sapiens
tggagaatatcataaagatgacccaagttccttcagattttcagaaactttctccctttatccacaggttcggactaaggatcaccgctttgaaagtgtc

SEQ ID NO: 827699 - DNA, 100 bp, Homo sapiens
cctgtcccttatctgatgggccttcagtcaaaagaaggaactgaccgttctaaactagaacttcctcaagaggtatgtcttgaaaaaatggaagatattc

SEQ ID NO: 827700 - DNA, 154 bp, Homo sapiens
aggctcggagttggcattcatcattttctaatcatcagcatttacatgacagaaatcacctatgtttacagcgacagtattgcctgtcagggcacccaaccttaccatgcaatgtgctcaaattcaaatcaaccaccattatgttggactgcgg

SEQ ID NO: 827701 - DNA, 99 bp, Homo sapiens
tgagcctgggggacaggtgagccgggggacaggacaggcgacactaacaggtgaagatctcgggagaccatgactaagaaaagaattgctgtgattggg

SEQ ID NO: 827702 - DNA, 100 bp, Homo sapiens
acggcaacgcgcttatcagcgctatgagaagaatgaattcttccaaaacaaaactagaactgcaaaagcacctgacgacattaaccaatcaggagcaggc

SEQ ID NO: 827703 - DNA, 100 bp, Homo sapiens
atgcatgaacccttccctatgtccaaaaacgtttttcctgataactggaaagttcctcaagatggagactttgactttgctaggcagctggaagagaaag

SEQ ID NO: 827704 - DNA, 100 bp, Homo sapiens
ctcctctttcaacaagacttgtatctgtgcaagaggatgctgggaaatctcctgctcgaaatagcaagtctggaaaagtttgaaattccagtaaaaattc

SEQ ID NO: 827705 - DNA, 100 bp, Homo sapiens
agcagacgtttttgaatcaactgagagaaattacggggattaatgacacccagatactacagcaagccttgaagattacatcgtcagcccaaacatctcc

SEQ ID NO: 827706 - DNA, 99 bp, Homo sapiens
tggaggacacacctaaacatgtggaatcccaatgccgggcagcccaatggatccaatggtgatgaagagacctcagttgtatggcatgggcagtaaccc

SEQ ID NO: 827707 - DNA, 145 bp, Homo sapiens
agaaaaagctcctgaattgcccaaaccaaagaaaaacagatgtttcatgtgcagaaagaaagttggtcttacagcaaaatgatgcttcaacacccaggccaggtctctgcctcggaagtgagtgcttctgccatcgtcccctgcc

SEQ ID NO: 827708 - DNA, 99 bp, Homo sapiens
tgggcaaggatgtggtcgtggaactaaagaatgacctgaggtccctttctagagataggagaagagagagatcgctgtctcgggagagaaatcacaagc

SEQ ID NO: 827709 - DNA, 100 bp, Homo sapiens
aggagtactactttgaacagcatagagccaatcacattttgcacaagggcagtcaccatgaaagcttggctttgaattggtggagacgccgaaaagctcg

SEQ ID NO: 827710 - DNA, 100 bp, Homo sapiens
agtgagcgctatgacaaattgaagcctcaaagccaatggacttaaaattatgcactggacctatccctaatactacacagctgtgccacattccttgtcc

SEQ ID NO: 827711 - DNA, 99 bp, Homo sapiens
gagcttgagcacctgaccaaaaagatgctgtatgacatggaaaatccacctgctgacgaatactttgtaatagctcttcaagtctgcaataaaaaatgg

SEQ ID NO: 827712 - DNA, 98 bp, Homo sapiens
agatatttagcattagcatcattgcccaaggcctccctttttgtcgaagacgggaaggatctgagtctctccctgcggagacagccctgaagaactcc

SEQ ID NO: 827713 - DNA, 98 bp, Homo sapiens
tagtgatacactcaagctgttgaaaatgagcagctgtcctcatgtctctccagcaggtgcagattcactttataggaacagcttcagcttcagtgatg

SEQ ID NO: 827714 - DNA, 99 bp, Homo sapiens
cggagagcggcgaggcggcagccacaggaaacttccattttagaagaatacagtatcaattggactcagaagctgggagctggaattagtggtccagtt

SEQ ID NO: 827715 - DNA, 100 bp, Homo sapiens
gaatagcttgccaaaccaggttgcatttcctgaaggggaagagcaagatgcagtcagtggagctatccagacagagcagctaccctcagctctagctgat

SEQ ID NO: 827716 - DNA, 128 bp, Homo sapiens
gatggcccaggaatttataccagctgtagcaaaagtgggaagccaagcctttcctcccggagaggccattcccctggtactggccctgtttgcctttgttggcttcatgctgatccttgtggtcgtgc

SEQ ID NO: 827717 - DNA, 100 bp, Homo sapiens
ccgttctccctccagaacatacacttacatctctagataacagtctgcactttcacccgtttcagaatcatctcccctgccccacaaacatgaaagaaaa

SEQ ID NO: 827718 - DNA, 100 bp, Homo sapiens
gcgagtgcttctgaaacgtcagctgcgctcccctaggagtgctgagcccgcggaaccgcagccatgccgagtgtttaagacggatatggagctggaggtt

SEQ ID NO: 827719 - DNA, 100 bp, Homo sapiens
aaagaaacaaggggccagggcagagggcacctgagcggctggagagcctgttggagaaacacaaagaggatcaaaatacttgctggatggtggactcaga

SEQ ID NO: 827720 - DNA, 99 bp, Homo sapiens
aggagtaagagcccatagcagtctgccagacaatagagcatatggagcaaggcctgtcattacggtggatgtctccatcttcctcccgggctccatcaa

SEQ ID NO: 827721 - DNA, 100 bp, Homo sapiens
ctgatgacataaaaatccacaccctgtcctacgatgtggaggaggaggaggagttccaggagctggagttcctctgtgacgagggtgcaggtatctctgg

SEQ ID NO: 827722 - DNA, 98 bp, Homo sapiens
attaagacactttcaagaaaatcctttgtattacccctgaattgtacccttgtttcagagcctaacaggtggtttttccccatcatcggccacatggg

SEQ ID NO: 827723 - DNA, 99 bp, Homo sapiens
gaaggaaaaggaggaattcgccgtgcccgagaatagctccgtccagcaggtatgcaaccactcatgtattcggttcaggaagcattaaatgccagacca

SEQ ID NO: 827724 - DNA, 100 bp, Homo sapiens
cccagcttggttgcacttgagaaaattaatgtggcagatgagtataggatcaaaccagtggaagaggtcaaatacatgaaaaatggggcagaagaagagc

SEQ ID NO: 827725 - DNA, 98 bp, Homo sapiens
gcacgatgcttcatccaggtctcctactaccactgcatctgtgtcagcaacagcagctccaagggatggtcttttagtaagaacaaaaactgaagata

SEQ ID NO: 827726 - DNA, 99 bp, Homo sapiens
tgtggtgccggcactgcggccatcttgcagttcctctgcaaagggtgtgctctgtgcaactcccctcatttttatcattccatcagcctgttatctgaa

SEQ ID NO: 827727 - DNA, 100 bp, Homo sapiens
agtctggatgctggtgccactaatattgggcaagtgtccagagaatggctgggatgaaagtacacttgaactctttttacatgaacttgcaatcatggac

SEQ ID NO: 827728 - DNA, 100 bp, Homo sapiens
agagatcaaaccacttctaaatgataagaccctatcagatttggatatgtccttcatatttgattggatttacagtggtttcagcagtgtgctacagttt

SEQ ID NO: 827729 - DNA, 100 bp, Homo sapiens
ggaggattgattgagcccaggaggtcgaggctgcactgagctatgataacgccactgcactccagactgggcgacacaagacggggtttcatcatgttgg

SEQ ID NO: 827730 - DNA, 99 bp, Homo sapiens
ttgctacctcttgggtgaactctagcaattacaagacactgtcacatgaacccaaagtccttcaagagggtctccttcagttggactccatcctctcct

SEQ ID NO: 827731 - DNA, 98 bp, Homo sapiens
taccagggagagcagtgaactgctccgcatcgagcagaaggacttcaaggcactatgggaggtgcatacattcagagggccacactggtgtgaatact

SEQ ID NO: 827732 - DNA, 100 bp, Homo sapiens
tgttcgtccgcggagatctctctcatctcgctcggctgcgggaaatcgggctgaagcgactgagtccgcgatggagccccaaatccgccaccattccgtg

SEQ ID NO: 827733 - DNA, 98 bp, Homo sapiens
aggagaacattctcagagccagtgaatcaggtctaggaaaatcgactctcataaacagcctattcctaactgatctgtacccagaaagagtcatacct

SEQ ID NO: 827734 - DNA, 98 bp, Homo sapiens
tattatagacaacaagcagcctattatgcccagacaagtccccagggaatgccacagcatcctccagcacctcagtttcgagaggcccgtgccatgag

SEQ ID NO: 827735 - DNA, 100 bp, Homo sapiens
cacacctttatttgtggctgctcagtatggcaagctagaaagcttgagcatacttatttcatcggttggtgaggtaacatacgtggagctcttaatggac

SEQ ID NO: 827736 - DNA, 98 bp, Homo sapiens
gctgccgcatggcgcccttgcagaaggctcaggtgacatgtacagccatgatgggaatactgatgagccagaatgggtaaagacagagcgagagcagt

SEQ ID NO: 827737 - DNA, 100 bp, Homo sapiens
tgttgatccttaacgagctggtccgaatcagcagcatggagggagaggtaacagttgacaaatgggaacctttgttgaacaacttggggcatgtctgcag

SEQ ID NO: 827738 - DNA, 100 bp, Homo sapiens
agcatgtgctcagtcagcctcaacaagtcagaaaggtaccattaggcttctcagctccaccagatggcctcccccaagtcccccacatggcatactgtgc

SEQ ID NO: 827739 - DNA, 100 bp, Homo sapiens
ctgtacctgcagctgctgcagctgctgcacagaaattaatgcgaacagacagacttgagtgctgaagctgctgaaagatggcagaagaagtggtggtagt

SEQ ID NO: 827740 - DNA, 98 bp, Homo sapiens
gataccttaggatacaacatagaacctattatgctctatcaggcaggaatgggccacttgtgtgtaacaaaagatggactgcgcttggaaggggaatc

SEQ ID NO: 827741 - DNA, 98 bp, Homo sapiens
acccctcacctcgatgcagccagtagcttggatccttgtgggcatgatccataatcggtttcaagatgcctgaggaaacccagacccaagaccaaccg

SEQ ID NO: 827742 - DNA, 100 bp, Homo sapiens
aaggcatcggaatgggaaacataggtcccgcaggcttattatgcccgtgatgctctggctaaaaacctctacagcaggttgttttcatggttggtaaatc

SEQ ID NO: 827743 - DNA, 99 bp, Homo sapiens
ctcacttccccggggtgtaataatgttaactgaggctcttcttccggaggcattaccccgtgaacagtgtgattttctgtgccttggacccacaagaca

SEQ ID NO: 827744 - DNA, 99 bp, Homo sapiens
agaatccggagaagtttgtgtaccctgtcccatgttttggagtgtcacagaccaaagccatcatgactctggtctctgggattccaatgggcccacccc

SEQ ID NO: 827745 - DNA, 100 bp, Homo sapiens
gctgagggtggaggccggattgtactgtatggggactccaattgcttggatgacagtcaccgacagaaggatgatgaagatgatgaagaggaagatgaag

SEQ ID NO: 827746 - DNA, 100 bp, Homo sapiens
agagaggaggtccgcgagatcctaggggaccaggacttcttccagtggaaatagggatccagccatccgtgggtcaggaggaatggagactgtaccttcc

SEQ ID NO: 827747 - DNA, 100 bp, Homo sapiens
ccctccctgggcagagcaaaaccttgagcctgtgtttggattttgtttctgggcctaagcctaagatgtataatttcaccagtttcactgtgagcctcaa

SEQ ID NO: 827748 - DNA, 100 bp, Homo sapiens
caagacggccgagagccactgcgtagaacgtcatgacatgaataccttaagcctgcccctgaacatacgccgaggggggtcagacaccaacctcaacttt

SEQ ID NO: 827749 - DNA, 100 bp, Homo sapiens
aagaaagaaactgattgacattcaggagaaaattcaagcattgcaaacggcatgccctgacttacaggggctatcaacagcaggacgcccatgaattcat

SEQ ID NO: 827750 - DNA, 100 bp, Homo sapiens
ggcccaacagcaacaggtctcaattggcagctggtggaatttttgaagaaaatggaatctcgaggccccctttcgtgcgacacggttctgaagatcttct

SEQ ID NO: 827751 - DNA, 98 bp, Homo sapiens
gagagtggaaaatgcttatcacatggaagcagaggttatcaatactctggctgaccatcatcatcgtgggactgactttggtggaagtccttggttac

SEQ ID NO: 827752 - DNA, 98 bp, Homo sapiens
cacctctgccatcctcgcctcagtcaaagaacaggaattcaaacccattggtaccgcgcacaacagaagggcccagccttttgttgcagctgcaaaca

SEQ ID NO: 827753 - DNA, 100 bp, Homo sapiens
tcctgagtagctgggaccacagctacctgaaaacttttgttcctatgcataaagatgtctttggtggacttgggaaagaggttgctagaagcagcaagaa

SEQ ID NO: 827754 - DNA, 100 bp, Homo sapiens
gtgatagttgcttcaggaatcttgcagaagaccgcagtgggataaatctcaaagatctcgtacaagatccttctttggcaattgaaggaacagactaaaa

SEQ ID NO: 827755 - DNA, 100 bp, Homo sapiens
cgctatgctgctgtaacacagtttgaggttatcaatactctggctgaccatcatcatcgtgggactgactttggtggaagtccttggttacatgtcatta

SEQ ID NO: 827756 - DNA, 100 bp, Homo sapiens
cagaggcgacatgttagtacagcagaagagccctggtacctgacagtgtaaagaaggagctcctacaaagaataagaacattccttgctcagcatgccag

SEQ ID NO: 827757 - DNA, 100 bp, Homo sapiens
tccacactgcgcttgttttcctgggattgaatgctggtgggaagcctcagttttatgaccctgtggagccagtggactttgaaggacttctgatgacaca

SEQ ID NO: 827758 - DNA, 100 bp, Homo sapiens
catggaggagagctactactgccgctgccaccgtggctacactctggaccccaatggcaaaacctgcagccgaccaggagctgcattatctattctagac

SEQ ID NO: 827759 - DNA, 98 bp, Homo sapiens
tgatacccaaacttccccagagccaggcacaaggatgaacattctgccgaagagaacaagacgtgtgaagactcagtttcagagtcaagtggtgagat

SEQ ID NO: 827760 - DNA, 98 bp, Homo sapiens
tgaaactcagtgagagcccagagcctggcaggagtccagaaagccagatggctgaacatcaggtacgcagattttctgaggcattcttttgttttgag

SEQ ID NO: 827761 - DNA, 100 bp, Homo sapiens
cgtacagagatggagaacgaatttgtcctcatcaagaaggcgcagttgtgtagcagttgagtaatgctggttagctgttaaggtggcgtgttgcagtgca

SEQ ID NO: 827762 - DNA, 100 bp, Homo sapiens
tctttttattgagaaaggagctgtttccagtcatgaggctgtggtggatctttctggaattacatgaatgacagtcttcgaaccaatgtgtttgttcgat

SEQ ID NO: 827763 - DNA, 98 bp, Homo sapiens
gtgatttcccagttagagcaagggacagagccatggatcatggagccaagcattccagtaggtacctgtgcagcggctctaattagaggaaatcgtaa

SEQ ID NO: 827764 - DNA, 100 bp, Homo sapiens
ctcaggccagtcgcctccaggccaagagggatccttcacccgtgtctgtcgtggcattcctggtggctttccatcagaacaagcagctcatcggtgacag

SEQ ID NO: 827765 - DNA, 100 bp, Homo sapiens
aaaatattggggccatttagtaacttctttgcaaggaaagccatcaccaagtcgggcctccagcacctggccccccctccgcccacccctggggccccgt

SEQ ID NO: 827766 - DNA, 98 bp, Homo sapiens
tgatggctgatcttgaaggtttacacttgtcaacttcctcttcagtcatcagtgagatatctgaagagattataggatcacccatcccagaacctagg

SEQ ID NO: 827767 - DNA, 98 bp, Homo sapiens
ggacaatcgcactttataccacctgcgattactaatccagcaactatcacaagaatactccttagccacttcaattgggataaagagaagctaatgga

SEQ ID NO: 827768 - DNA, 100 bp, Homo sapiens
tatgaccacaaacagccatcaagtagtgaccaaagatggagtctatgtccttgacttggcggccaaggtggacgccactgccgactacatctgcaaagtg

SEQ ID NO: 827769 - DNA, 100 bp, Homo sapiens
agacgcacgcagctgactttgtcttctccgcacgactgttacagaggtctccagagccttctctctcctggttatcaatactctggctgaccatcatcat

SEQ ID NO: 827770 - DNA, 99 bp, Homo sapiens
tgtatattgaggactgggtcattgtccacagaagtgagcctttgaatacatctttatcaatgaccagtgcagtacagaactccacatatacaacttccg

SEQ ID NO: 827771 - DNA, 100 bp, Homo sapiens
ccgcggccttcgttcctcccagaaagtgggagattttgataagatctggcgagaacactgtgaggatgaagaaactctttgtgaatatgccgttgcaatg

SEQ ID NO: 827772 - DNA, 99 bp, Homo sapiens
tttgaacaaactcgaagaacagctgtggaaagaagttgcaaaacactggaagctgttgtgaaggcagagcagcatctgctgaagagacagaaaccagcc

SEQ ID NO: 827773 - DNA, 98 bp, Homo sapiens
gaactaacgcattcaagtagtaacaagattgatgtggaattagaagaagctattagaagaagtcttgaggaaatgtaattaaagatattaccacacaa

SEQ ID NO: 827774 - DNA, 100 bp, Homo sapiens
tggaaggtagacatgctcaagctggatggctgcttctccacccccgaggagcgggcccaggtaaaggcatgacttcctggcaccacagggaaaatcgggt

SEQ ID NO: 827775 - DNA, 100 bp, Homo sapiens
acgacagaaaactgcagttcatgtgctaaacttttggtgcttaaatccagctgtgtgatggaagtaatatggatcaagaatatggcactgcttatacacc

SEQ ID NO: 827776 - DNA, 100 bp, Homo sapiens
ctggccaaagcctgcccagacggctcacctgtgcgggatggaacaaaaggttgcagcattgcaggaagagaaaagtagtttgttggcagagaatcaggta

SEQ ID NO: 827777 - DNA, 121 bp, Homo sapiens
gacccccaaaccaacagagccatcgatagaaatgagctttttaacttcatcactggtccagctgtaataccagggtacttctccgttgatgtgaataatgtggtactcattttaaatggaa

SEQ ID NO: 827778 - DNA, 100 bp, Homo sapiens
tcgtcagtgccctattccttcacatgtaattcagaaattagggacagattaccccggaagctttcgagaagctgggattccctgcagcaaaggaaatagc

SEQ ID NO: 827779 - DNA, 99 bp, Homo sapiens
aaactcctgtgcttgagtgatcctcctgcctcagccttcccaatggctgggactacaggtgaaaggtgtagcagtcactcggcctacacccacagcatc

SEQ ID NO: 827780 - DNA, 98 bp, Homo sapiens
aacagtggttctgctggattgataaacccagctgctacagaggactactgagcccagccaggctgtatgccattgctgccaaagaaaaagatattcaa

SEQ ID NO: 827781 - DNA, 100 bp, Homo sapiens
gtcccaggcccggcctttctgacaagagtaggtgacctcacagtgactcaagctaccacttactgttgattgtgacgaaatgccagctgaggcacatgcc

SEQ ID NO: 827782 - DNA, 100 bp, Homo sapiens
ggatggcgtgcagcgcaaccacgagacggccttccaaggtttattgttggccaaaaccaggctttgattgaaccaggatgaatgcgggtgttggaagtag

SEQ ID NO: 827783 - DNA, 98 bp, Homo sapiens
ttaatgaaggacaagtacaagttagaactctttatctttctgtggatccttacatggaagaagccatggatttaataaatagagaaacaatgtctgaa

SEQ ID NO: 827784 - DNA, 99 bp, Homo sapiens
aaaagcagatggagtagtggaggggatagatgtaaatggttgtactcgtaaaacaaggatcatcgatgttgtctacaatgcatctaataacgagctggt

SEQ ID NO: 827785 - DNA, 98 bp, Homo sapiens
ccattctccatggtgcggcggccttggccgatgatggcatccgcttcgatcctgaaattccgcaaacactacgactagagtttgctaaggcaaacacg

SEQ ID NO: 827786 - DNA, 100 bp, Homo sapiens
ctagccggtggagctcacgtttattcaacagtggtgaagcagtattttccaatttgaagattcatttgaaggtggctcctgccacctgctaatagcagtt

SEQ ID NO: 827787 - DNA, 98 bp, Homo sapiens
ctgctgcccgcccgctgcctgcctgcctggcatctctctctcccgtacatagtggaatgtcatgggatcacccttcttccccagttcttgggcatgta

SEQ ID NO: 827788 - DNA, 100 bp, Homo sapiens
ccaaggaattcctccatcatcaaaggacaaacttggtgtctgggtatataaaaacaacaattgaaagcatgtagtgaagaacaagaagacagagaatgtt

SEQ ID NO: 827789 - DNA, 100 bp, Homo sapiens
gtgatcccagctttaaaggagatgcaggagaaaatacggcattgctagcatcagaagagctaacaattgctggaatgacctttacaacttttgatcttgg

SEQ ID NO: 827790 - DNA, 99 bp, Homo sapiens
gacttcctccaagccaaggccaaatccaagactttggacttcattgatgtactcctgctgagcaagctgagatctgtatctgtggacctgaatgttgat

SEQ ID NO: 827791 - DNA, 100 bp, Homo sapiens
caaagaggaaacagtacagccagagtggcatgtcctcagtgcaatgctgaatacctaatagtttttccaaaattgggtttttagaacttcagccataaaa

SEQ ID NO: 827792 - DNA, 99 bp, Homo sapiens
gcgagctgagtggttgtgtggtcgcgtctcggaaaccggtagcgcttgcagcatgatgcaacagcttgagagacaagttattgatgctgaacgtcaagc

SEQ ID NO: 827793 - DNA, 100 bp, Homo sapiens
caagacactgaagaaagcatcgtcctaggaatggatttctcctctaatgacagtcaaatctacctgatgacatctttgaaaatggaaaggcagccgagga

SEQ ID NO: 827794 - DNA, 98 bp, Homo sapiens
caggggctctgggagtggctgccaggtggattctccacagttttcctcgtgcgtactcacggtggaatccgatgtgcattgaagcgaatgtatgtcaa

SEQ ID NO: 827795 - DNA, 99 bp, Homo sapiens
tcctaagtgaaagcctcagcacccggggagctgactccattgcatgtgggaccttcagccgtgaactgaagagaacgagttcattctgtatgctgtgag

SEQ ID NO: 827796 - DNA, 100 bp, Homo sapiens
catgaacggaggcccacacctcggcgccatcatgaccgggtcctataacaacttcttcaggatgtttgatagagacacgcggagggatgtgaccctggag

SEQ ID NO: 827797 - DNA, 98 bp, Homo sapiens
actctgtctctaccgacatttctcttctaagagaagtagtaaaaccagctgcagtgttatcaaagggttgcattcagctttactacgtctccttgcta

SEQ ID NO: 827798 - DNA, 98 bp, Homo sapiens
aagccagacaaacatgaggataacagaagaagttgggcaagcccggtttatacagaagcagatggaacattttcaagatacgcctggctgcaactcag

SEQ ID NO: 827799 - DNA, 100 bp, Homo sapiens
actgatatctcaaaaggtgatctggacaaaggaacaggtatctcagggagtcatttaatacttcatgattagaacaaatatgtgaaagttcccaccaacc

SEQ ID NO: 827800 - DNA, 99 bp, Homo sapiens
tagccactagccacataggctgttgattgcttgaaatgtgactagtctgaattgagaaatactttgcaccaccagcaccaccttccagtagtcagctct

SEQ ID NO: 827801 - DNA, 150 bp, Homo sapiens
aagaacatcattgttggttttgcaagaatgaatgggaggactgttggaattgttggcaaccaacctaaggtggcctcagcataccataaagtctccaaaggatggcacagtaaagaaagtgttctacagagaaggtgctcaggccaacag

SEQ ID NO: 827802 - DNA, 50 bp, Homo sapiens
cagcatcacgggccagctcaaggaggatgaaattttgaacagatcaccaa

SEQ ID NO: 827803 - DNA, 100 bp, Homo sapiens
agaaatcagctggtgccgaggtgaaaggttcgagaacttgtcttggacaattgcaaatcaaatgatggaaaaattgagggcttaacagctgaatttgtga

SEQ ID NO: 827804 - DNA, 100 bp, Homo sapiens
tgtgtttcaaaatggccctatgcttaggaatatcctccgaatcctaaatctagagctccaaggatgctggtcattaagaaaggtaatacaaaagacttac

SEQ ID NO: 827805 - DNA, 100 bp, Homo sapiens
cttgaagatggtgacagacaaaaggctatgaagcgtttacgtgtcccccctttgggagctgctcaggtgtggcagagaagacacagcttctgaaattgag

SEQ ID NO: 827806 - DNA, 100 bp, Homo sapiens
ctttcttatactctagaatatacaaagacaaaaggagattctgatgaagaagttattcaagatgggatacttgactttcagagatgtggctatagagttc

SEQ ID NO: 827807 - DNA, 134 bp, Homo sapiens
gtggaggctgtattcagctacctcacaggcaaaaggatcagtgaggcctgctctctggcccagcagtcagatgatgttgaatttgaagtatcatcggaccgacggactgggaaacccattgctgttaaactggt

SEQ ID NO: 827808 - DNA, 137 bp, Homo sapiens
tttgatctcagactgctgtgctagcaatcagcgagactccgtgggcgtaggaccctccgagccagaggcttaaaggatggcctcgtcagatctggaacaattatgctctcatgttaatgaaaagattggcaatatta

SEQ ID NO: 827809 - DNA, 100 bp, Homo sapiens
accccagaggagaagctggctgctctgtgcaagaagtatgctgaactggccttggacaagattcgctatgagagcctgacagacccttcgaagttggaca

SEQ ID NO: 827810 - DNA, 98 bp, Homo sapiens
aacccgcatgagctgtccttgctgaaggaacgcaatccacccctggcagaagctctgctcagtggagaccttgggcctcctcccaaggagaacatgag

SEQ ID NO: 827811 - DNA, 100 bp, Homo sapiens
cagacccgcacctacgacggcgacggctacaagaagcgggccgcatgcctgtgtttccgcagcgagagcgaggaggagtcactcaagactgcttgcaact

SEQ ID NO: 827812 - DNA, 99 bp, Homo sapiens
gaaaagggctcaggtttaagcgactggaatcattcctacatgattcctggcggcagaaacgtgacaagaattagagcccattgggaacgatgccaccac

SEQ ID NO: 827813 - DNA, 100 bp, Homo sapiens
taagaaggcgctgaagggcaaggaaagcagcatagagaatgagatagccgtcctgagaaagtttgacatctacaggaaggtgcccaaggaccttacgcag

SEQ ID NO: 827814 - DNA, 100 bp, Homo sapiens
atctgcacttcgcattttggcattgacatttaattttagggtcctttatatagaagggagattattgccttgtctgtcaagatccgcagttatgaagaac

SEQ ID NO: 827815 - DNA, 100 bp, Homo sapiens
ggacggtcactcagcctatggagatggagacgagagatctggacttctgaacatctaccggaaaagataaaatgtgcaagcccttcagaacgctggggag

SEQ ID NO: 827816 - DNA, 100 bp, Homo sapiens
aacctcagaggacaacgaagtgttcggaagaggatcacctagcccgggtagaagaggcaatcacccgtatgcttgtgtgtgccctgaaaactgcagagaa

SEQ ID NO: 827817 - DNA, 100 bp, Homo sapiens
cgggagaatacacttggaagccagtagggcagaaacccgagccggtgcagtacacacactggaacacacaccagccgctgctgaggtgcctgggcatccc

SEQ ID NO: 827818 - DNA, 98 bp, Homo sapiens
gaaaccaaatttgactccggttcaggaagtggacctctacagaatgaacagccaggacaagctgggcctcactgtgtgctaccggacggacgatgaag

SEQ ID NO: 827819 - DNA, 102 bp, Homo sapiens
aggagcttgatttgtttttggcatactacgtgcaggagcaagcttcctgcagatttcacaaaactgcatcttactgacagtctccacccacaggtgacccac

SEQ ID NO: 827820 - DNA, 98 bp, Homo sapiens
atttttacatttggatcttacagattaggagtgcatacaaaaggagcagtgaggagaatgaataccttccaagaccagagtggcagctccagtaatag

SEQ ID NO: 827821 - DNA, 100 bp, Homo sapiens
ctttgataaatgaaatcttcctaagtataggtgctgctacccccgtatgatgatgccactgtgaatggtgctgccaaggagccaccgccaccttacgtgt

SEQ ID NO: 827822 - DNA, 98 bp, Homo sapiens
caaattgaggcgcaatgatgagaggatgtggtggtctactctgatgtcaatcttgagggctaggcttcagcgattagccaaagatcttctaaaacaag

SEQ ID NO: 827823 - DNA, 100 bp, Homo sapiens
tttggctttgcctttctggacacagaagtatttgtgacagcatgaatatgatatatggccaccagctggaaaggaacgaaaacgttcaataaccaaaaat

SEQ ID NO: 827824 - DNA, 100 bp, Homo sapiens
tctcttgctgatataatggccaagaggaatcagaaacctgaagttagaaaggctcaacgagaacaagctatcagcttagcagtgtctgcaaaaacgaatc

SEQ ID NO: 827825 - DNA, 100 bp, Homo sapiens
aaagtagtagttaccgaagtaaaagaagaagatgctttttactccaaaaagtgtgcttcctcctgggatggacttgagtcatttacagggaatatctggc

SEQ ID NO: 827826 - DNA, 100 bp, Homo sapiens
tggaaaagacaattgatgacctggaagaacgaggtcactcggacactatggtgttcttttacctgtggattgtcttttatatcatcagttcctgctatac

SEQ ID NO: 827827 - DNA, 100 bp, Homo sapiens
aaggttaaaccactagcccatttcacaggtcatcaccgagtggtcttctcacatcatccttcaggcagcaccaagagtcactggcagcagagagagagag

SEQ ID NO: 827828 - DNA, 100 bp, Homo sapiens
aatatgcccagttcgctagtcaaacctgtgagttcaacatgatagagcagagtggaccaccccatgaacctcggagaatagacatttcccccagtacatt

SEQ ID NO: 827829 - DNA, 135 bp, Homo sapiens
tcaaagaggagatagcaattaccagtggtgaatgggaagttcttggccggcatggatctaatgtcataatgattacggttatcagcaaccgtcgtatcctgaacaaggctacgataggccttatgaggattcctc

SEQ ID NO: 827830 - DNA, 98 bp, Homo sapiens
ccaccttcctgtctcactgtgtgttctgggatgaggtccaggagacttgggacgactcaggatgccagcgtctactgggactatgccatgaccatccg

SEQ ID NO: 827831 - DNA, 98 bp, Homo sapiens
cttaaactccattgagtggcgcctaagaaaggaacagattaaaggcaaagtcaccatctttggcaggaagctccggtctccagagaatacagagggca

SEQ ID NO: 827832 - DNA, 98 bp, Homo sapiens
atgttgccaaaggcatggagtaccttcacaacctgacacagccaattatacatcgtgacttgaacaggaaatacaactggagcacgcaaagcaagcct

SEQ ID NO: 827833 - DNA, 100 bp, Homo sapiens
ggctccaaggccgtcgccgaccgctacgctgtctactggaacagcagcaaccccaggtggatttgccgctgcagtcaccacccctctagacgtggcaaag

SEQ ID NO: 827834 - DNA, 99 bp, Homo sapiens
ttcattgctctgtgtgccaccgataatcagcaactgctgtgatgagatgctgcctttaatgctgctgcatgtggtcaaacctccactcccagtctaccc

SEQ ID NO: 827835 - DNA, 100 bp, Homo sapiens
gtcagaaatcagctggtgccgaggtgaaagatgcctgtgaggagccaccaacatttgaagctatggagctcattggtaaaccaaaaccctactatgagat

SEQ ID NO: 827836 - DNA, 100 bp, Homo sapiens
cctcttcctggtggcttttgtgggctgctgcggggcctgcaaggagaactattgtcttatgatcacggatttaagtcgtggaactgaacatttatttggc

SEQ ID NO: 827837 - DNA, 98 bp, Homo sapiens
ctgtcttctggcccctcctgaaagctgtcacccacaagtaccccaagaagctagtgcagacttattcagtgtttccctaccaggacgagatgagcgac

SEQ ID NO: 827838 - DNA, 100 bp, Homo sapiens
gcagcctgcactcaagggcaaaaagggaaaggaagagaagtcaaaagggaaggctaagattacaggctgtgccagccctggaaaaacagttacaattgtt

SEQ ID NO: 827839 - DNA, 100 bp, Homo sapiens
attatggatgatgctgcagagtgctttcaattctgtggtgttcttggtcacacatttatggagtttctgaagggcagtggagattactgccaggcacagc

SEQ ID NO: 827840 - DNA, 99 bp, Homo sapiens
gagagtctgccggcggagaatataaggattcactccttctccagttgcacagccacacccttcagctggccttaatgttgactttgaatctgtgtttgg

SEQ ID NO: 827841 - DNA, 100 bp, Homo sapiens
gaatcaaagataaatccaaatactgcatatcagaaacaacagggctccagcaagagcttcccatgtggctcggagcacctgccctacccgctgggcagcc

SEQ ID NO: 827842 - DNA, 100 bp, Homo sapiens
actcgtcctacgtaacacagccagttagacaccattcgcttttcacccaagatgatttgatgtcttataaaactctgatgaaccatgatggctacacaga

SEQ ID NO: 827843 - DNA, 99 bp, Homo sapiens
tctgaaattagcttaaaaaatgatctaggtctgccatcatggatgttctcgcagaagcaaatggcacctttgccttaaaccttttgaaaacgctgggta

SEQ ID NO: 827844 - DNA, 98 bp, Homo sapiens
aacgggaagaggcgaactccagacagttggttgaatctggcgatgtggaacccatggatatggagggctgactatatacaccatgttttttcctggca

SEQ ID NO: 827845 - DNA, 98 bp, Homo sapiens
gaagcccaccggtccccaacgcatcatgccagggagccaagcgtcctgcccggccgaagaagaaatgccagaggtagaaattgacattgatgatcttc

SEQ ID NO: 827846 - DNA, 98 bp, Homo sapiens
ttttagggtcctttatatagaagggagagtagaaactgttcaggttccattatcaaaacgagcaaaatttgttggacctggtggctataacttaaaaa

SEQ ID NO: 827847 - DNA, 99 bp, Homo sapiens
catgacaagctggtgttgaagggtgattttgatgcttgcgaagagttgattgaaaaggctgtaaatggtgatgctgggagcagaactccaaaagaccag

SEQ ID NO: 827848 - DNA, 99 bp, Homo sapiens
ggcaaacaattttgttaccgacaagaactctggagaagtcatgacagtagggtttgtggcccgcaggtgtccaggatgcaggtgtaaatggacagtgtg

SEQ ID NO: 827849 - DNA, 100 bp, Homo sapiens
ggcatgccttgctcattttgcgcccagaagaattgggttttcttcgctacttgaaacaatccaagatccagatgtaccagctctcgaggttgcttcatga

SEQ ID NO: 827850 - DNA, 98 bp, Homo sapiens
tttgtggcaagacaagctcagaactgagaagctgtcaccacagctggagcagagtgaagccaagtgtgaggaggccttgaagacgcagaaggtgctca

SEQ ID NO: 827851 - DNA, 100 bp, Homo sapiens
agcggagtaacacacagctgggtgggggcacagatccgggacccgaagacccttcttcccatgcctggagtgatggttggcgacataggaaaaaaactcg

SEQ ID NO: 827852 - DNA, 100 bp, Homo sapiens
cttagatttgctgtgaccaatcaaattggcccggtcaaaggggttataatgagaagaaactaacagacaatattcagtgtgagatttttcaagttcttta

SEQ ID NO: 827853 - DNA, 100 bp, Homo sapiens
cgagagagagcaaagaaactggattctctccttacttcctctgaaactcccccttcaagactgactggtcttattgcagattgagtacccagcacgagga

SEQ ID NO: 827854 - DNA, 100 bp, Homo sapiens
gctttaggaactcaggattctacagatatatgcaaagttcttcgtaagtacatcttaaagctgtcaagatggttctagcagaccttggaagaaaaataac

SEQ ID NO: 827855 - DNA, 100 bp, Homo sapiens
aacttgccctgtctcctcgcagatgagatacccaagctccagtggttccatactggcgcctgcctggtttaggcattatcatctacctgctgaaacagag

SEQ ID NO: 827856 - DNA, 98 bp, Homo sapiens
gccttcagatcctacatacttttaccaacagtgaatatgatgaagaatgggctaagaaaattcagagtgaaaagtttcgctggcataactctcagtgg

SEQ ID NO: 827857 - DNA, 100 bp, Homo sapiens
aagaaaatcatttgtgatgggtcagctagtatgcaggctaggcaaactaatttctacaagtgtgaaagaattagaaaacttcaggaacttgttacagaat

SEQ ID NO: 827858 - DNA, 98 bp, Homo sapiens
atccaatggtggctattcctgaacatgaagctcttgattccaaagaggctggaggctctcaggtcatttttaccaacccattggagatagtgaagatt

SEQ ID NO: 827859 - DNA, 100 bp, Homo sapiens
agctgttgtttgggctgtgtttcgaaatgaagacagtcccagaaatcctggatagaaagcactttgaccaagagggaatgtgtatatattataccaagtt

SEQ ID NO: 827860 - DNA, 100 bp, Homo sapiens
tgatgaactggaggctgagtacgacagcctcaaacaggagctggagcagctcaaagaggtgtcacagatttatcagagcattgagttttctcgtttgact

SEQ ID NO: 827861 - DNA, 100 bp, Homo sapiens
actatggaattccctttgctgcacccacagcgcttgccagccgagatgggagcctagctaataatccatatccagaaaaccgtgaggacatactgaatgc

SEQ ID NO: 827862 - DNA, 99 bp, Homo sapiens
gctgctgggagatgggcctactcgcccgccaccctgcgctgccgccgctctgaggagttaaaggtgctgctacccccgtatgatgatgccactgtgaat

SEQ ID NO: 827863 - DNA, 100 bp, Homo sapiens
cctctccgagccctaccagtacaccttggccagcactggcatgattccaacagaactgcagcagctctggaaagaagtgacaagtgctcatactgcagaa

SEQ ID NO: 827864 - DNA, 100 bp, Homo sapiens
aaaacctccttatgctgatatacatccaatgagggagtttccagatgtcttggaatgcactgtatctcatgcagtagaaaagataaatcctgatgaaaga

SEQ ID NO: 827865 - DNA, 98 bp, Homo sapiens
agtggctgtagggagcatagctgctacactgaagatgaagcaaggcccaatgacccaggcgtttctgatgaagaattgaaaagaagagtagctgagga

SEQ ID NO: 827866 - DNA, 132 bp, Homo sapiens
tacttccacttcgtgttcttcctagcttccctgtatgtgatgatgaccgtcaccaactggttcaaaaatgtagacaaccaatttcctgggcaagctgctccacctggattcccagtgtatcccgcgtttagc

SEQ ID NO: 827867 - DNA, 100 bp, Homo sapiens
agaaagggaagctattgctgggattttgaggaggttccagaagtgacaactgtccaaaataaaaaaccagtaataccggttttaagtagtacaatcttac

SEQ ID NO: 827868 - DNA, 100 bp, Homo sapiens
gtgaccctctgtgtgattctgtataagaaagttcataaggggactgtgcccaagaatgacgcagtgagagggtccaagcctggtaagaatgtccagcttc

SEQ ID NO: 827869 - DNA, 98 bp, Homo sapiens
ccgtgccgcagatgcccaccggaatggagaaggaagaggagtcggtgcctcaggaaccctgaagctgggctgagccatgatgctgctgccagaacccc

SEQ ID NO: 827870 - DNA, 98 bp, Homo sapiens
cggtacaatagaattaaagcgcttccttctgggattggagctcaccagtctggagcccggcactgtggtcataacagagcaggcagtggatacctgct

SEQ ID NO: 827871 - DNA, 100 bp, Homo sapiens
agatctgcagagatcaaaacaagccctccaggaactcacgtgaagaagctaagtctcagaaagataactcacccaagaggacacaaggataaacctgata

SEQ ID NO: 827872 - DNA, 100 bp, Homo sapiens
acagaggaggatatcggcggacttcacgccaccatcgagtgtgagcagccccagcccgacctctacaagtgaaacaccattcaaagtcgtagtcaaatct

SEQ ID NO: 827873 - DNA, 100 bp, Homo sapiens
ctgtctcttccagggtcttctaagtcagagacatcaaaacctggaccttctggattacaggccaaattagcaagactagcccgagccaagtcagttccca

SEQ ID NO: 827874 - DNA, 98 bp, Homo sapiens
ttccatcagctgcagaaaattttctagttttggggagacaattacaaacatgttttatcaatgcagctaagaatgttggctcaattaagaaacatcag

SEQ ID NO: 827875 - DNA, 99 bp, Homo sapiens
atggcttggagcacttcctattccactggattgggaaagaccatggcagtttctcaactcattggatgctaaagaaatatatttggaagtaatacataa

SEQ ID NO: 827876 - DNA, 100 bp, Homo sapiens
ctgacgcagagccgagtgcagaagatctgggtgcccgtggaccacaggccctcgttgcccagatattgtctccagctttaagaccacgacatcgagagct

SEQ ID NO: 827877 - DNA, 99 bp, Homo sapiens
tcagcgtcgctggcagccgctgtacttgcaacagcttgaagaagaggcagctaaacctcctgagcctgagaagcccgtgtcccctcctcctgtggagca

SEQ ID NO: 827878 - DNA, 100 bp, Homo sapiens
attgttttttctacctgttgacgtgtcaagcactaactggacctccgaaacaatcttattagtagtatagatccaggtgccttctggggactgtcatctc

SEQ ID NO: 827879 - DNA, 99 bp, Homo sapiens
gaagagcaagaataaatgaaagtctgagccagctgaaaacactgattttggatgctctgaagaaagatacaaatttacatgtattggagaccagaccag

SEQ ID NO: 827880 - DNA, 117 bp, Homo sapiens
aaatgggtggcaagtaccgccttatggagtatacgggcaaccatggaatcaacaaggatttggagtagagttttcctttggaatatggataaatacaccatgatacggaaactagaa

SEQ ID NO: 827881 - DNA, 100 bp, Homo sapiens
gagacacaagtcctgttcgctcttttcagcccctcgatgcccagcctacagagtctgagaaggaaatttataatcaggtgaatgtagtattaaaagatgc

SEQ ID NO: 827882 - DNA, 100 bp, Homo sapiens
cctggcaccaaccagcgccagcccagcaagaaagcctcaaagggcaaggggtcatcaagagagagggcacaggtacagagatgcccatgattggggaccg

SEQ ID NO: 827883 - DNA, 100 bp, Homo sapiens
gaaaaacggagacttggatgaggtgaaagactatgtggccaagggccatgaaatgacaagcattggactgctacttggtgtttctgctgcaaaactaggc

SEQ ID NO: 827884 - DNA, 120 bp, Homo sapiens
cggccactacattctgggtgacacgctgggggtcggcaccttcggcaaagtgaagggcaattcgaagttttcaagtagcccttcacatctatccaatgaaccctgaaatatggaaagaag

SEQ ID NO: 827885 - DNA, 100 bp, Homo sapiens
cacatctttttggtctgaagagataaagtttgatactgaaatacaaggttctgtacagagtaatgagatgtgtgacggctgcaaaccaggtgtttttttc

SEQ ID NO: 827886 - DNA, 100 bp, Homo sapiens
attgtttacgaaataatgggcaatcaggggacaatgtagtaaagaacttttcaatgacaagagtaatactcatgaatttgtaaacctagtgaaagaacta

SEQ ID NO: 827887 - DNA, 100 bp, Homo sapiens
gaactgcagaggttcctctacagcaaggacacatgacggaagtgtgtatttttgggccactccacggcaggtccctagcctgcaacatttatgtcgcatg

SEQ ID NO: 827888 - DNA, 51 bp, Homo sapiens
ggagccatgtgccatctctattgagtttctctcctgtcacaatggcatgat

SEQ ID NO: 827889 - DNA, 100 bp, Homo sapiens
cgagggtgacgctcgctccgctcgtcccgctcgtcatggcctacccgggatacggaggaggggttttgctgttactgctcagtgtagtcacaccttgaat

SEQ ID NO: 827890 - DNA, 101 bp, Homo sapiens
ccaatttgcctccacttagtgagcggaagaatggtgcaccgggtataatttcttcaccatatgcaggggctgctggatttgccccagccattggatttcct

SEQ ID NO: 827891 - DNA, 100 bp, Homo sapiens
tgaaaacaatcggcaaggggaattttgcaaaagtaaaattggcaagacatatccttacaggcagagagcatgaagcgtgccagctctctgaatgtcctta

SEQ ID NO: 827892 - DNA, 100 bp, Homo sapiens
gagtttctgacggagctggtcatcagcctggagaagctggagaatgacaagagcttccgcggtgtcattctgacctcgatgctcagccagcattgggcag

SEQ ID NO: 827893 - DNA, 119 bp, Homo sapiens
gaaaaggcaaaaatcccatctaccgcaactctcagttcgagagtaaaggtacatgtcccagagcaagcacacggaggcccgggagctcatgtactcgggagccctgctcttcttcagcc

SEQ ID NO: 827894 - DNA, 100 bp, Homo sapiens
catggttcacatcagacgagagattgagatcatgtcatctctcaaccatcctcatatcatcagtatttatgaagtgaaagagtttctagccaaagccaaa

SEQ ID NO: 827895 - DNA, 100 bp, Homo sapiens
ccaggtgagactttcacaataagagcagaggatggaacacttcagtgcattcaaggccccttcacagatgtagtcactacaaatcttaaattgcgaaatc

SEQ ID NO: 827896 - DNA, 100 bp, Homo sapiens
ggaggcacctgttgcaagtgacagaagaggatgtggagaactttgacgtgaccaacttgtctcaagacatgctgcgaagcattgaggctgacagcttttg

SEQ ID NO: 827897 - DNA, 100 bp, Homo sapiens
aactctgctccagctgtacttgagattttggcagctcttggaaccggatttgcttgttccagtaaagcactggtgaggtggattgatgatgaatcttctg

SEQ ID NO: 827898 - DNA, 99 bp, Homo sapiens
cccgaaaacggaagcgcagggagaaggaagaggtgtttgaaaaggaaggagggagccccaggaacaggagtcccaccgaagaactgctctctgacagaa

SEQ ID NO: 827899 - DNA, 99 bp, Homo sapiens
aattctttgcgtggggccttttgacaactccaatgttgactagtgcctggaagagctgggatgtctggttgagtcctatggcatgaatgtttgccaacc

SEQ ID NO: 827900 - DNA, 100 bp, Homo sapiens
ccgggagggagttgtcggcgccgcggccgctgcggacggacgctcgcctgccggctgaggcaacgtgttggaccttccggagcttctcagaagacagagg

SEQ ID NO: 827901 - DNA, 100 bp, Homo sapiens
gggcagcgtgggcatgtctctgaccatctggacggtgtgtggggtcctgtcactatttgctggattgccttttgcaattcttacttcaaggcataccccc

SEQ ID NO: 827902 - DNA, 100 bp, Homo sapiens
aactccagccagctcaccgtccacctgcgatctcacacgggttcaaaatgagcctgtttggaacaacctcaggttttggaaccagtgggaccagcatgtt

SEQ ID NO: 827903 - DNA, 98 bp, Homo sapiens
agatgtttatcaccaccgaggacagcatccagttttggatgaaccaatagcagaagctgtctgtattatagctgacatggataaatggactgttcaag

SEQ ID NO: 827904 - DNA, 100 bp, Homo sapiens
atccctctgattgtggtatcagccttgaccttcgtgtgcctcatccttctcattgctgtgctcgtttactggaggcaccatactggacataccttttatg

SEQ ID NO: 827905 - DNA, 98 bp, Homo sapiens
tatgtcccgcggggaccgattttctgaagacagcagatttatcactgttaatccaggaatagccaggccagaagaaggaaggcctgtggtgagtggga

SEQ ID NO: 827906 - DNA, 98 bp, Homo sapiens
acaatttattagatggtgacactgcagttgaccattcctcaagaattttgtatccaaggcccaaaagtttgttacccaagatgatgaatgctgacatg

SEQ ID NO: 827907 - DNA, 98 bp, Homo sapiens
acgcgccccgaggaggagcggggcggcgcaggcggtactccaaagattcaggtttactcacgtcatccagcagagaatggaaagtcaaatttcctgaa

SEQ ID NO: 827908 - DNA, 98 bp, Homo sapiens
gacctgtcttgagaaaaggccagtgttgtccctactgcataggtattaatctctggagaagacacatccacagttagcactttcttcagatgctgacg

SEQ ID NO: 827909 - DNA, 100 bp, Homo sapiens
gcagagacatgcctcacccgaggatattaaaaaggcgaggaacgatgatgaatgtcgggcatttgtgaagagagtcataatgagccgtttctttaagata

SEQ ID NO: 827910 - DNA, 100 bp, Homo sapiens
ggaatctcactctgttaaagctggtctgttctaactgaggtaagaactcagggccctatcctcacagcaagtggcaaaaaccctgtaatggagctcaatg

SEQ ID NO: 827911 - DNA, 98 bp, Homo sapiens
catctacaaaaagtattggccaagaagagagatcctgtttctcacatttgtttcattgaagaaatagttaaggttacaagaggacccacctgtgggtg

SEQ ID NO: 827912 - DNA, 100 bp, Homo sapiens
cgaagcgctgcgctcgcgcccggatccctcagaaccgcatgcacgagtctctcatgctcttcgactccatctgtaacaacaagttcttcatcgatacctc

SEQ ID NO: 827913 - DNA, 100 bp, Homo sapiens
tgctgaatctgagccacagtgtgatcccagctttaaaggagatgcaggagaaaatacggcattgctaggcaagaaaaactttgactgcagataaattgga

SEQ ID NO: 827914 - DNA, 98 bp, Homo sapiens
gacgagcgcggaggaccgggaggctcccgggcttgcgtggtggcccaccctcaggaccctcaccacccatcagagaagcctgtcattcactgccataa

SEQ ID NO: 827915 - DNA, 99 bp, Homo sapiens
tgtaacacaaaacggcactcacgtggcatcagtccccactgcggtccacggccaggtgaacaatggagacgttctcttccagatggctgaagtccacag

SEQ ID NO: 827916 - DNA, 99 bp, Homo sapiens
tggtttccagtgcagcgcggagtgggcgatgccagcgtgccagatgagtttgatgcctacatcattgtgtctttcgtgaatgccaccctagtgttgtcc

SEQ ID NO: 827917 - DNA, 99 bp, Homo sapiens
cttcattaagcttaactgagaagtatttctctgtagagttggttgaatctggcgatgtggaacccatggatatggagggctgactatatacaccatgtt

SEQ ID NO: 827918 - DNA, 100 bp, Homo sapiens
ttatgacagattacgccccctatcctatccgcaaacagacacagatctggtgcccagcgacattgcggcgggcctcgccctgcttcatcagcaacaggac

SEQ ID NO: 827919 - DNA, 100 bp, Homo sapiens
ggggtccgatggttctcgaaggcccgcggcgccccgtgctgcagccatgaagctcatgactgctctggtgaatgttgccttaaacctcagtattcatcag

SEQ ID NO: 827920 - DNA, 100 bp, Homo sapiens
ttgtacgtggatgtaatgttggagaactatagtaacttggtgtcactggaatgtgacagtgatgataacatgggtgccaaaaatacttcaataggagaag

SEQ ID NO: 827921 - DNA, 98 bp, Homo sapiens
atagctgcatcgtttgtaacatgggacattccaacacagagattgacgtgcttgtagaccctggagttaaggcatggacacccactaaaggaaaacaa

SEQ ID NO: 827922 - DNA, 99 bp, Homo sapiens
aaaaactcacattgtgctcagactgtcagcagtgtttttaaaggggtttgtgtctggagaaaagagtcttctataagcttatatcgggacttcatgcta

SEQ ID NO: 827923 - DNA, 98 bp, Homo sapiens
ggccctcggtgcgcccggccgcctgcacccccaggaattttggagagtaaaaggctgaaccttgttaaagagaaaaccattaatcagaccatcggcaa

SEQ ID NO: 827924 - DNA, 99 bp, Homo sapiens
gaggaactggaagactgcttcttcactgctaagactacctttttcagaaatgcgcagagcaaacatctttcaaagaaggagctggcaaacagccctgac

SEQ ID NO: 827925 - DNA, 99 bp, Homo sapiens
gcgaaccgaacagaataacccgcccccagcgggatgtgaaggactccgggtgaggccggccacgccccgcacggtaagaatgattgatgttggctgata

SEQ ID NO: 827926 - DNA, 100 bp, Homo sapiens
tcgagagctcgccccgaacgggggtcttcctcctccgccgttgacagattttggatttagtaaaggggacacattaccaggtagcctgtcaaaaatactt

SEQ ID NO: 827927 - DNA, 131 bp, Homo sapiens
tggagatcctgatgtttctcagtgccattgtgatgatgaagaaccgcagatccagtgttccactgtgtccactttgagtgtccagagcagcagagcagccagaaggaggaaaatagtgaggaatcggggac

SEQ ID NO: 827928 - DNA, 99 bp, Homo sapiens
accactaccacctccaccttattcctgtgatccaagcggcagtgatttgcctcaagatctttccagaaatcgttttacagaaattccttctgatgtctg

SEQ ID NO: 827929 - DNA, 100 bp, Homo sapiens
gataccgcgcttggcgagaaggtgtgcatggatctgccaaattttatatttcagatttgtggaagggagctgagcggaaaatcagggatgaagaacgaaa

SEQ ID NO: 827930 - DNA, 100 bp, Homo sapiens
ggactgcagctatggggctgttactagtccaacctctacccttgaaagcagagatagtggcatcattgggaccagttactctccacaagaaaattcacac

SEQ ID NO: 827931 - DNA, 100 bp, Homo sapiens
ctgagagtgactattccctgaggcacgtggtgaggtgtgtatggcttcccgtggactcagcctcttccccgagtcctgtccagatttctgctgtggtacc

SEQ ID NO: 827932 - DNA, 99 bp, Homo sapiens
tctgtggcagcattttttccagaacacaaaagttcaaacgatatgtcaataaacttcgaagcaagagtacagttttcaaaaagaagcatcagataatag

SEQ ID NO: 827933 - DNA, 98 bp, Homo sapiens
tctaatcccctttaaaccaaaccctgtactcagtcttttgtgcccagctcccattttctccagcaattattcaagccgaagtggaacagctgctgggg

SEQ ID NO: 827934 - DNA, 99 bp, Homo sapiens
gatgacgaagacatgacacttacaagatggacagggatgataattgggcctccaagagtttttgtctgatgaaaatagtctggagtataaatattacaa

SEQ ID NO: 827935 - DNA, 98 bp, Homo sapiens
acaatgtgtgcaatttgtagaggctgcagcacacgagagtgaacagcagaaagaggcttcttggaaacataaccaggcgcacatggcacagcactcaa

SEQ ID NO: 827936 - DNA, 100 bp, Homo sapiens
ccagaagaggaggttgcccagaagaaaaaggttggtgggacaagtgatgttgaagtgaatgaaaagaaagacagagttacagatgcccttaatgctacaa

SEQ ID NO: 827937 - DNA, 99 bp, Homo sapiens
agaagattgctggatgttatgaaaagaatcttttatggggggctctgggagaaccaccacagacgacgagctagaagagatgctggagagcgggaagcc

SEQ ID NO: 827938 - DNA, 98 bp, Homo sapiens
aaaagacggtgtcacagctgtaccctgggatcggcagaaaagggtccccccggggcctgtaaggggtgcctgcggtcttgttgcagtaggagaaagag

SEQ ID NO: 827939 - DNA, 98 bp, Homo sapiens
gaagagaaaagtctgcgttagtctggagaagttggactagtgagcttaataccaaaacatccccagcaaccaaccaggcagctggccaagaggaaaaa

SEQ ID NO: 827940 - DNA, 100 bp, Homo sapiens
gcaccaacgcccaggaccagttcctgctgaagcaggcatttggctttatgtcccgagttgccctacaagcagagaagatgaatcatcacccagaatggtt

SEQ ID NO: 827941 - DNA, 98 bp, Homo sapiens
aggagagcactcggaacccctcactcatgaagcaggctagtgatacagagcgagatggactagccccagaaaagacatcaccagatagagataagaaa

SEQ ID NO: 827942 - DNA, 98 bp, Homo sapiens
ccccgcgcagccgcctgcgcctgcgggagccttacagaatgtctgaaggggacagtgtgggagaatccgtccatgggaaaccttcggtggtgtacaga

SEQ ID NO: 827943 - DNA, 100 bp, Homo sapiens
agacatggcgcttcatttactgaacaatggacagatggttttgcatttcagaatcttgtgaagtggattttgcaaatcgggaaagtcagctggcttttta

SEQ ID NO: 827944 - DNA, 100 bp, Homo sapiens
gctcgactgtgaggatggagtggctgcaaacaaaaaggtaactcgggaccaaatgaagatgtttatacagcaggaatttaagaaagttcagaaagtgatt

SEQ ID NO: 827945 - DNA, 100 bp, Homo sapiens
ccctaccccccaggcctctttccagagcacctcagcaccatacccagataaaagcttcgatgatgaagaatcagtggatggaaataggccatcatcagct

SEQ ID NO: 827946 - DNA, 100 bp, Homo sapiens
gaccgagagcgcgaatatcgtcatcgttagaaggtagcttcctattgaagtttattcggaagatgacaagtaggcattggtgtgctgttcccattttgtt

SEQ ID NO: 827947 - DNA, 100 bp, Homo sapiens
gggaaacaaggcttccagtgccaaggtgaatcttggaagcaaccagtaccttttctctgtcatagtggatcctaaagaaatgccctgcttctgtttgcgc

SEQ ID NO: 827948 - DNA, 101 bp, Homo sapiens
agacaacaatggagagggtgacgcctgctccgtggacattgatggggacgcaactggtgatgatgatgactgggatgaagactgggatgggcccaaatcct

SEQ ID NO: 827949 - DNA, 100 bp, Homo sapiens
ttcagcacaccagtggggcagtgcctcggatgtatgttgtgttcacagcgaaggtactcccttcagcctgtcccagaaaggaggattccaaaccgatact

SEQ ID NO: 827950 - DNA, 100 bp, Homo sapiens
ggagcatctgtgaggtcgaaacaggataaaattttggttcagccgtctgtatatctccccagatacctgaaactgaccacctgagtacgttttcccattg

SEQ ID NO: 827951 - DNA, 100 bp, Homo sapiens
ctttccctaatcgactctcatctggtggtgcagagatgtttcatgtccaggaaatggtgatgagctttgatccaaaccttctccacaacaatggacataa

SEQ ID NO: 827952 - DNA, 99 bp, Homo sapiens
tgctccaaccggcagggaaagggcgagaagcgcgccgtctccttccacaggtgataacgtggtgctggaccagacctacctgtggcagggtgttcgagt

SEQ ID NO: 827953 - DNA, 98 bp, Homo sapiens
aggaggggagaatctggaacttcgagattatcagctagaaggtctaaactggctagctcattcctggtgcaaaaagtttacaaagaggattttgagaa

SEQ ID NO: 827954 - DNA, 100 bp, Homo sapiens
agaacatctgaagcagaagtacccccaccacgcctctgcaatcatgggtcaccaagagaggctgagagaccagcaccggaagcagtactcagaacaagtc

SEQ ID NO: 827955 - DNA, 100 bp, Homo sapiens
cctgagtgtaccaccagagcgggactctgactccgaacctactgatgatagcaggaagaaccggacccggcgaacctggaagtggaccatgatttcttcc

SEQ ID NO: 827956 - DNA, 100 bp, Homo sapiens
ccggatggaagaaggaggaagtgatccgaaaatctgggctaagtgctggcaagagcgatgtctactacttcagggatttgtcttggctgttactatgaca

SEQ ID NO: 827957 - DNA, 98 bp, Homo sapiens
ggagctctcgcgccttggcccattgtcgggcttggaaaattcttgttaaaagttgatagcaagatcgaaagctgctttgcgtcgcagttggagcagca

SEQ ID NO: 827958 - DNA, 99 bp, Homo sapiens
tatcaagttactgtgtatcaggcaggggagagtgatacagattcatttgaagaagatcctgaaatttccttagcttggtatcctgaggtgcggcaccac

SEQ ID NO: 827959 - DNA, 100 bp, Homo sapiens
cagtatgcttgggagtcttctgctggaggttccttcactgtgcgtgctgaccatgaagttcccaaagtttgccggctgcaagtgagtgtggacgaccagt

SEQ ID NO: 827960 - DNA, 99 bp, Homo sapiens
aagaattttgtcagccgaagccttgtcataggagaagtcctctccatggcggacatggccacaggagtgaaggtagtgggcagcagtcagtgacaggtg

SEQ ID NO: 827961 - DNA, 106 bp, Homo sapiens
ggacagatctggaagcatctttgctaagttttgaaaaacttgaccgtgcctcaccagatctttggccagaacaattttcccgtcaccaattttccttggaattgga

SEQ ID NO: 827962 - DNA, 100 bp, Homo sapiens
cgagaagcgggctttccaggacaagtactttatgataggcctgtctcctccctcctacacatttccagctcctgctgcagttattcctacagaagctgcc

SEQ ID NO: 827963 - DNA, 100 bp, Homo sapiens
accatgaatgacttgctggcccaggagcctgactacggggccctgtatgagggacgcaaccctggcttctatgtagaggcaaaccctatgccaactttca

SEQ ID NO: 827964 - DNA, 100 bp, Homo sapiens
accagaagaagaaaaaagtctaccatacaaaccagaccaccttcataattggagaaacaccaaaaggaatccgcagagttaacgaattacatgatccaat

SEQ ID NO: 827965 - DNA, 98 bp, Homo sapiens
cagttcctctccgatgagcagaacatcctggccctccgtagcatccaaggcagacaaagagcaggcttatggctatgggccatacggtggtgcgtacc

SEQ ID NO: 827966 - DNA, 98 bp, Homo sapiens
gtgggaggcgccgtgagttcgccgctggtggctccgggctttgatgaactaggtggacttctcaaaccaacagtggcctctcagaaccagaaccttcc

SEQ ID NO: 827967 - DNA, 99 bp, Homo sapiens
tcacctgtgcgggatggaacaaaagtttcatgatcaacatgggagactcccacgtggacaccagctccaccgtgtccgaggcggtggccgaagaagtat

SEQ ID NO: 827968 - DNA, 100 bp, Homo sapiens
cccggctgatcctccagtaccttgattcagagagaagacagctgtgagccgtgagctttgaggcggtgggatgtgtcagcagaatgtctcctgcccccga

SEQ ID NO: 827969 - DNA, 100 bp, Homo sapiens
gattccattgatgcatgaagcaatgcagaagtggtattacaaagatcctcagggagaaattcaagtttccacagtgcctacacaacctgataatccattt

SEQ ID NO: 827970 - DNA, 116 bp, Homo sapiens
ggcgatttacagatgcaggatcggaaagaatcccggccagacgtgcgaacagctccagctgggtatctcaacctcctggcacaacatcattttctttgcctgatgactgggacaac

SEQ ID NO: 827971 - DNA, 100 bp, Homo sapiens
gacatgtctgagactcctgctcagtgtagcattaagagtggagagatctacagaccaagtaatcaagccagtcaatgtaggagctctatcaaaatgggtt

SEQ ID NO: 827972 - DNA, 99 bp, Homo sapiens
aaaaggcatttctcctagctgttgacgttggtgctcgtgacctctttatggaagttgccttaaagaatagacaagagctgtatgcactacctcctcctc

SEQ ID NO: 827973 - DNA, 100 bp, Homo sapiens
aggagagctgcgccggcgagaagcggccgagccagcagcagatgccgtagggccaggtgagctgctgtgaaggactcattcttggtagccggcagttact

SEQ ID NO: 827974 - DNA, 99 bp, Homo sapiens
tggatattcattgcatggtctccagatcattctcatatgccagcctgttattgcgctccaggccactatcactccagccaacctcagtatcgcccagtc

SEQ ID NO: 827975 - DNA, 122 bp, Homo sapiens
gagggctcctcccttcagctttggtccctcggggcgtctgggcagcctacgctttccgcattggcagcgttgggcttggaggcttctgcaccgcttctgagagttctgccagcctggatcca

SEQ ID NO: 827976 - DNA, 98 bp, Homo sapiens
atctgatacagcttcagttaatgaaaatgggctaggaaaggccgagggggacggcaagatgcacatcaccctctgtgacttcatcgtgccctgggaca

SEQ ID NO: 827977 - DNA, 99 bp, Homo sapiens
gtcccggcgctagcccagcccgacccagacaatgcagatcttcgtgaagactctgactggtaagaccatcaccctcgaggttgagcccagtgacaccat

SEQ ID NO: 827978 - DNA, 99 bp, Homo sapiens
tgcggagccgggcgctctccgccttcaagttgcggggcttgctgctccgtgggtcattaaaacaccaatgaccagccagaagacatttgaatctttggt

SEQ ID NO: 827979 - DNA, 60 bp, Homo sapiens
aggcaacagggacatggccacctgggacgaaaagtgaagtaagaactctgctagagagga

SEQ ID NO: 827980 - DNA, 100 bp, Homo sapiens
cactggatttcaagaaggacaaagcaaagtggaagatgctttctacaaaggtgaactcaggctgaatgaggaaaaattatggaagaaaagcagaacggtg

SEQ ID NO: 827981 - DNA, 98 bp, Homo sapiens
ctgggattggcatgctttagctatctgaacgaaacttccctttggggagttaagttttccagggtaaccaggagccgacaacaactcctgacgcaatg

SEQ ID NO: 827982 - DNA, 100 bp, Homo sapiens
gctgcagagtgtggaatacgtggtgttcgatgaagctgaccgctgatgatgggagaaccagttactaccttctctaacacaggctccatcctatctcttc

SEQ ID NO: 827983 - DNA, 100 bp, Homo sapiens
agccggagtgagaagcaagaaggccctggacacagcaatatctctgggctttcacagagaagaagctggaggagttctccgtggaagaggccgaggtgct

SEQ ID NO: 827984 - DNA, 100 bp, Homo sapiens
ttggagaggcccgtggccaatgactcgcaaccactcaccgtctacttctccctgagcctcctgcagatcatggacgtggaacaagatcactcaaggtgaa

SEQ ID NO: 827985 - DNA, 100 bp, Homo sapiens
caagtcttccgttctgaccaacgaaaagatgccaaatttgtatcctactgtggggcttcaaacaccaggagaagtggtcgatgccaattttgggcaacat

SEQ ID NO: 827986 - DNA, 98 bp, Homo sapiens
tgcgcgaccagaccggcccccccgaggctggaaaagaggaacaggagggcatggaagaaagccctcaatcagtgggcagacaggagaaagaagcagag

SEQ ID NO: 827987 - DNA, 100 bp, Homo sapiens
tgaggacatatctaaattttctagttttatagaaggcttttatccacaagaatcaagatcttccctctctgagcagacttaattcagtgcacaaatgaga

SEQ ID NO: 827988 - DNA, 100 bp, Homo sapiens
agcaagaagtggaaagaaatcctgaagttccctcacattagccagtgtgaagacctccgaaggaccataggagactccatcctctgccaatggcccttcc

SEQ ID NO: 827989 - DNA, 99 bp, Homo sapiens
agtgcaggacgcgctgacagctcgagtgagcggactgcccaggacttcggaactagacgaggtcctagcagaagatgtgactcagactgcctctgggtg

SEQ ID NO: 827990 - DNA, 100 bp, Homo sapiens
tgcatactcacagagttagagagagggatggtgtggaagacttataaccctgccttctcccggttggaaatctggttccggtttttctttgtggtgctca

SEQ ID NO: 827991 - DNA, 100 bp, Homo sapiens
gatacagcaggcgctcaccatgttccctggaggtttactcctggcttgggggcattaggaagcactggaggctcttcgggaactaatggatctaacgcca

SEQ ID NO: 827992 - DNA, 100 bp, Homo sapiens
ggccggccggtgccagcacctttcggcttctgagacggcggcagcagcggcattcagttcaaaaggtgatgacctatcaacagccattctcaaacagaag

SEQ ID NO: 827993 - DNA, 100 bp, Homo sapiens
gagcccaaatgggggagtgagaggccatagctgtctggcatgggcctctccaccgtgcctgacctgctgctgccactgagaccagatgaagaagctgtgg

SEQ ID NO: 827994 - DNA, 100 bp, Homo sapiens
ggaactggcaagaaagctaagcattgatattgaacagaggcggctgagccaggaacgggatcgcctagagggtcttcgccagagactccgcaaggcccag

SEQ ID NO: 827995 - DNA, 98 bp, Homo sapiens
gatgatcgagaggatctggtgtaccaggcgaagctggccgagcaggctgagcgatacgacgttggtgacaaagttcctgctgatataaggttaacttc

SEQ ID NO: 827996 - DNA, 100 bp, Homo sapiens
acaaacccttcacagactgctctgccgtttccctggggagatggtaaccatactctattccataaccctcatgtgaatccacttccaactggctacgaag

SEQ ID NO: 827997 - DNA, 98 bp, Homo sapiens
gagaccggcaggcctctgcttctgagaggccttcttcgaggcagccagcatgatgagacaggtctcccacaaacacatcgtgtacctctatggcgtct

SEQ ID NO: 827998 - DNA, 99 bp, Homo sapiens
agaaagaatattatattccaagacagagcacctaggattaaattggtttcctaaaactgtaagagtaaatgggtccagtaattggaatgactccagata

SEQ ID NO: 827999 - DNA, 100 bp, Homo sapiens
cagagagaaagaatccccagagcagatgaattaaaccaaactggacaaatccttgtggagcaaatgggaaaagtgtttggccagcgcttggatgagactg

SEQ ID NO: 828000 - DNA, 99 bp, Homo sapiens
ctcttcaagatctcttgttcttccccagtgatgacttttcagcgaggattaaatccaccacacagggtgaaatctatctccatgacaacattcacacaa

SEQ ID NO: 828001 - DNA, 99 bp, Homo sapiens
gctgatgaacttgtacttcacgcagaacaccttccaccatgaccacctcagcaagttcccacttaaataaaggcatcaagcaggtgtacatgtccctgc

SEQ ID NO: 828002 - DNA, 99 bp, Homo sapiens
tctgaagcggctcccagtccctgaaagcattaccgggttcgctaggctcacagtttggtgccctggttgtcagatgttggaaagcagtaggacggaaca

SEQ ID NO: 828003 - DNA, 100 bp, Homo sapiens
caaaaggagattaacagaagaaatgctttttccaacctgtgacattctggccattgataagtccctgacaccagtcaccctggtcctggcagaggatggc

SEQ ID NO: 828004 - DNA, 99 bp, Homo sapiens
ctgctgccactgctgccgccgcccccggagctgctggtttcattcgaggtttcgggccgattgtgttcagtgtggacccctccgagggcagccctggtt

SEQ ID NO: 828005 - DNA, 99 bp, Homo sapiens
gcggtgctgcgagggcagaacctggcaaaagttcaaacagaccctccctcagttccaatatgtgacctgtatcctaatggtgtatttcccaaaggacaa

SEQ ID NO: 828006 - DNA, 100 bp, Homo sapiens
gttttgagtcccaccatcttccatccctgatgcttggagaagctgaggacacacagggataagttctgaacgtcgaaaagaaaagtctcgagatgcagcc

SEQ ID NO: 828007 - DNA, 100 bp, Homo sapiens
gtggatagtagaacttatctactggatttccgtagtattgatggtatggaaaagttgaggccactcgcatattgttagagaaaggaaagtgcaatccaaa

SEQ ID NO: 828008 - DNA, 98 bp, Homo sapiens
gacactttgttattggagaaacatgcagattatatcgcatcctatggctcaaagaaagatgattatgccggaaggtggtggtcgtacgctgtgaaggc

SEQ ID NO: 828009 - DNA, 100 bp, Homo sapiens
gcttctttgtctggagttgaaagccagatcaccaccttctgatgtatgtccctgggaagctgcatgatgtggaacacgtgctcatcgatgtgggaactgg

SEQ ID NO: 828010 - DNA, 100 bp, Homo sapiens
cgggagccagcgagccacgggagcgagccaggatgaccggaaagaagggatgaccgcgtttgtggaaaagagaaaggccaacttcaaagaccagtgagaa

SEQ ID NO: 828011 - DNA, 100 bp, Homo sapiens
agcagattggaaaagtgaatggtgtgcatcacattaaggattaaggctgctgtcccaagcatcaaattctgcttggacaatggagccaagtcggtagtcc

SEQ ID NO: 828012 - DNA, 100 bp, Homo sapiens
tccaccccttccacgtcatccgcatcaacaagatgttgtcctgtgctggggctgacagatgaatgaagttacttattctaccctgaactttgaagcccag

SEQ ID NO: 828013 - DNA, 100 bp, Homo sapiens
ccgatcttcttgtgtcaccatgctattatgcatagaaagtgtgatgccattagtgtattggagaaagaacatgactacagagatgaacattttgatttta

SEQ ID NO: 828014 - DNA, 100 bp, Homo sapiens
ctagaagcctgtcgaaaaatgggggtgcctgagccccgactatctgagatcggccaagatgactgaggtgatgatgaacacccagcccatggaggagatc

SEQ ID NO: 828015 - DNA, 99 bp, Homo sapiens
agaggaggagatcctgggatcagatgatgaggagcaagaggaccctgcggactactgcaaaggctaggcagctggaagagaaagaccgagtgctaaaga

SEQ ID NO: 828016 - DNA, 100 bp, Homo sapiens
cgtcgctgaggggcttgcctgaagcgagggtctcacaccattttgctggtacagcctaccaagaggccagaaggcagaacttatgctgactacgaatctg

SEQ ID NO: 828017 - DNA, 98 bp, Homo sapiens
gtggctacagtgaccggagctcgggcgggtcctacagagacagttatgacagttacggttcaagcgtcctcagtaagccttgttcagtgactgtagcc

SEQ ID NO: 828018 - DNA, 98 bp, Homo sapiens
ggaaagcggcgagtaagatggaagatgaggaggtcgctgagagctgggaagaggcggcagacagcggggtggacaacaacacagcattggttgacaaa

SEQ ID NO: 828019 - DNA, 99 bp, Homo sapiens
ttcacgtcatttcaactatccaagcacaccaccttctgaaagaaatggcacttcatcaacttgtcaagaatacagattctgttcatcttgctctgaaat

SEQ ID NO: 828020 - DNA, 98 bp, Homo sapiens
caggacgaaggccctactgggcaagatctcagaaaactgatcttcacaatgaaggctacatcttggaattagattgctgttcctccttagaccacccg

SEQ ID NO: 828021 - DNA, 98 bp, Homo sapiens
caggccttccagtacacagacgagcatggggaaggcctgtgatcttggacccagccgaacccacaggtgacgtgggtggaggggaccgttggtgttgg

SEQ ID NO: 828022 - DNA, 98 bp, Homo sapiens
ggagtccctggaccggattaaagaggaattccagttcctgcaggcgcagtatcacaggtgttccattgcctaaagaggagaacatttctgctcccttg

SEQ ID NO: 828023 - DNA, 99 bp, Homo sapiens
ctcaccctacctgcggccgctcacgctgcattaccgccagtggacggaattgaccccaacttcaaaatggagcaccagaataagcgctctccactgcac

SEQ ID NO: 828024 - DNA, 98 bp, Homo sapiens
gctctgtgtctttccctgctgctctcagagataattgacgaccttgccaacctagtggagaacacagatgaaaaacttcgcaatgaaaccaggcgggt

SEQ ID NO: 828025 - DNA, 100 bp, Homo sapiens
ggaggagaagaaagcggagttcgagcggcagcgaaaaatgtagctacagcaagctgggtagcaggcagatccaaaggatatcatgaagtttccagggcct

SEQ ID NO: 828026 - DNA, 100 bp, Homo sapiens
cagccaatagaaaagcagaaagccgcctcttggtttgcgtcctgcactgaaaggaaatgacggattttcacatggattaattgatgtatgttgagtttat

SEQ ID NO: 828027 - DNA, 100 bp, Homo sapiens
ggagcgcaaccctcagctgcactactaccagggctaccatgacattgtggtcacatttctgctggtgggcacctcaacacctttgcttcgaatagcctgg

SEQ ID NO: 828028 - DNA, 101 bp, Homo sapiens
atcgactggaccaagatcgagcccagcgtcaacttcctcaagtcgcccaaaggtggatttcgccttcacagtgtggcagagcttccctgagaggattgtgg

SEQ ID NO: 828029 - DNA, 99 bp, Homo sapiens
agacttggtgacaagctggtctgagcagaggttggaaagaaccatgactgtattcaggaaggcacatgaactgaagcttctgtcagaatgccaatacaa

SEQ ID NO: 828030 - DNA, 100 bp, Homo sapiens
caccggctacttctcagctttaccatccctggaggagacctggcagcagatgacatgaagaatgcttacaagctgcatactttggatacttgtctaaaac

SEQ ID NO: 828031 - DNA, 99 bp, Homo sapiens
cggcatcccaccgccctacgacaagccccttggatctcccttcgtggagacgacaccggggtcctcctgcccaccccaggggaggcccaggatgctgat

SEQ ID NO: 828032 - DNA, 98 bp, Homo sapiens
atgcccctcaggctggaacttgccctgtctcctcgcagatgagagagggagccggcatcagaaaacaacactgggagctggggactgacagtacagga

SEQ ID NO: 828033 - DNA, 101 bp, Homo sapiens
gacctttttctccaagaaggacaagcccctgtgcccagctgtggtccctcaccagtattatggagttactccctggggagtctaccctgccagtcttttcc

SEQ ID NO: 828034 - DNA, 98 bp, Homo sapiens
tacatctgtcagatcttctcacactgctgtaaacacctgttcttcccggagcctatcagcaaagccattcccaaggctatggctacatgcaccagacc

SEQ ID NO: 828035 - DNA, 100 bp, Homo sapiens
ggcaggaattattggaggccaggtttactggagtaggtgttagtaagggatcgtgggactttaccagatcggtttgtaataacacctcgaagacgctatc

SEQ ID NO: 828036 - DNA, 98 bp, Homo sapiens
gaagatggcagctgctgaggaggagccgaagcccaaaaagctgaaggtggaggcgccgcaagcgctgaggtgtacaaagataatcaatgctgattcgg

SEQ ID NO: 828037 - DNA, 99 bp, Homo sapiens
ctcatcctgtccatcgtgtgcctgatgatcacgcagctggctggcttcagtggaccacttaattggcttagtgtcgacttcaataattggaaagactgg

SEQ ID NO: 828038 - DNA, 100 bp, Homo sapiens
cccaatcccactgatgaggatcagcccatgatttggataagtgaagacagtaataacattgaagcagtgaaccagtggaaagagacagtaataaatccag

SEQ ID NO: 828039 - DNA, 99 bp, Homo sapiens
tcagcggcgccttgcggagggaccccagagagtcaagccctacccgtcgagaagctgtgaagagaagaacagccgagtacctcatgcgggcagaaagta

SEQ ID NO: 828040 - DNA, 100 bp, Homo sapiens
gcagatttctgagctttcatttcctgcctgtaacacggccaaacaccagagcaccctagaaggtttaactaaaagaatgctcatgtttgacccagttcct

SEQ ID NO: 828041 - DNA, 100 bp, Homo sapiens
caaccgggagcggctcacggcggaggacgacgcgctcaaccagatcgcgcgggagataagaatgtgccttttgatgaaagaactttatctttctacaatg

SEQ ID NO: 828042 - DNA, 100 bp, Homo sapiens
tacaggatgtgactttttgagattggcttttttcgttgactatcctgcccctgagatccacccaagttgtggaacatggatgaagctggaaaccatcatt

SEQ ID NO: 828043 - DNA, 99 bp, Homo sapiens
tcccactggtttggacatattcctctcctgatctggcctcatctgttccagggaggtgggattgaacctcctgacagtgagtgagactgccaatgagcc

SEQ ID NO: 828044 - DNA, 60 bp, Homo sapiens
tgactttcaacgggactattatgatagaaaggagaagatgagtatgccaacgttgatgcc

SEQ ID NO: 828045 - DNA, 98 bp, Homo sapiens
ggtgagcgcagccactcaggctggtcctgggggtggggctgtaggggaaagtgctaaagccgctgaggtgctggttgccgaggagaacgtggacttcc

SEQ ID NO: 828046 - DNA, 98 bp, Homo sapiens
gactggttgatcagcagattggaaagactggaagcttcttcaggagaaggaagccaacatccttttggagccatgaatattgtccgaactccatctgt

SEQ ID NO: 828047 - DNA, 50 bp, Homo sapiens
tcaacatctctcagagacgaaaggtaggtagccatccaagcttcctgaag

SEQ ID NO: 828048 - DNA, 98 bp, Homo sapiens
aatacgtggttggagagctcatctggaattttgccgatttcatgactaaccagtgtgggagtgtaagataaccttccagataaagagttgctgctacc

SEQ ID NO: 828049 - DNA, 130 bp, Homo sapiens
cgtgttgagagacacgctcagcgaggaagaggaggacgactttcggctggaaggaccagaggagcgagagcagcaagaaccacacccagcagcaatgtcagcggaagtggaaacctcagagggggtagac

SEQ ID NO: 828050 - DNA, 100 bp, Homo sapiens
aagactaaatgaagattttaggcggtatcaaatggaaagtttttccaaatattcatctgtacagggaggaaataatgctggccatacagttgttgtggat

SEQ ID NO: 828051 - DNA, 100 bp, Homo sapiens
tcgtcgtcatcgtcatcttcctgtcagtctgcagctactcagcgatcaccagaatataccaattgtcggtatctatgcaaactttgcttaattcacattg

SEQ ID NO: 828052 - DNA, 100 bp, Homo sapiens
gaggcgagcagcacagagacggctgaaagctgagctaggaattcccttggaagaggaatgtatcctgtcaggtataatgtcagtgaatggcaagaaagtt

SEQ ID NO: 828053 - DNA, 100 bp, Homo sapiens
ctattgagttaaatgcagccaattatacagtgtgcctccttctgaagaaataaaaacaggtgaggatgaagatgaggaagataatgatgctctactgaag

SEQ ID NO: 828054 - DNA, 100 bp, Homo sapiens
caaacaataagatcactgtagtgggtgttggacaagttggtatggcgtgtgctatcagcattctgggaaagaccacggttgaccacaggtaactgaaacc

SEQ ID NO: 828055 - DNA, 100 bp, Homo sapiens
ccagggactctttggggtgaaatgtgaggcgtgtcaccagtttatcacagggaaagtcctggaggcacaaaacagcgttctcacggctcaccagccccaa

SEQ ID NO: 828056 - DNA, 98 bp, Homo sapiens
gctggagcggcagcagaaggaggaatagccaggccagaagaaggaaggcctgtggtgagtgggacaggaaatgacatcaccaccccaccgaacaagga

SEQ ID NO: 828057 - DNA, 100 bp, Homo sapiens
agaaatgtgaccctttgtggacatctccaccatggcaagaaacgtgatgaacgcaccttaataaatccagatattaaagttgtagactttggtagtgcaa

SEQ ID NO: 828058 - DNA, 100 bp, Homo sapiens
gctggagatgccaacgccgcgcggttgtaactcggccctagttacctggccagggtacgcgacaattggcggagggagctctgtccagcagattggcctc

SEQ ID NO: 828059 - DNA, 100 bp, Homo sapiens
ctccagtgcctccgacgcctcctgatgaaaccagccctgagcaaaggggttctgaggtccataccaagaagacggtgatgatcaagaccatcgagacacg

SEQ ID NO: 828060 - DNA, 100 bp, Homo sapiens
tgctccaggaggccagaaggaaatacaacattaaccaggtggtatttgttggaaatttcttgagaattaatacgatcgccatgcggcttttggcatatgc

SEQ ID NO: 828061 - DNA, 56 bp, Homo sapiens
aaacagctgagggggaggagacggtgggtttgagtcctgctggccggccctgatga

SEQ ID NO: 828062 - DNA, 100 bp, Homo sapiens
gtgggtgttggacaagttggtatggcgtgtgctatcagcattctgggaaaggatgttattgaaaattcttgtgatccagtacttgatctgcatatgtctc

SEQ ID NO: 828063 - DNA, 98 bp, Homo sapiens
agaaacgcaggtcatacagcttaatgaacaggatgtaaatgaagaccctggagaagatgtggccctcctctctgttagttttgaggacactgaagcca

SEQ ID NO: 828064 - DNA, 99 bp, Homo sapiens
agggagagccggatcctttcccagaagaatgagaatgaggtaccgattattcctactatcatgcaatattggaggctgcatttcagtttctgtcacccc

SEQ ID NO: 828065 - DNA, 100 bp, Homo sapiens
ccactaccgaaaagctgtctattgaatcagagatcattgatttcttcctgggggcctctctcaaggatgaggttttgaagattatgccagtgcagaagca

SEQ ID NO: 828066 - DNA, 119 bp, Homo sapiens
cttccacgacagaaaaacatacaagactccttcagccaacatgatggtactgaaagtagaggaactgagagcaacttcttcaagggcccggctctatgatgttgttgcagtttttccaa

SEQ ID NO: 828067 - DNA, 100 bp, Homo sapiens
aataccttctattccaacaaggagattttccttcgggagttgatctctaatgcttctgattgaggactcttgtgaagatatgagttgtggagaggagagt

SEQ ID NO: 828068 - DNA, 100 bp, Homo sapiens
gacaagtccatttgaagacattttcaagcagtgtctacgaacaattattgaaggcacaagaagccttggggagcagtactacaaagatgccatggagcag

SEQ ID NO: 828069 - DNA, 100 bp, Homo sapiens
tatagttagttcatttattaccaggcccatggaagtcagacaaaaggcttctgaattcccttctgagttaatgtcaaatgacagcaaagcactgtgtggc

SEQ ID NO: 828070 - DNA, 98 bp, Homo sapiens
tctgaaagactcagtgcagagagccagagactggcttcaggatgtagagggcctgcagctggggcaagaaggcaaagttcctctgcagagtgcccacc

SEQ ID NO: 828071 - DNA, 98 bp, Homo sapiens
caaactcattttttgatgcaacaggttatccggtgttggctcctgctgcttactatgaccaaactggtgcccttgtagtgaatgcaggcgcgagaaat

SEQ ID NO: 828072 - DNA, 100 bp, Homo sapiens
aaggcagtccaattaaagtaacactggcaactttgaaaatgtctgtacagccaacgtaacccttcccttattaaaaacatgcagagcagccacgcctact

SEQ ID NO: 828073 - DNA, 98 bp, Homo sapiens
acaacaagccattcatgggccggttttatgagtgggaaccatttgcagaagcctgcacagacaaggagttgcggaaccttgcctcccggctgaaggat

SEQ ID NO: 828074 - DNA, 100 bp, Homo sapiens
gttggagagactatggcgctcaacaagaatcactcggagggcggcggagtgatcgtcaataacaccgagagagagaagaagaaggaggttcctgctgtgc

SEQ ID NO: 828075 - DNA, 99 bp, Homo sapiens
ggccctgctgtctgcctccccggctgattggattcgttactgctttgcaacgcgcacctaactccaggctctaagggatggaaataagctggcacagat

SEQ ID NO: 828076 - DNA, 98 bp, Homo sapiens
taagactccaggacacccctgaagccgagaaatgccctttggagtgaatcaacctggaccttatatcatgtatacaactgtagatgcaaatgggtatc

SEQ ID NO: 828077 - DNA, 100 bp, Homo sapiens
cgagatgcccctgaggggggctttgatgcagtactccaggcagccgtctgcaaggatttgacgggatctgaactatacacccaggcggccagcctcctgc

SEQ ID NO: 828078 - DNA, 100 bp, Homo sapiens
tattacatgggccagcactgcttcatccgggaagtgcttggggatggagtgcctccaaaggttgctgaggctctaaaatccatccagttggccctgattg

SEQ ID NO: 828079 - DNA, 140 bp, Homo sapiens
tgagctgctggggaaaagggaaacgggagccctgcaaatggagcgacggggaggaagagcgagggtaatttagcccaagctgaagcagttggaagagaggcactggaattaatacctaatgatcactctctcatgttctc

SEQ ID NO: 828080 - DNA, 99 bp, Homo sapiens
tggaaaacccggacgacctggtgagagaggagttgttggaccacaggaaggtgtcttgctgcaggtaactaatgaagaagtggtcaaccacagagtctt

SEQ ID NO: 828081 - DNA, 100 bp, Homo sapiens
cttgcagcggggacgcgaggacccgggctgggctttcctcacccgggaatagccaggccagaagaaggaaggcctgtggtgagtgggacaggaaatgaca

SEQ ID NO: 828082 - DNA, 99 bp, Homo sapiens
agaacaagcctccaacacctacagtgactcctccagcatgttcgagccctcatccccaggagccgaatatatcactgatgtccattcgaatgacctgtc

SEQ ID NO: 828083 - DNA, 99 bp, Homo sapiens
ttccaggacacctgccatcatggagggttatccagcacctggaggatacctgctacctgtctccgaattcaatcctttgacgttcaccagcgtgatcga

SEQ ID NO: 828084 - DNA, 90 bp, Homo sapiens
ggtgcagattttaatttcagtgactgaattaaaaggtgtcaagaagctcagaatgtactgtaagattgatgttaaaggcatggtgttcac

SEQ ID NO: 828085 - DNA, 99 bp, Homo sapiens
ttctggctgctaatgtggccaccctggggctcctcatggcccggctccttagcacctctccagtgtggcaaaggagcagagaactttgacaagttcttc

SEQ ID NO: 828086 - DNA, 99 bp, Homo sapiens
aggaaaatagtatgggaattcctattatgaggcggggtttcaccatgttgcccagactggtcttgaactcctgagcttaagcaatccacctgcctcggc

SEQ ID NO: 828087 - DNA, 100 bp, Homo sapiens
cccaacattgaattgacctcgccacgcatgttcacctatgcctcgaagcggaggatccctgtgtcccagccgggcatggccgacccccaccagcttttcg

SEQ ID NO: 828088 - DNA, 100 bp, Homo sapiens
tcgcagtccggaggtgaggcggaactctgaggcgtccgacctccgatcatgaacgggcccctgcacccgcggcccctggtggcattgctggatggccggg

SEQ ID NO: 828089 - DNA, 98 bp, Homo sapiens
agcagttgaagaagtgaagaaattattggtacctgcagccttattccactgctggggattgatgtgtgggagcacgcttactaccttcagtataaaaa

SEQ ID NO: 828090 - DNA, 98 bp, Homo sapiens
cacggccgttttcatggctgcttaaaatggtctatggtctgtctctgccctgggctgcatcttgtacctgctgtgcttccggcagcacccttttgagg

SEQ ID NO: 828091 - DNA, 98 bp, Homo sapiens
ggaatatccatgtcggcttgtagagagattgcaggccatgaaatgacaagcattggactgctacttggtgtttctgctgcaaaactaggcaccatgga

SEQ ID NO: 828092 - DNA, 98 bp, Homo sapiens
cgccagcagaaatcctgaacgggaaggagatctccgcaccctgtattcagtggatcagctggcaccacccaaatagataaattggcccatctggtctt

SEQ ID NO: 828093 - DNA, 100 bp, Homo sapiens
ccagcaaataggaaaattaagtttagtagtgctcctattaagtcttcacagaaaagtactgtacagctaaccatgtggataagcttcctggcccaagaga

SEQ ID NO: 828094 - DNA, 99 bp, Homo sapiens
agctactcaaatgcagtcggcttgtcctggctcttgccctcatcctggttctggaatcctcagttcaagaactctcagaaattgagcccaatgtattcc

SEQ ID NO: 828095 - DNA, 98 bp, Homo sapiens
gatagcctttcacttattcatctgtccagcatgactcatccccgggagtgttgaactgcagctgaatatgtaaaatctcgactcccagaggcccttaa

SEQ ID NO: 828096 - DNA, 104 bp, Homo sapiens
gaataaataaaaatgactacttgcagtacttgcaattctgtggtgttcttggtcacacatttatggagtttctgaagggcagtggagattactgccaggcacag

SEQ ID NO: 828097 - DNA, 98 bp, Homo sapiens
aaaactcaacaaagcaactgagagctttgcttggaacattacagtattgaagggaggaagagatagtcgctctggatcacccatggctagacgctgaa

SEQ ID NO: 828098 - DNA, 99 bp, Homo sapiens
ttaatgctacttgcaaaggcgtgtcctactgcacagaggcagagctggcagattcgagtggtctctaccatgagggctccccatcaccaggctctccct

SEQ ID NO: 828099 - DNA, 98 bp, Homo sapiens
gggcccgggggtggtgacagcaggtctgaggaatttagataatgggctgtgtgcaatgtaaggataaagaagcaacaaaactgacggaggagagggac

SEQ ID NO: 828100 - DNA, 100 bp, Homo sapiens
tacacctttcacagcagtcttaaagtttgcagcagaagaattggcaggatcttgtggccagtggggtagtggagtatattgataccctggaagaagaaac

SEQ ID NO: 828101 - DNA, 99 bp, Homo sapiens
ccatccgtccgcgggtccgtggagctggagcagatcccccagccggctgagacaggtgtgatgaatgcagactctgctaccattttggctgtttggatc

SEQ ID NO: 828102 - DNA, 100 bp, Homo sapiens
tcacatatttgctcaacaaaatgatcaggaaattaaccattttctctcagtaagtgtttatgatgcacttccattgacaagacttgaaggactaaaggat

SEQ ID NO: 828103 - DNA, 100 bp, Homo sapiens
cccaacgcgggctttatgaggcagctgtctgagtatgaaggcatcttggatgcaaggaaggatgccatcctgttaactgatgcttttgacttcaccgatc

SEQ ID NO: 828104 - DNA, 98 bp, Homo sapiens
tagaacgatgtgaacatcgaatcatggaatcccttgcatggctctcagaattacatgaacgacagccttcgcaccgacgtcttcgtgcggttccagcc

SEQ ID NO: 828105 - DNA, 100 bp, Homo sapiens
acactacaaagaactggagttccagaaaggccccacccctgccattctagaatctctcatcagtttgggcttcctgtagacacccttttcctgcgcaaca

SEQ ID NO: 828106 - DNA, 98 bp, Homo sapiens
gtggactagcttcttcgctaattttgacacagaaattcctttcctgctagaactttcagaatctcaggcgggtgaggaaaatcctgccttgcttcgtt

SEQ ID NO: 828107 - DNA, 60 bp, Homo sapiens
atgtggcggattatgtgataccagctcaggtgggctccttcgggaatggcacggttctca

SEQ ID NO: 828108 - DNA, 98 bp, Homo sapiens
ggactccatcgactcccccggctcttagactaaacaatttctcacttgctatgaaactactgaaggagctgcataaagagtcaaaaaccagagacgat

SEQ ID NO: 828109 - DNA, 100 bp, Homo sapiens
ggctgatggcggatcaggatcggaagcctgcgtaactttctcccttgatccgggagtctttccactgggtcagcagcggactaaagccacaaccccagcc

SEQ ID NO: 828110 - DNA, 98 bp, Homo sapiens
accatctatgcaaagtgaaagctctgaacaagggtgatgccaactctgaagtcactgtgtactaccagccacagacccctttgcttctgtttttggga

SEQ ID NO: 828111 - DNA, 99 bp, Homo sapiens
ctgctctgctgccccgtgctcagctccgcgtacgcgctgtaatctatgccagcaattatgacaatgttagcagaccatgcagctcgtcagctgcttgat

SEQ ID NO: 828112 - DNA, 99 bp, Homo sapiens
atgaatttcctccgcggggtaatggggggtcagagtgccggaccccagcacacagaagccgagacggaatgaatctgaagtctgctgcagtaaaacaca

SEQ ID NO: 828113 - DNA, 100 bp, Homo sapiens
ttcagttaacacctatgaacagtctggccacctctgtattcagcatagctattcctgttgatggtgatgaagacaggtccaacgagcgctcctccaagcg

SEQ ID NO: 828114 - DNA, 100 bp, Homo sapiens
gaaccgggagccattcagaaaaggctttgatgaactaggtggacttctcaaaccaacagtggcctctcagaaccagaaccttcctgttgccaaactccca

SEQ ID NO: 828115 - DNA, 100 bp, Homo sapiens
aagttaaccctgctaaccttagcagaagaaaggacggtagacctgcccaagtctcccaaggaactttatattgctgttggaatatctggagccatccaac

SEQ ID NO: 828116 - DNA, 100 bp, Homo sapiens
tctttttaagaggcttcgcgcagttccaaccaacaagattttctggcatccttaaatcttgtgtcaaggattggttataatataaccagaaaccatgacg

SEQ ID NO: 828117 - DNA, 99 bp, Homo sapiens
aaggctctggcaacctggaggcaattcatattatcaagaagctaggaggaagtttggcagattcctatttagatgaagttgcagagcttgaagtgaaaa

SEQ ID NO: 828118 - DNA, 100 bp, Homo sapiens
tacttcaagaaagtacctcgtctcaaaacctggctgctatcagagaagaagggtgtttggggtgtgttttacaaagggcatattttagcactttatacct

SEQ ID NO: 828119 - DNA, 100 bp, Homo sapiens
cctgatttgagatcaattcttggagaacacaaagaagtgtgatgagtgttgttcgctgcctgtggcatccaaagctgaaccagatcatggttggaactgg

SEQ ID NO: 828120 - DNA, 100 bp, Homo sapiens
tccatccgtgtctgggacctggaagctgccaaaacagcccataacggtacgtgaaggccaaaccatctgtgtgcgtttctggcgatgcagcaattccaag

SEQ ID NO: 828121 - DNA, 98 bp, Homo sapiens
ttcctcctcgccatcgcctacttgatcgttaaagggttacggaggatgcagatccctatgtgcagcctgaagatgaaaactatgaaaatgactctgtc

SEQ ID NO: 828122 - DNA, 100 bp, Homo sapiens
gacctgctggtgttcgcccacgaccatggtgaatttccaatcatcagcccaggtcgggtatatgaatacacaagctgtaccacattctctacaacatcag

SEQ ID NO: 828123 - DNA, 100 bp, Homo sapiens
aagttttacaagatttaacctgtcatcaagacctgggattttggtggcaaggccaggcgggtgctgcctgggacccagtgactcagcacccctgcccgga

SEQ ID NO: 828124 - DNA, 102 bp, Homo sapiens
ctcacatcgtggagatggacaggagacctggaatcattgttggtgaggaagatcttctcagtcctccccaggacacaagcacagggttagaggaggtgatgg

SEQ ID NO: 828125 - DNA, 100 bp, Homo sapiens
tgaacagccaggcctctgtggcctaagtaacttgggaaatacgtgtttcatgaactcagctattcaggttgctgaaaagccaggagtcaaaatgactgag

SEQ ID NO: 828126 - DNA, 98 bp, Homo sapiens
tcagcatgagcaaaaactccaaactcctctccaccagcgccaagagaattcagcggggtgccaagtcgttttctgtgtgggttgagagacaggctgtg

SEQ ID NO: 828127 - DNA, 98 bp, Homo sapiens
tgaaagctttctgcccagagctcctggaccaatgcatcttcccaccaccttaaaccactggattaacacagattcctcagatccagaagactgaaatt

SEQ ID NO: 828128 - DNA, 98 bp, Homo sapiens
ttatctttatctgtggcatgcaactggctcaaactgctttttctgcaaaccctgccaatccagcaattttgtcagaagcttctgctcctatccctcac

SEQ ID NO: 828129 - DNA, 98 bp, Homo sapiens
gacaccacagccacccttggtgatgagcctcggaaagtgctcctgcggctgtatggagcgattttgcagatgggcagggtgccatttgccgtgcctga

SEQ ID NO: 828130 - DNA, 100 bp, Homo sapiens
gggcaaacccaggcgaaatcattactataaggtgctatacatttgccgaaatgccttggtatcaaagaagaattgctaaaatgctgtttgcaactcctcc

SEQ ID NO: 828131 - DNA, 100 bp, Homo sapiens
tcttctttggattattttacaaaaccagactaccaggaactgcaagcacatgttgaccagataactgaaatggcagcagtaatgaggaaagccattgaaa

SEQ ID NO: 828132 - DNA, 98 bp, Homo sapiens
attgcctttgggactctgaaggctgaagttgaggaaacgtgtgaagcttgaagggaaagaacttgaagaatacttggaaaaagagaaactaaagaaag

SEQ ID NO: 828133 - DNA, 98 bp, Homo sapiens
ttcttcatcaatttcatagccatttattaccatgcttcaagagccattccttttggaacaatgggcagcagctcatcccagctccagtcgtggactgt

SEQ ID NO: 828134 - DNA, 98 bp, Homo sapiens
gcaaaatgttctttactactaagcaccgttggtatcctcatggacgctgagtcatccaatggtggctattcctgaacatgaagctcttgattccaaag

SEQ ID NO: 828135 - DNA, 100 bp, Homo sapiens
cttgacacggatatcacctttgccactgacattgcagagctgtgggctgtgttccacaagttcaaaggaaatcagagatggtggttctctcaaaatgatt

SEQ ID NO: 828136 - DNA, 115 bp, Homo sapiens
tcgcgccggatgcggagcgcggtgctgccggtggagcttcaggtttgtggtaaatatgccagctctagaacacatgaatcagattttacacatcttgtttgtatttttacccttt

SEQ ID NO: 828137 - DNA, 99 bp, Homo sapiens
tgttacttattcctgttattggacccagtccaagccttatgcatttgatcgggtgttccagtcaagcacatctcaagagcaagtgtataatgactgtgc

SEQ ID NO: 828138 - DNA, 100 bp, Homo sapiens
tcataagggatccgcagctgctcccgctctccaggtttgctggttggctcccgagcagacagcaggaaagaagaagcccttcgtgtacacccagggccag

SEQ ID NO: 828139 - DNA, 100 bp, Homo sapiens
tgggatcctttatcctggtcatcttctatttccaaacgtttgcctcagcatggagggcggggccgcggcagccacccccacagcactgccttactacgtg

SEQ ID NO: 828140 - DNA, 98 bp, Homo sapiens
atgtggcaaacacgtcttagtacacatttggatgatgaagtggttctgcagtgcaccgcaaccatccacaaagaacaacagaagctatgcttggcagc

SEQ ID NO: 828141 - DNA, 100 bp, Homo sapiens
ctcagcagacccttcctgagggccgagcaacagtgtagtggcgtattccacatagcaaacaggttgctgaaaagccaggagtcaaaatgactgagcgctt

SEQ ID NO: 828142 - DNA, 100 bp, Homo sapiens
cgcccaagtccctctactcgcgaggtatgatctcgtgaaatcttgagagaaactgaatgacgaatgaaactattgttcctgtttcacacagaagaaaact

SEQ ID NO: 828143 - DNA, 98 bp, Homo sapiens
tgggacctattgttcagttacaagagaaactttatgtgcctgtaaaagaatacccagatccttacgaaggatgaatccaaaaggccaaagtataaaga

SEQ ID NO: 828144 - DNA, 99 bp, Homo sapiens
agagattgtcatcagagatgatcaagaccccagaccacatgaaatgaagatcacctctgcctatctacaggacattgagaatgcctataagaaaacctt

SEQ ID NO: 828145 - DNA, 100 bp, Homo sapiens
tgcagtatttctttggcatcactgcagctagtaatttgccttctggattcttttgctctgcatgcctgcaggaatgtctgaagccgaagaagcctgtctg

SEQ ID NO: 828146 - DNA, 100 bp, Homo sapiens
agttagcattttggaggcgctgctttgccagtcaatttctcatttaagcgtgacagcaactgtgtgaggaagatcttctcagtcctccccaggacacaag

SEQ ID NO: 828147 - DNA, 98 bp, Homo sapiens
tccaccagagtcattgcaggaagtggatgagttccacctcattttagagtatcaagcagactatccccataaatacggtcctcaggggggctgtgcag

SEQ ID NO: 828148 - DNA, 100 bp, Homo sapiens
ttcttgcaacagcgattttgggagcagtttcctggcagaacctgctaaggctgcctcagacctgactgcctggttcagcctcttcgctgacctcgaccca

SEQ ID NO: 828149 - DNA, 100 bp, Homo sapiens
ggagctggagaagaggaagctggagaacgagggcctgaggagcgatgcgacaggcatgatggaggtcgagtcctcctactcggacttcatctcctgtgac

SEQ ID NO: 828150 - DNA, 100 bp, Homo sapiens
tgcgctgtcccaaatccgctgttactatgagaaatgaagagctgcttttaagcggggccttttccgaagtggttttagctgaagagaaggcaactggcaa

SEQ ID NO: 828151 - DNA, 100 bp, Homo sapiens
gtctttttggccagatcaaaattcgccaacactagagccagatgaccaagatgctccagatgaacatgagtcgcctccacctgaagatgccccattgtac

SEQ ID NO: 828152 - DNA, 98 bp, Homo sapiens
gggcgaaccggccccccacagccactgcagttgcgacaaccaccagttaagcgtttgagacttcgtggtgattggtcagatactggacccagagcaag

SEQ ID NO: 828153 - DNA, 99 bp, Homo sapiens
aagctctcaagtctgttgagactagcactacttgcattaaaagtctgtatggaaaatggttctcctgaagaacatgcaatctatgtttgggatcatttc

SEQ ID NO: 828154 - DNA, 98 bp, Homo sapiens
gcggagatctctctcatctcgctcggctgcgggaaatcgggctgaagcgactgagtccgcgatggaggcagcctgcttctgcaaagtggtacgatcga

SEQ ID NO: 828155 - DNA, 100 bp, Homo sapiens
gctgattaaggactatcgggagaaagtggagtccgagctgagatccatctgcaccacggtgctgcctcagactatggcatgaaactgccaatcctgcgtt

SEQ ID NO: 828156 - DNA, 98 bp, Homo sapiens
ttctcaagagtctgccctttccgaggaagaagaggatacaaccaggcctcttactatgaatcaaagttgagaccaagaaattatttctgaaaaaggat

SEQ ID NO: 828157 - DNA, 100 bp, Homo sapiens
ttccgctgtgcaatatggcaacgctcagcgggtcacagaaagtcgagagagccaaatgacgattgaggagaggaagcagctcatcactgtgagagaggag

SEQ ID NO: 828158 - DNA, 100 bp, Homo sapiens
ggtgccgctagccaagctgtcctgcctgggagaaaaggttctgcaggacgatgagttcacctgtgacctcttccgattcctgcaactactctgtgaggga

SEQ ID NO: 828159 - DNA, 98 bp, Homo sapiens
ctggccatccttccccacccaggaccacctcccggccacgccccgggtccggctctcattcaaaggctaccggctctctgaccagttccacgacatcc

SEQ ID NO: 828160 - DNA, 100 bp, Homo sapiens
tactcgcacagagtacagacttattgtggagaatttgtcaagtcggtgcagctggcaagacctaaagcttctagaattcctctccagagctactctcaag

SEQ ID NO: 828161 - DNA, 100 bp, Homo sapiens
ttccatggtagctgggatgttagggctcaggatgggagcaaagtgtttacggcatcgtgtgataaaactgccaaaatgtgggacctcagcagtaaccaag

SEQ ID NO: 828162 - DNA, 114 bp, Homo sapiens
aagtttgtcctgtcctggatcagtttctttgtcatgtagccaagactggagaaacaatggtgcaacaccggaggatttcagcaacctcccacctgaacaaagaaggaaaaagct

SEQ ID NO: 828163 - DNA, 98 bp, Homo sapiens
aaacatcaagaagaaagaatgcgtgtattttgtggaaagttccaaactgtctgatgctggataacgaaggaggcccaacttcattcaataaggagcct

SEQ ID NO: 828164 - DNA, 98 bp, Homo sapiens
aagatctctttaagcaagaggagtctctgaaggcctcccagacctgtaaccagcatgaacgacaccctgttctcccactctgttccctcctcaggaag

SEQ ID NO: 828165 - DNA, 100 bp, Homo sapiens
tggaaaaaagagaggatttgcttttgtaacttttgatgatcatgatacagttgataaaattgttgacatgcggctcatgcagggggatgagatatgcctg

SEQ ID NO: 828166 - DNA, 98 bp, Homo sapiens
gactgttcgtgatatttcatatgttttagctacaaacatttatctaagatggaatcttgctctcttgctcagactggagtgcagtggcatgaccttgg

SEQ ID NO: 828167 - DNA, 100 bp, Homo sapiens
tcttgagggatgcacctatggattccattgaatgggctgaagtggtgatcaatgtgaacaatattctcaagcctggagaacagctccctccagagatgac

SEQ ID NO: 828168 - DNA, 100 bp, Homo sapiens
tctgcacttcgcattttggcattgacatttaattttagggtcctttatatagaagggagagtaggagacccatcggctctaccgcctgaagctggaggag

SEQ ID NO: 828169 - DNA, 100 bp, Homo sapiens
cggagacttggatgaggtgaaagactatgtggccaagtatcaccttttgccatgatagcatttctttcattggacagttccttacaagggctccactcag

SEQ ID NO: 828170 - DNA, 100 bp, Homo sapiens
ggactgcaaggtggtttcctgtaaaaactgcagcatccagcgtggacttaagaagacacatcatctcagagttggagcacctgacgtttgtcaacacgga

SEQ ID NO: 828171 - DNA, 98 bp, Homo sapiens
atggaaaagctcctattctgattgctacagatgtggcctccagagggctagcagtctctggtcccagcccaccccatggcccctcccagtcccagcac

SEQ ID NO: 828172 - DNA, 99 bp, Homo sapiens
tctgaggtcttctaaatcagaatcaagatgcaacatttcatttgttgcatttccagtttccaataccaactcacctacaaagattttaccaaaaacctt

SEQ ID NO: 828173 - DNA, 98 bp, Homo sapiens
gctgtcctcgtcctccagctgttatctggaaggtggcacaagaatggctcaactctccaaatagagagaatttctatcagttgcaagtacgaaaattt

SEQ ID NO: 828174 - DNA, 100 bp, Homo sapiens
tcgtcacggacactcctgagctacagagactgaagaggactcaggagcaaatcagtaatatcgatgctatagaagacaaacaagggaaggttttttttcc

SEQ ID NO: 828175 - DNA, 100 bp, Homo sapiens
gacagtggagacactggcattggaacttcctgttctgatagcgtggaagacatgcacatgatggtgtccaagccagaacagtgggtaaagccaatggctg

SEQ ID NO: 828176 - DNA, 98 bp, Homo sapiens
gaacactcaagtgaagcaaaagccttccatgattacatgggagacctttaactctgaaggacatatgggaaggagttcatgagtgctataagatgcga

SEQ ID NO: 828177 - DNA, 98 bp, Homo sapiens
ccccaatatccactctacccagctgggcccccagtctacaaccctgcaggtttaccgctccaagatggatggcgaggccaccagcccccttccccgga

SEQ ID NO: 828178 - DNA, 99 bp, Homo sapiens
agcaatcagctggcctggtttgatactgacctgtaaatcatcctttagagttttccgtctgatgaaggttggccatttgcaaagtatcttggagcttgt

SEQ ID NO: 828179 - DNA, 100 bp, Homo sapiens
ctgtggctgcttcaaccattgacagttttgctgctgctgggaatctgagaaaaaggggttgattgaaagaatctatatggtacaggatattgtttcaact

SEQ ID NO: 828180 - DNA, 100 bp, Homo sapiens
cattaccatctttacgagaattcttgacagacttctggatggttacgataatcggcttagaccaggactgggagatggagtctcgctctgttgcccaggc

SEQ ID NO: 828181 - DNA, 100 bp, Homo sapiens
gggaagacgtcgctggtgctgcgctactgcgagaacaagtttaacgacaagcacatcaccactctgcaggaccagatctttatggaaaatgtaggtgcag

SEQ ID NO: 828182 - DNA, 98 bp, Homo sapiens
tttccatcatgtacacaggagcaccagtggcatccagcagctggagggtctgtcagccatggaggtggaagtcaggtgcagctgcagcggccgtcacc

SEQ ID NO: 828183 - DNA, 100 bp, Homo sapiens
gtttgtgtccagcgtgcccaggtgtgatctgcatcagccactatgtgattgtcatgtccatgaccatctttttggtgttcctcaatggcctggcccagct

SEQ ID NO: 828184 - DNA, 98 bp, Homo sapiens
tcttcttcgagtatttgtagaagggtaagggagcgactgagggtttctttagaaagagtctctgcactggaagaagaactagctgctgctaatcagga

SEQ ID NO: 828185 - DNA, 100 bp, Homo sapiens
agtccaaaagatgcaaaatctattataattgcagaatgccactctgtagacattaaattgagtaaagagcagcattagtgccagcagtagttcccaaggg

SEQ ID NO: 828186 - DNA, 132 bp, Homo sapiens
aatggcaactatgtttggatgttggatctacactttctcaagcactgtgatcttcaaatgcacattgcaagcaacccgtgccttgatggtggttggcatcctcctgggagtgatagcaatctttgtggccac

SEQ ID NO: 828187 - DNA, 98 bp, Homo sapiens
atcatgatggacttggagctgccgccgccgggactcccgtcccagcagtgtcatcctgtgaccaagagcaccagtctgccctggaggaagccaagcag

SEQ ID NO: 828188 - DNA, 99 bp, Homo sapiens
tctgatcagtgacacgggggagttaaagctggcagatttcgatccgtgattctaactgcaactatgaggcctttatgaacattattaaattgagtgaca

SEQ ID NO: 828189 - DNA, 107 bp, Homo sapiens
ccagacactatagtcgagccaaacagacgctccctgtgatttatgtcaagaggaagtggcttttaggaagaagaggctgtgcattaaatttattccacgggattcaa

SEQ ID NO: 828190 - DNA, 100 bp, Homo sapiens
ctttgatgcgacctcaggaaggagatgagaaaatccaagtccggctagtacgcgaattggagaaaaagttcagtgggaagcatgtcgtctttatcgctca

SEQ ID NO: 828191 - DNA, 99 bp, Homo sapiens
atctttccggatcaatccagatggcagccagtcagtggtggaggaagctgaatatggtgggcatgatcagatagatttgtatgacgatgtcatatctcc

SEQ ID NO: 828192 - DNA, 99 bp, Homo sapiens
ccgtcttcccggcgagtccgcgacggtcgccgcccacggcgagaattcgacaccaaattttggaacttaaaaagaagattcttaaaacttacaatccag

SEQ ID NO: 828193 - DNA, 100 bp, Homo sapiens
ttaggattcaagatgaccaacgaagaacctcttcccaagaagcaataatgacgatgaggacctgacaccagagcagaaggcagagcgtgagaaggagcgg

SEQ ID NO: 828194 - DNA, 100 bp, Homo sapiens
ctctcttggcagccttcctgatttctgcagctctgtgtgaagttatttctcaaactctgaggctgcggagttcacacattgaaatctgtcatctttttca

SEQ ID NO: 828195 - DNA, 100 bp, Homo sapiens
tctacacctacaccggcaaaagccactttatgcttcctgatgacgatgtacaagggatccagtctctctatggtttgaagatgccgcatttggattggat

SEQ ID NO: 828196 - DNA, 98 bp, Homo sapiens
tggttcgcgtggtagcagaggagcttgagattgatgaactcccagagggcgctgtgaagcctccagcaaacaagtatcctatcttcttttttggcacc

SEQ ID NO: 828197 - DNA, 99 bp, Homo sapiens
agaacattaaacacaacctaaagaagttaatggaagtggatggaggagagattgttaagactggtgtcgttcagtatttctacattgaagactggcaat

SEQ ID NO: 828198 - DNA, 98 bp, Homo sapiens
tagtgttttccgtggaatattatcagtatgaagtgtaacagaacagactttaccacctgaaactgctgcttcaagttcagatcaggcaaggaacaaac

SEQ ID NO: 828199 - DNA, 98 bp, Homo sapiens
actgggtcagcttcatcctcggcggcggtggccgctagctccaaggaagcatttgacattgtgcagcaaagaaatggttatggagaagcccagtccgc

SEQ ID NO: 828200 - DNA, 100 bp, Homo sapiens
tgtcttcggtggactccttcggcagtccacccaccgccgccgcctcccaggcctttggaaatgccaagaccctccggaacgataactccagcaggttcgg

SEQ ID NO: 828201 - DNA, 98 bp, Homo sapiens
gttcctgtaatagaaatgtgggcagatcaactgacatccttaaagttaccgcgcttgaatgcctacagaggttactgtagtaaccagctggcagccaa

SEQ ID NO: 828202 - DNA, 98 bp, Homo sapiens
cttgcaacactttctcattgtattgaactaatggttaaacgtgaggacagctggcagaagagactggataaggcatttattaatacagcaaaagaaat

SEQ ID NO: 828203 - DNA, 100 bp, Homo sapiens
acaagattcttcatggatcaggcaagctttgaacttcaggcatttatattccagaggatgacaaagatgccccagagaagtttcggggtcttggtgtacg

SEQ ID NO: 828204 - DNA, 100 bp, Homo sapiens
gatgggaagagccccactgtgccctgtctacaggaagaggctggagagccattaggtggcaaaggagccttcacgtaaatgggtccagtcatgcctccca

SEQ ID NO: 828205 - DNA, 100 bp, Homo sapiens
acaaggagaacatcgccaaatgtgtctgacttccagcaactgctggcctgtgccagggtgcaagctgagcactggagtggagttttcctgtggagaggag

SEQ ID NO: 828206 - DNA, 100 bp, Homo sapiens
tttggtcactgaggaagagatcaatcttaccagagggccctcagaaacatgagttctgctggcgctgatgggagaaaagcgatgagaagatgtgacggac

SEQ ID NO: 828207 - DNA, 100 bp, Homo sapiens
gtggatcttcttggagcgagcagatgcaatctcttgtctcacatgctagcaacataccagggctacaaacctcctgatgaaggaccttctgagtaccaga

SEQ ID NO: 828208 - DNA, 100 bp, Homo sapiens
ccggaacctggtggaccccatcacacacgacctcatcatcagcctggcacgctacatccactgtcccaagccggatcttttgccagaaatgagggcatac

SEQ ID NO: 828209 - DNA, 109 bp, Homo sapiens
acacacacgccctcacgcccggcgagcccgcgagttgagccccatatgggggttggcaggcagcagagaggcccctttcaaggtgttcgggtaaagaactcagtgaagg

SEQ ID NO: 828210 - DNA, 100 bp, Homo sapiens
cagagttcattggccaaggagtgccccctttcacaggtgattaaagtatacagtgaagatgaaaccagcagggctttagatgtacccagtgacataacgg

SEQ ID NO: 828211 - DNA, 100 bp, Homo sapiens
aatgatgggcgtacagcctgcagcttatgttagtgctcctgtcacccaccaactagcacaacctgttgtagtcaaagccaagagctccctgctgattcac

SEQ ID NO: 828212 - DNA, 98 bp, Homo sapiens
ggacgccaaggcgaggcaggactgtgtcaaggagatcggcctcttgaaggtgaaaattagttctgctgtgcttaaagctgcggcccatcactatggag

SEQ ID NO: 828213 - DNA, 98 bp, Homo sapiens
gaaagcggccagtgatatccaggaaggcgatcttattgaagtggtcttgtcaggggcccagatcattgatctgatgatgctggtcatcgatgtgacca

SEQ ID NO: 828214 - DNA, 99 bp, Homo sapiens
gtggcagtgatggccaatggggactttggagagaccatacacaatgtgagaacccagagaagaatgaggcctttctggcccgccaagctgccccctgtg

SEQ ID NO: 828215 - DNA, 98 bp, Homo sapiens
tcatgagcgatgttaccattgtgaaagaaggttgggttcagaagagggagaggtacagaaagcagtcaacactgcccagggattgtttcagagatgga

SEQ ID NO: 828216 - DNA, 51 bp, Homo sapiens
tccaccagcggttccatcctacacttggacttaattcagtgcacaaatgag

SEQ ID NO: 828217 - DNA, 100 bp, Homo sapiens
cgcgtggatcctgctcaccttgggcttggtggcctgcgtgtcggcggagtcggaatagccaggccagaagaaggaaggcctgtggtgagtgggacaggaa

SEQ ID NO: 828218 - DNA, 99 bp, Homo sapiens
ttgggaatcaggtctggaatactcctaaccaagaagttgcccagcggaatcccgactgtgcctgggaaggtgaccctgcagaaggatgctcagaacctg

SEQ ID NO: 828219 - DNA, 98 bp, Homo sapiens
caggtttccccgcaaatgactggtcacgcgggactgaacaccgcacaggcaggaggcatggccaaggttattgttgtgggtaatccagccaataccaa

SEQ ID NO: 828220 - DNA, 100 bp, Homo sapiens
ccgaagttatgaaaggaggagatcaagaagtcggtcttttgattacaactatagaagatcgtatagtcctagaaagtggtcctgcagttgaaataactgg

SEQ ID NO: 828221 - DNA, 98 bp, Homo sapiens
agaggacaagaatgatggtggaaaatcaagaaaagggaatatagaacttgcctcatcagaaatgtcctgtctcatggaagcactggaggataagcggg

SEQ ID NO: 828222 - DNA, 98 bp, Homo sapiens
gttccatcagctcagccaggtcttcccatttgcttatgtggaccccttgcactgtaacatggcctatttgtaccttgagctcctcaaagactcactca

SEQ ID NO: 828223 - DNA, 98 bp, Homo sapiens
actcggcgacagctaacggggacgacagggaccccgagatcgagctctttgtgaagggtgctggtgacagctttgtgggagctctggccttctacctg

SEQ ID NO: 828224 - DNA, 100 bp, Homo sapiens
gagatgaagacgagactttcaaagatggaatcacaaacggcgcacattggtatgatgtggaaggtattagcaactatccagaaagcaccatagcaaccag

SEQ ID NO: 828225 - DNA, 98 bp, Homo sapiens
gagtctcactcaatggaagctggatttcctctcctgtaaaatgagaaattcgagctcaactggtagaacaacaaaaatgcctggagcagcaaacggag

SEQ ID NO: 828226 - DNA, 100 bp, Homo sapiens
tgtacacactgctgtttaccttggcgaggcctttcaccaagtccatggtcatgttggcagcttcctattggtctcttctggccccagcagttgagatggc

SEQ ID NO: 828227 - DNA, 99 bp, Homo sapiens
tcagttgtttgatttcatcgatgatctggcagacctcagctgcctggtattgggagtatgtatttaaaaacagtgaattttcatcaaagcaagagacat

SEQ ID NO: 828228 - DNA, 100 bp, Homo sapiens
tgggggtcatcgacagctgcaaggaggccgtcaccttcaaggccgtcagacaagatacgggaatatgaatggattcattcccaaaccaaaagattgaagt

SEQ ID NO: 828229 - DNA, 122 bp, Homo sapiens
cagttcgcctggcccttctaccagcccgtggacgcaatcaaattgaacctgccgcgagcatgacctgggggaggacatctacgactgcgtcccgtgtgaggatggaggggacgacatctacg

SEQ ID NO: 828230 - DNA, 98 bp, Homo sapiens
gaacactggcatcatctgtaccattggccccctcagaccgtgccatgggtgacagtgatgacgagtacgatcgaaggcgcagggacaagttcagaaga

SEQ ID NO: 828231 - DNA, 100 bp, Homo sapiens
cacgtgctcttgctaaagaggtagcaagaaagaaaattagagtgaatgtagttgcaccaggtttccacttgagcggcacagtgacagaacctgcaataca

SEQ ID NO: 828232 - DNA, 100 bp, Homo sapiens
ttatcaacttaaaagatgccacctctaagaatctgtgaaggccttgctgttaaagggcaaagctcctgtggacccagagtgtacagccaaggtggggaag

SEQ ID NO: 828233 - DNA, 101 bp, Homo sapiens
ttatctgtcagtgctgtgtgacagcatcgcaacgggatctgcagaacctgaactcgattacatgaagcagatgacatttgaagcccaagcctttttagaag

SEQ ID NO: 828234 - DNA, 130 bp, Homo sapiens
cgcctcttgtcagccgccgccacccaggccgtgcctgcccccaaccagcagcccgaggtcttctgcaaccagacctgcgaccgcatcaagcagtccgccagcggaaccaagcggcgcgtgttcatcatcg

SEQ ID NO: 828235 - DNA, 100 bp, Homo sapiens
aagctaacaagaatctgattttgaaggctatatctgaagctcaagaatccgtaacaaaaacaactaactactctacagggatatatcattcagaaaagag

SEQ ID NO: 828236 - DNA, 100 bp, Homo sapiens
agctcctgggcaaggggacgtctgcagctgaaactgtcagaccttcagcagcctcagctgcctgagcgcagggacagaggactgcggtccccagagcccc

SEQ ID NO: 828237 - DNA, 98 bp, Homo sapiens
tgcacttgcactagcagcgaacgattcgacactcgcctatggggacatgaaccacgagtggatcggcaacgagtggctccccagcctgggcctccccc

SEQ ID NO: 828238 - DNA, 100 bp, Homo sapiens
gaccatgatggggactttgagatcgtcgtggcggggggcaaaggaccactaaagcatacaactgatgtgatctatgcagcgaaaatgatatcagaatcag

SEQ ID NO: 828239 - DNA, 98 bp, Homo sapiens
gcaggttgggagatggcaaagacatcttctggtcagagatacttcttaaaagtatcactacacagccaacaaaatctcatgactgtctcaaatcttgg

SEQ ID NO: 828240 - DNA, 100 bp, Homo sapiens
aacttgaggctcctttcactcaggatgacacccttggactggaaaactcacacccggtctggacacagaaagagaaggtaatctacagttgctgcagaac

SEQ ID NO: 828241 - DNA, 98 bp, Homo sapiens
tcaactccacagcagctgatgaggtgacagctcatctggcagctgcagaccgaagccaggacagcacagccgtagcactctcagactctagctcaacg

SEQ ID NO: 828242 - DNA, 100 bp, Homo sapiens
tctcccctattgctggctctgcagggctctgatcaagcggatccaagccatgattcccaaggccaggacgactggaatgggaccaggccgtcgctgaagg

SEQ ID NO: 828243 - DNA, 100 bp, Homo sapiens
cgcggcccccagccagagccagcatgcagaacaggaaagcaggcaggatgggagagtcgccgatagaaccacctcttccctgcctcctgggcttggggga

SEQ ID NO: 828244 - DNA, 100 bp, Homo sapiens
gatgaaggatacactcccttgatggaagctgcccgggaaggacatgaagaaatggtggcactactcttagcacaagagaaagatgctggtttcgagtttt

SEQ ID NO: 828245 - DNA, 100 bp, Homo sapiens
gagtttgcgactcgcggaccggcgtccccggcgcgaagaggctggactcggattcgttgcctgagtggtctaccatcacggcaacagtgcgacgggcggc

SEQ ID NO: 828246 - DNA, 98 bp, Homo sapiens
acttagtaaagaaaaagcctggcagaccttcatcattgacttattattgcactgtccaagcaagatggacactccacagctgaccttgactgaactcc

SEQ ID NO: 828247 - DNA, 100 bp, Homo sapiens
atattctcaaaacactcgtgaaaagctgccgaccactggtcaaacaaatggattttacagaggcttacgcggacacgtgctctacagttggacttgctgc

SEQ ID NO: 828248 - DNA, 98 bp, Homo sapiens
gaaacaagagtgcttatcccagctaagctccagggaaaaggccaaagttgttgagcccctggactatgagaatgttattgcccaaagaaaaacccaga

SEQ ID NO: 828249 - DNA, 100 bp, Homo sapiens
cccttatcgatattatgagagcagagcatgatcctcttaaggatttaatccagagactgacttcactatagaacccacagttgtatcaatggttggggaa

SEQ ID NO: 828250 - DNA, 100 bp, Homo sapiens
gaaaagcggcacgacaacattaaaccatcagatgaggtgccagcgagatttcagattcctgtaaacctctaaagaaaaggagtcgcgcctcaactgatgt

SEQ ID NO: 828251 - DNA, 98 bp, Homo sapiens
atggatcctgctttgcaaatggcaaatacggctgagctcattggaagtctcacccacaagctggagaccctccaggaggcgaaggggagcctgctcac

SEQ ID NO: 828252 - DNA, 100 bp, Homo sapiens
ggactgagcatttctctgacttgacataacttcccatccagccaggagtctgcactcttcagtctttgcagacttgtgcaccatggacaattttgctgag

SEQ ID NO: 828253 - DNA, 99 bp, Homo sapiens
aacaaaatatgcaaaatgatatcaagttagcatttacagatatggctgaggagaatatccattattatgaacagcctcaaggaataggttctcctagtg

SEQ ID NO: 828254 - DNA, 100 bp, Homo sapiens
attatattccctccaattcctgatcctggcaagatttttaaagaaatgtttggagaccagaatgatgatactctggtctcatcagaaaattgaagactcc

SEQ ID NO: 828255 - DNA, 98 bp, Homo sapiens
tggctgctctcagcccccaagctggttcccgctgtagcaaacgtccgcggcctctcaggtacgacagtgccagcccacagggccatcctggtggcccg

SEQ ID NO: 828256 - DNA, 101 bp, Homo sapiens
tttttttgtatgaaattggaggaaatattggtccacaaggagaatccagaacaggtccaccagggtccacaggttcaagaggtccccctggcccccctggc

SEQ ID NO: 828257 - DNA, 99 bp, Homo sapiens
ctacatctcccacaggaagtgtcacacagcagtcaagtatgtcccaaacgtctatcatgtttcaggcatatggagacaaacagggaccactgcatggaa

SEQ ID NO: 828258 - DNA, 100 bp, Homo sapiens
tggtgattgttgtccaggactggttcacagacctcagtctctacaggataggatttttgggccttggtctcatgggaagtggaatcgtctccaacttgct

SEQ ID NO: 828259 - DNA, 100 bp, Homo sapiens
aaatatggaagtgacaaagtacgtgtgataaccctggtgaagaatcgtggaaaaggtggagcgattagaatgactatgaaaatgatgttagacaaaaagc

SEQ ID NO: 828260 - DNA, 98 bp, Homo sapiens
gccacaaatgtacccccagtacacttactactatcctcattatctccaaaccaagacacctctcattgaacctcacgttcctcttcgtcctgctaaca

SEQ ID NO: 828261 - DNA, 100 bp, Homo sapiens
gggagaggttcgactgatgataagggcccggtggccggctggataaacgccctggaagcgtatcagaaaacaggccagtggaatgcagtagccctctggg

SEQ ID NO: 828262 - DNA, 100 bp, Homo sapiens
gggaaagccactgttcggttaaaggagcctcctgtggatatctgtctaagtaagatcaaagccatcggccagacagagttgaatgcaagcaatccagaag

SEQ ID NO: 828263 - DNA, 100 bp, Homo sapiens
aaacagacagaagaaggaagtggctaatggttcatctctaacaagtatttagtgaaacgacagagcagagactatgatgtggaatggggctatgcttttg

SEQ ID NO: 828264 - DNA, 99 bp, Homo sapiens
cagaatctctccaaagaaattcctcaaacagaatttcacacagggtattccatggagaatgagcagggaggagagagcgatggcttttttcacccagaa

SEQ ID NO: 828265 - DNA, 98 bp, Homo sapiens
ggatagttctgaatggcatcgacctcaaagcatttcttgatagtctaccagatgtgaaaattgtcaaggaatgcttccggatcccaagaacactcaca

SEQ ID NO: 828266 - DNA, 98 bp, Homo sapiens
tgactgcgtcaggcatctcaatcatgaatttaagaagtgcaacatggccaggggctgcctctgctgcttgaagtacatgatgttcctcttcaatttga

SEQ ID NO: 828267 - DNA, 100 bp, Homo sapiens
ttggaacaagcaactggctattgaaaagtagaatatcagagagcctaaactatgaacattggtgttactgtcctgatttctaccaccgtctgcatctttg

SEQ ID NO: 828268 - DNA, 99 bp, Homo sapiens
tccttctcaaccttgtgggatgtgaaaactctgttactgaagataaagcatatgatggctttcattgaacaagaagccaatgagaaagcagaagaaata

SEQ ID NO: 828269 - DNA, 100 bp, Homo sapiens
ttatggggagagagaagctgaaagctgccgactgcgacctgcagatcaccaatgcgcagacgaaagaagattatcttagaagacctaggactccaaaaat

SEQ ID NO: 828270 - DNA, 100 bp, Homo sapiens
atctcagacaacgggtcatttggtcatctgcatgcccaaggatggatcatgaagccgcccagctggagaagcagcatgtgcacaatgtgtacgagagcac

SEQ ID NO: 828271 - DNA, 100 bp, Homo sapiens
ctgtgatccctcaagactggtccacggagtgtatgaccacaaacagccatcaagggtgataaaagaaaatgtggctgaagttacccgaagttcagcttgc

SEQ ID NO: 828272 - DNA, 100 bp, Homo sapiens
atggtttagaaatggaaaaatgtgtacgccgtcatgaaatacacaaatcgaagaatagagcattagtacactgggaactccaagaaaaagctttgaagag

SEQ ID NO: 828273 - DNA, 98 bp, Homo sapiens
ttgagcatcctgaagaagttgattatatgacggtcaagagcaatctgaatccaaatgcaaaggagtttgttcctggggtgaagtacggaaatatttga

SEQ ID NO: 828274 - DNA, 100 bp, Homo sapiens
cgtgggacttctcagcctccataattgagtgagccaattccctggtaacaaggagggagcgcattcttccaccttctgggtgctgctgagtatctttctg

SEQ ID NO: 828275 - DNA, 98 bp, Homo sapiens
ccaaggggggcaggttttacatcactggaatcttccaaattcttgctggaacagtggaggccatgtgtcttttggcagtcagtccagatgggaattgg

SEQ ID NO: 828276 - DNA, 99 bp, Homo sapiens
aaaaactcagaaaatacgtggttggagagctcatctggaattttgccgatttcatgactaaccagtatcgcccaggaccacaccgcagcgtaactgcag

SEQ ID NO: 828277 - DNA, 99 bp, Homo sapiens
aagaagatcaaaacccaccatgccccaggccatcaagccctgtcgtcctatgaccaacaatgctggcagacttttccactaccggatcacagtctcccc

SEQ ID NO: 828278 - DNA, 100 bp, Homo sapiens
tgataaagatgatgatatccttctcaaccttgtgggatgtgaaaactctgttactgaaggcaaggggctcaaatagtttacctctgctgagatctgtctt

SEQ ID NO: 828279 - DNA, 99 bp, Homo sapiens
cgaccaccacatcagcccctgcagatgccaaagatgatgcctgaaaaccagtatccatcagaacagagtgccggtggtggtgtgcacattgagccccgg

SEQ ID NO: 828280 - DNA, 100 bp, Homo sapiens
cagccttcccagtagctgggaccacagcgagaaaatgtcattgaatataaacactgtttgattacaaaaaatgagaatgaagagtacaacctcagtggga

SEQ ID NO: 828281 - DNA, 100 bp, Homo sapiens
gtattacaaccacttctgcagtcctggccaaggtgtgcatcaccttcgaccaggccaacctgaccgtcaagctgccagatggatacgaattcaagttccc

SEQ ID NO: 828282 - DNA, 100 bp, Homo sapiens
tgtctttacgatccatccttctcacgttcagccggcgtataccaacccaccccacatggcccacgtacctcagatccggagttctgtaactcacttgttg

SEQ ID NO: 828283 - DNA, 99 bp, Homo sapiens
agcagcaatgaccttccctcgggaattccacctctgcgtttttccctccaggaatgggtaccacagaccatgtcatcgtcctggcgtccacgaaccgag

SEQ ID NO: 828284 - DNA, 100 bp, Homo sapiens
taattttagggtcctttatatagaagggagagtaggtgcgggagtatgagttaagaaaaaacaacttctcagatactggaaactttggttttgggatcca

SEQ ID NO: 828285 - DNA, 100 bp, Homo sapiens
gggaagcccatcggctgtgactgcaagatctagaaatggccattgcctactggaacttagtgcttaatggaagatttaaattcttagacttatggaataa

SEQ ID NO: 828286 - DNA, 99 bp, Homo sapiens
gcacctcgtcaccaaggccaaggtggtgaaaacagttggtttgcgtgaggtctggttttttgggctgcagtatgtagacagcaaaggttattctacatg

SEQ ID NO: 828287 - DNA, 99 bp, Homo sapiens
agaagtgtcttggagccaactagaggcagggtcatccttgcccttgtcctcccctttcatccctatgtggaaaacggggataaaaacattcagatggca

SEQ ID NO: 828288 - DNA, 51 bp, Homo sapiens
gaactgataaaacccaccagtctagggagtaactattcccagtcagaggcg

SEQ ID NO: 828289 - DNA, 100 bp, Homo sapiens
cacacatttgactcttccagttgaagtgtcattctacagtgtttcagatgacaatgctccctctccttatatgaacactgagctgaaggttgaagtggag

SEQ ID NO: 828290 - DNA, 100 bp, Homo sapiens
agtatcctgtggttcttgctttttactccttgttcatttgtctgttggtacagaccactttatggagctttcagcaaaaccgctgagttcttgagcaaac

SEQ ID NO: 828291 - DNA, 100 bp, Homo sapiens
catgaaagagatcctggacctatgaatatccagtttgagccatcggatctaagatccaaaagcttttcagaagatggaaatgagacagttgagtccaaac

SEQ ID NO: 828292 - DNA, 100 bp, Homo sapiens
ctgcaatttgggttgcaacaactaagtctacagtaaataaatggtgaaagccctgtgtaaggaatgtgtagtagaacgttgtcgcatattgcgtctgaag

SEQ ID NO: 828293 - DNA, 100 bp, Homo sapiens
tgttttcaaaattgctaaaaacaggaattctcaaattgtcccaaactgattcagctacaacactgaggaagggaaactgtctacctctcaagatgctgct

SEQ ID NO: 828294 - DNA, 100 bp, Homo sapiens
tggagagaagccaatgtcaaggctgtcagtgaggaggcatacaaggtgtatgtatggatctatgacccagttcactttaaaacatttgtcatgggattaa

SEQ ID NO: 828295 - DNA, 99 bp, Homo sapiens
gcaattccaaaatgtgtaagacgggatattctcttctgtgctgtcaagggtgggtcctacgtgtatgaactcagcgcagtcctcatacacagaggagtg

SEQ ID NO: 828296 - DNA, 99 bp, Homo sapiens
ggagaagaaggcggtggtggcgggtggaggttcgagcgctgttctcgctccggagccgctgcacatttcgacgttatgaagaggacatgtactggagga

SEQ ID NO: 828297 - DNA, 98 bp, Homo sapiens
gaaatggtgcacagtgctttccaggcccagcgggctttccttctgatggcctctcagtaccaacaaccccacgagcaacctcaagcccagcagcgaag

SEQ ID NO: 828298 - DNA, 100 bp, Homo sapiens
gctctgatcgccgggaacccttgccgctgctgtcctgcgaccccaagcaggtatggacctgtctgccaatcaggacgaggagaccgaccaggagaccttc

SEQ ID NO: 828299 - DNA, 100 bp, Homo sapiens
ccagtcccctcaaccggcagaagctagacagcaagaagttgctcgttcaatctcatccctcccagcagctccccttccaccccccggggaactgaagatt

SEQ ID NO: 828300 - DNA, 98 bp, Homo sapiens
agggagcacgaattgtggccagcaccctctctaaccctgagctctttgaggaatggacagttaatgtttctgtaccaaagaaaacgagaaacaatggg

SEQ ID NO: 828301 - DNA, 100 bp, Homo sapiens
gaagcattagtgcttcaattaatccagaagatagtactttccctgaaagatgtgcgggacatcctcaccccaattcagattgaagctgcttaccaccttg

SEQ ID NO: 828302 - DNA, 99 bp, Homo sapiens
cccgaccagagaaatctgtaaataagatgcaggaagccaccccatctgcacaggaaacaaatggaagactgctgcgaccctgcccatctctttgctatg

SEQ ID NO: 828303 - DNA, 100 bp, Homo sapiens
aagctggccaagcacaaagagcttgctccctacgatgagaactggttctacacgcgagctggtacgagtgcttccatatccatttacccaccattggcaa

SEQ ID NO: 828304 - DNA, 100 bp, Homo sapiens
ccaataactatgcccgagggcactacaccattggcaaggagatcattgacctcgtgttggaccgaattcgcaagctggtggacccccaaaagtacaaggg

SEQ ID NO: 828305 - DNA, 100 bp, Homo sapiens
ggaagtcattcttgtgccagaggagtgtgccatattccaatggctgagccgttttgccccaaaacgagagaggtgtaatcctgagagattcacatggtgt

SEQ ID NO: 828306 - DNA, 100 bp, Homo sapiens
gcggcgaaggaggcagaggcacttatgcttgtcaggcttctcagaactttgcttctccagcagaataatcctgcggaagactgagcagttcttgtgagtg

SEQ ID NO: 828307 - DNA, 100 bp, Homo sapiens
gtttggagggaaatgggaatgtacacgataattaaagagtaaagttgtgctcaacgggaaagaccatgtttgtagatttattggctgtgggaggaatgat

SEQ ID NO: 828308 - DNA, 99 bp, Homo sapiens
gggacaccaagcatgtcctcactggctcagctgacaacagctgtcgtctctgggactgtgaaacagattccgaaatttttaacctctgaagctgtgcct

SEQ ID NO: 828309 - DNA, 98 bp, Homo sapiens
ctaagcgtcaccatcctgctcctgaacttcctgcgctcgcactgcaatgaagttggagcagaggctgaaaacacaggctgctgaagttttttggaatg

SEQ ID NO: 828310 - DNA, 98 bp, Homo sapiens
tctgatggcctctcagtaccaacaaccccacgaggtggttgaccagattgacaccctgacctctgacctacagctggaggatgagatgactgacagct

SEQ ID NO: 828311 - DNA, 100 bp, Homo sapiens
tgcacggtgaacctggaccaggaggaggttttcaggaccaaaattgtggaaaagtcactctgttgtcgccgtgatcctgaaggcgctgacctacgacgag

SEQ ID NO: 828312 - DNA, 100 bp, Homo sapiens
ggacgaagagctgcagctcctcctgtgcggtaaatttctaagtgatgaagaaaacttgaaactgtttgggaaatgcaacaatccaaatggccatgggcac

SEQ ID NO: 828313 - DNA, 98 bp, Homo sapiens
gagggattcgtggtgaaggtccggggcttgccctggtcttgctcggccgatgaagtgcagaggtttttttctgccctactgccaataaagggaaaata

SEQ ID NO: 828314 - DNA, 100 bp, Homo sapiens
cgaggagccagccttcaatgtgtcctacaccaggcagcccccaaatcccggcccagggggaaatttgcagtggtgagaaaatgtataaagaaagattctg

SEQ ID NO: 828315 - DNA, 99 bp, Homo sapiens
cattgcagttctggaagcaagaatttatcaaaggaaagatggatccagacaagaaagtgaagtcactgcttttgctgtcttggatcaagaccagaaaga

SEQ ID NO: 828316 - DNA, 99 bp, Homo sapiens
atccttgtacagcaatctcctcctccactgccactacagggaagtgcatcacatgtcaggtatgaggatacatgggctgcacttcacagaagagccaaa

SEQ ID NO: 828317 - DNA, 100 bp, Homo sapiens
atttatggtggatattttaaaggtatgatgtggaactcttccagcgcatagaacacttaattgggaagaaactaccaggttttccaacacaggatgatga

SEQ ID NO: 828318 - DNA, 100 bp, Homo sapiens
tggtggatgctcaaccccgggatgtaaagggattggccatttcaagagagcgagacatctgggccctcacaggaagaagctgtttgttttgattctgagc

SEQ ID NO: 828319 - DNA, 99 bp, Homo sapiens
ttggaattctgcccactctgcggagttagcagtcacgacctccagcacagaatgctgagatgtataaactgtcttcagagcaattccatgaggcagcct

SEQ ID NO: 828320 - DNA, 100 bp, Homo sapiens
gtctggaaagctttaggagttcacagtccaatatctgcctcagctgcttacattttgagtgaaatatgtcgagataaaaatgatgctgttttgccccttg

SEQ ID NO: 828321 - DNA, 110 bp, Homo sapiens
cccgcttcgaggccgctttggcgccaaatcctgaggataccgaagtgtataaagctacagtaaaagatgacctcaccaagtggcagaatgttctgaaggctcatagctct

SEQ ID NO: 828322 - DNA, 100 bp, Homo sapiens
agtcagtgcagtaaattcagtgtcagtatacagactagaccatacctttgaggttcaaaccttgtactactcagctgatcacaagctgcttgatgggaac

SEQ ID NO: 828323 - DNA, 98 bp, Homo sapiens
gaagtgtggtttggattccatcagtctgttcggcctgccatgtggaaaatgatgcttaatatcgatgttctgaatgacatcatctccaccatgttcaa

SEQ ID NO: 828324 - DNA, 100 bp, Homo sapiens
cagtgggacgtctgagactttctccttcaagtacttggcagatcactctcttagcaggatagagtaatgataaaccgcttagacaacatctgtgaagcag

SEQ ID NO: 828325 - DNA, 100 bp, Homo sapiens
atatgtggatactccatttggcaaggtgtatggaatgattcggttctcaggcaccacaggccagatgtctgacctgaacaaaatgatggtccaggatcta

SEQ ID NO: 828326 - DNA, 100 bp, Homo sapiens
ctaacctttgccagaagataaggaaaatgtttataggaggccttagctgggacactacaaagaaagatctgaaggactacttttccaaatttggtgaagt

SEQ ID NO: 828327 - DNA, 100 bp, Homo sapiens
aagtagctcctgaagcttctacgtctagtgccagccaagtgattgctcctactcaagtgacaggagaacctgaagtctggagtgtatcctctcaaggaag

SEQ ID NO: 828328 - DNA, 99 bp, Homo sapiens
ggctcgctcgcggctcttcggccatgatcattatgtagaagttctggaatgcaaaatacagtgtgaagagaacctcaccccagttataggaggctatcc

SEQ ID NO: 828329 - DNA, 99 bp, Homo sapiens
gtagggctataccgcacaggaaaatcctatctcatgaatcgtcttgcaggaaagcgcaatggattatcccacctatactattcttggtcagaatcagta

SEQ ID NO: 828330 - DNA, 51 bp, Homo sapiens
agtggttgtggatttccacgcacaattttggaagatggcaaagttcatgac

SEQ ID NO: 828331 - DNA, 98 bp, Homo sapiens
aacaactgctacatctgttggaggagccaactagcatggaagtgcaggcctcccgaggagcccagacagctgcagccacagctccccgtatcaagaaa

SEQ ID NO: 828332 - DNA, 113 bp, Homo sapiens
ggactctagggaccctgctgaatagctggggctacaggcgtgtgtcactgcgcccagttgttgacctcctgtactggagagacattaagaagactggagtggtgtttggtgcc

SEQ ID NO: 828333 - DNA, 98 bp, Homo sapiens
tctaatgcaggatctaaagccttttcgcattttaatcagtttactggacaaacctgagctaggctgaccagtgcaccggtcttcagggcttcttggtt

SEQ ID NO: 828334 - DNA, 98 bp, Homo sapiens
aggacgtgcttcctgcttcatagataagagaggcaaggtctcactcggtcatccaggttggaatgcagtggtgtgatcacagttcactgtaaactcaa

SEQ ID NO: 828335 - DNA, 100 bp, Homo sapiens
tccctgccttttgagtccaggtgcaattctgtggtgttcttggtcacacatttatggagtttctgaagggcagtggagattactgccaggcacagcacga

SEQ ID NO: 828336 - DNA, 100 bp, Homo sapiens
ctccagtttaggggctcacctgccttgcatcgttccgagtcctgtactggactgcatcaggccgcgtctcctcagggtagctacagcaagctgggtagca

SEQ ID NO: 828337 - DNA, 98 bp, Homo sapiens
tgtcatcatgtcgcgttacgggcggtacggaggagagatctgttggtaatctgaggatttttattctacgtcgtcttgacagatggaaaacctgaagt

SEQ ID NO: 828338 - DNA, 100 bp, Homo sapiens
cgcatcctatggctcaaagaaagatgattatgtcattcctgtcccaatcagctgctctactactgatgacattaaagatgccttcattacccaggcacag

SEQ ID NO: 828339 - DNA, 100 bp, Homo sapiens
actcgagcgacagagacaagctgagcttgccgcacaaaaagctagagagataacagtcttcactcctatgctgatttttctggtgccactgaagttattt

SEQ ID NO: 828340 - DNA, 98 bp, Homo sapiens
gtgaggctcagaggtgcttgtaccgtgatgtgatgctagagaacctggctctcatatcctcgctgggactcaagcacagagggttcggaaaccgcgtt

SEQ ID NO: 828341 - DNA, 100 bp, Homo sapiens
gtatctcaggagctcttctctgctggcttggtggatggtcacgatgtagttatagctgatgttctgagcgaagaagcaatactgaaatggtataaggaag

SEQ ID NO: 828342 - DNA, 100 bp, Homo sapiens
tgtcactgaatccaggaggagacccttctacgcctggttacccaagtgtcgattttaggtgatgggcaagtcagaaagtcagatggatataactgatatc

SEQ ID NO: 828343 - DNA, 100 bp, Homo sapiens
tcatgacacctttgactcttctactgtctcagaccttagattccaacaatgtctcacccatcttggctgccacccaaaagcactggtgagcccctcggcc

SEQ ID NO: 828344 - DNA, 100 bp, Homo sapiens
taccctccaaatagcaaatgtacttggaaaatcacagctggacgtaaagaaagaagtgatgcactcaattctgcaatagataaaatgaccaagaagacca

SEQ ID NO: 828345 - DNA, 98 bp, Homo sapiens
ggcctagtgcgccagggcctcaagtgcgatggagaactacgatgacccgcacaaaacccctgcctccccagttgtccacatcaggggcctgattgacg

SEQ ID NO: 828346 - DNA, 100 bp, Homo sapiens
agcagagcagcaactcacccagcacacaaaatggatctcttacggagatgttgcagtaaagatcctaaaggttgtcgacccaaccccagagcaattccag

SEQ ID NO: 828347 - DNA, 100 bp, Homo sapiens
tccaaaccagcagcactaacagactacacttgctgctttgaaggatgaagttgtatctgttgaaaatgaactctcagaattgcaagaagtagaaaaaaaa

SEQ ID NO: 828348 - DNA, 100 bp, Homo sapiens
acatgctttggcagggatgcagtgcataactcctcctcagagccctgatctcgtggagccatcgacaaggacacctgtttctccccaagtaacagattcc

SEQ ID NO: 828349 - DNA, 99 bp, Homo sapiens
tttcctctgcattgctgatcttgtacttggattcagcaaggaaccttccgaacattaaccaggtggtatttgttggaaatttcttgagaattaatacga

SEQ ID NO: 828350 - DNA, 100 bp, Homo sapiens
tgaacggaggtgtttcacaagtagcaaatgagatgaaccatcttcctgcacacagccaaagtctgcaaaggatgtgttttggagatgcagacaaaatatc

SEQ ID NO: 828351 - DNA, 98 bp, Homo sapiens
ttgttaagcacaagttcacgaaagcctacaaaagtgtggagaggttccttcaggaggatcaggtggtactgtgaaggcaaggagcttgaaaattcccc

SEQ ID NO: 828352 - DNA, 123 bp, Homo sapiens
cgtggtgcagtgaaataagctggtcacagagagacaaatcctgggtgatcccacttacatgaggttctgctccagacgagcccttaccacgttgactcactcctgcagctcagcgatgcctgc

SEQ ID NO: 828353 - DNA, 100 bp, Homo sapiens
ttttcagatgagggaacgtgtgtggaccttcactgcctggtgtaactcccacctaaggaaagccggcacccagattgagaacatcgaggaagacttcagg

SEQ ID NO: 828354 - DNA, 98 bp, Homo sapiens
cggcgttggaggccaccgtttccagttggtcctgagaaaagggtgccagcgatgcctggatcgcctgtggaagtgaagatacagtccagatcctcacc

SEQ ID NO: 828355 - DNA, 98 bp, Homo sapiens
tcttgtccacagctggcaaattcagtgcagatcaggttgtctaccttcataacaacaatatctctgtagttggatcaagtgacttctgcccacctgga

SEQ ID NO: 828356 - DNA, 100 bp, Homo sapiens
ccttatacaaagacctttcgggtgcaatggatgagcttcatagtctggatccaagaaggcaagagttattggaagctagatttactggagttgcaagtgg

SEQ ID NO: 828357 - DNA, 100 bp, Homo sapiens
tgaaatcctcattgagggcaagaactttatccccaggatctaaaccagtgctggacaatagatgctcaagtttgccagatccggcccggtgcctgggttc

SEQ ID NO: 828358 - DNA, 99 bp, Homo sapiens
ggccttccccctagcacctcctcaggccagccacccctgcaggacatgctaaactcatcactgctatatatgcagattatgcccggagtttgaagaacc

SEQ ID NO: 828359 - DNA, 100 bp, Homo sapiens
cctggcgaggcaggaatggccccgaggcctccgaccgccgcgccccagggacccgagctgatccagaaagccaacggtctccacggcttcatgaattggc

SEQ ID NO: 828360 - DNA, 100 bp, Homo sapiens
tcttttccatggctggggcccttgacacatgtcactgtgcactgctcttctcgctggggatcaagagaaatatggattattaaatgtaacaaaaattgct

SEQ ID NO: 828361 - DNA, 100 bp, Homo sapiens
gcctggcggagctccacgacgagctggaaaagctagagaccgttggatggcagcttaaccttcagatggctcactctgctcaagcaaaactaaaatctcc

SEQ ID NO: 828362 - DNA, 132 bp, Homo sapiens
gactagccactttgcattgactggaaacaatggcatttacagaaagagtcaacagcagtggcaacagaaatgatcttccagtggtccccagctcaaagaggtctgctgtttcagctccaaagtcaaccaaag

SEQ ID NO: 828363 - DNA, 138 bp, Homo sapiens
tgcttaccgtcaaaagtttttggagacatttggtaaacaggaaactaataaacgatacttgcattatgcagaaggtcggtgcaagagagaaactcctatgcagtgagtgtgtggaagagagtgaaagccaagttagag

SEQ ID NO: 828364 - DNA, 98 bp, Homo sapiens
tctgaaattgaagaaaacaagccaaaacttgaacaacttaagactgtattagagataaagtctttatctcttgcaaggttcagtagtggcagatcatg

SEQ ID NO: 828365 - DNA, 100 bp, Homo sapiens
atccgtattgatgctatgcatggaggtcacataatgagtatgactcctgaacagcttcaggcttggcggtgggaaagagaaattgatgagagaaatcgcc

SEQ ID NO: 828366 - DNA, 98 bp, Homo sapiens
cagcctttgccgaatacatcctatctgccacacatccagcgtgaggtggtggctaatgccgtagcggcattatctgaaatcagtgagtctcacccaaa

SEQ ID NO: 828367 - DNA, 60 bp, Homo sapiens
tgttatctggtggatgttatagacacatgtggcagttccagaaacagcattattacaaac

SEQ ID NO: 828368 - DNA, 100 bp, Homo sapiens
tgaattttcagtcactggaggaacagaagaaaagtccagtcttctcatgagctgtctggcaggggaaatggaaggtgatgcagtcgaagccattgtggag

SEQ ID NO: 828369 - DNA, 100 bp, Homo sapiens
agctatcaaacatgcaaactctgtggatacatcattttctaaagatgttttaaattccatagcagaattggcagagggggtcgatttgggaggaaaggtg

SEQ ID NO: 828370 - DNA, 98 bp, Homo sapiens
cacagcctggtgggaaaacactgtgaggatgggatctgcactgtaactgctggacccaaggacatggtggtcgggaaccctgcctacgccatgaggac

SEQ ID NO: 828371 - DNA, 113 bp, Homo sapiens
aggaatctcagtagggacaacaggcaggagaattatgggagcgcatttccccaggctggatctaccatgaaagacttgtgaatccaggaagagagactgactgggcaacatgt

SEQ ID NO: 828372 - DNA, 100 bp, Homo sapiens
gagcccggcctaggagaccccgagaggagacggactttgacttgagccagctgcacaggggcctggacgctcggcctgaagtgactcgtaacgacgttgc

SEQ ID NO: 828373 - DNA, 100 bp, Homo sapiens
tttgcacccagtcctgcagcgccagcagctggactatggcatctatgttatcaaccagcaatggctgccatccggaagaaactggtgattgttggtgatg

SEQ ID NO: 828374 - DNA, 99 bp, Homo sapiens
gcctcctcaagaagggcgcgtgctacggggacgacgcgtgcttcgtggcccggcaccgttccgcggacgtgctcgacttaattcagtgcacaaatgaga

SEQ ID NO: 828375 - DNA, 101 bp, Homo sapiens
ctccattatttgagatgagttacatcttggaggtggtattaaagataatcaaacattatcaagaagaaggacaaggaactgaagttgttcaaggagtgctt

SEQ ID NO: 828376 - DNA, 100 bp, Homo sapiens
aagctgggacttccaaagctgggaatcctattttttattatgttgcacggagttgagccccatatgggggttggcaggcagcagagaggcccctttcaag

SEQ ID NO: 828377 - DNA, 100 bp, Homo sapiens
ggccagagaacagcctcctggaggagaccctacactttgaccatgctgtccggatgggtggaagtttagctgatgctataagtgaaaactacagaatcat

SEQ ID NO: 828378 - DNA, 51 bp, Homo sapiens
agacagggcacaccaaactccatctggtgctggctgccagctgctgcgccc

SEQ ID NO: 828379 - DNA, 98 bp, Homo sapiens
cgaggagagtaccgaggagggggtcggcgggagaggagataggccctgtctctgcccctggtggtcatcgtccatggcaaccaagacaacaatgccaa

SEQ ID NO: 828380 - DNA, 100 bp, Homo sapiens
ccgtgaccgagagcgtgaccgagagcgcgaatatcgtcatcgttagaagccctcacagatcaaatttagctgtttaccagtatcaagagtagaatgcatg

SEQ ID NO: 828381 - DNA, 140 bp, Homo sapiens
cagtttgataaaacatggtggagacagcggctgaaatggaagcatatgttctagaagacattcttgagggcatgatgccattgtcacactcctgaagcattataagagaccacaagatgaattgccctgtaatgaatatt

SEQ ID NO: 828382 - DNA, 99 bp, Homo sapiens
gaaaacagacgaaggaccagtgggccagagatgaccctgctttcttggtcctgttaagtatctggctctgtgatccccgtcgaggtcaagatcaagatc

SEQ ID NO: 828383 - DNA, 100 bp, Homo sapiens
gtgtattactgctccgtggtctcagcccaggacctccaggggaacaatgaggcctacgcagagctcatcgtccttgaatgagaagctgagccgcaatgag

SEQ ID NO: 828384 - DNA, 98 bp, Homo sapiens
cggcgtggatgtctcaactcagatgtccaaacagctctcccttttagcagttgatgctgaaaatcaagtggaactggaggaaaaaacaagacttatta

SEQ ID NO: 828385 - DNA, 98 bp, Homo sapiens
tattaagaagcctatggatttttccacaattagagagaaactaagtagtggacaggtaaagcatgaatcatcctccagtgatgaggagcgcgcagctg

SEQ ID NO: 828386 - DNA, 100 bp, Homo sapiens
caacaaggaagggactttaatcactgaccatcccaatatacagtaccccaaggagataactctggaggcatttgcagttattgtcacccagatgctggca

SEQ ID NO: 828387 - DNA, 98 bp, Homo sapiens
cgacctgtgattgacaaccccaattataaaggcaaatggaagcctcctatgattgacaatcccagttaccagttatctgatgatggccgctatgtctt

SEQ ID NO: 828388 - DNA, 100 bp, Homo sapiens
aaaatcaggactgaaatacattaatgtgggtgatttagctcgagaaggaacagtacgtatttggcattcaagcacctaccggcttgagagcacactgaat

SEQ ID NO: 828389 - DNA, 100 bp, Homo sapiens
accgtcaccacggaggacaggaagaaggaccactttaagaaaaatcgatgcctgtctatcgggatacaggtgacaatctccaatagacttgtgtcttcac

SEQ ID NO: 828390 - DNA, 98 bp, Homo sapiens
tcagtccttcctttccgacttagtcctcgggaagaagtttcagactacaagggagaagatgtcaaccggacactagaaggtggaaggaaacctcttca

SEQ ID NO: 828391 - DNA, 98 bp, Homo sapiens
ttgaacatgctggtgccgctagccaagctgtcctgcctgggtgaataacgtatgtttagaagaagttactcatgaagaagcagtaactgccttaaaga

SEQ ID NO: 828392 - DNA, 116 bp, Homo sapiens
ttcctgagccactaatgacgaacaaactctcggaaacctttctacagatctaccaatctggaacccaggctggagaagagatgcctgttgtttcaaaaaccaacattaaggagtac

SEQ ID NO: 828393 - DNA, 116 bp, Homo sapiens
tcccacgctgctactgcctgggggctgaggatgacaaaaaagccttcataggccttggacaagattcgctatgagagcctgacagacccttcgaagttggacagtggtaaagagct

SEQ ID NO: 828394 - DNA, 100 bp, Homo sapiens
gaagggagaggggagcgaccctggggaccgactctggggaccctcgccgaagagttcttggagaagctgaatatcttctcttgagagagccaggccatgt

SEQ ID NO: 828395 - DNA, 100 bp, Homo sapiens
ggacttacgaggagcagtttaagcagggtttccaggcctgaggtgcccgccctggccccaggagaatgaaccagccgcagaggatggcgcctgtgggcac

SEQ ID NO: 828396 - DNA, 100 bp, Homo sapiens
ctgaccaggacctaatcaagctgtgccaaccttaataacgacatgatagtcactgacaacaacggtgcagtcaagtttccacaactgtgtaaattttgtg

SEQ ID NO: 828397 - DNA, 99 bp, Homo sapiens
acatgcatacaaaggacacacagggattttgaaaatgctgcacatcccttaatagtcatctacataggaagacagtgagcgctactctcgtagatccag

SEQ ID NO: 828398 - DNA, 98 bp, Homo sapiens
ttgccagatccggcccggtgcctgggttccaggaggacacgctgcagttggccttcatcgacttgagacaaactttgacccctggtggacaaacgact

SEQ ID NO: 828399 - DNA, 98 bp, Homo sapiens
acaccgacaccatctggaggaggcgttgccgtgaggggactgctgagatgtcctctattcttgaagagcgtattcttggagctgatacctctgttgat

SEQ ID NO: 828400 - DNA, 99 bp, Homo sapiens
gctaatccagtatttgcggatagctccaaactgggatatgttagaaaacgaaaagctgcttgagagcaaagcctgcctacaggattcctatgacaactt

SEQ ID NO: 828401 - DNA, 100 bp, Homo sapiens
acagtgattgggatgaaccggcagtctccccacatcgataaagttcacattcctggtgccatctacctctcaatcaaattcgactctcagtgcaacacag

SEQ ID NO: 828402 - DNA, 100 bp, Homo sapiens
gggtgcagaactacctgtacaacgtgctggagagaccccgcggctgggcgttcatctaccacgctttcgttccacctaaacccactgtgttcatctctgg

SEQ ID NO: 828403 - DNA, 98 bp, Homo sapiens
acttttcaaaatgctttggtgggaagaagtagaggactgttgtaatactgcattgcatgattgtgcagaatctggaagtttggacatcatgaagatgc

SEQ ID NO: 828404 - DNA, 101 bp, Homo sapiens
tcatgtacaaaattacaagtggaaatccacaaggattcttttcaatacatcctaaaacaggattccagctttccctcctggccagaaatgttcagcctgga

SEQ ID NO: 828405 - DNA, 100 bp, Homo sapiens
gggacagtagtgtctgatgtcgaacttcctccttgggccaaaacctcagaagaatttgttcacataaacagattgacggtctggaaaatcccgaagcaga

SEQ ID NO: 828406 - DNA, 98 bp, Homo sapiens
caaacctagagggcagtgcatgaagccaggggtcatcagccatgctccagacagtgtggttccagggtagtggtggtgcacgaagatccgcactactt

SEQ ID NO: 828407 - DNA, 100 bp, Homo sapiens
agattgcaaagagttatggatattctggtggggagatgaacccaacctagtgggtgtaatacatcatgaactgcaggtgttgttacagatcttataacag

SEQ ID NO: 828408 - DNA, 98 bp, Homo sapiens
acagcaatgggaacatagccctttgggagagttgtgtccaccagatttgaaggccatatagagatctgcccaccaggcatgagccattcagcttgttc

SEQ ID NO: 828409 - DNA, 100 bp, Homo sapiens
tcaataaggggtcataggtggaaaagacatgaaaacgttgtgtgacgtgatcctcatggtccaggaaagaaagatacctgctcatcgtgttgttcttgct

SEQ ID NO: 828410 - DNA, 100 bp, Homo sapiens
tatctgtggccactatccccggcacatcgtgttcctggagtatgagagttctgagaaggagaaagacaccatcccggcggcgcaggcgcagaggagagcg

SEQ ID NO: 828411 - DNA, 98 bp, Homo sapiens
cctggaccagtatgagcgctactcagagcagcacaaggaagctgccttcttcaaagagctgatagtgacgagaggctgcgagactgtggaaatgaccc

SEQ ID NO: 828412 - DNA, 98 bp, Homo sapiens
ggatgctcaaccccgggatgtaaagggattggccatttcaagagagcgagacatctgggccctcacagtcgcagatatggccagtacactatgaacca

SEQ ID NO: 828413 - DNA, 100 bp, Homo sapiens
tgccatggtgcagctgcagtcccagtattgcctaagtgtaatcttgaacatgggcggtgctgtgagtgctggtgaagacaatgatgagctgatagataat

SEQ ID NO: 828414 - DNA, 98 bp, Homo sapiens
gcaatgtgcctgccctctgatttcttccagtaacaaatatgggcacggttatgaaatattttgtgttacttgtaacagttcaaagactctgcttgcct

SEQ ID NO: 828415 - DNA, 101 bp, Homo sapiens
atacattgcaattgcaaaggaaaagcatggctacaatgtggaacaggtttctggcatttgaagtcaaagagtattcagcgttggatgaattacaaaaggaa

SEQ ID NO: 828416 - DNA, 98 bp, Homo sapiens
tctatagagaagaccgcccaagtctgcccttgtttgaggccttcacagcatgtggttttgtgcaggttggaaaagagactgttcaaaccactgaggat

SEQ ID NO: 828417 - DNA, 128 bp, Homo sapiens
tgtcctactcaaaggagacccagactcctcttgccacgcatcagtctgaaggtgtatgcaacagcgttattgcaacaggctaacgaaaacagacaaaattcaactggaaaagcatgttttggcacctt

SEQ ID NO: 828418 - DNA, 100 bp, Homo sapiens
ctgcgatcccgggtcatctccagatgctagggttatgggtcaacggcagagacttatccagagcaactcatgaccaggctgtggaagctttcaagacagc

SEQ ID NO: 828419 - DNA, 100 bp, Homo sapiens
cctccacccccaccaggatttgggcctgatgagcccagctgggtgcctgcctcatacttggagaaaggtgctggagaatctggtaaaagcaccattgtga

SEQ ID NO: 828420 - DNA, 100 bp, Homo sapiens
gctcacactttgttgcgggggacactgagatataagacaacagcagttctgtagagagtttaaatatgaaggaatggcaggacgggctaagggcacttct

SEQ ID NO: 828421 - DNA, 100 bp, Homo sapiens
gataagggcgacagcaacagctctgccggctggaaggttcgccatcggtggtgtgaactcattgttaagcacaagttcacgaaagcctacaaaagtgtgg

SEQ ID NO: 828422 - DNA, 112 bp, Homo sapiens
ccacatgcctctaccaatggacagctctcagtccacactcccaaaagggaaaggtgagagatcaagcccagcgctgttcacgggttctcctggatattgaggctggtgctcc

SEQ ID NO: 828423 - DNA, 99 bp, Homo sapiens
aaatcatatagagaaagacagatggaagtctttaagctctaagcgaaagacatgaggcctcagcctgaaatgaggttgttttgaggtcatctgatttct

SEQ ID NO: 828424 - DNA, 100 bp, Homo sapiens
actcaggagtctaccaatgtgttataaatttgctaatccagactttacacaacctatctcagaagttgtagatgaagtaattcagaattgtcctattgat

SEQ ID NO: 828425 - DNA, 51 bp, Homo sapiens
ccgggaccgggatcgtgaccgtggagggttactataacaacagtaccaagg

SEQ ID NO: 828426 - DNA, 98 bp, Homo sapiens
acaaagacctcctcctccacaggggagacagaggagccattatttccatttaatttggatgaatttgttactgtggatgaggttatagaagaagtgaa

SEQ ID NO: 828427 - DNA, 100 bp, Homo sapiens
gtcagcaccagtccagaaaaatgactcagttgtttctgtgggtattatagcttttgaggaaatcattgagccatacagacttcatgaagatgataaagag

SEQ ID NO: 828428 - DNA, 124 bp, Homo sapiens
acagatgcaaacggacgggccaacgccgtggccagctccactgagagaaccccagggttctcatgtatcagccatcttctgtaagggtgcccagtgtgacttcggttgatcctgctgctattcc

SEQ ID NO: 828429 - DNA, 98 bp, Homo sapiens
ggtcttgggtcctccgagagcagcagcgattcacttgtcatggattagtgactggtcagagttatattttccgggtcagagcagtcaatgcagctgga

SEQ ID NO: 828430 - DNA, 98 bp, Homo sapiens
ggatgccgaagtcctggaggtgttccacccgacgcatgagtggcaggcccttcagccagattatgatgcatcattatcacagaagaaattcgtgtcta

SEQ ID NO: 828431 - DNA, 98 bp, Homo sapiens
aagaagcaaggtcctgttgctacaggtgtttctggggatgcttcaacaaatgaaacatatttgccgttgcgctacaagtcagacctgatcggcatgaa

SEQ ID NO: 828432 - DNA, 100 bp, Homo sapiens
gagaaactcgccagtgagaagacagagatgcagcggcattatgtcatgtttaaggaagaaatctctaaacgttttaaatcacatactgaccaacttgtgt

SEQ ID NO: 828433 - DNA, 98 bp, Homo sapiens
ctgtttcctgtggtaaacactcggctgaatgatatggaacctagcaaagctgttccactgaatgcatctaagcaagatggacctatgccaaaaccaca

SEQ ID NO: 828434 - DNA, 100 bp, Homo sapiens
cagttgggatcaaatgtgagcctatggatcaagaaaaagttggtgattcaaggaaagcacattgcaatgcattatagcaatcccagacctaagtttgaag

SEQ ID NO: 828435 - DNA, 105 bp, Homo sapiens
gagcagggcccggcagccgagcagcctggcaacggcggtggcgcccggagcccgaggtgcactacatcctccaggaggtggtgatgggtgggatggtgttggaaa

SEQ ID NO: 828436 - DNA, 100 bp, Homo sapiens
gcacctcggggacattattgcgcgtggaacggctgcttttggaagagagagtctacaaggagattgaacaggtggttggcccacatcgccctccagcgct

SEQ ID NO: 828437 - DNA, 100 bp, Homo sapiens
cagcagttaaagaatgaagatgagacagaccggccatcattggaatcagaatgttggctaccagggtatttagcctagttggcaagcgagcaatttccac

SEQ ID NO: 828438 - DNA, 98 bp, Homo sapiens
agaatcaggaaaaagcaccattgtgaagcagatgaacaatccccaaggtgagactggagacaatctatatttgcggagtagatgagatgagcacccaa

SEQ ID NO: 828439 - DNA, 98 bp, Homo sapiens
tcactattaaaatattttccccccaagtctcaaatattgaagaatctctaaccagatcacacgcgctgcaacgtgtggattctggatggagacttgta

SEQ ID NO: 828440 - DNA, 99 bp, Homo sapiens
aatgcatctgtaaacctgaaacgtacccattctccttgaaggcaaatggtgagtgtttctatggttggctagaacctctgttggccagaatagctgaga

SEQ ID NO: 828441 - DNA, 100 bp, Homo sapiens
taaggtccaaaaaaactccagctgtgaaagcaacataaatggtcttcaaagcttcacctttctccaaaggcagatgtgaagaacttgatgtcttatgtgg

SEQ ID NO: 828442 - DNA, 100 bp, Homo sapiens
ccctgagtcactgcctgcgcagctccggccgcctggctccccatactagtcgccggcaatccttaggtgtcacatggccctctagtggaagggatgctca

SEQ ID NO: 828443 - DNA, 100 bp, Homo sapiens
gtatggtgtgttcagcattgctgaattcttctctgatatcttcctgtcatggttccccttctactacatgctgaaggtaagtcagtaatgttgtatgcag

SEQ ID NO: 828444 - DNA, 100 bp, Homo sapiens
ctgcacatatgatggaaaagcaaagcgaacatgcttccgaagatcagatgctggagtaatttgttctgatcttaagaagcatacagctgatgaaaatcca

SEQ ID NO: 828445 - DNA, 100 bp, Homo sapiens
ccaccacgcagggacagctgaaggagcagctctaccaggaaatcatccactacttcgacaaaggcaagagcaaattggtcaggagatgttggaaaacctt

SEQ ID NO: 828446 - DNA, 100 bp, Homo sapiens
ccagtttttggtcttctgtcaaaaacacagggatgaggatcatggggttgacagcagcattttccagaatcctaaaaagcttcatctaactattgggatg

SEQ ID NO: 828447 - DNA, 99 bp, Homo sapiens
cctggctacgatgacattgccctgggcattaccttcatgggcaccttcacaggtgcatggaggactgcaacagaggagtgggggactgaagattggaat

SEQ ID NO: 828448 - DNA, 100 bp, Homo sapiens
tcttcgcatcggcggcggcttccgtcacctccgctcccccgatcctattcccagtcgtctttccccacaaataaaccagagaaagatgcaagacatgtag

SEQ ID NO: 828449 - DNA, 99 bp, Homo sapiens
tgtggtttatcattgtaatcagcttcttaccaaatacagaagatgcctgtgaggagccaccaacatttgaagctatggagctcattggtaaaccaaaac

SEQ ID NO: 828450 - DNA, 98 bp, Homo sapiens
atttctacgacccggagcacccgacccctgagtatcgagaaccttccctgcgaacttcagaggaacttccagctgatgcgagagctggaccagaggac

SEQ ID NO: 828451 - DNA, 100 bp, Homo sapiens
tgagtcgggaaatggccgctgtgtggttgcaacggagataaattcccggaaccgcgattcggcgtgtcaggttttgcactgctgtgtgtgtggctcaagc

SEQ ID NO: 828452 - DNA, 100 bp, Homo sapiens
gatgtgatattcaagttggagcaagaagaggagccctgggtgatggaggaagaaatgtttgggaggcactgtccagactatgaatcaaagttgagaccaa

SEQ ID NO: 828453 - DNA, 100 bp, Homo sapiens
actttcagaacacctttctagatacacaacttgaaagtacctacagtaatccttcccctctaccaccggatatggctcctgggcagagttatcaacccca

SEQ ID NO: 828454 - DNA, 98 bp, Homo sapiens
aaaccgacattcccaggtacatcattagccaactgggactcaataaggatcccttggaagaagatattgatgctgatggacagggattttgtcaagga

SEQ ID NO: 828455 - DNA, 100 bp, Homo sapiens
aagccctacgagtgcaacatctgcaaggtccgcttcaccaggacccggtcagcccaaggagcaggggtccagcagctctgcggaggcatctggaacagag

SEQ ID NO: 828456 - DNA, 98 bp, Homo sapiens
cgtgctgctgttgatgctggctttgttcccaatgacatgcaagttggacagacgggaaaaatagtagcaccaattactttctatgaagacaaaaattt

SEQ ID NO: 828457 - DNA, 98 bp, Homo sapiens
ggcaaagttggcaagagccgacgagacaagttttatcacttggcgaaggagacgggccctccaggccctccaggtggtctgagaatagaagacattag

SEQ ID NO: 828458 - DNA, 98 bp, Homo sapiens
gaaaaaccagttgagagtgactccaaaaagtcctgttccatcataatgaatggatccaatatggcaaatacatcaccgagtgtaaaatccaaagagga

SEQ ID NO: 828459 - DNA, 100 bp, Homo sapiens
tccttctgcatggaggaggtcattctgccctttcttgggctgtgttcacgtggaagatagatgataagcctgtaaaaattgacaagtgggatggatcagc

SEQ ID NO: 828460 - DNA, 100 bp, Homo sapiens
ggcctctctcctgatacagcaggcgctcaccatgttccctggaggttgtctttctactcgggacactcttcctttgggatgtactgcatggtgttcttgg

SEQ ID NO: 828461 - DNA, 99 bp, Homo sapiens
tgagccgcgaggacacgggctgcaacctgcagcacatcagcgaccgggagaacatagacggtggcacaagatctctgtaaagtagcaggcatagcaaaa

SEQ ID NO: 828462 - DNA, 115 bp, Homo sapiens
gagctgcaagccggtgcagcagccttcagcttttggcagcatgaaagttagcagaactgcaagcacatgttgaccagataactgaaatggcagcagtaatgaggaaagccattga

SEQ ID NO: 828463 - DNA, 98 bp, Homo sapiens
tcaaggtagagcaaggacaagagccatggatggtggagggagcgaatccacacgagagctctccagttgtcgagatgtccacagaaggaggatttggt

SEQ ID NO: 828464 - DNA, 98 bp, Homo sapiens
ttctacaatgcagacgagctcaagggtgatgaattagaagacaatggaaagaatttctacgaatctgatgatgatcagaaggaaaagactgacaaaaa

SEQ ID NO: 828465 - DNA, 100 bp, Homo sapiens
gtaacatttcaggatttaatgaaacctgcttgagatggagaagcatcaagacagctgatatggaggagatgtatttagtggcacaagatctctgtaaagt

SEQ ID NO: 828466 - DNA, 99 bp, Homo sapiens
ctgtattcacctattgcctgatctccatgcattagaacacacatactctgataaagatgtgatgtttactgggacagcagatggccgggtcgtaaaact

SEQ ID NO: 828467 - DNA, 98 bp, Homo sapiens
caggggggcaaggacttcaacatgcccctcactatctcccggcaatgtgtattcctccatcatatgctgaccttggcaaagctgccagagatattttc

SEQ ID NO: 828468 - DNA, 100 bp, Homo sapiens
ggctgctgccgccggacgcctccattgtttgaccacaacaagggccggattctcacccagggtctcctatggacagaagtgcgggcaaggagctttgttc

SEQ ID NO: 828469 - DNA, 98 bp, Homo sapiens
ctaacacaagtgatcacagaaaaattgcagctgccttctccccaagagattctacattgcattgactgggattccagtagcaattttcataactctgg

SEQ ID NO: 828470 - DNA, 100 bp, Homo sapiens
aattgccaggttcttcactgaataacaatgcagatcttcgtgaagactctgactggtaagaccatcaccctcgaggttgagcccagtgacaccatcgaga

SEQ ID NO: 828471 - DNA, 101 bp, Homo sapiens
ccctgacctcagagcagatccagaagctcttagccagcactcgctatccacctccagcatctgtgttttgtgtgagcctggaccccaagaccaataccttg

SEQ ID NO: 828472 - DNA, 98 bp, Homo sapiens
aacccagatagaagatgccaccgagaagctcaagcaagtaactggcagaagttttggtgataaagattttcggacaggtttagaaaatggaatcctcc

SEQ ID NO: 828473 - DNA, 100 bp, Homo sapiens
cggtgttctgcaaagactgcaggaagtaagactttgaccccgacgcaggcttcagtgattgccgcggatcagaagcctgagcactttggctcgagacaat

SEQ ID NO: 828474 - DNA, 100 bp, Homo sapiens
aaaatggagatattgggaaagaaagatatagagacaacgactatgtccaattttcatgctcaggttgtggtttctcgatcaggaccatcaacccctcatg

SEQ ID NO: 828475 - DNA, 100 bp, Homo sapiens
tgcattgaggcagaatttacatgaaatagactaccaaaaggaagcgtggctacattaaaaataagctggtttttaagaaaggcaagaaaatatctaagaa

SEQ ID NO: 828476 - DNA, 98 bp, Homo sapiens
ctatttgcagtaaatcagaaaaacatgactgcattggagaaagtgaagtcactgcttttgctgtcttggatcaagaccagaaagaaattattgatacc

SEQ ID NO: 828477 - DNA, 100 bp, Homo sapiens
agaagcgcagaagattgtaaggcagcggcaggaggagctgtgcctggccaggcagtacaggctgatcgtccacaacgtagagacggggtttcgccgtgtt

SEQ ID NO: 828478 - DNA, 98 bp, Homo sapiens
ccactctaaagagacatcatcttacagattgggatcccagccttctcaccagtttgtcactcaagccctatcagaaggttggtttgaattggctggca

SEQ ID NO: 828479 - DNA, 100 bp, Homo sapiens
gatgaagggaaggaaatcatgtcaagcgaagccttgaaaaagctgccctgagacggtgtcccgccgaaaggaggattctgaggttccattcactgaagaa

SEQ ID NO: 828480 - DNA, 100 bp, Homo sapiens
gggggaagctggtaggcacgggcggctccgcagtgaccggactcgggggagctgtcccagttaaatcagagttggcagttgaaattttggagaaaggcca

SEQ ID NO: 828481 - DNA, 98 bp, Homo sapiens
cacatcttggcgcgttgcacggtgatttgtggagctatgatttcttcagtggtgaatttgtggtgtcacctgaaccagacacaagtgtccacactctt

SEQ ID NO: 828482 - DNA, 99 bp, Homo sapiens
tttttgagaaggataacattgccagctaaaaaaatagaggttcctgcacagctgaaagaattagtttcggatttatcttctcagtttgtcatctcacct

SEQ ID NO: 828483 - DNA, 98 bp, Homo sapiens
cgcggggggagggagctgactgggccggccgtgctggctgtggaactgtgctcccgagagaggtgaacgtgggctgcgggccagccgaggagcgggtg

SEQ ID NO: 828484 - DNA, 100 bp, Homo sapiens
agatgacttcaccacagaaactttagaatggaggctcggttcttctgacattcttaattacagggttggattgagattgttggatgtgctgatcgttcct

SEQ ID NO: 828485 - DNA, 100 bp, Homo sapiens
aacgtccagtcctcgtgcgaccgcgctgggtcggaagtgagcagccgtgcttcctcaaagactgggaaatgcacgtccacttcaaagtccacggcacagg

SEQ ID NO: 828486 - DNA, 99 bp, Homo sapiens
cttcacctggccgggctgcgtcgcttcgatgccgcgcaggctgatgtggtcatcaagttccctgaggaagaagctccctcgactgtcttgtcccagaac

SEQ ID NO: 828487 - DNA, 98 bp, Homo sapiens
ctgatccggttcttggtgcccctgggcatcaccaacatagccatcgacttcggggagcagtctggcaagttctccggcagttctccggcgcccccaag

SEQ ID NO: 828488 - DNA, 100 bp, Homo sapiens
ccaccttgggctgctacaacaaaggctgctccttccgataccattacccgtgtgccattgatgcaggctttgtccagggatctgaaaccactttgcagtc

SEQ ID NO: 828489 - DNA, 100 bp, Homo sapiens
cttcattgctccttcaggacatggtgcgaggacgacgggcagacgttcttcagcctagatgacgggaacaccaaattctctgacctgatccagctggttg

SEQ ID NO: 828490 - DNA, 100 bp, Homo sapiens
gtcaagaatcctgaagatctgtctgcagaaacaatggcaaaaacaagttgaaatcatcgcagaaggataaagttcgtcagtttatgatcttcacacaatc

SEQ ID NO: 828491 - DNA, 100 bp, Homo sapiens
gcagatacaaacttggattttttccagtctgatccttttgttggcaatgggacaccaggtccaataccacctccaagccgagtcacttggtggatgcgca

SEQ ID NO: 828492 - DNA, 98 bp, Homo sapiens
gcagggcaaggaaactggccacaagcactactgcagtcttcagttaagcaacaagtagaagctattgaaaaacagtacatttctgcaattgagaaaca

SEQ ID NO: 828493 - DNA, 121 bp, Homo sapiens
ggaagatgctcccagctacagagggtaccgggatgcctgcaccattactgatagggccagatttgagtgtgtgaatttttgagtgaaacctggaacccaaatgagaagaaatctgcaagga

SEQ ID NO: 828494 - DNA, 100 bp, Homo sapiens
gaggaggacaaggctagaagaatcttagagctttctggatccagttcagaggattcagagaagcattgttggaaactgttactacatttttactggaaat

SEQ ID NO: 828495 - DNA, 98 bp, Homo sapiens
cggctgggctcggtattccccttcctgctagtcctggtggatctgcagtacgaagtaattcgccaaaatgacgaacacaaagggaaagaggagaggca

SEQ ID NO: 828496 - DNA, 98 bp, Homo sapiens
gctgccggcccccgctctgccctggtgggtcctacgtgtatgaactcagcgcagtcctcatacacagaggagtgagtgcttattctggccactacatc

SEQ ID NO: 828497 - DNA, 98 bp, Homo sapiens
cagcggggcaccggaagttatggaggttttgcactgattgcaaaaataaagtcctccgagcatacaatatccttattggtgaacttgactgcagcaaa

SEQ ID NO: 828498 - DNA, 100 bp, Homo sapiens
tggatgccttccagaaagtggctgacatggctaccaacacccgagtgattacccaaagaaggaggactacatcgtctacctgggtcgctcaaggcttaac

SEQ ID NO: 828499 - DNA, 100 bp, Homo sapiens
gtcaaaacgggcaataagactctttaaagaaggcaaggagagaatgtatgaagaacagtcacaggacaggatcagctcagctactatttaataaaacaaa

SEQ ID NO: 828500 - DNA, 100 bp, Homo sapiens
tgaggcgccgcccgggtgtccccgcggcgcaggaggcggtggagcgcagagcgggcgagcgcgaacatgttcttcaagtatacatggaataactttttgc

SEQ ID NO: 828501 - DNA, 98 bp, Homo sapiens
gacaagcaaaatattaaacttttagacctgaagccatacaaagtaagctggaaagcagatggtactcggagcatttcatactactgaagctgaagcta

SEQ ID NO: 828502 - DNA, 98 bp, Homo sapiens
tcttagaagagtcaaatgttcagccagtatcaacaccagtaacagtgtgtggagatatccatggacagctcggcttgcccttcccctgcttgtgccgt

SEQ ID NO: 828503 - DNA, 101 bp, Homo sapiens
ggcccgcgggggagccccgggagccgcacgttcacacaaaagatgttggacaatttctacaattttgcttcatcatttgctgtctctcaggcccagatgac

SEQ ID NO: 828504 - DNA, 100 bp, Homo sapiens
atgacctcttttccctttccaacaagcaagacaagtcgtcactgcttctgttcggaacagagatccccctgagatagaatacagaagtaatatgacttct

SEQ ID NO: 828505 - DNA, 100 bp, Homo sapiens
cagagctatgaacagaatatcaaacagattggcacctttgcctcttccagttacaacacagggatcacaacaaacacaaccgccacagaagcactatggc

SEQ ID NO: 828506 - DNA, 100 bp, Homo sapiens
ttccgcccctttctggcaaagatgagggggattcttaagattacaaatgttggatcactttgctgaatgtgttaaacaagctaaaggtgtccgccagcag

SEQ ID NO: 828507 - DNA, 98 bp, Homo sapiens
gccgtccacgtgaaggggcccttctcggtggaggccgacccatccaggtgtaccttccggtttcccagcacggccatcaagatccagttcacgtcgct

SEQ ID NO: 828508 - DNA, 101 bp, Homo sapiens
ggtcccaggactttgcaagagatggagacaggttcaagttctttcttcaaagagtcatcagaataacatggattgaagagacttccgaacacttgctatct

SEQ ID NO: 828509 - DNA, 100 bp, Homo sapiens
taaatctggaaatgaaaatggagagttctacctacgagtgattccagatcactgtatctttgccagtaacacatctgctctcccaatcagtgaaatcgct

SEQ ID NO: 828510 - DNA, 100 bp, Homo sapiens
ttttaaaatcaaaagtaacaagagaacagcaagtgcaccaaacttagggtaaaggagctggaagtgcgaaaattgatgcatgtgagaggagatggaccct

SEQ ID NO: 828511 - DNA, 98 bp, Homo sapiens
gccatcactctgcgcagagaagccgatgtcaagaagaggatcaaggaggccaagcagcgctctgagaaagtggccgaaagaaaagaaactgaattttt

SEQ ID NO: 828512 - DNA, 106 bp, Homo sapiens
cggccagaagcgggcggcgcgggggagatgtacacattttggaactttatacccaagaatttatttgaacaattcagaagagtagccaacttttatttccttatca

SEQ ID NO: 828513 - DNA, 100 bp, Homo sapiens
cgatcatggcggatggcccccggtgcaagaggcgcaaacaagccaatcccaggaggaaaaacgaattatatccagatcgagagacagaagattctgaaag

SEQ ID NO: 828514 - DNA, 99 bp, Homo sapiens
agcagacacgcctgctcgctccagggtgcccctgtagacaatggccctcgtgtctgccgattcccgcattgcagaacttctcacagagctccatcagct

SEQ ID NO: 828515 - DNA, 98 bp, Homo sapiens
ccaagctatgcagacagttggtgtacattcaattgttcaggcaaaaataatgtgttcctcaatatgcaaatgtattggctgtaagaattttgaagaaa

SEQ ID NO: 828516 - DNA, 98 bp, Homo sapiens
ctttattgtattcagttacagaacctgtgggtgtgatgaatgcagactctgctaccattttggctgtttggatcctcctttgaaaaagtctcctaaac

SEQ ID NO: 828517 - DNA, 98 bp, Homo sapiens
tggcgaccgagggaatgatccttactaaccacgaccatcaaatccgtgtcggagtccttacaggcatctctgggaagagccagatcctgtttgctctc

SEQ ID NO: 828518 - DNA, 100 bp, Homo sapiens
caggtatatgctggtcactttcgaagagccgccctatgctatcaaggttttgacctgtagcagagaaccaattctggagaacagcctcacttctttgatt

SEQ ID NO: 828519 - DNA, 99 bp, Homo sapiens
acactccgtccacggactctccgttattttaggagatgagccctcgctgtgctaatctggccctcaagcactacctgctcaagccggttcagaggatcc

SEQ ID NO: 828520 - DNA, 100 bp, Homo sapiens
tttgcctttctggacacagaagtatttgtgacaggagatgacgcattcatggcctccccctctaacggctattcatacaccatgcaaaacagaaccttcc

SEQ ID NO: 828521 - DNA, 99 bp, Homo sapiens
agctgagctcccacccttaaaaaatggagttcactagagaaaaaatccttattgcgagataacgtggacctattgggaagcttggcagatctgtacttc

SEQ ID NO: 828522 - DNA, 100 bp, Homo sapiens
tgccatggaaattctccagggccgggatttcactggcaaagtggttgtggtcactggagctaattcaggaatagatcagcttgaacgggtctttttacga

SEQ ID NO: 828523 - DNA, 98 bp, Homo sapiens
gagcaaacagattcagtggcctgcattgggtgcttcaaggatgaccgcatcgtcttctggacttggatgttctccacctacttcatggagaaatgggc

SEQ ID NO: 828524 - DNA, 100 bp, Homo sapiens
ccaggccagcgaagtattggtggagtgtgatagcctggtgccagtgacgagtagcacagcccctctatggtttagatggcagtgctgcaaaggaggcaac

SEQ ID NO: 828525 - DNA, 99 bp, Homo sapiens
acagctttgccacaaagcccagtctgtgtctcaaatcaaccacaagctggagatcggacagctggcttttaaaggaatgaagagactcaatagaatcca

SEQ ID NO: 828526 - DNA, 98 bp, Homo sapiens
tggcgggaaggctctggcttgggacgaaagtgtcaaggcattacggctcccattgaggttcattccgacaggaccaccccagtagcatgggtgtttat

SEQ ID NO: 828527 - DNA, 99 bp, Homo sapiens
gcggcacagaggtgcttctgccagagccagctctcccaggcgctgaacggactgtcagacagggccaaagaagccaaggagtttctggtacagctgcgc

SEQ ID NO: 828528 - DNA, 100 bp, Homo sapiens
cttccccaggctcaagccattctcctacctcagcctcccaagcagttgggaccacagttgcgacaaccaccagttaagcgtttgagacttcgtggtgatt

SEQ ID NO: 828529 - DNA, 100 bp, Homo sapiens
tgatttccactctggaaaacttcaagcatttggcccgcctgaactgtaagcactgtgggaagccggtgatcgacgtgaggatcgggatgcagtacttctc

SEQ ID NO: 828530 - DNA, 98 bp, Homo sapiens
ttttacattgaccacaacacgcgccagacgtcgtggatcgacccccgcgaccggttgtgatcaattattcaatcgtgaaagggctgaagtacaatcag

SEQ ID NO: 828531 - DNA, 98 bp, Homo sapiens
ccttgttgctccagctctgaataaaccgaagaaacctctcacttctagcagtgcagtctctgctggatgaaccgaatcctaacagtccagccaatagc

SEQ ID NO: 828532 - DNA, 99 bp, Homo sapiens
tctctgtccccccgggaccccctggagcccccatgatccctaagaagacagcttgaacctagcctcctgacaaggtgatccgggcgggccccgcaggaa

SEQ ID NO: 828533 - DNA, 100 bp, Homo sapiens
tgccatggcctgaaagctccctaatagactttgtcgtgacctgccaagggaggcagttgagaattttgaaccagcaactcagagaacaacagaaaactca

SEQ ID NO: 828534 - DNA, 100 bp, Homo sapiens
ttgaattcagccagtggtcacagctggatgtttgcgacatcccagagagcttccagagctctccagcagaactatctcctactactctttcccctgttaa

SEQ ID NO: 828535 - DNA, 100 bp, Homo sapiens
gagattgcagcagcgaaccaatcccaagcatgattccacctttccactgatagactcaagttcccagaaccagattagaaaacgcatcgtacttgaaaag

SEQ ID NO: 828536 - DNA, 100 bp, Homo sapiens
gcagccctggtgtcacctatcagtaaaagcttacgaggaaatatttcagtaaaagcagttaaaaaagaagtagaaaagaaactccgatgtcttcttgctg

SEQ ID NO: 828537 - DNA, 114 bp, Homo sapiens
aaaagatctctggaagcgattaatgataaaatttcatggagaagaaggccttgactacggaggggttgccaggtgctgatagttgatctctgtgcagacaagttcttacaggag

SEQ ID NO: 828538 - DNA, 100 bp, Homo sapiens
ccggcctagcgtcctggaattacttcaatcaacccctgcctgacttctcacgagtccctggtctgacattgcccagtggagccttctcagactgcttgac

SEQ ID NO: 828539 - DNA, 98 bp, Homo sapiens
ctgcagaacggctgcctaatttacagcaaccatgagagaacactaaactctacatctcccttcccgagcaaggagctggctgaagccacaaaaacatt

SEQ ID NO: 828540 - DNA, 98 bp, Homo sapiens
cccagtactttgggaggccaagcaagcttcatctccccagagaagagccggaagatgttgccgactcccattgggaccaacagtggcacttccttgct

SEQ ID NO: 828541 - DNA, 100 bp, Homo sapiens
gggcttcagtgcagacgcagtggtggccctggagcagtatgccagcaagggatccatctgtctctaagtctgtagaacgaatctttaaaatctgggaaga

SEQ ID NO: 828542 - DNA, 98 bp, Homo sapiens
gggaagttaatgtttacggcgaagtctactcaacgtttccaaggaaggcgtggaagtgcgagtggccagaatcttcaacacctttgggccacgcatgc

SEQ ID NO: 828543 - DNA, 98 bp, Homo sapiens
gacctctgtggcagcattttttccagaacacaaaaggtcacctcatcatctcaaggaggagcattcccctgggctaaggcactggggccgaactctag

SEQ ID NO: 828544 - DNA, 100 bp, Homo sapiens
gcgccggctccctatctgggaaacaaagcctggttgcagtatgcttgaaatctgggatgtggaagacccttccaatgcagctaaccctcccttatgtagc

SEQ ID NO: 828545 - DNA, 98 bp, Homo sapiens
tctgaggccaatgtcagagaaatctttgacaagacatcatccagacccactaccagccctggggcttcctgagtgcagctcataccgtgtgtcccggc

SEQ ID NO: 828546 - DNA, 98 bp, Homo sapiens
aaatcgtgcacatccaggctggtcagtgtggcaaccagatcggtgccaagagctgtaggtaaaacttgcctactgatcagttacacaaccaatgcatt

SEQ ID NO: 828547 - DNA, 100 bp, Homo sapiens
taaccacgaccatcaaatccgtgtcggagtccttacagggtcctctcatcgttactgaagagcttcactcccttagttttgaaacccaattgtgccagcc

SEQ ID NO: 828548 - DNA, 100 bp, Homo sapiens
tttcgactggatcatatcagaaagatggcatatcagatatgcaagtctgtgaattggaatctttaaccagtttcagtgtagtagtgaaaaagtgcttcca

SEQ ID NO: 828549 - DNA, 99 bp, Homo sapiens
gcagaagaaagaagaggagaaggagcagtccgtgctcaacagagaatgtggatttaaatgggataaagcaacaaagtcgacttagggtcagaaagccca

SEQ ID NO: 828550 - DNA, 144 bp, Homo sapiens
atggacagcagagaagatgaacagatccgagggatcactatgaaatccagtgccatttccctacattatgcaacagacttaattcagtgcacaaatgagatgaatgtgaacatcccacagttggcagacagtttatttgaaaga

SEQ ID NO: 828551 - DNA, 99 bp, Homo sapiens
atctacctggaacccttgaaggatgcaggtgatggtgttcgatacttgctcaggtgcaacccagtttatgcctgaccccaagctcatggatcacgggca

SEQ ID NO: 828552 - DNA, 100 bp, Homo sapiens
tagccgaaagaggcatcgttttctctttagtcctcctgcatatgcccaagaggattgggagtggaatggacaccagcagaagcaccacagttattcctgt

SEQ ID NO: 828553 - DNA, 98 bp, Homo sapiens
gaggcatgggggtccacactgcaatgtttttgtggaacatggacacaactcagatgggaagttcatcgcccgggcacagcggatagagtacgactgtg

SEQ ID NO: 828554 - DNA, 100 bp, Homo sapiens
gatatatggtccaaatccaactatcaagtattccagaaggaaggctttgtgatacctgatgaagggggcccacaggaggagcaagaagagtattaacagc

SEQ ID NO: 828555 - DNA, 100 bp, Homo sapiens
tggtagcagaaggatttgattcagcaaatgggatcaatatttcacctgatgataagggtggcactgaatcaacaagacaagcaactcaattgattaatgc

SEQ ID NO: 828556 - DNA, 100 bp, Homo sapiens
aagcccatcagtatatcctggagtttgggattggaagccattgtagaagatgaagtgacccagaggttttcctcagaggagctagtgtcatggaatctcc

SEQ ID NO: 828557 - DNA, 98 bp, Homo sapiens
catgtgaactgcacgataaaggaactcaggcgcctcttcttagttgatgatttagttgattctctgaaggccatgcacttggtgtaccgagccctgga

SEQ ID NO: 828558 - DNA, 100 bp, Homo sapiens
ctttttcacacggaaactctcaagcacctgcaggacatcaacatcgccacccctgttcacaacatgctgccagcctaccaggacatcctcggaaagtatt

SEQ ID NO: 828559 - DNA, 100 bp, Homo sapiens
ccggatgtggcgcggctgcgcgaggagcaggaaaaggtgtgagttcttgatacgaatgaaaggccaagagtttgttgatgagattcaaggtagatatcct

SEQ ID NO: 828560 - DNA, 100 bp, Homo sapiens
cgacagcaagggggttgtccacgaggaacaaattgtacatttgcccattctcaggaagagcttgaaaattcctggtccagaactttacacagaaaaggtg

SEQ ID NO: 828561 - DNA, 99 bp, Homo sapiens
actgggggctgcggcctagaggtccgggcttggagttcgcctcagacgcggtggagccgccggagtctgagaagtaatgctacagccctttgactatga

SEQ ID NO: 828562 - DNA, 98 bp, Homo sapiens
tagcgatctatattccctttccagaagatgattccaacgccaccaattccaacctgattccagactccatcatttctcgtggtgttcaggtgctccca

SEQ ID NO: 828563 - DNA, 115 bp, Homo sapiens
agagaagtttacaggccctctattgccaactgttaagtctggagcccggcactgtggtcataacagagcaggcagtggatacctgcttcaaggcagagtttgagcagattgtcct

SEQ ID NO: 828564 - DNA, 100 bp, Homo sapiens
ctgcagaaattcctgactggcttcaggtttacgcacgagcccctgtgaagataagttctgaacgtcgaaaagaaaagtctcgagatgcagccagatctcg

SEQ ID NO: 828565 - DNA, 100 bp, Homo sapiens
gactcttccatggaggagatctttcagcacctgatggcctatcaccagccgattccacgactcttctttgcgggagaacatacgatccgtaactacccag

SEQ ID NO: 828566 - DNA, 100 bp, Homo sapiens
acctggggatcgctacggaccttaaaatacccgcaacagccccttcgtcccaagcgtttagatgccaaccatattacctcagtccccgaggacagttttg

SEQ ID NO: 828567 - DNA, 100 bp, Homo sapiens
tatacaaaagacaaggaagatgagctgtcctttcaggaaggagccattatttatgtcatcaagaagaatgacgatgaacccagtgacttgattgtaaaaa

SEQ ID NO: 828568 - DNA, 100 bp, Homo sapiens
taagactccaggacacccctgaagccgagaaatgatgtcatggcacccccagtaccggagctccaagttccgtcatgtctttggcaaaccagccagcaag

SEQ ID NO: 828569 - DNA, 99 bp, Homo sapiens
ttgagcatacaccgagagagtgaggagccagacgacaagcacacactatggcgctgaaacggattaataagggatgctgcctgaccccaagaacgtgca

SEQ ID NO: 828570 - DNA, 98 bp, Homo sapiens
cattctgaatctagacttgctcagcctaatcaagttcctgtacaaccagaagcgacacagataaataggatttaccaatccttggatgaagtgcttgg

SEQ ID NO: 828571 - DNA, 100 bp, Homo sapiens
gccaaccccaacgtgggcttccagagacagctccaggagtttgagaagcatgaggtccatcagaccctctttcccagctgcccgctcctcagcacccgaa

SEQ ID NO: 828572 - DNA, 100 bp, Homo sapiens
aatgtcatatgaaggacccactgcagaagtggtggaggtaatgaggagtacctgatcaatctgatagactctccaggacacgtggacttttcctcagaag

SEQ ID NO: 828573 - DNA, 99 bp, Homo sapiens
tcctgggaccactcgttgctgacagtcagaaatattcatccacaatgcgatacctttcatagggtttggctttttggataatgcaattatgattgttgc

SEQ ID NO: 828574 - DNA, 51 bp, Homo sapiens
aggaggaaggcctggttcttcaagtggacctggtccagattccccaggccg

SEQ ID NO: 828575 - DNA, 98 bp, Homo sapiens
ctgtgtggtgctgtccttcctcaagactacctcattctcactggctcggagactcctgcctgctgagatcagacctattgtgaccgcctggtgcagga

SEQ ID NO: 828576 - DNA, 100 bp, Homo sapiens
atgaatttcctgaagaaacaaatccctgccatcacctgcattcaggtagatcatgccactaatcgtacccagtttggggagaaaattcacaactttgggc

SEQ ID NO: 828577 - DNA, 100 bp, Homo sapiens
gcgcccgcggccagggccgaggcaggcctgacccggggccgggcagcccgcgcgactttcgataaataggatttaccaatccttggatgaagtgcttggg

SEQ ID NO: 828578 - DNA, 100 bp, Homo sapiens
gacctcggtcccagtgccccacaccaccgcactgtcgctgcccgcctgccctgaggagtccccgctgcttggcattcctagccgagtgtgacacagtgga

SEQ ID NO: 828579 - DNA, 98 bp, Homo sapiens
caccatccacgccagccgcaccatgccgctcctaagcctgcacagccgcggcggcagcagcagtgagagatggactcaccctgtcacccaggttggac

SEQ ID NO: 828580 - DNA, 100 bp, Homo sapiens
tgaatctggtgatgaacttagcagcagctccactgaacagataagggacacattggcgtgagacctgggagtacgttgtgccaaatcattgccacttgcc

SEQ ID NO: 828581 - DNA, 50 bp, Homo sapiens
tccgctctccgctctggcgaggaggacctggcaatgcccagacatctgtg

SEQ ID NO: 828582 - DNA, 98 bp, Homo sapiens
agaaggatatcgacgtcgtgatccagaagtccagagctgaggactgcctgtttgcagggtcagtatagaccttctgatttgctgtgccctgagacata

SEQ ID NO: 828583 - DNA, 100 bp, Homo sapiens
gacagatcactggacccagcacctagctgcagccgctccggcctccttgctgttcctgggatacgccacactcagtctggcctcggggcctttgcactgg

SEQ ID NO: 828584 - DNA, 99 bp, Homo sapiens
tttgggtcacaatagccaagcatatgaagccttaacccaaattcctgattccagcaggtgtgaaggaattacaagtccagaaggctcaaaatctatagt

SEQ ID NO: 828585 - DNA, 100 bp, Homo sapiens
gccagaggctggcagcgactatgtgaaggaaggtgggagtcaatcattttgacaagtctcctgaaaggaacagctagcaggaactgaaacctttttccat

SEQ ID NO: 828586 - DNA, 100 bp, Homo sapiens
tataaaatggttgaaggaggcagaggaagaatcttctggtggcgaagaagaagatgaagatgagaacattgaggccctggccaacgtcaacattgggagc

SEQ ID NO: 828587 - DNA, 100 bp, Homo sapiens
agatggagaaactgtagagtttgatgtggttgaaggagagaagatttaatccagagactgacttcactatagaacccacagttgtatcaatggttgggga

SEQ ID NO: 828588 - DNA, 100 bp, Homo sapiens
ctgatgaagatgaactaacagatgtaagttgtccaataaggcaagttcccacaggtaaaaagcaggtgcctttgaatcctgacctcaatcaaacaaaacc

SEQ ID NO: 828589 - DNA, 100 bp, Homo sapiens
tcccattgcatttgctcctatgaccaatgggctttgctgcacattttttccacatggtggagtcattgccacaggttgtacaatggtagatggagtgatg

SEQ ID NO: 828590 - DNA, 100 bp, Homo sapiens
agggcaagctgtgttccatggcagggaacttttggcagagctcccactacaatgggtagaaggcctgagatcaatcatacacaacttcagggccaacaac

SEQ ID NO: 828591 - DNA, 100 bp, Homo sapiens
tagcactggctttcacagggattagccttctggtggtgggcacaactgtggtgggatacttgccaaatgggagaaaatggtgtgaatggaacattaactt

SEQ ID NO: 828592 - DNA, 100 bp, Homo sapiens
catatgtcgagggaatgcagaaagagttaaggaaggcagtgctgatgagctccttctaactgagatgatgtttaatggccttttcaatgacctttctgca

SEQ ID NO: 828593 - DNA, 100 bp, Homo sapiens
actccccagccctaacagacttcacgttcatggtaaaggccttgcttatccaagagtcaaaatggaaattaccacacctactacagttgcctgagaatta

SEQ ID NO: 828594 - DNA, 99 bp, Homo sapiens
aaaatttcttccaaggttgatgcatctctctcagaggacacattggcgtgagacctgggagtacgttgtgccaaatcattgccacttgccacatgagtg

SEQ ID NO: 828595 - DNA, 100 bp, Homo sapiens
ctcccattcacaaggcagctcgctctgggagcctagaatgcatcagtgcccttgtggcgaatggggctcacgtcgaacggagtcttgctccatcgccagg

SEQ ID NO: 828596 - DNA, 100 bp, Homo sapiens
ggatttcagtgttcaaattaaattcccagacagagaggagaacgcaggtgctggagaatctggtaaaagcaccattgtgaagcagatgaggatcctgcat

SEQ ID NO: 828597 - DNA, 100 bp, Homo sapiens
aggaatgaccctagccagactcagggatcaaagagcaaacagattcagtggcctgcattgttgtgctgaaagacattatgacaccgccaaatttaattgc

SEQ ID NO: 828598 - DNA, 99 bp, Homo sapiens
gggaatccggaagggacacgctgaacagactgatgggtttctgaaggacaacaacaatgctgcccagcgcctgttggacgggatgaacttcatggctca

SEQ ID NO: 828599 - DNA, 100 bp, Homo sapiens
ccgctccccacggtggtgttagcacctcagcccatcccagaccacagatgacatccttgtggcctcagcagagtgtcccagcgatgatgaggacattgac

SEQ ID NO: 828600 - DNA, 100 bp, Homo sapiens
ccgcaatggcgtctcaggcctggtaaccagccgcagcttccgtactgccagtgtcagcatcaaccagacagcaggagagcctgtcctgcctccagtccac

SEQ ID NO: 828601 - DNA, 100 bp, Homo sapiens
ctcgctggggcggggaccttgccttgcccgggaacactgagctgaaggttgaagtggagagcttgaaacgagaactccaggacaagaaacagcatctgga

SEQ ID NO: 828602 - DNA, 99 bp, Homo sapiens
cctagcgtcctggaattacttcaatcaagccccttcacagatgtagtcactacaaatcttaaattgcgaaatccatcggatagaaaagtgtgtttcaaa

SEQ ID NO: 828603 - DNA, 100 bp, Homo sapiens
ctcctacgtttacctgtccatgctccgccgcatgcaagagatgattgcaaggatgcaggcgcagatgcagatgcagatgcagggcggggatggcgatggc

SEQ ID NO: 828604 - DNA, 100 bp, Homo sapiens
attacagaccggtggatcctgtccttcatgcagtctctcattggcttctttgagactgaaatggcagaaataccagcgaaggcggaagtacagcctgtct

SEQ ID NO: 828605 - DNA, 100 bp, Homo sapiens
cagctctcctggttttccagccattggtttaccgtcatgatatccctgtatctgctgctgctgctcatagcaacactggactatggaatgtattctcgag

SEQ ID NO: 828606 - DNA, 98 bp, Homo sapiens
catagatatcagcaaagtatgtaaccaggagcaggactgcagggactggagtgatgagcccctgaaagagtgtcgttatgagtccagggacaatatgg

SEQ ID NO: 828607 - DNA, 100 bp, Homo sapiens
ccagccgagatgctaagagcaaggccaagaggaagtcgtgagatggagaataaagaaactctcaaagggttgcacaagatggatgatcgtccagaggaac

SEQ ID NO: 828608 - DNA, 100 bp, Homo sapiens
ctgaacccggcccccgacggctctgcagttaacgggaccagctctgcggagttttgacacaagggcgcatatcttcaaagcacctagtacctcctaccat

SEQ ID NO: 828609 - DNA, 98 bp, Homo sapiens
gctaagtacatgctggattgtagaacttctctctctatagaagaagtcagagatgccatggaaaatgaaatgagaacccagcttcgccgacaggcagc

SEQ ID NO: 828610 - DNA, 99 bp, Homo sapiens
aagcagtcagcagactctacagaattcccagtttcttttaacaagattttgactaaaggagaagttcaagtatcagataaagacacacacaactggagc

SEQ ID NO: 828611 - DNA, 100 bp, Homo sapiens
ttgcaactgacgcagtcactgcagcactggtggaacttgaggttcaatgtatctatgcctgcctacctcaatctgcaagggagtgtcagaaaggccccgc

SEQ ID NO: 828612 - DNA, 100 bp, Homo sapiens
cggcttgttgcgggcacttctcacccctgagaatctgggacctcaacagagccatcatcaaccactttaaccccaaaattgagtcctacgctgctgtgaa

SEQ ID NO: 828613 - DNA, 98 bp, Homo sapiens
tttgtgctgataggacagaaaggacagatccagttgagtatgtggaaaacatgtgtgagaacatgcagctgtacccattgcaggacattctcactgga

SEQ ID NO: 828614 - DNA, 99 bp, Homo sapiens
aaatataataatggcagcacagagctacattcgagacaaattggagacaatctgattgttcctggaggagtgaagaccattgaagccaatgggaagatg

SEQ ID NO: 828615 - DNA, 100 bp, Homo sapiens
tttcaaggagtttgtttgcaagtatggactggagacccacatggagacccattcagataacccactaagtgtgcaggatcaagacaaaaaacttcaagac

SEQ ID NO: 828616 - DNA, 100 bp, Homo sapiens
gctgtgacagagacaacaccgagtatgagaagagatgttacagcccagatagctcttcagcctgcactgaagttcaatggtggtggtcatatcaatcata

SEQ ID NO: 828617 - DNA, 100 bp, Homo sapiens
aactttcccagaagttgttctaacgctgcctttgctttaaaacagtattacttgcgacttatacaagcactagcaacaactctatatctggatcattgaa

SEQ ID NO: 828618 - DNA, 98 bp, Homo sapiens
aaggacgcgcagtccatctctctcagggaattcacaattgaaactgaagggaaaacatttcagttaacaaaagacatgatcaatgtgaagagattcca

SEQ ID NO: 828619 - DNA, 100 bp, Homo sapiens
gagaccctggcggagacatggaccagaggatctcctgcagctccagtatgagggtgtggctgtcatgaaactcttcaacaaggccaaagtcaatgtcaac

SEQ ID NO: 828620 - DNA, 98 bp, Homo sapiens
acggccctggaggccggcagctggcgctggggatccctgctcttcgctctcttcctggctgcgtccctagatgccatggacaatattaccaggcagaa

SEQ ID NO: 828621 - DNA, 100 bp, Homo sapiens
aaaaaacttccagaacatctgggagaatatttaatggaaaatcgcttggttaaaacctgacacttttaacaggcgttggagaccagggccagccctggcc

SEQ ID NO: 828622 - DNA, 100 bp, Homo sapiens
cgcagggagatacacccaactgggagaaacaagtgttgaaaatgttaaaggctgtgctgaagaagagccgagagggaggaaagggaggcaagaaggaagc

SEQ ID NO: 828623 - DNA, 100 bp, Homo sapiens
cgccatttttggtaacattacattatgctttccagacagaaaccaaacttcatctcattttaggtattgggagagttgctgctacatctttaggaaattt

SEQ ID NO: 828624 - DNA, 100 bp, Homo sapiens
gggaaggatggtggaggaatgaaaacgccgaaagggttcaaagacaccagtcagtatgtagtaggagaattggcagcactagagaatgagcaaaagcaaa

SEQ ID NO: 828625 - DNA, 98 bp, Homo sapiens
cattgggggttgatacagcagagacgtcatacttggaaatggctgcaggttcagactccgacagttagttaatatgtgcatcaacccagatccagaga

SEQ ID NO: 828626 - DNA, 100 bp, Homo sapiens
gcagaccctcgcagtgagtgttacagctcttaaggcgctgggccccctgccccgtgaggacggcaacctgatgctgcacctgcagcgcctggagaccacg

SEQ ID NO: 828627 - DNA, 100 bp, Homo sapiens
atgccgcaattccagcctatcacctaagagaccttatcaaaagtatggtggtgatattacccgaaaaatgaagcttttgaagagacaagcagaagggaaa

SEQ ID NO: 828628 - DNA, 100 bp, Homo sapiens
gccatgaccaaggctcgcaattttgagagagttttgggaaagaatcccacgtggcgaagtctcgattttggaattatgccagaccgtcttgatacatctg

SEQ ID NO: 828629 - DNA, 98 bp, Homo sapiens
aggtcgagatagaagctcgcttttagatgataccactgtgacattgtcgttatgccagctaagaaatgttgcagatgctattctaggcaatcagatgt

SEQ ID NO: 828630 - DNA, 100 bp, Homo sapiens
tcgaaggccccttctgcctgatggcacattcagctcctgtaagaagaaatgagccgtcagactgctacagcattacctaccggtacctcgaagtgtccac

SEQ ID NO: 828631 - DNA, 98 bp, Homo sapiens
agaggagattgcagaccaagaattagcagaagcccttcaaaaatcagcagaggatgcagatatggccgcgtggaaagtgtcaaaattcttcccaagag

SEQ ID NO: 828632 - DNA, 100 bp, Homo sapiens
agcctttccttaggacaaacaaggtcgtccttggtggaaggaaccatgaactggcatctccccctcttcctcttggcctctgtgacgctgccttccatct

SEQ ID NO: 828633 - DNA, 98 bp, Homo sapiens
ggggaacctgctcaaagccctgggtcgcttggaagaagccaagacatatctgaagagatggattaagaatgctttggattaaggattgtggagcacat

SEQ ID NO: 828634 - DNA, 100 bp, Homo sapiens
gccaaagaaacaagccgtggaataggtgtatcaagtaatggtgcaaagcctgaaattatctccctccaaactctaaagaaggaatataaatcctatgaag

SEQ ID NO: 828635 - DNA, 100 bp, Homo sapiens
tcgccatggccgacgaaaagcccaaggacactcatgaggaccatgatacttccactgagaatacagacgagtccaaccatgaccctcagtttgagccaat

SEQ ID NO: 828636 - DNA, 144 bp, Homo sapiens
catcacctatgtgcaccagcacagccggcagcccccctcccagtttgaacctctggacatgaagctcatgagctggttatattctgggcactaaatgaaggcgtttctaggcaatttgattcgttcagagatggatttgaatca

SEQ ID NO: 828637 - DNA, 98 bp, Homo sapiens
cctggtcgaacagttttttctaatggctattcaaggcaccatacaggaagattacttgagagagctgctgacaaccatgggggatcggtttacagatg

SEQ ID NO: 828638 - DNA, 99 bp, Homo sapiens
tcagctccaggcctgggaaagtgaagattctgaaaaagagttccacgtcctcccttatcgagtctttgttccccttcctggatccactgtaatgttgtg

SEQ ID NO: 828639 - DNA, 98 bp, Homo sapiens
ctgcctcagcctccggagtagctgggaatacaggaaggaagagggaatggtttaaaatagaagacgccataaaagtgctgcagtatcacaaacccgtg

SEQ ID NO: 828640 - DNA, 98 bp, Homo sapiens
atctgaatacactcgtgaccgaaatgaacgagctgctgaccaggatcgcaaaagaggatgctgtcctaccagtagctctcttcccatctctctgcgag

SEQ ID NO: 828641 - DNA, 98 bp, Homo sapiens
aaaaaccaaaagagaaagtggatgctctatcacagtttgatctcaacaattatgcaaatgacacagtttatctctttgttgtaaaccacccagaattc

SEQ ID NO: 828642 - DNA, 99 bp, Homo sapiens
acacattcataatcagggtcttgcagccattgaaaagtgtggagaagctgctttaaatgttaatcactgttctgaagatggtgtttgtaacaccagtta

SEQ ID NO: 828643 - DNA, 100 bp, Homo sapiens
gtttattcaccatcaacaaagaagaccacacactgggaaacatcattaaatcagttcagttgattccaccatctctagttcttcttccactaaaggaata

SEQ ID NO: 828644 - DNA, 100 bp, Homo sapiens
ctgctgctggccagctgcagcctcagccccacaagtggttggaggcaaagtaaagaagcccggtaaacgtggtcggaagccagccaaaattgacttgaaa

SEQ ID NO: 828645 - DNA, 99 bp, Homo sapiens
tttgccttcctgaatctttttccctgcactacgaggaagagcatttcagtagaaccatggaggagctggttcatgaccttgtctcagcattggaagaga

SEQ ID NO: 828646 - DNA, 100 bp, Homo sapiens
aacaacttcaatgcagtctttagtcgcatttctaccagagttgaaactgtgggacagccagacagaagagatagcataggagtgtgtgcagaaaaacagg

SEQ ID NO: 828647 - DNA, 100 bp, Homo sapiens
gaattgataaaccaagctcggaaacaagccaattctggtgatcttgatactgcagcagtaaaagtggaatttgatgaagaattcagtggagcaccagtag

SEQ ID NO: 828648 - DNA, 99 bp, Homo sapiens
atagtcaactgcgtggaagagaagtgatgctattgctgagattagagccatttgtattgaagaaattggagtatggatgaaaatgtatagtgatgcctt

SEQ ID NO: 828649 - DNA, 100 bp, Homo sapiens
cagtgcaaacagacttcggagtacctgcgctatgaagacacgcttcttctggaagaccagccaacagatgcctgaggaagtgcaccatggagaggaggag

SEQ ID NO: 828650 - DNA, 100 bp, Homo sapiens
gctcagttgcggtttcctgtaccaaagatacaggttgatggacggatggctacatggatgtgatggagatggtttactatcgggaccttccgcatcctgc

SEQ ID NO: 828651 - DNA, 127 bp, Homo sapiens
cccagcagcgggagaagctgtctctgatccgcaagcatgctcagaccttcattgctctgtgtgccaccgcgagcccccgcttcggaggaggagttccagtttctgcgctgccagcaatgccaggcgg

SEQ ID NO: 828652 - DNA, 99 bp, Homo sapiens
ccgatttaaagctgagctgcgaggaaaatggcggcgggagcaaactacagggctcctttgatgtcagtgtcaagggcatcagcatttcggtcaacctcc

SEQ ID NO: 828653 - DNA, 100 bp, Homo sapiens
agcctgagcaaggagcgggtccgtcgcggagccggagggcgggaggaacatgacatcgcggaggtgaaaggtgtagcagtcactcggcctacacccacag

SEQ ID NO: 828654 - DNA, 100 bp, Homo sapiens
tgcagcaggtggtgggcccgggatccagcctcccctcttcccttccctggcagggagcaggggagagaagacagaagaggttggagaggtcagggaggtg

SEQ ID NO: 828655 - DNA, 100 bp, Homo sapiens
tcgctgcgggtttgcactgcccgggacatgggcaagttttgcctcacatacgaggcctccatgacccggctcttccgagaggggaggacggagaccgtgc

SEQ ID NO: 828656 - DNA, 100 bp, Homo sapiens
cgggccaagatcgatgatcccacagactccaagcctgagtgactgtcatgtggcatgggtctctgcccaagctcgtaatgagactatagcaaggcggctg

SEQ ID NO: 828657 - DNA, 100 bp, Homo sapiens
gtgcttctgcccaacgacatcgatggcctggagaagacatctgtgcaggttccatcaccagcaaatggcgtgattgaagctcttttggtacctgatgggg

SEQ ID NO: 828658 - DNA, 101 bp, Homo sapiens
tgagtactcatggaaagcaaattatgcaagccgtcactcttattctagaaggggaacataacattgaggtcaaagagcagaattatatccagatcgagaga

SEQ ID NO: 828659 - DNA, 98 bp, Homo sapiens
tttatattgctgttggaatatctggagccatccaacatttagctgggatgaaagacagcaagaatgtcaagctgtcagctgaggtggagccatttatt

SEQ ID NO: 828660 - DNA, 100 bp, Homo sapiens
aaaagaaagcatactgcgagccctgctacattgcatctaataggattcaggaatcaaagaatcagtgtactcaggtggtacaggaaagagagagccttct

SEQ ID NO: 828661 - DNA, 99 bp, Homo sapiens
gaggattttgaggacacttgtggagagctcgaattccagaatgatgaaattgtcttgacaaaagtaagctgaagccaggaacaagagttgctttggata

SEQ ID NO: 828662 - DNA, 100 bp, Homo sapiens
tcaggagaccgtcgttgccttgtatttccagagaacaggcattttttactgtctacagaaacttattgtaattcatttttcctcactccagtagtaagaa

SEQ ID NO: 828663 - DNA, 98 bp, Homo sapiens
gacacggggcaggctgagttcctcttgctcacagagctctgtaaagatgggggctccggaggtggcgcccaggctctgagctaccctaggtctgcaga

SEQ ID NO: 828664 - DNA, 100 bp, Homo sapiens
ttgggccgccgagctggacccggaccggttttgggtgaggacaccagtgatgaattctgaagcaaaagttctggtgcctgggattcctggtcatcatgca

SEQ ID NO: 828665 - DNA, 101 bp, Homo sapiens
gagggagtgcgtggaggagctgtgcagccgcgaggaggcgcgggaggtgttcgagaacgaccccgagacgataatatccctgttcacttttgccgttggag

SEQ ID NO: 828666 - DNA, 100 bp, Homo sapiens
acatagctgtgaagctgggaactgatctagaatactggtgagcctggccagtgaagtccaggacctgcatctggcccagaggaaggaaatggcctcaggc

SEQ ID NO: 828667 - DNA, 98 bp, Homo sapiens
ggcatgctctatctgtactgccggcacctcaaccagatgaggaagtacaactttgagagtgatgacagacctaatgctctattaagttcacctgcaac

SEQ ID NO: 828668 - DNA, 100 bp, Homo sapiens
ccaagaaaaaaaccacaaatgtttttctgttttgcctgaatacatgatttaaacaagagatttccacagaagggctcaagggttcttgttgatgcacgag

SEQ ID NO: 828669 - DNA, 100 bp, Homo sapiens
tacatcctctgccacatcttcctgacccgcttcaagaagcctgctgagttcaccacagccacagcgtcctgtgtttactcatgaaaatattcaaggtggg

SEQ ID NO: 828670 - DNA, 75 bp, Homo sapiens
tgttgctgaacagttggagaagatctatgggtcagacagaattctgccactggtgacatgccaacttaccagatc

SEQ ID NO: 828671 - DNA, 100 bp, Homo sapiens
cctgtaacccagcctgtttcacttcttggtgaccaaagccacgtaatgtccgtagttcgctcatccgtccatgccagatggattgtggggaaggtgattg

SEQ ID NO: 828672 - DNA, 100 bp, Homo sapiens
gcggtgcgggccgtgcagagcagcacctccatcaggtacaacctcgaggagctctaccagttttttgtagcatcagatccaacagttaaaacagatcgac

SEQ ID NO: 828673 - DNA, 98 bp, Homo sapiens
ctagaccctgagttcctgaaggccatccccatcatgaaaacccgcagtggcatgcagccgctgtacaaccagccctccgacacccggcagtatcatga

SEQ ID NO: 828674 - DNA, 99 bp, Homo sapiens
ccaatgcaaacattatttctgaggccaagcccgaaggacctagagtcaaggatggatctggaaggtgttgaaagcagcaggggcctagaagacattaaa

SEQ ID NO: 828675 - DNA, 100 bp, Homo sapiens
ctggatccaaaatttatcacgagtattttgactgcaattacatgcctgtctactgttctatcaattgatttcaaaccttcagaaatagaagttggagtag

SEQ ID NO: 828676 - DNA, 98 bp, Homo sapiens
tggcagcgaggtcgcggcaggttcgagatatcagttttagagaatgtggcgtggagaaattctcaaggaaagagtaaaatgctggtgatgtgctgagg

SEQ ID NO: 828677 - DNA, 100 bp, Homo sapiens
ctcctcaccatacacctgaaggaaggccggaacctggttgtccgagatcgctgtggataaggccgccaggacttcactttgtgctactgcaagtgcatca

SEQ ID NO: 828678 - DNA, 100 bp, Homo sapiens
agaataagagatgtgattaatgtattccaccacctccgccagttaagaggaaaaaggaatacggggtgctttgcattcaggaatacagaaaaaacagcaa

SEQ ID NO: 828679 - DNA, 100 bp, Homo sapiens
tttgcctcatttgaggagtgggaacaggcttcggcgaacacaaagattggtttatcttggaagctaaagggcattgctcatcctgaagatcagctgacca

SEQ ID NO: 828680 - DNA, 98 bp, Homo sapiens
gcgccgggccaaggccaaggccagccggactaaaacaaagcacaagtggaagtgctgtccgctgcactacgtgcttccagcctggatgcacatgaaga

SEQ ID NO: 828681 - DNA, 100 bp, Homo sapiens
atgattttgaaccttacttgagtccacaggtagctacagcaagctgggtagcaggcagatccaaaggatatcatgaagtttccagggcctttggaaaacc

SEQ ID NO: 828682 - DNA, 100 bp, Homo sapiens
ccggagaccccgaaaacggaagcgcagggagaaggaagaggtgtttgaaaagttgctgatatgtgttcaagatgagtgggatgggagaaaatacctctga

SEQ ID NO: 828683 - DNA, 100 bp, Homo sapiens
actagctgcagagctcaggggagctgctccacatcaccgacatgaagggaacaggcatcatggactgtgcgcccaaggacagtcattttgtttactcatt

SEQ ID NO: 828684 - DNA, 98 bp, Homo sapiens
caaagaaatcaatggaattcatgatgaaagcaatgcttttgaatcaaaagcacctgttcttcccggagcctatcagcaaagccattcccaaggctatg

SEQ ID NO: 828685 - DNA, 103 bp, Homo sapiens
tctctctctctccctctccctctcctgccagccaagtgaagacatgcttacttccccttcaccttccttcatgatggttcctaaaagtaaagctttagaggcc

SEQ ID NO: 828686 - DNA, 100 bp, Homo sapiens
aaaagccaagaggaggacagttcgctacacagcaatgcatcgagagctggaagtcgagtgtgctactcaactcaggagatttggagacaaactgaacttc

SEQ ID NO: 828687 - DNA, 100 bp, Homo sapiens
gagagcccaacgcctggtgctcaagactttctccgaggaatcattaaccaatggcaacaggaatccaaggataaagtgatttccctcctgttaactcatc

SEQ ID NO: 828688 - DNA, 100 bp, Homo sapiens
cccaaatctctgccgtatgttctgccatggaaaaacaccatgcaagtttctgctagatgctgtgtttgctaaaggaatgactgtacggcaatcaaaagag

SEQ ID NO: 828689 - DNA, 98 bp, Homo sapiens
aaagagaagatgttcaaaagaaaacattcacaaaatgggtaaatgcacaattttctaagatagctttccaatgattagacgaattgattctttctgtg

SEQ ID NO: 828690 - DNA, 100 bp, Homo sapiens
ctgttgtgagaatcaaacgagataatgtatgctgaggcatgctgtgaacactacgtgctgggtacaggaggctgaccaactgactgaagagcagattgca

SEQ ID NO: 828691 - DNA, 100 bp, Homo sapiens
gatcccattcacctgaggcacccgaagaagagaccatccatatttccagtgcacctggtggacatatggaatgtcatagaagcattgcgggaaaatgctc

SEQ ID NO: 828692 - DNA, 98 bp, Homo sapiens
cctgccctaccatccgccccagcgcaggatgaacctgaagggcatccaggaatcagagatcattgatttcttcctgggggcctctctcaaggatgagg

SEQ ID NO: 828693 - DNA, 98 bp, Homo sapiens
caagatcatggtggggagtacggacgaccccagcgtgttcagcctccctgactccaagtgaacagagtatctgtcaggcaagagctgctgtgatggtt

SEQ ID NO: 828694 - DNA, 100 bp, Homo sapiens
gttcaagtgcagggagttcccgttacaatcactagtgttgcaggtgacttaagagattaaaattaatttggttgctgttggttctgaacaaataatgagt

SEQ ID NO: 828695 - DNA, 99 bp, Homo sapiens
ccacgaccatctcgcactaccctgactacagctggagcgcccagaggcgagccctggtggaggaagaggtgtccctggccagtgtccttccacctgtcc

SEQ ID NO: 828696 - DNA, 98 bp, Homo sapiens
ctcacacacctcacttgttcttttgggcgaagtgctgcattggaagaagtgggcatttgatgtagaactactgtacatagcacagttctttaaaattc

SEQ ID NO: 828697 - DNA, 100 bp, Homo sapiens
gctcgggagattcagccgtgaagcaagtgcagatagatggccttaatatgacagatacctagcatctagcaaaataatggcagctgcttaccttgacccc

SEQ ID NO: 828698 - DNA, 100 bp, Homo sapiens
gcagaaccgtgggtggtttctggcaatactggagtaaccgcttcctaaaccattttgcagaaatgtaagggtgttcggttgcgtgcatgtgcgtttttag

SEQ ID NO: 828699 - DNA, 100 bp, Homo sapiens
gtgcgaggagaactactccgtgacctggtacatcgccgagttctgggcagacactggcctcagatacctgacctggtaccctctatgaggcctgcggtgc

SEQ ID NO: 828700 - DNA, 100 bp, Homo sapiens
gagaatgtgtgtgtgtcccgggcccagacgaattgcaatatgtcggacgccttggccaacgccgtgtgccagcgctgccaggcccgcttctcccccgccg

SEQ ID NO: 828701 - DNA, 99 bp, Homo sapiens
cgcttccacctctccaccaccgaccgcgtcatcaaagggaaaagaagatctcccggagcagtgccctgaaagtgctggaccatgccatgattggccccg

SEQ ID NO: 828702 - DNA, 98 bp, Homo sapiens
ctgcagaggatggcgtgcgaggtcgccgcggggctggccgccatgcacaagctgcacttcctgcacagagaagctcgcagaggctcagcgcaggtttg

SEQ ID NO: 828703 - DNA, 100 bp, Homo sapiens
gcattgtccactgcagcagtacactaccaacagatcaaagaaacccctccggccagtgagagccctggccaacgtcaacattgggagcctcatctgcaat

SEQ ID NO: 828704 - DNA, 98 bp, Homo sapiens
agcactttgggtttcatttgtaaaggagccggagccccagatgtctttggtggacttgggaaagaggttgctagaagcagcaagaaaaggccaagatg

SEQ ID NO: 828705 - DNA, 100 bp, Homo sapiens
cgtgtggacccgtaaaataaaatggagatggaaaataatgtcctgcaagatgaggattgaacagttaaaacaaacaatatgtaaaggaaatgaagaaatg

SEQ ID NO: 828706 - DNA, 100 bp, Homo sapiens
ctggctcagtacatattcaccttgaagaggaagacggggcggaagaccaagatcatcgagatggtaattttggccagctggtactggatttataccaaaa

SEQ ID NO: 828707 - DNA, 98 bp, Homo sapiens
gaaacctaacactctgattccaaggtgctgctgctaacatctgcagaagatttggactgcactcctggatttcagcagaaagtgttccatatcaatca

SEQ ID NO: 828708 - DNA, 98 bp, Homo sapiens
tgtccagaagtttactattttgatagatgttactttgctgaaaatagaactggaatcagtgtctgtccctgaagggtcattaaatcagctatgttctt

SEQ ID NO: 828709 - DNA, 99 bp, Homo sapiens
aaggtggaagattcttccaaggaaccagtgcgaagggattcatccaaccatcatttctgagtcattccagaaggccctggaaaagggcattgaaatctt

SEQ ID NO: 828710 - DNA, 98 bp, Homo sapiens
tgggaccatggccactgactcatgggccctggcggtggacgagcaggaagctgcggctgagtcggaaccttccctgtatactgtcaaagccatcctga

SEQ ID NO: 828711 - DNA, 99 bp, Homo sapiens
taagaggaaagaaaattagattacagatctggatgagttagatgaactccgtgctgagatggaagagatgagagacagttatttagaggaagatgttta

SEQ ID NO: 828712 - DNA, 100 bp, Homo sapiens
taatcatggaacatttgaagtcacgtaaagaaggagtgtgcactcacctagttaggcctatcttggcctgcccatcactcctggcgtgcagtctcctaac

SEQ ID NO: 828713 - DNA, 98 bp, Homo sapiens
cgcagaaagcaggcgaacccgcggcgcaataacgtttaagctatgaagaaggacatccctcacactctgaaacagatctccttcagagacagagtttt

SEQ ID NO: 828714 - DNA, 100 bp, Homo sapiens
ccgaccccacccgccgcacatccccagccattttcctgagttccctgatccccacacctacatcaaaactccgttaagtgggcagaccaacatccacctc

SEQ ID NO: 828715 - DNA, 100 bp, Homo sapiens
caaattcttctcggagtacttcagaagttaatccacaaatgcttcaagacttgcaagctgctggatttgatgagtgctgtccccggcataggtccatctc

SEQ ID NO: 828716 - DNA, 100 bp, Homo sapiens
gagaagcctcggccacttggttctgccagatgttcctggggttactgtaaatgggaaggacaggcagagctaaacaagacttcagctacgggacggacga

SEQ ID NO: 828717 - DNA, 100 bp, Homo sapiens
ccgaatgccacctggtttataacaaaagaagccctacaggtggcaactactagcccaactgccaatactactggtactgctactacttcctcaaccactg

SEQ ID NO: 828718 - DNA, 98 bp, Homo sapiens
acctggaagctagtggacagcaagaatttcgatgactacatgaagtcactcggactatcctattaagtgtaatctcactgcttaatgagcccaacacc

SEQ ID NO: 828719 - DNA, 98 bp, Homo sapiens
cttgtccagaactctgtcaaatgaagaacactttcaagaaccaggggctttgttatgcacctaaagccatattggaagctccagaagaaagagcaccc

SEQ ID NO: 828720 - DNA, 99 bp, Homo sapiens
tacaaaaagcagtggagagctttacctggaatattaccatcttaaagccagtacaggctactctgtcatctttgaagatgttagatgtgggaaagtggc

SEQ ID NO: 828721 - DNA, 99 bp, Homo sapiens
gctgaagaagaaatcatagacgatgatgatgatgacatcacccttacagcttacctgttgattcggtggtaattacagaatctgatgcacagagaacaa

SEQ ID NO: 828722 - DNA, 114 bp, Homo sapiens
tcagttgcgatgcatgcaagtcggaggaaacgctagtgcaaaatacatgctacaggatttaactatcagaatgaagatgaaaaagtcaccttgtctttccctagtactctgcaa

SEQ ID NO: 828723 - DNA, 100 bp, Homo sapiens
cgggcggcccgggctgtagtgccggcgccgccgcgtcttcccggtctcctttcccggccgcacagggaccaccgcacagtctcaagtgtagtgaagtcag

SEQ ID NO: 828724 - DNA, 98 bp, Homo sapiens
tggcctcgttacctgcaggtattgggagatccacagctaagacgccaggacccactggaagcctagaaatggaagattgttgatcgaatcgacaatga

SEQ ID NO: 828725 - DNA, 100 bp, Homo sapiens
gcaacttctcccaccaaaagccctttcaagataccaccggtaactttcatcaatgaaggaacatttacagttcagttttatgatggagtaattcgttgtt

SEQ ID NO: 828726 - DNA, 100 bp, Homo sapiens
acccgtagtatgggatgtggtatgataccagcaactggtctattatatcatttaaaccacatggctatctaaagagacgttccatcctcagagcagcctg

SEQ ID NO: 828727 - DNA, 98 bp, Homo sapiens
ggaggttctgaagaagatcgtaacaacttatgacatgacatatctgaagagatggattaagaatgctttggattaaggattgtggagcacatttcaat

SEQ ID NO: 828728 - DNA, 126 bp, Homo sapiens
ggcacctacacccgccacggctacatcttttcgtcgcttgccggctgtctgatgaagagcagcgagaatggcgcgggtccacacccagcaccactgagcaagtttgtgagcagtgtgagcacggcc

SEQ ID NO: 828729 - DNA, 100 bp, Homo sapiens
cggacggcacaccctacgttaccgtgctcaagctcccgctgctggaggacaagctgcggacagagctgcctgctggggcccgcgtggtgtctgggcgctt

SEQ ID NO: 828730 - DNA, 100 bp, Homo sapiens
gagtctactctgtcgctcttgtgccctagcaccccgagaaccgtcagtttgagccagatggtcctatggcagcgtatacaaagctattcataaagagacc

SEQ ID NO: 828731 - DNA, 100 bp, Homo sapiens
agataaatccaaatactgcatatcagaaacaacagagaatggatcttggagaatgtctgaaagtccatgacctggctttaagagcggattatgaaattgc

SEQ ID NO: 828732 - DNA, 100 bp, Homo sapiens
aacgtagttcccagctacttttatataatcagccattgtttgatgtcctgtgactgagaaaccaggctttaaactttatgcctttggagatggagcccaa

SEQ ID NO: 828733 - DNA, 100 bp, Homo sapiens
catccatcaccagcgccgccttcaccctcaggacgcagtgaatcatctctaatcatgaacaagttaaaatgccctcattgtagctatgtagccaaataca

SEQ ID NO: 828734 - DNA, 99 bp, Homo sapiens
ttcgttgcattgcctgagaggagcggagtctgccaggtggtgtccatcatggagttaaagttcctcgtaattttcgcttgttggaagaacttgaagaag

SEQ ID NO: 828735 - DNA, 100 bp, Homo sapiens
ggaagtgcagctgcctcagttcttagcgcagtcgtcctcttgagttctggcgccttgactactgggaagatgacttgcggcgccggcgacgatttgtgcg

SEQ ID NO: 828736 - DNA, 100 bp, Homo sapiens
tggcgtcaccaatgggctgaatgatgccagcgactccatctacacgaaaggcaccccggagattgctttctggggaaggcctccccatggccacccatgg

SEQ ID NO: 828737 - DNA, 99 bp, Homo sapiens
atgggcaacccttctgttttttgcagcgctctttgttctgatggagggagttctgggaaatcgttcattcatttacagatgaacagaaaagactcttct

SEQ ID NO: 828738 - DNA, 101 bp, Homo sapiens
agacaaggttcaaaaactaagcatccagaggccctgagcagctttcagcactggagtgtcttgggacaaggtgcgcattcctggtgtgctgcagcgattgg

SEQ ID NO: 828739 - DNA, 100 bp, Homo sapiens
gggagatcgctcagctggccgtgtcctggcaggtggctattatcatggaaaactaatttttcccagagaatttcctttcaaacctcccagtatctatatg

SEQ ID NO: 828740 - DNA, 99 bp, Homo sapiens
ggaaggcctgcagcctgaaacgggccttgaaagaggacagcctcaaggatgggcaccagctgaaacaactgctgctgaaggccctgactctgatgttgg

SEQ ID NO: 828741 - DNA, 100 bp, Homo sapiens
tactgcgtgattctcgaccctgtcggaccggatggcaagaatcagctggggcagaagcgcgtggtcaagcagcagtgttgtactgctacttctataaacg

SEQ ID NO: 828742 - DNA, 99 bp, Homo sapiens
acgagtctttccttagtaacctgggcgatagctggtccaagacaagctgctgctatctgcgtgccacttactggtctcactggccaccaccgtgcggcc

SEQ ID NO: 828743 - DNA, 60 bp, Homo sapiens
ccagctggccctggagtcccctgaggaatacctccacgggcccattcccgagattctagt

SEQ ID NO: 828744 - DNA, 100 bp, Homo sapiens
gacacagccttaacctatgcttgtgaaaatggacatacggatgttgcagatgttttacttcaagcaggggctgatttagattttgacacttcatgacatg

SEQ ID NO: 828745 - DNA, 100 bp, Homo sapiens
ggccaagggacaatggtcaccgtctcttcagctggtaggtgagtgctgtcctcggctcactttcctcaagctctccggctgccacggtgtgactgctgac

SEQ ID NO: 828746 - DNA, 100 bp, Homo sapiens
ggcgttcccgacccttagctacccacgatgtttcagacagtccccgacacgtcgtcttacatcaaggcccagggccccggccagtgcccagccccgctgg

SEQ ID NO: 828747 - DNA, 100 bp, Homo sapiens
aagggttcagcctttcaatgtgacacaaggaaagtattctacagagaatagtgacagtggtacaggaaagaaagaaaaagaaaagaaaaacagaaagggc

SEQ ID NO: 828748 - DNA, 98 bp, Homo sapiens
ggctggccgccatgcacaagctgcacttcctgcacaggtaccgagttttggcaattggggatgaaaaagatcaaaccaggaaagaggatgaacttaac

SEQ ID NO: 828749 - DNA, 98 bp, Homo sapiens
gatttgtgaagctgggaatcatttcatcaatgtaatgttgtctcatcccaatcacacaggcaggaatgggccacttgtgtgtaacaaaagatggactg

SEQ ID NO: 828750 - DNA, 98 bp, Homo sapiens
atttctgagtaatctggaagaaacctgccccatgacatgtattctcgagaatctggacgaggctagagaacagaaagaaaagagtcctccagaccagc

SEQ ID NO: 828751 - DNA, 100 bp, Homo sapiens
ccttcaagaagctctacttctccctcactaccgaggccctcagcttcgcgaagacgcccagctccaaggctgaagtcgcccagctgcaagaacaggtggc

SEQ ID NO: 828752 - DNA, 100 bp, Homo sapiens
aagttaaagataacagacatgtatatgagggaaaagatggtgccattgaagatattatcacaggattctggactctacttataatatccctaactgctgg

SEQ ID NO: 828753 - DNA, 98 bp, Homo sapiens
tggtactcaaatgggctgcgtggatgttttatatttccagaacctagcacagtgccgggcataaacacatggattaattgatgtatgttgagtttatg

SEQ ID NO: 828754 - DNA, 100 bp, Homo sapiens
cgccaccgagtccggaccggagactttggggcctaactaggtctccaggtggtcctgaattccatcatcaaggccatggtccccctgctgcacatcgccc

SEQ ID NO: 828755 - DNA, 98 bp, Homo sapiens
acgagctagagttgccatttcgctgggatttttgggtggtgcaaagtttttcacagcatatggtcctgattatgtgctggaaatcacgccaagctgcc

SEQ ID NO: 828756 - DNA, 100 bp, Homo sapiens
ggaccttttttcatttccatttctaccttgtatgcctcaatttgctggatttaagcactgctgcactttatgagagtatggtgtttgcgaaaacttgcgg

SEQ ID NO: 828757 - DNA, 99 bp, Homo sapiens
taaaaaatggcatgattattccttcaatgtataacaatttggggcttttcattaaccattatcctaatggggaaagaccacagcaagattctttcattc

SEQ ID NO: 828758 - DNA, 100 bp, Homo sapiens
cagagatcggcggagaccctcgaagtgcgcaaacttgacactcaccctgaccgcatgctggactatgatacagagaacctgaactctgaagaaatctata

SEQ ID NO: 828759 - DNA, 99 bp, Homo sapiens
gcatctttgctaagttttgaaaaacttgaccgtgcctcaccagatctttggccagaacaatgagtattttatacagaaatcttgtgaaaccactgccca

SEQ ID NO: 828760 - DNA, 100 bp, Homo sapiens
ttctggccagtggagagaggaattcctcaagacaccattccagttctgccttcaggtagcaaaacagaacggatcttccctgccttctgcttgtcagccc

SEQ ID NO: 828761 - DNA, 100 bp, Homo sapiens
ttttttgaccgctttctccagtggaagtggttggaaagcctcattgatgctactcacagagacgtggatgtgctgttactgctttctaactctgcctact

SEQ ID NO: 828762 - DNA, 100 bp, Homo sapiens
tccagtcggtgttgagcacggcgagcagtctcaggcctttagtgatgatgataaaatttgatgctgggactctccttcttagtacacaccgactgatttg

SEQ ID NO: 828763 - DNA, 100 bp, Homo sapiens
tttgacctccttccatgaatcacaaatgttcttaatggcatctagaatgatcactggggtgatcctgctggctgttggagtctggggcaaacttactctg

SEQ ID NO: 828764 - DNA, 100 bp, Homo sapiens
gactgattttatgggaaaattaagcagatgctccagtttgagaaacctggatctgcgatctgtttgtggttgaagcactggacaatgccacatactttgt

SEQ ID NO: 828765 - DNA, 98 bp, Homo sapiens
gctagcaggctgtcataacaatgaccacctggtagagaaataccgcattcttatcacaaagtttggtagtggccccaatgaagaaccttcagaacctg

SEQ ID NO: 828766 - DNA, 100 bp, Homo sapiens
tcacatgctttacaagctgaggatgctcaccaagccctgttggagactatgcaaaacaagtttatcatgaaaaatgtgaggttttacaatattctgcaag

SEQ ID NO: 828767 - DNA, 98 bp, Homo sapiens
cgccctcgctcaccgccagcctgggcgcaacctatatcctggtgatggtggatccagatgcccctagcagagcagaacccagacagagattctggaga

SEQ ID NO: 828768 - DNA, 98 bp, Homo sapiens
cacattgcgcagtcgggaccatcgccggagcctgaggacacttctctgtcgtcacagttaggttttgtagtgcatccctgagcatgagcacagaatga

SEQ ID NO: 828769 - DNA, 99 bp, Homo sapiens
aaaaaccccggagtcttcctgatccatggacccgatgaacatagacacagggtgataaaagaaaatgtggctgaagttacccgaagttcagcttgcagt

SEQ ID NO: 828770 - DNA, 100 bp, Homo sapiens
tacattctcaggtggagacctcttcttggacacttaatgattgttggcaagaaatgtgctgctgatctgggcctgaataagggttatcgaatggtggtga

SEQ ID NO: 828771 - DNA, 99 bp, Homo sapiens
tgccaatggtggagaagaaaacttcggacaagggcatggcccccgccctccggcatctgtacaaggagctcatggggccatggaacaaggatgagatca

SEQ ID NO: 828772 - DNA, 100 bp, Homo sapiens
acagctaacggggacgacagggaccccgagatcgagctctttgtgaagggtctcggattgcgagctggctgccgagtttttcggttgaagtgatgcacac

SEQ ID NO: 828773 - DNA, 100 bp, Homo sapiens
gtttcagaggttgagcaagaactggcctgtcaaaatgaccattctagtgctctccaggagagcgacttgcagttgtggaggtacagtgtgaacggctgag

SEQ ID NO: 828774 - DNA, 100 bp, Homo sapiens
gccgggccgcccgggcgcagtctttaaccatggcgtccctcttcaagaagaaaaccgtggatgtcatcagcagtgaggactctgaaggatccactgacgt

SEQ ID NO: 828775 - DNA, 100 bp, Homo sapiens
cctgaatgaatttagagccaaactgtccaaggctttggcaagagacccatattcgggaaatgcctttctgcctggtgaaagctccagtgaggatgaagag

SEQ ID NO: 828776 - DNA, 100 bp, Homo sapiens
taaccatgaagacttgaacttaatacagcaagaaagaccatcaagtttaccagatgacagtgatgggattccgtggtcagaagaacgggtggtacgtaaa

SEQ ID NO: 828777 - DNA, 100 bp, Homo sapiens
aaagggttacaagttgctgccaccttatcttagagttattcaaggggatggagtagatattaataccttacaagaggatggaggtttgcttctgaataac

SEQ ID NO: 828778 - DNA, 118 bp, Homo sapiens
ttcgctatacccgatcgcggttttaatcgacgagctccgcaatgaagacgtgcaggcaaagcgaaggctggagctaggagaaagcggtcatcagtacctctcagatggtttaaaaacc

SEQ ID NO: 828779 - DNA, 99 bp, Homo sapiens
tctgtaatgttcaggccatggaagaaatgatgatggaaatgaagtataataccaagaaagccccacttggggcaagaatggtgagggagctgtttgtca

SEQ ID NO: 828780 - DNA, 98 bp, Homo sapiens
ctcctcaccccctgaaaatgttcgcctgctccaagtttgtctccactccctccttgatcatggaagggaagtggttgctgtgtatgttactggtgctt

SEQ ID NO: 828781 - DNA, 98 bp, Homo sapiens
acttcaacgctgagccaccttgggaacctagctgatgataggggggttccatctcccaacttgtccatacctgtcatttactccatcctttatagtga

SEQ ID NO: 828782 - DNA, 98 bp, Homo sapiens
gggaactcgatcctgctggctgctgtctctattctctcggcctgtcagcaaagtctggagcccggcactgtggtcataacagagcaggcagtggatac

SEQ ID NO: 828783 - DNA, 100 bp, Homo sapiens
aacccctggcagagctgcagccacagtgccggctgcacctatgcagctcttcaatggagatgctggtttttcagcagcagacagagaagccagtctggag

SEQ ID NO: 828784 - DNA, 110 bp, Homo sapiens
actggattataatactggagaggataaatcctcaaaaaatcttcttggttctgctacaaatggggaaattgaggcagagaagccaagacatgtgctaaaggtcatgcagg

SEQ ID NO: 828785 - DNA, 98 bp, Homo sapiens
cagctgtgccgcaccgaggcgagcaggagcagggaacagcgatatgccaatttcaaggacgaacctactttgaaggagaaagaaatacagtctattcc

SEQ ID NO: 828786 - DNA, 98 bp, Homo sapiens
caaaaaagggactgctaagaagataccaccagcaaatccagtttgctgatgacatgcaggagttcaccaaattccccaccaaaactggccgaagatct

SEQ ID NO: 828787 - DNA, 100 bp, Homo sapiens
cagggcatataccttctactgtccaagcacagtctcagccccatggggtatatccaccctcaagtgtggttgttgatcattatgaaaatcctagaaacgt

SEQ ID NO: 828788 - DNA, 100 bp, Homo sapiens
agatacttctagatcgtctagatctactagaccatgggccaaagagggtcgacctgcaaacttgcaagagctccggaaattggcctcagtccttgtcagc

SEQ ID NO: 828789 - DNA, 99 bp, Homo sapiens
taagctcctaactttgcccaatggagagcgcctcagtcttccacccaatcttggctggtccattggtccaaatcatttgataaaacatttacagacagt

SEQ ID NO: 828790 - DNA, 98 bp, Homo sapiens
gtaaagacccatttctctatgagatggaattgtcagccacttgaagaagcaggcaggaccagcttcagtgcctctcaggactgaggaagaatttaaga

SEQ ID NO: 828791 - DNA, 98 bp, Homo sapiens
aaggaagtggtcccagaaaagaaagtaccggtgcctcctgccaaaaagccagaagctccacctcctaaagaatgctcacctagtcatttcaagtgccg

SEQ ID NO: 828792 - DNA, 100 bp, Homo sapiens
aggatttggcaacagactttgtttcttggagtccacttccaattccaagctcatggggcattcagaatgggaccacaaacgagggccaagaggatcacag

SEQ ID NO: 828793 - DNA, 100 bp, Homo sapiens
tctaaactgcccttgaaatgaagctggacttggagacttaattcagtgcacaaatgagatgaatgtgaacatcccacagttggcagacagtttatttgaa

SEQ ID NO: 828794 - DNA, 100 bp, Homo sapiens
aaaaagtgagagcacttaaaggccacgtggaacagaagagactaagcaatgggaaacttggtattatacctgaagaaccttagccctcgggtgactgaaa

SEQ ID NO: 828795 - DNA, 98 bp, Homo sapiens
caagatggagttcctcctggggaacccgttcagcacaccagtggggcagtgcctcgtgatcagggccaaagcggtcagtgagaaggaagtggactctg

SEQ ID NO: 828796 - DNA, 100 bp, Homo sapiens
tcagataatcagagtggaggaagtacagccagcagacacagcattgttggttttgccatgtactattttacctatgacccgtggattggcaagttattgt

SEQ ID NO: 828797 - DNA, 100 bp, Homo sapiens
gagcaaacggcacagcttgaagagcttttcatggcagttaagcccttgaagaaagctgttaggatgatgggagcacctaacctaatagcagacagtatgg

SEQ ID NO: 828798 - DNA, 98 bp, Homo sapiens
ccgctccgagtggaggcgactgggggctgaagagcgcgccgccctctcgtcccactttccagcttgtggcccaggtccttgaacataaagctataggc

SEQ ID NO: 828799 - DNA, 100 bp, Homo sapiens
attccagggagataactttcgtatcacaaaagcagatgctgctgaattctggagaaagttttttggagacaagtgatgagacaaaccatgcttctgccac

SEQ ID NO: 828800 - DNA, 100 bp, Homo sapiens
ctgaggttcagagaggttaagagactccactgaggtcacacagccggtttgctgtggaatttgtcatctaatgacaaactcaagaatctcatgataacag

SEQ ID NO: 828801 - DNA, 100 bp, Homo sapiens
gtttatagtagactgaatccacatagagaaagtgatggggtttgtcaagggctatttaatgagttactagaaaatgggatttctgtgtggcctggttatt

SEQ ID NO: 828802 - DNA, 100 bp, Homo sapiens
gggaagggccggcccgcctccctggccggggcgcagttcggaggttcagcaaattgtggctactaatttgccccctgaagatcaagatggctctggggat

SEQ ID NO: 828803 - DNA, 100 bp, Homo sapiens
gaaagatgcagagatggaccgcatctttgccaacactgaaagctatcttaagtgggtcttcaaacaactctatgataaaggccttgtttatagaggtgtg

SEQ ID NO: 828804 - DNA, 100 bp, Homo sapiens
tcagccgtggtcatcttcaacgtgggctccaacaccaacgagaccatcaccatgccccacgcggatattgatgatgttaagaagttcaaaccgggttacc

SEQ ID NO: 828805 - DNA, 100 bp, Homo sapiens
gcagatcgggagcgcaaggtcgccctcaaggccatgatcaaaacgtcatgtccaaagtaatggagatgttccagcctagtgcggtggtcttacagtgtgg

SEQ ID NO: 828806 - DNA, 98 bp, Homo sapiens
gaaactgccacatgaaaaacaccacaatcaaccttattgtggcattgcgccgtacattcgagagtttgagcccgtggaacacagagcattcctaatga

SEQ ID NO: 828807 - DNA, 100 bp, Homo sapiens
ggatccagggataaatcccaaacttcttaacccctagaccggtttttagtccattgactatgcagcctaatgggagcggacatggactacgactcgtacc

SEQ ID NO: 828808 - DNA, 98 bp, Homo sapiens
aaactgaatcctctaaaggccccatacaatgaagtagacattggtggaaacatttagtttgaagactgcttcattctgcctctagtaccagcggtttc

SEQ ID NO: 828809 - DNA, 127 bp, Homo sapiens
tcaggtggaaaccaagatagatgtgtcctatgaataccgcttcctggagttcacgactctgagtgctgtatgccgagattttgctgtcctggaggaccacaccctggctcacagcctgcaggaacaa

SEQ ID NO: 828810 - DNA, 100 bp, Homo sapiens
taggaagtggtgcgattgtggttcagttggcacaaccgtacatgattgggtcaatacgattctggaacttttcaaagcctgactctcttcttgaaacagt

SEQ ID NO: 828811 - DNA, 100 bp, Homo sapiens
gtacccgccaagctgtcatcacaaaagagttgattgaaattatctctggtgctgcagctctatgtttctttctcagcaaaatagaggagaagcttacccc

SEQ ID NO: 828812 - DNA, 50 bp, Homo sapiens
ggtttctactcattccctatttgccaagatggaatctcactctgtcaccc

SEQ ID NO: 828813 - DNA, 51 bp, Homo sapiens
ctacgacaccggcgaggaacttggcaggactatcctattaagtgtaatctc

SEQ ID NO: 828814 - DNA, 98 bp, Homo sapiens
gtcaagaatcgctctataagatctgcaaggtggccgtcgaggaccgagtcaggcagctgcatgaagcccacagggactttggtccagcatctcagcac

SEQ ID NO: 828815 - DNA, 99 bp, Homo sapiens
tacagttcatcaacatcaactacgtccctctgaaggatgataatgaagataattcaaatgatgggacccagccatccaaaaggaggcgaatgggctcag

SEQ ID NO: 828816 - DNA, 100 bp, Homo sapiens
attttttctcatggatgttcttcttcgagtatttgtagaaggggcagcgaggtcacaggccccacctttgctgatggcgagctcatccccagggaacccg

SEQ ID NO: 828817 - DNA, 100 bp, Homo sapiens
aatggtgaagaaaacaaagatgatgataatgttttcagcagcaatttgccctcagaggtgttggagcgggccggagagaagtagagtgggctgcgaggag

SEQ ID NO: 828818 - DNA, 100 bp, Homo sapiens
agggaatgatccttactaaccacgaccatcaaatccgtgtcggagtccttacaggtacaatccttggatttaccctccgaccatacagaatgagctaccg

SEQ ID NO: 828819 - DNA, 98 bp, Homo sapiens
tccatcatgaaggagttccggtcgggcgccagttttcggctttgtgagaaaccttaccatcaaacacgatggccagcaacgttaccaacaagacagat

SEQ ID NO: 828820 - DNA, 100 bp, Homo sapiens
aacggattgccagagaattggcagaaggtaaagtgttgagagaggagaaccagtgcattgctcctgtggtttccagccgcgtgagtccagggacaagacc

SEQ ID NO: 828821 - DNA, 98 bp, Homo sapiens
catctgaagtcgtgattgggtcactaataacaccaggacaaagttaagggatcactactcaagcataagtgagaaagatcagtctaaagaaaaggaga

SEQ ID NO: 828822 - DNA, 100 bp, Homo sapiens
gattaaactattatacaggcttcatatccctccagaatccgaatcttgaactgcctatgttattgtcctacaagcatactgacagtggttacagctaaaa

SEQ ID NO: 828823 - DNA, 99 bp, Homo sapiens
gggaaacatagctggagatagctctgtttgccgagattacgtcttgaactgttccatccttaatcctttgttaacgttggctgatcaagatgacactga

SEQ ID NO: 828824 - DNA, 100 bp, Homo sapiens
acggtgccccatagatggccagctttcccccgagggtcaacgagaaagagatcgacaatgattgaagctcacgttgatgtcaagactaccgatggttact

SEQ ID NO: 828825 - DNA, 100 bp, Homo sapiens
agggattcattatggctgaagtaatgaaatacgaagattttaaagaggaaggttctgaaaatgcagtcaagttttctggatatgccgcagaaggatccgt

SEQ ID NO: 828826 - DNA, 100 bp, Homo sapiens
atgttgcagataagaatgaagaaccctcaagcaatcatattccacatgggaaaggtaaaactctgctggcacaaaccctagctaaatgccttgatgtccc

SEQ ID NO: 828827 - DNA, 98 bp, Homo sapiens
ccggtggagtatggcaaggacagttgcatcatcaaagaaggagacgtggggtcactggtgtatgtcatggaaggtctctaattaacagaagatggcaa

SEQ ID NO: 828828 - DNA, 98 bp, Homo sapiens
tccctaatgatgatgctcagtttgatgcgtcacactacgacagtgagaaaggaggtttgttggagactgaaccgttgcaaggaacagacgaagatgca

SEQ ID NO: 828829 - DNA, 100 bp, Homo sapiens
catttgccttggtttagctggaaaacctgctttcatgggacgagcagataaggttgatgataattagaagcatgctttccactgaacttcccgacaacat

SEQ ID NO: 828830 - DNA, 100 bp, Homo sapiens
atttgtatcctcagatgaaatggatttgcatcttgtaatgtgtttaacaaagccacgaataacctataatgcagcccttgccttttctcttgcagcaaca

SEQ ID NO: 828831 - DNA, 100 bp, Homo sapiens
agggccgccgatgtcaagtacatcttcttgatgacaggaagctggaactcctagtacagtaacagatcaactcctagcaatcatgatcggatacagcgtc

SEQ ID NO: 828832 - DNA, 100 bp, Homo sapiens
ccgagagggactacgtgggcaccttgcgcttcttgcagtcgaatttcgctaaggagtttgtgatcagtgatcggaaggagctggaggaagatttcatcaa

SEQ ID NO: 828833 - DNA, 98 bp, Homo sapiens
gggtctggagtgcgtgggggaccggctgttggcggccaacagctcatcaaggaagtggatgccaaaactactcatggaattctacagaaaccagtgga

SEQ ID NO: 828834 - DNA, 100 bp, Homo sapiens
atccggaaggctgagagtgcggaggacttcccgatccttttcagacaagactggaaggatcaccagcacatatgcggccagtcagcagctgtcaccgtcc

SEQ ID NO: 828835 - DNA, 100 bp, Homo sapiens
cgtggagatggacaggagacctggaatcattgttgcttattgcaggagtgaccaggacactacctcctagaagtaatgcccacagaaagcgcaagttgtt

SEQ ID NO: 828836 - DNA, 100 bp, Homo sapiens
ctctgccgagtctcaatatctgtcttcggtggactccttcggcagtccacccaccgccgccgcctcccaggttggtgttcgaggaagagacattgttgtt

SEQ ID NO: 828837 - DNA, 101 bp, Homo sapiens
cgacgtcttgcctgtgtcccacttgttcgcggcctatagggccaattcctgtccccccagcagcatggcatcgtgtgctgaaccctctgagccctctgccc

SEQ ID NO: 828838 - DNA, 100 bp, Homo sapiens
gtcgagaagaagcctgaatcaaagaatgtggacgatattttgaaaccaccgggccgggagagcagacctgagagatgtttcagaaatacaccaagtacag

SEQ ID NO: 828839 - DNA, 117 bp, Homo sapiens
aaaaatttttgttggtggcctttctccagatacacctgaagagaaaataagggagtactttggtggttttggtgagcatctgggtactttgaaagttcctggaaaggaaatatctgc

SEQ ID NO: 828840 - DNA, 100 bp, Homo sapiens
gctccacaagttagtcacaagcctggtggagagccaaagatcaaaaaaccctggccctggatgcccatgttggctgccctggttgcagtaacagccatcg

SEQ ID NO: 828841 - DNA, 133 bp, Homo sapiens
aaaagaaacgctcagctcaatacagctatcctgttgataaggatatggagttaagtcatctaagaagtagggaacataatacaactggatctaagcttaagcaaacacgtgatgagggaacaagtaaacaggc

SEQ ID NO: 828842 - DNA, 99 bp, Homo sapiens
caaacactaaggaatcgaaactcggcggccttgggggcggccctacgtagcctggcttctgggttccgaggcctcatcctgctgctgaccttcctaatt

SEQ ID NO: 828843 - DNA, 100 bp, Homo sapiens
actaccaaacagcacttcctggcaatgatagatacatcagtgtgggaagccaagcagatacaaatatggaatgtgcagatgtcccactattaactccaag

SEQ ID NO: 828844 - DNA, 100 bp, Homo sapiens
cccaagaccctaaagttcgtcgtcgtcatcgtcgcggtcctgctgccaatcatgtttgagaccttcaacaccccagccatgtacgttgctatccaggctg

SEQ ID NO: 828845 - DNA, 98 bp, Homo sapiens
ccaggtggctacccaccagctgcaccaggagcctccctattaaggaccttgccgtagacagcgcctctcccgtctaccaggctgtgattaagagccag

SEQ ID NO: 828846 - DNA, 98 bp, Homo sapiens
aagaatgaaccgcttgcttcttatttagatacagtttatgtaacttgatggaagaaaatggaattactccaaaaagacaagtgctcaagcagcaaaat

SEQ ID NO: 828847 - DNA, 148 bp, Homo sapiens
attacaaagcctgaagaccccggagcccctttagccatgtggatacctacggagcacgagaaatacggcgtggatctcctccctggttcgaagggctgccctcacacacaacgacaaccacttcaattatgagaagacacacaacttt

SEQ ID NO: 828848 - DNA, 100 bp, Homo sapiens
aaaattgagacggagctaagagatatctgcaatgatgtactggaacacaaagtgctgctgacgggaaccccactccagaacactgtggaagaactcttca

SEQ ID NO: 828849 - DNA, 100 bp, Homo sapiens
gtggcattgtcctggccaatgcttgtggcccctgcattggccagtgggacaggaagagagttgtatgtacaacccaacaggcaaggcagctaaatgcaga

SEQ ID NO: 828850 - DNA, 100 bp, Homo sapiens
cggggagccgagctggagctgccgcggcgcagccagggcaccctgcagaagttcgtggatgacctgttccaggtgattctcagcaccagccgccccgtgc

SEQ ID NO: 828851 - DNA, 100 bp, Homo sapiens
attaccttcactctgggaaaaggcactgaagttggtgtttcagtcacctccagtaacacgggcgtgccagatatctcgggttctgtgtactccaaaaccc

SEQ ID NO: 828852 - DNA, 99 bp, Homo sapiens
tgggagccgtgctctacctctatccgcctctgaagagccaatccattcaggatgggaaaccacgcaggcaaacgagaattaaatgccgagaaggccagt

SEQ ID NO: 828853 - DNA, 100 bp, Homo sapiens
cgcaactgttacaaaaccagttggtggtgacaagaacggcggtacccgggtggttaaacttcgcaaaatggactcagaattcatgattgaagaaatgcag

SEQ ID NO: 828854 - DNA, 100 bp, Homo sapiens
gcttcaggtcctgggtcgatgtctgtctatggaataaagccccgtcagtctattatcctcccagtccacaacgctgaaccgtggctggacgaatgtttga

SEQ ID NO: 828855 - DNA, 98 bp, Homo sapiens
cgagctgagtggttgtgtggtcgcgtctcggaaaccggtagcgcttgcagcatgatttaccggaacattccaggatttttacgtacacttatggatgc

SEQ ID NO: 828856 - DNA, 100 bp, Homo sapiens
gccggagaagcgagtttcagctgagaacgccagatcaagtgtcccaagtgtgataagctgttcttgagaacaaatcacttaaagaagcatctcaattctc

SEQ ID NO: 828857 - DNA, 99 bp, Homo sapiens
cgcagattaagtataaccgcgaaggagacctcctctttactgtggccaaggaccctttccctccctttggaacgcagcgtgggcacctgcaacgcagag

SEQ ID NO: 828858 - DNA, 99 bp, Homo sapiens
ttgagtcatattcagacttctgggcagagttctggaaattcagtggaattgtcttctcacgtgtgtatgatgagacaatgcagatcttcgtgaagactc

SEQ ID NO: 828859 - DNA, 100 bp, Homo sapiens
cgcgtcccgctcgctgggagagaggaggccccgtgtgggccgcggcccggccctcaccatggagtccatgttcgaggacgacatcagcatcctgacgcag

SEQ ID NO: 828860 - DNA, 101 bp, Homo sapiens
atgaggatgacaaactctggagtaattggagccaagaaatgagtatagagtgtgccctggaggatgaaacgtatgcagatggagctgagaccgaggtggac

SEQ ID NO: 828861 - DNA, 51 bp, Homo sapiens
agcccccttcagtcgcagcctcactctagtgaagttattgccagtggactg

SEQ ID NO: 828862 - DNA, 100 bp, Homo sapiens
cccggacgtgcgggccttgggcacggaaccccacttctttgacaggaactacggccgcgggctggattggtacaggcctaaaggggagtggccccagtgg

SEQ ID NO: 828863 - DNA, 98 bp, Homo sapiens
aagccagaagctccacctcctaaaggcaagttggacaaatgcaagtaaaaagcaacgtgaaaagctccttgagttgatacgccgtcttgcagaagatg

SEQ ID NO: 828864 - DNA, 98 bp, Homo sapiens
tcttcctcctcctcccgcgacggttgctcgtgggggccccgcgggcagaagcgcttccactgcagagagccaacagaacgggagggctgtacagctgc

SEQ ID NO: 828865 - DNA, 98 bp, Homo sapiens
agacttctcccgcctggcgagggtgctgacgggcaacgccattgccctggtgcttgggggagggggagcaaggcctaagcagcgagagctggtccatc

SEQ ID NO: 828866 - DNA, 100 bp, Homo sapiens
ctgaggcacccgaagaagagaccatccatatttccagtccgggaccatgtctggagaactaccaccaaacattaacatcaaggaacctcgatgggatcaa

SEQ ID NO: 828867 - DNA, 109 bp, Homo sapiens
tttgccacttcttcacggaccagtttcagttcgccgatgggaaacccggagaccaaatccttgattatctcaactttggtctcctgggaccactcgttgctgacagtca

SEQ ID NO: 828868 - DNA, 100 bp, Homo sapiens
gccccgagcgggacagcgcggcggggagcgacgacagggagaaggttttaaggtgaaaacgaagaaagaaatccggcatgtggaaaagaagagccactcg

SEQ ID NO: 828869 - DNA, 100 bp, Homo sapiens
ctgctattaaagggaagatcgatgtgtgcattgtaatttgcctagtgggattgggcctggtggtcttcttcttcagttttctactttcaatatttcgttc

SEQ ID NO: 828870 - DNA, 100 bp, Homo sapiens
aagccgccaggaaaagcgctccctctaccggcggggtgaagaagcctcatcgctacagcaggtttggatgcatctgctcagactacttctcatgaactca

SEQ ID NO: 828871 - DNA, 100 bp, Homo sapiens
ggattgcagtagctacagtacatactggcatatttaagccgagtagcattctatggtttaaaaggcaggtattccaaagcaatcttgaattgtaacaagg

SEQ ID NO: 828872 - DNA, 98 bp, Homo sapiens
tgaaagccaacgcaatgttcggtgcgggggacgaggacgacaccgatttcctctcgccgagcggcgggcactacaagggcccccagggatggagaagt

SEQ ID NO: 828873 - DNA, 100 bp, Homo sapiens
cgacaggcacatggaatccttgagtcagtccaaaagtttccgtcgtcggcacaactcctaaaggcctaaagaatgtatttgacgaagcaatattggctgc

SEQ ID NO: 828874 - DNA, 100 bp, Homo sapiens
caagacctctcctcattcttattgttttattagggcaatttgtctcaataaaagcccaggaagaagacgaggatgtgaaatgcaaaatggaggacgatgc

SEQ ID NO: 828875 - DNA, 100 bp, Homo sapiens
ataaccctctggctgtgggacagtatgtcaacaattgttccaatgaatatcctccgaatcctaaatctagagctccaaggatgctggtcattaagaaagg

SEQ ID NO: 828876 - DNA, 98 bp, Homo sapiens
tcagtttctgaaatgattctccagaatttctcctcataaaaaaggttctcatcccaggccttgtggagggatctaccaaaaggaagcgggttctgagt

SEQ ID NO: 828877 - DNA, 98 bp, Homo sapiens
gaggtatccagatatggacactgagcccgttatttactacctggtgaaatggtgctctctgccctatgaggatagcacatgggagctaaaagaagatg

SEQ ID NO: 828878 - DNA, 100 bp, Homo sapiens
ctgaatgatgaatacttttactactgtgacaacattaacggatcgcagtatgtggtagggaagtgatgctgtctgaaggtgacatcctgttctcctctct

SEQ ID NO: 828879 - DNA, 99 bp, Homo sapiens
caggcctgagccaccacgcctggccaatatgtgaatgactggcaggaggactgggtcgtgttctatgcccggcagcgcattcagccccagatggacatg

SEQ ID NO: 828880 - DNA, 99 bp, Homo sapiens
gatagtagaacttatctactggatttccgtagtattgatgggaacagaaagaacagcttcaaaagatgaaagacttcgggtctgagccacagatggctg

SEQ ID NO: 828881 - DNA, 98 bp, Homo sapiens
cagccagggctgaacccccgcaggtggcacaagatctctgtaaagtagcaggcatagcaaaagttctggtggctcagcatgatgtgtacaaaggccta

SEQ ID NO: 828882 - DNA, 100 bp, Homo sapiens
acaagccaagatttcatctattgaatttgggtacatgatttatgtgatcagtttggctgaaccccgtctgcccctgcagctggatgatgctgttcggcct

SEQ ID NO: 828883 - DNA, 100 bp, Homo sapiens
aagcaatttgaatttgcctgtctgggatcctcggtcttactactttgaccgcgatgatgtggctttgaagaactttgccaaatactttcttcaccaatct

SEQ ID NO: 828884 - DNA, 100 bp, Homo sapiens
tcgaggcaatgaaagaaattacagcaggcttaccagtgaaagttgtggtggatgtcttaagacaagcttctaagagcgttgacagacccagagactggta

SEQ ID NO: 828885 - DNA, 100 bp, Homo sapiens
aaaagaattttcctttgcagtttggaagacatatctgaagagatggattaagaatgctttggattaaggattgtggagcacatttcaatcattttaggat

SEQ ID NO: 828886 - DNA, 98 bp, Homo sapiens
gcaccgagagggactacgtgggcaccttgcgcttcttgcagtcggtgaaagaacttgtcctggacaacagtcggtcgaatgaaggcaaactcgaaggc

SEQ ID NO: 828887 - DNA, 100 bp, Homo sapiens
aaacctcaggacttgagtaacagcaacatgcctaaatgcgatggccaggtattactgacacaagtgtggaagcgtttaaacctggtagaatgtgactact

SEQ ID NO: 828888 - DNA, 100 bp, Homo sapiens
cactaggagtttttgctttagctggactaacagatttgatctgggttggaatttgcccctgacaaataataaaatgatgagtgatgcaagtgacatgttg

SEQ ID NO: 828889 - DNA, 100 bp, Homo sapiens
accttcaaaacaactggaatatttagcaaggattcaaggctttcagagcttactgtctccggtggcatttggatttggcactgagtacctggttcgcttt

SEQ ID NO: 828890 - DNA, 100 bp, Homo sapiens
gttactcaaactgaaacgtctcctgcatcagctctattatcaagtcctaaattttggaatgattgtctcatcggcactaatgatctggaaggggttaatg

SEQ ID NO: 828891 - DNA, 99 bp, Homo sapiens
tccaaagctgtggacaaggagctgcagccaagactggctgtgtagacttgactatcactaatctgcttgagggggccgtagctttcatgcctgaagaca

SEQ ID NO: 828892 - DNA, 100 bp, Homo sapiens
tgctgggcccgtgacgtcaccccgctgtgacgcgcacgctgtaggaaaactttgctgcacctgtcgtttccgctcggtctgatgctgatcactctggctc

SEQ ID NO: 828893 - DNA, 99 bp, Homo sapiens
gactgaaaagtgttagcatgagcaaaagttcctatctaatattatatgctttcctttgctcccaggcattgacaaaggatccccaggattaccctgata

SEQ ID NO: 828894 - DNA, 100 bp, Homo sapiens
tggaaatgttattgataactatgtttatgaacataccctgggctctacggtatttaatggggcccagaatggtgtgtctcagctaatccaaagggagttt

SEQ ID NO: 828895 - DNA, 100 bp, Homo sapiens
gcctcagagaacttgaggaagagaacacgagcttgaagttaatatgatcctctgttgaagcaagaagacaaactgtatggtggagaaagaagtgggaagg

SEQ ID NO: 828896 - DNA, 100 bp, Homo sapiens
tcgaccggcgacagcagccaggagtcatgagcgacagcggcgagcagaactacggcgagcggaggaatgttacggcatccggagtcatccctcagatttc

SEQ ID NO: 828897 - DNA, 100 bp, Homo sapiens
tggtttgaatatcgtaagcgcacgtttaaacatctcaaggtatgctatgttgactatggttttagtgaaaatgttgaaaaaagcaaagcatacaaattaa

SEQ ID NO: 828898 - DNA, 99 bp, Homo sapiens
cctcagaaggcggacaccgaccctgagaacttacctgagatttcgtcacagtgaaaatacctaactctgcattctgtgaaagggagagagttgaaatga

SEQ ID NO: 828899 - DNA, 100 bp, Homo sapiens
gactgggataacaaacagaataaacaattgagatggtaccctctgaagcggaagtcttgtgaaaatgccattgtgtgctggaaacctggcaagatggaag

SEQ ID NO: 828900 - DNA, 100 bp, Homo sapiens
tcctcgtgtttgtcgtcttcttcatctgctttggcctgaccatcttcgttgggatcagagaaatgcactcggtgatggaaagagagccactattctgaag

SEQ ID NO: 828901 - DNA, 99 bp, Homo sapiens
atgaattgtgctgatattgatattattacagcttcatatgcaccagaaggagatgaaggccataaaattttgagtagaaaaatccagaaatttgaaaat

SEQ ID NO: 828902 - DNA, 98 bp, Homo sapiens
gtacatttctgcaattgagaaacaggcacacaagtgtgaggagttgctaaatgctcaggtgatttggagtacagatagtatagtccttgagttgtcaa

SEQ ID NO: 828903 - DNA, 100 bp, Homo sapiens
caatgtagaaggaataagtcctgaattagaaaaggtattcattaaagaaaataatgggaaggaagaagtatccaaggttatcaatactctggctgaccat

SEQ ID NO: 828904 - DNA, 98 bp, Homo sapiens
aaggtccagagcattcagctgtctcaaatgcagaatcgcatcgccaagcgcagcaggaagctagtggactatgacagtgcccgccaccatctggaagc

SEQ ID NO: 828905 - DNA, 100 bp, Homo sapiens
ttgaacacatccttcaagcagtagtcccagccacaaatgtgaacacagttttaagaattcctcctaaagaagcctgtgtctcccaaatcaggaacactga

SEQ ID NO: 828906 - DNA, 100 bp, Homo sapiens
atgtggtatgataccagcaactggtctattatatcatttaaaccacatggctatctaaagagctttataaggagattgtctatttacaaaaggagcaccc

SEQ ID NO: 828907 - DNA, 100 bp, Homo sapiens
gaaaaaggattttttatcagcgcctcaatctctactcgaagaagaaagagaagaaacgttttctcaggaccgtataatagacgctggccccaaaggaaac

SEQ ID NO: 828908 - DNA, 100 bp, Homo sapiens
tgcaagagaaggcatggggtgcagttgttccactagtaggcaaattaaagaaattttacgaattttctcagaggttaggcatccgtgtcattctggacct

SEQ ID NO: 828909 - DNA, 100 bp, Homo sapiens
tccatctctcgaagacttgaagaataatccagaatggctactctgatctatgttgataaggaaaatggagaaccaggcacccgtgtggttgctaaggatg

SEQ ID NO: 828910 - DNA, 100 bp, Homo sapiens
tctcagagaagaacttatcagagattgagaatgtccatggatttgtttctcattctcatatttcaccaataaaggttaaagaactgaatcattatctgga

SEQ ID NO: 828911 - DNA, 98 bp, Homo sapiens
tggtacagctgtacctcactatgggattcattacaggtttattttaggacagtggaacttatagaagagcctataaaagggtctcctggtttgagttt

SEQ ID NO: 828912 - DNA, 99 bp, Homo sapiens
atgttgaccaagcaagcttccaggttgatgcctttggaacgtcattcattctcgatgtcgtgctaaatcagtgtgatgaatgcagactctgctaccatt

SEQ ID NO: 828913 - DNA, 98 bp, Homo sapiens
agatggcggatgccctgcagtacctgcagaaggtctctggagacatcttcagcagaaagatgttctcgtccgtggcgcacctggcgcgggcgaacccc

SEQ ID NO: 828914 - DNA, 50 bp, Homo sapiens
taaaagcaatatataattctggtcaagattctctcgggcctagccgtcct

SEQ ID NO: 828915 - DNA, 100 bp, Homo sapiens
acaatatggaataatttccgatgctcctattaatgaagtagcacgatttaatctgatgcaggtaaagcttgagagcaactttgcctccattgtgtttgcc

SEQ ID NO: 828916 - DNA, 100 bp, Homo sapiens
ctggctgtgctgcgcggcccccgcgcatggtgctgttccagaattcaaagaagagaaactgcagctgcaaccaaaaccacgttctggagctgtggaagaa

SEQ ID NO: 828917 - DNA, 100 bp, Homo sapiens
tggtgatgaacttagcagcagctccactgaacagataaggttgccttgccaactaatacgacctcatcgagacctcggactgagtgttgtagtgatgcag

SEQ ID NO: 828918 - DNA, 137 bp, Homo sapiens
tcaggaattgcttggattgctacatggaccccctgagactatcattattacctcctagggccaggaagccaggtggagcgaatcaaggagcgtgtggaggagaaagagggaatccccccacaacagcagaggctcat

SEQ ID NO: 828919 - DNA, 100 bp, Homo sapiens
ataaacgcccccaatttcccagctgctaaaggaagaggaagcaaatcctgaaggaacccaaagtggctgcttctgttttgaatccctatgtgaagcgttc

SEQ ID NO: 828920 - DNA, 50 bp, Homo sapiens
gccagctcaagaaaatggtgtccaagatgtagaagatctttatgaaccgg

SEQ ID NO: 828921 - DNA, 100 bp, Homo sapiens
ttactgatgggagcaagttgactaccaccagtggagtccaggatgaggaagaaggtcgtggtcaaggtttcactgacggggtgtaccaagggaaacagct

SEQ ID NO: 828922 - DNA, 98 bp, Homo sapiens
aagcagcacgggatcccagcctcaggcctgcacggacggtgttggttggggagtgacagtgttccctattggaattggagatcgctacgatgcagccc

SEQ ID NO: 828923 - DNA, 100 bp, Homo sapiens
tgctggagcactcatttgagatcgctgcacagaagctctgccgcctcttgggactgggggtgacggatttctcccgagccttgctcacccctcgcatcaa

SEQ ID NO: 828924 - DNA, 100 bp, Homo sapiens
aaagctgtcctaggccaaccagagattcatctttcatgcagtgacatgttgataaaaaatgatggctgagtcatcactagagagtgggaagggcagcagc

SEQ ID NO: 828925 - DNA, 100 bp, Homo sapiens
agatccgggagcacgtcatcgccatcgaagtttcagctgtgagttcaacatggaggcaaatcagtgccccctggttgtggaaccatcttacccagacctg

SEQ ID NO: 828926 - DNA, 98 bp, Homo sapiens
tctctttccagaggccaggctttatgggagcatgggttaccagcgacgcaccctgtggtccagctgctcacctgtgacctgctactgtcgctacggac

SEQ ID NO: 828927 - DNA, 100 bp, Homo sapiens
tccggagcagcttcaggaacatgctgttttcctttggaatatggataaatacaccatgatacggaaactagaaggacatcaccatgatgtggtagcttgt

SEQ ID NO: 828928 - DNA, 100 bp, Homo sapiens
aaaggaacggctgaaggccctacgggagaaaaccgggcgcaaggtgaaatgacaatggatgctctgttggctcgattgaaacttctgaatccagatgacc

SEQ ID NO: 828929 - DNA, 98 bp, Homo sapiens
aagatgttcaaaagaaaacattcacaaaatgggtaaatgcacaattttctaagttttcctcacgggagaaaaagccaattccatattaaaacgctacc

SEQ ID NO: 828930 - DNA, 98 bp, Homo sapiens
tgcatcttcccaccaccttaaaccactgtgatcctggtggagggattgaaatgtctgagttcatccgagaggccacacccccagttggttgcagttcc

SEQ ID NO: 828931 - DNA, 98 bp, Homo sapiens
acatacagaaattgttgaatttttgttgcaacttggagtgccagtgaatgataaagacgatgatactcatccagatcatcaggatattctgaaagcaa

SEQ ID NO: 828932 - DNA, 100 bp, Homo sapiens
cagaaggtgcctcggcaggtgcagtccttcagctggaatagtcaaatgatttcagttcgtgaagccaaagccattccaaggcctgatggtattgaatgga

SEQ ID NO: 828933 - DNA, 100 bp, Homo sapiens
ctggaattgatctcgccaaaaaggacatctttggagccagatcaatgtccgagttaccaccatggatgcagagctggagtttgcaatccagccaaataca

SEQ ID NO: 828934 - DNA, 50 bp, Homo sapiens
taaagactttctgaatggaccagaacctctgtattactggcaacagactg

SEQ ID NO: 828935 - DNA, 98 bp, Homo sapiens
agtgctttgcaacgctaattagactcatgccacttgagttccctgaccaagcaacacagctaaaatggaatgttcagttttgcctgacgatccctccc

SEQ ID NO: 828936 - DNA, 98 bp, Homo sapiens
agtttatcacagggaaagtcctggagtatggtgactacgaccccagtgttcacaagcggggatttttggcccaagaggaattgcttccaaaaagggta

SEQ ID NO: 828937 - DNA, 100 bp, Homo sapiens
aggaaatgtgaatctcaggagagagcagccagagtggtacttacaatttcatcagaaattcctaaaagaattcgaagtgccttaaaaaatgcagaagaat

SEQ ID NO: 828938 - DNA, 100 bp, Homo sapiens
cagttcagaatgatggatcaagctagatcagcattctctaacttggtacaatgttagctgttctaaaaaatttgcacttagtcgttggaatcgtaagcct

SEQ ID NO: 828939 - DNA, 99 bp, Homo sapiens
gctgactctggcgctggtcaagtcacaggacaccgaagaaaccatcacgtacacggtctggaggcggctggtggaaatccaattccccgcggagcatgg

SEQ ID NO: 828940 - DNA, 99 bp, Homo sapiens
caagactgtggaatgaggatattttttgaatcagtatggggcgccgggggctccctgaaggtcaccattctgcagagcagtgacagccgggcctttagc

SEQ ID NO: 828941 - DNA, 98 bp, Homo sapiens
caggagcagaagaacttggctgccattcaaaaaggagcagggtatcacttggatctcttttgggtggccatcctcatggttatatgctccctcatggc

SEQ ID NO: 828942 - DNA, 100 bp, Homo sapiens
ctgcttttccaggaatgaaagacattcaggatcaacttgaacgaatatttctgatccagacctctctgatatgaagaataatgagccttatgactataag

SEQ ID NO: 828943 - DNA, 100 bp, Homo sapiens
aacagtttctctagtgggcccttctagctgtattgtctgaacttgcattgtgattggcctgtagagttgctgagagggctcgaggggtgggctggtatct

SEQ ID NO: 828944 - DNA, 98 bp, Homo sapiens
acctatgactcccaacagtatgacagtcccggctgacgagccagagcgaggccatggccctgcagtcgatccggaacatgcgcgggaactcccactgt

SEQ ID NO: 828945 - DNA, 100 bp, Homo sapiens
cagatggttcccagcctcatttagtgaacatccaattcagattcgagtgagggttgaaaaggatccagaacttggatttagcatatcaggtggtgtcggg

SEQ ID NO: 828946 - DNA, 99 bp, Homo sapiens
aagcctgtcattcctgctgctgccctagctggctacacagttacgccccatggtgtccatcctgccagcagactgattcagaatgggaggcttttgcaa

SEQ ID NO: 828947 - DNA, 100 bp, Homo sapiens
cttctggctgcacgacagcttccccaagcccagacgcgggaatgaaagctactggttgattttaaagtgcctgggcctcacaggtttggagatgtcccag

SEQ ID NO: 828948 - DNA, 100 bp, Homo sapiens
cacatcgggggacacataaagctaggtcgtcccactgttccgtgtatcacttggataagcatccagttttggatgaaccaatagcagaagctgtctgtat

SEQ ID NO: 828949 - DNA, 99 bp, Homo sapiens
aatcgccaagagagctttgacatctttgaagatgaaggattaattacacaaggtggaagcgtgggccagatggagaacatatccccaggacagatcatt

SEQ ID NO: 828950 - DNA, 100 bp, Homo sapiens
tacagctggagcgcccagaggcgagccctggtggaggaagagtcataccctaatgatcccagcaagataatgtcctgtcttctaagatgtgcatcaagcc

SEQ ID NO: 828951 - DNA, 100 bp, Homo sapiens
cagaagcacaaccacagcaagagcacctggctgatcctgcaccacaaggtgtacgatttgaccaaatttctggaagagaaccttcgagatctgcggtctg

SEQ ID NO: 828952 - DNA, 116 bp, Homo sapiens
attaatgagccaactgctgctgctattgcttacggcttagacaaaaagtattattttggcgacttcaatttgccacgggacaagtttctaaaggaacagataaaactggatgaagg

SEQ ID NO: 828953 - DNA, 100 bp, Homo sapiens
aggaaggtgatacaatgatggggcagcaagtggccaacatcctaatgtcctatgatcacgtggaactcacattcaatgacatgaagaacgtgccagaagc

SEQ ID NO: 828954 - DNA, 118 bp, Homo sapiens
ccaggtaggatttccgggagaggctgctgtggaggctgaggaggcggcggcggagatctgggatgagacctgcacgcagtggctcacagcagcacgatttgtgacagcccgaggcgga

SEQ ID NO: 828955 - DNA, 100 bp, Homo sapiens
aagaaataaaattttcccatactgaagtactgggatttaatgaatttgtctgaaaaacatgataagataccagaaatctgggaaggccataatatagctg

SEQ ID NO: 828956 - DNA, 142 bp, Homo sapiens
ttaacgtcgtcgacttaaagaagaatattgaatatgcggcatctgtgctggaagcagtttatatcgatgaaacaagggccaaagcacgttgttgttaagtttgtggtgaaattctttccgcctgaccacacacaactccaag

SEQ ID NO: 828957 - DNA, 98 bp, Homo sapiens
ttgtggtgatagtccacctgcaatcttgtggaagaagaatgaagttgctgattatgaagctacaacattttccatcttctataacaacactctgttcc

SEQ ID NO: 828958 - DNA, 100 bp, Homo sapiens
caacgtggaggcctcacgcagctccacagacagccccagctcggtgttcctcagcacatggattaattgatgtatgttgagtttatggagctgccttttg

SEQ ID NO: 828959 - DNA, 100 bp, Homo sapiens
gagcagctgccgaagtcagttccttgtggagccggagctgggcgcggattcgccgaggcaccgaggcactcagaggagtagagacggggtttcactgtgt

SEQ ID NO: 828960 - DNA, 100 bp, Homo sapiens
cccatctatacttccagagcaagaattgactcgaataggagtgtctataaatgtgatttcctgaacttacagcttcagcaaccactccagcttgcacagg

SEQ ID NO: 828961 - DNA, 100 bp, Homo sapiens
aggctgcggcgcgcagagcgaggctgcgggaccccaggatgggggacaggaggctgcggggcctcagggcatccgcttcgatcctgaaattccgcaaaca

SEQ ID NO: 828962 - DNA, 100 bp, Homo sapiens
cccgtcattagcgtgaaaaccacaagcaggtccaaagagagacccccaaatacatcaagatgtttgtactggatgaagctgacgaaatgttaagccgtgg

SEQ ID NO: 828963 - DNA, 100 bp, Homo sapiens
caccaccacctcagatgggagagattattagctgctgtggaggcacatacctacccagcatgcctcggtcctataaggaagttttattcagtgtatgggt

SEQ ID NO: 828964 - DNA, 100 bp, Homo sapiens
acagatcctgaaagatctgcccatggtctatgttaacaatgaatgggcaaccagtgttggggaaggagggagctttggagaacttgctttgatttatgga

SEQ ID NO: 828965 - DNA, 99 bp, Homo sapiens
cttcccctcccttgcatgatggaaacaccatggctgcggcggcccagctctctctgacacagggaagaatatttctcagccctccgttctcaagacaga

SEQ ID NO: 828966 - DNA, 99 bp, Homo sapiens
ttccgccggagcttgaatcgttttcacatggattaattgatgtatgttgagtttatggagctgccttttggtggcttgctttatctgcagtttttaaga

SEQ ID NO: 828967 - DNA, 98 bp, Homo sapiens
ctctttctgggtgactatgtggacagaggctatttcagtatagaggttcgggaggccttgaggaaagcagagaaggagctagaatctcacagctcatg

SEQ ID NO: 828968 - DNA, 98 bp, Homo sapiens
aaataaggaattgcagtgtgattttctttccccctttaacttagaggaacgaggattatacagaaatttgaagtatccgcccccagatcatgaacggc

SEQ ID NO: 828969 - DNA, 100 bp, Homo sapiens
agcaggcctccagcaagatctccgatgactcttgtgaagcagcaggcgccaagtgatgaaggttcgatacaagaggctgttttcctagcgtggcttgctg

SEQ ID NO: 828970 - DNA, 98 bp, Homo sapiens
gattccaagtaactcttatttgtttgccaaggcacgagtaacaagctcacgcagttgggcacttttgaagatcattttctcagcctccagaggatgtt

SEQ ID NO: 828971 - DNA, 98 bp, Homo sapiens
gccaagctgatccccaacgccatccagatctgcacggagagcgagaaggctgacttctgcctgggcaccgccctgcactcttggggactgtggttcac

SEQ ID NO: 828972 - DNA, 98 bp, Homo sapiens
ttgagcaagagctgggagcatttttcccctgggcctgatcactcagggtctgagttgtgcactgcctatgatccactccacagaagttctgatttctt

SEQ ID NO: 828973 - DNA, 98 bp, Homo sapiens
atcagaagggcctgctgtgcgaacacggaaatgcctccagaattgaatgatctggcacgggaccctccagcacagtgttcagcaggtcctgttggaga

SEQ ID NO: 828974 - DNA, 100 bp, Homo sapiens
agatcgaagatttagaggccgctacagaagtccttaagtgaagatagtccaagtcctaagagacagcgcctctctcattcagtctttgattatacatcag

SEQ ID NO: 828975 - DNA, 98 bp, Homo sapiens
tctctcagtaatgctggggaccctgagatcgtcaagtctcccagcgaccccaagcaataccgtattgctgacagacagaacgccttggaggctgagtg

SEQ ID NO: 828976 - DNA, 98 bp, Homo sapiens
ggaaaattggcaaatctgttactgcagacagatgggaaaaatatttgatcaagttggaaatctacatttctgaaggaacccactcaacagaagaagac

SEQ ID NO: 828977 - DNA, 99 bp, Homo sapiens
ctggggagattggacaagtatgctgcaagtgagaacatatttaacaggcccgccaagctgccccctgtgtgctattctttgatgagctggattcgattg

SEQ ID NO: 828978 - DNA, 99 bp, Homo sapiens
tgagactcctgctcagtgtagcattaagcatcagaggctccttgaaatgctagatacagagaaggaactgttaaaagaaaaaataaaggaagctttgat

SEQ ID NO: 828979 - DNA, 100 bp, Homo sapiens
aatcagggtaacggttgttgatgtcaatgaatcaagaatcaatgcgtggaattctcctacacttcctatttatgagttgccaaagctgtttgatggatgc

SEQ ID NO: 828980 - DNA, 98 bp, Homo sapiens
cgcaggcaaacgagaattaaatgccgagaaggccagtacggtcggccacacacccggagcaccgtcatcacagcggtcaagttccttatctcggacca

SEQ ID NO: 828981 - DNA, 100 bp, Homo sapiens
tccacgctgcctcagagagggtgctgagtgatgccaggaccatcctggaagagaacatccaggaccaaggtggtcgtgtgatggtaacagatgctgacag

SEQ ID NO: 828982 - DNA, 98 bp, Homo sapiens
tgcagttgccgacaagctgggctccggggagggcctgatcatagtcaagatgagttccggaggaggtggagtttgtccatatgctcaatgctaccatg

SEQ ID NO: 828983 - DNA, 98 bp, Homo sapiens
aattcgaaaagcagttcaacgagaatgaagccatccaatggatgcaggaaaactggtccagctgggagctccccgacctccaggagggcaagatccaa

SEQ ID NO: 828984 - DNA, 100 bp, Homo sapiens
caatcacagcagcaaaaccttcatggtgatccatggctggacggcaccacactgtaactcgaggcatcaccaaaggcgtgaaggaggactttcgcctggc

SEQ ID NO: 828985 - DNA, 98 bp, Homo sapiens
catgtcattataccttcacccagcatttcatccctcgtcgaaaggattggattggcatctttagataccactccaaaggcaaggaaccatgattgaca

SEQ ID NO: 828986 - DNA, 100 bp, Homo sapiens
agttttatccttttctgtacaacatcacttcttctgtttgcagtgactcatccatctcccccaactcaaaaatgaaacaaagatggagggagaacggaat

SEQ ID NO: 828987 - DNA, 138 bp, Homo sapiens
ggacactttgcgttcgggctgggagcgtgctttccacgacggtgacacgcttccctggattgggaagcggctcagccccagggcagcacatcagagacaccatggaacacagccattcctctgccgtcgtgctgggac

SEQ ID NO: 828988 - DNA, 101 bp, Homo sapiens
ctgacagtgcagctcgtttctcagagccggcggatgttcatgggcagcaccatcgagccagaagcagtatttgtcctggtgaccagaagtcagcagcttcc

SEQ ID NO: 828989 - DNA, 100 bp, Homo sapiens
cgaattgacataaaacagttgatagcaaagaagataaagttgacagcagaggcagagggcctgccttaagtgtgaaagtaatgactgatgaaagtggaaa

SEQ ID NO: 828990 - DNA, 100 bp, Homo sapiens
gagaagaaaatgtccacccccatcgaagtgttgtgtaaaggctacccttcttgcagaagatggtgcgtccggatcagccacaaacagtaacaaccatcta

SEQ ID NO: 828991 - DNA, 100 bp, Homo sapiens
aagagtaaaaccttttatgacaggggctgcagaacaaatcaagcacatccttgctaatttcaaaaactaccagcttatttcaacaattccaactagccgt

SEQ ID NO: 828992 - DNA, 100 bp, Homo sapiens
acctcagcactatcccaagactgctggcaacaggttgatgataattagaagcatgctttccactgaacttcccgacaacatttgttatgcagaatgtctc

SEQ ID NO: 828993 - DNA, 99 bp, Homo sapiens
caaaattggcctcaagttgcctcttgatcctgtactatactggcaattgctggagaagattttgcaattgttgcttctgatactcgattgagtgaaggg

SEQ ID NO: 828994 - DNA, 100 bp, Homo sapiens
cttccaagctggccgtggctctcttggcagccttcctgatttctgcagctctgtgtgaagggaaagaatatggcaaagctgatgcaagatgggtttattt

SEQ ID NO: 828995 - DNA, 100 bp, Homo sapiens
aggcagtccttgtagtcctctcttggcctttcacttttggaggagcagcatttctttctattactactatctatgctgagactggttcaggttttgtagt

SEQ ID NO: 828996 - DNA, 98 bp, Homo sapiens
agaacagtccgaaatggcggggactgttggtctcggccctgcggaaggcaaaggcagctcgagcatctcatctgacgtgagttcaagtacagatcaca

SEQ ID NO: 828997 - DNA, 100 bp, Homo sapiens
acggagttgcgtcccggggacttggggccgcagggagggcagagcggcttgggtaaatccaccttaatcaacaccctcttcaaatccaaaatcagccgga

SEQ ID NO: 828998 - DNA, 100 bp, Homo sapiens
tcacgcgggcgcggatcgaccggagcagagagctggcgagcaagactcggtgaaatacctggagtgctcagctctcacccagagaggcctgaaaaccgtg

SEQ ID NO: 828999 - DNA, 100 bp, Homo sapiens
cggcggctcctcaggagagctggggcgcccacgagaggatccctcacccggttggcgctgtacgtttatgagtacctgctgcacatcggtgcccagaagt

SEQ ID NO: 829000 - DNA, 100 bp, Homo sapiens
actgtgtgggctttgatcacacagtgaaaccagtcagcgatatggtactgcaacgactggagcagaggcggcagcaggcttcagagcgggaggctccaag

SEQ ID NO: 829001 - DNA, 100 bp, Homo sapiens
cacagcctttaggaagcttcctcgggaccccttcccggtgcgccgccccgggtgggcctgggggcgcgccctattgagaaaatcatgagttctattggag

SEQ ID NO: 829002 - DNA, 138 bp, Homo sapiens
gccagcacgaggttcccagccgctgggaagcccctagacgcgccgaggggccgggctacgagcggctgaggttggttcatgtgatcctggttaatggaacataagtgagattttatgggtgacagggagagagatcag

SEQ ID NO: 829003 - DNA, 100 bp, Homo sapiens
actatccggatgaaagctacaatgaagtatatgcagaggaggtcccacaggctcctgccctggactaccgaggctgtgtttgatgtggacaagaagaaag

SEQ ID NO: 829004 - DNA, 100 bp, Homo sapiens
agcaactggattttttaactgaagatagtgcctttcagccctaccagagtgaagacatttccacctggacacctgaccatgtgcctgccctgagcagcga

SEQ ID NO: 829005 - DNA, 99 bp, Homo sapiens
tatacatgatgtctgaagtcttggccaaagaggaggcgcgccgtgcactggagacaccctcaccgcctggacattagggcagcccggattcttctggat

SEQ ID NO: 829006 - DNA, 100 bp, Homo sapiens
cccccaccgaggccccccggcaccgcgcctgctgccgggttgcgctccgtgcacctcttgcggtcctattttgtaacggattatgatccaaccattgaag

SEQ ID NO: 829007 - DNA, 101 bp, Homo sapiens
agcacaccgggcgcccgaatccgccgggtcccactcacgcccgccggccgccgcaggacagctggcctgaagctcagagccggggcgtgcgccatggcccc

SEQ ID NO: 829008 - DNA, 100 bp, Homo sapiens
cgctccgggcctcagcctctctctgtcttttccttttcaggactccggacccaacaagagctccacgcaggagatcggtgaggagctgatcaacggagtc

SEQ ID NO: 829009 - DNA, 99 bp, Homo sapiens
tggaccaagatcgagcccagcgtcaacttcctcaagtcgcccaaaggtgaaagaacttgtcctggacaacagtcggtcgaatgaaggcaaactcgaagg

SEQ ID NO: 829010 - DNA, 100 bp, Homo sapiens
ataaacgcctgaaagaagctacctgcaagctctatttttaccagatgctcttggctgtgcagtgagaaagatcagtctaaagaaaaggagaagaaagtga

SEQ ID NO: 829011 - DNA, 100 bp, Homo sapiens
agactgatctttgctggcaagcagctggaagatggacgtactttgtctgactacaatattcaaaagtctgggattatatcaatggagtgataaagtagtt

SEQ ID NO: 829012 - DNA, 98 bp, Homo sapiens
accgattttctgcagaagatgaagctttgagtaacattgccagagagctgtcacaagatgaaggtagaggcacattatacaaatacagacctgaagaa

SEQ ID NO: 829013 - DNA, 98 bp, Homo sapiens
tggtacaaggaccagaagaaactgcaccggaaatgtgcctaccaggctctgcttgaccccctcataggcctgctgtgttctgttgccacccaaatcca

SEQ ID NO: 829014 - DNA, 98 bp, Homo sapiens
gcgctgaagggcaccatcgacccgaagttgcggattgcagccgagaacgagctcaaccaggatttgcagatttacagaatggctgcacattaatggaa

SEQ ID NO: 829015 - DNA, 98 bp, Homo sapiens
aagtggagcacagtgtggagggtgcccagcgcgccgctgctatcgcgcgccagaaggccgagattgccgcctccagcctgcctagggtagttaaaaga

SEQ ID NO: 829016 - DNA, 98 bp, Homo sapiens
tcatgttggagcaaggaaaggaaccatgggcactgcagggtgagaggccacgtcagagctgcccagttacatgggaataggactctcggctcaaggcg

SEQ ID NO: 829017 - DNA, 50 bp, Homo sapiens
cagcttagcttctgtcctaaagcacctggctgcagtggaagaaagaaaga

SEQ ID NO: 829018 - DNA, 100 bp, Homo sapiens
gattccgactggatgcctggaagagagcagaagccatagagagcagcctcgaggtggagaagaaggacaagcttgcgaggcaagaatctgcatcaaagag

SEQ ID NO: 829019 - DNA, 100 bp, Homo sapiens
ggaaagtttttttaatgtggttggaacaactgagcctgcttgaatttcttgaaactgtgcaaaataaaatattacaattattgccttattcacaatgtac

SEQ ID NO: 829020 - DNA, 100 bp, Homo sapiens
cgtgaaggggcccttctcggtggaggccgacccatccaggtggccaaggtggaatacgtcaggaagaagccaaaattaaaagaagtccaggtgaggttag

SEQ ID NO: 829021 - DNA, 98 bp, Homo sapiens
acaaaatctaccaggaagatatctttccatgtttaacattctcaaaaagtgagatcgaccttcagaagatgcccttggggaagctgagcaaaaggcag

SEQ ID NO: 829022 - DNA, 99 bp, Homo sapiens
aaatatcctcggaagagcgctcccaggagaaacaaaagctccaccatgaggcgaggtggatggaggaagcgagctgaaaatgatggctgggaaacatgg

SEQ ID NO: 829023 - DNA, 99 bp, Homo sapiens
ggggagcctggtcaccaactggatgctcagtccacaagaatcggaatgtcagttaatgctattcgcaagcagagtacagatgaggaagttacatctttg

SEQ ID NO: 829024 - DNA, 98 bp, Homo sapiens
gctagtacaactggactttttgacccatataagggctacagaactggctacccttatcgataccctgctctgagagagaagtctaaaaaatacagcga

SEQ ID NO: 829025 - DNA, 100 bp, Homo sapiens
caggcgctgcccagccccttgtcagccagggctgaacccccgcagaatgaaatgaatgatgtgcctttctttgatatccaactgccttacgaattggcaa

SEQ ID NO: 829026 - DNA, 100 bp, Homo sapiens
ggacttctgcctcggcgtgccacccccttttcccccgatccaaggatgttctttacactatctgtaatccttgtggccctgtccagagaattgtcatttt

SEQ ID NO: 829027 - DNA, 100 bp, Homo sapiens
gggcaaggtgatccagcaaggtcggcagagcaaggggcttacgcagaaggacctggccacggtatcgagaaccttccctgcgaacttcagaggaacttcc

SEQ ID NO: 829028 - DNA, 99 bp, Homo sapiens
aaccatgtttcggaatagtctcaagatgctgcttactggtgggaaatcaagtcgtaaaaacaggtcaagtggatctctatgaagcaccagaattatcag

SEQ ID NO: 829029 - DNA, 100 bp, Homo sapiens
tcaaaagtagagaaaatgaaaggagagcaagaatctcataggtctatagtaaagagatgtggcatctgatgaaaaggaagacaagaagatgcggcagccc

SEQ ID NO: 829030 - DNA, 98 bp, Homo sapiens
ttgcacttgtgcagaccgggcgagcagagtaagaagcagatcatggaagggaagtggttgctgtgtatgttactggtgcttggaactgctattgttga

SEQ ID NO: 829031 - DNA, 100 bp, Homo sapiens
ggcgcaggaccccaagtgggggtcccggagccagaggtcaaaatgcagatcttcgtgaaaacccttaccggcaagaccatcacccttgaggtggagccca

SEQ ID NO: 829032 - DNA, 98 bp, Homo sapiens
tgcggcgagtatacatgcaaagcttccaatgagtatggcagtgtcagctgtacagccacactaactgtgacagggagtaactattcccagtcagaggc

SEQ ID NO: 829033 - DNA, 98 bp, Homo sapiens
tggcagggcagccagctggccaggggggcccgtctgggccagccacctggtgtccggtgtggcacattggttgacctttgccagggcccccaccttcg

SEQ ID NO: 829034 - DNA, 100 bp, Homo sapiens
tcttccggacagactatggtcaggggaattacagcaccactgtgaagtggaaccaggttctgcattggagctgggaatctgagctccctttggaatgtgc

SEQ ID NO: 829035 - DNA, 100 bp, Homo sapiens
atacctttgaaggagtggtttcgactggatatctcttttaacggaggccaggtagttgtgtcaactaacatagcagagacgtctttgacaatagatggtg

SEQ ID NO: 829036 - DNA, 100 bp, Homo sapiens
cgctggacatcgagtggctgatatcaccagctgataatcagaaggtggatcaagtgggctgtggcagaaattctcaggagcagcatgccttgaagcacta

SEQ ID NO: 829037 - DNA, 99 bp, Homo sapiens
atagacctgaagacaaaaatccagaagtacaagcagtctgttttaacaggttttgaaactaataacaaatatgaaattaagaacagctttggacagagg

SEQ ID NO: 829038 - DNA, 98 bp, Homo sapiens
aaaaattgatggaaccagaacaccccgagatgagaggagaagagcccagcacaacgaaggctccctgtggcggtacgtgcgcgccagcatgacgctgt

SEQ ID NO: 829039 - DNA, 99 bp, Homo sapiens
tcgctctgtgacctgcgggtattggatgattggtagctaagactcccgaatacttcagaagtggggaaatgttacagaatgtctgaaggggacagtgtg

SEQ ID NO: 829040 - DNA, 100 bp, Homo sapiens
ttagcccgaagaaagaagctgctgaaaacagaagttcacctgcacatcttgttttccctaacatcaagaatgggttgatgttcatgggtgattgatcatc

SEQ ID NO: 829041 - DNA, 100 bp, Homo sapiens
cgtctccagttcagggcaagaagagtccgcgactcctgtggcagagatgcatggcgagctgattgagttcaacgagcgcctgcacagggccctggtagcc

SEQ ID NO: 829042 - DNA, 100 bp, Homo sapiens
aacaagtggagatgatgcttgtaacttgacgagctttcgaccagctactctcacagtgacaaatttttttaagcaggttttagatggagcaggattagat

SEQ ID NO: 829043 - DNA, 98 bp, Homo sapiens
atctgcatatcagagatattacagtttacaggctgactactggaagatatggactccagtcatagtataacgcttcagcctactgcaaatccaaacac

SEQ ID NO: 829044 - DNA, 98 bp, Homo sapiens
ccattccagagctcagcgagctcagcaggagctggctgcggagcggcgagggacctcgcagggagccatccgatgtccagcatgccagcaaacagatc

SEQ ID NO: 829045 - DNA, 100 bp, Homo sapiens
caccaacatgatgatgataggaggaaacaaagtactggccagatccctcatgattcaggaacttagtgatttggcccgtgaccctccagcacaatgttct

SEQ ID NO: 829046 - DNA, 100 bp, Homo sapiens
tggtgtaatagatgtaatcacaaagacatggagttctggaggctgagaagtccaagatcaaggcaccaacagattcagtgtctgatgaaggcttgttctc

SEQ ID NO: 829047 - DNA, 100 bp, Homo sapiens
cgacaagaccatgctggcaagtctgaaggtcaactcaaccagaacgtaagttctttccaaagaaaatttgttggtgaggtgaagaggtgtgaagagctag

SEQ ID NO: 829048 - DNA, 100 bp, Homo sapiens
caagcctctgccttgtggttccttagaaactggcgatggaatatgagaggagccctctggaaagaaaaggacagaccctgtgctttcatgaaagtgaaga

SEQ ID NO: 829049 - DNA, 100 bp, Homo sapiens
acttctttggcaagtggacattttactggctcaagtgcttgtgagtgaggattctgacagtgatggcattgtggcccacttccctgcccatgagaagcca

SEQ ID NO: 829050 - DNA, 100 bp, Homo sapiens
taccatgacagtaccgtcacatccactgtcctcatcctagtgggggttggcttgcccatttcctctgtaccaaccaagaagctgaagaaatatgagaaag

SEQ ID NO: 829051 - DNA, 100 bp, Homo sapiens
atgaacttagcagcagctccactgaacagataaggcaacagcaggtggctacccagcagttggcttttcagcagcagcttttacagatgcagcagttaca

SEQ ID NO: 829052 - DNA, 99 bp, Homo sapiens
ttggtggtgttcttgggtggttgtacattctctgagatctcagccctccggttcctgggcagagagaaagaacctgatgttgttgttaaacgacaagaa

SEQ ID NO: 829053 - DNA, 99 bp, Homo sapiens
atagattgcctacccccattgcaggactggaaaatgtttataggaggccttagctgggacactacaaagaaagatctgaaggactacttttccaaattt

SEQ ID NO: 829054 - DNA, 100 bp, Homo sapiens
tgctcttctgggacaacgcgtacgagttcaacctcagcgctctgaaacggcaccgaaagcgaaggaagctcctgctcctcctaaagccgaagccaaagcg

SEQ ID NO: 829055 - DNA, 98 bp, Homo sapiens
cagtggcctcggcgattatggacccggccgaggcggtgctgcaagagaaggcactcaagtttatggggacttgtctttgacacactgtatggaaatct

SEQ ID NO: 829056 - DNA, 100 bp, Homo sapiens
tgatttaacaacgttaccagcatccattgcaaaccttattaatctcagggaactggatgtcagcaagaatggaaaatgtttataggaggccttagctggg

SEQ ID NO: 829057 - DNA, 98 bp, Homo sapiens
cccattttaccagtgtgcagaagttctcgaatcattctttgtacagaaattgaaaggcttcaaagctagcaggacatggatttgattgacatactttg

SEQ ID NO: 829058 - DNA, 98 bp, Homo sapiens
gcagctttggagcaagtggagagccagaaaaggatccagaactggagtggaaggggtgagccaaaaacctggtatggagtcccagggtatgctgctga

SEQ ID NO: 829059 - DNA, 100 bp, Homo sapiens
ctcgaggctgctaagagactaagtaactcaactggacccaaataaatcattattggaggtaaagttgttccctcaagaaacccttttccttgaagcaaaa

SEQ ID NO: 829060 - DNA, 100 bp, Homo sapiens
caaagcctgcgaaagtgctcgggaagagggagagcaaacttggctcagcccataatttgccatcttccatgtatgaatggtggccagtgcagttcaaggg

SEQ ID NO: 829061 - DNA, 100 bp, Homo sapiens
ttaaatggcccacatcaggacagctgttccttggccatcccaaagctattctgggggcaacagagaatcaggaaacccaggcccaacggcaggtggatgc

SEQ ID NO: 829062 - DNA, 100 bp, Homo sapiens
tcactggccgagcccactggggctcacaccacgcaggttgtctaccttcataacaacaatatctctgtagttggatcaagtgacttctgcccacctggac

SEQ ID NO: 829063 - DNA, 98 bp, Homo sapiens
gcgggacgacaacgagcagctcatcacccagtacgagcgggagaaggcgctgcgcaagcacgctgaggagtctgaagatgatgagaaactgaaaaaga

SEQ ID NO: 829064 - DNA, 98 bp, Homo sapiens
aaatgggtaaatgcacaattttctaaggtgtgatgaatgcagactctgctaccattttggctgtttggatcctcctttgaaaaagtctcctaaacaga

SEQ ID NO: 829065 - DNA, 99 bp, Homo sapiens
acagctgaatcatgcagaatttgaagatcaagatgatgaagccagagttcagtatgagggttttcgacctgggatgttcgggtcttagggggatgggga

SEQ ID NO: 829066 - DNA, 99 bp, Homo sapiens
agaacgcggtcggcccggtccccgccgcacccagcccagggcatgggagcagtatttttcaacaaaggagagaactgtattgctgctgggcggttgttc

SEQ ID NO: 829067 - DNA, 100 bp, Homo sapiens
agtgtcaacacgacaccggataaaccaaagacagcatctgagcacagaaaggaccaagaatcgccttcagccctgtctggtgcatccttggcagaaagtg

SEQ ID NO: 829068 - DNA, 99 bp, Homo sapiens
gtgtcctccggcaatacatgtgaagatgtatttccactacacaaaattttccacctctgggataccttactacttgggaattcctctttcccattctgt

SEQ ID NO: 829069 - DNA, 100 bp, Homo sapiens
ctttactttgcctcatttgaggagtgggaacaggcttcggcgaacacaaagaaaatgactgtggtgctagaagatcattacttttggaaagccggttaac

SEQ ID NO: 829070 - DNA, 100 bp, Homo sapiens
tctccattactggaacagattcctctgtggaagccagggagaagaggagatgcctacgacttgtaacgggctgcctggtaaaatgagtctatggaaacgg

SEQ ID NO: 829071 - DNA, 98 bp, Homo sapiens
gctgtcctcgtccccagcggtcccgcccaacgcccgactctgctgaccggttccctgatgtgttacctgcttctgctactgatccaaactgcagaact

SEQ ID NO: 829072 - DNA, 100 bp, Homo sapiens
ctggcagcatgtatatcttttgagtccccggcgtgcagtggagcctcgctgggggaaatgacagcttggaccatgggcgcccgcggtctggacaagcgag

SEQ ID NO: 829073 - DNA, 100 bp, Homo sapiens
ggcagggtctgaaaaacctgctggaagagacacagtagcaattgtgggcacacttgaagctgaaaaagaaagaagaaaatctgggctatcctcaagagtt

SEQ ID NO: 829074 - DNA, 99 bp, Homo sapiens
cctgctgaaatcgctgggctgcagattggagacaagatcatgcagggaaatgatgtcactctgaaactcaggctggaatacactggcatggtcatacct

SEQ ID NO: 829075 - DNA, 99 bp, Homo sapiens
ggccctgggacccgcggaagccggcatgctggagaagctggagttcgaggacgaaggagatacaactcgtcaacgaatcaaattcagtgatgacagagt

SEQ ID NO: 829076 - DNA, 100 bp, Homo sapiens
cgactgtgacctccttatgtacttgagggcagcaaggtcaccttcatgctgctggaccagaacaaccgtgagcacgccattgacgccttccggcctgacc

SEQ ID NO: 829077 - DNA, 98 bp, Homo sapiens
ccagatccatgactgttggtgatcagtgtactgttacccggacatacctattccttcacaagttctggttcttcagtgctgcttactattttggtaac

SEQ ID NO: 829078 - DNA, 98 bp, Homo sapiens
cccagacgaggctcgggactttgcagccggccttagtgctcgcgcagaaagaagattggcccatgcacaagctggaatgttctcccatggttgttttt

SEQ ID NO: 829079 - DNA, 98 bp, Homo sapiens
agggacatcggtccctcaactaacaaggcctggcagtttcctcctcacgtcaacggaaaatgtttataggaggccttagctgggacactacaaagaaa

SEQ ID NO: 829080 - DNA, 98 bp, Homo sapiens
ctggacaacaccatggaaatatttgacattgagaagcgcatactgtgctgcctccgtagcctcgctgaccaacatcatcactccagacctctttgagg

SEQ ID NO: 829081 - DNA, 99 bp, Homo sapiens
cgccatggcccagattctgccaattcgttttcaggagcatctccaggtgaacgcttggccaagccagagcgaggcaagatgagagtgcacaagatctcc

SEQ ID NO: 829082 - DNA, 100 bp, Homo sapiens
tggttctggaatcctcagttcaagccaggtgtgaagtctggcaacaagaggtcttcatctcactctagcccaggtagtccaaagaagcagaagaatgaaa

SEQ ID NO: 829083 - DNA, 98 bp, Homo sapiens
gcattggggagcctggttagaactctgtaacctgatcacagacaaagagatgcggatactctgttttcaaggaagctgaatgggaaatacagacttga

SEQ ID NO: 829084 - DNA, 100 bp, Homo sapiens
ggaatctgtacccattattggtggtttttgggagactatctttggcaacaggttcacaagaatgtactttaaacatgtactctttgaggacacattcttt

SEQ ID NO: 829085 - DNA, 99 bp, Homo sapiens
aaaaaagggactgctaagaagataccaccaggtgatctgcaactctttcaccatctgtaatgcggagatgcaggaagttggtgttggcctatatcccag

SEQ ID NO: 829086 - DNA, 100 bp, Homo sapiens
cttcacattcaaaatcaaaaagcctctgtagtttgaacttcaatggaaaacatgaaaaggtgaacagtcagcccagtgcatctgggggaggtgttgtagc

SEQ ID NO: 829087 - DNA, 98 bp, Homo sapiens
gaactgggagaagatggctttaaagaatacacttcaagtggatcatccatgccatggagtatgaacttcagatccgtggcggagacaagccagccttg

SEQ ID NO: 829088 - DNA, 129 bp, Homo sapiens
ccggccccggcgaggaggcgcggaaccatggccgatgggggcgagggcgaagacgagatccagttcctgcgaactgatttttttcccaggaagccatcccgtcagaggggttcaagtgatgaaagttgg

SEQ ID NO: 829089 - DNA, 98 bp, Homo sapiens
tcctctgttactacagcaacagtctgcgttctgtggtggggataagcagacccttccagccattgagacccagagcagcagttctgaagagatagtgc

SEQ ID NO: 829090 - DNA, 100 bp, Homo sapiens
cggatttcaccacaagaagggctgccaggactcggtggtggtttttctagactgcccttccatctggtgacttcggtacattgacttactcatcctgaga

SEQ ID NO: 829091 - DNA, 100 bp, Homo sapiens
gaacgaccggctcctgctcaagatctcagagaaggaggaggtgaccacgcgcgagggtgagaactctgtctcagtcgacgggaagtgcagtgactccacg

SEQ ID NO: 829092 - DNA, 100 bp, Homo sapiens
gagctgatcgacctcaagatgattcagtgcaagagagttgttaatggcctccccatggccacccatggaccagtcggcattcacttcctcccttctgcgg

SEQ ID NO: 829093 - DNA, 98 bp, Homo sapiens
aaagatgttggtttaaagcgattttttcctaagagtttactggattctgtcaaggctattcatgctcttatggaaaatgctgtgcaacccttactcac

SEQ ID NO: 829094 - DNA, 98 bp, Homo sapiens
accccaagaagaccattcagatgggatctttccggatcaatccagatggcagccagtcagtggtggagaatggcattgtgcccatcgtggagcctgag

SEQ ID NO: 829095 - DNA, 98 bp, Homo sapiens
tggagctctcagaccacgtgtgtgatgtggtgtttgcactctttgactgtgatggttcgagtgactgtgtttccctcaaagactgtagctcagtattc

SEQ ID NO: 829096 - DNA, 100 bp, Homo sapiens
aaataccaaaatttctacccagctagattttgcttctaaacggttttttgccctgacatctcttcgtcttgtgtttttacttgcatttggcttgatgatc

SEQ ID NO: 829097 - DNA, 98 bp, Homo sapiens
tggggactctgaacttccctggtcgaacagttttttctaatggctattcaagagctaaagttgcagacaagatccagctcatcaataatatgctggac

SEQ ID NO: 829098 - DNA, 98 bp, Homo sapiens
ttcccctgagcctcagcacctgcttgtttggaagagtcttcctgcgagcaattaatcagtatgcagatatgctgaacaaaaaatttctggatcaagcc

SEQ ID NO: 829099 - DNA, 99 bp, Homo sapiens
ttacagcctggggagtgcgagagaaacccagccgaagcatttaaaagcactatgggactgagtaacattctctttgtgatggccttcctgctctctggt

SEQ ID NO: 829100 - DNA, 98 bp, Homo sapiens
gacgggtcctttggtacatgcagtccgagatattatgcctggtgatcctgatctgcttcagtgcctccacaccaggctactcctccctgtcggtgatt

SEQ ID NO: 829101 - DNA, 100 bp, Homo sapiens
ggccatggccgccgccgatgccgagctgcatcttcctcccgtgaggctggccgagctccacgctgatctgaagatacaggagagggacgaactcgcctgg

SEQ ID NO: 829102 - DNA, 109 bp, Homo sapiens
actctatggtgtatataaagtacatgggaattatggtcgagttttcagaattctcccaataatatgagcctgagtaatcaaccgggcactccaagggatgatggcgaaa

SEQ ID NO: 829103 - DNA, 100 bp, Homo sapiens
tctgccttgggtttcctctgcttactgtggatggccccagagggatccggcactccacccagagcctctttgagtacatgaagggcattcagagcgaccc

SEQ ID NO: 829104 - DNA, 100 bp, Homo sapiens
aggtggatggagaagcagctgggggccttggctgtaaggacccctaagggaggataagatcaatgccctcattaaagcagccggtgtaaatgttgagcct

SEQ ID NO: 829105 - DNA, 100 bp, Homo sapiens
gcgacggctacgccgaagcactcgttccgggggtgaagcctcctgcgccggccttgcctcgggtgctgtgcctgaggaacaataccatttttaagcaagc

SEQ ID NO: 829106 - DNA, 125 bp, Homo sapiens
tgaagttacatttagagactgaaatcactgcaccttaaaaacaaaagattgagctgcactgtattccttataaatgacatcgcatttaagcctgatggaactcaactgattttggctgccggaag

SEQ ID NO: 829107 - DNA, 100 bp, Homo sapiens
cctgtacagcctgcagaactgtgaatctggattgggaaagtcgacattaatcaactcattattcctcacagatttgtattctccagagtatccaggtcct

SEQ ID NO: 829108 - DNA, 100 bp, Homo sapiens
ctgccaccgtcctctttctgcacgccacacagaaggacctatccgacttccaccagtccatggcggagaagctggactccttcctccctgcccacctctg

SEQ ID NO: 829109 - DNA, 100 bp, Homo sapiens
gaagcagctttcatagaaatggagataggggacatcacccagaagggctatgaaaagaaaaggtccaaactcctatctccttacagcccgcagacacaag

SEQ ID NO: 829110 - DNA, 98 bp, Homo sapiens
ttatagactgatcaaatcgaggagtgaatctgatttgtctcagcctgaatcagatgaagagggttacgcactggttcagaacttggcagtaaggaatc

SEQ ID NO: 829111 - DNA, 98 bp, Homo sapiens
gtaggagctgtccagatgctgaaaagagaaggtcaaacagctgaagggcttatttcaaaacctttgtccctcagttccaggaggcagcatttgccaat

SEQ ID NO: 829112 - DNA, 99 bp, Homo sapiens
ggataccaagtctcccaacaacagagacaggacctgtgtggagccaccacctgtgacaccctgggcatggctgatgtgggtaccatgtgtgaccccaag

SEQ ID NO: 829113 - DNA, 99 bp, Homo sapiens
tgaagcttttgcacgagaacatggactcatcttcatggaaacgtctgctaagactgcttccaatgtagaagagagtttgccagatccggcccggtgcct

SEQ ID NO: 829114 - DNA, 100 bp, Homo sapiens
ttctttaagagggcaatggaagccaagccaaagccatgtactcctgtaaagcagagcacagtcatgagctttccttcccacaaggagcaatattttctaa

SEQ ID NO: 829115 - DNA, 100 bp, Homo sapiens
aagtgtccagcgacagcttctgggagaaacgaggatgcagtcaatcagatggccgttactccctttccagtgccatcaagttctccatcttctattgagg

SEQ ID NO: 829116 - DNA, 98 bp, Homo sapiens
agttgattactcagtctctaaaaagctaagcattcagcaactagttcctgaatataaggaaaaacagacacctgaaagtcttcctcaaaataacaatc

SEQ ID NO: 829117 - DNA, 117 bp, Homo sapiens
ggaggagaagatccccaaccccagcaagagccacctgttccaggattgccatgagaaaatcagagtgctttctcagcaggcagcttctgtggttaagcaggaagggggtgacaatga

SEQ ID NO: 829118 - DNA, 100 bp, Homo sapiens
atgaagcagtaggaaatgtcactgcagctttaaaaagcagtgggctctggaacaacacggtgttcatcttttctacagcttttacaaagttgatcacagt

SEQ ID NO: 829119 - DNA, 99 bp, Homo sapiens
cacctctcagcaggcctttgctggacagatgaagagtgacttgtttctggatgattctaagagaaatgattctggggaccattctgaccacatgcatta

SEQ ID NO: 829120 - DNA, 100 bp, Homo sapiens
gttccaggggctctgggagtggctgccagtttaaagctgatggaacaggatacttgcaatcttgaagaggaagagcgaaaagcaagtaccaaaatcaaag

SEQ ID NO: 829121 - DNA, 100 bp, Homo sapiens
aacgttaatggacaccagaacggctactgcagagctgggctggacggccaatcctgcgtccggggtactggactcgagtgttttgcaaacagaaaatcat

SEQ ID NO: 829122 - DNA, 100 bp, Homo sapiens
gctggagtacctgctgcaccttggttctccccaggcttcaacggaccacaccaaaatgccatctcaaatggaacacgccatggaaaccatgatgtttaca

SEQ ID NO: 829123 - DNA, 99 bp, Homo sapiens
ccccgctcccccggacccatcggcgcgctgcccacacctccaggcgaccgggtatgaggatacatgggctgcacttcacagaagagccaaagactgtgc

SEQ ID NO: 829124 - DNA, 99 bp, Homo sapiens
tttaaccccatcaccaacatgcacctgcgcatgtttgaggtggccagagatcacctacaccaaacaggtgctggagaatctggtaaaagcaccattgtg

SEQ ID NO: 829125 - DNA, 100 bp, Homo sapiens
aaagtatgttgtaccttgtgacagaatatgccaaaaatggagaaatttttgtttcagcatcaggcaagtggctggatggtattcgaaaatggtattacaa

SEQ ID NO: 829126 - DNA, 98 bp, Homo sapiens
cgagtcccctgatccccaaccgcactgaggataaggaggagaacaggaagagcacgatggggaagaatatttctcagccctccgttctcaagacagat

SEQ ID NO: 829127 - DNA, 100 bp, Homo sapiens
aagggagacctcccgaaaataaacggagcaggaagccggctcacccagtgaaaagggagatcaatgaggagatgaaggtgctaagagatgccgtttgcag

SEQ ID NO: 829128 - DNA, 98 bp, Homo sapiens
gtcaccgaggagaagtaccaggaggcgttggccaagggggctaagtgatggatcttgtactccgtgttgcagattactatttttttacaccatacgtg

SEQ ID NO: 829129 - DNA, 98 bp, Homo sapiens
acaggacaagcaaacctcagcctggaggcacttttccaggttggacaccgaggaacagtaagagattatccagactttagcccatcagtggatgctga

SEQ ID NO: 829130 - DNA, 100 bp, Homo sapiens
ctctccagttcttcaagaaatattcaacaaatgttggcagattcaatcaatcgtatgaaggcatatgcatttcaccaggccctggccaacgtcaacattg

SEQ ID NO: 829131 - DNA, 98 bp, Homo sapiens
aagcaccccagagccaaggcaaagaggtaatttcatgctcccaaaatgggacataaagtggttgtcttcgacatttctgtcatcagagccttgtggga

SEQ ID NO: 829132 - DNA, 99 bp, Homo sapiens
gcggcggctctctggtccgcagcggcaacagtaacgaaaaacagggctcagctcttcagtgggtcatctgtgtgtcacagcctcagaagaccagcgaga

SEQ ID NO: 829133 - DNA, 100 bp, Homo sapiens
ggaagacctgcgtcctttttcgtttttcggatgatgccttcaatactacctttatttccaccataggtttgtgaaatggctgctgacatttctgaatcca

SEQ ID NO: 829134 - DNA, 98 bp, Homo sapiens
caacatcgaggccgacacctactggtgcatgagcaagctgctggatggcattcagggaggtggggaagacagggctccagctaccacaggacgggctc

SEQ ID NO: 829135 - DNA, 100 bp, Homo sapiens
ttggtatatattcaggaaattattcctggaggagactgttataagcttggtgctaacagtggtttgcacatcatcatctttgatgaaattgatgccatct

SEQ ID NO: 829136 - DNA, 100 bp, Homo sapiens
ggaagttgaagaggtggcaccacctagagtcctcctccatcaaagaaaatgaagttatttggatttaaagaagatccatttgtatttattcctgaagatg

SEQ ID NO: 829137 - DNA, 100 bp, Homo sapiens
gctgggagtggggctgaacacgacaattctgacgcccaatgggaatgaagacaccacagctgccaatggagatcttcgtggatgatgagacgaagttgac

SEQ ID NO: 829138 - DNA, 99 bp, Homo sapiens
aagagttgcctgcttcttcaaaaacaagtaactcccagcatggaaacagagagatcgatgtcttattgtgatgagtctcgactgtcatatcttcttcgg

SEQ ID NO: 829139 - DNA, 100 bp, Homo sapiens
tggatggacttgattctgatgagagaagcctaaagaaactgttccaactcttgctccaaaaactctttcagtagcagcagcttttaatgaagatgaagat

SEQ ID NO: 829140 - DNA, 100 bp, Homo sapiens
aaaaagccagaagctccacctcctaaagttactggctgaccaacaaagttcctatcaaaagacccagcacaggtcttctcatgtatacacttgccacaag

SEQ ID NO: 829141 - DNA, 100 bp, Homo sapiens
ctgaacaagtcccagctgaagctgggcatctggggcgattgcagagggaatggcatacatcgagcggaagaactacattcaccgggacctgcgagcagct

SEQ ID NO: 829142 - DNA, 100 bp, Homo sapiens
cattgtgaagcagatgaggatcctgcatgttaatgggtttaatggagagtcgttccaggggtagaggaggcatgaaggatgaccgtcgggacagatactc

SEQ ID NO: 829143 - DNA, 98 bp, Homo sapiens
agattatgaccttaacatcagtggcagccgacttggatggagaaattgacttgtccgcatgttacgatgtcacagagtatccagttcagagaaactat

SEQ ID NO: 829144 - DNA, 100 bp, Homo sapiens
agcttcagatagctgaagacaatcttcgggccctcctcatttatgccatttcagctacagtgttcacagtgatgacacatctccacgtgattgaagaaag

SEQ ID NO: 829145 - DNA, 98 bp, Homo sapiens
ggcaatcgagttgagtacttggatagacttatacctcagtttgtgaagaaatatgggaacctttttagcttggagcttggtgacatatctgcagttct

SEQ ID NO: 829146 - DNA, 100 bp, Homo sapiens
attgtcagcaaaggaagagatggcaaacggggattcagcgtccgatcctttggaacagggactcacgtgaagcttccaggaccagctcccgacaagccca

SEQ ID NO: 829147 - DNA, 99 bp, Homo sapiens
tggaataactgatgaggaacaagccattagcaggaagtgtttggattgtgagctatttcagaactgttctcaggactcattattttaacatttgggaga

SEQ ID NO: 829148 - DNA, 100 bp, Homo sapiens
caccaggggccctcagggaagagaccctgcaaagatcctgggagaccaagggagtgcctggcaacattggtgctcccggacccaaaggagcaaaaggaga

SEQ ID NO: 829149 - DNA, 100 bp, Homo sapiens
ttttgcctgaatacatgatttaaacaagagatttccacagaaggttctctcaagtagtgctgccagtagtaccatcacagcactgtcacctggaggggca

SEQ ID NO: 829150 - DNA, 100 bp, Homo sapiens
gaggctgccaagaggaacgacttctgtaaggttaatttggagtggcccctggagtcagtttcctacaccatccgaggccccacccagcacgagctacagc

SEQ ID NO: 829151 - DNA, 98 bp, Homo sapiens
agggactgaaggtcacaccacagcgcgtactccaaagattcaggtttactcacgtcatccagcagagaatggaaagtcaaatttcctgaattgctatg

SEQ ID NO: 829152 - DNA, 98 bp, Homo sapiens
aacaatatttctcagaggatagcctttcacttattcatctgtccagcatgactcatccccgggagtgttgagtctgctgagaacagacccagtccctg

SEQ ID NO: 829153 - DNA, 98 bp, Homo sapiens
tcctgtccatcgtgtgcctgatgatcacgcagctggctggcttcagtggaccagctgtggtccaaggccatttttgctggctataagcggggtctccg

SEQ ID NO: 829154 - DNA, 100 bp, Homo sapiens
tacaaccagaagctcagggagaagttgaaggaggaggagaacacagtgggtgcacattcaggttcccgagcacaaacatcaagataacgttcactgccct

SEQ ID NO: 829155 - DNA, 133 bp, Homo sapiens
gaaatgaaagagcgccttgggacagggggatttggaaatgtcatccgatggcacaatcaggaagcagaatctttaattgcaaaaaagattcatccacagaccatcatagcgggttggagagaagccacgaagg

SEQ ID NO: 829156 - DNA, 99 bp, Homo sapiens
tggacttcggaccctggcctcttgggatgcaaaggcttgtaaacatataacataaaaatggcttccaaaagagctctggtcatcctggctaaaggagca

SEQ ID NO: 829157 - DNA, 51 bp, Homo sapiens
cctatgccagcaccatagggcactatacccggatgcagagtctacagcctg

SEQ ID NO: 829158 - DNA, 100 bp, Homo sapiens
gtactccttgtctttgcaaacaaacagatggctgctttgtcactgtgtcttaatatggccgttgccctgtgttttctgtgtcctcatctcttcttctaag

SEQ ID NO: 829159 - DNA, 101 bp, Homo sapiens
tcggctcttccagccaccccctctccagtctgctcaggagagatcctgcatacagtacattcccgccagaaggtgttttcgtaaatacgcttggccttctg

SEQ ID NO: 829160 - DNA, 99 bp, Homo sapiens
ctggggaagacaggtggcaggaaaagtatgatccatttgctgagcacagacctccaaagattgcagaccgggaagatgaatacaaaaagcataggcgga

SEQ ID NO: 829161 - DNA, 98 bp, Homo sapiens
agctctttgatggcaaaactggacatcagaagacagtggatctctctggacaagaatcaactggcagtataattgaagttctgagtaaaatagattca

SEQ ID NO: 829162 - DNA, 98 bp, Homo sapiens
tgcagctgcagaagtgaaccggcaaatgctgcaggaactggtgaacgcaggatgcgaccagccgatacggaagatgtgtgcattgtagagagattgtt

SEQ ID NO: 829163 - DNA, 98 bp, Homo sapiens
agggacctgcttggccagcgacagatcctttgctgctctgtctgccggttcttgaggcctcccagacctgtaaccagcatgaacgacaccctgttctc

SEQ ID NO: 829164 - DNA, 100 bp, Homo sapiens
gaccatgatgagcacggctccccagcctgtctgggatatcatgtttcaagtggctgtgccaaagaaaactttagaaactgttcctttggagaggaaaaag

SEQ ID NO: 829165 - DNA, 100 bp, Homo sapiens
agcgcagtgacagtgcagaaccccggcgcggcccttgaacgctgcgatgactggggactagacaccatgaggcaaatccaagtgtttgaagatgagccag

SEQ ID NO: 829166 - DNA, 100 bp, Homo sapiens
aagatggccgggaactcgatcctgctggctgctgtctctattctctcggcctgtcagcaaagattcactccttctccagttgcacagccacacccttcag

SEQ ID NO: 829167 - DNA, 98 bp, Homo sapiens
cgcaagcccagacaatgccggtggaggaatttgtggctggctggatctctgaggcatttcatccttcatgaagccattcaggattttgaattgcatat

SEQ ID NO: 829168 - DNA, 100 bp, Homo sapiens
cagcatggttaaactctgcattgatggatacgaatatgcctacctgaaggcaatagtactcttcagtccaggaagcaattttggaggtggtggaagctac

SEQ ID NO: 829169 - DNA, 98 bp, Homo sapiens
caattctggccttggagagaaaacttgcaaggaaaggaacatgtttgaatttcagatgtgttcctcaatgaatcacatttgggccaggcttagtcatc

SEQ ID NO: 829170 - DNA, 100 bp, Homo sapiens
ccccaacatcctgctcctgctcatggacgacctcctgaaactgggcactggtctcctggaaagtgggcgccattaccttgctgccagccgcgccttcgtt

SEQ ID NO: 829171 - DNA, 99 bp, Homo sapiens
gacaatcttggcatgttggtctggtcacccaatcaaaatctgtcagaagcaaagtgctgaagtttctctttggctcatcagccacccaggccttggacc

SEQ ID NO: 829172 - DNA, 98 bp, Homo sapiens
gagcatgcattgccattatctgtgaactaggtcccagtagggatggcacaatcagcgaggacaccatccgagcctctctcatctctgcggtcagtgac

SEQ ID NO: 829173 - DNA, 100 bp, Homo sapiens
ttacgtgccatgcacaaggctgtggtggatgcaggaatcactaccaagcttctgaccgctggaagtgatggagagagtattggaaactgtcccttttgcc

SEQ ID NO: 829174 - DNA, 98 bp, Homo sapiens
tgtaactgtggaaggaggctggccacagtttggagtaggagctgaaatctgtgccaggatcatggaagcacgttcacgtccatgttcttcccaggaag

SEQ ID NO: 829175 - DNA, 100 bp, Homo sapiens
ttacgtttgatgaaagatttgggcttgaagacccagaagatgacatatgcaaatggccgcccatgccccatcattctttgggatgcatctttatcttcag

SEQ ID NO: 829176 - DNA, 100 bp, Homo sapiens
atacagaaaaagaggacagatcaccatctgctatattttcagcagagctgagtaaaacttcaggtactccaaagattcaggtttactcacgtcatccagc

SEQ ID NO: 829177 - DNA, 100 bp, Homo sapiens
atggacactgcaaatacctcacccttcaaagtaccaatgctgatgcagagattgaaggagccccagctgctcccttggatgtgaagtgcttggaggccaa

SEQ ID NO: 829178 - DNA, 100 bp, Homo sapiens
ggcagtggaagttttggaactgtctatctggtttcagacaagaaagccaaacgaggagaggaattgtacaccaggggttggaaaaaccacactaggcaaa

SEQ ID NO: 829179 - DNA, 99 bp, Homo sapiens
gcatgggaacaggagcaggcgcctacatcctaactcgatttgctagtcacctgatatgaaaaaggagcaagacccccctgccaagtgccacaccaaaaa

SEQ ID NO: 829180 - DNA, 99 bp, Homo sapiens
tcaaaagatacttggaatgcaccgtcgtcatattggtaaaggttttcaaggtgtcatgaaaagatggggatttaaaggccagcctgctacgcatggtca

SEQ ID NO: 829181 - DNA, 99 bp, Homo sapiens
atacctggaggcttatctgaggccaaacccgccactccagaaatccaggagattgttgataagatatccatctctcctcgaacaacaaattctttccac

SEQ ID NO: 829182 - DNA, 100 bp, Homo sapiens
ccaggaaggcaagaagcagtataagatgatctgccatgtgttcgagtcggaggataaaaacaggatgaagttgtctattacgatccatgtgaaagtccag

SEQ ID NO: 829183 - DNA, 98 bp, Homo sapiens
gttcaagttcagaacattttcttcgagtgctcttctgatgtatcttgccacacgagacctgcatgattccacctttccactgatagactcaagttccc

SEQ ID NO: 829184 - DNA, 100 bp, Homo sapiens
gaccctctgcctggcaaccaccccgtctgagaagtgaggagcccctccgcccggcagctgccccgtctgagaatggatccaaacttctacagcaaaaact

SEQ ID NO: 829185 - DNA, 100 bp, Homo sapiens
acagaggataaatttcaacctccggggccacaatagcgaggaagcccagaacctcatggccctcaccaatgtggacaccccattgaaaggtggacttaat

SEQ ID NO: 829186 - DNA, 101 bp, Homo sapiens
aggcctggctgctgccaagaagctttgtgagaatcttttgcaaacaaaagtgacccgccccgccgtgctcaagcggcacggggtacaggagtgcatcctgc

SEQ ID NO: 829187 - DNA, 100 bp, Homo sapiens
gcttgaggctccagtcaaaaaccattaaggttttggctacgggcctccacctccaccgccagatcagtttgcccctccgggggttcctcctccaccagcc

SEQ ID NO: 829188 - DNA, 99 bp, Homo sapiens
aaacatctgtagcatcaatgagtcagacaagcggtggtgaggcaggctcgcctcctccagctgttgttgctgctggctggagtgcggtggcgtgatctt

SEQ ID NO: 829189 - DNA, 100 bp, Homo sapiens
acatttcaagtattggtcttaaaacagtaattggagaacttcctccagcttccagtgagcatctgctgcacccaagcctgagccggttcctgttcaaaag

SEQ ID NO: 829190 - DNA, 50 bp, Homo sapiens
caggactccctggaagcctagaaatgtggttccccctggaagtcctgggc

SEQ ID NO: 829191 - DNA, 98 bp, Homo sapiens
ggagaggggccaccttcaggacggcgaccacgtggccttggtctaccccccagccttccctgagcctgggcaccatcacagatgaggagatgaaaact

SEQ ID NO: 829192 - DNA, 99 bp, Homo sapiens
gtgaggaggacattgatgactgccttgccagctacagtggtggctgtgttgccatgcgaggaaggcatccacttggtcgctgggaagtgaagcactgtc

SEQ ID NO: 829193 - DNA, 100 bp, Homo sapiens
gacagtcctagctaaacttcgccaactccgctgcctttgccgccaccatgcccaaaacgtgaaacaaagagtcctcttcgtggaaaagaaaaaaatacgc

SEQ ID NO: 829194 - DNA, 100 bp, Homo sapiens
atgtggtggaataagtgctagtatcggacatgatcctcatcttttatacactcttagtgctgtccaggttatcaatactctggctgaccatcatcatcgt

SEQ ID NO: 829195 - DNA, 98 bp, Homo sapiens
tttaactctccttatgctgggtgaaaacaaagtaacaaatgtggcaattattttggatctatcacctgtcatcataactggcttctgcttgtcatcca

SEQ ID NO: 829196 - DNA, 98 bp, Homo sapiens
agaagctgctgactcttttcagagctggccacgaccaggggaccctccattttccatatccaggaaaatgtgatgcgccacaggtatcagcgtctgga

SEQ ID NO: 829197 - DNA, 127 bp, Homo sapiens
ctttcatgcaagaaaataaatcctgcacatttgatgtactgctttaaacttaaagacctctttggacccgaaattgtaaggagcggagggcacagtgttccctaaatctatagaaacacctaatgtc

SEQ ID NO: 829198 - DNA, 98 bp, Homo sapiens
gagtcagcgatggtgcccggcgaggagaaccaactggtcccgaaagaggttatcttatgatgaggcttttgctatggctaatgatcccttggaaggct

SEQ ID NO: 829199 - DNA, 99 bp, Homo sapiens
tcatttccttcgtacccacagtgcttcatgagagcctaccgtatgtgaacgggagctgtgtgtgtttgcttttcaaaccctgggagtaatgaatgaagc

SEQ ID NO: 829200 - DNA, 133 bp, Homo sapiens
tgagacagaggagtgcaacaaccactggttctccaggaaccgaaaaggcgaggagtatagtacggcaaaaaactgtcgaataactgaagtgaagtgatggactccgatttggagagtagtaagacgtgaaagg

SEQ ID NO: 829201 - DNA, 101 bp, Homo sapiens
tcccaagtagctgggactgcaggttcaagccaaatgttaccagcttctcctctcagtcttccagcattccaatcgtgccctttcaactccttatattcatt

SEQ ID NO: 829202 - DNA, 98 bp, Homo sapiens
actaactgtgcttatgttggtgacatcgtggacattccaggaacctctgttgccatcagcaactgtgatggtctggttctcctgaaaagaaagctgaa

SEQ ID NO: 829203 - DNA, 100 bp, Homo sapiens
tctgccttattacgccgtctccaagatgtagctaatgaccgtggttcccactgagcactgtgattgccaccaacattctcttggttgatgagatcatgcg

SEQ ID NO: 829204 - DNA, 100 bp, Homo sapiens
ttcgaattaccgtggttgatgatgcagacactgttgaactctgtggtgcgcttaaggttgaaactgataaagccactgttggatttgagagcctggagga

SEQ ID NO: 829205 - DNA, 100 bp, Homo sapiens
ggcagcgcagtgcagatccgcaggcgcaaggcttcaggcgacccgtactgggcctactctggtccggaccctatttgtcagtggccttcctctggatatc

SEQ ID NO: 829206 - DNA, 100 bp, Homo sapiens
actccctgaaatctggagtgaagaacgccgccatccagccaccattccaaggctggcgccttcctctgttgggccagcggtacctggacctcctgaccac

SEQ ID NO: 829207 - DNA, 100 bp, Homo sapiens
caaccacgtcccgctctccccagcatttccacagacctgatcggtttgggcttggccagccaggaagaatacctggttctgtgaatgccatgagagttct

SEQ ID NO: 829208 - DNA, 99 bp, Homo sapiens
cagtatcaacggagtctccggggatggatagaatgacagaagatgctcttcgcttgaatctgttgaagcggagcttggacccagcagatgagcgagatg

SEQ ID NO: 829209 - DNA, 100 bp, Homo sapiens
caaagttcctcacagtttaggtctcaaggcaagcctattgagttaacacctctgccgctgctaaaaggttagtggttacttggatgattgtacctgtgat

SEQ ID NO: 829210 - DNA, 98 bp, Homo sapiens
cctccaagaccgtgctggtctttctcaacctcatcttctgggatcttcaagatgaagttcaaagggagaatactaatctgcaaaaactacaggcccag

SEQ ID NO: 829211 - DNA, 100 bp, Homo sapiens
tcccactcaccaaccctgagcattttggcactccagtcataggaaagaaaacaaatagaggaagaagatctaatcatatatcagttggccttatttcctc

SEQ ID NO: 829212 - DNA, 99 bp, Homo sapiens
atacaccagctccaaaaccactcgcatctgagcctgccgatgacactggagaagaaactgaggcctggaatttgattaactcattcaaggttacccagt

SEQ ID NO: 829213 - DNA, 98 bp, Homo sapiens
cccattggctattccattcccaagcccatatcatctctgctgatacgagggtggaacgcatgtcctgaaaatctaaacagtgggaatgtttgacatct

SEQ ID NO: 829214 - DNA, 100 bp, Homo sapiens
ttggcaacgggaagtccgtggacgacgtgctttcccattttgctcagcgactgtttgatgacgtcccgcaggtgaacctgagcaaggtgggcgagtattg

SEQ ID NO: 829215 - DNA, 99 bp, Homo sapiens
gctgaagtacaggcagtcaaccctaaacagtggactcaacttcaaagacgttctcaaggagaaggcagacctggagtcgtccttgtctactccactacc

SEQ ID NO: 829216 - DNA, 100 bp, Homo sapiens
taccatctaaaatacgaaggtttctggctggaaactggcgatggaatatgagaggagccctctggaaagaaaaggacagaccctgtgctttcatgaaagt

SEQ ID NO: 829217 - DNA, 115 bp, Homo sapiens
agattcagtttctttgcattgtgtgtgcgaagctgaaacaggacccctacctggttaactttttcctagaggaccttgaggaattggatccagattttatcatggctaaacaggt

SEQ ID NO: 829218 - DNA, 124 bp, Homo sapiens
gcaagaccaacaacatcttctgctccaaccccaaccaccgcacccctacgctgaccagagagaaaagctgaagtcccttttggcagctaaagaaaagcaacatgaagaaagcttaaggactatt

SEQ ID NO: 829219 - DNA, 98 bp, Homo sapiens
acagatttgattgcctccagtggagatatcatcaaggcttattgtgtaacagaacctggagcaggctctgatgtagctggtataaagaccaaagcaga

SEQ ID NO: 829220 - DNA, 98 bp, Homo sapiens
tctctctattgtttacgtagctacagatgaatctgagacctcagagctggaagtcgagtgtgctactcaactcaggagatttggagacaaactgaact

SEQ ID NO: 829221 - DNA, 98 bp, Homo sapiens
ctggaaggatgctttcgataaaggttcactttttggaggctctgtaaaactggctattgacctgaaaagtggttctggaaaagtgtaccaaggccctg

SEQ ID NO: 829222 - DNA, 98 bp, Homo sapiens
ttctgattctgtttcttcagtaagccaggaatcccaaaacatgagatgagtatgatgtatgtgccatttgtttggatgagtatgaagatggagacaaa

SEQ ID NO: 829223 - DNA, 100 bp, Homo sapiens
cccgaccgcgtgctggagctcttcgacccacccaaggctgaagccgacgtagcttctctgaacagacgcatccagctggttgaggaagagttggatcgtg

SEQ ID NO: 829224 - DNA, 100 bp, Homo sapiens
aagagtgaggagaccatagctgcacagccagacagcaccagttgcccttgaagcagaaaacagaggtgaaatgaaactagctctccagtatgtcccagag

SEQ ID NO: 829225 - DNA, 100 bp, Homo sapiens
aaaaagaagtgtggcgtgaatttggtcctcagcaaccacctactctatgaggagttgggggagttcatggagaccaaaggtgccagcagccctgggattc

SEQ ID NO: 829226 - DNA, 98 bp, Homo sapiens
gttctaagtgatgtccaggaaggaggaggaataatatttatggagcatatattatggaacacagcctccttgtatcagtcctctatagacagaagcct

SEQ ID NO: 829227 - DNA, 100 bp, Homo sapiens
gacagcttcgacttagccctgctccaggaatgggacctcgagtcactgtggtgaccgaagaggcctatgtcccagtgagtgacatgaacggcctgggatt

SEQ ID NO: 829228 - DNA, 99 bp, Homo sapiens
gacagaccgtttgtgtgcaatgccccgggctgtggacagattctgaaggaagatttccattaggtaatttgtttaatcagtgcaagcgaaattaaggga

SEQ ID NO: 829229 - DNA, 99 bp, Homo sapiens
caccttttatagaccaccagaatattgaaggatatttggccttgacattaaaggcagagactgtggcaatgaggcagctaagtggttcaccaacttctt

SEQ ID NO: 829230 - DNA, 99 bp, Homo sapiens
actggatcattgttcacatggaagagccaggagaaggcacaatccctgtggaatccagtgacattgtgcctacgtgggatggcattcggctcggggaga

SEQ ID NO: 829231 - DNA, 100 bp, Homo sapiens
gcgacagtgagcgccggcgcgaggacagcgcgtgcccgcgaggagccgccgcgcgcccgcgccctccgcgcgacgccagataaggagtcaggccagggcg

SEQ ID NO: 829232 - DNA, 101 bp, Homo sapiens
tatgaactccttctccacaaatcatagatgtcatagataaggaactaattcaaccttttgagattctatttgaaggagttgaatatattgccagagctgga

SEQ ID NO: 829233 - DNA, 51 bp, Homo sapiens
aggcggccatggtccaaccttgaaggtgcagtatgcagaattgaaactctg

SEQ ID NO: 829234 - DNA, 98 bp, Homo sapiens
acgccctccgaagtatcgaaagattccgcaggaagatttccagattttacagttaagacttcaacaaagaaggacccaggaacaactggctaaccaag

SEQ ID NO: 829235 - DNA, 100 bp, Homo sapiens
gctgcggtcagcgcttcgatcctgagaccaattccgacgggttattttggagctgttggagcactccttgagctgttgaagatcccgtgatcattacctg

SEQ ID NO: 829236 - DNA, 100 bp, Homo sapiens
ggaagcacagcagatgtctacttggaatatattcagcgaaacttacctgaaggggttgccatggaagtaacaaagggaatttaccagctgaagaaagcct

SEQ ID NO: 829237 - DNA, 100 bp, Homo sapiens
acacacggtcactgcagctgaagccgctgcccctgctacaggtcatacttacctggttgcttgcgcatctagtaatgttggatcatattctggatgtttt

SEQ ID NO: 829238 - DNA, 100 bp, Homo sapiens
tgttccaacactacttagctttccaagtcactctgagaggagtgataccaatgaaaaaaggtcagttgattccagtgctaaaagggaaaaacctgtggtc

SEQ ID NO: 829239 - DNA, 100 bp, Homo sapiens
gaggaaggctctcccaagggacagactaactgggaatccctgcctctgtggatctagtgagcagtgacccgagccatatggtagcatcattcagcaaggg

SEQ ID NO: 829240 - DNA, 100 bp, Homo sapiens
cctcatttgtgactatggacctatggagttggtaactctgggtggattttaactacaactcttgtcctctcggtgatggtattgctttggatttgttgtg

SEQ ID NO: 829241 - DNA, 100 bp, Homo sapiens
aaagtatcccacatgacgagtggatttcagatgcatgccaggtttccactgattgccagaactcgagatcactacacatggatccccaaaatcaacatgg

SEQ ID NO: 829242 - DNA, 100 bp, Homo sapiens
ccgccctaatggaggtctccagtttcgagggtattgtgcctggccccccgacagacctctctgtcactgaggccacccggagctatgtggtgctcagctg

SEQ ID NO: 829243 - DNA, 98 bp, Homo sapiens
tccctcatccggaccatcatcggcggtttgttggagactgaaccgttgcaaggaacagacgaagatgcagtagccagtgctgacttctctagcatgct

SEQ ID NO: 829244 - DNA, 120 bp, Homo sapiens
aggaaagtgacgcccttggagtgaggcgagcagcacagagacggctgaaagctgagctaggaattcccttggaagaggtggcatggaatattcacatgggagagccgcatgaggccgccc

SEQ ID NO: 829245 - DNA, 100 bp, Homo sapiens
gtcctttagaacagcttttgcagggaattaatcccagaactaagaaggcagataatgtggtaaacattgccagaaccgtggaacctctggagtattacag

SEQ ID NO: 829246 - DNA, 100 bp, Homo sapiens
tcaccttcgacgaggaagcttataaaaatgtgatcacgcgctgccccatgatcccgtgctacatctcctccccggacgagtgcctctggatggactgggt

SEQ ID NO: 829247 - DNA, 98 bp, Homo sapiens
atggtcacttcatgcctgtcctgggatttggcacctatgcgcctgcagagttttaaccatgctgaccaacgaaactggctttgaaatcagttcttctg

SEQ ID NO: 829248 - DNA, 99 bp, Homo sapiens
tttggccgccgcgccaccatctttcgggctgccgagggtgttcttgacgattaatcaacagcacaatcctggaggaagagaaggctcagcaagaagagc

SEQ ID NO: 829249 - DNA, 98 bp, Homo sapiens
tgaccatcgtgggctcggtgctggaggggacgtacctggacaagcacatggaggctcagcgggccgaggagggagtggggaaggccagggccagattc

SEQ ID NO: 829250 - DNA, 98 bp, Homo sapiens
acccgggacccacttcactccagtgcctccgacgcctcctgatgggtggatgtgaacactgaccggaagatcagtgccaaggagatgcagcgctggat

SEQ ID NO: 829251 - DNA, 100 bp, Homo sapiens
gagatggagaccctctagtctcgtgagactttgccccatggcagaactctgctggaatcctattgagaaggaactctaatgaatcattgattgaccagca

SEQ ID NO: 829252 - DNA, 100 bp, Homo sapiens
gaaaacatcgtggccaacacggtcttgctgaaagccagggaaggtctgtttatgatggtgaagaacatggacgtttcatggagaagcttgaaactcgtat

SEQ ID NO: 829253 - DNA, 125 bp, Homo sapiens
actgactcctacttcctctgtatagagcaactgttgaactcagctgcctgtagatggcaagttcttagcgtgcgtgagccaggacgggtttctgcgggtgttcaactttgactcagtggagctgc

SEQ ID NO: 829254 - DNA, 98 bp, Homo sapiens
acagatggtccaggagaagctttgaaggctgtgaagggcatgagccagaaggagagctctaagtctgccatgatgtatattcaggagttgaggtcagg

SEQ ID NO: 829255 - DNA, 140 bp, Homo sapiens
tgaagaaaatgggtttctagtaatcaaaaatcttgtacctgatgccgatattcaacgctttcggtactccaaagattcaggtttactcacgtcatccagcagagaatggaaagtcaaatttcctgaattgctatgtgtct

SEQ ID NO: 829256 - DNA, 98 bp, Homo sapiens
aaagcctcctacaagagtcctaccaaaacaagctctattgccaagattggctcagatcctttaaaactggtacgtgatgctatggaggaaaccacgga

SEQ ID NO: 829257 - DNA, 100 bp, Homo sapiens
tgaaaatggccatactgcccaaggctttatctaccaaaaaatgaattggataatctacataaacaaaaagcacggagaatttatccatcagattttgccg

SEQ ID NO: 829258 - DNA, 51 bp, Homo sapiens
tttataaccgcgacttcaagatcaggacttttccagatttctcagaataaa

SEQ ID NO: 829259 - DNA, 100 bp, Homo sapiens
aaagcctcagtgatcttggtgccatagagagtctccgggtccctggaaaggaagatgagaatgtgcctactgctcctgatcctccaagtcaacatttacg

SEQ ID NO: 829260 - DNA, 100 bp, Homo sapiens
ttcaccagagacctggccagcatcgccagactccgcatcgcaaaggggggcgtcaatgacaatttccaggctgtattcatcaccaaagaaaaaacttaca

SEQ ID NO: 829261 - DNA, 100 bp, Homo sapiens
gaagctcagcaagactggagtccctgatggaattatgcagtttattaaggggtggcactgaatcaacaagacaagcaactcaattgattaatgctttgat

SEQ ID NO: 829262 - DNA, 100 bp, Homo sapiens
tgcaaatcagactggaagatgaaccatatttatttagagtcagaatggagcgatttgtagtaacagcaccacctgctcgaaaccgttctaagactgcttt

SEQ ID NO: 829263 - DNA, 100 bp, Homo sapiens
ctgcttgctcctcggcttgcatttgtttctgctgaccgcgggccctgccctgggctggaacgaccctgccttagattgtaagcaaaagaaatcaaggtca

SEQ ID NO: 829264 - DNA, 101 bp, Homo sapiens
tgaactcgctcttcaggaagagaaacaaaggcaaatacagccccactgtgcagacccggagtcattgaagtcaacaagagagacatagtcttcctggtgga

SEQ ID NO: 829265 - DNA, 98 bp, Homo sapiens
agacccttcttcccatgcctggagtgatggttggcgacataggaaaaaaactcgggcagaacggtctggataatggtaatgccatcggtcccctggta

SEQ ID NO: 829266 - DNA, 99 bp, Homo sapiens
ggccgttgaaaaatggcgactgtggcagagttgaaggctgcgccacgatcatgtctctcgaagactttgagcagcgcttgaatcaggccatcgaaagaa

SEQ ID NO: 829267 - DNA, 100 bp, Homo sapiens
acagcttccaaagacaagaaagtgagagtcattgatcccaggaaacaagagattgttgctattcaaggaatgacagcattacctccagatatagaaagac

SEQ ID NO: 829268 - DNA, 101 bp, Homo sapiens
acaaactgaaagaccactatctggagtttgaggaacaggagtacagctgtgtagtaaagatgccttctggtgaatttgcacgtatatgccgagatctcagc

SEQ ID NO: 829269 - DNA, 98 bp, Homo sapiens
ggccaaggagatcgaggacgccgagaagtactccttcatggccaccgtcaccaaggcgcccaagaaggaactctttccagttaacagacagagtgtgg

SEQ ID NO: 829270 - DNA, 100 bp, Homo sapiens
gaggaaacctgcatctttacccagcaatccaggtgctggagaatctggtaaaagcaccattgtgaagcagatgaggatcctgcatgttaatgggtttaat

SEQ ID NO: 829271 - DNA, 98 bp, Homo sapiens
acttccaaaggagcagttgctagtggccatttacaggaatcagccacttcagttcagggcagctgcaatgactctccgcacggtattattgtcattgc

SEQ ID NO: 829272 - DNA, 100 bp, Homo sapiens
ttggctcaggtcttctgtgaggaatctggattgtcacctttgctgcaaaaaattacgggatcagttcgacagcttagacaagcatacacaatggggaatt

SEQ ID NO: 829273 - DNA, 100 bp, Homo sapiens
ggtaggcaagacctgcctcctgttccgcttctcagaggacgccttcaacaccaccttcatctccaccatcgcttcagtatcagacacagcacagcagcca

SEQ ID NO: 829274 - DNA, 100 bp, Homo sapiens
cggggcgccacgggggccatgtaagcagcctcaaggaataggttctcctagtgtctatcatgcagttatcgtcatctttttggagttttttgcttgggga

SEQ ID NO: 829275 - DNA, 100 bp, Homo sapiens
ccagcatatcttttctgttgtgacagacacttcacatactgctgctgctgaaatgaggcaaaatgacaaaatcatgtgcatattggaaaaccggaaaaag

SEQ ID NO: 829276 - DNA, 99 bp, Homo sapiens
ggcagggcttctcctatgactacgtctttgactggaacatgctgaaattcatcgagggcacccagaaactgctcaacaaagacctggcagagctcatca

SEQ ID NO: 829277 - DNA, 100 bp, Homo sapiens
cttctgaggcgcaaactcatccacgatggctgcctgctctggaagacagcgacggggcgcttcaaagaatggaacaaaagtgggacttttaaaatgttgc

SEQ ID NO: 829278 - DNA, 99 bp, Homo sapiens
gtcctttcaggaaggagccattatttatgtcatcaagaagaatgacgatgatctgtgcgagagcgagagagtcacagtcgaaagagtgccagctcctgt

SEQ ID NO: 829279 - DNA, 100 bp, Homo sapiens
aagaatgggcggaaagcttgcctcaatcctgcatcccccatagttaagaaaatcatcgaaaagatgctgaacagcttcgcagaatcaagaacggctatgt

SEQ ID NO: 829280 - DNA, 98 bp, Homo sapiens
gtatgtgccacgccgcccaggagacccctctgctgcaccacttcatggacactgggtccccttggagcctccccaggcttaatgattgtccagaaggc

SEQ ID NO: 829281 - DNA, 99 bp, Homo sapiens
tcctttgcctagaggctatcacacgatgagttttgatcatcctgagaaaaatgggccttggcctgcagacccaataaaccttccctcccatggataata

SEQ ID NO: 829282 - DNA, 100 bp, Homo sapiens
gccgcgggcgcgaccggaggcagatcctgcaccagttcaacttatagttcagtttttggaacaggcttccaaaccttcagttaatgaacaaaaccaagtt

SEQ ID NO: 829283 - DNA, 100 bp, Homo sapiens
ggttactcactccatggctgcagcaaggagaggcggcggcggcctcggctgaagaaagaagacgaggagaagaccttttcatgtgtatggacatacagct

SEQ ID NO: 829284 - DNA, 100 bp, Homo sapiens
cgggagttgctgctgcctccaccagacaccaaaccagagcccccctccatgcgcctgaaggcccgacccagcagccctggcttttccgtgcttacctgca

SEQ ID NO: 829285 - DNA, 100 bp, Homo sapiens
aaaaaacaatagggaagggaaattttgccaaagtcaaattggcaagacacgttctaactggtagagagggtgctgcgcctcactcgcctgtcgcctgaga

SEQ ID NO: 829286 - DNA, 157 bp, Homo sapiens
tgtcccagtagaagccaacacggctgcgtgttaggagaggacatgacagtgcttccgtctttctcccctgggggacacgcgactccagctcggacacagacagcttctacggcgcagttgagcggcctgtggatatcagcctttccccgtaccccac

SEQ ID NO: 829287 - DNA, 98 bp, Homo sapiens
tccagtcttgctctgccctccggagatgacaagtgagaaagaagtgtccggccgggccatccccttcagcaacctttcccctggatctcacaaaaact

SEQ ID NO: 829288 - DNA, 98 bp, Homo sapiens
actaagcgggatcttgccctcagtgaaggagatattcacactttgactccagatgtggacttttggattatccccatgatccaaggttttgtgcagat

SEQ ID NO: 829289 - DNA, 98 bp, Homo sapiens
ccggccgctcgcagcgttgtggaggggcgggccggacgctgagcggagcagctgcgccacggaacaagatcactcaaggtgaaggataatctactaat

SEQ ID NO: 829290 - DNA, 99 bp, Homo sapiens
aatgaagccgcggaccctcctgcttaagagttggacagtggaggaccttcagaagaggctcttggccctggaccccatgatggagcaggagattgaaga

SEQ ID NO: 829291 - DNA, 98 bp, Homo sapiens
ccctcccccttctttcgatcagagatcggcggagaccctcgaagtgcgcaaacttgacactcaccctgaccgagctggactggccattatggaggagg

SEQ ID NO: 829292 - DNA, 100 bp, Homo sapiens
atattctgttgtacgaggagaacagatccaattgaaaggaactgtttacaactataggacttctgggatgcagtgatatcagtatcaagataaaagtttg

SEQ ID NO: 829293 - DNA, 98 bp, Homo sapiens
gacactgaacggttgatcggtgatgccgcaaagaatcaagttgcaatgaaccccaccaacacagtttttgctggacagactccaccacgtccaccctt

SEQ ID NO: 829294 - DNA, 100 bp, Homo sapiens
tcagtctggtgcctggcgtcacactggatttgatagaaaacaattctgtggtgttcttggtcacacatttatggagtttctgaagggcagtggagattac

SEQ ID NO: 829295 - DNA, 100 bp, Homo sapiens
accggccgcctcagccatggacgcgtccctggagaaggctggatgacaccaaaatcctcccaggcaacatgaaggataacttctgggagatgggtgacac

SEQ ID NO: 829296 - DNA, 100 bp, Homo sapiens
tggaatgtcacccagacaagcatcctgaaaaccccaaagctgggaaaaagacctcgatgaagttctgcagacccactcagtgtttgtaaatgtttctaaa

SEQ ID NO: 829297 - DNA, 98 bp, Homo sapiens
tttgctaaatacagaaggacatgcaaaacttgcagattttggggtagcaggtcaacttacaatccttacaataaatgaggatggatcacttggtttga

SEQ ID NO: 829298 - DNA, 98 bp, Homo sapiens
gccgccatcctcggcgcgactcgcttctttcggttctacctgggagaatccaccgccatccgccaccatgggagaagaaatgggtgaccgttggtgac

SEQ ID NO: 829299 - DNA, 99 bp, Homo sapiens
ttcaccttccaccaccatgatttgattacagtggcgagatcttgaacaactgctgcgtcatggagtaccaccaagccacaggcacccttagtgcccact

SEQ ID NO: 829300 - DNA, 100 bp, Homo sapiens
aagccccattctggtgcccgatcctggcctgctgcatccctgccttctcctcccgggcactcagcctgcaggtggaagctataaaggccatgtggatatt

SEQ ID NO: 829301 - DNA, 98 bp, Homo sapiens
gaaaaatgtgacgatggatggtttgttgatggcaccgaaagcgaaggaagctcctgctcctcctaaagccgaagccaaagcgaaggctttaaaggcca

SEQ ID NO: 829302 - DNA, 98 bp, Homo sapiens
tacatgtttgctacaaaggtggtgtgtctaaaaagcacggcaagctcattacgttcttacgaacattcatgaagtctcgtccaacaaaacagaagctg

SEQ ID NO: 829303 - DNA, 100 bp, Homo sapiens
gtgctattcaaactgccctgatgggcagtcaacagctaaaaccttcctcaccgtgtactaatgttggctaccagggtatttagcctagttggcaagcgag

SEQ ID NO: 829304 - DNA, 98 bp, Homo sapiens
ttctcttcactagaatatggagactgttcaatcaccaggaaaatggccttacagcctgggacaaaccgaagcactgtccagaccgagaacacgactgg

SEQ ID NO: 829305 - DNA, 100 bp, Homo sapiens
agcaagcacatggtgcagatagtgggactgcaagagcttcaggtggacagtgtggagctcctcttagaggtagctacagcaagctgggtagcaggcagat

SEQ ID NO: 829306 - DNA, 98 bp, Homo sapiens
taccaggaagaggcagaagaggaggtggttgaccagattgacaccctgacctctgacctacagctggaggatgagatgactgacagctccaaaacgga

SEQ ID NO: 829307 - DNA, 98 bp, Homo sapiens
cttgacacttatatcctccctgggacccttgaacatctgtgaagaaatgactattctgcatggaggcttcttgctggccgagcagctgttccacccta

SEQ ID NO: 829308 - DNA, 98 bp, Homo sapiens
ttaacgtgagcccgctgcaggtgtgcggcccagtccgagacagcaggtgacaggaactccctcgaaaggctttgatgagaaggcctacctgtcggcca

SEQ ID NO: 829309 - DNA, 98 bp, Homo sapiens
aaacttgacactcaccctgaccgtcggtggtggggagcggcagctggcagagagtcaacgcccagacggctgtgagatccccgagatatgccgtgttt

SEQ ID NO: 829310 - DNA, 98 bp, Homo sapiens
agaaaccaaatttgactccggttcagctcacggacacagacctaattaaacagtgtatagatgaatgcacagccaggattgaaattggactgcattac

SEQ ID NO: 829311 - DNA, 100 bp, Homo sapiens
gctgagcttgacatgttaaaagatcctagtttcagaggatccgatgatggggatggagattctgaaaaagagttccacgtcctcccttatcgagtctttg

SEQ ID NO: 829312 - DNA, 99 bp, Homo sapiens
atggatccacgcctgatggctccacgcatttcccttcgtgctgtcttgtcgacggtctcactgatgcctcttctgcattcaaagttcctcgacccgggc

SEQ ID NO: 829313 - DNA, 98 bp, Homo sapiens
gccatcctcggtgagatgcagacattggaaggaaaagttcactggagcaagtctcttgcagctgaatggggtaaatatggaatgcgattcaatgtgat

SEQ ID NO: 829314 - DNA, 98 bp, Homo sapiens
actatggaaacaagagattggatcttgctgggccgctgcttgcattcttatttagaggtattcctgcagctgcgctagacttatttgattacatgctt

SEQ ID NO: 829315 - DNA, 99 bp, Homo sapiens
tctgatcaagcggatccaagccatgattcccaagggttatgggacccacctgatgaaccacctgaaggagtatcacatcaagcacaacattctctactt

SEQ ID NO: 829316 - DNA, 100 bp, Homo sapiens
ggatggtgtattccacgtgttcactaaaccctattgaggatgaagcagtcatagcatctttactggaaaaaagtgaagggtttcgaaaaaacgatgaaat

SEQ ID NO: 829317 - DNA, 99 bp, Homo sapiens
attgttcaccacggagcatgaagacagagcgggtgactggaggtggctccccagagtgtgaacatggctacgcctcttcattcccgtccatgccgagcc

SEQ ID NO: 829318 - DNA, 98 bp, Homo sapiens
tttgggaaggtagaagcatttggcacagaagtgctgccaggagaaactaagttgctgaacggctgcagaaccttggcctgaaaatgctacattatatc

SEQ ID NO: 829319 - DNA, 100 bp, Homo sapiens
cgactgcccagagtccgcggccggggcgcgggagagacctgtcggccatggagcctaatgatagtaccagtaccgctgtggaggagcctgacagcttgga

SEQ ID NO: 829320 - DNA, 100 bp, Homo sapiens
ggtagccctggataaagatgcaccggttccttttgcaggtcctcaggttgagaggaactgtactccagaagctatacttaaagaactacatctgaggagc

SEQ ID NO: 829321 - DNA, 100 bp, Homo sapiens
agtccgccgctcaccccgcggccgcaccttcccgccttctcagactgcagctgaatatgtaaaatctcgactcccagaggcccttaaacagcatcttcag

SEQ ID NO: 829322 - DNA, 98 bp, Homo sapiens
tacatcacgtttcttccattcactcactggaatattgacccttatttatccagaagattgatcatcatatgggttcaagttgtcctcgaagaaggtac

SEQ ID NO: 829323 - DNA, 98 bp, Homo sapiens
aggtgtaagcgcagaaagcaggcgaacccgcggcgcaataacggatctgaacgtctatgacactctttcgagctgacacagtgaagaacatagaagga

SEQ ID NO: 829324 - DNA, 100 bp, Homo sapiens
gaagccatttcaggagtacctggaggctcaacggcagaagcttcaccacaaaagcgaaatgggcacaccacagggagaaggccaaggagctgtggcagag

SEQ ID NO: 829325 - DNA, 99 bp, Homo sapiens
gagcacgccggccccgcgcgcgcctcgaggccgagtcaaggcctgcggggagccatcccctatgccctgagcctacacctggacctggagcccatggag

SEQ ID NO: 829326 - DNA, 111 bp, Homo sapiens
tggccatccaaggagtgaaggctagcctctatgtggccatgaatggtgaaggctatctctacagttcaggtatcagcatggaagccatgagtgagaataaaatggtgccct

SEQ ID NO: 829327 - DNA, 100 bp, Homo sapiens
cgttggctggattgtgttagtcatcacgaccagcttttcagagatgagtatgcgctgtatagaccactgcaggtcaatctatgctgtatttgaatccgac

SEQ ID NO: 829328 - DNA, 98 bp, Homo sapiens
caatccaggaacaagagagacataagcaactgaagtccgctgaaatggctattcctacaaagtggcagtcgcattgtctctttttcttggatggttgg

SEQ ID NO: 829329 - DNA, 99 bp, Homo sapiens
aagactattaccagtgaagacgtggccgaaatgcacaacatcctgaagaaataccaccaggtaaaataccatgaagattttgaaaaaacaaaggggaga

SEQ ID NO: 829330 - DNA, 98 bp, Homo sapiens
cagaacatgggtccgtggtcgtttgtttctccaaggtttgaaaagcagctggcctgcaaggaatatattattcgagtgcaaagaggaatttctgtgga

SEQ ID NO: 829331 - DNA, 98 bp, Homo sapiens
gtggcactgaggctctggaacttctgcccagctctccttgggaaaagaagatctcccggagcagtgccctgaaagtgctggaccatgccatgattggc

SEQ ID NO: 829332 - DNA, 98 bp, Homo sapiens
aggtgatgaggttgaagatctctatgagcttttgaaacttgttaaggacgcacaagaccagccactgctaccgcatcacgtaccgccacatggaacgg

SEQ ID NO: 829333 - DNA, 100 bp, Homo sapiens
acctggggaacctgctcaaagccctgggtcgcttggaagaagccaagaatgaggagaaacctgtgcaaatgatgtttaagcaatctacttttaagaagac

SEQ ID NO: 829334 - DNA, 100 bp, Homo sapiens
atggacagattctgcctgtaccaaacgtggttgtacgagacgtggcctgtggcgctaaccacacgggatcaagcatgaattgcaagcaaactgctacgag

SEQ ID NO: 829335 - DNA, 100 bp, Homo sapiens
ttctttgagaaccaccctgcctccatccctgccaagtctctggcatctctatcccctatgaggcaccacgtaagacctcctgcccttagctctcttgctc

SEQ ID NO: 829336 - DNA, 100 bp, Homo sapiens
ccagtctgaattctgtggattttcgtctaaaaataacaagaatgggaggagaaggggatgggcgtgttttgggcgtgctagaggtgtcacgctccattgg

SEQ ID NO: 829337 - DNA, 126 bp, Homo sapiens
tacatccttgtgaggcccaaggctggccagacactgcagcagagggttttccagatcctagacagtaaggttgaagctccattcataccaaagtttagaggctctggagataccagcaactttgat

SEQ ID NO: 829338 - DNA, 100 bp, Homo sapiens
ctctccccaaaagccgtcaaaggatttgaaactgctccacttaccaagaattattatactgtgcctctcaacattgcctacagccacatctacagctcct

SEQ ID NO: 829339 - DNA, 99 bp, Homo sapiens
ggcactttcctatgttcttgcaagaaagatgaatgcacttcacatgctggatattaaagagcacaatggacagtgataccatgtgtgggaagttgttct

SEQ ID NO: 829340 - DNA, 151 bp, Homo sapiens
aaaatcttaaccttcaaccatctggggaaaaggcaaaaatcccatctaccgcaactctcagttcgagagtaaagactgtccttcatctacttggattcagttccaagacagttgttacatttttctccaagaagccatcaaagtagaaagc

SEQ ID NO: 829341 - DNA, 100 bp, Homo sapiens
tcagagatccaagtgcgcgccctggcgggtccggaccaaggtcatcctttgcaaccagatttcttcttagatgaatacccagaagcagttagcaagaaag

SEQ ID NO: 829342 - DNA, 100 bp, Homo sapiens
ggactatggcatctatgttatcaaccagggtgatacaattctggagactggagaagtaattccaccaatgaaagaatttcctgatcaacatcattaaaga

SEQ ID NO: 829343 - DNA, 100 bp, Homo sapiens
cgaaaactgaagcagatgttgaacaacaaggtatgtttctataaaacctgataaccgaaaattggccaacggaacaaatgtcctcggcttactgattgac

SEQ ID NO: 829344 - DNA, 99 bp, Homo sapiens
cacagcctgcggtttccggctgcaccgcggcatgaatgtgcccttcaagcgcctgtctgtgagaaggacgttgaagagtgggctcggagatgacctggt

SEQ ID NO: 829345 - DNA, 98 bp, Homo sapiens
tttcttcaatatttatcaccctagaacggagaccaacctgggctgaagaaagaagattaaatgctgaaacatttggaatcccacttcgtccaaaccgt

SEQ ID NO: 829346 - DNA, 100 bp, Homo sapiens
aagcacaaagagcttgctccctacgatgagaactggttctacacgcgagctggcaatttcttgcaaccaccaccgaggccccgaaaagcactggtcgtca

SEQ ID NO: 829347 - DNA, 100 bp, Homo sapiens
gtggacaccacctcagcccactgagcaggagtcacagcacgaagaccaagcgcaaaggtgaaatgacaatggatgctctgttggctcgattgaaacttct

SEQ ID NO: 829348 - DNA, 51 bp, Homo sapiens
gctggcggagcatgagcgccccaggtgtatgcaacagcgttattgcaacag

SEQ ID NO: 829349 - DNA, 100 bp, Homo sapiens
gggcagcgtccctgtgacctggccgatgaggaagtactgagcctgttggaggaactggcccggaaacaggaggacccaccttcagggctgtctgtcaaag

SEQ ID NO: 829350 - DNA, 98 bp, Homo sapiens
tcctccttggtcgccgcgtccttggctggcgtacaaaacttacctggggtccctacttatggttttacatgcttcgggctgctacatcaactctctca

SEQ ID NO: 829351 - DNA, 100 bp, Homo sapiens
tcatcgtggaccacaacatagccgactacatgacagccaagaacaacgtcgtcatcaactataaggagtctcaggagcaggggctgcggcagaggctgct

SEQ ID NO: 829352 - DNA, 98 bp, Homo sapiens
ggcttacacccgaggtccctctttggggtggctctttgctaagtgctgctgttgcttcccgtgtagagcaatggctgccatccggaagaaactggtga

SEQ ID NO: 829353 - DNA, 103 bp, Homo sapiens
tagttggattttcacgtgctcttgctaaagaggtagcaagaaagaaaattagagtgaatgtagttgcaccagggcaagtgtccagagaatggctgggatgaaa

SEQ ID NO: 829354 - DNA, 100 bp, Homo sapiens
agcaagcagaggctgggggggggaaagacgaggaaagaggaggaaaacaaaagctgctacttatggaagatacaaagggattccagtcctctactaaatg

SEQ ID NO: 829355 - DNA, 100 bp, Homo sapiens
cgccatcgttgctgccttcttcgtcaagcaaagggttaccttccagttcaacatttaccttggaagaggggaccatctacttgaccgctgagcccaacac

SEQ ID NO: 829356 - DNA, 99 bp, Homo sapiens
aaaaggatccgcaggaggcgtcaggcctgcctagacggagtgggattttaggtgatgggcaagtcagaaagtcagatggatataactgatatcaacact

SEQ ID NO: 829357 - DNA, 100 bp, Homo sapiens
tgccgctgtgtacagcgcagccatcctggagtacctcaccgcagagcccaggagttctgtttccgaagaaagagccagatgattctagagatgaggatga

SEQ ID NO: 829358 - DNA, 100 bp, Homo sapiens
gagctacagaaattagaagaacagattgcaaatcagactggaagatgggtatttgaagtataccatacaactgttttgaaaatccagcgtggacaatggc

SEQ ID NO: 829359 - DNA, 100 bp, Homo sapiens
gccccgctacatgcagtggagggaaaccatgagctccacctctaccctgggcttccggatcgagggcatcaagcgtatccagtatgccaagaccgactca

SEQ ID NO: 829360 - DNA, 100 bp, Homo sapiens
ggcgatgggcccgtggacatgcgcacctcacacagaggcagaggaggtggacacggtggacgtctccggcgtgcccgcagaggtgctgtgcaacatcgag

SEQ ID NO: 829361 - DNA, 100 bp, Homo sapiens
tgaacatgcctccattcacctgtgggacctgctggaagggaaggaaaaacctgtatgtggaaccacctgtacgtcttcaaataccatctcagcaggctgg

SEQ ID NO: 829362 - DNA, 100 bp, Homo sapiens
cgatgaagtgcagaggtttttttctggatacaatgtctctttgctatatgaccttgaaaatcttccggcatccaaggattccattgtgcatcaagctggc

SEQ ID NO: 829363 - DNA, 100 bp, Homo sapiens
cgcccgtccacacccgccgccaggctttccatctgatggtcccctggtgtgtgccctggaacaggagcgaaggctccgcctccctccgaagccacctccc

SEQ ID NO: 829364 - DNA, 99 bp, Homo sapiens
aagtggttgcggtaacctggcctgggcctgaagaacctagaaagattgtacaatgaatggtgattctcgtgctgcggtggtgacctcaccacccccgac

SEQ ID NO: 829365 - DNA, 98 bp, Homo sapiens
ggaatgagaagctaaagaaggttgtgaggcttgcccgggttcgagatcattatatctgttggatggcaagcatgtggtgtttggcaaagtgaaagaag

SEQ ID NO: 829366 - DNA, 100 bp, Homo sapiens
gacattcaaccgtacccgccaagctgtcatcacaaaagagttgattgaaattatctctggtgctgcagctctcacctgttcttcccggagcctatcagca

SEQ ID NO: 829367 - DNA, 100 bp, Homo sapiens
gccgccgccgccgccatcatgagggaaatcgtgcacttgcaggccgggcagtgcggcaaccaaatcggcgccaagaaactagatgatggccatttaaaca

SEQ ID NO: 829368 - DNA, 98 bp, Homo sapiens
gatagagcagagtggaccaccccatgaacctcgcagctaccaagggggtgccagctggaaacagtgacacagaggggggccagcctggtcggaaacga

SEQ ID NO: 829369 - DNA, 98 bp, Homo sapiens
agaatcccatctgatggtcaccagtcaatctttgaggtgaatgaaaactttgccattgatttgatagcagagcagcccgtgagcgaggtggagactcg

SEQ ID NO: 829370 - DNA, 100 bp, Homo sapiens
tcagagatccctcagcggctccatgccttgcttatgccaccagaacctatcatcattaatcatgtcatcaggagtccttcaataatgttaaacagtggct

SEQ ID NO: 829371 - DNA, 100 bp, Homo sapiens
cgcagggagaaggaagaggtgtttgaaaaggaacaagcacatcatgattgacttggggactggcaacaacaacaagattaactgggccatggaggacaag

SEQ ID NO: 829372 - DNA, 99 bp, Homo sapiens
agaagttgccaaatttgaagcagaacgatcaaaagccaagtggcaaacggctgcaagaaagcgtaagattgccattcgaaaagcccaggggaaaaatgt

SEQ ID NO: 829373 - DNA, 100 bp, Homo sapiens
agtgcgggcgcagctggcggagctggagctggagctctcggaggctgcatccagatctcattatgcatcagaaaaatgaaaaaacagaggaaaattctat

SEQ ID NO: 829374 - DNA, 98 bp, Homo sapiens
tttcttcaatgaccggccgtggaggagggcaactgcggaaagtgccagtgaatgcctgcggaaaagagtgcaaattcggaaagcacctcaagctgttt

SEQ ID NO: 829375 - DNA, 100 bp, Homo sapiens
ccctgctcagggtcttcatccagaaacgagcttcttctcagcctgttgataaccatgttagcccatcttccttcttgggccagacaccagcatctccagc

SEQ ID NO: 829376 - DNA, 100 bp, Homo sapiens
atgtcgggttattcgagtgaccgagaccgcggccgggaccgaggaacaagttgaaatcatcgcagaaggataaagttcgtcagtttatgatcttcacaca

SEQ ID NO: 829377 - DNA, 100 bp, Homo sapiens
agagaggagaacgaacatcttctggacctttgtccagattcaattagcagagcctcacagacaatggccaaatgtgtcaaagctgtcacagagggtgccc

SEQ ID NO: 829378 - DNA, 98 bp, Homo sapiens
agcattctaaagtgaatgactccaacgaattaggtggtctgactaccagtggctctgcagagggagactcatgcatctgtatgccgtgtgcgtggact

SEQ ID NO: 829379 - DNA, 98 bp, Homo sapiens
gcggtggcaggagctgacagagtgatgggaaacgcgtgagccaggccgagagatccagtgccctacctgccaattcgtctggtgttttaagtgccact

SEQ ID NO: 829380 - DNA, 100 bp, Homo sapiens
tcggggtctttaagggggagagtgacccagcctaccagcaataccaggatgccgagaacaccttctgcagtggggaccatgtgtcctggcacagcccttt

SEQ ID NO: 829381 - DNA, 140 bp, Homo sapiens
gttcaatggtggtggtcatatcaatcatagcattttctggacaaacctcagccctaacggtggtggagaacccaaagagctgtaggtaaaacttgcctactgatcagttacacaaccaatgcatttcctggagaatatat

SEQ ID NO: 829382 - DNA, 100 bp, Homo sapiens
ggagagttctgcatgttgattctgtaaacaggaacatcgataagtagtgtaaaaacttgcacaatgaaatccgaagccaaggatggagaggaggagagtc

SEQ ID NO: 829383 - DNA, 98 bp, Homo sapiens
gggaaatgatgaccaaagatagaggctatggagaaaaggatgatgcacgccaactctttgtgctagctggagctgctgaagaaggctttatgactgca

SEQ ID NO: 829384 - DNA, 98 bp, Homo sapiens
cctcaaacaggagctggagcagctcaaagaggttggaatgttgcatcagcaggtagaagaacatgaaaaaatcaagcaagagatgaccatggaatata

SEQ ID NO: 829385 - DNA, 98 bp, Homo sapiens
accaggtaccaagtgctgctggatggactggttctccaggctaaagaattacctccaaagccattgtcaagaccacagcagtcatctgcaccagtcca

SEQ ID NO: 829386 - DNA, 100 bp, Homo sapiens
gaaagaatggagaactattaactgcctttcttctgtgggctgtgattttcagaggggaatgctaagaggagatctataaggacaggcagaaattctcaga

SEQ ID NO: 829387 - DNA, 98 bp, Homo sapiens
tgaagattccaagttcaggagaactcgaccgaatgtgacagtgatgataacatgggtgccaaaaatacttcaataggagaagaatttatatccacaga

SEQ ID NO: 829388 - DNA, 99 bp, Homo sapiens
agcagttccttcagaggcaacagcaccttctcgcggaacaggttttttggaacgaagtggatgatgttcctcgctgtgggcatctacgccctctttgtc

SEQ ID NO: 829389 - DNA, 100 bp, Homo sapiens
tgtgcctgatgatcacgcagctggctggcttcagtggaccatcatccgtccttggctcaggatttggagagcttgcaccaccaaaaatggcaaacatcac

SEQ ID NO: 829390 - DNA, 100 bp, Homo sapiens
accattagcagaaagtatcacagacgttctcgtaaggacaaaacgggactggctagttaaacaaagaggctggacatggccaaacgtgtagccaacctgc

SEQ ID NO: 829391 - DNA, 99 bp, Homo sapiens
cgctctcttcggctgccccaatccccggcagctctctcagtgggcctttggagtgacgctgtgggaactcatgactctgggccagactccctacgtgga

SEQ ID NO: 829392 - DNA, 98 bp, Homo sapiens
ccagcccccagaaaggattgtgacatatcgttggacccagaattgaggttcgatacaagaggctgttttcctagcgtggcttgctgcctttggtaaga

SEQ ID NO: 829393 - DNA, 100 bp, Homo sapiens
atgaagagagcgacctggagcggggatacacgacatatgtagagtgtgtcggtcagaaggaacacctgagaaaccgctttatcatccttgtgtatgtact

SEQ ID NO: 829394 - DNA, 100 bp, Homo sapiens
aaccgcgcgccccacctttccccacgtggccgcgaagaccgggctgcagatcaaattacgaagctgtataatctcttcctgaaaattgatgctactcagg

SEQ ID NO: 829395 - DNA, 100 bp, Homo sapiens
ccacaggagaagcgccgtgatgaggagctcatctaccacaaagtgacggcagccgagctgcaggtccccagtctatgtgaggatctcctgtcttctgttg

SEQ ID NO: 829396 - DNA, 100 bp, Homo sapiens
actgcagctgccccctgtgtcagtggcagcttcacaagtatcaccttttgccatgatagcatttctttcattggacagttccttacaagggctccactca

SEQ ID NO: 829397 - DNA, 98 bp, Homo sapiens
taaaacgcttccatctttatccagagaactaagttcagaaaatcttagaacttgctttaagatcatcaatggttatatctttttatcatcaacagaat

SEQ ID NO: 829398 - DNA, 51 bp, Homo sapiens
ggtggacaagaatgctagacttaaaggtcaataactgggagatggacaaac

SEQ ID NO: 829399 - DNA, 100 bp, Homo sapiens
tgtacttacagtgtttccaacatcttctcataaaaggggaaagcttcatagcctcaaccatgaaggaaaccagctatggaggctatgatgattacaatgg

SEQ ID NO: 829400 - DNA, 124 bp, Homo sapiens
gagctgtccagcagccacggcccggggttttcaaggcttaatcgaagagatgcccgaggagccttcaacacctggtacagtggtcagttcccctagcatctccactcctccaattgttcctgat

SEQ ID NO: 829401 - DNA, 98 bp, Homo sapiens
gcaccatgccgtcggagaagaccttcaagcagcgccgcaccttcggatcgaatcatcaatttagttgttggcagcttaacatccttattgattctagt

SEQ ID NO: 829402 - DNA, 104 bp, Homo sapiens
gcaaatcgacagcctgaagccctctggaagcccaagactgctggagtgcctatgattacacaataccacctatggagaaagctgttgtgaaaacggacattcag

SEQ ID NO: 829403 - DNA, 100 bp, Homo sapiens
cggcgatcggcggcgttgaggcgggatccgggcgagccgagtgaaggtgacagagctgaatgaacctctctccaatgaagatcgaaatctcctctctgtg

SEQ ID NO: 829404 - DNA, 100 bp, Homo sapiens
gacagagctactggatctcagccttgtcaaagatgccagatgtgggagacacgccaaagctcccaagggaagaggaagaacgtctgagaaataaaattcg

SEQ ID NO: 829405 - DNA, 98 bp, Homo sapiens
ggacaggactgacgaatcttctggatgtccctggattgaagatttgtacacacagatatgacgaaagacttgaaagaagaacatttaaagaaaaatat

SEQ ID NO: 829406 - DNA, 100 bp, Homo sapiens
tatgatcgtcctggttggaaccctcggttctgcatcatctcggggaaccagctgctcatgctggatgaggatgagtctctagtgatccctgaaaagttcc

SEQ ID NO: 829407 - DNA, 100 bp, Homo sapiens
gctgacgtgtcatttctaagtactttctcctactccataaagacttcaagtagctacagcaagctgggtagcaggcagatccaaaggatatcatgaagtt

SEQ ID NO: 829408 - DNA, 100 bp, Homo sapiens
catgcgtttgagatctactgtgagttttgcactgattgcaaaaataaagtcctccgagcatacaatatccttattggtgaacttgactgcagcaaagaaa

SEQ ID NO: 829409 - DNA, 99 bp, Homo sapiens
ttcaccgcactcgaccaggaccacagcggcaaggtctccaagtcccagctcaagaaaatcctttgagtttgaggatgcatccagtctccagtccctgta

SEQ ID NO: 829410 - DNA, 100 bp, Homo sapiens
gaccccctccggctcaagtgtgtcaagcaaggtgatgtgccttcaggacttttttggtgatgatgacatttttattgcatgtggaccggagaagttccgt

SEQ ID NO: 829411 - DNA, 100 bp, Homo sapiens
gaagaggttagaagccatgctaaaagagagggagagtgatctttctagcaaaacacagctgttacagaatccagactccaaaatgatgcaaatcaacctg

SEQ ID NO: 829412 - DNA, 100 bp, Homo sapiens
gtgcggagagactccttgggggtcgagcacataacggggttcgggtgtctcgtgtgtgaacatcacaggaggaggtgcgccagtctgtaactcctgccga

SEQ ID NO: 829413 - DNA, 98 bp, Homo sapiens
aataagtcagatgactttctgtcggtcttgcgagtggctggttccctgcagaagagcacagaagtgatgaaggccatgcaaagtcttgtgaagattcc

SEQ ID NO: 829414 - DNA, 100 bp, Homo sapiens
ggcatctctaggtaccatccctgacctggtcctcatgctgccgaggctgttgctgttgatctgtgggtaaatgttgtccagactcagagtttaagaaaca

SEQ ID NO: 829415 - DNA, 98 bp, Homo sapiens
tgccaattgtgtggccttagcgatctatattccctttccagaagatgattccaacgccaccaattccaacctggctgctgatgtgctgttgcaacatg

SEQ ID NO: 829416 - DNA, 100 bp, Homo sapiens
gcactgaggagctcgcctgctgccctcttgcgcgcgggaagcagcaccaagttcacggccaacgccttggcactaggtttcgctcttgttgcccaggctg

SEQ ID NO: 829417 - DNA, 100 bp, Homo sapiens
attatctatgacattcgggccagacctcgaaaaatctcctcccctacaggctccaaaggctgaccagtgcaccggtcttcagggcttcttggttttccac

SEQ ID NO: 829418 - DNA, 100 bp, Homo sapiens
gaccaatacactgaggccctggcccagagggacaagaaatcagagatggtggttctctcaaaatgattcactttggtctggtgtaaacattaagaaaaaa

SEQ ID NO: 829419 - DNA, 100 bp, Homo sapiens
gagcttgagatacgccgctctgaatcttgccgccctgcactgccgcttcggtcactagctttcctcggagacgggtggcatggggagcagctagaacaat

SEQ ID NO: 829420 - DNA, 100 bp, Homo sapiens
gctgcacggcttgtccacggggatatgaaggccagtactgtgaaaggtcatactccctgtcacaaactccagctgaactaacttggaggaggatcttccc

SEQ ID NO: 829421 - DNA, 101 bp, Homo sapiens
gttttctatcagatgttccacgtaataatgctgatagccgcaatggctgaaaatggtgataatgaaaagatggctgccctggaggccaaaatctgtcatca

SEQ ID NO: 829422 - DNA, 99 bp, Homo sapiens
tgctttcccattttgctcagcgactgtttgatgacgtcccgcagacaatgcagatcttcgtgaagactctgactggtaagaccatcaccctcgaggttg

SEQ ID NO: 829423 - DNA, 98 bp, Homo sapiens
ccagacagagattctggagacattggctggtaacagatatcaagggaaaggtggcccagacagcgtgtatgtcagcttgcaagcatttagccacatcc

SEQ ID NO: 829424 - DNA, 98 bp, Homo sapiens
aaatcgagaaaaacctcagcgacctgatcgacctgatgcgctggctccctccctccgaggctacttctcagggctggaagtcccgtcagttctgctga

SEQ ID NO: 829425 - DNA, 98 bp, Homo sapiens
ttgatagtcattcgtaatcagcaggccaaagactcagaggcctatggcatgtctgcgttacctttaaatctgataaaaggcactagaagcgctgctta

SEQ ID NO: 829426 - DNA, 98 bp, Homo sapiens
cgcgtcaagcccatcggcgtccactcggtggtgaagggccggctgcacctgactttggccaacgtggccggcacagtcttcactaccgtagaagacct

SEQ ID NO: 829427 - DNA, 100 bp, Homo sapiens
ccccaccacccggaggagcagctcctgcccctgtccgggggatgactgattctcctccgccaggaaagaccacagcaagattctttcattcgtctcctcc

SEQ ID NO: 829428 - DNA, 99 bp, Homo sapiens
gacgctgagcgaggcggagaaggtgtacatcgtgcatggcgtccaggttatgaagacagtatggagtttccagaccatagtagacatttgctacagtgt

SEQ ID NO: 829429 - DNA, 100 bp, Homo sapiens
ctataagaacctggttcctaagcctgtaccacctccttccaaggccctggagagtgaatttgtttcctgccagcttcaccaatggattgatctcattttt

SEQ ID NO: 829430 - DNA, 99 bp, Homo sapiens
tgacttctctctcctagtgaatgcatcagtgtcattccaggacgtgactgtggaattcagccaggaggagtggcagcacatgggccctgttgagaggac

SEQ ID NO: 829431 - DNA, 98 bp, Homo sapiens
tgcctttgacctttttgaagcctttgcaaaaatggaagacgtcatagcacggatgcaagatgaaaaaaatggaattcctattcgtacggtcaaaagct

SEQ ID NO: 829432 - DNA, 100 bp, Homo sapiens
ccggtaaatccagatgcagttgttaattggccttggtcctcacagctccaaaaagaaacaggatctcgataagctctatgagctgaagtccaaagctcgg

SEQ ID NO: 829433 - DNA, 131 bp, Homo sapiens
aaacagcaaattccatcgtgtaatcaaggacttcatgatccagggcggagacttcaccaggggagatggcacaggagggaaatgtttcaacgtgcgcaagcgttgcggcggcgggcagaggactactacag

SEQ ID NO: 829434 - DNA, 100 bp, Homo sapiens
aggccaggtttactggagtaggtgttagtaaggacttgtcttacaaggaccggcactggcatgaagcctgtttccactgctcgcagtgcagaaactcact

SEQ ID NO: 829435 - DNA, 98 bp, Homo sapiens
gcagatgaatggacaccttgaagcagaggagcagcaggaccaggcaccggaggaagtcttctgtaacagattccttcagcagcctggtgaaccgcccc

SEQ ID NO: 829436 - DNA, 100 bp, Homo sapiens
taatttgatattaacaactggaggaacaggatttgcaccacgagatgtcactccagagatccatgtaaaagctcattttgactatgacccctcagatgac

SEQ ID NO: 829437 - DNA, 98 bp, Homo sapiens
aacaagatggtgagcatgatggagggtgtcatccaggcctgaaagtaagcaggagccagtgaaaacagaaatgggtcctccaccatctccagcatcca

SEQ ID NO: 829438 - DNA, 100 bp, Homo sapiens
ttgtatgaaagagatctcagacttgcattacctcagatgagtgatgtgtctgcaggaggagccactgtttttcctgaagttggagctagtgtttggccca

SEQ ID NO: 829439 - DNA, 98 bp, Homo sapiens
ctgggcagagcttctaccagaaggatgggcgacccctctgcgaaccctgctaccaggcagctgccagacccggccatcgaggaccagggtggggagta

SEQ ID NO: 829440 - DNA, 100 bp, Homo sapiens
tgaagctgcagaaccaacgaggtggccgaatcttccttcaggatatcaagcatggcttctcgctgtttctgggatgctgacactgacaactatactcatg

SEQ ID NO: 829441 - DNA, 100 bp, Homo sapiens
acatacctggtttattatgcagaagttaatgacaggaaaaacagctctgacttgaaatatagaattctgcttagcagtgtctgcaaaaacgaatcttttc

SEQ ID NO: 829442 - DNA, 98 bp, Homo sapiens
cccagacggctcacctgtgcgggatggaacaaaagccgccccgtggtgcctcctttgatcccgccaaagatcccagaaggggagcgcgttgacttcga

SEQ ID NO: 829443 - DNA, 51 bp, Homo sapiens
ggtggagcgcagagcgggcgagcgcgcactggtgaccccggcagccctgag

SEQ ID NO: 829444 - DNA, 98 bp, Homo sapiens
acgagcgacggcggaacccgtgggcctgtggactgcagcctcggcggtcagcagggatcgcttacacctgagacgaactacagaacagcacgtaccag

SEQ ID NO: 829445 - DNA, 98 bp, Homo sapiens
cctcggcttcccaaaatgttggtattacagtaactctcaggagccttctccgcagttggcttcctcggtagcttccacacggagcatgcccgagagcc

SEQ ID NO: 829446 - DNA, 112 bp, Homo sapiens
atggatcctcttccaaaaccacaaacttgcctacgtcagtaacagccaccaagctgagatctgtatctgtggacctgaatgttgatccctcgcttcagattgacatacctga

SEQ ID NO: 829447 - DNA, 100 bp, Homo sapiens
tcttgatctggagaaaaactggatgttggtagaaaaagcaagagtttgttatatagcagatcctgagcagagacctactgcagatgaacttctagatcgc

SEQ ID NO: 829448 - DNA, 119 bp, Homo sapiens
agctgttgaagaccctcctggatattcctgcaaacccaacaggatgaacatggtttcatctccagggagttccacaggaaataccggatcccagctgatgtagaccctctcaccattac

SEQ ID NO: 829449 - DNA, 99 bp, Homo sapiens
gtgcgcccgcgccaccatcttcggctgaagccaaaatgaagtttaatccctttgtgacttccgaccgaagcaagaatcgcaaaaggcatttcaatgcac

SEQ ID NO: 829450 - DNA, 99 bp, Homo sapiens
tggacgtcttcctgaactctggaggagaagagaacactgtgctgtcccccgccttagcaagagtactggaggctagtggaagagaaggactgccacgtg

SEQ ID NO: 829451 - DNA, 100 bp, Homo sapiens
aaaaagaaggaaactaagaaaaaattcaaacttgagccacatgatgatcaggtttttctggatggaaatgaggtcatagaaggttatgaaatagcctgca

SEQ ID NO: 829452 - DNA, 100 bp, Homo sapiens
ccgctccttggaaggtcgctgggaggtggcattcaaagccccctctcccaacaactccgacacctgttccaagggaacctggccggaagcctctttctag

SEQ ID NO: 829453 - DNA, 100 bp, Homo sapiens
gcccattgatagaggccagattgtcttggaagttccaaagttgcaacgatttctcggagcgtgctttggacaccatgaattttgatgttataaagggcaa

SEQ ID NO: 829454 - DNA, 100 bp, Homo sapiens
caaagccagactgtcactcaagaaatcgacattcaagagaaaagccttacagatgctcatgggaagggtgtgagtggcgttttgcaagaagtgatgagtt

SEQ ID NO: 829455 - DNA, 100 bp, Homo sapiens
gctcctccatctccagatcggatcacggtgagggaaagatgagcgaggagacggcgacttctgacaacgaaacatccagtcatggataaaaatgagctgg

SEQ ID NO: 829456 - DNA, 98 bp, Homo sapiens
ctgtgagaaaagcgagcctcttctgataactcaggatttacttgaaatgaaaggagattccaacctacttcagaaacccgggatggacgtggccgacg

SEQ ID NO: 829457 - DNA, 99 bp, Homo sapiens
agagtctgtgcagtggcacctgcgcgaagctggccaaagcctgcccagacggctcacctgtgcgggatggaacaaaagagatggggtttcgccatgttg

SEQ ID NO: 829458 - DNA, 100 bp, Homo sapiens
cgacaactccatcaagcctcaggagctgctgaacacagatatgtagaactcttcttgaattctacagcaggagcaagcggtggtgcttatggtagccaaa

SEQ ID NO: 829459 - DNA, 100 bp, Homo sapiens
aaaacttcactttcttcattcacaatcccaagcgccaggaccttgaagttgagctcacagcgctccttcaccactattacccaattgagatcgacccaca

SEQ ID NO: 829460 - DNA, 98 bp, Homo sapiens
attcagggtggggacttcagtgaaggagcctgccagaacaaaggccaatatataatgttgtgacatcatatctgataaccagaggtctggtatctaca

SEQ ID NO: 829461 - DNA, 98 bp, Homo sapiens
ttccttggagtttggcatgatgatcatttttgcttatctgccttatgggcttgcagaaggaatctcactctcagggtcgtcatgtcaaaacgggccag

SEQ ID NO: 829462 - DNA, 100 bp, Homo sapiens
gccaactcgagccaggctgcaaaaagagcatcctggccagaacaagccaaggagccaagacgagagggacacacggacaaacaacagacagaagacgtac

SEQ ID NO: 829463 - DNA, 98 bp, Homo sapiens
gaaggcctgaaatttgcacgaaagcattccatgttatttataggagtacaaaatttcaagctttgagcagaggctgatgaatgaaatagagtttcgct

SEQ ID NO: 829464 - DNA, 100 bp, Homo sapiens
ccgcagatcgctgtagtgggcggccagagcgccggcaagagctcggtgctggagaacttcgtgggccggtccctgagtgccagaggtggtggtgttgctt

SEQ ID NO: 829465 - DNA, 100 bp, Homo sapiens
cctatgaccggcgtcgagaatttcaactgggagaagagaagtttacctttattgagaaatgtaacaaccctcgttctgtcacattattgatcaaaggacc

SEQ ID NO: 829466 - DNA, 100 bp, Homo sapiens
gaaggcgcaatactctccagctccaccgttaccgctaatataagccaggcagtacatgcagatgctacccaaggaaaagcagccagtagcaggctcagag

SEQ ID NO: 829467 - DNA, 98 bp, Homo sapiens
taatgctgtaggccaagtatcaagcacagccaacctgagtctggaaggtgaccattgtgaggtagatattttgttctaattttccagatgaggaagct

SEQ ID NO: 829468 - DNA, 100 bp, Homo sapiens
tgtaccagtgatgacacaaaatcccagatctacctgacgggcctgcgagggttgaagattgtgaagcaatagcctaagccagtgccaatatctgcaatgt

SEQ ID NO: 829469 - DNA, 100 bp, Homo sapiens
tattcacaatctattgttcaaagaagacagttgattatgggacggaagacgaaggggaggaccaggctggcgatgaagatgaagatgatgaatgggatga

SEQ ID NO: 829470 - DNA, 100 bp, Homo sapiens
tgagacttttgcactgtaaaactttacacattgtgctattcactctgctttacaagaaatttaagatccgcattgaagacccaccccgcagaaagcacat

SEQ ID NO: 829471 - DNA, 100 bp, Homo sapiens
tggagaagaaagatgttttgcctactgttgatccggtaaatcttacaaaccattgtggttttatgggaggactacaaaaaaacaaaagcactggattgac

SEQ ID NO: 829472 - DNA, 98 bp, Homo sapiens
cggctttcaacactaccagtggccttccttatccaagagagtccagctacttgctcttttagttcccactttgatatcttacctgctggatgaaaatt

SEQ ID NO: 829473 - DNA, 100 bp, Homo sapiens
gattgaccccaaagttgcatttcctcgtcgagcgcaacccaaggaggtccctacttttacggaattaagcagagaaaatgatgaagagaaaggtagtttt

SEQ ID NO: 829474 - DNA, 98 bp, Homo sapiens
ggatccgccgtgatccaggtgctgagccgggtgctgcggctctgcgcggtccccgccagcgccccatcctgagccgagtaattccctcctggtcccag

SEQ ID NO: 829475 - DNA, 100 bp, Homo sapiens
accccagaacaccccgcagaaagtgcctgtgcatcaggctcaccagctggattccctcctgggggcttcattcccaaaacggccaccacgcccaaaggca

SEQ ID NO: 829476 - DNA, 99 bp, Homo sapiens
cctgctgcgcaacaggaacttctggatcctgcggctccctccaggtattaagggagatatcccaaagattaattgggaatcttggctactggaggattc

SEQ ID NO: 829477 - DNA, 100 bp, Homo sapiens
gatctgtccagtttgatgcctttgtgaagatgaagaatcttaaagagctattacgccttcccatacattatattagtgttatctttggttactctggctg

SEQ ID NO: 829478 - DNA, 99 bp, Homo sapiens
tctactatttcctgggatttctgctcctggctgcaagattgccacttgatgccgccaaacgcaagaaggggttaaaagtggaatgtatgttgtaataga

SEQ ID NO: 829479 - DNA, 100 bp, Homo sapiens
caaaaacaaagtaatcaaaagcaagagaatacagaagtggaggaacatttggtgcacgctccctgaaatttggcaggcagactggaggtgaagagggaga

SEQ ID NO: 829480 - DNA, 51 bp, Homo sapiens
caggcacgcgccaccactcccaggcatccaaacaattgactctacccaggc

SEQ ID NO: 829481 - DNA, 98 bp, Homo sapiens
gtttgtccccgcaggcactcacactcctgggagccggctccaggacccttttggagagaagcggggccactttgactaccagtccctcttgatgcgcc

SEQ ID NO: 829482 - DNA, 100 bp, Homo sapiens
gtttgatccagtaccagttggagtaaccaaggtcatttggatccaggattcctagcaagtgacaaaacatctggcaatgcgccactcaatgaagaaatta

SEQ ID NO: 829483 - DNA, 100 bp, Homo sapiens
agtcagcgtcaccgtggggggcaagcagtacctcctaggactctatgacacggccggacagcaaaatggaagctcctccttgcacagtgcagccccttcc

SEQ ID NO: 829484 - DNA, 100 bp, Homo sapiens
gacttccctttggatgtagcaaggaagaaattgttcagttcttctcagatgtgttcagagcaacattgttttgttgacacaagcatttagaagaaagttt

SEQ ID NO: 829485 - DNA, 115 bp, Homo sapiens
agagatcccggctcccagcccactgagtggcttcagcctcgctgctggagatatccctgttcagtactgcgcccagcccaccaatggcatggtgtatttccgggccttctccagc

SEQ ID NO: 829486 - DNA, 98 bp, Homo sapiens
gaaaaggaaccggaattgcagcagtatgtgccacaactgcaaaacaacaccatcctccgccttctgcagcagcaccttttctgctgccatgacaacca

SEQ ID NO: 829487 - DNA, 100 bp, Homo sapiens
gtgggcttggtgggcaactcgctggtcatgttcgtgatcatccgggtcatcgagcagctcggtgggaagcagctggtcatgaaccacatgcatcatgaag

SEQ ID NO: 829488 - DNA, 98 bp, Homo sapiens
ttctgggagacgcacagctaagatgccaggacatcctggaagctgggaaaaggtgtcagttgtacccgaggcgttctcagcagcagcaagtacctgtg

SEQ ID NO: 829489 - DNA, 98 bp, Homo sapiens
acttcctgttagtcctcttactgaagagccagtgcctttcaaggttctcctgaaaagaaagctgaacattcatctataaatcaagaaaatggcactgc

SEQ ID NO: 829490 - DNA, 99 bp, Homo sapiens
atactttatactcttggactacatctttctcgggctcagaagcagaatgtgaccatcatggaccaccactcggctgcagaatccttcatgaagtacatg

SEQ ID NO: 829491 - DNA, 100 bp, Homo sapiens
cagctaacaaaggcgaggagaagaaagacgacgagaacattccgatggagacagtacctaagactaatgctttctgtggacaccactgagctctgcctca

SEQ ID NO: 829492 - DNA, 98 bp, Homo sapiens
tgatatctcaaaaggtgatctggacaaaggaacaggtatctcagctctgcctgcagttgaacacaaagacctggaggagactcccacctccttcaggg

SEQ ID NO: 829493 - DNA, 100 bp, Homo sapiens
agtgctttccaggcccagcgggctttccttctgatggcctctcagtaccaacaaccccacgagggcgtctctggccgagcctctttttgtggaaaacgac

SEQ ID NO: 829494 - DNA, 98 bp, Homo sapiens
tcatctgcctttatgatgaatgcaataattctccattgagaagagagaagaacattctcgaatacctagaatgggtatagactatggtcgaagaaaaa

SEQ ID NO: 829495 - DNA, 98 bp, Homo sapiens
ttcatgtagctttggctctcctaaaggaactggccagtcatggtggcttatgcctgtaatcccaggactttgggaggccgaggctggaggatcacttg

SEQ ID NO: 829496 - DNA, 100 bp, Homo sapiens
cgcacagagccgcgggccctttgcagctgcgattttcgccctacgttttcaacggaggggcgtctctggccgagcctctttttgtggaaaacgacagcag

SEQ ID NO: 829497 - DNA, 98 bp, Homo sapiens
tacagtgcagtcttatcgaaggatgtgcatgaaggacagcctcttctcaatgatggatttgcagccgctgcaagtgtgtggaagggccgtgttcgtgt

SEQ ID NO: 829498 - DNA, 100 bp, Homo sapiens
ccagcaacttgtggacctcctgtgccgcctggagctctaccgggctgcccagatcatcctgaactgctggtacacacccccaaaagaagacggctaaccc

SEQ ID NO: 829499 - DNA, 100 bp, Homo sapiens
gatgtttcatgtgcagaaagaaagttggtcttacaggcttcactgtataaataggagaggatgagagcccagaggtaacagaacagcttcaggttatcga

SEQ ID NO: 829500 - DNA, 98 bp, Homo sapiens
aagaagcacacctgaaacatgaatttgatgcagacttacaggctgatagccctgaagagatgcacagttggattaaagcagtctctggcgccattgta

SEQ ID NO: 829501 - DNA, 104 bp, Homo sapiens
ggggcttcagcatcgtcacggacactcctgagctacagagactgaagaggactcaggagcaaatcagtaatgttcctggtacagttcagacaggacaaagtatg

SEQ ID NO: 829502 - DNA, 98 bp, Homo sapiens
gaaaatgagccatgaaccaaccaatggcgacgggcgtttattggaattggcttcggggaccgaggtgatgcctttgacttcaatgttgcattgcagga

SEQ ID NO: 829503 - DNA, 101 bp, Homo sapiens
cgtacatcggcgagggcgcctacggcatggtgtggtctctaattaacagaagatggcaaagcccagccacagcagctatgtccttcagcagctaaacaacc

SEQ ID NO: 829504 - DNA, 100 bp, Homo sapiens
catcacatccagagcgctctgctggtcacagaggacaagaattttgggcagatttgaatgccatgaacgtgtatgaaacaactgaatttgaccaactacg

SEQ ID NO: 829505 - DNA, 98 bp, Homo sapiens
acttggaagcaatgtttgaacaaactcgaagaacagctgtggaaagaagttgcaaaacactggcttgcgcgatctctggcctcttcaactgcatcacc

SEQ ID NO: 829506 - DNA, 100 bp, Homo sapiens
ggcaggctcgagtgcacggagcgtcccttccatcaggagaggtgctggagaatctggtaaaagcaccattgtgaagcagatgaggatcctgcatgttaat

SEQ ID NO: 829507 - DNA, 99 bp, Homo sapiens
gtggacaaaccaaatgaccaatcttcaagatggtcttcagagagcaactatcctccccaggataggaaaaacttgttggagacccgattgcacatcact

SEQ ID NO: 829508 - DNA, 99 bp, Homo sapiens
ctgtattggtctcctgctcctagaggcagcggaggaggaaatggcaggtcctaatcaactctgcattcgccgctggactaccaagcatgtagctgtgtg

SEQ ID NO: 829509 - DNA, 99 bp, Homo sapiens
acaaattcatcccagaaatctaagagagagttatgatgacttgtaccattggtccgttgagtcatattcagacttctgggcagagttctggaaattcag

SEQ ID NO: 829510 - DNA, 122 bp, Homo sapiens
gtctcgctccgtggccttagctgtgctcgcgctactctctctttctggcctggaggctatccagcgtgccctacgagacgctgaacaaacgctttcgcgccgctcagaagaacattgaccgg

SEQ ID NO: 829511 - DNA, 100 bp, Homo sapiens
ccattactcatggagccttgcatggactagcctacctacattctcatgcattgattcatagtgctgtgctgtggctttcattgagaagctagacgcccag

SEQ ID NO: 829512 - DNA, 100 bp, Homo sapiens
ataacatctctcccaaacttcatgtagataaaggatttgtgaacatcttaatgactaggtcctacaacgtgactttaaaaagacagcagaaagcaaaaat

SEQ ID NO: 829513 - DNA, 100 bp, Homo sapiens
gaaaacaaggtgtctgcaggaccaacctctcctctggatgctctagacggaatcagtccccaatgcctggaaattcctcattggattactgtgttttaaa

SEQ ID NO: 829514 - DNA, 100 bp, Homo sapiens
ttacaggaatcttctctcattgggtagttgtgtcaactaacatagcagagacgtctttgacaatagatggtgtggtgtttgtgattgatcctggatttgc

SEQ ID NO: 829515 - DNA, 98 bp, Homo sapiens
agcctcgcgcggcgctggagagagacaagatgtccgccagagctgcggccgccaagatttgggccaggcttagtcatctattggtatggatttatcca

SEQ ID NO: 829516 - DNA, 98 bp, Homo sapiens
aacagaagcggaacagccacagcagcctcccaaggagtctgcaagttggtcatgcttcaccccttcctccatctgctgcacctaccactgattctaca

SEQ ID NO: 829517 - DNA, 100 bp, Homo sapiens
cagctctcagatgtcccaaggacctattgctatgcagggtcaaagctgcgaaacctgtgggatcaggatgcacttaccctgcgtggccaagtacttccag

SEQ ID NO: 829518 - DNA, 100 bp, Homo sapiens
ctgatgcgatgcgggggctgctgcaatgacgagggcctggagtgtgtgcccactgaggagtccaacatcaccatgcaggacgctgccaaggtctgcagag

SEQ ID NO: 829519 - DNA, 100 bp, Homo sapiens
agcagaagctctgaatcgtgttcctgaatgaaagaagtcaggtggccgtttgttgcatctgtttttttgttattcttcctctaaatcttgttggtacaat

SEQ ID NO: 829520 - DNA, 99 bp, Homo sapiens
tggaaagttgcacagccacagacttctcagcacagagtggggactgccttccattgtgaagtctgctctcaaaattagagagatgtgtaattgtccacc

SEQ ID NO: 829521 - DNA, 100 bp, Homo sapiens
cgatgctttaacatacagccactaggtaactggggaagaagctaaacaagaatcattggagacttctaatcttgtgctttcgggtattggaagtacacaa

SEQ ID NO: 829522 - DNA, 100 bp, Homo sapiens
aaaagctggcaacttctatgtacctgcagaacccaaattggcgtttgtcatcagaatcagaggggcccaggaaaccttcatgcaatgggatcagtgccgg

SEQ ID NO: 829523 - DNA, 100 bp, Homo sapiens
gaccatcatcctcacataccaggagaacctgaccgacctccatcagtacagagatccttccgctgaggaattgagaaaactaatgatgttgcatggaggt

SEQ ID NO: 829524 - DNA, 100 bp, Homo sapiens
acccacaaacaaactacccattttcttttttggaactcatgagacctttttgcctgaattcatcaatggagactttgattctattaggcctgaagtcaga

SEQ ID NO: 829525 - DNA, 98 bp, Homo sapiens
agtgacgggtctggagtgcgtgggggaccggctgttggcggatgagtaacccgaagcccctagaggagtggtcacctgcctgagggcacttctgtccc

SEQ ID NO: 829526 - DNA, 100 bp, Homo sapiens
ccgaatcgtgcgatgacaatgtgaggaagggaaactgtctacctctcaagatgctgcttgtaaagacgcagaggagtgtcccgagactgcagaggcgaag

SEQ ID NO: 829527 - DNA, 99 bp, Homo sapiens
acgacgaggcggtgcaggcgttgaagcgcgcgggcaaggaagtgctgctggaagctgctgtaagtaaagatgattccattatttcaagtcttgatgtca

SEQ ID NO: 829528 - DNA, 100 bp, Homo sapiens
caacggagtgagagttcaaagattctttgtagcagacactgcaaatgaagctctcgaggctgctaagagactaagcagttatacttaagcatgaacattg

SEQ ID NO: 829529 - DNA, 100 bp, Homo sapiens
ctgatgtcaagttggttgctgatttccaaagtttacaggagacatatgaggccaaaaggaacgagttcctaggggaactccagaaaaaagaagaggagat

SEQ ID NO: 829530 - DNA, 100 bp, Homo sapiens
cgggacactttaagtgacggggtagacaaaagctggaacaaaagagcctctattaaggctgagtcatcactagagagtgggaagggcagcagcagcagag

SEQ ID NO: 829531 - DNA, 99 bp, Homo sapiens
aacatagagaattctgggcttccacacaactccagtgctaactcaacaggcccgatgagagaaagggaaagttaaggatgctggagcagaacaatggat

SEQ ID NO: 829532 - DNA, 100 bp, Homo sapiens
ctacttgcctaaatgaggaatgtctttcctaccatctaaaatacgaaggtttctggctgggctgtattcatcaccaaagaaaaaacttacaccaatgcag

SEQ ID NO: 829533 - DNA, 100 bp, Homo sapiens
caaggagaggaagaactagtttcccaaacagatgttaagacattcttggaagccttaccggggatggaggtatgttctgcaactcctggtggccgagcgt

SEQ ID NO: 829534 - DNA, 100 bp, Homo sapiens
ttgcagtcttgcaggccaatgatggacactccttccataatatactgttccaagtgaagaccgtgcctcaggtgggatgtgtgtgggctgaaattccgag

SEQ ID NO: 829535 - DNA, 98 bp, Homo sapiens
agtgattatgtcagccaaagctactcctactcatctattttgaataaatcagaaactggcctccccatggccacccatggaccagtcggcattcactt

SEQ ID NO: 829536 - DNA, 99 bp, Homo sapiens
ggcagaacttacgctgcgggaccccgggcactgttgctgctgcgggagaggagaaggcagagcccccccaggctatgaatgccctgatgcggttgaacc

SEQ ID NO: 829537 - DNA, 98 bp, Homo sapiens
ctgcagtagaattccttgtagataagcaactggattttttaactgaagatagtgcctttcagccctaccagactttaagaaagaaaggccttaatggt

SEQ ID NO: 829538 - DNA, 100 bp, Homo sapiens
tgaagcctcccctatctggctacagagctgcccaaggactgaccactgagcagatgctgagaaaagaccagaagactatctatagacaaggcgtcaaggt

SEQ ID NO: 829539 - DNA, 98 bp, Homo sapiens
ctgcctatggttttatggggttcacagacctggaagagcccatctctggatgccctggaggcccatgggctctaggtaccaaatatgccccaacagcg

SEQ ID NO: 829540 - DNA, 100 bp, Homo sapiens
ttaggatttgcagctccaggaagcgagatgtcgaagccgccacccaaaccagtcaaaccagagacaaagcatggaggacacaagaatgggaggaaaggcg

SEQ ID NO: 829541 - DNA, 50 bp, Homo sapiens
aaaggtgttagtaaagaagtgaagctcaatgtcaattgctgcaagcttag

SEQ ID NO: 829542 - DNA, 99 bp, Homo sapiens
tgggagtgacccaattttccaggaaggaattttacagaagctacagagaagtgttgagcaagaagaaaataaatggaaagttaaggtcgatgaatcaca

SEQ ID NO: 829543 - DNA, 100 bp, Homo sapiens
aatggcgtctcaggcctggtaaccagccgcagcttccgtactgccagtgtcagcatcaaccagacagcaattctgtggtgttcttggtcacacatttatg

SEQ ID NO: 829544 - DNA, 98 bp, Homo sapiens
gggtccagaccaaacatttccacatcaagtgtttcacctgcaaaggtcagtcttcactgtttccaatggaagatggattcttggatgatggccgtggg

SEQ ID NO: 829545 - DNA, 100 bp, Homo sapiens
ctttgcttttgttgaatttgaagatccccgagatgcagctgatgcagtccgagagctagatggaagttgagccccatatgggggttggcaggcagcagag

SEQ ID NO: 829546 - DNA, 98 bp, Homo sapiens
gcaaacaagccaatcccaggaggaaaaacgtggcatccagcagctggagggtctgtcagccatggaggtggaagtcaggtgcagctgcagcggccgtc

SEQ ID NO: 829547 - DNA, 98 bp, Homo sapiens
ctactcaacaccctaactaaaaagcagaagaaacatcttcgagatttcggcgaggagcatcccttctatgacagcacgaggtagaactaacattgaac

SEQ ID NO: 829548 - DNA, 100 bp, Homo sapiens
accagggccggaggattaccatcaccggaagtttttcgttggaatatacgttgcacatttatggcgattctgagtgtgagggcagacttctgccaggctc

SEQ ID NO: 829549 - DNA, 124 bp, Homo sapiens
atgtcatcacctgttatgagaaagcaggggacatcgcactcctgtatctccaagagatagaaagggtggacccccaaaagtacaagggcatatttaacggattctcagttacacttaaagagga

SEQ ID NO: 829550 - DNA, 99 bp, Homo sapiens
gaccaacttctttggcaagtggacattttactggctcaaaggaagcctttgacaagttgcctcagtctacggttcctgagatgcagcgtagtaatttgg

SEQ ID NO: 829551 - DNA, 51 bp, Homo sapiens
tgtcgggaaggtcactgaacctacacgaatgcagagtttgagtccagatcc

SEQ ID NO: 829552 - DNA, 99 bp, Homo sapiens
agaaaatggtgcctgctgaccttctggagttattggctagtaagaaagtgttatagttttgccgctggactcttccctcccttcccccaccccatcagg

SEQ ID NO: 829553 - DNA, 100 bp, Homo sapiens
gtgctgaccattcaaagttcagcaacacctgttaaagtccttgctcctggtgaattcggtaaccatagaccaaaagctgtcccctttcctccaacccaac

SEQ ID NO: 829554 - DNA, 98 bp, Homo sapiens
gtctggaaagctttaggagttcacagtagtgtgaaccggttggcaatggagacaagaaaagtaatgaaaggaaatcattccagaaagacagctgcatt

SEQ ID NO: 829555 - DNA, 100 bp, Homo sapiens
ttttggaagaggaaccacaagaaaatcaaaagaaacttttgcccttatcagtaacacctgaggaaccaaagaggttgttgtaaatgtggatgatgatgga

SEQ ID NO: 829556 - DNA, 100 bp, Homo sapiens
ctcatcgcgaagagaccgcccttacaaagcctgcaggagcggggtctgctccgagagtcaccggcctgagaaggagtggcctattaagagtctcaaagtc

SEQ ID NO: 829557 - DNA, 100 bp, Homo sapiens
ccttcaggctgcaccacgtggaggccaacaggagattatggagaagtctggcgaggaaggaatgcctgatcttgcccatgtcatgcgcatcttgtctgca

SEQ ID NO: 829558 - DNA, 98 bp, Homo sapiens
gctttcgcttggcgctgggcagcttcgtggaggagtacaacaacaaggctggtgagcaaatccatgtcagtctccccttatcacagcaagtagccaat

SEQ ID NO: 829559 - DNA, 98 bp, Homo sapiens
tggtggggaataaacgcctgaaagaagctacctgcaagctctatttttaccagatgctcttggctgtgcagaaactcatcactgctatatatgcagat

SEQ ID NO: 829560 - DNA, 100 bp, Homo sapiens
aaacacacgtttagccctgtcattaagttgagtacagtgttggttcgacaagtggcaacagggaaatttgaacacagagacatacacaaagggaagaaga

SEQ ID NO: 829561 - DNA, 101 bp, Homo sapiens
caccaccctcgtgtctgccaccatcttcgacttgagcgaagttttatgcaagtcattgaaattatgagactatcattcaaatggaagcattatagttcttc

SEQ ID NO: 829562 - DNA, 100 bp, Homo sapiens
aatagtctatgtataaaagtaaatgggaagctatttcctttgccttttgccatgagtccatctaacttcagcagcagtgactgtcaggatgaagaaggcc

SEQ ID NO: 829563 - DNA, 100 bp, Homo sapiens
aagtgactcaaactgtgagaacttcaggagactacctaggtggagaagcgtactgggccggcggcctgcacctctacaccccattacctttccggccagg

SEQ ID NO: 829564 - DNA, 100 bp, Homo sapiens
tgtacatgtggcacctcgtgggacaccagagaaataacagacaagtcacgctggaggtttcaggtgcagacatggccaagtccaagaaccacaccacaca

SEQ ID NO: 829565 - DNA, 100 bp, Homo sapiens
tgagtgcctggaagtttacgcctgataggttttgcacactagggaccaagaagccctcggggacactgctgagaaaagactgccgaagggaagaccagcg

SEQ ID NO: 829566 - DNA, 99 bp, Homo sapiens
tcggattgcccatgcacttgttgcagaaacagccaaggcttgcagccaatttactggagcagggatgacgtagcccagtggctcaagtgggctgaaaat

SEQ ID NO: 829567 - DNA, 98 bp, Homo sapiens
ttaataatgatagaatgaagaccacaataaaagagacctctacttagctcagcaattcttaccttctggcagccggtcaagttccccaggaaaattgt

SEQ ID NO: 829568 - DNA, 98 bp, Homo sapiens
gaagggccttactccttcacagatcggtgtgggcccatcgctggatggatctgtcagaacacggctttgggctggccctgctcaacgactgcaagtat

SEQ ID NO: 829569 - DNA, 99 bp, Homo sapiens
acaagtgaagctcaccatggctcaacttactcagttaacacagggccaccaaaccagtccagctacgggggcccagccagccagcagctgagtgggggt

SEQ ID NO: 829570 - DNA, 98 bp, Homo sapiens
gagggattacagaaaggagaacaccttatttcagatacaaggcagatccaaccatccccaccgtggtcctacgatcagtcctaccaatacctgggatc

SEQ ID NO: 829571 - DNA, 99 bp, Homo sapiens
atgtctcaagatttgaagttctaaacttgctttactgttggtccccaagagattcaacaggggccattgatcattcaggatatgttcgtccagtaccag

SEQ ID NO: 829572 - DNA, 100 bp, Homo sapiens
cttcgtcaaagttgctgatccaattggggatatcattttcaatgcccaatacccagaactgcctcccgattttatctttggagaagatgctgaattcctg

SEQ ID NO: 829573 - DNA, 100 bp, Homo sapiens
acttcaaagacgttctcaaggagaaggcagacctgggtgtgagttcttgatacgaatgaaaggccaagagtttgttgatgagattcaaggtagatatcct

SEQ ID NO: 829574 - DNA, 98 bp, Homo sapiens
ggcatcagggaggctttcagccggagaagcgagtttcagctggacccattccaacaatctcgtaaaacatggtggattactatgaagttctaggcgtg

SEQ ID NO: 829575 - DNA, 99 bp, Homo sapiens
aacggagagcagcagccgcccgcttcaaccccaggggaccagaggaactcagccctgattgcggctcagaagtgacaaaagagaattatcaggatggca

SEQ ID NO: 829576 - DNA, 98 bp, Homo sapiens
gagctcgcccaagccgcgtccccagagagcgccctgagagaacagggtggccgcttggtccagggttctcatgtatcagccatcttctgtaagggtgc

SEQ ID NO: 829577 - DNA, 100 bp, Homo sapiens
gcacttgctacgaaacagaaatttcatgttgcaccctgtgcttgaggaatccaaagccctcgtgcgctgcaacatgaagatggagctggagcaggccaac

SEQ ID NO: 829578 - DNA, 100 bp, Homo sapiens
tgatggtgtggttcgtttgagaggacttccttatagttgcaatgagaaagacattgtagacttctttgcaggatggccatttggaaacacgatgtgcaag

SEQ ID NO: 829579 - DNA, 100 bp, Homo sapiens
gaaatttcaaccacagcagatgactgcagttcagagcacctggctgcagtggaagaaagaaagatcaagtccctggtagctctcttggttgagacacaaa

SEQ ID NO: 829580 - DNA, 98 bp, Homo sapiens
gagggcgaagacgagatccagttcctgcgaactgtgccctacgagacgctgaacaaacgctttcgcgccgctcagaagaacattgaccgggagaccag

SEQ ID NO: 829581 - DNA, 99 bp, Homo sapiens
ccatcatgccttatccacctgccgctgtcaatggcaccagcatgatatcattgatcattcctcccaaagaccagatttcacgagtggcaaaaatgttag

SEQ ID NO: 829582 - DNA, 100 bp, Homo sapiens
atcacctggatgcctacgtgggaagggacctcgaatgtgggaccccagcccctctccagctcgaaatccatgacgacagagatgatggtgtggattattg

SEQ ID NO: 829583 - DNA, 100 bp, Homo sapiens
gggctttcgcccgggtcctcctagaaattccccccgaagaagactcccccacatctgggactgagtggagtagctggagtgagttcccgctgtgaaaaag

SEQ ID NO: 829584 - DNA, 116 bp, Homo sapiens
aagacaacgacacatagctgggtgtcaggctgagggttagtgagcaggccaggagtggtggctcacacctgtaatcccagctctgggaggccaaggccagtggattgcttgagccc

SEQ ID NO: 829585 - DNA, 100 bp, Homo sapiens
atgacccgcagaccaccaacctcctgtatctggagctgggagacaagcccgcgcccaacaccttctatgtagttcacctctgggggacagaggaggttgc

SEQ ID NO: 829586 - DNA, 100 bp, Homo sapiens
gtacaggctcagtctgcggccaagactccgtcctgcaagggccagatgcagatggctggagatgggtgcagatcccagggatctcgaaattctgagaaag

SEQ ID NO: 829587 - DNA, 101 bp, Homo sapiens
ggcggccgggagggggcagtcctcgccggcgagttcagcatgcaccgtggcctggcggcgagcccccggtcaccttcctccgcacggaagaggggccggac

SEQ ID NO: 829588 - DNA, 100 bp, Homo sapiens
ctttggtggccgcagacccaaaggcacctcgcgcattctcccgcctacctatcaatcatcgtgctccgctgtccagttggctggccaagggggcggggcc

SEQ ID NO: 829589 - DNA, 99 bp, Homo sapiens
aagcacgtggtgggctatggccaccttgatggtggatgcttccaaaagcatcgaagctgtccatgaggacatccgcgtgctctctgaggacgccatccg

SEQ ID NO: 829590 - DNA, 100 bp, Homo sapiens
ctacatctcccacaggaagtgtcacacagcagtcaagtttctgctttgggacaaccatacatctaattccttaaagtagttttatatgtaaaacttgcaa

SEQ ID NO: 829591 - DNA, 100 bp, Homo sapiens
cggcgagaggaggccgtccagcagatggcggatgccctgcagtacctgcagaaggtctctggagacatcttcagcaggtcctgtatggtggaagagtcgg

SEQ ID NO: 829592 - DNA, 122 bp, Homo sapiens
ctccctctgccctatgaacagcttaagcacttttaccgaaaaccttctccccaggatgttctgctgcttagccagttcatccggcctcatggaggcatgctgccccgaaagatcacaggcct

SEQ ID NO: 829593 - DNA, 100 bp, Homo sapiens
caagttccaacaaaagaatgctgccgcagccgattccacgactcttctttgcgggagaacatacgatccgtaactacccagccacagtgcatggtgctct

SEQ ID NO: 829594 - DNA, 100 bp, Homo sapiens
gagcagtaccctgatggagtcccttgcagagcacttcagcctgcgaaactgcattccagcgccagtcccagtgctcagcagtacgatgcttccagtgcag

SEQ ID NO: 829595 - DNA, 98 bp, Homo sapiens
tatcccagtacaagtccaagtacagttccttggagcagagtgagcgccgccggaggttactggaactgcagaaatcagagaagaagaaggaggttcct

SEQ ID NO: 829596 - DNA, 100 bp, Homo sapiens
tttgaatctcagagtgaagatgagttgacaccttttgacatgagcatccaggagtggcgtgctgtgtggataatgaatattggggaaggcatctctctcc

SEQ ID NO: 829597 - DNA, 100 bp, Homo sapiens
cattccaggatcttaaagaactagagagactatgcacttttgtcttcctggccagtgttttactacaatgaggatggcaagtctggacaacagccagctt

SEQ ID NO: 829598 - DNA, 98 bp, Homo sapiens
ggagcggcagcaagcgggtgctgctcatctgcctcgacctcttctgcctcttcatgggatcattttacttctccagatgaatatgatgaccctactgt

SEQ ID NO: 829599 - DNA, 99 bp, Homo sapiens
ctgaggctctgggcgcttagcctggctcacgcacaatgctggaagccaagcttgcacattctaggcagccatttggaagattcttctctgcgcatgacc

SEQ ID NO: 829600 - DNA, 130 bp, Homo sapiens
aattggccgcggaaaccgatctgcccgttgtgtttgtgaaacagagaaagataggcggccatggtccaaccttgaagatgttaactcattccagcaaactacaaagtggattgatgatgtcagaacagaa

SEQ ID NO: 829601 - DNA, 98 bp, Homo sapiens
tggagactgcagttctctatccttcacacaggctttgaaatttctgaaaaccagaagaggcaggctgcaatgactgtgagaaaagtccctaagcaaaa

SEQ ID NO: 829602 - DNA, 98 bp, Homo sapiens
tcaacatcgccaccaggaccaccttcctcctgccaggagtggtgaaaggacataggaaggagtctggggaactgtactacagcattgaaaaagaaggc

SEQ ID NO: 829603 - DNA, 100 bp, Homo sapiens
tcagagagagcaagatcattttgtgaaagaaaagaataatttaataatgatgttgcaaagagttcatgtgaaatggattttggacactgatattttcaat

SEQ ID NO: 829604 - DNA, 100 bp, Homo sapiens
ctaccatctaaaatacgaaggtttctggctgggcggtcaaacagtgagcaccactgattcctcaaccagcaaccgggaaagcgtcaagtcggaagatggg

SEQ ID NO: 829605 - DNA, 98 bp, Homo sapiens
aagaagaggacctggatgatgatgtcatcctgacagaactatgtgaatctttagaagaactacaaaacctgaatggaaaacttcgaagtgaaggacaa

SEQ ID NO: 829606 - DNA, 100 bp, Homo sapiens
acccgagaccgagtcagaacccgagtgctgcttggcggcgagtatactgcattggaacaaaaactgaaaaaattgacggaagatttgagttgtcagcgac

SEQ ID NO: 829607 - DNA, 117 bp, Homo sapiens
cccgcgccgaccgcgttcctatggacagacgcacagacacctgcagattctcaagtccaaagatttaacatctccaacccagcgctacatcgacagcaaagttgtgaaaacaagagc

SEQ ID NO: 829608 - DNA, 100 bp, Homo sapiens
aggaggtctccggagcagagccgaagctcgccggagaagaggagccccagcgccccggtttgcaaagcagctgcagaaccttggcctgaaaatgctacat

SEQ ID NO: 829609 - DNA, 100 bp, Homo sapiens
ccctgcaactaactccattcttaattgctcgagcccagaaaactatcctctaagaccagacgtgacaaggagaagcagagctgtaagagctgtggtgaga

SEQ ID NO: 829610 - DNA, 100 bp, Homo sapiens
aggaccagagcccctcacgggcaccagggcttcgccagcgggccagcaacaaagtgcaagatgagaccctttttgctcttcctgctgcatctgagcctgt

SEQ ID NO: 829611 - DNA, 99 bp, Homo sapiens
gcagaatcacagctggtgttaacgagcaaattcaacacccaacagcttccttaatagcaaaggtagcaacagcccaggatgatataactggtgatggta

SEQ ID NO: 829612 - DNA, 98 bp, Homo sapiens
caatacgcgccacaacgtccgactgcactcacacgacgtgcgctatgggtcagaattcagtttgcctgttctgtatgcaagttccgtagctttgatga

SEQ ID NO: 829613 - DNA, 114 bp, Homo sapiens
taccccctggactccctggagaagcagatggaaaaggacccctcgtccagtcattgtggaacccatggagcagtttgatgatgaagatggcttgccagagaagctgatgcagaa

SEQ ID NO: 829614 - DNA, 100 bp, Homo sapiens
ccgggccctgctgcgggggggagagccactgacgccgggaccgggaccgccgccgccgccgccaccatggtccaggacctacagctggaacgggagatgg

SEQ ID NO: 829615 - DNA, 100 bp, Homo sapiens
agctgacggtggaggttcgcggctctaacggggctttctacaagctccttccagggagatactacagcaaaccttttgttacatttcatcaaatcaatgc

SEQ ID NO: 829616 - DNA, 98 bp, Homo sapiens
gcagccgcacaccatcctgcgcgtcgtgtcttggtgctgggattacaagcgtgagctaccacacccagcgaggaagccaagtttaacgtgtgtgctcc

SEQ ID NO: 829617 - DNA, 100 bp, Homo sapiens
cttccacagcttccaccaaagggaacgttggatagaagagaatttgcagccttcaagtagccaccatcatggcagcatctgctcttatttcttaagtctt

SEQ ID NO: 829618 - DNA, 133 bp, Homo sapiens
actgtagaagaactcgcaaatcttgctgctttcctttgtagtgattatgcttcttggattaatggagcagtattggtcatcattgatgtgaagccgaaggacctagggctgcctacagaagcgtacatttcag

SEQ ID NO: 829619 - DNA, 129 bp, Homo sapiens
aggtacctgcaggacctatttgtgttcgttgatctctcagagcagttggaagtcatggtaaaataccatgaagattttgaaaaaacaaaggggagaggctttactcccgtcgtggacgatcctgtgaca

SEQ ID NO: 829620 - DNA, 100 bp, Homo sapiens
ttgaacatgccgtggaagcttctaaactttctagtcaagatccactagttcctggactatgggaactgatgactcgcccaatgtcacagatgatgcagct

SEQ ID NO: 829621 - DNA, 100 bp, Homo sapiens
ctcgaagacttgaaggtagacaaagtaattcagcctaaaagtggtgatgccaaatcttcgagtaaatcaaagcgatctcagggtcctgtccatattacag

SEQ ID NO: 829622 - DNA, 100 bp, Homo sapiens
gctgacctcggtttcctggacccattccgactcagaactgcatgaacttgcccccagacaaggtccagctgctgagccagtatgacaacgagaagaagtg

SEQ ID NO: 829623 - DNA, 135 bp, Homo sapiens
tccctggagtgtgccgaagagattcttttacatctggaggaaactgatgaaaattttcacaacacaaacgtgcagatatctgatagccctttccgttgcactcaagaggaagcaagatcattagttgaatcggta

SEQ ID NO: 829624 - DNA, 100 bp, Homo sapiens
aatatcattggaattctcaccatatgtaccaaagatgtattaggtatccagtagaaaaagcactctccagtgttcatctgtggaactggatggttcctac

SEQ ID NO: 829625 - DNA, 99 bp, Homo sapiens
taaacccccaagagtatttaactagcactgcttgtcggaggaacttgactggagatgtgtgtgctgtgatgaggaacagcatatgccatatatgagctg

SEQ ID NO: 829626 - DNA, 100 bp, Homo sapiens
ctctgcctcacccagttccaggtagacatggaggccgtcggggagacgctgtggtgtgactggggcaggaccatcaggctatttgctttctagaagagaa

SEQ ID NO: 829627 - DNA, 51 bp, Homo sapiens
gaatcctgcaaagtgatgcctcagctctctctccagatcggattcaaccgc

SEQ ID NO: 829628 - DNA, 98 bp, Homo sapiens
attcgagggcggatcctctctgacttgccttcaaggtgtgcaagtaaggacttatctccagaaaagaacacttatgaaacagaattatcccaatggga

SEQ ID NO: 829629 - DNA, 99 bp, Homo sapiens
gaaaatcatattatagatggagtaaagttcctctgtgacgagggtgcaggtatctctggggactacatcgatcgcgtggacgagcccttgtcctgctct

SEQ ID NO: 829630 - DNA, 100 bp, Homo sapiens
ataccacaatcagaccctccgatccgagtgaagcctgacaggaccggtgtggtcacggatggtgtgaagcactccatgaaccccttctgtgagatcgcgg

SEQ ID NO: 829631 - DNA, 100 bp, Homo sapiens
ccaatgggtattcagaacattttgtggaattcgtgaaacttgtccgtgccaaatttcctgaacacaccattatgtcactcagcctctgaagaagcttcgg

SEQ ID NO: 829632 - DNA, 100 bp, Homo sapiens
gctcctggagctgtgagctctgctacttcaagtaccaggtcctggcgatcagcaccaagaacccactgcaggtttttgccaatccagaagactgtgtagc

SEQ ID NO: 829633 - DNA, 100 bp, Homo sapiens
gaaaacgtcttgcacgtgcgaggggcatttcaggagtttcctgtctgtcaggtcgttcatgcccaacttggtgcctcccaagatccccgatggagagaga

SEQ ID NO: 829634 - DNA, 100 bp, Homo sapiens
ccactctgtaatgggcacaccacagggatggatgtcctctgggcagggacccccatggtgactatgccagtgagaaagatcagtctaaagaaaaggagaa

SEQ ID NO: 829635 - DNA, 98 bp, Homo sapiens
gccaatcaaatgcctggaagccgtgatcctgggaatcacggatgataccatcggggaccttaagaagctgattgcagcccaaactggtacccgttgga

SEQ ID NO: 829636 - DNA, 98 bp, Homo sapiens
ttctcgctgatcgcctaacttctactgacgaagcttggaagttgcagaagccttcaagatggtcagcaaggccagcagtccacagcccaggtcaaagt

SEQ ID NO: 829637 - DNA, 100 bp, Homo sapiens
tgatgaatcagagagtgcttcgagatggcagatgttctggctacacaggaaccctggattgcttgttacaggtgaacctatgggtcgtggaacaaaagtt

SEQ ID NO: 829638 - DNA, 100 bp, Homo sapiens
gatttgaggagctgctgctgcaggcccgccaagctgccccctgtgtgctattctttgatgagctggattcgattgccaaggctcgtggaggtaacattgg

SEQ ID NO: 829639 - DNA, 98 bp, Homo sapiens
tgacctgcctccctatgacccacagtgtggcatccagagtagcgagtggggtggaagacaacccgtgagtattacaccttcatgtgggttactttgcc

SEQ ID NO: 829640 - DNA, 100 bp, Homo sapiens
acaattccatcagccacattgcggagggtgccttcaagggactcaggagcctgcgagtcttgaaagaccacagcaagattctttcattcgtctcctccta

SEQ ID NO: 829641 - DNA, 100 bp, Homo sapiens
ctttgcctttatgcataccttcttccaagcatgtacagacaccagattttttcctggaagttgagccccatatgggggttggcaggcagcagagaggccc

SEQ ID NO: 829642 - DNA, 98 bp, Homo sapiens
cgtggagatggacaggagacctggaatcattgttggtccataattcagcagccaaatctttccctcgaaggtttgttttgcctttaaatgtcagtttg

SEQ ID NO: 829643 - DNA, 100 bp, Homo sapiens
ttatcctctcaaatttcagacttgcttactaggccaacaccagctttaaatagtggaggcggaaatatgaccagtataagactccaatggagaacattgg

SEQ ID NO: 829644 - DNA, 100 bp, Homo sapiens
gccctggaatcacttttgagattggtgctcgtttggaggcactggactacttacaaaaatggtccaactggcccaccttcaacactccctctaagcaccc

SEQ ID NO: 829645 - DNA, 100 bp, Homo sapiens
cgcggcagtatccttggggcactgtgcagggtacagcccacgcttgatggaaaaaattctccaaatggctgaaggtattgatattggggagatgccttca

SEQ ID NO: 829646 - DNA, 100 bp, Homo sapiens
aaggaactggctaccgttcggactatttgtagtcatgtacagaacatgatcaagggtgttacactgggaaaaagacctcgatgaagttctgcagacccac

SEQ ID NO: 829647 - DNA, 98 bp, Homo sapiens
agatctgtaaaagcctcttctgtgctgcgtctcaactcagagcttctcgaaacaagtctgagaagaagcgtcgggaccagttcaatgttctcatcaaa

SEQ ID NO: 829648 - DNA, 100 bp, Homo sapiens
tcttcaccaaatcaaagctttccattccagaactctcctatatatgttttaagataaaattggctgcagcattggcaagatgtcgaatcaagcatgatgc

SEQ ID NO: 829649 - DNA, 98 bp, Homo sapiens
tgcccgggctgcgggaggggaggagagcagagaacgtccccaggtactccaaagattcaggtttactcacgtcatccagcagagaatggaaagtcaaa

SEQ ID NO: 829650 - DNA, 100 bp, Homo sapiens
tcgagcacacagtgacagcaacctgtctgcaagtgcagcagagcggattcgggattcaaaagcaggttggtctcctcttcatattgcggcttctgctggc

SEQ ID NO: 829651 - DNA, 98 bp, Homo sapiens
gggctgggctgcagcaagccgcacctggagaagctgaccctgggcatcacgcgcatcctaggtcatcaccgagtggtcttctcacatcatccttcagg

SEQ ID NO: 829652 - DNA, 99 bp, Homo sapiens
ccacaccaaggggctggaatgcaacttcggcgccagctccaccgctctgaaggggatctgcagagtctccggagtagagatgaagagagaatttctaaa

SEQ ID NO: 829653 - DNA, 100 bp, Homo sapiens
acatctctagataacagtctgcactttcacccgtttcagggccatgtttatgagtggactaagtgaaagcaaacaaacccatgtacacctgaggaatgtc

SEQ ID NO: 829654 - DNA, 98 bp, Homo sapiens
ggagacagtgcaggacatcgtgtaccgcaccatggagatcttccagctcctgaggaacatgcagatgagcgtgaagccgtgcagaagaagaccttcac

SEQ ID NO: 829655 - DNA, 99 bp, Homo sapiens
aggaagttcacctggagcctatatcatctcagagcatcagggtcacatggaagggacaggccttcagtatttggcatcacctttacatggagcacaaag

SEQ ID NO: 829656 - DNA, 100 bp, Homo sapiens
aaaaccctatctcaagaacttgttaacctccggggagagctaggttgctgaaaagccaggagtcaaaatgactgagcgctttgactgccaccattgcaac

SEQ ID NO: 829657 - DNA, 98 bp, Homo sapiens
agacgctccaggatcttgtctacgatctctccacctcagggtctggctcagtgtcaacctaagaaaaagtctacgccactgaagtatgaagttggaga

SEQ ID NO: 829658 - DNA, 99 bp, Homo sapiens
aaagctcatggcccaccagctagaaaggcaatggtggcttgctatccgggaaatggaacaggttatgttcgccacgtggacaaccccaacggtgatggt

SEQ ID NO: 829659 - DNA, 101 bp, Homo sapiens
ccagctacttaggaggctgaagcaggagaatcgcttgaaccccggaggtggaggctacagtgaaaggtgtagcagtcactcggcctacacccacagcatcg

SEQ ID NO: 829660 - DNA, 100 bp, Homo sapiens
gattccggaaaaggtgccaagagcttagttgaactccttgacatggatttgattgacatactttggaggcaagatatagatcttggagtaagtcgagaag

SEQ ID NO: 829661 - DNA, 98 bp, Homo sapiens
actactttgtgatgacagccaagaagcagtgcctgctgcggctgggggtgctgcgccaggggaggcacacgatccgaggtccttttagtctcagagga

SEQ ID NO: 829662 - DNA, 99 bp, Homo sapiens
acggaagttatagtaaagagcatactccaaggattgagcttctactccagagccagcgccctgaggtggaggagatgatccgagacatgggtgtgggac

SEQ ID NO: 829663 - DNA, 100 bp, Homo sapiens
gggctccgctcttgccttctccacacttgtttgttgctgatcccacaccctttcatattcaagctgaagtgacgatgaaaacaaatttctttggtacccg

SEQ ID NO: 829664 - DNA, 100 bp, Homo sapiens
actgaggagctgcacctgatcacctttgagaccgaggtgtatcaccaaggcctcaagattgacctagagggcttgtcaatgaggcagatcagattcaggt

SEQ ID NO: 829665 - DNA, 98 bp, Homo sapiens
ccgtgtcctggggaagccaagacaggaagagcctgtcaaagaagcacctggaaaacgaaagaaggaaatggccaaacagaaagcagctcctgaagcca

SEQ ID NO: 829666 - DNA, 100 bp, Homo sapiens
tatctcttcaagtacatcataatcggcgacacagaacatccagtcatggataaaaatgagctggttcagaaggccaaactggccgagcaggctgagcgat

SEQ ID NO: 829667 - DNA, 100 bp, Homo sapiens
ccgccgccgctgccgcttccaccacaggaacaagcacatcatgattgacttggggactggcaacaacaacaagattaactgggccatggaggacaagcag

SEQ ID NO: 829668 - DNA, 98 bp, Homo sapiens
agagggaggcccgtcccacggtctgtggctacggatcccaggaccctcttcgcgggcgattcgcgtagcctcaggttttgctgttactgctcagtgta

SEQ ID NO: 829669 - DNA, 99 bp, Homo sapiens
tcaggtatctgcccaaactggaacttatgctgtagacatttctttgtggtttatctaaaaaccaaagtctttcccagggaactccgatgaagtgttcca

SEQ ID NO: 829670 - DNA, 100 bp, Homo sapiens
aagaacctgagacatcagcatatatgtcaactctaccatgtgctagagacagccaacaaaatattcatggttcttgagtctcacaccattttgctggtac

SEQ ID NO: 829671 - DNA, 74 bp, Homo sapiens
gctgacatatgaaggactcattgatgaaatttatggcattcagaacaatggagttttaacattgaatgcggaga

SEQ ID NO: 829672 - DNA, 98 bp, Homo sapiens
tttgtgaagctgggaatcatttcatcaatgtaatgttgtctcatcccaatcacacagatgttgatggcatggacctgggcaaaaaggtcagcatcccc

SEQ ID NO: 829673 - DNA, 98 bp, Homo sapiens
cttacacaatgggcccatcctcagcttctcggagttcatcaaacagattctggaacttttcaaagcctgactctcttcttgaaacagtggagcatcat

SEQ ID NO: 829674 - DNA, 98 bp, Homo sapiens
gtcggatagacaataccacaacaacacattttgcagagacgcaagatggctgtcctctctaaggaatatggttttgtgcttctaactggtgctgccag

SEQ ID NO: 829675 - DNA, 100 bp, Homo sapiens
cacttcctattccactggattgggaaagaccatggcagacctgtgaccgcatcaagcagtcagcagctggcaccaagcgtcgggtgtttatcattgagac

SEQ ID NO: 829676 - DNA, 126 bp, Homo sapiens
tttagtgactgctgaagatggtgaaggagctggagaagcacggagttcgggggatggcacagaatgggggtctcttgcaacgtgtgagctgcctcttgccaagagtgagtggcaaaagaaactaac

SEQ ID NO: 829677 - DNA, 100 bp, Homo sapiens
cctgttgcacatcttgtaaaattggacaatggctctttagagagttatctgagtattgacagtcagatggagacctcgtgccaaattacatttgagtttg

SEQ ID NO: 829678 - DNA, 98 bp, Homo sapiens
tgatgactcaggctgtgctttggaagagtatgcctgggtcccgccgggtctgaagcctgaacagccctgttcacagagacaccccatgacatgacagc

SEQ ID NO: 829679 - DNA, 100 bp, Homo sapiens
gccaatgttggtgctggcaaaaaggcacaccctctggaagcgggtccaaggtgctgtcacccctctgctggcgagcatgatatcattcatcgacagagac

SEQ ID NO: 829680 - DNA, 109 bp, Homo sapiens
ggcaactgcgatgtctgtggactgtcttgggcagcatgcagtgctttctggctcctcagagaaattttgaaattgccttcaagatgtttgatttgaatggagatggaga

SEQ ID NO: 829681 - DNA, 117 bp, Homo sapiens
ggagagagatgttatcatgagggaattccggtcagggtcaagtcgtgttctgatcactactgacttgttgataaccttctgttcggtgatgaaattatcactaatggttttcattcc

SEQ ID NO: 829682 - DNA, 98 bp, Homo sapiens
gtcagcaacgatgtgggcgcagacgtcagcaagtccatgtacctcacggttaaaatatgagcccagaggacctggtcggcccttgtaccaaagaagaa

SEQ ID NO: 829683 - DNA, 100 bp, Homo sapiens
gttctaacgtgcctgatctactgagaccaaggatgaccaatgactcagaagggaaaatgggatttaaacacccaaaggaaagaccacagcaagattcttt

SEQ ID NO: 829684 - DNA, 98 bp, Homo sapiens
attaagaaagcagtacctgaagcacctactcctgttcctaaaaaagtggaggcaccaccagctaaaggattgtcaccagacctgcaatctatggagca

SEQ ID NO: 829685 - DNA, 99 bp, Homo sapiens
tggccagttatttgcctcagtaaaagaagctggagtggaccagagaaattgcttgctttagatgaactcattgatagttgtgaaccaacacaagtaaaa

SEQ ID NO: 829686 - DNA, 98 bp, Homo sapiens
ccaggacagtgggaagagtggctggaggaattcagtttcttggggagttggccaccctgttcaagggcttaggagaaagtcaacacacttcgcaactt

SEQ ID NO: 829687 - DNA, 100 bp, Homo sapiens
tcatgcctataatcccagcacttttggaggctgaggcgggcagatcacttgagatcaggagttcgagaccagcctgtcgagtaatcctgcctgtgtctgt

SEQ ID NO: 829688 - DNA, 100 bp, Homo sapiens
gaatatgccaaaaatggagaaatttttgataggagcatgctgctatgtggaatgttcagctttaacccagaagggattgaagactgtttttgatgaggct

SEQ ID NO: 829689 - DNA, 98 bp, Homo sapiens
tctggagccagtcttgaggtcctacatctccgaaagcaagctcttctagaagttggtaagaagagttcctgggtcaagtggtcaccttcataaaaccg

SEQ ID NO: 829690 - DNA, 100 bp, Homo sapiens
caagaggaagtgatattattgtagatctagaagtcactttggaagaagtatatgcaggaaattttgtggaatttgcccagtatgcggagatcgtccactt

SEQ ID NO: 829691 - DNA, 74 bp, Homo sapiens
gaagcctataatatttgtcacctgaactacttcacattttccccaatatatgctgttaaaaagaaagctggctt

SEQ ID NO: 829692 - DNA, 100 bp, Homo sapiens
agatacatcgtggaacacgtagatctgggtgcatactattatagaaaatttttctaccagaaggagctcagccggtctatcagtgtcgatttagcagaaa

SEQ ID NO: 829693 - DNA, 104 bp, Homo sapiens
ttcggggaaatggctgcgagaccctagaggcctgcggcctgcggggtcgggccccggctcagtggtcccaggcagctcgggtgtcggaacccccagacagttca

SEQ ID NO: 829694 - DNA, 100 bp, Homo sapiens
agttctccaatgatatctacagcacctatcacttgttccctccaagacaactgaatggtgtcatggagaaactccagctgggcccagagattctgcagcg

SEQ ID NO: 829695 - DNA, 98 bp, Homo sapiens
ggaccctaacgacaggcgcctccggcccatttacgttggtgcttcccgtgctgctgttgatgctggctttgttcccaatgacatgcaagttggacaga

SEQ ID NO: 829696 - DNA, 100 bp, Homo sapiens
gacagtttgtgccagctctccagagagaaaaggaattcgaatttagagtttaatttctcagagcattctctccaggaagaatttttacagtatctcaaag

SEQ ID NO: 829697 - DNA, 99 bp, Homo sapiens
tgtgcgatgtgcggaagggcacctccacccgcccctgcagatcaagtcagtagtggcaccagagcatgtgaagggctacatctacgtggaggcctacaa

SEQ ID NO: 829698 - DNA, 98 bp, Homo sapiens
aaactcctctccaccagcgccaagagcaattaatggatgcctcgaagttgacgtacatatatattcagaaatgttttgccacctgagacctatgagga

SEQ ID NO: 829699 - DNA, 98 bp, Homo sapiens
gtctccacaccagcggcagcatgcatctgatgctctctctccagtccttgctgaagagactttccgttacatgaatgatgttgaatttgaagtatcat

SEQ ID NO: 829700 - DNA, 100 bp, Homo sapiens
cctgaagccggcggacggttttcgtacgggcggccgtgcgcgaggcgagatgctaaagaaaacccttatggcgaggatgacaataagagtccattccccc

SEQ ID NO: 829701 - DNA, 98 bp, Homo sapiens
cagcggaagaccaaagaggatgagaaggacgacaagcccatccgagtgcctaagtgtctagagagctgagtgggttgcctcggatcggccaggcctgg

SEQ ID NO: 829702 - DNA, 98 bp, Homo sapiens
tgagcttggcgcacgggccgaccaggccgcagcctgggattccccagggacccccccggagccgccgcgtctcccatggacttgcccggggactccag

SEQ ID NO: 829703 - DNA, 100 bp, Homo sapiens
gacggcttgttgcgggcacttctcacccctgagaatctgggacctcaacagaatttcagaggcaggaaagtgtccggtcccagcataaaggtatccagtt

SEQ ID NO: 829704 - DNA, 100 bp, Homo sapiens
catatctatgagatttgaagtatacggttgcaagataacaggtttcaggctctgtataactatactcccaggaatgaagatgagctggagctcagagaaa

SEQ ID NO: 829705 - DNA, 98 bp, Homo sapiens
agcggagatgagaagaagatggagagagtgagcgaaccctgcccaggctccaagaagcagctgaagtttgaactggagtccctggatgccctagagcc

SEQ ID NO: 829706 - DNA, 98 bp, Homo sapiens
attttttgactgctctgctcctctatgctggacatcaaatttccaggtaaagaagcagctttgaatctgagcttcatatcgaaagaagagatgaaaaa

SEQ ID NO: 829707 - DNA, 98 bp, Homo sapiens
tgaggaggcctcggttggatgcgaaggagctgcagcatccagacaatgactgatgtggtgggtaacccagaggaggagcgccgagctgagttctactt

SEQ ID NO: 829708 - DNA, 98 bp, Homo sapiens
gatgaagaaggcttggaacccattggaaatgtccatccagttgggagctatgagtcctctgaaatgaacagcatacctaaaagtggtgatgccaaatc

SEQ ID NO: 829709 - DNA, 100 bp, Homo sapiens
gcagcaattgtacgtgcatttccaggggtcagttgtccagttcatccctgagccttgagctcccagtcgcaggaccctgatgctcccataagacagaaaa

SEQ ID NO: 829710 - DNA, 98 bp, Homo sapiens
gccggtcgctggcagctgagcggcggaacccttcgctggcgggagcgcggttcggggccgcagagatccgagcagttggcagactaaaaagagagcgg

SEQ ID NO: 829711 - DNA, 98 bp, Homo sapiens
ccctcggacggccacgagactcggacatagggcctgattacattccaacagaggaagaaaggagagtcttcgcagaatgcaatgatgaaagcttctgg

SEQ ID NO: 829712 - DNA, 133 bp, Homo sapiens
gtgcctgtcttcagatcttcacagcacagttcctgggaaggtggagccaccagcctctccttggaaccaggaaagcgttctcagctgtggaggatgacaggaacaggaatgctggcccatgagggctcctcag

SEQ ID NO: 829713 - DNA, 99 bp, Homo sapiens
acagcttaggaccagaagcctttcgcggagaaaaggctgacatgcccgtcctatatgacaggaataggaggccttcaagattttgtgctgaaatctgca

SEQ ID NO: 829714 - DNA, 100 bp, Homo sapiens
ccatggacctgaaggagaagcacctgggcccggcaggaagatgggctcccgtggacagggactcttgctggcgtactgcctgctccttgcctttgcctct

SEQ ID NO: 829715 - DNA, 102 bp, Homo sapiens
gcctccaaatgtgaattcctcagtgacagcacagcctgctcaaacttcatatttaagtacacattttggaactttatacccaagaatttatttgaacaattc

SEQ ID NO: 829716 - DNA, 99 bp, Homo sapiens
tgatgatggaatcttggccaaaatcgtggttatcctacctacaaagaaaaagtaaagaaaaggcctggaggccgcccagaagtgatctacaactatgtc

SEQ ID NO: 829717 - DNA, 98 bp, Homo sapiens
agggagaaaatggaagacagggaattccagggcaacaggatgagcagaagggtacaaatctgcctttgggaaatacatctgaaatgcagagataaaca

SEQ ID NO: 829718 - DNA, 99 bp, Homo sapiens
gcagccgtagacaccagctccgaaatcaccaccaagaaagacgagaatccaggacttgaatcgtatcttcccactttctgaggactactctggatcagg

SEQ ID NO: 829719 - DNA, 99 bp, Homo sapiens
tagaagccaatgtggaaagctcagaggtgcacgtcgaaagagccactgaacagttacagcgagctgcttactatcagtaagagatgctaaaaaccttgt

SEQ ID NO: 829720 - DNA, 98 bp, Homo sapiens
aaatacagtgacagcacaggtcacagtaaggccaaaaatgtgcatactcacagagttagagagagggatggtgggtaatgccctgtacttcaagtctg

SEQ ID NO: 829721 - DNA, 99 bp, Homo sapiens
gctaacagcctgccagcccctcctcagatgcccctgccggagatccctcagccctggctggtaaagtgaatgccgaagacagaagatttggatgataca

SEQ ID NO: 829722 - DNA, 98 bp, Homo sapiens
gaaggcactcaaaagtggggggcaggaaagagcttctcgaaacaagtctgagaagaagcgtcgggaccagttcaatgttctcatcaaagagctcagtt

SEQ ID NO: 829723 - DNA, 100 bp, Homo sapiens
gtattagatgatgacagagaagatctttttgcagacatatctgaagagatggattaagaatgctttggattaaggattgtggagcacatttcaatcattt

SEQ ID NO: 829724 - DNA, 99 bp, Homo sapiens
tccaaaaaatgagacttctagcaaagattatttgccttatgttatgggctatttgtgtagcagaaggttgccgaggagcccaagtagaagaaatatgga

SEQ ID NO: 829725 - DNA, 100 bp, Homo sapiens
tgttcccatcatccaccgcgaccttaagtccagcaacagtttgccaataggattatcctgctgccatcatgtcttggtttgttgatcttgctggaaaggc

SEQ ID NO: 829726 - DNA, 100 bp, Homo sapiens
tcctatgactcagacctgggcacagcaaatgctgaggactcagaccagtctctgcaagactgctgggcatgctgtgtgcttgcatcgtgttgtgcagaag

SEQ ID NO: 829727 - DNA, 100 bp, Homo sapiens
aaaaagaacatggagtggtacctcaagcagacaacgcaacgccttcagaacgatttgaagctgattttcacacccgctaccactgtggctgctgtacagt

SEQ ID NO: 829728 - DNA, 99 bp, Homo sapiens
caaactggaaaagaaaagagaagttgcctcaggttacgaggtcttggcacaattatatgtgtaatagttgtggaaagtaaaaatgtagccctaccaaaa

SEQ ID NO: 829729 - DNA, 99 bp, Homo sapiens
aaagctattctgggggcaacagagggtcagagcacttactctaggcagatcaagcaagttgaagatgacattcagcaacttctcaagaaaattaatgag

SEQ ID NO: 829730 - DNA, 98 bp, Homo sapiens
atcactgcaccttaaaaacaaaagattgagctgcactgtattccttgagagtaacacatgcgcactgtggattcctttgtgaatacataaaaggaaaa

SEQ ID NO: 829731 - DNA, 115 bp, Homo sapiens
cttccatcggcgcactggacagaagtgtgccctgaaggtctgcgagctctgcaagggagcggcccctcctgacagccccgtggtctactcggacagggcaggctacaacaagcag

SEQ ID NO: 829732 - DNA, 100 bp, Homo sapiens
accggctgagcccccatcattgggagaaatccccactcctccaagaaccaacccccaaattggctgggacagacagcgtggaagatgaactggagatggc

SEQ ID NO: 829733 - DNA, 100 bp, Homo sapiens
attatctttcgggaaagctctctggggcaggaattaaacaaccaccatgtcgagcaaaaaggcaaagaccaagaccaccaagaagcgccctcagcgtgca

SEQ ID NO: 829734 - DNA, 100 bp, Homo sapiens
ggcggcatttgattgtattgatgatactaagcttgtgaagcagataatcatatcagattcctacaggaagcaagtagtaattgatggagaaacctgtctc

SEQ ID NO: 829735 - DNA, 101 bp, Homo sapiens
aagagcaatcagtaccatctggttgtctaccttcataacaacaatatctctgtagttggatcaagtgacttctgcccacctggacacaacaccaaaaaggc

SEQ ID NO: 829736 - DNA, 99 bp, Homo sapiens
ctgggcctaacctgatcgcaattgggtctagtgaatctgcacagaaggcccttaagtgaaacaaagagtcctcttcgtggaaaagaaaaaaatacgctc

SEQ ID NO: 829737 - DNA, 50 bp, Homo sapiens
caagagggaacacgactggaagatgagcaacaaggctttttgcatttggg

SEQ ID NO: 829738 - DNA, 100 bp, Homo sapiens
acccagcaagatatgcagtccaggtactaggttttgacaagcttgcatcatgcgtgagtataagctagtcgttcttggctcaggaggcgttggaaagtct

SEQ ID NO: 829739 - DNA, 100 bp, Homo sapiens
ctccggcagcggtagcacgagtgcgggcagcagcagccccggggcccggagagctgttcgggggtcttgtctggattttggttgcctcctccaatgttcc

SEQ ID NO: 829740 - DNA, 100 bp, Homo sapiens
aatattagcatgtggcaatgatgattgcagaattcacatatttgctcaacaaaatgatcaggagtccttcaataatgttaaacagtggctgcaggaaata

SEQ ID NO: 829741 - DNA, 100 bp, Homo sapiens
ctgctgcctatatgaagtctttgagaaagtatttaaaagacccaactcagcccatcttagaggccttggacaaggacagctcaccaaaggatgacgtctg

SEQ ID NO: 829742 - DNA, 100 bp, Homo sapiens
attcaggcacttatggccatttcagccaatttgcttgctgaaaatggtcgattaagcaatacccaaggagtcgtttctgccttttctaccatgatgagtg

SEQ ID NO: 829743 - DNA, 100 bp, Homo sapiens
cggagccagctatatccagaggtgccacccgaggagttccgcccctttctggcaaagatgagggggattcttaagctgagtcatccaatggtggctattc

SEQ ID NO: 829744 - DNA, 100 bp, Homo sapiens
atgtcatctccctgctggagcaagaggcagagctgtgggcggtggagtctagacttccccaaggcgtgtacccagggtgaccatcgggatgaggaggaag

SEQ ID NO: 829745 - DNA, 100 bp, Homo sapiens
tggagaatggctggtctcctactcccagatgcatccgtgtcatctcaaatatctatcagtgtagaagagtgggaagacaccaaagactccaaagaacaag

SEQ ID NO: 829746 - DNA, 99 bp, Homo sapiens
tcaacgcgggagacttccacggcctgcaggacatgaacaagctgagtggaggcggcgggcgcaggactcgggtggaagggggccagcttgggggcgagg

SEQ ID NO: 829747 - DNA, 108 bp, Homo sapiens
ccaaaacaaaggggatttggtgatggaggctttgttagaaggaatacaaaatcgagggcatggtggatttcacctgtgtacacgatggcgagagtgaggctgaattaa

SEQ ID NO: 829748 - DNA, 100 bp, Homo sapiens
ttttggatcaattaccagtgctaagatcctgaacaactacctccagtttgaggtgtcccacggcccctccgatgtggagtccgtgatgctgtccgggttg

SEQ ID NO: 829749 - DNA, 100 bp, Homo sapiens
caagaaaatcacctcgtttaatggcacaaggtaaatatgctgaagatatatttggagaattattcaatgaagcacatagtttttccttcagagtcaactc

SEQ ID NO: 829750 - DNA, 99 bp, Homo sapiens
ggacggcgtggaccacatagacatttacgcggatgtcggcgaagagttcaaccagttcagacttggttccttcaacctagagaaagttgaaaacccagc

SEQ ID NO: 829751 - DNA, 98 bp, Homo sapiens
tttccagccttccaagctctactgtgacttcagagacactgccaagcagccttagccctagtgtagagaggtcctgctgtactagccaccaaagcagc

SEQ ID NO: 829752 - DNA, 100 bp, Homo sapiens
cactggactcatggaggctgagcatttattcagaacgaggtcactcggacactatggtgttcttttacctgtggattgtcttttatatcatcagttcctg

SEQ ID NO: 829753 - DNA, 99 bp, Homo sapiens
acaaaaatccagaagtacaagcagtctgttttgcacagtaataagttgactcacacagacttaaagcctgaaaacatcttatttgtgcagtctgactac

SEQ ID NO: 829754 - DNA, 99 bp, Homo sapiens
cacatcttcccagctttggttggaagacctattatcagatcaaccaccaaagtgggaaacattgaaatcaagctaaccatctcagtctttcctgaggac

SEQ ID NO: 829755 - DNA, 51 bp, Homo sapiens
ggcgacgcctttggcggtaaattcggactattgggaagaagttacctgcaa

SEQ ID NO: 829756 - DNA, 98 bp, Homo sapiens
aaacagcttaacaactgggccgtgtataggttgtcaaaattcacaaggcaaggtgactttgaaaggaaccttggcagctctgaacttcagtttttgcc

SEQ ID NO: 829757 - DNA, 100 bp, Homo sapiens
ttttctccctgaggacaacctgagggagagtcacaccgggacagctcatgtcctatattcagctcttcaagaacaacctcaaagctctaatgaatcattg

SEQ ID NO: 829758 - DNA, 101 bp, Homo sapiens
aggattttattactggcagcatgtatatcttttgtagctacagcaagctgggtagcaggcagatccaaaggatatcatgaagtttccagggcctttggaaa

SEQ ID NO: 829759 - DNA, 98 bp, Homo sapiens
ctacgcgagcgccgcgaacttggtggccagcgccgcgcccggggccgtgcgctctcgggccactcggccgcagtctgaagatgatgagaaactgaaaa

SEQ ID NO: 829760 - DNA, 98 bp, Homo sapiens
gcggccggcctgggcaggtgtcttcctcgagaggcaggcaggggatcccggacattgcagtgcttttgtccacaaaggctgccgagaaagtctagcct

SEQ ID NO: 829761 - DNA, 129 bp, Homo sapiens
agcttcaaatccagaagatgaaacacagcatctgcttttccacaaccagtttataagtgctgttaaatatgtgggccctgtggtaggaggctggtacaaggttttggatcggttcatccctggcaccac

SEQ ID NO: 829762 - DNA, 100 bp, Homo sapiens
ggggtcagagtgccggaccccagcacacagaagccgagacggatcagagccacacacaagtgtcccagtaccggcaggatccctccctgatcatgcggtc

SEQ ID NO: 829763 - DNA, 100 bp, Homo sapiens
tgtgctgaacgggaagggcctcggcactggtaccctttacatcgctgagaggtaactcgggaccaaatgaagatgtttatacagcaggaatttaagaaag

SEQ ID NO: 829764 - DNA, 98 bp, Homo sapiens
tgatggagcccagcagcattgagaaaattgtagagattgatgctcacatagcactgggttctaatcttcacgtcgaagtgaagggttatgaggatgga

SEQ ID NO: 829765 - DNA, 98 bp, Homo sapiens
ttccgcaggccgtttccaccgaggaaaaggaatcgtatcgtatgtccgctatccagaacctccactctttcggttaatgttgaagaaggaaaatgcgg

SEQ ID NO: 829766 - DNA, 100 bp, Homo sapiens
gaccgaggcccccctgaaccccaaggccaacagagagaagatgactcaggcccagaaggatgtggatgctgtggacaaggtgatgaaggagctagacgag

SEQ ID NO: 829767 - DNA, 100 bp, Homo sapiens
tggcgtctcttcgacatgccaaatggtttcaggtgtacccttcagccaagccaatgatcaaattccaatcaccctatgaggaacagttggaacagcagag

SEQ ID NO: 829768 - DNA, 100 bp, Homo sapiens
ctgttgggccaggccagtcatgctagaactgattcgcctttgccagtctcatctcgtgtctgctttgttaagttccatgatccagactcagcagttgtgg

SEQ ID NO: 829769 - DNA, 115 bp, Homo sapiens
ataatcatagctgactgccaggtttacctggctgtgctttcatttgtaaaacaagaattgtcaggtgctggctgcaggattcaacctcccggaggaggaggaggaggaagaggag

SEQ ID NO: 829770 - DNA, 100 bp, Homo sapiens
ctaatgttttccttcagcaaggacaaagatgacgatttatgaagactcagttgcaacgcatcttacaaaaatcctcaattctgatgaacatgcagtggtc

SEQ ID NO: 829771 - DNA, 98 bp, Homo sapiens
gagaaataaggacaaaagccaagaggaggacagttcgctacacagcaatgcatcgagtgctgtccccggcataggtccatctctgcagaagccatttc

SEQ ID NO: 829772 - DNA, 100 bp, Homo sapiens
tttcattgaaggaatcattgctcgtgggaacgcttattcaacggcaaaagggagtgcatccgccccaacccttttccccctcgtctcctgtgagaattcc

SEQ ID NO: 829773 - DNA, 98 bp, Homo sapiens
ggaccagttattaatgtgtgccatttatgtgatggcaaagtttgtgaagaaatatgggaacctttttagcttggagcttggtgacatatctgcagttc

SEQ ID NO: 829774 - DNA, 99 bp, Homo sapiens
ggcttagcgcactggaggagcggcgggcttcagacaggatgaccagtgtcccagtgaaggaacgagtgaaggtgtctcagaactggagactggggcgct

SEQ ID NO: 829775 - DNA, 100 bp, Homo sapiens
aggattataatgagactgactggtcccaagaattcatctctgaagttacaggagtccatagaggccactgtattctattgaagaacatgtctaacagtaa

SEQ ID NO: 829776 - DNA, 100 bp, Homo sapiens
gtgctcaattttctggctccctcgactggttgatcagcagattggaaagactggaagcttcttcagtgaactttgaggcgctgatcatcaccatgtcggt

SEQ ID NO: 829777 - DNA, 100 bp, Homo sapiens
cttgcttccctttcaccttctgccatgattgtaagtttcctgaggcctctccagccatcctgaactgatccactagttcctggactatgggaactgatga

SEQ ID NO: 829778 - DNA, 98 bp, Homo sapiens
atgtctgccgaaatgttcaagtttaccaaaagagaggcaccgctggaacactaatgaggtatgtattgggtggaggagcattatgtatggaacttctc

SEQ ID NO: 829779 - DNA, 98 bp, Homo sapiens
cttcggacatagaggccaaccaacctttggaggatccagtttatggaaaaggaaaacttggagaaatccagggacttatcttgggaatgttagatacc

SEQ ID NO: 829780 - DNA, 98 bp, Homo sapiens
gcggagaagggcagtggctgtagctgccctttccgtttccagggttccgaccaggcctttctggagcaatgcattctcaagtgtttcctcacgctcat

SEQ ID NO: 829781 - DNA, 99 bp, Homo sapiens
cggaggcggcggaggccagggaggaagatgtcgtaatgagcggcagcacagtcagtgctgatttcattatttgaactcaataccccagagtttacaatg

SEQ ID NO: 829782 - DNA, 99 bp, Homo sapiens
ggggactctgtgtgagggaaagaaaacaatttctcctgctctgcagcttctgttcagggatcgcttacacctgagacgaactacagaacagcacgtacc

SEQ ID NO: 829783 - DNA, 100 bp, Homo sapiens
tctgctctgtgcacgtcttcaatcgtcatcaaaggtatatttgcttacttaaactaccatgttcctcgaacgagacgagaaatcctggagaccctaatca

SEQ ID NO: 829784 - DNA, 99 bp, Homo sapiens
ggagtgaacggagagcgtagtgaccatcatacgcaaacatgcagatctttgtgaagaccctcactggcaaaaccatcacccttgaggtcgagcccagtg

SEQ ID NO: 829785 - DNA, 101 bp, Homo sapiens
gattgaaaccagcaggaaggaagatgtctctcagaaacaaagtcactcctgaagccattggcttcttgtctgctgttggggtctttattgttcttctggcc

SEQ ID NO: 829786 - DNA, 100 bp, Homo sapiens
aaaattacagcacatctcagtgaatttgcaagtgatagtgtgtgtaccatatcagtggcgtgtaactatgctcatcattgttcttgtcaatgcctttgtg

SEQ ID NO: 829787 - DNA, 100 bp, Homo sapiens
ggaaatcgtgcacttgcaggccgggcagtgcggcaaccaaatcggcgccaaggtttaatagactacaacttccactgtttccgaaaagctattcatgagg

SEQ ID NO: 829788 - DNA, 100 bp, Homo sapiens
ccacaaggattcttttcaatacatcctaaaacaggtgcaatggatgagcttcatagtctggatccaagaaggcaagagttattggaagctagatttactg

SEQ ID NO: 829789 - DNA, 100 bp, Homo sapiens
atgactttaattgtaatgtatgggacacgctaaaaggagatcgtgcagtatgccgagattttgctgtcctggaggaccacaccctggctcacagcctgca

SEQ ID NO: 829790 - DNA, 98 bp, Homo sapiens
cgactacaactacccagccactctcacgccttcctatcaaacagctatgaaactggtgcccttgaaagatgaaacttccattttagaagaatacagta

SEQ ID NO: 829791 - DNA, 138 bp, Homo sapiens
ccggcctatgcctacgtgctcacggtcaacgagcggggcaaccactgcgagtactgcttcaccagaccttcactgcctggtgtaactcccacctaaggaaagccggcacccagattgagaacatcgaggaagacttca

SEQ ID NO: 829792 - DNA, 100 bp, Homo sapiens
aggaagtggtcccagaaaagaaagtaccggtgcctcctgccaaaaagccagaagctccacctcctaaagcttcaaaggaatattttggcatctaatccca

SEQ ID NO: 829793 - DNA, 99 bp, Homo sapiens
ctgtcctttctctcaccgtatcaggaacacaaaactgcggcccttgtctgcaaacagtggtatcgacttatcaaagtttctggaactaatgcaactgaa

SEQ ID NO: 829794 - DNA, 100 bp, Homo sapiens
ttactttgaaagggctgccgacttcattgaccaggctttggctcaaaagaatggggacaccgtggtgtttaaggatggccagtactggatccgaggccgg

SEQ ID NO: 829795 - DNA, 99 bp, Homo sapiens
gaagattctgaagaaagaagtcattattgcaaagatgaggtttatataactttccaagacaaggaagttgtgcaaagcctcacagctactaagaggctg

SEQ ID NO: 829796 - DNA, 113 bp, Homo sapiens
cggcgcgcagcgtgtcaggcggagagacccgccgccaggatgtacagttacccagcacgtgtacctcctcctcctcctattgctcgggctgtagtgccctcgaaacgtcagcg

SEQ ID NO: 829797 - DNA, 100 bp, Homo sapiens
ttttcatgactacaaagaattactgtgatcctcagggccatcccagtacagaaaaaacactgtgaagtggttcgatatggatatgatgtcataatcttct

SEQ ID NO: 829798 - DNA, 100 bp, Homo sapiens
cctgacagctctgcggctcgggccctgagtggacacgtcgatctgacaatgctaggagcgatgcaggtttccaaatatggtgacctggctaactggatga

SEQ ID NO: 829799 - DNA, 100 bp, Homo sapiens
acagcactggttgtttctggtgggatcgttggctatgtaaaaacaggtgtgtacattctcacgaccggcctgatccctgtgctggagaaagaacacgacc

SEQ ID NO: 829800 - DNA, 99 bp, Homo sapiens
tttcatctaacttgtcatgttccaacactacttagctttccaaggctcacgaggcccagggaatcctctggaccatcagattaccaatgaaagaggaga

SEQ ID NO: 829801 - DNA, 98 bp, Homo sapiens
tggcttgaacagacagattctgtcttaactaataagattggaactgtattaggaaaatgtttataggaggccttagctgggacactacaaagaaagat

SEQ ID NO: 829802 - DNA, 106 bp, Homo sapiens
gcagctcggagacaggccaagcaggaggagcttaagcggctgcatcgagcccagggttttctagtcttgaactactggctacgtggctaccaaatgcctaagggag

SEQ ID NO: 829803 - DNA, 100 bp, Homo sapiens
tttgattttttagtgactgctgaagatggtgaaggagctggagaagcacggagttcgggggatggcacagaatgggttgctcatgtgcggcctcggtgat

SEQ ID NO: 829804 - DNA, 98 bp, Homo sapiens
caggatgtgctgccggccctgccgaatccagatgactattttctcctgcgttggctccgagttacaccaaacccaaaggccagttaccagattacaca

SEQ ID NO: 829805 - DNA, 100 bp, Homo sapiens
ctgtgtgtgaacctccgaaagctcagcacacactcccgcaggatcccgccattgttcagtggtggacttgctttgtgaagagacagttcatgaacaagag

SEQ ID NO: 829806 - DNA, 98 bp, Homo sapiens
cgagaccactttggccgtacattctataatcaggcaattatgtcttctaaaaatattgcacagagagcagagctgacatctgataaagacatgtacct

SEQ ID NO: 829807 - DNA, 100 bp, Homo sapiens
ttggcacagagaagagcccagagtatagagcggaagcaagagagacatagggcctgattacattccaacagaggaagaaaggagagtcttcgcagaatgc

SEQ ID NO: 829808 - DNA, 108 bp, Homo sapiens
ttggttatgagagatttttgggacctgaaatcttttttcatccagagatggtggttgctatttcaggcccagacataatcaaatccatgtgaagaaaagagatttctt

SEQ ID NO: 829809 - DNA, 98 bp, Homo sapiens
tctaccgatgggaagtccttattattggccctccagatacactttactgagatgagtgaactgagtgtggcacagaaaccagaaaaacttttggagcg

SEQ ID NO: 829810 - DNA, 98 bp, Homo sapiens
aatattactgtgatcaccagagaggacagaagtgtgtagaatttagcagtgtagacaatattgtccagtggaatgcagtagccctctgggcctgggat

SEQ ID NO: 829811 - DNA, 98 bp, Homo sapiens
acttcccagcactcgaaagggaccgaaatggagagcaaagtgccaccgtgggccttaattgcaatagccatagtcgcagtccttttagtcctgacctg

SEQ ID NO: 829812 - DNA, 100 bp, Homo sapiens
tagcgttgtatcttgggagaaagacacagtctccatcatcccaggagaccaggcacctggatgagatgaagtcggccatgcggaaaggccacaacctgct

SEQ ID NO: 829813 - DNA, 100 bp, Homo sapiens
ctatgcctatgataactttggcgtgctgggcctggacctctggcaggtgtgggccatgtttgaggattgccccagcattcagttctatgagtaataaata

SEQ ID NO: 829814 - DNA, 100 bp, Homo sapiens
tctagaggaaaaaattgaaagagaaaaggaattagcagaagacattatgtcaggttcactactgtgatagacaaagtggcaaagagtgtgtgacctgtct

SEQ ID NO: 829815 - DNA, 100 bp, Homo sapiens
cgcttcaaccccaggggaccagaggaactcagccctgattgcgagggtgctcgagaggaagacctcgatgctgtggaagcgcagattggctgcaagcttc

SEQ ID NO: 829816 - DNA, 98 bp, Homo sapiens
ctacctcatcatggaacatctcaagtgaactcaacaaagaaccgagattaagcgtagctcctgaaatggatatcatggactactgcaaaaaagaatgg

SEQ ID NO: 829817 - DNA, 100 bp, Homo sapiens
ctttagttccatcaaacacagaggaatgaccaccatggcagatggcaacagaggatgtcaacaattttttggaggaatcctgaagtgggtaaaactgatt

SEQ ID NO: 829818 - DNA, 98 bp, Homo sapiens
cttcaagccccgcgagtcgcatctgctcaacgacgaggacctgacgcagttgtattccctgaatgactataaaccacccatttcgaaagcgaaaatga

SEQ ID NO: 829819 - DNA, 98 bp, Homo sapiens
cggtttgctggaagcgttcggaaatggcaacttgcgcggtggaggtgttcgggctcctggaggacgagatgtgaactatgaagactttactttcacca

SEQ ID NO: 829820 - DNA, 106 bp, Homo sapiens
gactgggggcatctgaagcagtggccgacatcaagttttcctctgcaggatggcaagcttaccaaggaggagatcgttgacaagtatgacttatttgttggcagcc

SEQ ID NO: 829821 - DNA, 100 bp, Homo sapiens
ctggctttgaaaattggttactgggtctcctctcaagaaatctcaagatattaaagttactgctgttaaaaagctgagtccagattggcaggtggactac

SEQ ID NO: 829822 - DNA, 98 bp, Homo sapiens
cgccgccgggctcggggcctccgcagcgacaacatggaggccgtgaagaccttcaatagcgagatactccatcttctaaaccaacactcctagccaat

SEQ ID NO: 829823 - DNA, 100 bp, Homo sapiens
atcttaaccttcaaccatctggggaaaaggcaaaaatcccatctaccgcaactctcagttcgagagtaaagggtgcaggttcgcagccctgtcaaccagc

SEQ ID NO: 829824 - DNA, 98 bp, Homo sapiens
atctgaaagacccccaagaggagcttgtttgggagtgggggcagacggcgttttgcgcccaactgaccagcatctcagacatgtcgaaaaagatgttt

SEQ ID NO: 829825 - DNA, 98 bp, Homo sapiens
tgtttctcattctcatatttcaccaataaagagtcaacacagactgtccaagctctgcagtattcaactgttgatggtccactaacagcaagcaaaga

SEQ ID NO: 829826 - DNA, 99 bp, Homo sapiens
ggcatggtggtctggggcaacgcggaagggttacacatcattttggaatgactgtatatcatctggattacgtggctgtatgttaattgaattagcatt

SEQ ID NO: 829827 - DNA, 100 bp, Homo sapiens
cttctttgggaatgggccaccagttaactacaagggctcacccttcagaggacaatgacttttacatcaactacaaggacatcgacctggcttcccagcc

SEQ ID NO: 829828 - DNA, 99 bp, Homo sapiens
acactgcgagctactttctgactgcccgcctggcactgaagccgagctcaaagggacatgagagatggctttagaagaaaaagtttctactcttcccat

SEQ ID NO: 829829 - DNA, 98 bp, Homo sapiens
tggaaccgggagctgctggacaagtactgtgtggcctacggcgtgggcatcattggcttcttcaaggacaccatgcggcttccgggtgcgatgccagc

SEQ ID NO: 829830 - DNA, 98 bp, Homo sapiens
gagtgaaggtgcagtgctggcgattggtgctgaagacatggacggcttccaggcagacacggaggaggaggaagaggaggagggcgactgtatgatcg

SEQ ID NO: 829831 - DNA, 99 bp, Homo sapiens
agagcagcagcctggctcctggtggctccagcagcaggaacctggccactgctccttggtccttggcattatgacgggattcccttgtcacctctgaca

SEQ ID NO: 829832 - DNA, 100 bp, Homo sapiens
ctttttgctgtgtggatggtactgagggagagccggatcctttcccagaagaatgagaatgagacggtgtgaagggagacctgctgattgacatcggctc

SEQ ID NO: 829833 - DNA, 100 bp, Homo sapiens
acagtggagcagctctgaagatgcaaaggaccgtgtgtatgtacaacaaaataatgtggagaacgtctacaatttgggattaattatttttcgagatcaa

SEQ ID NO: 829834 - DNA, 100 bp, Homo sapiens
gggaaaggtggaaaccagctgcgctgtcctaaatgtggcgacttgtgcacacatgtagagacctttgtatagcttgacaaaagatttgggaggcaatgca

SEQ ID NO: 829835 - DNA, 100 bp, Homo sapiens
gcatgttccggatcccttggaaacacgctggcaagcaagattataatcaggaagtggatgcctccatttttaaggtggcaagttatggtgtgaagccaag

SEQ ID NO: 829836 - DNA, 100 bp, Homo sapiens
aggctacgagaaggtggaggatgcctgccaggacctgctgcggatgttctttgacgcactgtatgacgaggacgtggtgaaggaggatgccttctacagt

SEQ ID NO: 829837 - DNA, 100 bp, Homo sapiens
cgcacagctgcctgtcaccccagatgtcctcatcatcccgtcagagctgaggtacttcgtgaaggcctgagaactgggaggaagctggagaaaagatgcc

SEQ ID NO: 829838 - DNA, 99 bp, Homo sapiens
gcaagttcatgaaacctgggaaggtggtgcttgtcctggctggacgctactccggacgcaaagctgtcatcgtgaagttcgacatcagcgaggatgaca

SEQ ID NO: 829839 - DNA, 100 bp, Homo sapiens
ttgttgaagagttcaactttcccagaagttgttctaacgctgcctttgctttaaaacagtattacttgcggtttgacagtgctctggaagacctacctaa

SEQ ID NO: 829840 - DNA, 101 bp, Homo sapiens
cggaggcagagcggctgccatgggtgtccgcaatgttgccagtgtctgtctgcagattggctacccaactgttgcatcagtaccccattctatcatcaacg

SEQ ID NO: 829841 - DNA, 143 bp, Homo sapiens
gaacttgaaggtgaaaaaggagaatggggatttaaagcactgaaacaaatgattaagattaacttcaagttgttgcgagaaagaatcaaagctggcaaaggtgtgacttcagctattgacctgtgtcgttaccatggaaacaa

SEQ ID NO: 829842 - DNA, 98 bp, Homo sapiens
tgccctaacatctggatcatccccttccgcacccgcctcggactctattgggtactggtatcttgggcctctaaaaatcaaagcagcccactttttca

SEQ ID NO: 829843 - DNA, 100 bp, Homo sapiens
ggtgtatcaagtaatggtgcaaagcctgaagctgcattgcgtcagattactgataaagctcgtgaatttggagctggtcctttgtttaatcagattcttc

SEQ ID NO: 829844 - DNA, 100 bp, Homo sapiens
gacacacagaagaacggttattacgctacctcatacatctgagccaggcccagacatgtccgtccttgtaagttaaaagcttccatgggagccttccttc

SEQ ID NO: 829845 - DNA, 100 bp, Homo sapiens
aactctttatctttctgtggatccttacatgaccagcatctcagacatgtcgaaaaagatgttttgatccctaaaataatgagagaaaaggccaaagaga

SEQ ID NO: 829846 - DNA, 100 bp, Homo sapiens
cagcagccgcatcctcagccccagaactgttcattatgaaggtggcgctgtgtctgttcatgcacgttccctttggagactagagacgctaagagttgcg

SEQ ID NO: 829847 - DNA, 100 bp, Homo sapiens
tacactggcaacattagatccacctcatacaggcattgaatgccccagaggagcccgaaacctcccaggcttggtgcaggaaggagagcccttcagcgag

SEQ ID NO: 829848 - DNA, 100 bp, Homo sapiens
cccccgatccgccagcaccacctgaggatccagaaaccgccccagcgatggaagaggatcaggagctggagagtaattcgccaaaatgacgaacacaaag

SEQ ID NO: 829849 - DNA, 100 bp, Homo sapiens
aagacgagactttcaaagatggaatcacaaacggcgcacattggtatgatgtggaaggaaaactcctccttaacttggtagatcatactgaagtggtcag

SEQ ID NO: 829850 - DNA, 98 bp, Homo sapiens
atattcctctcctgatctggcctcatctgttccagggaggtgggattgagagcagagcccctggtgcctgcgcaggatgcgtcctcccaggtgaagcg

SEQ ID NO: 829851 - DNA, 100 bp, Homo sapiens
gattcctgccttgtcttctccactgttcctggaggaatccgagaagagcagagcggagggagccccagacacggactgggaggtgctggtcctagggaag

SEQ ID NO: 829852 - DNA, 100 bp, Homo sapiens
tatttaagaattaaaagatgatgagaaataaggacaaaagccaagaggaggacagttcgctacacagcaatgcatcgagcctatcatctgcgtcgtgagg

SEQ ID NO: 829853 - DNA, 99 bp, Homo sapiens
tactgcacatcgtggtggtcggatttcaccacaagaagggctgccaggccaagtcctgtatctgccatgtctgtggcgtccacctcaacaggctgcatt

SEQ ID NO: 829854 - DNA, 100 bp, Homo sapiens
caagtgacaagatcttttttcatcatctagacaacttgaggccttctctaacacctgtaaaagggatagctgggagtatggccaccctgctccacgatgc

SEQ ID NO: 829855 - DNA, 98 bp, Homo sapiens
agatcttgcacatgaagctacaaaactgaatgatatggaacctagcaaagctgttccactgaatgcatctaagcaagatggacctatgccaaaaccac

SEQ ID NO: 829856 - DNA, 98 bp, Homo sapiens
agacccgtagctaagacgccaggatttcctggaagcagagaaatggcccggattgcatttctacaaggcgaaagaaaaggtcaagagaacctgaagaa

SEQ ID NO: 829857 - DNA, 100 bp, Homo sapiens
ggggaaggaactttgggtcctgaatcttctgggagctgaggaaccagatatcttgaaaagctgccagaaagcagctgcacggtatgaatgtgctccggtg

SEQ ID NO: 829858 - DNA, 98 bp, Homo sapiens
gctaagctcaaagagttgagcaggagaactaccttcatccgagtcacccagcaggtgtggactggaccctgggcacctcacatgaacagtgtgcatat

SEQ ID NO: 829859 - DNA, 118 bp, Homo sapiens
gtgtggtggaattccagttcatgctgcccacatctcatccaaacaggtgtctgacttccagcaactgctggcctgtgccagggtgcaagctgagcactggagtggagttttcctgtgg

SEQ ID NO: 829860 - DNA, 100 bp, Homo sapiens
aggagagagcaggactggcatggctggcagggttgcgagtgactcgggcaccatcaccctgtgctgtaaagacctgcgagtgctgcagctggaaatagag

SEQ ID NO: 829861 - DNA, 98 bp, Homo sapiens
gcagtttcagcagttgttaaattctcaacagctcacaccagtagcaacacaagtcggaatagaatggaacctgtcccctgttggcagagttaccccaa

SEQ ID NO: 829862 - DNA, 100 bp, Homo sapiens
ggtccttcgctacccaccaaacagaacgaggaattccgccccttcattcgaaggctcccagagtttaaattttgacttcacagagaatgcagttgtcttg

SEQ ID NO: 829863 - DNA, 98 bp, Homo sapiens
gcacgaaaaatgctaacaacagcttcacgtgcgtaatgggaaaactgagtgttacctttccatccagactcaagagaactttccggccaatttaaacg

SEQ ID NO: 829864 - DNA, 100 bp, Homo sapiens
acctggcattgccttttgttgaggatgacatctgaactggagagcagcctaacgtctatggactggttaccacagctcaccatgagagcagccatccaaa

SEQ ID NO: 829865 - DNA, 98 bp, Homo sapiens
gtccgtatgcgtccagtccctgcgcctggcgctcagcgaagtcctgtagcacgggctcgcaaaggatctccttcatccctctccagaagaggagaaga

SEQ ID NO: 829866 - DNA, 100 bp, Homo sapiens
tcctcaccctctgccgagtctcaatatctgtcttcggtggactccttcggcagtccacccaccgccgccgcctcccagatcctgtgcgcaggtggcagtg

SEQ ID NO: 829867 - DNA, 100 bp, Homo sapiens
cggcacggccatctgtgtgtctgggcagtgcaagagctctctttacgagaaaaggaagatcctggctggtcagcatgaggatgcccgggagctgaaggag

SEQ ID NO: 829868 - DNA, 100 bp, Homo sapiens
cttgcagcctggtgggaatgaaggttctacagaaagtcaccagaggaaggcttcaacggaccacaccaaaatgccatctcaaatggaacacgccatggaa

SEQ ID NO: 829869 - DNA, 100 bp, Homo sapiens
gctgtttctgacaaggaaaagaagaaaacatacttctttgcagcggacaaatactggaggacctgtagatgaatacatgttgccatttgaggaggaaatt

SEQ ID NO: 829870 - DNA, 100 bp, Homo sapiens
cttcaacacccggactcaggtcaccagcaatgactttagcagggctgtggctgaggagtacctgtccttcttccagtttggaggccagagtctggaccga

SEQ ID NO: 829871 - DNA, 100 bp, Homo sapiens
aggtggagttgctgcccttccggagtccgccccgtgaggagaatggatcgaatcatcaatttagttgttggcagcttaacatccttattgattctagtaa

SEQ ID NO: 829872 - DNA, 99 bp, Homo sapiens
ttacactgtcatccttaccaatcccatttcaaaggagaagcagagccatgtggtctctctggttgtgtatggtggtgaagcagtattttccaatttgaa

SEQ ID NO: 829873 - DNA, 98 bp, Homo sapiens
cagaccgtgctgatcttcgatgagctctcggattccttatgcagagtggccgacttgaacattaaccaggtggtatttgttggaaatttcttgagaat

SEQ ID NO: 829874 - DNA, 100 bp, Homo sapiens
gcagatcatctctggaaaggatattgatccgcctcatgtaaagtatgcttagttcctttccagtggtgttctgatctacaatggccaactggacatcatc

SEQ ID NO: 829875 - DNA, 143 bp, Homo sapiens
ctcttgctcatgagattgctgtaaatgagaactttcaattgaaacaagaggctctcccagaaaagaggtgccttggaacactatgttaattgcctggatctggtaaacaagaggctaccttatggccttgctcagattggagt

SEQ ID NO: 829876 - DNA, 98 bp, Homo sapiens
tccagaagtgtcatacaccacacctggcctgggctctaacatcttccgcctgctagacagcctgcgggccctgtcaggccaggctggatgtcgcctcc

SEQ ID NO: 829877 - DNA, 98 bp, Homo sapiens
atacattgcaattgcaaaggaaaagcatggctacaatgtggaacagccatcagagggttctcgcttcagcacaagatccggagttttgaagaagcgcg

SEQ ID NO: 829878 - DNA, 100 bp, Homo sapiens
ggcacttaaaatttcaagagaggtagatccagatggtgctggtaaacaatgccaaaactcatggagatacaagagcattggaactgaatcagagattgtc

SEQ ID NO: 829879 - DNA, 100 bp, Homo sapiens
ccggtactgtgcactattctttcccaggaaccattggataaggataaaggaccagtcctgcctctgttgtagaagacatgtggtgtatataaagtttgtg

SEQ ID NO: 829880 - DNA, 98 bp, Homo sapiens
ggagtacgtcgttcccgctgcgctaggggaagcgggcagtcaccaccaagtaagcgaagaaaattagagaaaccgagaaaacccataacattcgtggt

SEQ ID NO: 829881 - DNA, 99 bp, Homo sapiens
caagttttgtggagcaagataatttctgcattatcacggagtactgtgagaaagctacatccatattggaattttaccgggaacttggattgccgccga

SEQ ID NO: 829882 - DNA, 100 bp, Homo sapiens
acgaattccgtctgcaggctgacaacatgagcaacacagccttgtcccgggagcttaaggagacccatcggctctaccgcctgaagctggaggagctgac

SEQ ID NO: 829883 - DNA, 100 bp, Homo sapiens
tcagaaacccgcgaggagtccagggcggaacaggctccttttctgggcagtggagggactatagctccatcatctttttcttctcgaggacagtatgaac

SEQ ID NO: 829884 - DNA, 100 bp, Homo sapiens
cgcctacagcgccgggtggaggaactctgtcagcgagtgtacagccgagcggaagatggagaaccgtgattaccgggatgcacaggagtttgctgctgat

SEQ ID NO: 829885 - DNA, 100 bp, Homo sapiens
taggagcgctctgtggtgcctggggctgaacgcggctttctggcctcagctgttgaagaacgctctgcagagagcagtagagaggggccagttagaacag

SEQ ID NO: 829886 - DNA, 100 bp, Homo sapiens
aaaaagctgaaccaggcccttttggatcttcatgccctgggttctgcccgcacggacccccatagagaaaccaatcagcttcattttcaacttcttctat

SEQ ID NO: 829887 - DNA, 100 bp, Homo sapiens
gaataaatagagttcacgatcctgtaactgccaaacccaagttggttggagatgtggattttgaagattaaacatcctactgccctaggattagaagttg

SEQ ID NO: 829888 - DNA, 100 bp, Homo sapiens
ctcgcaactcggcagcctccacccaccggcccaccctacatttagcgcatcatgtgatccggatgctgaagaataccagcctcctatatggaaatcatac

SEQ ID NO: 829889 - DNA, 100 bp, Homo sapiens
ctgctagagatgtgcaaggatgtctgtgaagccatggaatacctggagtcaaagcagttccttcaccgagacctggaattctatgagcatgccaaggctc

SEQ ID NO: 829890 - DNA, 105 bp, Homo sapiens
ggggctctcacgctttctgctcaagtcctgtcctcttctgaccaaagatcccggacatgatggcacatggaatgacaatcagctacaagaaatggcccaactgag

SEQ ID NO: 829891 - DNA, 98 bp, Homo sapiens
tgacatcgaaaacccggacctcgcttacctgcatgctgtaccttccactggaagaatctcaaacagcgctacttactcaggatcagtggcaccagcca

SEQ ID NO: 829892 - DNA, 98 bp, Homo sapiens
tgaaatcctgctttcttttcctcagaactactatattcagtggctaaatggctccctgattcatggttggactccatgaaagaattgcacaaaacaaa

SEQ ID NO: 829893 - DNA, 99 bp, Homo sapiens
tttgtcaccaaaaacagaaaaatgcacaacagagggacaacaaaagcctcctacaagagtcctaccaaaagaattgccacaagcagtctgtgagatcct

SEQ ID NO: 829894 - DNA, 100 bp, Homo sapiens
tccagggccgggtctgggggccaggacctgctgggatgacgtgagttgaggaggctcagcggaaagcgacaggaaagatacaaggtctcgctgttctacc

SEQ ID NO: 829895 - DNA, 100 bp, Homo sapiens
ctgtttgcctattggaatgtgaagtctcagatgttttatcttagtgattatgataactccttgattctgaaaagaaatcatctctcctgtcagaggaaca

SEQ ID NO: 829896 - DNA, 100 bp, Homo sapiens
ttatcagtagtgacttacagtaaggtagttaaaccagagagcaatgacaaagaaacagaagctgcgtatgaatcagatatccccgaggagctctgtggac

SEQ ID NO: 829897 - DNA, 98 bp, Homo sapiens
tactacaagtcctcgcacctaaagtcgcacctgcggacgcacacaggtaactaggatttctacctcaaccgcgagacctatgcaaggacggtgtggac

SEQ ID NO: 829898 - DNA, 100 bp, Homo sapiens
tttgagagattacctgaagttgcactcaaaagcaagatatactactaactttgaaatggaataagtccagttacaacacagggatcacaacaaacacaac

SEQ ID NO: 829899 - DNA, 100 bp, Homo sapiens
gtatttctttggcatcactgcagctagtaatttgccttctggattattgaagaattggaggagaaacttaatgatgcacttcaccagaagcagctactaa

SEQ ID NO: 829900 - DNA, 100 bp, Homo sapiens
actgtagagcactccctagtgggctttcagactccaaggttctccggcactgtaagagaatgtcatacccaggctatcccccaacaggctacccaccttt

SEQ ID NO: 829901 - DNA, 100 bp, Homo sapiens
accctgacagcaaacccttcagtgagaaagatcagtctaaagaaaaggagaagaaagtgaaaaaaacaattccttcctgggctaccctttctgccagcca

SEQ ID NO: 829902 - DNA, 100 bp, Homo sapiens
ctgcctgattacaggagctttaacaggcagtgctgagccctctcatagccatcgcactgaaaatatcccagattcatgagagaactggccggaggggacc

SEQ ID NO: 829903 - DNA, 98 bp, Homo sapiens
gccacgctgatcaatgcatacctgttcatggcttcagacctgtcaaggccccaggaacattccacatgcagcagccagtaaggaggagaaggggagag

SEQ ID NO: 829904 - DNA, 100 bp, Homo sapiens
atacctgaaccaagattcaaacctaagcatgcatatttggaaatagtgggatttattgatatagctgatatttcaagtcccccagttctgtccagacatc

SEQ ID NO: 829905 - DNA, 100 bp, Homo sapiens
ctacagtcttcgcccccatcctcaacttcctgcgcaccaaagagttggatcccaggtgccttcaaatctcttgacaaagatggcactggacaaatccagg

SEQ ID NO: 829906 - DNA, 100 bp, Homo sapiens
agcgatgaaagagatgtctgcgtgatggctcagtgttccgagacttggttattaagtacggtgcagttgacccactgttggctctccttgcagttcctga

SEQ ID NO: 829907 - DNA, 98 bp, Homo sapiens
cacgaaatggattggagtgaaccggagaccccgaaaacggaagcgcagggagaaggaagaggtgtttgaaaaggtgcagctgcaggggatgacaccga

SEQ ID NO: 829908 - DNA, 98 bp, Homo sapiens
ggatgctcacccgaaggctgattactttggtgaattatgtaacctcattacgctggatgtagctcacaatcaacttgaacaccttccaaaggagattg

SEQ ID NO: 829909 - DNA, 100 bp, Homo sapiens
atcccagtggaatggtatctcaaagggaagaaactagagcccagcgataaggtatcctggtcagatataggaggactggaaagtatcaaactgaagttgg

SEQ ID NO: 829910 - DNA, 100 bp, Homo sapiens
ccgccatggaggcttcattctggacgaggctgatatggatatgtgtgtgccacaaaaattatgaaactgaggaaaatacttgaaaaggtggaggctgcat

SEQ ID NO: 829911 - DNA, 100 bp, Homo sapiens
cgcatcgttctgcagattgacaatgcccgtcttgctgctgatgactttagagtcaagatcccagaacctcaaaaacctcaactgaagccacctgaagata

SEQ ID NO: 829912 - DNA, 100 bp, Homo sapiens
gaccccggagcacagcaggaagcgctcccggccctcgctcctccgccccgtgtctgcacccgccaagctggaggagagcaggagtgttcagaagcaaatg

SEQ ID NO: 829913 - DNA, 100 bp, Homo sapiens
aggtagacgtttttaaggagaaacacgttgtttttgagcacgttcactctcgcagtgtcagctggggctgttttgcttttacccttctcaatcatcagca

SEQ ID NO: 829914 - DNA, 100 bp, Homo sapiens
caggccacagtggcttggccaatggcacagtttaagctatgaagaaggacatccctcacactctgaaacagatctccttcagagacagagttttgcagcc

SEQ ID NO: 829915 - DNA, 100 bp, Homo sapiens
gacgccatctgtgacttcccatgaaacttctgatttcttccctaggcctttacgatatctcagccagcttttatgcaaagcagtttatcccagccatctg

SEQ ID NO: 829916 - DNA, 99 bp, Homo sapiens
aattcctgagtgaacgaacagagcagctcctcttccatctccaggtactaggttttgacaagcttgcatcatgcgtgagtataagctagtcgttcttgg

SEQ ID NO: 829917 - DNA, 100 bp, Homo sapiens
gtgcctttgaagagagcacttgcggctttgactccgtgttggcctctctgccgtggattttaaatgaggaagctgactcaggtgttgacaccttggcagt

SEQ ID NO: 829918 - DNA, 50 bp, Homo sapiens
atggcctcaacacgtccctaacttgtgtcatccgtccttggctcaggatt

SEQ ID NO: 829919 - DNA, 100 bp, Homo sapiens
agagaggatccacctccgaaacccctcggcggcgttcttctgtgtggcccgcctgcagctgccccagagcacatcagctatgtgccccagctctcaaacg

SEQ ID NO: 829920 - DNA, 100 bp, Homo sapiens
gtctattgaagattctgtgatctcactctcaggagaccattgcatcattggccgcacactggtgcacatggattaattgatgtatgttgagtttatggag

SEQ ID NO: 829921 - DNA, 100 bp, Homo sapiens
gtcggtgttccacgtgaagctcaccgacagtgccctgagggccttcgagagctaccgcgccagacagggccctgagcaccccaatcccggaaagccgttc

SEQ ID NO: 829922 - DNA, 98 bp, Homo sapiens
gtgaggacacggatctggatgactgggagccagacccgccccggcccttcgacccacacgacttgtattttggaaccagtactagcagtggaggactc

SEQ ID NO: 829923 - DNA, 100 bp, Homo sapiens
ccaaaatacaaatggggatctgtgactcatcagagtgtgggggttgtgaaaggacttctgtttcctgctctcgacaagggctggtggcctgggaatcaat

SEQ ID NO: 829924 - DNA, 50 bp, Homo sapiens
cgaaaccacaagtttgccgatatataaagatgaagcgcagctgtataaag

SEQ ID NO: 829925 - DNA, 100 bp, Homo sapiens
ttcagaaaccaggctgctttcaggaacattgctgtggattcccaggaaccacgtgaatgttgagggggcgacacacaagcaggtggtggacctgattcga

SEQ ID NO: 829926 - DNA, 100 bp, Homo sapiens
gtggggctgaccctgtgaccagtgtggggaaaagggctatgcagaagctcagcctggcctccaagaggaagaagccccacccgccaccgcctccagccac

SEQ ID NO: 829927 - DNA, 100 bp, Homo sapiens
caagagttggtgggagacgggtgaagtacaggctcagtctgcggccaagactccatcctgcaagctggtgtcatagatgaagattatagaggaaatgttg

SEQ ID NO: 829928 - DNA, 100 bp, Homo sapiens
tactcttgttcgtctgagaaaactgaagtttgccataaaagttgatggagattacctttgggtgctgggaacaccaacccgggaacaaatccgagagatg

SEQ ID NO: 829929 - DNA, 98 bp, Homo sapiens
gagaggttccttcaggaggatcaggaatcattaaccaatggcaacaggaatccaaggataaagtgatttccctcctgttaactcatctgcctttgctg

SEQ ID NO: 829930 - DNA, 98 bp, Homo sapiens
ggctatgtagctggtgcgctgctcacggccattcactgcccatgctgagcgcctctcacacagtttcatcgcaaaccagaaaaggttagaaatcatca

SEQ ID NO: 829931 - DNA, 98 bp, Homo sapiens
ttaactgcagctcaacagcagcaatatgcattagcagcagctcagcagccacatataggagtggagtcaacatatcaatggagcaagtcacagtcgtc

SEQ ID NO: 829932 - DNA, 142 bp, Homo sapiens
gccatgccacatattaagacatatatgaggccttctccagacttcagtaaaattgcttggttccttgtcacaagtgaacagagtatctgccaagcccgggcttccgtgatggtctacgatgacaccagtaagaaatgggtac

SEQ ID NO: 829933 - DNA, 98 bp, Homo sapiens
cttgtcatccattagagcggtaatcaagagatgtacactgatgctgaagtactatgagccttcggaacttgtggagagactacaaagttttggttgtt

SEQ ID NO: 829934 - DNA, 98 bp, Homo sapiens
gaagatggaaggaaggagcgcagcggttcagtgaacagcattttggacaggacatttggtgccaggtctgagtagccagtttgctgaattattgtccc

SEQ ID NO: 829935 - DNA, 98 bp, Homo sapiens
acgagtggatggtgcgttgcgtgccctacttcaaggataagggcgacagcaacagctctgccggctggaagccccattgacaaaccttcagattctct

SEQ ID NO: 829936 - DNA, 100 bp, Homo sapiens
ggaaattgtgcttcatgtgctgcattgtttacattccctagcgattccttgtaatgaggagtacctgatcaatctgatagactctccaggacacgtggac

SEQ ID NO: 829937 - DNA, 100 bp, Homo sapiens
cttgcagaagacgccgtacgaggctttcagtccagtgtaaagctgttggagcgcgggagcaaaggtaaagaatgatgtaatgcgctggctgctccaaagc

SEQ ID NO: 829938 - DNA, 100 bp, Homo sapiens
ggcaggagcttttcgtaaagggaagtcatttctactggacttcatgcttagatacatgtataacaagttatcaatgccctgtctcagagatatttccttc

SEQ ID NO: 829939 - DNA, 98 bp, Homo sapiens
tctccgccaacgcggtcatctcgcagaacgccatcaaccagctgactcctcacaaatcccaggccgacacaacagcagagaaaacagcagacaatgtc

SEQ ID NO: 829940 - DNA, 100 bp, Homo sapiens
aggacctgtggaatatgagtgatgacaaaccctttctatgtactgcgcctggatgtggccaggaaatactcttaattctaaggaaaacctggaagcacaa

SEQ ID NO: 829941 - DNA, 100 bp, Homo sapiens
cggacgggcactgggcgactctgtgcctcgctgagggtggtgatgatgtccagcaactctgtgaagcaggagaagaggagtttttggaaatcatggcact

SEQ ID NO: 829942 - DNA, 98 bp, Homo sapiens
actccatcttcgcggtagctgggaccgccgttcagcaaaatgatgcttcaacacccaggccaggtctctgcctcggaagtgagtgcttctgccatcgt

SEQ ID NO: 829943 - DNA, 98 bp, Homo sapiens
agaattggaaataacgggagggaggacctggtccagcttcccttcctcaaataaggaaattgacacctggcgtggatggaagagtgtagaaagtgtcc

SEQ ID NO: 829944 - DNA, 98 bp, Homo sapiens
atgagttgaaggaaggtcggcagatcaaaccttataccctcatgagcatggtggccaacctcttgtatgagaaacgaggaggctgcggaggaggagga

SEQ ID NO: 829945 - DNA, 99 bp, Homo sapiens
ggagatgctgtcgggccgcggcggcgcttggcagccaggagctctgcattgaaggcactgggaaaacatggtaagaggcttagatgaagatgagaccaa

SEQ ID NO: 829946 - DNA, 98 bp, Homo sapiens
gcactgtcgctgcccgcctgccctgaggagtccccgctgcttgacgtgaagccctccaatatgctagtaaacacaagaggacaggttaagctgtgtga

SEQ ID NO: 829947 - DNA, 100 bp, Homo sapiens
gtcccagccgtctgtttccatagaaaaaggtgctggagaatctggtaaaagcaccattgtgaagcagatgaggatcctgcatgttaatgggtttaatgga

SEQ ID NO: 829948 - DNA, 100 bp, Homo sapiens
gtcctcacagaggcagaccctgcagccagtgtcagcggtgcccactgtgctggccatgaagaatggggacgtggtggacaagtttgtgggcatcaaggat

SEQ ID NO: 829949 - DNA, 100 bp, Homo sapiens
ctggatcgctccagagatgctgagcgaagactgtaaggagaaccctgtacagctgttcagaggagatcctgacagtggctgccatgctctctgtcaacaa

SEQ ID NO: 829950 - DNA, 100 bp, Homo sapiens
gcgccgaccacatcgcccgccccatcctcatcctcaaggagactcggcggctgccctgggccactggctacgcagagaacctgcgcaagggacccagtgg

SEQ ID NO: 829951 - DNA, 100 bp, Homo sapiens
ggcggctgccgagaaggagggaggggaaacacaaagccggctacgcgctgcgagggatcgcttacacctgagacgaactacagaacagcacgtaccagag

SEQ ID NO: 829952 - DNA, 98 bp, Homo sapiens
gccgccaagatgccgcagtccaagtcccggaagatcgcgatcctgggctaccggtctgtgggtatcctgtggtctgaggccatcttcctcgaggcaag

SEQ ID NO: 829953 - DNA, 99 bp, Homo sapiens
tcccccgggcgccactgcagagcctgtccgtcagtccctaggtatccgcactgctcagggatgcctaccttaatgcctctgaaacaaccactctgagcc

SEQ ID NO: 829954 - DNA, 100 bp, Homo sapiens
aggatgtcaacaattttttggagttggtgtgaccccatatggttatgcatcccggtttgagatccactttgatgacaaatttgatgtgtcttttgggaga

SEQ ID NO: 829955 - DNA, 99 bp, Homo sapiens
aagagtttccgggaaaaggcaaggctttgttccaggcatcttttctgtcagatcagcctgagccctacctgcccttcctctcaagattcctggagaccc

SEQ ID NO: 829956 - DNA, 100 bp, Homo sapiens
gatggaagccatggatggccgggaaccttttaaactcatatcccaggcatatgaagtgctttcagatccaaagaaaagggatgtttatgaccaaggcgga

SEQ ID NO: 829957 - DNA, 100 bp, Homo sapiens
agaatatgactctctgcctgaaaatagcgagacagatatctggggaagatgaagtagagtgctctgacaaggacgagcccgacctcgatggggatgtgtc

SEQ ID NO: 829958 - DNA, 98 bp, Homo sapiens
ctcatctcagagctgggtgccaggctgaaggatcactgaggaaggggaagtgggcaaagcagcctatacggttcagacatccgagagcatgaccccaa

SEQ ID NO: 829959 - DNA, 100 bp, Homo sapiens
cccagtcatgggccagacctcggtgtccacgctgtccccgcagcccggcagcgcatatcgcacggatgactgccatccctgggttttgccagtagtgaag

SEQ ID NO: 829960 - DNA, 99 bp, Homo sapiens
gcgcgaacatggacgccgtcaacgccttcaaccaggagccacaatggtgcgcatgaatgtcctggcagatgctctcaagagtatcaacaatgccgaaaa

SEQ ID NO: 829961 - DNA, 98 bp, Homo sapiens
taacttgatctgtgatgaatcagatgtcaaagacttagcttttaaattaaaaaggaagctattcaccattgaggcccgatgagagaaagggaaagtta

SEQ ID NO: 829962 - DNA, 100 bp, Homo sapiens
ccgatgtcatcaagttgcaagagattccaaccttccagccccttttgaaaggtgagaattatgaagatgatgacctagtaaattctgatgaggttatgaa

SEQ ID NO: 829963 - DNA, 100 bp, Homo sapiens
cttcttaacccctagaccggtttttagtccattgactatgcagcctaatgctgatgcttttttcaaagccgctataagccttgttccggaagttccaaag

SEQ ID NO: 829964 - DNA, 100 bp, Homo sapiens
gccgcctgcaccgtgacccgcactattcacgggagccctagagaggacaccgggacacccagaagccgggaaatgggacacggccaacacggtgaaggaa

SEQ ID NO: 829965 - DNA, 100 bp, Homo sapiens
catcatgctgaacgtaaactgtagcagggcgccaagcagtgacttctgaccaacagagtgtggggagaagggatgtgtattagccccggaggacgtgatg

SEQ ID NO: 829966 - DNA, 100 bp, Homo sapiens
agcaaacatcatccagagttggtggatctgttctccaggagtgggatttatatcaagcaggcagctgagtatgtcccagagaaggtgaagaaagcggaaa

SEQ ID NO: 829967 - DNA, 99 bp, Homo sapiens
aggaaccggctccttgcgtcccgcctccctgggagctccgcacggaaactggcagacctttcacttcgtatccaacaaattgaaacaactctcaatatt

SEQ ID NO: 829968 - DNA, 100 bp, Homo sapiens
tgctgggagccatctgtgccatcatcgtggtagttattgtaaagtcttaccagcaaggggtcctgtctgccaccatcctctatgagatcttgctagggaa

SEQ ID NO: 829969 - DNA, 99 bp, Homo sapiens
acccacagaagttgtattagatgatgacagagaagatctttttgcaggtctctaattaacagaagatggcaaagcccagccacagcagctatgtccttc

SEQ ID NO: 829970 - DNA, 98 bp, Homo sapiens
ggaggatgcctatgtattccctggggatggcgcatcacacaccaaagtgagaagcgccaccttcaagtgaacgtcaccaacccagtacagtgcagcct

SEQ ID NO: 829971 - DNA, 98 bp, Homo sapiens
ggggaggagcagcagccaccgcacgaggtgctctcggaaccctggcgtctctccaccagccagatcccccaatcccagatccgcatgttcgacccaga

SEQ ID NO: 829972 - DNA, 100 bp, Homo sapiens
ttccttgtttagaggactaggccccaatttagtgggggtagccccttccaggtggcgacatgtctaagaatgtgagccagtcacagatggcaaaattgaa

SEQ ID NO: 829973 - DNA, 100 bp, Homo sapiens
aggcttaccgagagtttgaaagtgcgattgtggaagctgctcggatgggcttccccaaggatttattgacattgctacttgagtgtgaacagttacctgg

SEQ ID NO: 829974 - DNA, 100 bp, Homo sapiens
cttggccatgaccatctggattctcaaagtcatgaacttcacaattggtaagcttgatgattaccaggaacgaatgaacaaaggggaaaggcttaatcaa

SEQ ID NO: 829975 - DNA, 100 bp, Homo sapiens
gtatgtgcgagctgatgtagaattagaggagcttcagaaatacgagcagttcatctttgcagatcataccaatatgattcacgttgaaaatgtctatgag

SEQ ID NO: 829976 - DNA, 100 bp, Homo sapiens
gggacacacctccattggatttaaaagacagtcctcgtcagcactgactttcagctatggaatcggtaaagaatctcatttggacacattgagtcgggca

SEQ ID NO: 829977 - DNA, 100 bp, Homo sapiens
agagaataaaactccagcgagatccgggccgtgaacgaaagcagtgacggaggagcttgtaccaccggttcagccgtctgtatatctccccagatacctg

SEQ ID NO: 829978 - DNA, 100 bp, Homo sapiens
tcgttatcctcctcactctgtccagtatacatttcccaacacccgccaccagcagaggtgacattgtgattgcaaaaagcccaagtgatccaaaatcaaa

SEQ ID NO: 829979 - DNA, 99 bp, Homo sapiens
gtgaatcagtatgttgtgcaagaggtactgtccatcaaacatcttccaccacagcttagagctcctgcccctcctaaagctgaagccaaagcgaaggct

SEQ ID NO: 829980 - DNA, 100 bp, Homo sapiens
cgcggccttcccatcaccatcacagagagcgatgggtcattgtcattcgaagatgtggctgtgggcttcaccagggaggagtggcagtttttggaccagt

SEQ ID NO: 829981 - DNA, 100 bp, Homo sapiens
cgctccgggcccgggcggctggcctcaccgcccactggatttgggccaggcttagtcatctattggtatggatttatccaggagctggactgcaaccggg

SEQ ID NO: 829982 - DNA, 98 bp, Homo sapiens
gcctccgtgagcggatcagacacctagatgacatggtgcattgccagcagaagaaagtcaagcagatggtcgaggagcgggtattcccctacatctca

SEQ ID NO: 829983 - DNA, 100 bp, Homo sapiens
ggagcaagattagtggctgctaaacttgaaccgaaaagatactgtggatggtagggaagaaaagtctgcttctgattcttctggaaaacagtctactcag

SEQ ID NO: 829984 - DNA, 100 bp, Homo sapiens
aagttcaggaaacatccaagaaaaatgtccttaaagcaattgagcaggctgatctactgcaggaggctcttcattgatggtgaccgcatagacgccccca

SEQ ID NO: 829985 - DNA, 100 bp, Homo sapiens
gagctcaagaaactgcaagaagccagagatgaagtaaagaaggtcttagacaaattttacaagaggaaagaaattcagaaactgggtgctgattatggac

SEQ ID NO: 829986 - DNA, 98 bp, Homo sapiens
ctccgaaagcaagctcttctagaagttggacttgtcttacaaggaccggcactggcatgaagcctgtttccactgctcgcagtgcagaaactcactgg

SEQ ID NO: 829987 - DNA, 98 bp, Homo sapiens
gaaagcagaagaagaagccagaaggagaatagaggaagaaaagaaggcgtttgctgaagcaaggagaaatatgcacttgctgtcacctcagcgggccc

SEQ ID NO: 829988 - DNA, 99 bp, Homo sapiens
tccaggagttcgtctcttacgtctgcggaagtgcagctgcctcagttcttagcgcaggagccaaaaacctgtatatcatctccgtgaaggggatcaagg

SEQ ID NO: 829989 - DNA, 100 bp, Homo sapiens
tcttcaaaatttcaggtcttaaatctggaatctacttgaaaatggatcggtttatgttggattaaatgctgctctttgtggcctcatagcaaacagtctt

SEQ ID NO: 829990 - DNA, 100 bp, Homo sapiens
cttccacctgggaatctggccagagaagagcagcggaaagagctcagtgctagaaagcctggtggggagggacctgcttcccagaggtactggaattgtc

SEQ ID NO: 829991 - DNA, 98 bp, Homo sapiens
gcctcccagtgttgggattataggtgtgagccaccacacccagccactaaggtgagccagccatgagagggtatcttgtggccatattcctgagtgct

SEQ ID NO: 829992 - DNA, 100 bp, Homo sapiens
ccagttacattccagaggatgaggcgctgatgcttcgggatggacgattaccccggaagctttcgagaagctgggattccctgcagcaaaggaaatagcc

SEQ ID NO: 829993 - DNA, 100 bp, Homo sapiens
cacgacttactctctacccttggcagttacatcatgctgatgacagcttcctggtcctcaccacagatggaattaacttcatggtgaatagtcaagagat

SEQ ID NO: 829994 - DNA, 100 bp, Homo sapiens
caccgacgactaccagctcttcgaggagcttggcaaaggaacttcctgaagtgctccgaagacaacccgctctttgccggcatcgactgtgaggtgttcg

SEQ ID NO: 829995 - DNA, 100 bp, Homo sapiens
tcactgcctacactggacccctcgttgaggacttccttagtggtttccaggatccgagccaggagacactgagcctttggagttaggaggtcctggagca

SEQ ID NO: 829996 - DNA, 100 bp, Homo sapiens
cagaagtgaccatctcaagcatccggcctatttcagaaagaaaacgagcctccatctccactggtctctgggattattgattacaacatgcccctcacct

SEQ ID NO: 829997 - DNA, 98 bp, Homo sapiens
atcttcttcaagagacgtctgatgaacctcatgcgggatgtggagcgggagggcctggactgggacctcatgagaaccaggtgcatcagcgcattgcg

SEQ ID NO: 829998 - DNA, 105 bp, Homo sapiens
aggagccccagctccccaggagcttggggctgcagacaagcatggtgactctagatctcgttagagcattacaagatctggaaaatgcagcctcaggtgatgcag

SEQ ID NO: 829999 - DNA, 99 bp, Homo sapiens
aaagacacagtgctgctggagttttatgctccatggtgtggtcattgtaagactctggctcctacttgggaggaactctctaaaaaggaattccctggt

SEQ ID NO: 830000 - DNA, 100 bp, Homo sapiens
gaattatgacgctaggccacaaaaatcgggatgtatggcattgagaatgaagtcttcctgagccttccatgtatcctcaatgcccggggattaaccagcg

SEQ ID NO: 830001 - DNA, 100 bp, Homo sapiens
ccgcctcatgtaaagtatgcttagttcctttccagtggtgtccttttggaataaatcatgggattgagcttcattcagatgtggtggaatatgccaagga

SEQ ID NO: 830002 - DNA, 98 bp, Homo sapiens
ggactcagcagcagcaactgtgggactttttgactacaattctcaacaacaggcacggaagaagatgtagtaaagtcaaagaaaacattcagaagtca

SEQ ID NO: 830003 - DNA, 131 bp, Homo sapiens
caaagctcaagatggcggacaaaacgccaggcggatctcagaaggccagttcaaagtagtggccacagaagaagtagttactgcagaatctgtggatggtgccattcagcaagtagttagttcagggggtc

SEQ ID NO: 830004 - DNA, 99 bp, Homo sapiens
gaaaaagaagaccagcgacaaatttagagaaacctcggcagctgttcgggggtcttgtctggattttggttgcctcctccaatgttcctctacctctac

SEQ ID NO: 830005 - DNA, 100 bp, Homo sapiens
atacttctcaaaatacttgtaaaagtcctccaaaaatgagcaagattgaccttgtacaaataaaacagatgttcgctcagatgtatcagaagactctggg

SEQ ID NO: 830006 - DNA, 98 bp, Homo sapiens
gacacctacagccccgacgaacatttctgggtgacactcaacaggattcccggtgatgcagaagatggggaagaatatgatgacccttttgctgggcc

SEQ ID NO: 830007 - DNA, 100 bp, Homo sapiens
gaagaagccacagagagaaccaccagcattgccaccaccaccaccaccaccacagagtctgtggaagaggtggttcgagatatgaagatcaatgatgcag

SEQ ID NO: 830008 - DNA, 100 bp, Homo sapiens
cccagcactcgaaagggaccgaaatggagagcaaaggaggcactggctacaattaggcttctcgacgtcctgtgcgaaatgactgtgaatactgagctgc

SEQ ID NO: 830009 - DNA, 100 bp, Homo sapiens
acctgaaactgaattggagactgttaggcccagaagaacaattagggtgacgtgtgcattgagtaaacgcaacatattgctgaacgttctgattccaccc

SEQ ID NO: 830010 - DNA, 98 bp, Homo sapiens
cgtggaaccgtgtgagaatccctaaggcggggaaccgcagcgcagtgacagtgcagaaccccggcgcggcccttgtttgcccagtatgcggagatcgt

SEQ ID NO: 830011 - DNA, 100 bp, Homo sapiens
aacagcccctgctggcaagtcaagtggcaactccgtcagctcgttagaaaggtggcttaccttatccaacaaaatgttatcccacctttttgcaacttgc

SEQ ID NO: 830012 - DNA, 100 bp, Homo sapiens
gaaagcagtgacggaggagcttgtaccaccgtctgacagcaatgcaagcttcctccgtgctgccagagcaggcaacctggacaaagttgtggaatatctg

SEQ ID NO: 830013 - DNA, 99 bp, Homo sapiens
tcgcggggcccgcgcccggagctggcgccagaacccgagcaacttcccgagaagagaagaacctccaaggctttctggaacagcccaaggagaagtggg

SEQ ID NO: 830014 - DNA, 100 bp, Homo sapiens
ctgtgcctgcttcgtgcctggtgtgacgtctctcaggatgcctgagccggggaagaagccagattgcagatctgactcagaagatctttgaccttcgagg

SEQ ID NO: 830015 - DNA, 100 bp, Homo sapiens
gggtttaggagaagaaaccaatgaggaggatgaggaggaaagtgacaaccaggtttggtcgctggctacggtagctacagatctttgccttggtccgaaa

SEQ ID NO: 830016 - DNA, 99 bp, Homo sapiens
tacgagagtggccctgacggaggggaggaagtgagtatgagcgtagagtggaacgggattgtgtctgcagttcaatactgccatcagaaacggatcgta

SEQ ID NO: 830017 - DNA, 100 bp, Homo sapiens
ccggggctgctgcttcctggcctctggctgctgctgctggcccggccggcctcgtgcgccccagatgctgaagagtttctggcagaaggtttgcggaatg

SEQ ID NO: 830018 - DNA, 100 bp, Homo sapiens
ccgaccttgtccacacagtccatcggcgtcttcgacatcttcggaacattgctgcccggaacattgttaatagaaatggccatcagctccttgataccta

SEQ ID NO: 830019 - DNA, 98 bp, Homo sapiens
cgcaccaacgccgacatcatcgagattatgtttgagaccttcaacaccccggccatgtacgtggccatccaggccgtgctgtccctctacgcctctgg

SEQ ID NO: 830020 - DNA, 100 bp, Homo sapiens
ccgaggagaagtaccaggaggcgttggccaaggatgggaaagggctccttcaagtatgcctgggtcttggataaactgaaagctgagcgtgaacgtggta

SEQ ID NO: 830021 - DNA, 100 bp, Homo sapiens
tcaccgctggaagaggctggtggacgaccggtggctgtggcgacatgtcgacctgacgctctacacgttctggacatggcaagacatgtgccactctatc

SEQ ID NO: 830022 - DNA, 100 bp, Homo sapiens
cattgtcaccatgaccacactgggcctgggactacggccagggcttcgtgaatgaggagatgatccgggaccaccttccacccccagaggaggagccgct

SEQ ID NO: 830023 - DNA, 100 bp, Homo sapiens
aggccagaagatacaaagacagaccatcccagttgaatgctgtcttccaagaacagaagaaaatgatccaggcccaggctgaccagtgcaccggtcttca

SEQ ID NO: 830024 - DNA, 100 bp, Homo sapiens
aactacggacactgtgacttttcagccatcacaattgtagtacccaagtggccttggaccatctggagtctgtgcctgagaaactgagcctactagaaga

SEQ ID NO: 830025 - DNA, 98 bp, Homo sapiens
ctgtgcaccctctctccatgctgctcagtggcatcgtggacccggccgtcatggggggcttctccaactatgaaaagattgttggaccttcagatgga

SEQ ID NO: 830026 - DNA, 100 bp, Homo sapiens
gttacaaaggcatatgctgacacacagtggagacaaacctttcaagtactatactggcaattgctggagaagattttgcaattgttgcttctgatactcg

SEQ ID NO: 830027 - DNA, 100 bp, Homo sapiens
agttggggaccagcatcatgaagtggatggtggtggtcttggtctgcctccagctcttggaggcagcagtggtcaagcatccgtgtacaagatttgcaga

SEQ ID NO: 830028 - DNA, 98 bp, Homo sapiens
ggactctcctgagtgggaatcactacagccttctgaggagggggtgttccagcactcctgtaggaggcctgctgatggcatttcagaagtactctggt

SEQ ID NO: 830029 - DNA, 126 bp, Homo sapiens
gcagagctctgtagaactctgtggtgtaaagattgtggtagtagatgaagaaagcagatggtggagctgaatatgccacttaccagactaaatcaaccactccagcagagcagagaggctgaatag

SEQ ID NO: 830030 - DNA, 75 bp, Homo sapiens
catgtagctctccaggcttgcaagcgattaccaggcctgccgaggaggaactgaagacgaagaacatggatgata

SEQ ID NO: 830031 - DNA, 98 bp, Homo sapiens
caaattccgacgtcttgaagacttccgagtagatgtatgtaggaaaccttcccagaatatttgactactcgcctttagatccaacacaagatttcaac

SEQ ID NO: 830032 - DNA, 99 bp, Homo sapiens
ccctcgcgcggtccggcacagcggacaccaggactccaaaatggcgtcagttgaaactatgttccaacttcctgtcaacaatcttggcagtttaagaaa

SEQ ID NO: 830033 - DNA, 98 bp, Homo sapiens
cccgtgattctcatggatgagacgctcaagtttgtggcccgcaactacctggaacctgcttgaaatggcgattgaaaacctccaaaaaagcgaaggaa

SEQ ID NO: 830034 - DNA, 99 bp, Homo sapiens
tccagtagacggtacagcgaaggcagagagttcagatagaaaatgctgctgaagaacctagagtcttatgtattatacaagatactactaattcaaaga

SEQ ID NO: 830035 - DNA, 100 bp, Homo sapiens
ttcttttgacctgagggctgctattgtatatcacactaaaggagcgtccgtggccactgaactgcgctgccagtgcttgcagaccctgcagggaattcac

SEQ ID NO: 830036 - DNA, 99 bp, Homo sapiens
gtggcaggggctgactgagagcgtctgcttgtcaaagaagtttggcagagatcacggagctaattcatattgctctccttgtacatcgtgggatagtaa

SEQ ID NO: 830037 - DNA, 99 bp, Homo sapiens
tggagtgcaagaagaaattcccacctgtcaaagaggtttaagtggaaaccctgcagatttagaaagaagagaagcagtgtttggaaagaattttatacc

SEQ ID NO: 830038 - DNA, 100 bp, Homo sapiens
tcaagaaggtgccggtggtgcgagtcttcggagcgaccccggcaggtatcatttatcactgtgatcttaccaaagaggagctggagccaagagttttccg

SEQ ID NO: 830039 - DNA, 99 bp, Homo sapiens
ttacctccaaagccattgtcaagaccacagcagtcatctgcaccagtccagctgaactctggctctcaaagtaaggtactcaactgtgtggggtactac

SEQ ID NO: 830040 - DNA, 100 bp, Homo sapiens
ctgtgatcaccctgatgtcaccgaatggccacagcttgtaaaaggtatatgtctcgagtccacggtatgcaccctaaagagaccacccgtcagctgagct

SEQ ID NO: 830041 - DNA, 100 bp, Homo sapiens
aactgttgaattagacccgtttcctatagatgagaaaccatacaagctgtggctcccagccaacctctgataaaccctcccagcggccatcagagagcac

SEQ ID NO: 830042 - DNA, 100 bp, Homo sapiens
tccttctggaagcagttgctgcatgttggagacttgggcaatgtgactgctgacaaagatggtgtggccgatgtgtctattgaagattctgtgatctcac

SEQ ID NO: 830043 - DNA, 101 bp, Homo sapiens
gccaacgacctgtttgagagtgggaacatgacgcaggtgcaggtgtctcttctcgccctggcggggaagtgggcgacagatgcgaaagaaacgagttccag

SEQ ID NO: 830044 - DNA, 100 bp, Homo sapiens
attgtgcctgtcattgcaaaagctgacactctcaccctgaaggaacgggagcggctgaagaaaaggataggagcatgctgctatgtggaatgttcagctt

SEQ ID NO: 830045 - DNA, 100 bp, Homo sapiens
aacatctgaagatgacaatttattagatggtgacactgcagttgtgtaaacaggaacatcgataagtagtgtaaaaacttgcacaatgaaatccgaagcc

SEQ ID NO: 830046 - DNA, 50 bp, Homo sapiens
tttggcccgtggctccttaggaagatactatgggggagcagaggtggtgg

SEQ ID NO: 830047 - DNA, 98 bp, Homo sapiens
cacaataaaagagacctctacttagctcagcaattcttaccttaataccatggcaagacatgctgataattgtgctggcccagatggcgtagaggggg

SEQ ID NO: 830048 - DNA, 103 bp, Homo sapiens
caggttccagaccctgccttctcttctgaaagaagaaaaagtcagcactttttgaagtgtctgaggttataccagtcatgacaaataattatgaagaaaatat

SEQ ID NO: 830049 - DNA, 100 bp, Homo sapiens
ccacgacggcaggaattattggaggccaggtttactggagtaggtgttagtaaggtggagccgccaccaaaatgcagattttcgtgaaaacccttacggg

SEQ ID NO: 830050 - DNA, 100 bp, Homo sapiens
aatgggaaggcaaagggacagcttcccgatctaaactattggataaacttcagagaggcgctatcacacttggtgtgacatcaagataaagagcggaggt

SEQ ID NO: 830051 - DNA, 100 bp, Homo sapiens
tcgagtacatcgtgcagcagtgcgcgctgccccccgagcaggaggtgacgcatccaaagaagacattgacactgctatgaaattaggagccggttacccc

SEQ ID NO: 830052 - DNA, 100 bp, Homo sapiens
gagagactgactgggaaacatgttattcaggtgcgctcccctggggccccagggcccctgactctgaaggaggtggaggagctggagcagctgacccagc

SEQ ID NO: 830053 - DNA, 100 bp, Homo sapiens
gcaatttgggttgcaacaactaagtctacagtaaataaatgggtgtgttccggggtggtcatgacatcctggtgcgctcccggctgctgcttttggacac

SEQ ID NO: 830054 - DNA, 98 bp, Homo sapiens
aggccttcgtcttccgaatgaactacagccgcaagaaccaggactcggaagcgcacataaaatccaaatcccacttgaaccaactgaagaaaagaaga

SEQ ID NO: 830055 - DNA, 99 bp, Homo sapiens
taacagaagatctgtcagtaccctcaaaccttgtgctaaagatgcatatatgcttttccaggcagtggttgcaggaatccagcaggctcacgcggaaca

SEQ ID NO: 830056 - DNA, 98 bp, Homo sapiens
aaggattcagagcagatgtgatctgcgctaggtggcatctcctctcacggatgcctcggccctctttggattccagtacgatgcatcagaccatacca

SEQ ID NO: 830057 - DNA, 155 bp, Homo sapiens
ctgccaccgaaggaagtggtcccagaaaagaaagtaccggtgcctcctgccaaaaagccagaagctccacctcctaaagaaaattggcaacttctccatcgtgcggcggcttggcgtgcaggagtgcattctcctggttacacaacgcataacca

SEQ ID NO: 830058 - DNA, 100 bp, Homo sapiens
ggccgtgatcctgtggtttcagctggcgctgtgcttcggccctgcacagctcacgggcgagtttgccagatccggcccggtgcctgggttccaggaggac

SEQ ID NO: 830059 - DNA, 101 bp, Homo sapiens
cagaataagagtcaaaacaaataagttatgctatgaggatgacaaactctggagtaattggagccaagaaatgagtatagaactagacagtacggatggtg

SEQ ID NO: 830060 - DNA, 98 bp, Homo sapiens
aggagccattttgagcaatggggaacgctcacggactgtgtggtcagaatggcggcagtggagcatcgtcattcttcaggattgccctactggcccta

SEQ ID NO: 830061 - DNA, 100 bp, Homo sapiens
ggaaggtactgcaccatctgaaaatggtgaaactaaagctgaagagaaagcatcatcattcaccagttacgaatgaactccagatgaaatggtaaaccaa

SEQ ID NO: 830062 - DNA, 98 bp, Homo sapiens
gggcgccaggacaccgaggagaatatcttgctgggagtggacttttccagtaaggaaagctgttccaaagacctaatgcgcttgctgtccagcagttg

SEQ ID NO: 830063 - DNA, 98 bp, Homo sapiens
ctctttgaccttctggatgtccttgagttcaaccagggtcctccaggacccccagggccacctggcttacctgggattccaggaaaaccaggaactga

SEQ ID NO: 830064 - DNA, 100 bp, Homo sapiens
atgaatatacccttagaaaaaatgtggcagtgtgtctgggataagattttggagcctgtggcatgtgtgagaaaaaagtctgaaatgctccagcttttcc

SEQ ID NO: 830065 - DNA, 100 bp, Homo sapiens
gccagatcaacctggagctctacgcctcctacgtttacctgtccatgatatgaattgagaattcgttatttgccaaaaggatttctaaaccagtttactg

SEQ ID NO: 830066 - DNA, 98 bp, Homo sapiens
agatggaattgaagaggaagatgatgatgatgatgaaattgatgatgatgatacaatttctgactggaatctaatgagcagtgaagattcagaagatt

SEQ ID NO: 830067 - DNA, 98 bp, Homo sapiens
caagctcggatccctgaatttgatccaggggatcccaacaagccctcaggattcagaagtgttaaagctcctgtcactaaagtggctgcgtcgattgg

SEQ ID NO: 830068 - DNA, 51 bp, Homo sapiens
cggaggtctccgccggctcccggttccctgtattgaacactgatatacaag

SEQ ID NO: 830069 - DNA, 100 bp, Homo sapiens
gttgggagatgtgattgaggtgcatggaaaacatgaagagcgccagagctggaagtcgagtgtgctactcaactcaggagatttggagacaaactgaact

SEQ ID NO: 830070 - DNA, 100 bp, Homo sapiens
gccagtctttaaatattcgaacaactcagcttgcaaaagcccagggccatatatctcagagtgaagatagtccaagtcctaagagacagcgcctctctca

SEQ ID NO: 830071 - DNA, 98 bp, Homo sapiens
gcaggggcagagcgctcctgtggggatgaaggccgagggcttcgtggatgccctgcaccgggtccggcaggttgaatgcctttgagaacttgatgcat

SEQ ID NO: 830072 - DNA, 100 bp, Homo sapiens
gagctgctgcagattctctcagatgaccggagtgtctactatgaaccatcctgtactcagaatgtgaatcatggtgtacttgtggttggctatggtgatc

SEQ ID NO: 830073 - DNA, 99 bp, Homo sapiens
gaggggtcttcaaagaccttgcaagaagtactaactatggagtatcggctaagtcaagcttgtatggagttcaaagaaggacgcagagccagccacaca

SEQ ID NO: 830074 - DNA, 100 bp, Homo sapiens
agcctcgaagacctcttcaatttctgttcaagaaggttcacaatgaaaactgtacttatgttagctgaccaggtaattttttctgcaggatgaattaaga

SEQ ID NO: 830075 - DNA, 98 bp, Homo sapiens
aagggaccgaaatggagagcaaaggtacatattctcagctcctaaggacctccttcctaaagaagaaagagttgattgaagatttgataagcatgcat

SEQ ID NO: 830076 - DNA, 100 bp, Homo sapiens
catcctgctctcaactacaacatcgtttcaggggaaggtattcatgtaaatcaagaattactgcaaatatctccttgtatcacagagcagttcattgagc

SEQ ID NO: 830077 - DNA, 51 bp, Homo sapiens
gtgtttcatgaactcagctattcagctattcaaagtgtgattagagctggg

SEQ ID NO: 830078 - DNA, 98 bp, Homo sapiens
cagactgtgcttcttgtgcaagtaatcagtctttgacaagtgatgagaagctgtcggagcttcccaagaaggtagaagatagcaccatgccgattcgt

SEQ ID NO: 830079 - DNA, 100 bp, Homo sapiens
ctcttttgacttggactatgactttcaacgggactattatgatagcctaatcacacggatgctacagagagatcccaagagaagggcttctttagaagag

SEQ ID NO: 830080 - DNA, 100 bp, Homo sapiens
acatcagaaggatacagttcatgacaatgactttgagccctaccttactggacagtcaaatcaggaactctgcgaccttcaagtcgtttgaggaccgagt

SEQ ID NO: 830081 - DNA, 100 bp, Homo sapiens
tccagttccaaggactccacggggcagagatcctacaagaatccaggatgatgatcccagattgccagcgcaggttggaagccgcatatttggatcttca

SEQ ID NO: 830082 - DNA, 99 bp, Homo sapiens
actggtctagaacccggctctgagggcactggcctagttcccgacttgtttctcaggaattacatgaacgacagccttcgcaccgacgtcttcgtgcgg

SEQ ID NO: 830083 - DNA, 119 bp, Homo sapiens
caagggaaagaaccctggctggggaaaagggaagtgaaaagagatctgttttcaggcatcagtgtcattccaggacgtgactgtggaattcagccaggaggagtggcagcacatgggcc

SEQ ID NO: 830084 - DNA, 100 bp, Homo sapiens
ctttactgggtagatgcaggcttcaaaaagattgagtcctatggtctaggaataggctttttagctgtgactgtacattagaagctccaagaagttctct

SEQ ID NO: 830085 - DNA, 50 bp, Homo sapiens
gaaggattccgggagcacagttccgccgaagaatgccacgggtgacctgg

SEQ ID NO: 830086 - DNA, 98 bp, Homo sapiens
tcgctggcagccgctgtacttgccgccaagctgagccaccaaagaaggaggctgccaccacggggccgcaggtgaagagagcagatgagtggaaggac

SEQ ID NO: 830087 - DNA, 98 bp, Homo sapiens
ctgaggcctccccagccatgcttcctgtacggcctgcagaactgaaagaccacagcaagattctttcattcgtctcctcctagcctgggggaccaggc

SEQ ID NO: 830088 - DNA, 100 bp, Homo sapiens
atgaaatttccagatttcaagaaagatgttgctaacaaccacaagcagaatttgatgacggtggcaaaccttggtgtggtgtttggacccactctgctga

SEQ ID NO: 830089 - DNA, 100 bp, Homo sapiens
ttcttggcctggttatataatgaaagaatccacattcatctcaatggaaggatcctgccttaagtcaacttatttgtttttgccgggaaagtcgctacat

SEQ ID NO: 830090 - DNA, 100 bp, Homo sapiens
tcagagcccggcaccacccatcttgagtatctggcaccatggctgaggaaacagctccagcagttcttgagcggcaccagggggccctgtactccctctt

SEQ ID NO: 830091 - DNA, 100 bp, Homo sapiens
gggttccggggcccggtagaggcgcgccaagaggaaaggaaagtgcggcggccctggaacctggatatcgcgcgagaaccccagctcaaagggattgtga

SEQ ID NO: 830092 - DNA, 98 bp, Homo sapiens
ccgagtggtctaaggcgccagactcaaggaaggtgggagtcaatcattttgacaagtctcctgaaaggaacagctagcaggaactgaaacctttttcc

SEQ ID NO: 830093 - DNA, 100 bp, Homo sapiens
cctaagattatttaaaaatgatcctttgttcttcaaacctgtaccctatgatgagaggacctgatcctgctgctgctccatatagtactcagaaatcatc

SEQ ID NO: 830094 - DNA, 99 bp, Homo sapiens
agcgattggacagaatttgtgaaggtgtaccttgaaagacttttaacatacgcagagatagatatctgtccggccaactggaagcggattgttttaggg

SEQ ID NO: 830095 - DNA, 100 bp, Homo sapiens
tggtatttcaaatgaccaccatgttgcaaaagaacttcagatggtggcaaagtggttggcaccatagaagtcagtgtcgtgaagatgggggagattgagg

SEQ ID NO: 830096 - DNA, 100 bp, Homo sapiens
attatgtcaacagcatctgtggaaatcgatgatgcattgtatagttcaggcccatgaagttcatcagaaaattctggcaactgatgttagttccaaaaat

SEQ ID NO: 830097 - DNA, 101 bp, Homo sapiens
cacttacacctgacccagagcctacccatgaaggagctggagtcagatggcagcactatggaggactattcacaggaggactggggaaaccacagtcagga

SEQ ID NO: 830098 - DNA, 100 bp, Homo sapiens
ttggttaaaacctgacacttttaacagggaacagaaagaacagcttcaaaagatgaaagacttcgggtctgagccacagatggctgaccatctaccacct

SEQ ID NO: 830099 - DNA, 98 bp, Homo sapiens
gtagatggtggctttctttggacccttgacatcaaccagttactatttggtcacagaaacatccagccatgacatatatgaagaggctgaggctgaca

SEQ ID NO: 830100 - DNA, 100 bp, Homo sapiens
catgttttcctgaaggccaagacccggcctcgaccagtgaggagagctggaccgacagcgaggtggactcatcatgctccgggcagcccatccacctgtg

SEQ ID NO: 830101 - DNA, 99 bp, Homo sapiens
caacaccggagtcatctcttgtaccgtgtgcctagaggaattccagacgcccataacgttggtggccaccacatcgaagaatgccaatgcctccctggt

SEQ ID NO: 830102 - DNA, 98 bp, Homo sapiens
ggcatctgacagaaaaatgtgagtgtgctgtggaaggcttgcatttcctttaaggtatttaacatgaagtcgctccagattgtgttacctgcccgagc

SEQ ID NO: 830103 - DNA, 98 bp, Homo sapiens
gttttggatattagagagttcaagaaacaggaccttgccctgtcactcaggatggagttcagtggtcctatcatggctcattatagcctcaaactccc

SEQ ID NO: 830104 - DNA, 98 bp, Homo sapiens
agtcgtggttcctgtgatctgtgtcctctttgcagaaggttagctaaccatgcagcaggtgcttgagtttcacctttctccagtccagcagaattaca

SEQ ID NO: 830105 - DNA, 100 bp, Homo sapiens
cgggtgaggtacaggctcagtctgcggccaagactccgtcctgcaagatgctctctgtgtgggtatgtgtgtagccatcctccttctttgaagtctcata

SEQ ID NO: 830106 - DNA, 100 bp, Homo sapiens
ccttatgggcttgcagaaggaatctcactctcaggtcgctcctgtggttggtccagcccagaatgcagccttgagcctggcttaggccaccacctactcc

SEQ ID NO: 830107 - DNA, 100 bp, Homo sapiens
aactcctgctctgtttactgtggattggatattctcaaggaaccacacatgtattaagatttgcacagtgatgcggtccatgacctccttctggatgtga

SEQ ID NO: 830108 - DNA, 98 bp, Homo sapiens
gtgccttgcttggagctgacgccgacgggctgggacctttggcctacaatcagcaaggggctgtgttccctgcaactgcaattcttttgggtctaagt

SEQ ID NO: 830109 - DNA, 98 bp, Homo sapiens
gcgcgccggggagcggcgcccccgccgctgccgccgcgacccttggcgcctgcccctgcaacgggaggtgaccagaagtcagcagcttcccagaagcc

SEQ ID NO: 830110 - DNA, 100 bp, Homo sapiens
ttccggacacacttggactcgacagactctaagatcaaccttttcggccttccttgtcccgcaataacagcgtacctaattactgcaaaaatgatgaagg

SEQ ID NO: 830111 - DNA, 100 bp, Homo sapiens
gacccacgagatcatggggcccaagaaaaagcacctggactgagactccatcctctgccaatggcccttcccgggagggctctaggctgccgcctgctag

SEQ ID NO: 830112 - DNA, 98 bp, Homo sapiens
gacagtttggagctgatccggagcaaggctgggcgtgtgtttgggcggacagcgtggaagatgaactggagatggccaccgtcaggcatcggcctgaa

SEQ ID NO: 830113 - DNA, 98 bp, Homo sapiens
attcgacgatttcttcaatggacagaattattagatcctacaaatgtgttcatttcagttgagccagagtgacccctcgacctgtcagccatggggga

SEQ ID NO: 830114 - DNA, 100 bp, Homo sapiens
gaagtcaccattggagctcatcagactgaccgtgtcttacatcagttcagagaggtacatggatgtagctggaaagcttcattctcagcaaactaacgca

SEQ ID NO: 830115 - DNA, 100 bp, Homo sapiens
ctgctcgccctcctcctgcctcactgccagaagctctttgtgtatgaccttcacgcagtcaagaacgacttccagatcactttgggaagcagtgacatcc

SEQ ID NO: 830116 - DNA, 100 bp, Homo sapiens
caagatgtatattgcctttgtattcaaggagaagcaggttcccagtgcccccgacaagcccctgctggtgtctccatctcctgccaagcatcctccagtg

SEQ ID NO: 830117 - DNA, 98 bp, Homo sapiens
ttccagaatgatgaaattgtatgagaactggactgatgaccaactgcttggttttaaaccatgcaatgaaaaccttattgctggctgcaatataatca

SEQ ID NO: 830118 - DNA, 98 bp, Homo sapiens
cagaactgcctgattacaggagctttaacaggagaataaaggcagccccgttgatgactgaaaatgacaaagcatccacctaacagacgaggaatcag

SEQ ID NO: 830119 - DNA, 98 bp, Homo sapiens
tccagcactggactcatggaggctgagcatttattcagacaacagcccggagacgcgggctaaagtgaagtttgtccaggacacttctaagtattggt

SEQ ID NO: 830120 - DNA, 99 bp, Homo sapiens
cagccctgtgcacacagaccggacacaggcgtccacagatgaggacggggacttggttgccttttccagtgacgaggaattgacaatggccatgtccta

SEQ ID NO: 830121 - DNA, 100 bp, Homo sapiens
aattctgggccgaaatgatccgcctgcctcagcctccaaagtagctgagactacagagagaggctgctcacccaacagacgtctccatctccaaaacagc

SEQ ID NO: 830122 - DNA, 100 bp, Homo sapiens
aaatcgtgtcaacacttttaccttctaccattgatgcttcagcgcctgctcctggtcatcactaaccagatttacttggagtacatgtgaaagaaaacgt

SEQ ID NO: 830123 - DNA, 100 bp, Homo sapiens
ctctacttccatccctgtaatttcacagccccaggatgttgcttcagagtgtgaagtcaaatgcatgccaacattccagttttttaagaagggacaaaag

SEQ ID NO: 830124 - DNA, 100 bp, Homo sapiens
gtccactaagaaaagtccatgtgctggcagcacttccctgagccactctccaggctgctccagtactcaagggaacggcctcaagtactacagccttcca

SEQ ID NO: 830125 - DNA, 98 bp, Homo sapiens
aaaagttgaagtcaagcaagaggaaataatgaagaaaaacaaattccgcgtggtaatattccagagagcagagctgacatctgataaagacatgtacc

SEQ ID NO: 830126 - DNA, 100 bp, Homo sapiens
caaaaaaatagcctgcctcagctatgggagtggtccacatattgtccttgcaacaacagaaatttgcccttggccattgggatttctatgccaattgtga

SEQ ID NO: 830127 - DNA, 98 bp, Homo sapiens
gtgaacttcactggatgtagcctgcccagtgaaagggccatctttaggacaggagacggtggctcagggagtaaaggaaggccagttgagcaaacaga

SEQ ID NO: 830128 - DNA, 99 bp, Homo sapiens
tcccaggttgccttggaaaatgccaacgccgtgtctgaagctgaatttgtgatcagtcttgctgagaaaaataccacctttgatacttttaaggcttct

SEQ ID NO: 830129 - DNA, 100 bp, Homo sapiens
agctggcggacatcactttagaccctccacctaattgcagtgttggctctggaattaagggatggggagaaggttctggatctctgtgctgctcctggag

SEQ ID NO: 830130 - DNA, 60 bp, Homo sapiens
acaactcgggcctccccagcgacaggatgtgtttggccaaatgggagagtggttacaaca

SEQ ID NO: 830131 - DNA, 100 bp, Homo sapiens
caggaagcccggtttgcccagagcgccccaggccgcctgatcttcgacaacctaaagaagtccattgcctacaccctgaccagcaatatcccggagatca

SEQ ID NO: 830132 - DNA, 99 bp, Homo sapiens
tggtttattatgcagaagttaatgacaggaaaaacagctctgacttgaaatatagaattctggttcaaaccttgtactactcagctgatcacaagctgc

SEQ ID NO: 830133 - DNA, 98 bp, Homo sapiens
aggtggacgtgctggtgtctgagtggatggggacctgcctgctgatggcaccgaaagcgaaggaagctcctgctcctcctaaagccgaagccaaagcg

SEQ ID NO: 830134 - DNA, 100 bp, Homo sapiens
ctgcgggaccgcgctgagaagaccctgaccatcttcatggagtacatgccaggggaaatccctttggaccaggtggacatagacaaagagaatgagatgc

SEQ ID NO: 830135 - DNA, 100 bp, Homo sapiens
gccctgccgagggggcgctgcctccccttgggaaaagagaaacagcacccaggactatcttccaaagagttctggatatcctaaagaaatcttctcatgc

SEQ ID NO: 830136 - DNA, 100 bp, Homo sapiens
cagggatgttcaggagctgaaagacgcaagggctggaaaaatgtacccaagcaacgagggcatacattcaagaattccaagagttctcaaaaaatatatc

SEQ ID NO: 830137 - DNA, 100 bp, Homo sapiens
cagggaggatgacggagctgcagtcggcactgctactgcgaagacagctggcaggctgcaaggtgtgactgttgtaaatctcaaggaactcttaaagagc

SEQ ID NO: 830138 - DNA, 136 bp, Homo sapiens
ggtatctgggcctttgaccttacctcagactagaggcgatggaaagaaaatagttagttaccaggaaacccagcgtttgctggcagaaccagttcctggcatcaaagccgaaccagatgagagcaacgcccgttat

SEQ ID NO: 830139 - DNA, 100 bp, Homo sapiens
gaaccggactgtaaccccagtgaagctgccagtgaagaaagtaacagtgagatagagcaggaactcgaatcatttatgacagaaagtttctgttggatcg

SEQ ID NO: 830140 - DNA, 99 bp, Homo sapiens
acacctctgcctttgttgggaaatgttttgtcctatcgtcagaaccacaatggacactgccagccatagccttgttcttctccagcagctgaacatgca

SEQ ID NO: 830141 - DNA, 99 bp, Homo sapiens
tgatcttgtgcagataatgtagttggaaaaaggaggagtattctgatcttttcagtcctcctgcatatgcccaagaggattgggagtggaatggacacc

SEQ ID NO: 830142 - DNA, 100 bp, Homo sapiens
tgctgtcccacagataccctcttacagacctaatctgggagcctgcaagtgacaacagcctttgcggtccttagacagcttggcctggaggagaacacat

SEQ ID NO: 830143 - DNA, 98 bp, Homo sapiens
ggcagtatagagacgtcggacttcacgggtgattctgggggtccacttgtctgtaatggtgtgcttcaaggtatcacatcatggggccctgagccatg

SEQ ID NO: 830144 - DNA, 100 bp, Homo sapiens
ttccgtagcataagagctgaaacttcagagcaagttttcattgggcaaaatgggagtatgccaagatggaaggaagcctcatacagtgagattaataatc

SEQ ID NO: 830145 - DNA, 98 bp, Homo sapiens
cagctgactgcacttcttttttgagaaaggaaggaatatatcctgactgattacccaacatgagtgaagtttcctgcaagaaacgggacgactatttg

SEQ ID NO: 830146 - DNA, 99 bp, Homo sapiens
cacctttaactctccttatgctgggtgaaaacaaagatgtttcagaaagaacaagtggatcctcttcagatgaaattgcagcaggtgaatggacttggc

SEQ ID NO: 830147 - DNA, 100 bp, Homo sapiens
ctgaaaatgatgttggaaatgcacaagctggagcccaactgataatccttgaacatggagatatgtcagtattgaattctcccagacatcagagctgtat

SEQ ID NO: 830148 - DNA, 100 bp, Homo sapiens
gtcggcgccccgcgcctgccgctgccctacggcttctccgccatgcaaggctggcgcgtctccatggagctggacacctgttctgctgttgtgtcctgcc

SEQ ID NO: 830149 - DNA, 99 bp, Homo sapiens
gctctttcggcggaagtgatagagcagtacaagaaacatggtgccggcatctgcttctggcgagggcctcagggagcttctactcgtgcaggaaggtga

SEQ ID NO: 830150 - DNA, 111 bp, Homo sapiens
tttaccttggaagaactccgtgcccagatgctcataaggattgtcctctttctacaaaagctgccactgcagagccccgccatggaagacacgccgttggtgatatcgaag

SEQ ID NO: 830151 - DNA, 100 bp, Homo sapiens
gccggcggccaagcagccaaccatgctcaacttcggtgcctctctccagcagactgcggccagaagcggactcctagaagaggggagcagcaaggatgga

SEQ ID NO: 830152 - DNA, 51 bp, Homo sapiens
aagacgactcaataggaggaaggaaataatgaagatgtttcattttcaaga

SEQ ID NO: 830153 - DNA, 98 bp, Homo sapiens
gaacttgcaagaagatgggcattaagacagttgccatccacagtgatgttgatgctagttcttcttcccaagggattgttgaagaaacttctgaagag

SEQ ID NO: 830154 - DNA, 98 bp, Homo sapiens
cagcagacagtggccccacagcaacagaggcgcagcctcaaggaggaggagtgtccagcagcaacacagtcactcctggcggcaaaccaaacaaaacc

SEQ ID NO: 830155 - DNA, 100 bp, Homo sapiens
actgccgcttcagttctcccggtgtggccacgagtcgggcctcttcatgtgcttgtgtgcaacgcagcaacttttgctctaccctggagtctcaccaaag

SEQ ID NO: 830156 - DNA, 100 bp, Homo sapiens
ctcgagctgcgagagtcttggctcccagccggcggcggctcggccgcccagcgtggactccttgtccagagttactggaggtgaactgtttgaagacata

SEQ ID NO: 830157 - DNA, 98 bp, Homo sapiens
tcagaaaagtcaaagcctctgtggacatgtttgatcagcttttgcaagcaggtatgggcactaggaaaagacttcttccatcaagcttaattgttttg

SEQ ID NO: 830158 - DNA, 100 bp, Homo sapiens
agtggcgtcctggagccctcctcaggtgagctggagctgcccggctcggcagcgggaaggaaagatgaatgggagggctgattttcgagagccgaatgca

SEQ ID NO: 830159 - DNA, 98 bp, Homo sapiens
gtcctccatgagaagcaagatttggaaggcttgatcggaaccctctgtgaccaggtgctgttccagaattcaaagaagagaaactgcagctgcaacca

SEQ ID NO: 830160 - DNA, 100 bp, Homo sapiens
cgggggctcagagatccaagtgcgcgccctggcgggtccggaccaaggaatagccaggccagaagaaggaaggcctgtggtgagtgggacaggaaatgac

SEQ ID NO: 830161 - DNA, 98 bp, Homo sapiens
gagaaggtgcggactcttgttcttgcactggtggtaaaataccatgaagattttgaaaaaacaaaggggagaggctttactcccgtcgtggacgatcc

SEQ ID NO: 830162 - DNA, 100 bp, Homo sapiens
atcacagccaccacagcatctttctgaagccgggagagggcctgtagggctgcggggtattgaatttgaggctgctctcagcattactgctcatctcaaa

SEQ ID NO: 830163 - DNA, 51 bp, Homo sapiens
gtctgctcgggggtctacttcgagggtcccgcagcccccggaagccaatag

SEQ ID NO: 830164 - DNA, 98 bp, Homo sapiens
gacttgaccaagaccgactgccagtaatagtcatcagggccaagttcgtggggacaccagaagtcaaccagaccaccttataccagcgttatgagatc

SEQ ID NO: 830165 - DNA, 100 bp, Homo sapiens
cggcgcgggagggctgtgtgatggcctcggagcgcccggagccggaggtgtggatgaggtcaccattgtcaacattttgaccaaccgcagcaatgcacag

SEQ ID NO: 830166 - DNA, 98 bp, Homo sapiens
cgttgcatatctgacggagttatttattcaattagaacaaatggtgtgcttctatttataccaagttctccaacatcttcaaataaagaagtggttat

SEQ ID NO: 830167 - DNA, 100 bp, Homo sapiens
tcacatcaaagagattctgacaactgcctgcctagcggctcagtgcatcgacaggtttacttttggacatcaagcccatcactgccagccagtgaagaag

SEQ ID NO: 830168 - DNA, 100 bp, Homo sapiens
gaaactgaagaagacagagacgcaagagaaaaatccactgccttccaaagaaagggcgctaatcgtactgaaacagtcacgtcttttagaaaacgagaaa

SEQ ID NO: 830169 - DNA, 101 bp, Homo sapiens
agagagcccaacgcctggtgctcaagactttctccgagggcgccctgcgtccggcagaggaggcgagcatcccgctcaggtgatgaggaacccctcgcgca

SEQ ID NO: 830170 - DNA, 98 bp, Homo sapiens
caatgggctacttcaaatgtttaatcacacacaacatattcgaattgagtcaagcccatttcctctttccttcagtgaatctacagacctattttctc

SEQ ID NO: 830171 - DNA, 98 bp, Homo sapiens
gaggcaccgggatcgtgaccgagaccgtgaccgagagcgtgaccgagagcgcgaatatcgtcatcgttagaagattttgtccatcatgctgtactcct

SEQ ID NO: 830172 - DNA, 100 bp, Homo sapiens
aagtggctacacttgccactgtgtgctgccatacacaggtgatggaaccagccctggaaggcacaggcaaagaggggaagaaagcatcctccaggaagcg

SEQ ID NO: 830173 - DNA, 99 bp, Homo sapiens
ggggcctgcccttgggacaggtccagacccatggagccccccgggaggagcagcagtaatctatgccagcaattatgacaatgttagcagaccatgcag

SEQ ID NO: 830174 - DNA, 98 bp, Homo sapiens
agaaagagaagaaacgttttctcaggtttcgcatcgccgaagatagattctgttgctgctcagcccaccgcaacaagcccagtagtttatacaagacc

SEQ ID NO: 830175 - DNA, 137 bp, Homo sapiens
ctggacttgaaaagctgggaatattcgtcaagacagtaacagaaggtggtgctgctcaacgggatggcagaacgaagtcggcctactggagttcttccaaaatgtgataaaagaaactagggcagagccaaaaaagg

SEQ ID NO: 830176 - DNA, 98 bp, Homo sapiens
ataaaccaagcactctagatgccctcaactatgctctccgctgtgtccacagcgttcaaggagatgagtatgatgtatgtgccatttgtttggatgag

SEQ ID NO: 830177 - DNA, 100 bp, Homo sapiens
gttaatcttggcgacattgacaatgatggctttgaaggcctgcactgcccaaagtcttggaaacttgctggatatgatgtaccgggagccagcacgatgg

SEQ ID NO: 830178 - DNA, 98 bp, Homo sapiens
attcagaagaatgcaggccttgcttttatcgaacttgtcaatgaaggaaggtttttcgttggaatatacgttgcacatttatggcgattctgagtgtg

SEQ ID NO: 830179 - DNA, 100 bp, Homo sapiens
aggaatttcagtatctgctacggtaacttcatcagcccgccaagatggcgatgcaagcggccaagagggcgaacgaatccagacgctctgcagtgtccca

SEQ ID NO: 830180 - DNA, 98 bp, Homo sapiens
aaggtgctaccatcgtgagagtaaggatatgggccctcacattttccaaacctgtccatctgctaactattttgactgcagagccatgtccattggag

SEQ ID NO: 830181 - DNA, 98 bp, Homo sapiens
aagcatgggttaaaatagaaaatctagccaaagccaatccccaggatcttctcttagaaatctacagaagtataggggagccagatagtttgtatggc

SEQ ID NO: 830182 - DNA, 99 bp, Homo sapiens
caacagaggatgtcaacaattttttggaggaaagaccacagcaagattctttcattcgtctcctcctagcctgggggaccaggctcgaactgaccctgg

SEQ ID NO: 830183 - DNA, 98 bp, Homo sapiens
aagggctcaatatggaggattacagttgctgggagcctgagcacctttcgtttttcggctcagagaaagccaagtgcaacttgcttcagtcatcctga

SEQ ID NO: 830184 - DNA, 100 bp, Homo sapiens
gacgctgctgggtccgctgagcggggcgacccgagggaagtcttaagagaagccgacagatctcacctcaggaattcattcatgagctgaaaatggggtc

SEQ ID NO: 830185 - DNA, 100 bp, Homo sapiens
ttgagcaatggtctttgctgtgccttctctactgatggcagtgttttagctgctgggtttgaatcaatttggccagatgagcatggcccagccccctatt

SEQ ID NO: 830186 - DNA, 98 bp, Homo sapiens
gtcgacgactgggacaatgagaacagctctgcgcggctttttgagcggtcccgcatcaaggctctggcaggagtgggaatagctttgcgaaaaatggg

SEQ ID NO: 830187 - DNA, 100 bp, Homo sapiens
tcagtatgtggacaagttcggcttccacacggtgacgtgctgcggcttcatcccgcagattggtgaggaaatgagccagaacagtttcataaaacagtat

SEQ ID NO: 830188 - DNA, 99 bp, Homo sapiens
tctgtccagttttcaaaccacacagggccgttgctccagggagaactgcaaatatcttcatccacccccacatttaaaaacgcagttggagataaatgg

SEQ ID NO: 830189 - DNA, 100 bp, Homo sapiens
atatttaatggaaaatcgcttggttaaaacctgacacttttaacagagcccaatgacgaaagtggagctaacgtggatgcgtccaaaatgtggcgcgatg

SEQ ID NO: 830190 - DNA, 98 bp, Homo sapiens
aggagtgggctgtgatcttctacccagcttatagtgatttaggatactacattatcaataaactgcaccatgtggacgagtcggtggggagcaagacg

SEQ ID NO: 830191 - DNA, 100 bp, Homo sapiens
acgggaacttttcaactgacttttacttttgacgaccaccatgactgagatcactgctgaaggaacttagtgatttggcccgtgaccctccagcacaatg

SEQ ID NO: 830192 - DNA, 98 bp, Homo sapiens
tgtctgatcccttgctcccatccctgcagcatgaacaaggctgtgaggatatcattgctgagagcatctcattagataccttaattgccatcctcaag

SEQ ID NO: 830193 - DNA, 100 bp, Homo sapiens
cagccaatcggatgctgaagcagatgcttttcagatggctctgagagattcctctgcgaatctgtttttagctatcaagtggcatccacgcttaaacagg

SEQ ID NO: 830194 - DNA, 99 bp, Homo sapiens
tcgcagtctccctgctacttaccacctgccgccggttgccggaggccatcgaggaagtgaagaaggacacactcaggacaccaacaccttctttctgtg

SEQ ID NO: 830195 - DNA, 98 bp, Homo sapiens
tctccacacgggcaccttctggctgacccggatcgtgctcctgaaggccctagccttcgtgtactgagcaggccgggctctcgccatgggtcactgtc

SEQ ID NO: 830196 - DNA, 98 bp, Homo sapiens
tgaggaaaggcacctccaccaggcccagatagctaataaccgaacacctggaagatggacccagcggtactattcagccaacaaaaacattatctgta

SEQ ID NO: 830197 - DNA, 100 bp, Homo sapiens
atttaggaatccaaggagataaagaatactgtattactaggtgtgcgagaagagcagagatctccattcaatgatcgttttccacttaagcgacctcgat

SEQ ID NO: 830198 - DNA, 100 bp, Homo sapiens
accaatcagctcttcacccggttcagtgacaacaaccaagcattaactggcattgctcgggtaccacttgctggagctgctggaggccctggggttggta

SEQ ID NO: 830199 - DNA, 100 bp, Homo sapiens
tgtctttccctgctgctctcagagctaaagttgcagacaagatccagctcatcaataatatgctggacaaagtcaatgagatgattattggtggtggaat

SEQ ID NO: 830200 - DNA, 98 bp, Homo sapiens
gccggaggaagctcaccttcgacgaggaagcttataaaaatgtgagctgtaggtaaaacttgcctactgatcagttacacaaccaatgcatttcctgg

SEQ ID NO: 830201 - DNA, 100 bp, Homo sapiens
ttcgatgtgtgaagaaaaaagaagtaaaagaagctattattacaagaataaaggcaggaatcaatccattcaatggaacccagtgaaatgagctgcacca

SEQ ID NO: 830202 - DNA, 98 bp, Homo sapiens
cctggacgtgctcgcgcccctggtcctgctgctcggggtccgcgcggcctccgcggagccagccacagcgtcctgtgtttactcatgaaaatattcaa

SEQ ID NO: 830203 - DNA, 100 bp, Homo sapiens
gccaggtagagtgaagtcctacagagttatcaggttccagaccctgccttctcttctgaaagccaaggacccttgtcatccattagagcggtaatcaaga

SEQ ID NO: 830204 - DNA, 100 bp, Homo sapiens
tcttcccagctttggttggaagacctattatcagatcaaccaccaaagtgggaaacattgaaatcaagataagtaatggaacatcatctgtgatcgtctc

SEQ ID NO: 830205 - DNA, 100 bp, Homo sapiens
gtatgggatctgatgatgctgcctacacacaagctgcagaagaaagatcagcaactggagcctaaaaaaagtaccagccctaaaaaagctgcggagccca

SEQ ID NO: 830206 - DNA, 100 bp, Homo sapiens
cgcaagtcgagaggaaactgttgtgcctcttcatattggcgatcctgttgtgccccctcccaccacctcctccagtaagcagaaacggcagcacatctcg

SEQ ID NO: 830207 - DNA, 100 bp, Homo sapiens
gtcatgtggcatgcagatgcaacctctgcctttttccgctgtaaataattaagaagaccaagtagcatccaagactaactggatcttctgggtttgtgac

SEQ ID NO: 830208 - DNA, 100 bp, Homo sapiens
ctgcaggccatgcacctggagcgatgggtgaaaatcctatttataagagtgccgtaacaactgtggtcaatccgaagtatgagggaaaatgagtactgcc

SEQ ID NO: 830209 - DNA, 100 bp, Homo sapiens
gcggcagctgcaggtcctggatttatttctcgattcgctgtcggaggagaatgagaccctggtggagtttgctattggggactacatccctggcacagag

SEQ ID NO: 830210 - DNA, 100 bp, Homo sapiens
ccgtgacccgtgtattattgtccgagtggccggaacgggagccaacatggcagcggggttcgggcgatgctgcaggacggagtctcgctctgtcacccag

SEQ ID NO: 830211 - DNA, 100 bp, Homo sapiens
agaccttcaagtttgtcgtcgtcggggtcctgctgcaggattactacagcatcccatttcccacacccactactccgctgactgggagggatggtagcct

SEQ ID NO: 830212 - DNA, 98 bp, Homo sapiens
tgaaggagccagtagagacagctgtagaaggagcatttctaccagaggcagcaccggctgcccgagccctcctgcccacagctggccacactcaccag

SEQ ID NO: 830213 - DNA, 100 bp, Homo sapiens
tgtggtacctgtggaatcagcaggtccagctcttctatgaactaactgatatcatgaataaggtctggaacaagattcagaagagaggcaatctcaacct

SEQ ID NO: 830214 - DNA, 100 bp, Homo sapiens
acggggcgagtgccaactggaccattcagtacaacgacccaatattcatgggctgccctgggcaagagccagctctgtttagcactgataatgatgactt

SEQ ID NO: 830215 - DNA, 100 bp, Homo sapiens
aaatctctaaatgcagattccagaaaaattacagcacatctcagtgaatttgcaagtggtaagaatgattgatgttggctgatattggagtgctcattca

SEQ ID NO: 830216 - DNA, 100 bp, Homo sapiens
ctttcggaacccgcaccaagctctgctccacactgccaaccggccagaggacgagtgtggacttcgagtaagaaggtgatttacagccagcctagtgccc

SEQ ID NO: 830217 - DNA, 98 bp, Homo sapiens
aagacatgacacttacaagatggacagggatgataattgggcctccaagagttggaaaagagactgttcaaaccactgaggatcagattttgaagaga

SEQ ID NO: 830218 - DNA, 100 bp, Homo sapiens
taggccatctgaataactttactaagggagtgaactactttatgtccaagggtatcctggatgattcgccaaaggaaatagcaaagtttatcttctgtac

SEQ ID NO: 830219 - DNA, 100 bp, Homo sapiens
aaggaatatgcattgaagcaaattgaaggcacaggaatatccatgtcggcttgtagagagattgcacgtcatcacgtagacataaccaagaaacttcacc

SEQ ID NO: 830220 - DNA, 99 bp, Homo sapiens
aaaagccggcaaaaccacttacagctgaaaaggcctatggcatgtctgcgttacctttaaatctgataaaaggcactagaagcgctgcttatgaacgtt

SEQ ID NO: 830221 - DNA, 100 bp, Homo sapiens
ccggcctctccccgccggcccgcgggctcgccgtccggcgcagggcagacttaattcagtgcacaaatgagatgaatgtgaacatcccacagttggcaga

SEQ ID NO: 830222 - DNA, 100 bp, Homo sapiens
aaacttttcaagcctgaaggaaaggcagaactgcctgattacaggagctttaacagcctgcctagggtagttaaaagacgagtgaatgctctcaaaaacc

SEQ ID NO: 830223 - DNA, 99 bp, Homo sapiens
attcagcaaatgaagattcagtggatgctaagccagaccggtcctcgtttgtaccgtccctcttcaggagctatgaagacatgattggtgaggaggtgc

SEQ ID NO: 830224 - DNA, 129 bp, Homo sapiens
aagcggcagaagtccaagtcttcccagtcgtccaccctgagccactccaatcgagggaatgaaagctactggttgattttaaagtgcctgggcctcacaggtttggagatgtcccagaataaggcacaa

SEQ ID NO: 830225 - DNA, 98 bp, Homo sapiens
gcaaagctgtcatttgctgtcgcacccagtcagcttgaagagtttcaaatggaccctaccactgagaaatcaagatggcagtctactatggggaattg

SEQ ID NO: 830226 - DNA, 98 bp, Homo sapiens
cctgccactgctgtgcctgtcgtcgtcattgaaggagagagcaaggcagttatttggcagaaaagcagagtatcagatcacaagatggctctcatgtc

SEQ ID NO: 830227 - DNA, 100 bp, Homo sapiens
cctgtacctccccacagagcttcaaaacgggcttttaggaagaaggaatggaggctttgaagtgtgtgtgtgcaggccacagcagcatgcccttggtgta

SEQ ID NO: 830228 - DNA, 100 bp, Homo sapiens
gaaagagaagctctatctcccctccaggagcccagctatgaactccttctccacaagaatggtcctcgtccgaagtgagaatgggcagttgttaatgatt

SEQ ID NO: 830229 - DNA, 100 bp, Homo sapiens
acctaactacggaaaacctgatcccaaaattattgaaaacactcgaagggaccaagaatcgccttcagccctgtctggtgcatccttggcagaaagtgag

SEQ ID NO: 830230 - DNA, 100 bp, Homo sapiens
aattatcgcatctcttaatcaacaagttgcttttggaatcaataaggtttccaatgctcccaaatgtgtcagaagaaacagtgtctcccaccagagcacg

SEQ ID NO: 830231 - DNA, 99 bp, Homo sapiens
ggcggcataaagctttttgcagtgttttataccctcggcaatcttgctgcgttagccagatccagaagcttggaagctgtattacagatccaggtaatc

SEQ ID NO: 830232 - DNA, 98 bp, Homo sapiens
acgttcagcggacacgggagcaagatggcgattccgggcaggcaaaagaagctggcccagcggctgcaggatgccgaggaggccgtggaggctgttaa

SEQ ID NO: 830233 - DNA, 100 bp, Homo sapiens
cgtctccgccggctactgccgcttcagttctcccggtgtggccacgagtcggagcttgacctcatggacctcgtaggggaagacagaaagtggatgatgg

SEQ ID NO: 830234 - DNA, 100 bp, Homo sapiens
ggagaggggagcgaccctggggaccgactctggggaccctcgccgaagaggacatccaggcagaaattgatgcccacaatgacatatttaaaagcattga

SEQ ID NO: 830235 - DNA, 98 bp, Homo sapiens
tctttccatcgaacattccgagaatgcgagagaaagagcctccgtcaccacatatttgctatgccaaaaattttggccccacgggtattgggtttgga

SEQ ID NO: 830236 - DNA, 99 bp, Homo sapiens
catcgaggatttggcgctgcagaaccagatccgggagcacgtcatctccatcgagggacccattccaacaatctcgtaaaacatggtggattactatga

SEQ ID NO: 830237 - DNA, 100 bp, Homo sapiens
ataaaaacagaacaggaggtggtagagggcatggatatctctactcgctccaaaggttgtccttctattcaggccactcttcgttttccatgtactgcat

SEQ ID NO: 830238 - DNA, 100 bp, Homo sapiens
caaaaagaagtgggaaagtgggcactgcttaaaagacagaaatgaaccctgccatataatgatattatgaacagtgagaaaagttatgattcattgccca

SEQ ID NO: 830239 - DNA, 98 bp, Homo sapiens
actgagagttcaaatacaacaattgaggatgaagatgtgaaaggactttgtgttttatgccccacgtctgagaatcaacaagcggatcctgcagctct

SEQ ID NO: 830240 - DNA, 100 bp, Homo sapiens
tatggttatgggggacaaaaaagacctttagaagatggagtgaaactggaacgccaagctgaagaagaacgaatacggaagcacaaagcagctgctgaga

SEQ ID NO: 830241 - DNA, 100 bp, Homo sapiens
ctttggcatcactgcagctagtaatttgccttctggattgctgaccggttccctgatgtgttacctgcttctgctactgatccaaactgcagaacttctc

SEQ ID NO: 830242 - DNA, 98 bp, Homo sapiens
tactttcatgagtttggtcacgtgatgcatcagatttgtgcacaggacattgccgagaatggctgcgcccccaccccagaagagcagctgccaaagac

SEQ ID NO: 830243 - DNA, 109 bp, Homo sapiens
gaacatacttggagagagctaactgcttcccgcctcccgtgttcatcatctccatcagcctggccgaggacttggatgttgtgggtgatggtatgcagtgtcctccttc

SEQ ID NO: 830244 - DNA, 95 bp, Homo sapiens
tttatcaagagcaccctgatttggctaggcgcacagcagtatgatgaaatgagtattctcttcacagttttggttactgaaactactttggagaa

SEQ ID NO: 830245 - DNA, 100 bp, Homo sapiens
gcacaggcagctcgcggtcatgggcggctcagcctccagccagctggacgagggcaagtgcgcttacatccgagtgccagggcaggggcccttggagtga

SEQ ID NO: 830246 - DNA, 99 bp, Homo sapiens
gcataaatagcttagctaccgatgactctgcctgttttagggatgcttgaagatggaaagaaatttgattcctcccgggacagaaacaagccctttaag

SEQ ID NO: 830247 - DNA, 100 bp, Homo sapiens
cgtgattcactgaggagagaaacaggcctccttggagaccagctactacttttcagcatccttatgtgagccattgccgaaatctaaaaaaacttgtagc

SEQ ID NO: 830248 - DNA, 99 bp, Homo sapiens
ggacggcaagtgtgttggaaagaacaccgacttcattgagaagagaagagcaagttagtaccttgtaccaaaacatcaaccttgtggagccaagattaa

SEQ ID NO: 830249 - DNA, 100 bp, Homo sapiens
tcttgtcaggcataggatttcactatttgggcaactccaacaacattgccaccgtggacatctccgcaggcttcgtgggcttagacacctacgtggaaat

SEQ ID NO: 830250 - DNA, 100 bp, Homo sapiens
ttagaaagaaaatttggaaagcatggtggaactattcccattgtacccacggcagagttccaagacaggatatcgacctgcctagagctggaacgttacc

SEQ ID NO: 830251 - DNA, 100 bp, Homo sapiens
aggtcgcctctggaaaaggccagcgttgtctccaaactttttttcagggaaatcctcattgacgattcaatttgttgaaggccaatttgtggactcctac

SEQ ID NO: 830252 - DNA, 99 bp, Homo sapiens
taaatgtcagtggaaaggagagctaccatcactaaggtgattgtagagaaggctccaaaagccagggtgcctgatctggacaagaggaagtacctagtg

SEQ ID NO: 830253 - DNA, 100 bp, Homo sapiens
gtttcccttagccagcccgagcaagtaaagattgatagcagaccccacgttagctgaaatgggaaaaaacttgaaggaggcagtgaagatgctggaggac

SEQ ID NO: 830254 - DNA, 100 bp, Homo sapiens
cgcggaaaccgatctgcccgttgtgtttgtgaaacagagaaagataggcggccatggtccaaccttgaaggctaggcagctggaagagaaagaccgagtg

SEQ ID NO: 830255 - DNA, 100 bp, Homo sapiens
gaacttcatcatcatctacttcacaggaattgccatttaccccaagactgcttctgagacagaaacagatatctgtgctgaatgggagataaagaccatc

SEQ ID NO: 830256 - DNA, 143 bp, Homo sapiens
caagagcttactggtgaaggaatgggacaagacccatctttatgcaaagccagcgttacagtaatgttccagtccagaacacatattacataatggagccgggagacagactagggctggcttgatccggccacgcagtccag

SEQ ID NO: 830257 - DNA, 98 bp, Homo sapiens
caaactaacacagtccctatcaaacctttgatcagtactcctcctgtttcatcacagccaaagttatgattcaagaagattaccacagtcaaaatcct

SEQ ID NO: 830258 - DNA, 100 bp, Homo sapiens
caggagacctggaatcattgttggattgatcggaagatgtcaagtactcacaccagctacaaactggatgaggcgcaggctatcatgagtgagctccgga

SEQ ID NO: 830259 - DNA, 98 bp, Homo sapiens
gcccgatcctacttgtcctcccagattcagtcctattttgtaacggattatgatccaaccattgaagattcttacacaaagcagtgtgtgatagatga

SEQ ID NO: 830260 - DNA, 100 bp, Homo sapiens
gatgagaccgcaattcgagaatcaaagggccgggagcgatgggggggccctcagcctcttggccttgaacgggctgttcatcttgattcacaaacacaac

SEQ ID NO: 830261 - DNA, 100 bp, Homo sapiens
tcatttgctactatgggaaccgaggggagcctgatcctatcgttttgacgccagctacaaggctttggcccaccaagtgtgtaccatgctgctattgtca

SEQ ID NO: 830262 - DNA, 100 bp, Homo sapiens
tagatcacattctcgatccagaggaaggcgatactctcgctcacgcagcaggagcaggggacgaagccgattatgtttcgaggggaagtacgtttaaatg

SEQ ID NO: 830263 - DNA, 100 bp, Homo sapiens
ctgggctttcttaaatattatgctacagaatttgagcaaaagatgtgattgaagagcatggtccttcagaaaaggcaataaacggcccaactagtgcttc

SEQ ID NO: 830264 - DNA, 100 bp, Homo sapiens
ggggccaaagtgatggcaaccacaggaggaaccaatttacgagatgacataatgaggcttgatgatacaggaatctgtcttggaggacatcagaaggtga

SEQ ID NO: 830265 - DNA, 100 bp, Homo sapiens
gcaagaacatccgagggtgcctgggaatcggtcgcctggaggaccagtatttcccatggagggatcgaatcatcaatttagttgttggcagcttaacatc

SEQ ID NO: 830266 - DNA, 99 bp, Homo sapiens
ttctctcatatctacatttggggaaacaaatttgatgaggctacgtgtatagaaaggttgaaacttgaacgtaacaaagaatacaatcagtttctcagg

SEQ ID NO: 830267 - DNA, 100 bp, Homo sapiens
tatctaaatctcagagtatcttaatatctaccagtgcaacagcatcttcaaagatttataatcgcttagatacaaattgctgtggattcagacctcgcaa

SEQ ID NO: 830268 - DNA, 135 bp, Homo sapiens
aaggaaaaacatcttgatctggagaaaaactggatgttggtagaaaaagcaagagtttgttatatagcagcaatttgaatcaacccatagaagtgacagcgctgtattcatttgaaggacagcagcctggggatt

SEQ ID NO: 830269 - DNA, 100 bp, Homo sapiens
accaatgtgtgaagtgacaggcggttcatgaaccatcgagctccagccaatggccgctacaagccaacttgctatgaacatgctgctaactgttacacac

SEQ ID NO: 830270 - DNA, 100 bp, Homo sapiens
ggccaagatacagcagctaatgaaggctgaatcgtctcaaacttgtcattctgaacaaggtgataaaaagatggaggaaaaaaattcaggcaacttccag

SEQ ID NO: 830271 - DNA, 100 bp, Homo sapiens
caagtggccaggctgtgaagcagtgtgcgaagatttccaatcatttctaaaatacttggcatatcgaaattttatgattgacacgtatcgtctaaacccc

SEQ ID NO: 830272 - DNA, 100 bp, Homo sapiens
ccaccgaaggaagtggtcccagaaaagaaagtaccggtgcctcctgccaaaaagccagaagctccacctcctaaagacatgctgctgatcaccaacaacc

SEQ ID NO: 830273 - DNA, 98 bp, Homo sapiens
tctacactgggcagctggccctgaactgggcatggccccccatcttctttggtgcccgacaaatgggctgggccggaaggtggtggtcgtacgctgtg

SEQ ID NO: 830274 - DNA, 98 bp, Homo sapiens
cgaagacgagatccagttcctgcgaacttgaggtctgccagtctttagtgaaacacagctctggaataaaaggaagtttaccactacaaaaactacat

SEQ ID NO: 830275 - DNA, 98 bp, Homo sapiens
agtggaagacaacaaaaacaactgcattgtgtacagcaaagagcctggagaaagttcttgtggaattcagtcacaaggagttgtttgatttctataac

SEQ ID NO: 830276 - DNA, 100 bp, Homo sapiens
tggtcgaatgaggcacctaaaaattgtataccgcagattcagacctttaccagaagatgatagtattgaagcagatatactagctataactggaccagag

SEQ ID NO: 830277 - DNA, 100 bp, Homo sapiens
gctaacatagctgtttgcagttctaagaacgtggttctcctcaagatttagttactaaagacatcactgacacatcaattggggcttattggacatctgc

SEQ ID NO: 830278 - DNA, 98 bp, Homo sapiens
atggagcaccttcagaatcagagaagctttactcattttatgatctggagtcaagtagaaacgttgaagcacaatgatccttttgctcctggtggaac

SEQ ID NO: 830279 - DNA, 99 bp, Homo sapiens
aagtctatccgctgtagcaattggagtaaatttcctctcactgaggaccagaaactgtatgcagccactgatgcttatataggacatgagaatggcgag

SEQ ID NO: 830280 - DNA, 100 bp, Homo sapiens
gaaactgaattggagactgttaggcccagaagaacaattagggtgacgtgtgcattgagtaaacgattttttatcaagcagaaatgcatcgaacaacgag

SEQ ID NO: 830281 - DNA, 100 bp, Homo sapiens
atgaagaagaagaggaagcaaaggaggctgaagacttcacagagaatgcagttgtcttgacttcaggtctgtctgttctgttggcaagtaaatgcagtac

SEQ ID NO: 830282 - DNA, 100 bp, Homo sapiens
caaatgtttggtaatgcagacatgaatacatttcccaccttcaaatttgaaggtgattttaaaaatcgagctgagatgatagatttcaatatccggatca

SEQ ID NO: 830283 - DNA, 100 bp, Homo sapiens
gtaaaaggccactgactcctacttcctctgtatagagcaactgttgaactcagctgcctgtaggtgacttcatggtcatgacgattttcttcaatgtgag

SEQ ID NO: 830284 - DNA, 100 bp, Homo sapiens
tttttaaagaaatgtttggagaccagaatgatgatactctgtatgatccatttgctgagcacagacctccaaagattgcagaccgggaagatgaatacaa

SEQ ID NO: 830285 - DNA, 100 bp, Homo sapiens
ctgacaactctcacacagattcggctgcagatactcacagagccctatgagtttgtctctctggaatggctgcaaaagtggttggatgaatcaacaccta

SEQ ID NO: 830286 - DNA, 127 bp, Homo sapiens
tactcaacaccaacatcgatgggcggcggaaaatagcctttgccatcactgccattaagattgaaggattctcattaagcaaactagggaatttcaaccttcaagacattgaaaaagatgttgtgat

SEQ ID NO: 830287 - DNA, 100 bp, Homo sapiens
cccgaatctgtagtgtggctggtatcggtgttcccctggtttaactagcctgtttggctgggctaagcagttccaagctttccatgtccaaggccctccc

SEQ ID NO: 830288 - DNA, 100 bp, Homo sapiens
gcatggaagtttcaacccagctggcccgtgctttcactatggactgtattactttggaaggtaaaaggattgagagggaagaagaggaagaagaagaagc

SEQ ID NO: 830289 - DNA, 98 bp, Homo sapiens
ggggccaggaggagcgaacacctgccgcggtcctcccgccggcgctgggtgcaacaatcgaacacagtgtatagtagttactgggtcagatgtgtttc

SEQ ID NO: 830290 - DNA, 98 bp, Homo sapiens
ttctcagtgcaataagaaagatgacttacttcacaagttgttcacaaagatgtccaaaactaatggcttatcagaagatttgatatggcactgtaaaa

SEQ ID NO: 830291 - DNA, 100 bp, Homo sapiens
gagaaaagcgagcctcttctgataactcaggatttacttgaaacaaaaggagaccctaatcttcaggtattgcacatctattacaaatttcctggttatg

SEQ ID NO: 830292 - DNA, 100 bp, Homo sapiens
tgacattttcaatgttgcaaaaccaaaaaacccttctaccaatgtctcagttgttgtttttgacagtactaaggatggcactgaaaatgaagtatttcag

SEQ ID NO: 830293 - DNA, 100 bp, Homo sapiens
ttggtatccagggctcatgttcacttgatgaaaactcctccaaaagaacatccagtcatggataaaaatgagctggttcagaaggccaaactggccgagc

SEQ ID NO: 830294 - DNA, 128 bp, Homo sapiens
gactcttagcactttgaaagaaaaaggctacaaagctgctttcattggaataggtgctgggactctggtgcccccaaccctgggcatcctcaggctttgaggagaatacacaggatttgaagtcagaa

SEQ ID NO: 830295 - DNA, 100 bp, Homo sapiens
atgatgaacagcgtcctggaaaacttcaccatcctccaggtgtcagctgtgatgcatgtttaaaaggaaattttcgaggtcgcagatataagtgtttaat

SEQ ID NO: 830296 - DNA, 100 bp, Homo sapiens
gtggaaaagaaagcatactgcgagccctgctacattgtgattgaagatagtactggagtccgccgggtggtggtcacaccccagtctcctgagtgttatc

SEQ ID NO: 830297 - DNA, 148 bp, Homo sapiens
gcggcgattactacacttcgcccagctcgcccacgagtagcagccgcaactggacggaggacatggaaggagggtttgccttcccggattgggcctacaagccagagtcgtcccctggctcaaggcagatccagctgtggcactttat

SEQ ID NO: 830298 - DNA, 100 bp, Homo sapiens
agacagtgaacaaaggcagtctgttgaggcatctggacaccacacacatcatcagtctgggttgccacaccatttggaggttttgaaaaagcatcaagaa

SEQ ID NO: 830299 - DNA, 99 bp, Homo sapiens
tgttactttgccacttcttcacggaccagtttcagttcgccgatgggaaacccggagaccaaatccttggtggaaaaggattattcatacctgaaggag

SEQ ID NO: 830300 - DNA, 98 bp, Homo sapiens
atggtatgaagtttctaagtgaaagccttatgtggcatatttcatcacaagttgctgaacttaagcttctcaataggtttggcatggacaagatctat

SEQ ID NO: 830301 - DNA, 100 bp, Homo sapiens
aagaacactgctccaagtgcctggcagagcagatgatcctggaggaatttggaaggtggagccgccaccaaaatgcagattttcgtgaaaacccttacgg

SEQ ID NO: 830302 - DNA, 100 bp, Homo sapiens
agagacgcaataaaccaagcactctagatgccctcaactatgctctccgctgtgtccacagcgttcaagaaggcagacggtaacaagtactccttgctgg

SEQ ID NO: 830303 - DNA, 98 bp, Homo sapiens
agcatctaaagtcaaatctctcaagcccattgactatgtggagcagttctggaggttttatagccacatggtacgtcctggggacctgacaggccaca

SEQ ID NO: 830304 - DNA, 100 bp, Homo sapiens
gtgtcacgcaggacagaaatgaccaacagataactgaggacaatggacctgcctgggcatagacttccttaagcacagtttaatggcaacgagaagcggc

SEQ ID NO: 830305 - DNA, 98 bp, Homo sapiens
aagatgctgtaaatgatgatgattttgagccatacttaagtagccagacaaatcagaaaaatgtctcaaattgggtataacaaatcagcgtgattgcc

SEQ ID NO: 830306 - DNA, 100 bp, Homo sapiens
cttacagtaatctcatattaacaggtgtggcggggcaccctggcccgcatgcggtacaaaagaaccaaggcagctctgacaataatcaggtactaccggc

SEQ ID NO: 830307 - DNA, 99 bp, Homo sapiens
ctgttgaaagcgacaagtggaggcgccgctctagcggccgggactctgaactatggcgtaccttggttgtgaagcagaagctaccaggcgtctatgtgc

SEQ ID NO: 830308 - DNA, 100 bp, Homo sapiens
gtaaggccaaaaatgtgcatactcacagagttagagagagggatggtgttgctgatagtccaactccaccgccaccacctccaccagatgacattcccat

SEQ ID NO: 830309 - DNA, 98 bp, Homo sapiens
gccgcaccatggacgcccccaggcaggtggtcaactttgggcctggtcccgccaagctgccgcactcagtgtgcaactgaggaacatggctcaagaaa

SEQ ID NO: 830310 - DNA, 100 bp, Homo sapiens
caaaggttaacggcagtgcctcagtgtgtggaccagttgacaaagatccaaactgaattacaagagacagtgaaagatttagctaaaggcaaaaagaaat

SEQ ID NO: 830311 - DNA, 100 bp, Homo sapiens
aatgttcagatctaactctagaagaaatgaaaaaacaggctgctgtccagtgtcttcgatctgcttctgatgaagtctatgttaacaatgaatgggcaac

SEQ ID NO: 830312 - DNA, 100 bp, Homo sapiens
gacacacttgccctgctcaacctggcttcaacggaccacaccaaaatgccatctcaaatggaacacgccatggaaaccatgatgtttacatttcacaaat

SEQ ID NO: 830313 - DNA, 100 bp, Homo sapiens
acatatactcaggggtcctcataaacagcttcacagcgaggtggagaagcccctgatgaacttccgtgagaacttcaagaaagacatgaagaagtgcgac

SEQ ID NO: 830314 - DNA, 127 bp, Homo sapiens
ggggaggttgggctgaactgcagtgggagaggagaagagatgctggcgtgaagggttggaatgccaagatgccttggaaacagcagcccgagccgagggcctctctcttgatgcctccatgcattct

SEQ ID NO: 830315 - DNA, 100 bp, Homo sapiens
gtcaaaaattagaacctcttcgccaaagccttaatttatctgaaagcctatatatgcaaacagatttgcagtaccaacctatgcagccaagcaacctcag

SEQ ID NO: 830316 - DNA, 100 bp, Homo sapiens
cggagaatggaactgtatgccagcagcttgttgtacagcatgtccagatcagcaatgagtcggcaattgacttctacaggaagtttggctttgagattat

SEQ ID NO: 830317 - DNA, 98 bp, Homo sapiens
tgagaaactggaccaccatcctgaatggtttaacgtgtacaacaagttaagtgggcagaccaacatccacctcagcaaaaacttcttcctgacgaatc

SEQ ID NO: 830318 - DNA, 100 bp, Homo sapiens
cggcgcgcgaggtcaagctgctgctgctcgatgcgctggctccctccctccgaggctacttctcagggctggaagtcccgtcagttctgctgaatactat

SEQ ID NO: 830319 - DNA, 143 bp, Homo sapiens
gtcgccgatcccgccggaagcgccaggacaatggggacccgggacgacgagtacgactacctattcaaagcaagagtgagccatggagctacgtgtggggaacaagtaccgcctgggacggaagatcgggagcgggtccttcg

SEQ ID NO: 830320 - DNA, 98 bp, Homo sapiens
aagtttgtcctgtcctggatcagtttctttgtcatgtagccaagactggagaaacaatgtctgcggatcaatggagagctaatcactgcctacccaca

SEQ ID NO: 830321 - DNA, 98 bp, Homo sapiens
aagtacgaggagaatcctgggtttagccattgagatctctctggttaataacttcttgaagtatgggttaaatgagcttaaactgtgcttccgagtaa

SEQ ID NO: 830322 - DNA, 100 bp, Homo sapiens
aacaactttccttttactcctttggtataatagagaccccaccccctggctacctgagtgaagatggagaaaccagtgaccaccagatgaaccacagcat

SEQ ID NO: 830323 - DNA, 98 bp, Homo sapiens
gacagcagcgactttggggcccgtcaccctcaggtgcataaggcaaatccaatacgcaagtaccagggtctggagataaagtcaagtgaccagcctct

SEQ ID NO: 830324 - DNA, 99 bp, Homo sapiens
ccagggagaggaattacgggaacagaaagaaaagtccgaaagagctggtacagtctgaaaatacagcctgttgagaaaatgcatctagctgtagttgcc

SEQ ID NO: 830325 - DNA, 100 bp, Homo sapiens
gaacttttcaactgacttttacttttgacgaccaccatgactgagatcactgctgaagggaaatctgcttcgccactgaaggtactctgcaccccagaag

SEQ ID NO: 830326 - DNA, 102 bp, Homo sapiens
ttcgggtgggagtgacccgattttccaggtcctgaatctcttcctggccttgctgctcagctccttcagtgcagacaacctcacagcccctgatgaggacag

SEQ ID NO: 830327 - DNA, 104 bp, Homo sapiens
ggatttaatgaagtaattccacaacatctgctgaagacatttgatgagaaggagttagagtttaagtgctgtggggctgctaactacacagattgggagaaaat

SEQ ID NO: 830328 - DNA, 99 bp, Homo sapiens
agagtgaggtttctgcagacaatcaaaaagcgtggatacccatcaacgaagttttgatattggaattcagattggctatcagcgacgcaataaggatgt

SEQ ID NO: 830329 - DNA, 50 bp, Homo sapiens
cttggccgcaccattgcagaccatatgaggaaagtgaggcccaaagaaga

SEQ ID NO: 830330 - DNA, 98 bp, Homo sapiens
cagctccttaccttcctggactgattcagagcagtcattatggcgaaccttggctgctggatgctggttctctttgtggccacatggagtgacctggg

SEQ ID NO: 830331 - DNA, 98 bp, Homo sapiens
aattaatgacaataatggatagtatgaatgatcaagatgtggaagatgtcaagtttgtgatcaactatgactatccaaacagctcagaggattatgtg

SEQ ID NO: 830332 - DNA, 100 bp, Homo sapiens
ctcaggtgatactgtcatttgggataatgaaacacctatttgtgacagccaagctataacatcagaaatggtgaatgaatacaagaaaattcttttgctg

SEQ ID NO: 830333 - DNA, 100 bp, Homo sapiens
ttccgatgcaactgatagcagctctgatgacgatttggatgaatatacccttagaaaaaatgtggcagtcaccatcactcctgtagtgggtaagaagaga

SEQ ID NO: 830334 - DNA, 100 bp, Homo sapiens
gctattgtttatggcagatgtcacgaagaaataggaccttttacagataccagatatatcattggaatgttagagaggagtttcactctatcacccaggc

SEQ ID NO: 830335 - DNA, 100 bp, Homo sapiens
gctccaaagtcatcgtccggtttctcactgtgatgatgaagcatggtgtggaaaaagaagctctcggcggccgtggaggtgggcgacgcggctgaggtga

SEQ ID NO: 830336 - DNA, 99 bp, Homo sapiens
gacaacttgagctgaaagcgaaaaactatgctgaccagagtctcagcttgactatgaagttcccagggaaaaggccttccaaaagagcagcaccggctt

SEQ ID NO: 830337 - DNA, 100 bp, Homo sapiens
acaattgcgaatattctggcccaccaaaaccattgccaaaggatggatatgacttagtgcaggctggctcaactaccctctggagaagataggcttctgg

SEQ ID NO: 830338 - DNA, 98 bp, Homo sapiens
aaccactggttctccaggaaccgaaaaggcgaggagtatagtacggcaaaaaactgtcggatattctggaccactgaaggaaattcctcctgaaaaat

SEQ ID NO: 830339 - DNA, 100 bp, Homo sapiens
acgtggggccgcgctacaccaacctctcgtacatcggcgagggcgcctacggcatggtgtggccacggcgtatgcctccgaggacggggtcctgaccgag

SEQ ID NO: 830340 - DNA, 99 bp, Homo sapiens
tgacagacacaagtcaccttctggttattgcacttagctctccctggggacttaaattttgagtattgggaaagggtcgttgtggtgcatagacccaga

SEQ ID NO: 830341 - DNA, 100 bp, Homo sapiens
ccttcaactgagaacagttgaccgcaagctgaaactggtgtgtggaagtcacagcttcatcaagttacatggtgatgaattttgtcctgttttggatgca

SEQ ID NO: 830342 - DNA, 100 bp, Homo sapiens
atgcttcttgccacttgacggaattgtactttgagaaggggaagaaacatattgccgagtggatgccgccgcgcagcgtgtttgcttgaggcagaagctt

SEQ ID NO: 830343 - DNA, 98 bp, Homo sapiens
acagcattctatacataattttcagccacccaataactctggtggaatgtgcaagtaaagatgttctggtgaagaccctcagggctattgatgtgaaa

SEQ ID NO: 830344 - DNA, 98 bp, Homo sapiens
aaacatggcgaccgagggaatgatccttactaaccacgaccatcaaatccgtgtcggagtccttacagcatgccaccctggtttttacgggccagatt

SEQ ID NO: 830345 - DNA, 100 bp, Homo sapiens
tggatttgacagctcagttgcctctcagatcacagaagctttagtcagcggaccaaagccacctattgaaagaatgtgccataccgaatccgtgtgcggc

SEQ ID NO: 830346 - DNA, 98 bp, Homo sapiens
aaccgagtcaacagggaagcagaggagaaccgggagccattcagaaaagcttgcaaaccatactgggtacatcaaagttgactggcaacgagtggaga

SEQ ID NO: 830347 - DNA, 100 bp, Homo sapiens
ggaagcgtttttgaagactgttgcccaaaactacagttctgtcactcacttacacagtattgggaaatctgtgaaagcccttagagatttgtttgattcc

SEQ ID NO: 830348 - DNA, 100 bp, Homo sapiens
tcactcacttacacagtattgggaaatctgtgaaagatgagagtccctacactaaatccgccagccagacaaagccgcctgatggagcgttggctgtgag

SEQ ID NO: 830349 - DNA, 103 bp, Homo sapiens
tcggcgcgatttgaggagctgctgctgcaggttctgtacagagtaatgagatgtgtgacggctgcaaaccaggtgtttttttctgaggctgtgttgacagctg

SEQ ID NO: 830350 - DNA, 100 bp, Homo sapiens
cagagaagtagccaagccaacagagcctgatgagcatgcttgcctgggaccagtggcagggaccccggaacctgaaggtgctgacaaagatgacctgctg

SEQ ID NO: 830351 - DNA, 100 bp, Homo sapiens
tgttcctgcccacaaggagttagcgacctactggggaaggatatggagtaatagtactaaatcccaatgaaaactatattgaagtagaaaagccgaagat

SEQ ID NO: 830352 - DNA, 100 bp, Homo sapiens
cctgctggaggtgcaagtgcctgctgcccttgtgcagtttggtcagtctgtggaggcaaaaccttcaactgaggacttgggggataagaaggaaggtgaa

SEQ ID NO: 830353 - DNA, 100 bp, Homo sapiens
tagcctcaggaggcagctatccaaggagtgttgaagcctggaaatcccctccccttccccctcccccctttacagtatccccctccctccaccctttccc

SEQ ID NO: 830354 - DNA, 100 bp, Homo sapiens
aaattaaagatgcatgctgatggcgataagtcattaccacagatatgagatcctgactccaaactccattcccaagggtttcatggacgggaagcaggcg

SEQ ID NO: 830355 - DNA, 100 bp, Homo sapiens
cgggctatacggtgaaaatcagtaattatgaatgatatggaacctagcaaagctgttccactgaatgcatctaagcaagatggacctatgccaaaaccac

SEQ ID NO: 830356 - DNA, 51 bp, Homo sapiens
cacagacagaatccctgctaccactggtgctcaagaccgaatcggctgggc

SEQ ID NO: 830357 - DNA, 100 bp, Homo sapiens
acatcttctggacccaactgtggaatatgtgaagcagaaacagtcctgctccagctgtaacagcagcatctgtgaccaacatacaggctactgaagtttc

SEQ ID NO: 830358 - DNA, 100 bp, Homo sapiens
ggcgggccgcgggagccgcacgcggcgatatggaagaggagggcaagaagggcaagaagaccctccagccataccccacaacctctcctgcctcatgaac

SEQ ID NO: 830359 - DNA, 100 bp, Homo sapiens
agtcatctactgacagctacagctcagattgtagaaggcatgaaacaaaaaatgtggagtattgaaaatattgccttcggttctggtggaggtttgctac

SEQ ID NO: 830360 - DNA, 99 bp, Homo sapiens
tttccaaccatatctgaaaagtgaaggctcacctaatagcatcaggtgctgactgggttacttttttaaacactaggaatggtaatttctactcttctg

SEQ ID NO: 830361 - DNA, 100 bp, Homo sapiens
cgtggacctgtatcgcagccacatccccctggccttcgaccccacctccataccccgcggcatccctctggacgcagggctacatgcagccgctgaagca

SEQ ID NO: 830362 - DNA, 75 bp, Homo sapiens
agagccaaaaatgaccaagtccctgtttcaccagtgatcattaaagaatgggcagcttacaaaggaaagtctcct

SEQ ID NO: 830363 - DNA, 100 bp, Homo sapiens
cggggacattattgcgcgtggaacggctgcttttggaagacccaacatgagtgaagtttcctgcaagaaacgggacgactatttggaatggccagagtat

SEQ ID NO: 830364 - DNA, 100 bp, Homo sapiens
ttcctgtacagcctgcagaactgtattcggaggaggagattcggcagaaagtggggacattccggcagatgctgatggagaaggagggagtgctcaccag

SEQ ID NO: 830365 - DNA, 100 bp, Homo sapiens
tctaactggcaaccaaaggttgcaccaacaaccgcttggaatgctgcaacaatgatggggtcacagtggttataaagagttataccctgaagaatttgaa

SEQ ID NO: 830366 - DNA, 100 bp, Homo sapiens
agagttccgaaacttcagtagatacattgcctacattgaatcccaaggagctcatcgggcagggctagccaaggtgaaattcgatgctactgtgatgctg

SEQ ID NO: 830367 - DNA, 100 bp, Homo sapiens
cccctggggaccgaagaaagatcagccctttttggaaacatacaggatatctaccacttcaatagaattggcagagggggtcgatttgggaggaaaggtg

SEQ ID NO: 830368 - DNA, 100 bp, Homo sapiens
gtcaacctctttgtttcccgggaccttggtggcagttctgcagccacagagattctgagacgcccatccctgcaacgtcgagctggctcccgctctgatg

SEQ ID NO: 830369 - DNA, 98 bp, Homo sapiens
tggaatcaagttttaaagaggaaggagcagactctcctctgctaatgcaaagaacatttcctgcaaatgcatcagaaatatgttgtattattagaaca

SEQ ID NO: 830370 - DNA, 98 bp, Homo sapiens
ttaaagatgtcaaacaacctccgtgttctaaggagtggaagctggacacactatgtgacttgtatgaaaccctgaccatcacccaggcagtcatcttc

SEQ ID NO: 830371 - DNA, 98 bp, Homo sapiens
ggaggagaagagaacactgtgctgtcccccgccttagggcctgctatggtgtgctgcggttcatcatggagagtggggccaaaggctgcgaggttgtg

SEQ ID NO: 830372 - DNA, 100 bp, Homo sapiens
ccctgaactacttcttggagcaaggcattataccaaagctattggctatgtatgtcaaaaaggatgttcctttgtggcaaaaacatggacggaacttctg

SEQ ID NO: 830373 - DNA, 98 bp, Homo sapiens
atgacctccccaactcgttgtttgcgtgcaatgttcaccagtcagtgtttgaaggagaagagagcaaggttccaaggaatcctgatatcccaaatcca

SEQ ID NO: 830374 - DNA, 100 bp, Homo sapiens
ggtctcaaagggaacttggaaatgacattggcatccagattatccactgcagttttactgcaatcacagcaaccaaccccatttggcttataaagactcg

SEQ ID NO: 830375 - DNA, 100 bp, Homo sapiens
gcagcagctgtggctccagtatcagaaagggtttgtgtttagtgaatcagagggatctgcattagaacagtttgaaggtggcccctgtgctgttattgca

SEQ ID NO: 830376 - DNA, 100 bp, Homo sapiens
ctctgaggcgctatggggcggtggaggagacggcttggaaaacggagagactggggagaagtatctcagatgaagacatcatcaacattactcttcctac

SEQ ID NO: 830377 - DNA, 99 bp, Homo sapiens
tcatgggctggacagcggccacgggcagcctcgatgctgtgttttagagcactttgctgcaagggaccaccacctgcacgaccagaatatgacctggtt

SEQ ID NO: 830378 - DNA, 100 bp, Homo sapiens
caaactcccaggctcaagcaatcctaccatgtcagccttcccagtagctggaactacaggaccttgcctcatagtattcgatcagattcagaagatatct

SEQ ID NO: 830379 - DNA, 100 bp, Homo sapiens
gcaagatcaagcactggaaccgcttccgagacccctgggcgctgcctatggcacagccaagagcggtaccggcattgcggccatgtctgtcatgcggccg

SEQ ID NO: 830380 - DNA, 98 bp, Homo sapiens
tggaagctggagcccagatcgaattccgtgatatgcaagggggccaggccaaccaccccacagcagccgtggtgacggagaagcagcagatgctggag

SEQ ID NO: 830381 - DNA, 100 bp, Homo sapiens
acctttaccgatgatggatgtgggatgacacctcataaactacaccgaatgctcaggtgtaatcctgagagattcacatggtgttgcacaagtacgtttt

SEQ ID NO: 830382 - DNA, 98 bp, Homo sapiens
tggaggtcctctctggagagaggctgtaactctcaggagccttctccgcagttggcttcctcggtagcttccacacggagcatgcccgagagcctgga

SEQ ID NO: 830383 - DNA, 100 bp, Homo sapiens
gagcagaggtgtttgtcagggcagggctgaacacagcagcctcgtcttacagcgtgactgcaaagaaaaagacttttgttttgcaaaagaaaagcagctc

SEQ ID NO: 830384 - DNA, 100 bp, Homo sapiens
ggaaaactgggccaaagcagtgaaacgctccatgaattgggaactgactcttttttggagtaaactgcaaagaagaattgacccttctttagatactttt

SEQ ID NO: 830385 - DNA, 99 bp, Homo sapiens
gaggcgtcgccgcatcccggacggtacttctgccactgctgctccgtggagatcgtcccgcgcctgccgcaacagtatcaaagtgctctattttgggca

SEQ ID NO: 830386 - DNA, 100 bp, Homo sapiens
aagcaaaggctgctctgaagcgcacgacctccgactactttctccttcaagattcttattgccaagtcccctctggctcccttcacctcatttgtctaca

SEQ ID NO: 830387 - DNA, 98 bp, Homo sapiens
tccaaagcctgaactgatagctgcagagaagaaatatttttctttaaagcctgaagaaaaggacaagttggatggcttgaggactggtactaaaagga

SEQ ID NO: 830388 - DNA, 100 bp, Homo sapiens
atggctcacaccacaaaggttaacggcagtgcctcagagatggaaaataatgtcctgcaagatgaggattgaacagttaaaacaaacaatatgtaaagga

SEQ ID NO: 830389 - DNA, 100 bp, Homo sapiens
atggaggttggggatacatgtgggagtacccaattgcaaatatttgtgtggaagtaatcgaaaagacaacatatttattgatcctggataccaaacattt

SEQ ID NO: 830390 - DNA, 100 bp, Homo sapiens
atcgatgaccttggacacctccatgttatggacacggtctttcttattcagattcaggcttcttcaggagaaagcaagtacactggtaccttggactgtg

SEQ ID NO: 830391 - DNA, 100 bp, Homo sapiens
gagttagacgtgtgcatacttcactatgatatgaggcagtctctgatacatactgccatgaaagaaagctcacctttatttgatgatgggcagccttggg

SEQ ID NO: 830392 - DNA, 100 bp, Homo sapiens
gctcatatccttttcagactacattttcctcacaactgttctttccagtagttatgcttgtcctagcttggaaattggatgcacaaaacatgggttattt

SEQ ID NO: 830393 - DNA, 99 bp, Homo sapiens
ttcgcctccaggatgcgctgagccctacaacacccccagcggccgccggctcccccacgagatatctcccggggccaattcagcatctctacctggcca

SEQ ID NO: 830394 - DNA, 50 bp, Homo sapiens
cttagctcagcaattcttaccttgtgaaaagccatacaagtgtacctggg

SEQ ID NO: 830395 - DNA, 98 bp, Homo sapiens
caccccagatgggtgagagatgtgatcactggtttcgtggcctgaccaaggacctccaagtccctaaaagataagttagtacaagagaaaaagctgtc

SEQ ID NO: 830396 - DNA, 100 bp, Homo sapiens
atattttgcaccctatcaagcagagcggtttcgaagacttgggtggtcttcaagctgacagagaagctgacggaacagaaggagtggatgaagatataat

SEQ ID NO: 830397 - DNA, 100 bp, Homo sapiens
ctcagcctgaatactttgctgttggatactatggacagggctttccttctttcctacgggtggacgacatccttggagaaggcagcgacgacagcgacag

SEQ ID NO: 830398 - DNA, 100 bp, Homo sapiens
gaaacttagacgagacctcatttttgtgtttttctccagccatacaccctctgactggaaataccggcatgcaggattgatggccttatctgccattggt

SEQ ID NO: 830399 - DNA, 100 bp, Homo sapiens
gttgcgggcacttctcacccctgagaatctgggacctcaacaggtagcccagtgtgtctcaccaaagggacctcttgcttgttcgagaacatactttttt

SEQ ID NO: 830400 - DNA, 100 bp, Homo sapiens
acccgaagaagaaaggattcgttacagccagagattggtgtgaatgacagaggtggtgccatccagcgcgctcagcgaggtcagcctgcgcctcctctgc

SEQ ID NO: 830401 - DNA, 104 bp, Homo sapiens
tttgcatcagccatctcttagtccagcaagtcctcatagccaggggcgaccctggacatctttgactacatctacatagatgcttttgggaaaggcaagcagct

SEQ ID NO: 830402 - DNA, 100 bp, Homo sapiens
gatgatcacgcagctggctggcttcagtggaccagtctcctctgagcctccggcctccataagacccaaaacagatgacacctcttcccagtcccccgcg

SEQ ID NO: 830403 - DNA, 100 bp, Homo sapiens
ctcatttctgagtattgtctttatatcctgacactatgaatgctacttggatgcctcttaagccaaatttgtatcctactgtggggcttcaaacaccagg

SEQ ID NO: 830404 - DNA, 100 bp, Homo sapiens
tcagagacttcagctactcttacaagcaatagtaccactggcacttctataggagcactatcctgaggagcgacatgtggttgaacgccatggacgggac

SEQ ID NO: 830405 - DNA, 99 bp, Homo sapiens
atgagcgattttggtatttcagcagaaagactttcacagagactttcttcatgagattgaaacagcccctgccgccttgtcatgactccgaggaatcca

SEQ ID NO: 830406 - DNA, 99 bp, Homo sapiens
aaagagtcaagacctggcctaggtgtgataaagcggaattgggaatatatatgtagccatgataaagaaaaaacgaagatcctaggagacaaaaatgtt

SEQ ID NO: 830407 - DNA, 100 bp, Homo sapiens
cagggtaacggttgttgatgtcaatgaatcaagaatcaatgcgtggaattctcctacacttcctatttatgaggtagctacagcaagctgggtagcaggc

SEQ ID NO: 830408 - DNA, 98 bp, Homo sapiens
ggaagaagctcgggcagtccctatggtggtgtggtggctggaggtggccgaattgacaaacccatcttgaaggctggccgggcgtaccacaaatataa

SEQ ID NO: 830409 - DNA, 98 bp, Homo sapiens
aacaagcaactggctattgaaaagtgcgagtctggatccgagggcgatgggacagtgcaccgcaggaagaagaggaggacgtgcagcatggtgggaaa

SEQ ID NO: 830410 - DNA, 98 bp, Homo sapiens
tggggtatggagaggaaggaagaggtatggtggatattgcccgacagacggttgaatttctctacgaagagaatggtggcatcccaagagacctttat

SEQ ID NO: 830411 - DNA, 98 bp, Homo sapiens
gcttctgcttccaaaggagaaccgcagtgaaagctaattgaagacccagtggagatcatcagcagcaaactggaagtccaagccttcgaacgcattga

SEQ ID NO: 830412 - DNA, 98 bp, Homo sapiens
caaggaaaactcaggaccatgatggctcagtttcccacagctatgaatgaaccaatttagaacttgaattgattcatcgaggaggcaatttgtgttca

SEQ ID NO: 830413 - DNA, 100 bp, Homo sapiens
tgaagaggaatcaattttggtatgcagataatcactgggctcatgggtcttgctctttacaaagaggaattggcagcaatgaaacagattctcgttaaga

SEQ ID NO: 830414 - DNA, 100 bp, Homo sapiens
tggaagaacatggcatcaagtttataagacagttcgtaccaattaaagaatttttgagagatatcttcaatctcctgtttttgttgccaagtctaaagga

SEQ ID NO: 830415 - DNA, 100 bp, Homo sapiens
cccgggactgcaggtccaggcaggctccacagcacctgttgccttcattagcagcttttcctcctcttccctgcacttcccagaaccaaagaatgtgaag

SEQ ID NO: 830416 - DNA, 98 bp, Homo sapiens
cacaacaaccttatttcgtgctgtgaatccagagctcttcattaaacctagggagaaccgaagattacaggaggccagcatgaggttggaacaagaga

SEQ ID NO: 830417 - DNA, 98 bp, Homo sapiens
agcagcacctcctctccctaccccctccctgaggaaattaggaacctgttggcagattcacaatgacatcctttcaagaagtcccattgcagacttcc

SEQ ID NO: 830418 - DNA, 100 bp, Homo sapiens
gccgggaccgaaacctagccccggacgagaagcgcagcaacgtgcggtgggaccacgagagcattggagctggagtgagccttccaggaattttggctgc

SEQ ID NO: 830419 - DNA, 101 bp, Homo sapiens
cagctcgagtgagcggactgcccaggacttcggaactagacgagaacaagctgactgacctggagatacttgcattgctgattgctgcactaagccacgat

SEQ ID NO: 830420 - DNA, 100 bp, Homo sapiens
gagtgggtgtctggtgccggcgtttgggctacggttgttgttggcgactgtgcttcaagcgctgtcacaagatgaaggtagaggcacattatacaaatac

SEQ ID NO: 830421 - DNA, 99 bp, Homo sapiens
gttgttggtccttctctaaacgaccatctgaagcatctgcttacaagcaagtcctggagggtatttgggagccaaaaagaaaaagaagaaacagaagag

SEQ ID NO: 830422 - DNA, 100 bp, Homo sapiens
agacctgttgcctgctgcacagtattgctgtagactacagtcaaaatttgctgtgcgatgtcacaattgtggcagaagacatggaaatttctgctcatag

SEQ ID NO: 830423 - DNA, 100 bp, Homo sapiens
agatcctgctgtttggccaccccctgttcctgcagaacacaggaactatcccttcgacatagtgacattgttaaaccttgttctattcaaggcctctgac

SEQ ID NO: 830424 - DNA, 100 bp, Homo sapiens
gggctctgaggatgagctggaggaggggagtattgggaaagggtcgttgtggtgcatagacccagagtatagacaaaatctaattcaggctttgaaaaag

SEQ ID NO: 830425 - DNA, 106 bp, Homo sapiens
acatattctacaacgtcactggatgcctaagcatggtttcatcttacctcgtgcatcatgggtattgtgccacagccacggcttttgctcgaatgactgaaacccc

SEQ ID NO: 830426 - DNA, 98 bp, Homo sapiens
agccgccacctacccagtgaccatgatagaatgcactgctgcctgcaggcctgaggcagaaggatcagaccaccaaggcgcccacgggcccctttaaa

SEQ ID NO: 830427 - DNA, 98 bp, Homo sapiens
gttctctgttctccactggaaaggttgaccagatgttcgccgccttcccccctgacgtgactggcaacttggactacaagaacctggtgcacatcatc

SEQ ID NO: 830428 - DNA, 100 bp, Homo sapiens
agggatctcttcagggtggaatacgtcattggttgtggacctggcctattagcagatgccaagatgcgggtatttgaacgttcagtgtattttggtgatt

SEQ ID NO: 830429 - DNA, 100 bp, Homo sapiens
ataaatcttcttattacacaagccacacctcatgttgctcctgtgatgccattagatcgtttcattacagccacaatggtgcgcatgaatgtcctggcag

SEQ ID NO: 830430 - DNA, 99 bp, Homo sapiens
tcatctacatcgccttcatcctgggcagaatgtttctccatcccagagagatgaagtaattcaatggctggccaaactcaagtaccaattcaaccttta

SEQ ID NO: 830431 - DNA, 101 bp, Homo sapiens
gaagtacgcaagcccacggggagcagagcagcaactcacccagcacacaaaatggatctcttacggtgtacgaagccatcgacagcagagatggagcatct

SEQ ID NO: 830432 - DNA, 98 bp, Homo sapiens
acattgttggcagtgagcattacgatgttgcccgtggggtgcaaaagatcctgcaggacttgtgccgacagctccacgcccgtgtggacaaggtggat

SEQ ID NO: 830433 - DNA, 100 bp, Homo sapiens
tttccctcctattgggtgttggcttttaactctttcaaagccgattttgaaacggctgcagtgatacatgcgaaggttccaatggtcctcagctgtttac

SEQ ID NO: 830434 - DNA, 98 bp, Homo sapiens
atgtgtctcagctccctccaccttctcaagatcagtctcagttgatggagtttgcactgtagcaaattgcgttggaaaagaactagctccacatgtca

SEQ ID NO: 830435 - DNA, 99 bp, Homo sapiens
ccggaaccgcgtggccctgaaggatctgcaaccaggccttgcagatgcacgggggctacggctacctgaaggattacgctgttcagcagtacgtgcggg

SEQ ID NO: 830436 - DNA, 100 bp, Homo sapiens
gaagttttggtgataaagattttcggacaggtttagaaaatggaatcctcctctgcgaattttaggtgatgggcaagtcagaaagtcagatggatataac

SEQ ID NO: 830437 - DNA, 98 bp, Homo sapiens
ggtttccggctgcaccgcggcatgaatgtgcccttcaagcgcctgtctgttccacagaggacgtcccccacaggcccaaaaaacatgcagacctctgg

SEQ ID NO: 830438 - DNA, 99 bp, Homo sapiens
cagaagtgggactggagcgaagtagaggatgccgaggagaaaacagcaggcacccaagcgggcggcagtataaggttcagattcctgaaggccgagcca

SEQ ID NO: 830439 - DNA, 98 bp, Homo sapiens
agtaccggaaagaaaaggaagaagccgatcttctgctggagcagcagcgactgcaaatacttccctggacaagaaagccagatgaaactgatctacca

SEQ ID NO: 830440 - DNA, 98 bp, Homo sapiens
caaggggtgtttttccgtaagcatactcaggtgtgcctacaggggttgtggaaggagacgctgcccccggtctatgccctggaattgctgaccatctt

SEQ ID NO: 830441 - DNA, 100 bp, Homo sapiens
acttgtattccaacttcccgatcggcgagaagcaggatatctggaaagaaatgaccgcccggatgtgccactgagagccccgcgggtctcccggtgcccg

SEQ ID NO: 830442 - DNA, 99 bp, Homo sapiens
ttcaacgggactattatgataggtgatgctagcgaggaggatcacccccaagtctgtgccaagtgctgcgcacaattcactgacccaactgaattcctc

SEQ ID NO: 830443 - DNA, 101 bp, Homo sapiens
tctgggagaatatttaatggaaaatcgcttggttaaaacctgacacttttaacaggtaaatcgatttagtaaggtggaagacagagcaatttttgtcactg

SEQ ID NO: 830444 - DNA, 99 bp, Homo sapiens
acgaagggactgtgtattttaaatgcaggctccgagctctgtccagtggtgggagtattacatcccctcctctttctccagcattgccgaagtataaat

SEQ ID NO: 830445 - DNA, 106 bp, Homo sapiens
tggcggccatggtgttgctgctgtactccttctccgtatgtcagccacctccagatgtcctgcatgctgagcgtacccaaagggacaaggacaacttttcacccgg

SEQ ID NO: 830446 - DNA, 100 bp, Homo sapiens
cacgggtagagattggcttcgggctgagctagcagtgagcaccttttggcccaatgaatatcaggtgaagagcgattatatgttagagatagctgatcaa

SEQ ID NO: 830447 - DNA, 100 bp, Homo sapiens
ctgctgctgccgaaaatatcaggctgccaaatgcaggcactcaggttttgctgttactgctcagtgtagtcacaccttgaataagaaatggaaaaccttg

SEQ ID NO: 830448 - DNA, 104 bp, Homo sapiens
gactttgtttcttggagtccacttccaattccaaggtaggaggtgtgcaatctttggggggaacaggtgcacttcgaattggagctgatttcttagcgcgttgg

SEQ ID NO: 830449 - DNA, 100 bp, Homo sapiens
cctggcgctttcctgggttgcttctggcggccatggtgttgctgctgtactccttctccggtatgtcaagagccccaccttcctcgggggcacctccagc

SEQ ID NO: 830450 - DNA, 98 bp, Homo sapiens
cacatcctgatgacgttctggaatcaccacaagacctaagtgtccgaagaagtcaagccaaaagaatgcaatggtgtaaagattccagttgatgccag

SEQ ID NO: 830451 - DNA, 100 bp, Homo sapiens
agaagcaacacgcaaacgagagctgaggctaatgaaaaacagatatgcctcttcatgttcgacgcagtagtgacccagctctaattggcctctccacttc

SEQ ID NO: 830452 - DNA, 100 bp, Homo sapiens
aaatggaaggaaaaggtggcctggccgcggcttaccaaggaggatatcaaggacttaaccaccaccatgtcgagcaaaagaacaaagaccaagaccaaga

SEQ ID NO: 830453 - DNA, 100 bp, Homo sapiens
cgctaagctccatggccaacattgcgggcttcgcaaacctgggtatacttcatgtgacaaagaaaaaagtatttgaaacactggaagcacgaatgacaga

SEQ ID NO: 830454 - DNA, 98 bp, Homo sapiens
agagccccacagagagtgggtctcgatgggtcctgaaccgcaccacaaccggccagtgagaattaactcctgaggagagagcccaaaagattgccaaa

SEQ ID NO: 830455 - DNA, 118 bp, Homo sapiens
tttcaggctgcaaaaggggctggaatttccttactgtctataacacacagaccttctctttgcgccacccaagactgtcaaaccccctgaggatcaactgaagtcggagaacctcgag

SEQ ID NO: 830456 - DNA, 98 bp, Homo sapiens
ccctggctaccgacccggaccccgcggagcctcttgcctcggaaacaggagctcacttttctacatccttgttggagcatgctgggaatgaagacagg

SEQ ID NO: 830457 - DNA, 99 bp, Homo sapiens
aagaacctgaagacgacccaaaagggtacctagagtgtgaacatggctacgcctcttcattcccgtccatgccgagcccccgactgcagcattcaaagc

SEQ ID NO: 830458 - DNA, 100 bp, Homo sapiens
tcctcagaagttggttatgatgctatggctggagattttgtgaatatggtggaaaaaggaatcattgacccaacaaagaatgaggaaaatggggagcagg

SEQ ID NO: 830459 - DNA, 100 bp, Homo sapiens
ggaaagattttactgtaacccagaaaatgatagaatgagaatgaagtatggagaagagcaagttagtaccttgtaccaaaacatcaaccttgtggagcca

SEQ ID NO: 830460 - DNA, 98 bp, Homo sapiens
gcgcaactgagaggaactgagacccaagcagctcagtaaatgtactaatggtcacttgatgtgcgctggctgttttatccacctactagcagatgccc

SEQ ID NO: 830461 - DNA, 100 bp, Homo sapiens
cacattgccaagttatgcagccttaaacgacttgttctctatcgaacaaaagtagagggaagacccgaattttctgaagttgtcatgaagttagaagagt

SEQ ID NO: 830462 - DNA, 100 bp, Homo sapiens
cggccaaaacgctgggcatcgtggtcggctgcttcgtcctctgctggctgccttttttcttagtcatgcccattggaactgtggtgtatggcgagcccat

SEQ ID NO: 830463 - DNA, 100 bp, Homo sapiens
cgggttggtggctcctgcacatttttacagttctccagtccttctctttcggtaactataactacccaatattgcagccatggagtccatgcttaataaa

SEQ ID NO: 830464 - DNA, 99 bp, Homo sapiens
ccagccgaaccctgggattgtgagaaataatcagatccgtacaggtttacagcaccaaataatctggccctgtcagcccagctgtgttcctctggatga

SEQ ID NO: 830465 - DNA, 100 bp, Homo sapiens
ttgacatcaatgtggatgaacttgatacccccgatgaagcagattcttttgagtacactggccatgcagggagaaggttttaaggtgaaaacgaagaaag

SEQ ID NO: 830466 - DNA, 98 bp, Homo sapiens
gacttcatgatgaattcctagatgggcaaagatggattgaagacaaccttgatttcagtgtggagaatgacatcttcctgggctgggaaaaaggagct

SEQ ID NO: 830467 - DNA, 100 bp, Homo sapiens
agcttgaagcaagggaccttgttatagaagccttaaaggcagaatggctaatgcggatctggtgaagtatggtttggctgatgtggtagaaaatcctggt

SEQ ID NO: 830468 - DNA, 100 bp, Homo sapiens
tcaccgccatggctgccccgtgtttgctgcggcaaggacgagccggggcgctgaagagaacggagaccaacctgggctgaagaaagaagattaaatgctg

SEQ ID NO: 830469 - DNA, 100 bp, Homo sapiens
ttacaggcgctgcaaactggaggaaatgggctttacagatgtgggcccagaaaacaagccagtcaggaaaactaggaatctatgatgctgatggtgatgg

SEQ ID NO: 830470 - DNA, 98 bp, Homo sapiens
tgaaggattccgacccattcatccggaagcagacactcatcttgcttaccaatctcttgcagcaattctgtggtgttcttggtcacacatttatggag

SEQ ID NO: 830471 - DNA, 98 bp, Homo sapiens
ttctgtgcgtcctggactcctctgagaaacaggtaatctcagccaggaaaggagagtttgaaactggatttgaaaaaggaggacagacaagagaacat

SEQ ID NO: 830472 - DNA, 100 bp, Homo sapiens
cggaggtctcatctttgaactactgccggagcttctgccagcacatgattaagtaccggtacatcccgttcacacatgggaagagaaggtacagaggcaa

SEQ ID NO: 830473 - DNA, 131 bp, Homo sapiens
taccattacacaatgcctgttcttatggtcattatgaagtaactgaacttttggtcaagctctcagagaaggggaaaccttatgttgacatccaaggtttgactgcctctaccatggaaattttattggac

SEQ ID NO: 830474 - DNA, 99 bp, Homo sapiens
tgagccgttctccaaccctttggcccccgatggccacgatgtggatgatcctcactccttccaccaggttaccatccattgacccatcaggcagctccc

SEQ ID NO: 830475 - DNA, 100 bp, Homo sapiens
ccgcgcccggccggacccgggcccgaggacccttgaacatctgtgaagaaatgactattctgcatggaggcttcttgctggccgagcagctgttccaccc

SEQ ID NO: 830476 - DNA, 100 bp, Homo sapiens
attaataatgcagctgcaggctcacagaatctatgtactttcatcagcgcggccagtaagtttgcacagctccagtgtctgtggaagacgagagactcag

SEQ ID NO: 830477 - DNA, 99 bp, Homo sapiens
cagcaaaagcattcagtctcaacccagagcattccatattggaagaagagatttctacacatgaaaaaaatgcctttgtttagtaaatcacacaaaaat

SEQ ID NO: 830478 - DNA, 100 bp, Homo sapiens
tgcgccaaagcctactacaagtcctcgcacctaaagtcgcacctgcggacgcacacaggtggccaaggtggaatacgtcaggaagaagccaaaattaaaa

SEQ ID NO: 830479 - DNA, 100 bp, Homo sapiens
cagcagcatccacctggcagtattgtttcaacacatgcctattatagcatatctcatctcaaagggacagcttttggaaaagaagaagagagtccaactc

SEQ ID NO: 830480 - DNA, 100 bp, Homo sapiens
gggaagacctgtgtcctgttccgcttctccgaggacgccttcaactccacttttatctccaccatagcatttcacaggacatgcaacgccagtttcgtca

SEQ ID NO: 830481 - DNA, 100 bp, Homo sapiens
ccttctgaaagaagaattttcaacagttttcttcatactgcattaaaggttttagaaatactacataggaatttcgctaaggagtttgtgatcagtgatc

SEQ ID NO: 830482 - DNA, 100 bp, Homo sapiens
tcgcggctacggcgtcatggaggagatccggcggcagggcaagctgtgcgacgtgaccctcaagcacgcactcctggctttaaagtttatacttgcattt

SEQ ID NO: 830483 - DNA, 102 bp, Homo sapiens
acgatgatgatgaagaggatgatgatgaagagaaaaaaggggtgctggaaacattctccggaacagaaaccaacaagatttggccctatgtatatgctttcc

SEQ ID NO: 830484 - DNA, 100 bp, Homo sapiens
tctccagtgtctgaaaacaaatgtttttctggtcttcacttttttgaggcaggaaggatcagattttattaagacctctactggaaaagaaacagtaaat

SEQ ID NO: 830485 - DNA, 99 bp, Homo sapiens
agactttgcttcattaaagtgtctgagaaggaagggaacaacaccctggacatggctccagagatcaacttgccgggcccaatgagcctcattgataac

SEQ ID NO: 830486 - DNA, 99 bp, Homo sapiens
ttaaagcaaatcatcggacgaccagttgtggtaaaattaaattctggagtggattatcgagggcagctgcaatgactctccgcacggtattattgtcat

SEQ ID NO: 830487 - DNA, 100 bp, Homo sapiens
caacctcttgagcaatatccagaagctattctctgaacgtattgatgtgttcagccctgtggagttcaacaaggccatcaccatcgaggctgagccaaga

SEQ ID NO: 830488 - DNA, 98 bp, Homo sapiens
cagcctcccggagcccctcctttggtgacccacagctatcccctgaggcccgacccaggaggaacgatgatgaatgtcgggcatttgtgaagagagtc

SEQ ID NO: 830489 - DNA, 100 bp, Homo sapiens
aaagtcaaacaaggcttttgggaagaatttgaggagtgtgctgaaaaacaaggccaaattgaacgagtcattaaggaaaaaaaagcagtggaagaagaac

SEQ ID NO: 830490 - DNA, 98 bp, Homo sapiens
gcagttgtctgatgaagagaaggcagacgcgtgccatgcctaccagatcattcaccgcaatgggattcctgacgaacagatcgttgtgatgatgtacg

SEQ ID NO: 830491 - DNA, 100 bp, Homo sapiens
agaagcctgtcatatatcttagtgctgctgctagacctggcctgggccaatacctttgtaatcagggaagtgttcgccagttactacatgaaaagataag

SEQ ID NO: 830492 - DNA, 98 bp, Homo sapiens
acacaccatccagactgaagaccgagtctggtccattgctatcagcccattactcagcgatgccctcctagctagccgtcacgggatggagggcttca

SEQ ID NO: 830493 - DNA, 100 bp, Homo sapiens
ctttgatccagaacttgcagcaacaatagacatacaacagctgtgccagactctgcttaaaccaagaaacagtatgtttagcaagcactgctatgaagac

SEQ ID NO: 830494 - DNA, 99 bp, Homo sapiens
agttacgatatattcaaaatttcaagtggactgatacattgcaaggacaggttccaagacaggggcaagtgtccgagtggtgaatcagctacttacaga

SEQ ID NO: 830495 - DNA, 100 bp, Homo sapiens
agatggcaccgaatacagctgtgacctggagagtgaaatggtaaaggagctggatggtcatgtgctcaaatgtgtgaaagatcagaatggaaaccatgtt

SEQ ID NO: 830496 - DNA, 100 bp, Homo sapiens
taaattatgatctacctaccaatcgtgaaaactatattcacagtggaaggagaacatgaatctctcagaggcccaagtacaggcgttagcattaagtaga

SEQ ID NO: 830497 - DNA, 99 bp, Homo sapiens
agctttctggatgatgtaaaccttattctggccaacagtgttaagtataatgactagacgcttgaagcaaagctgccatcccagaagacgacatgctct

SEQ ID NO: 830498 - DNA, 100 bp, Homo sapiens
agtgagacacaatttatcattgaataagtgttttaagaaagtggacaaagagaggagtcaggtatttgccttatccacacatccttatggctgccgagtg

SEQ ID NO: 830499 - DNA, 100 bp, Homo sapiens
ctgcaaagatctgacccctcagtccccaagattgtggcatttgaaactgtccattcaatggatgaggcggggtttcaccatgttgcccagactggtcttg

SEQ ID NO: 830500 - DNA, 101 bp, Homo sapiens
gtcgtcttcttcatctgctttggcctgaccatcttcgttgggatcagaggcacagagttcgagtacaccgactcagagagcgaggtcaaggtgcgcaagcg

SEQ ID NO: 830501 - DNA, 100 bp, Homo sapiens
agacctgccaatttaccagagataattgataacaccctgtaacagctgagtaaggaacctacccttggagaggtgaaggagtgaattagtccagcttgcc

SEQ ID NO: 830502 - DNA, 100 bp, Homo sapiens
atgcaagagtcaccttctcaactgttgtcctcatgatgtcctttctggaactgtatctcagatgaagacatcatcaacattactcttcctactggagtcc

SEQ ID NO: 830503 - DNA, 100 bp, Homo sapiens
ctagccaaggagttgaagtttgtgactttgaatgattacggacctgaagccaaagaacaagatgcgctagtggacagattgctgaccaggggcttgagag

SEQ ID NO: 830504 - DNA, 100 bp, Homo sapiens
tcgcctttcaggaccccacacagaacaatcccgaagagatgacttggagtctctgggctacgtgctaatgtacttcaacctgggctctctcccctggcag

SEQ ID NO: 830505 - DNA, 101 bp, Homo sapiens
aattaccactaccaagaagggatctatcacctctgtacagaattctgtagcaaagccaatacaaaaatcagctaaagctgccacagaagaggcatcttcaa

SEQ ID NO: 830506 - DNA, 100 bp, Homo sapiens
ggatggcaagcagacatcttgccaagatggcctaagtcaagtatgcaccaggacacaacagggtatgcctgccttctcattcagccagccaagaaatcag

SEQ ID NO: 830507 - DNA, 100 bp, Homo sapiens
tatatgaacaatccgtctggatcacggatgtaggaagtgatgttaattattcatactgcatgactgaggattttggaggcagagagagattcatctgcaa

SEQ ID NO: 830508 - DNA, 99 bp, Homo sapiens
gctttcctgtcagcaatagcaaacaaaacttatctcctgaggagaaggtgaatgaaaactttgccattgatttgatagcagagcagcccgtgagcgagg

SEQ ID NO: 830509 - DNA, 98 bp, Homo sapiens
tgccgaaacaagaagaaggagaagacggagtgcctgcagaaacaccacccagctatgcagaagtggtaacagaggaacaaaggcggaacaatcttgca

SEQ ID NO: 830510 - DNA, 100 bp, Homo sapiens
ttggaccatcccccaatcctctcatcttgtcctacctgaagtatgccattagttcccagccaatggagatcttcgtggatgatgagacgaagttgacgct

SEQ ID NO: 830511 - DNA, 100 bp, Homo sapiens
gtcgcagggcggcctgcagctgggccgcggccgaggaggcagcgcgacctccgcacgaatgtcgtactctcaggaggctccaccatgttcagggatttcg

SEQ ID NO: 830512 - DNA, 100 bp, Homo sapiens
gaaacacaaagccggctacgcgctgcgagatctgttacctaaagcaataaaaaatggccagaggatcagtgtccgatgaggaaatgatggagctcagaga

SEQ ID NO: 830513 - DNA, 98 bp, Homo sapiens
taaagcggcgacggcgtcctcaggagctgtggggtcccctgctagaagtgggggactcggcggggctttgtgccttgggcaaagggcagcttactcct

SEQ ID NO: 830514 - DNA, 100 bp, Homo sapiens
aactctcagtggtcctacctggggatattatcaaatctactactgttcatggcaggaaccgcggcatttgcagtttttcagcgaatttggcaatagtgat

SEQ ID NO: 830515 - DNA, 100 bp, Homo sapiens
gttagatatgatgagaatagccaaagaaaacgatcaaaccccactggccatctataactctatcaggggtcgaactggaaaaattagagtgcagagtctg

SEQ ID NO: 830516 - DNA, 98 bp, Homo sapiens
gtagctgagactccgctacacccctgaagtggggaaatgggtggctgtgctggctctggctgtggcaaatgtgactgccatggagtgaagggacaaaa

SEQ ID NO: 830517 - DNA, 100 bp, Homo sapiens
gttgaagatgtccttaccagctttgacaatacaggaaatgtttgtgagcctgaatttaaatacattgggaatatgcatgggaatgaggctgttggacgag

SEQ ID NO: 830518 - DNA, 146 bp, Homo sapiens
agctgtgcgacctcttctgcggccggcctgggcaggtgtcttcctcgagaggcaggcaggggatcccggacgactctggactgtcttcacactaggtggtgtgggcagcaaagcggctgcctctccagagctttcttcccctctgg

SEQ ID NO: 830519 - DNA, 100 bp, Homo sapiens
taagagcgcctatgaaaataacttgatgccttacaccaattacacctttgatttcaaaggagaaaactggttgtcctggatgtttgaaaagttggtcgtt

SEQ ID NO: 830520 - DNA, 75 bp, Homo sapiens
cgggagcggaaggtgcctgtgacgaggattggccggctggccaacttcggaggtcagcagcaaggacaagatgga

SEQ ID NO: 830521 - DNA, 100 bp, Homo sapiens
tgggaataggaccaattccagccataaagcaagctgttgcgagttataaggactcagcatcatgtagaagcacttgtggagcatcagaatggcaaggttg

SEQ ID NO: 830522 - DNA, 100 bp, Homo sapiens
tgtctactgcaacttcaagtagtggaaggagtacagggaagtctataagctttgcaacagaattacagagtatgatggcacagacagaagcttgatgact

SEQ ID NO: 830523 - DNA, 99 bp, Homo sapiens
caagtacaaatagcaggaaacccagatggatgggaatggatcaaagctgtgatcacagatccgagtgaagcctgacaggaccggtgtggtcacggatgg

SEQ ID NO: 830524 - DNA, 100 bp, Homo sapiens
gccgccacccccgggctcggggtggcccccgcttcagtcccagggcagatttgcttggaacggtagaagaaatccttccaagcctctcagaaaatatcag

SEQ ID NO: 830525 - DNA, 136 bp, Homo sapiens
aattgcagcagatgaagatccattggtaaattgatcaggatttttggcctaccctccaaagaaaagagcatatatcattacagactatatgggcatccgaaatgaaagtttcatgaaattagctgcagtagggacc

SEQ ID NO: 830526 - DNA, 98 bp, Homo sapiens
tcctcaaaaaatcttcttggttctgctacaaatctttaatctcatgaagtacgacagctacagccgcttcttaaagtctgacttgtttttaaaacaca

SEQ ID NO: 830527 - DNA, 99 bp, Homo sapiens
aagaccctggagggcgagttctcggtcaccatgtggtcctcaggtgtatactcttgatgtaccagatgcattctattactgttatagtccagaccctgg

SEQ ID NO: 830528 - DNA, 100 bp, Homo sapiens
atttagtttttacacaaaggaagccattcttaaggtctgtaaactgcagcaaaaagttcaaaactcaaagatgagtgaagcttcaggtattcagcaagaa

SEQ ID NO: 830529 - DNA, 100 bp, Homo sapiens
ggatgatgacaatgtagaggatgacttctctaatcagttacggaaaatgtttataggaggccttagctgggacactacaaagaaagatctgaaggactac

SEQ ID NO: 830530 - DNA, 100 bp, Homo sapiens
gaaaatacgtggttggagagctcatctggaattttgccgatttcatgactaaccagtgtaaaaatgttgtacatcagctctcagtaaccctagaagactt

SEQ ID NO: 830531 - DNA, 100 bp, Homo sapiens
gtttcgctattgcacgaagttcagcccagaggagaaactcgctcgccttcagaagacaggtgtcagttgtacccgaggcgttctcagcagcagcaagtac

SEQ ID NO: 830532 - DNA, 100 bp, Homo sapiens
ggccaaagcctgcccagacggctcacctgtgcgggatggaacaaaaggaggagaagatgaggaaggaagaggaagaggccaagaagcgggcagaggatga

SEQ ID NO: 830533 - DNA, 100 bp, Homo sapiens
cgtggacatcggggcagctgacctcgcccacgcccagcagcagcagcaacaggagtcaatcttaagatgtgatactttcctgtgaaacctgaaacaaggt

SEQ ID NO: 830534 - DNA, 98 bp, Homo sapiens
atagtacttcaagagcacagtcttatgtaagataaaaatttccaatgggcaaatactggagcagctgtgtttggaacacagtcagtcggaacccagtc

SEQ ID NO: 830535 - DNA, 99 bp, Homo sapiens
ctagatgtcaataaccagtccttcagagaacaagagatgcacacttgactgaaggaggacagggaatctgaagactccggatgacatcagagctacttt

SEQ ID NO: 830536 - DNA, 100 bp, Homo sapiens
ctgcgtccccccaacacgtctctgttcgtcaggaacgtggccgacgacaccagatgatatcatcaagttgaatcgaaaggaagggaagaagcagaatttt

SEQ ID NO: 830537 - DNA, 100 bp, Homo sapiens
tctggaaccggcaccatgtggagcgggtggagatcatcatgaaagagaccgtggatgctgaaggagatgaccaggatagtgaaaagtcaaaaccagcagg

SEQ ID NO: 830538 - DNA, 98 bp, Homo sapiens
atgaagcaagtttacctaacacgtctttgcaaggctcttcgtcagattgggcagaggacgataagcactgcttcccgcaggcattttaaaaataaagt

SEQ ID NO: 830539 - DNA, 116 bp, Homo sapiens
agcaaggcggccacagagagggtggtctcagccatggacacagtacggcggaagcatcccgaggaagaggagcaggacttggatggtgagaaggggccatcatcggaagggcctga

SEQ ID NO: 830540 - DNA, 98 bp, Homo sapiens
tgaccttgattggaatgttggcagctataacttacacactgcagaagaaagatcagcaactggagcctaaaaaaagtaccagccctaaaaaagctgcg

SEQ ID NO: 830541 - DNA, 98 bp, Homo sapiens
gcgatcatgtcaaaaaagtttcttttaaaggaattgaaaattctcaggcaccaaaaattgtcaggaaagaatacccacctcatgtccaaaaagttgaa

SEQ ID NO: 830542 - DNA, 100 bp, Homo sapiens
aaacatggaaaagctcctattctgattgctacagatgtggcctccagagggctagccttatgattctgcagatgactggtctgagcatattagctcttct

SEQ ID NO: 830543 - DNA, 99 bp, Homo sapiens
ctgaggcgggtggcatggcggagaaggatgacaccggagtttgacgaagaggtggtttttgaggtggccagcatcgaaatgttcagccttttagtgatg

SEQ ID NO: 830544 - DNA, 99 bp, Homo sapiens
aactttctcatcttttcagcatctcaaccctgtggaatcttttaactcccaagtttgtcagaggaatggctgtgaatggatgcctggaaggaccatcct

SEQ ID NO: 830545 - DNA, 100 bp, Homo sapiens
atggtgcagtccgagcggtacctccaacagccatccccgcctatccagggttcacaatggtccgtagtggaaaaaatggtgaccttcatcttaaacagat

SEQ ID NO: 830546 - DNA, 98 bp, Homo sapiens
agcattatctgcatatcagagatattacagtttacaggctgactactggaagaaatgtggtttggttttgagctggaagagagtacaaggtgcttccg

SEQ ID NO: 830547 - DNA, 100 bp, Homo sapiens
ttttaatgataattcatgacagaagggagtttgctaaatttgaaaaggagaaaatgaatgccaaatgggacacgctatgtgatgatgatgccatttaaac

SEQ ID NO: 830548 - DNA, 99 bp, Homo sapiens
aaggatcttcggaatgatgagcacacaaggcgggagctagccaagatgaagcaggacgctgccaaggtctgcagagaattcaccgagcgtgagcaagga

SEQ ID NO: 830549 - DNA, 98 bp, Homo sapiens
tgctggagtgggccgactccgaggtgaccctgcaggccctgcggcggaagacggccgctcactttcacggacgctgtgcagagctgcaagtccgtatc

SEQ ID NO: 830550 - DNA, 100 bp, Homo sapiens
aagtggtgatgcaagaagtttctaggaaaggccggacaccaggtagatttcgggcagacaacttgaacaagctgaagaacctatgcagcaagacaatcgg

SEQ ID NO: 830551 - DNA, 98 bp, Homo sapiens
ttcggcaagaactggattcgtggcgccacaagctcattcactgtgtagaaattctccagaatttcagaaacttctgggcatcgctatggaactttttc

SEQ ID NO: 830552 - DNA, 100 bp, Homo sapiens
tgtagagactgatttgcaacccttccgggaagccatagctctgcatggtaaactttcctgagaatggctttctctctcctgataaactgtctttgctgga

SEQ ID NO: 830553 - DNA, 100 bp, Homo sapiens
aaacaggcttactgtgttcactgctggacgcctctgggcaatcttaccctcctgggaactgagagagcgtaccagtaatgttcgatccacatttttcaag

SEQ ID NO: 830554 - DNA, 145 bp, Homo sapiens
cactatatcagataagcttgacattacagccaagatggtgctgtcccagagacaacgagatgaactgtctccaattgagaaacatggcactgtttttcctgcactctacccacctattgctggacttctgttgtacaagttggca

SEQ ID NO: 830555 - DNA, 100 bp, Homo sapiens
ccttccagctccggctcccgctgcctgcaccatgtccgccagaggctggacgtaaagaaagaagtgatgcactcaattctgcaatagataaaatgaccaa

SEQ ID NO: 830556 - DNA, 100 bp, Homo sapiens
accttgcttctgtagaccagctccaacaggattccatggtagctgggatgttagggctcaggtatggcatttcaaatatagatacaaccattgaaggaac

SEQ ID NO: 830557 - DNA, 100 bp, Homo sapiens
atgagcaccaagcagatcacttgcagtcgactcctttacatctagcagcgggctacaacagagttcgaatagttcagcttcttcttcagcatggtgctga

SEQ ID NO: 830558 - DNA, 99 bp, Homo sapiens
ccttcccggagcaccaactccgtgtcgggagtgcagaaaccaacaaatcatcaatgctgtggtactgttgattttattgagtgccctggctgatccgga

SEQ ID NO: 830559 - DNA, 99 bp, Homo sapiens
ctaagtagatcagagctcctggaactttctcatcttttcagcatctcaaccctgtggaatcttttaactcccaagacaaatttacatgtattggagacc

SEQ ID NO: 830560 - DNA, 99 bp, Homo sapiens
gcgagagatggtcaggtctggagctcgaccgggccagggctattactgtgtttcgaccccaaaacttcaatcaatttttcatccagcctgaagaatgga

SEQ ID NO: 830561 - DNA, 100 bp, Homo sapiens
gaaaagcacaagaagtaaacttttacagtcgttgatttgactataacgctgatccccccaaatcaaagcacatggattaattgatgtatgttgagtttat

SEQ ID NO: 830562 - DNA, 98 bp, Homo sapiens
acatggggaaggcctggtaaagtgaatccacactggtgatagaccatacaaatgtgcacacccaggctgtgagaaagccttcacacaactctccaatc

SEQ ID NO: 830563 - DNA, 99 bp, Homo sapiens
gcaagccagccatcctgggaccccaggcgtgcaggttctctttgagggtaaaataccatgaagattttgaaaaaacaaaggggagaggctttactcccg

SEQ ID NO: 830564 - DNA, 100 bp, Homo sapiens
gggcagattcattccgttatcctaaaacagttgcggtccagcacagagctccatccagacctgctcacagattgcctcaccgtgcagtccctgcagccgg

SEQ ID NO: 830565 - DNA, 100 bp, Homo sapiens
tgatatgctaagaaagaatcttgtcactttagccactgctactacagtgcatccactctgggagagcgtggacctggttcctgggggcgatcgccagtca

SEQ ID NO: 830566 - DNA, 100 bp, Homo sapiens
ttaatcaaacttggacagctctctatgggggtcctgatgacaacttaattgaaggtggaggaacaaaatttgtctgcaaacctggagccagaaacattac

SEQ ID NO: 830567 - DNA, 100 bp, Homo sapiens
ctgccctcaaggaagccatgtttgatgatgatgctgaccagtttcctgacgaaaatatttacaccagcagctccagttcataccaataaagaagatcctg

SEQ ID NO: 830568 - DNA, 124 bp, Homo sapiens
aggcacagctgggtcctgatgaaagcaaacagaaatttgtgctcaaaacccccaagatttgcttgtaaatgcatcacgaagaggcagcccagaatgaagaaagcaagcaggagtgttggctcag

SEQ ID NO: 830569 - DNA, 99 bp, Homo sapiens
gagtttgacgaagaggtggtttttgagattctcacatgcttaacactggaaatgatttgaaagaaaatgtcaaaagcgattcagtgctgctgaccagtg

SEQ ID NO: 830570 - DNA, 98 bp, Homo sapiens
atattcagtcatggcgtccgaactttattcttgtagacactgtttgggctctgtcatacttgacagatggaggtaatgaacagatacagatggttatt

SEQ ID NO: 830571 - DNA, 100 bp, Homo sapiens
gtcgagaatctgaacttaggacagtattgagcttcctacaagctgttctggccagaatcaggatgggtcatcagttaaggaagttgaaacctaccaccgg

SEQ ID NO: 830572 - DNA, 98 bp, Homo sapiens
cacaggcagctcgcggtcatgggcggctcagcctccagccagctggacgagggcaagtgcgcttacatccgaggaaatcttcagaggaactagacatg

SEQ ID NO: 830573 - DNA, 98 bp, Homo sapiens
aaagagatgccagggctggaccctaatttgagaagtgcagtgtgcaccaagggtcaggtagtaagtggccagtaccggatgctcgcaaagcatggggg

SEQ ID NO: 830574 - DNA, 98 bp, Homo sapiens
aaaaccgctcctgtctgggccctgagtgctgaggaggaagctgccatgcacttttccctggcatttttcctgcatgataacaaggacgtgtcggtgat

SEQ ID NO: 830575 - DNA, 99 bp, Homo sapiens
catggcttggagcacttcctattccactggattgggaaagaccatggcagaaactatgttccaacttcctgtcaacaatcttggcagtttaagaaaagc

SEQ ID NO: 830576 - DNA, 99 bp, Homo sapiens
cgccaccaccaccgccgctgccccggctgcctcctccctgaggggttgccctgctgtcagacgtctatcctgagaaaatcttgccggacttgttggctc

SEQ ID NO: 830577 - DNA, 100 bp, Homo sapiens
cttcttcacggaccagtttcagttcgccgatgggaaacccggagaccaaatccttggcaaccacacctccaaatcaaggaaggccagattctcctgtcta

SEQ ID NO: 830578 - DNA, 99 bp, Homo sapiens
gaacaggccagcaaaacactcagctgcaagtccaaagccacaagtgtgctggaattgatgttcgtctgtgtgatgttggtgaggccatccaagaagtta

SEQ ID NO: 830579 - DNA, 99 bp, Homo sapiens
gtacagggagctgcagaggtacgccgaggaggttgggatcttcttcactgcctctggcatggatgagttttcatggagtgataatgaaaggagcagcag

SEQ ID NO: 830580 - DNA, 98 bp, Homo sapiens
gctgcttgaatgtctgccgaaatgttcaagtttaccaaaagagaggcaccgctggaacactaatgaggtgctgctacccccgtatgatgatgccactg

SEQ ID NO: 830581 - DNA, 100 bp, Homo sapiens
cttcactcgagagatgaggacactgaaattcagagaggggaagtgatttgcctcagcttgtactgtgaaagaactcttttcttctttgggagtcgaatgt

SEQ ID NO: 830582 - DNA, 99 bp, Homo sapiens
tgaggaagtcttgaagaatagagccataaagaaagcaaagcgcagaaatgttggatttgaacaagaggtggaaacatacagaagaagcaaggaaattac

SEQ ID NO: 830583 - DNA, 99 bp, Homo sapiens
tggatttaaaagatttcttaatgaaaatgaaagaaagtccacatttccaaaagtccaaggtgctgctgggggtgaaatctttgaccagtgtgttgcaga

SEQ ID NO: 830584 - DNA, 100 bp, Homo sapiens
gagcactctatgaagcaatacgggatgcacagaagatctctgatgatctgatgcagaagatcagtactcagaaccgccgggccctagaccttgtagccgc

SEQ ID NO: 830585 - DNA, 100 bp, Homo sapiens
gatcagaaggaattcagtctccaggacattgagcctccatcttccaagaagagcgatggttctgggacatatactaagttgcagaatacccaggtgaggg

SEQ ID NO: 830586 - DNA, 99 bp, Homo sapiens
ttccacttgtcagtgaagttcaaatagctcagttgcggtttcctgtaccaaaggatatgggccctcacattttccaaacctgtccatctgctaactatt

SEQ ID NO: 830587 - DNA, 98 bp, Homo sapiens
tgggttggttatgaaggcaataatagagttgtattccctgaatgactataaaccacccatttcgaaagcgaaaatgacccaaattactaaggcagcca

SEQ ID NO: 830588 - DNA, 101 bp, Homo sapiens
agaaaaggacactgattctacgagagattaaacagattctagaaaatgaacttcagatacctgtgtccaaaatgctgttaaaaggctggaagacgggagat

SEQ ID NO: 830589 - DNA, 143 bp, Homo sapiens
cgagctcagttatggcacacacagtgggacctagacaaagggagagggtgaccgacatcccaactaggccaaacgtaccaagaaagtcgggatcgtcggtaaatacgggacccgctatggggcctccctccggaaaatggtga

SEQ ID NO: 830590 - DNA, 100 bp, Homo sapiens
tttgatccagaacttgcagcaacaatagatcaatgaactgagccatgttcaaatccctgttatgttgatgccagatgacttcaaagcctattcaaaaata

SEQ ID NO: 830591 - DNA, 100 bp, Homo sapiens
gacactccaagtttggcatgaaagcaacacgctagaagggtttatgaaattcttcgactactggtaactgacatgagtgatgccgaacaatacagaagct

SEQ ID NO: 830592 - DNA, 102 bp, Homo sapiens
gaaaatcaaaagaaacttttgcccttatcagtaacacctgaggatggtgaaacgccacttataaaggctaccaagatgagaaacattgaagtggtggagctg

SEQ ID NO: 830593 - DNA, 100 bp, Homo sapiens
aaaagaacgtgttgaaacaaggaattgccccatagccttcacagagactgggtgtgttgctgtattgcccaggctggtgtggaactcctggcctcaagcg

SEQ ID NO: 830594 - DNA, 100 bp, Homo sapiens
cgacggtatcaatgtgtttctggatgactgcctggacaagggagttcagcttttgggagactgactgggctatgaaggctatcaagtactagctccaact

SEQ ID NO: 830595 - DNA, 98 bp, Homo sapiens
cggtcaggctcgccgccgagctgatgccatggacaatattaccaggcagaaccaattctacgatacccaagtcatcaaacaagaaaacgagtcaggct

SEQ ID NO: 830596 - DNA, 99 bp, Homo sapiens
gttcgttgtggcggcagcgagttgaactttaggagagctgtgttctctgcagattctaagtgcttttgaagatgatgatatcacgcacgttgaaggaag

SEQ ID NO: 830597 - DNA, 99 bp, Homo sapiens
cttcctgcaggccccatcaggtgcagagctgtgggtctggttccaagacactgtcactgactgctcctgctaaggccaagccggctgaagctcctgctg

SEQ ID NO: 830598 - DNA, 98 bp, Homo sapiens
gagtctccgcgtcccgctcgctgggagagaggtacctctccttttccctctccctttccctaaggtaagaagtttgatagctgtaggactgggtgttg

SEQ ID NO: 830599 - DNA, 100 bp, Homo sapiens
cctgagcgggacatggactcaacagatctgtctgcctgcaatctacaagattgactttgaagatgtgattgcagaaccagaagggacacacagttttgac

SEQ ID NO: 830600 - DNA, 124 bp, Homo sapiens
ccaaggaaaactgggtgcagagggttgtggagaagtttttgaagagggggcttcgccaccttctcctcctgcttccccggcctctgcgagggcaagcctgctgccctgctacccatgagcctct

SEQ ID NO: 830601 - DNA, 100 bp, Homo sapiens
gaactccctcaagtttcatttgtgaaggagtgtgtcatgaacaatgtcacctgtactcggatctatgaaaaagtagaataaaaattccatcatcactttg

SEQ ID NO: 830602 - DNA, 100 bp, Homo sapiens
tcataccatggatttttctccgagaagtggatactttgccttggggaatgaaaagggcaaggccctgatgtatagtatcctaagaaatccggtaaccaat

SEQ ID NO: 830603 - DNA, 98 bp, Homo sapiens
aacccttaatgtgcatgatggttgtacactcgcctatggggacatgaaccacgagtggatcggcaacgagtggctccccagcctgggcctcccccagt

SEQ ID NO: 830604 - DNA, 100 bp, Homo sapiens
ccagaagattgatcatcatatgggttatgtaggtgcaaaaaactacagacatctctgtgctgtttattacaacaagaatcctgggtttgagatcattcat

SEQ ID NO: 830605 - DNA, 100 bp, Homo sapiens
ggatgtgaagtagatgataaagatgatgatatccttctcaaccttgtgggatgtgaaaactctgttactgaaggttggcgtgcagtggtgtgatctcagc

SEQ ID NO: 830606 - DNA, 100 bp, Homo sapiens
agtgactccaggatttctgaagactattgtggaagaagcatccattaaggtgaccaagaatatggcccaggtgaccaaagccctggacaaggccctgagc

SEQ ID NO: 830607 - DNA, 100 bp, Homo sapiens
aaaaagttattcatcatttttggagtggatattcagaagtgacttccctcttttgctctgttgccattgccccaaatggagccttacagttggcaagtcc

SEQ ID NO: 830608 - DNA, 98 bp, Homo sapiens
ggaagtcaccattggagctcatcagactgaccgtgtcttacatcagttcagagaggatgggtcatcagttaaggaagttgaaacctaccaccggacac

SEQ ID NO: 830609 - DNA, 99 bp, Homo sapiens
ggagctacttccaaattaaccaaggccatgaagcccccaggaggagaatcgagcaatctttttggaagtccagaagaagctactccttccagcaggcct

SEQ ID NO: 830610 - DNA, 100 bp, Homo sapiens
agtagcttcacaaagtgccaaccatacacatggcaccacctcacacagggaaacgtcatctggggacctggagaatgatgagcaggcagccagtgccatc

SEQ ID NO: 830611 - DNA, 100 bp, Homo sapiens
agattattacagtaaaaacaaaagaaaggcaagagaatacttactagttaaaggtcctacaacgtgactttaaaaagacagcagaaagcaaaaatgtccc

SEQ ID NO: 830612 - DNA, 98 bp, Homo sapiens
tatggggaccagaggctgaagcccaagcacacccttttccccacgactctgaaagaggacagcgttcccaatgtcccagtttaagcgccagcggatca

SEQ ID NO: 830613 - DNA, 104 bp, Homo sapiens
gcaagtcccatcggaggacctccctgccctgtataccgagggaacagtctctggctgatgaacttgctcttgtggatgttttggaagataagcttaaaggagaa

SEQ ID NO: 830614 - DNA, 100 bp, Homo sapiens
cggcgccatcttcgaacttagacttccggaaggactttggcgaggaccagtgacaagaccatcctgtactcggtggccaccaccctggtgaactgcacca

SEQ ID NO: 830615 - DNA, 100 bp, Homo sapiens
gggacgcgaggacccgggctgggctttcctcacccggggaagctatgcgaaattatttaaaagagcgaggggatcaaacagtacttattcttcatgcaaa

SEQ ID NO: 830616 - DNA, 100 bp, Homo sapiens
agctgatgataggggggttccatctcccaacttgtccatctgccactgcagagccccgccatggaagacacgccgttggtgatatcgaagcagaagacgg

SEQ ID NO: 830617 - DNA, 100 bp, Homo sapiens
ctgccttcacttgaaaactccaagtactgccgtttcaaccaggacccagaagcaggttaaatgggccagggaaaactatcaccataacattggctcacca

SEQ ID NO: 830618 - DNA, 98 bp, Homo sapiens
acagcaacctgatctcattgggcaggatggggaagcagaatagcaaactggcccctgaagtgatggaggacctggtgaagagcacagagtttaatgag

SEQ ID NO: 830619 - DNA, 98 bp, Homo sapiens
aacattgcctacttatttctctcagctgccaacagatggctggaggtcaggacggaagaggctctgcgtcgccagcgggagcaagaaattgcattaag

SEQ ID NO: 830620 - DNA, 100 bp, Homo sapiens
cataataaattacgaagtcaggtgtatccaacagcctctaatatggagtatatgagctaatgtcaaaccccgaaattccacaccacctagtttggcaaga

SEQ ID NO: 830621 - DNA, 98 bp, Homo sapiens
tggccacttgcttgggatcctttatcctggtcatcttctatttccaaaatacacagatgctaccagcaaatatgaatctgtcatgaaaacagagccaa

SEQ ID NO: 830622 - DNA, 100 bp, Homo sapiens
agaaaccggggaccttaacaatccacctaagaaattcagagcctgtgaacttatgaatcaaggcatcttggccctggtcagctccattggctgcacgtca

SEQ ID NO: 830623 - DNA, 98 bp, Homo sapiens
ggacccaacggggcaacagaagaagatggggttccttccaaagtgcagcgctgtgcagtgcttgtctccaatgttctcattttctcctgcaccaacat

SEQ ID NO: 830624 - DNA, 100 bp, Homo sapiens
cgctaaacgtgccctactctgccccgggggagagcacacggaccctgactactcggctgcctatgtcgtcatagaaactgatgcagaagatggaatcaag

SEQ ID NO: 830625 - DNA, 98 bp, Homo sapiens
ctgctacgcaccgtcaagaaggagggttgagaatgcttgcaccaagcttgtccaggcagctcagatgcttcagtcagacccttactcagtgcctgctc

SEQ ID NO: 830626 - DNA, 98 bp, Homo sapiens
ggaggagctcagctctgctctgcacctgtccaagggcatgtcgatcttcctcgacgaactccttcacagacatccttcgtgccatcctgctgtcattg

SEQ ID NO: 830627 - DNA, 98 bp, Homo sapiens
catattccagtaatggtggatgaagttgttcattgtttgtcaccacaaaaaggacagagtgctgcagcagctcccagtccagtgctaggaaacattcc

SEQ ID NO: 830628 - DNA, 98 bp, Homo sapiens
agaagcggccgagccagcagcagatgttaaggacatgttcacttccagatctctcaaagctgttcagaacccttatggatgttcccaccgtaggagat

SEQ ID NO: 830629 - DNA, 100 bp, Homo sapiens
tcagctacggggatgagattggcctggatgcagctgcccttcctggacagaacatccagtcatggataaaaatgagctggttcagaaggccaaactggcc

SEQ ID NO: 830630 - DNA, 99 bp, Homo sapiens
caaagacgtagaaagaaatcttagcagattgatatcagtaaatgccattatttagtggatttggacaccatgagagaaacaccccgggagccaaaatat

SEQ ID NO: 830631 - DNA, 100 bp, Homo sapiens
gggagaaacaacaactgctacatctgttggaggagccaactagcatggaagtgcaggtgggtcatgataactgggtacgtggagttctgttccattctgg

SEQ ID NO: 830632 - DNA, 100 bp, Homo sapiens
gcagtatcggtttgtcattgagttggaccttagcccatctactggcattgtgcttctagaattcctctccagagctactctcaagttatatccaggggac

SEQ ID NO: 830633 - DNA, 98 bp, Homo sapiens
gggggctccgaagtctgcgagtgcagctgtgcacaggtcctcagaatggttggaatgaccctccagctttgaacagagtacccaaaaagaagaaggta

SEQ ID NO: 830634 - DNA, 100 bp, Homo sapiens
ctttgtcaccagaatgaatgaagtgcttcagatttaaatagtaatgaggagtacctgatcaatctgatagactctccaggacacgtggacttttcctcag

SEQ ID NO: 830635 - DNA, 100 bp, Homo sapiens
gactttgcccttctccaggaagagcactcaggagaccaggaaaatggccacagggctcctgagagccaaaaaagaggttaccttccgaacaagaatctat

SEQ ID NO: 830636 - DNA, 101 bp, Homo sapiens
gaagtaagaggatttatagatcagaatctcagtccaacaaaagtgctgaagctgctgaaagatggcagaagaagtggtggtagtagccaaatttgattatg

SEQ ID NO: 830637 - DNA, 100 bp, Homo sapiens
tttgaggttcatttaaccccaaaatcagtgattctacatctcaagctcatattttgaagtgtttacggggatgagatttactgccagatctgcaagcagc

SEQ ID NO: 830638 - DNA, 100 bp, Homo sapiens
ttgatgttctcatcaagcccacgagtttagattatcccgaaggcaataattcaagtgattatcttgttcaaacaacaacgtatctcccggaaaacttcac

SEQ ID NO: 830639 - DNA, 100 bp, Homo sapiens
cttttctatcccaagaagtggtggttaatcttttacaagaaaccaaacaagcctttgaaagatgtcataggatctcccttgagtttagaaatctggctga

SEQ ID NO: 830640 - DNA, 98 bp, Homo sapiens
tttctggaaaattgctcttctctgcagacaataatgaagtggtagtaggagctgaaagattacgagttttaggcctgtcatctttacttcagagtgtt

SEQ ID NO: 830641 - DNA, 100 bp, Homo sapiens
acagagaaatcaccaggcagcagggggaaaaggtctatgttaacaatgaatgggcaaccagtgttggggaaggagggagctttggagaacttgctttgat

SEQ ID NO: 830642 - DNA, 100 bp, Homo sapiens
gggccccaatgagtggcacacagtctactatcaccgacaggaaagaggttggcctcagcagcaatgagggataattctttcaagaaaggaatgaagagag

SEQ ID NO: 830643 - DNA, 100 bp, Homo sapiens
gagactgggctgccaaaggaccgtatttactgcaacccttctgtggggctcaattttggaaatcttggaagtacttcaactccagcaactacatctgctc

SEQ ID NO: 830644 - DNA, 60 bp, Homo sapiens
caggaagaacagggtcgaggatcgaggttttcctcctccaccaggcgctccacctccatc

SEQ ID NO: 830645 - DNA, 98 bp, Homo sapiens
caatctccgctgttcaagtgattctcctgcctcagcctggttgcagagaacacatcttagaagatgaaaaacctgaatctatcagtgacactactgac

SEQ ID NO: 830646 - DNA, 119 bp, Homo sapiens
tacccttctgaagaacagaaaaagcagttggcacaagacacgggactcaccatccttcaagtgaacaattgggaaaagaagatctcccggagcagtgccctgaaagtgctggaccatgc

SEQ ID NO: 830647 - DNA, 99 bp, Homo sapiens
accgtggctgctcgataaatcagacagaacagttaatcctcaatttaagcctgatctaacccctagaaacagtatgaagtgtaacagaacagactttac

SEQ ID NO: 830648 - DNA, 101 bp, Homo sapiens
gagaaatggtggcatcaacgaataaaagaacaggcctccaaaatttcagaagctgatggggcagtgcccaaaggaaatgccactaaagaattcatcgagag

SEQ ID NO: 830649 - DNA, 100 bp, Homo sapiens
cccgggagcaagtgccttcagctgggagtgtctggagccctggccaccagcgggatctaagcctttcccacgttatggttataaaccctccccaccgaat

SEQ ID NO: 830650 - DNA, 99 bp, Homo sapiens
gagtcttcctgatccatggacccgatgaacatagacacaggtgttgacttcaaaatcaaaactgtagagctaagaggaaagaaaattagattacagatc

SEQ ID NO: 830651 - DNA, 98 bp, Homo sapiens
gacaaccacactgggacgtcagcctcagcccccatggctgcaggcatcattgcgctggccctggaagccaacaatcatcctcttccagtggtagcgtg

SEQ ID NO: 830652 - DNA, 100 bp, Homo sapiens
gagcgcactgctgcagtttggcgtgacatacctggaggactattcggcagagtacatcattcagcaaggtggctgggtgtggtgtcagcacagcggcagg

SEQ ID NO: 830653 - DNA, 98 bp, Homo sapiens
cagcatctacgggaggcaaacttgtaaaacctggaacagcagcatcattgtcaaaggatcaatctccccatccagacctactctgccctcaacttccg

SEQ ID NO: 830654 - DNA, 100 bp, Homo sapiens
ggatgagttctattcagacccccatgctgtagcagacctgcctagagctggaacgttacctccagagcgagccctgctatgtttcagcctcagaaatcaa

SEQ ID NO: 830655 - DNA, 100 bp, Homo sapiens
tggctgtagggagcatagctgctacactgaagatgaagcaaggcccaatgacccaggcggtttcactgaagaaacttcttagagattcattgcacttctg

SEQ ID NO: 830656 - DNA, 98 bp, Homo sapiens
cacctttaaatggatgaccatgtcacaatcaggaagaaacatctccaaagacccatctttagagcacaaagttatcattgttgggctggataatgcag

SEQ ID NO: 830657 - DNA, 100 bp, Homo sapiens
gctgctcctgctgctcatcccggtggccgccgcgcaggagcctcccggagctgctagagaccgttggatggcagcttaaccttcagatggctcactctgc

SEQ ID NO: 830658 - DNA, 100 bp, Homo sapiens
gtccaccactgtttctcatcatcaccaaacgaatggtagataacgcagatcatctctggaaaggatattgatccgcctcatgtaaagtatgcttagttcc

SEQ ID NO: 830659 - DNA, 51 bp, Homo sapiens
gtcggcggcgcccggatgggcagctgaggttactataacaacagtaccaag

SEQ ID NO: 830660 - DNA, 100 bp, Homo sapiens
tatgcttcgtgggatctttgagccttttggaagagtttggtgcacctcgatttggaggaagtagggcagggcccttatctggaaagaagtttggaaaccc

SEQ ID NO: 830661 - DNA, 98 bp, Homo sapiens
tccctacgcgtccctttgggtttagcacgatgagctcaatcggcactggggaaaagaccagtgccctcagtctgagcaacgttgctggagtattctac

SEQ ID NO: 830662 - DNA, 99 bp, Homo sapiens
gcactggcgaccctagcgggtgagaggcccttcagggccgcggcggaatagctgaaacctttggacttcaagaaaattatatcaaaattgtcataaata

SEQ ID NO: 830663 - DNA, 100 bp, Homo sapiens
ttttgatgatggagggctactacagccatatcagcgggaacaagattggctgggagaagacgggaagccactcagagcctcaggcacgaggagacccagg

SEQ ID NO: 830664 - DNA, 100 bp, Homo sapiens
catgctgcagcttatgaccatcaatatgtttgcagtacacaactcccagctgaaaggtgtcagaaactatttaaaagaagcactggtgaatataattgcc

SEQ ID NO: 830665 - DNA, 99 bp, Homo sapiens
tcaagtgaagcaaaagccttccatgattacaaaaagcttgtggtgaaggggggcaaaaaaaagaagcaagttctgaagttcactcttgattgcacccac

SEQ ID NO: 830666 - DNA, 99 bp, Homo sapiens
tccaaagaacagacaccttgggattctataaaattgacttttgaagcaacaggacaggaaagtgattgtgaaaacaatgaagacttatgttgaaaaggt

SEQ ID NO: 830667 - DNA, 105 bp, Homo sapiens
ccaggtcaagcccgaccaatacactgaggccctggcccagagggacaaacgctctgctgttgcccgtattcaggagttcttcagacggagaaaagaaaggaaaga

SEQ ID NO: 830668 - DNA, 100 bp, Homo sapiens
tggtagacggcaaggatgtgatgccagaggtcaacaaggttctggacaagatgaagtctttctgccagacctatgaggaccagcacagcagtgaggagga

SEQ ID NO: 830669 - DNA, 98 bp, Homo sapiens
aaaacttgctggaaaccctgaaagaggagatttcaagtgatgaagaggagacaaatgtaactgctcaagcaatgcagtcaaataatggaagaggtgaa

SEQ ID NO: 830670 - DNA, 100 bp, Homo sapiens
ggagatcctgggatcagatgatgaggagcaagaggaccctgcggactactgcaaaggaagatgagaatgtgcctactgctcctgatcctccaagtcaaca

SEQ ID NO: 830671 - DNA, 100 bp, Homo sapiens
gaaataagtcagcacaacatcaatcctcatcaaggaaatgctatacttgaaaaggcaaacgaagatttaatattaaattgtggaagaccttcactgattg

SEQ ID NO: 830672 - DNA, 100 bp, Homo sapiens
accagaagtttacactggaactggacaggttggctggggaacagaccagggaattggtggatttggagaagagccgggaattaaatcacagctaatgaac

SEQ ID NO: 830673 - DNA, 98 bp, Homo sapiens
gaacattgaattcagggacctttcctattcggttcctgaaggaccctggtggaggaagaaagatgagctgcttcagaaagagcaaaactattcagatg

SEQ ID NO: 830674 - DNA, 100 bp, Homo sapiens
agaccgaattcagaaggatatcgacgtcgtgatccagaagtccagagctgaggactgcctgtttgcagctcggtcaaggagtgtgatgactggcgagcag

SEQ ID NO: 830675 - DNA, 100 bp, Homo sapiens
gggctccgaggacgccaaggagatcatgcagcatcgcttctttgccggtatcgtgtggcagcacgtgtacgagaagaagattatgtttgagaccttcaac

SEQ ID NO: 830676 - DNA, 98 bp, Homo sapiens
ctgaagaagggctccctcgtgaagaacctgaaggacacactagatgagaccctttttgctcttcctgctgcatctgagcctgtgatacgctcctctgc

SEQ ID NO: 830677 - DNA, 100 bp, Homo sapiens
agatccgggagcacgtcatctccatcgaggttttagttactatccagcagaaaacttgatagagtacaaatggccacctgatgaaacaggagaatactat

SEQ ID NO: 830678 - DNA, 100 bp, Homo sapiens
ccgacatggctcgccggcagcagaaggttgctgaaaagccaggagtcaaaatgactgagcgctttgactgccaccattgcaacgaatctctctttggcaa

SEQ ID NO: 830679 - DNA, 98 bp, Homo sapiens
caccccaccaaggatgcccaggataccgggcatttgccactgcaagatatttccatgaggacaacttacaaggacctgtatggcctcattttagctgc

SEQ ID NO: 830680 - DNA, 75 bp, Homo sapiens
tcagccatgaacggatggatgtgatgcctgctagccaaaaggatgattctttgggattgggacttaaaacaatgg

SEQ ID NO: 830681 - DNA, 100 bp, Homo sapiens
aagaaactttgctacagcctcctttgaccagatccatgactgttggtggaaaaatgccagctgtgggacaaggagtgcaggccgcacaacctcggcaggc

SEQ ID NO: 830682 - DNA, 100 bp, Homo sapiens
tgccctctggcgccatgtcgcagaacggagcgcccgggatgcaggaggagagcctgcaggaaatggtggagtcaatgaagaaagtagcagggatggatgt

SEQ ID NO: 830683 - DNA, 100 bp, Homo sapiens
cctaagcaaattctctcatgatgctgatccagaagtttcctataactccatttttgccatgggcatggtgggcagtgctacacagaggatcagagcaggg

SEQ ID NO: 830684 - DNA, 100 bp, Homo sapiens
atgtcatcaaatgctagtgaagttaaacgtattccagttgtgttgctttctgccacaatgccaactgatgtgttggaagtgaccaaaaaattcatgagag

SEQ ID NO: 830685 - DNA, 100 bp, Homo sapiens
tctcctgtatacacccaagtggttgaaaacacagattcccccatctggaattttcaacagcagtcaagatgagtttgatgcctacatcattgtgtctttc

SEQ ID NO: 830686 - DNA, 100 bp, Homo sapiens
cagagaagctgcatccgaggaagctttaacagcagtccaaagtggaaatgttagtgaaccggaggtaccaaagcagtcagactcacagcctaattctgat

SEQ ID NO: 830687 - DNA, 98 bp, Homo sapiens
agattgcagaaaaaaaattgcttggtccccttggcatgaaaactttagatccagagtggatcatccatgccatggagtatgaacttcagatccgtggc

SEQ ID NO: 830688 - DNA, 99 bp, Homo sapiens
ttaaatctgcactcctattccaatttgcccatctgggtcaacaagcttgacatggagcttcagcgcctgctcctggtcatcactaaccagatttacttg

SEQ ID NO: 830689 - DNA, 100 bp, Homo sapiens
ttcaaggtgacatcaccacctgtactgagcagtacagtgaatacacaggctatgctgagacatatcgttggtcccggagccacgaagatgggagtgaaag

SEQ ID NO: 830690 - DNA, 98 bp, Homo sapiens
gagttagagacatgggtaatacagaaagaatctgaggtggctcacgttgaccaactctttgatgatgcatccagtgaagccttctccttccaaaaagt

SEQ ID NO: 830691 - DNA, 99 bp, Homo sapiens
gagtgcagctttgtagttttgcgtgtgttgaaagtacaattctattgcacatcaatgatatcatcccagatctgactgcagccatgagcagcaatgagt

SEQ ID NO: 830692 - DNA, 100 bp, Homo sapiens
ttggagaggtgttaccggaacggcggcgacaagggtgttcccgaactagagtggctaaaagatggcggcaaggcagcccaggcaaatgtaagaataggcg

SEQ ID NO: 830693 - DNA, 99 bp, Homo sapiens
catcatccaccactggaacgccaaccggctggacctgttcgagatcagccagccgaccgagacaaatttacatgtattggagaccagaccagaagccct

SEQ ID NO: 830694 - DNA, 100 bp, Homo sapiens
ggcagtaatggagttgaagctctacagctgttagaacatgagcaagctaatgggaatgacagcaagaaatttaaacgagatagacctccctgttcgcctt

SEQ ID NO: 830695 - DNA, 100 bp, Homo sapiens
tgcgttgcagaatggtgcctgtggcatgatgccagctttgcaatcatgagattcaaaagccacactgtggaattgatgtgggctctcttgatgagaagat

SEQ ID NO: 830696 - DNA, 100 bp, Homo sapiens
gaaacccccatctccggcggagagaccgtccgaggtaattgtctgccacgagtgcacattctgaaaacaggcttgcacccttgctcggaggaatgcagac

SEQ ID NO: 830697 - DNA, 100 bp, Homo sapiens
tcaggaaaactcgtgtccatcaaaatccagatgctggatgacacccaggaggcatttgaagttccagtagctacagcaagctgggtagcaggcagatcca

SEQ ID NO: 830698 - DNA, 100 bp, Homo sapiens
ctctgcggcgcatggaggaggaggaggctgaaggtgatgtggccgccctcaaccgacgcatccagctcgttgaggaggagttggacagggctcaggaacg

SEQ ID NO: 830699 - DNA, 100 bp, Homo sapiens
agtcgcgaagtcgggaccatcgtcgtgaggatcgtgtgcattacaggagtcctccacttgccactggttggactaaatgctcttccttcagaggattatc

SEQ ID NO: 830700 - DNA, 100 bp, Homo sapiens
ggattctgcaccaacactgcacttaaataagggcacacctagtcagacatcaactagtcaggcagtcttccgtctccagtctggcatctgccatctcttc

SEQ ID NO: 830701 - DNA, 100 bp, Homo sapiens
cccagtggccctgcagccgcagcaggaatgaagacctgaagattatcggctataagagaataagaattgcagaaaataacagtgaagtgattgaaacttt

SEQ ID NO: 830702 - DNA, 100 bp, Homo sapiens
ttgttcgggaatccattaaaaatcggtgctacggtggcctgtgggagaaggaccagaaaactacccctgagtgtggtcccacaggatatgtagagaaaat

SEQ ID NO: 830703 - DNA, 98 bp, Homo sapiens
ccttctgtttagtcggacagctttaacagagaaatgtagccctaagtcaaagcaggaggtgatggtccgtccccctacagtgatgtccccatctggaa

SEQ ID NO: 830704 - DNA, 98 bp, Homo sapiens
tcgatcccttctctgatttgctgtcagccatgaacggatggatgtgatgcctgctagccaaaaggggctcaagggttcttgttgatgcacgagataag

SEQ ID NO: 830705 - DNA, 98 bp, Homo sapiens
aaaggaaagacattgaatccattagaaactttgcagctgaccattttaatcaggttctccgtggaggagccagccaacgtcctttgaccccaaaccag

SEQ ID NO: 830706 - DNA, 100 bp, Homo sapiens
acagatgccagcgtagctgaatccagtaccaaaaacgtcaacaacagttttacggcgtcctgcctctgcggctctgccccctgcatcctgtgcagctgct

SEQ ID NO: 830707 - DNA, 98 bp, Homo sapiens
aaccctttactcgcgacctttcgcttcaccttcacagcagccctgcgaggcatgtactggcattgaaaacattgacgaagctattacattgcttgaac

SEQ ID NO: 830708 - DNA, 99 bp, Homo sapiens
gtggacggctccagccccagctgcgtgcccagtcaggatggctaaaggtgaccccaagaaaccaaagggcaagatgtccgcttatgccttctttgtgca

SEQ ID NO: 830709 - DNA, 98 bp, Homo sapiens
tctaaacagcttaacaactgggccgtgtataggttgtcaaaattcacaaggcaaggtgactttgaaagacttacagattccagtctgctgttagatga

SEQ ID NO: 830710 - DNA, 98 bp, Homo sapiens
agtggaagatgatcacatcccaggtgcaaatatatacagagcttcataatcagcccaagaccacatagagcaaacatgaatgatatttcccaaaaggc

SEQ ID NO: 830711 - DNA, 100 bp, Homo sapiens
cgcagctgccgcttcagtccgaaggaggaagggaaccaacccactttctcggcgccgcggctcttttctaaaagtatgcacaaagcagggtcatcagaag

SEQ ID NO: 830712 - DNA, 100 bp, Homo sapiens
ttgatacccgcaaaatcaacaacagtttcctgcgcgaccacagctatgcgaccgaagctcagaggctgagaatggtgtggaggagaaaaagaaagcctgc

SEQ ID NO: 830713 - DNA, 98 bp, Homo sapiens
cttgtctcttatttagttctggggagcgcctcgtcgacatgagtgatgtggaggaaaacaacttcgagggcagagtcattgctagaatcgtggatgga

SEQ ID NO: 830714 - DNA, 100 bp, Homo sapiens
gttgaattccactatgcaaggagattatggagaagtctggcgaggaaggaatgcctgatcttgcccatgtcatgcgcatcttgtctgcagaaaatatccc

SEQ ID NO: 830715 - DNA, 95 bp, Homo sapiens
gacatgtcaaaaattagaacctcttcgccaaagccttaatttatctgaaagtggcgtagatgtttactatgcagttaccttcaatggtgaggcca

SEQ ID NO: 830716 - DNA, 98 bp, Homo sapiens
gatttgtttgtcatccttgtacagcaatctcctcctccactgccactacagggaagtgcatcacatgtcagttctggacttcagtgaccccttcagca

SEQ ID NO: 830717 - DNA, 98 bp, Homo sapiens
tcgctctcggcctccgacacgacataaccagtgcggtgcaatccaagcgaagaaaatccaagtaaacaagcaggactgcgacttgatacttggaaatg

SEQ ID NO: 830718 - DNA, 100 bp, Homo sapiens
ctgccagcccctctcaacctcaggtacgccgtcatgaaatacacaaatcgaagaatagagcattagtacactgggaactccaagaaaaagctttgaagag

SEQ ID NO: 830719 - DNA, 99 bp, Homo sapiens
acaaagcctattgctacaacggcatgtgccagtattatgatgctcaatgtcaagtcatctttggctcaagcatagagaaggagacgtgccagaagatgg

SEQ ID NO: 830720 - DNA, 100 bp, Homo sapiens
gagagataacaaaagctgctcagagtctcaatgaacttgtttctgatgaagaattgaaaagaagagtagctgaggagctggcattggagcaagccaagaa

SEQ ID NO: 830721 - DNA, 100 bp, Homo sapiens
ctacctggcattgccttttgttgaggagagtgggcgctccctttctcttcctggaagatcagtcccaccccccatttctacatctccttgggtataccag

SEQ ID NO: 830722 - DNA, 98 bp, Homo sapiens
ccagtgtccctcgggctgacaagaaccacttcccaagacccacagtgcctggagaggacatggggaaggcctcaacaccctcccccagcctcccattc

SEQ ID NO: 830723 - DNA, 98 bp, Homo sapiens
gacactcggcgatgagctaagacgctgtttcagagcgtttgggtcctctgaggccccttgaccagctctgcaagatttgaagggtcccttaatatgga

SEQ ID NO: 830724 - DNA, 98 bp, Homo sapiens
tggtacaggaaatcctgctcacctgagatactgtgtcacctgtgagggggccctgccttcatcacaagagaaatgacagactttttcattgaatgatg

SEQ ID NO: 830725 - DNA, 74 bp, Homo sapiens
gccttctctagaccttgccaagatggcacagaataaaagccgccctcattctaggggagaatataatgtttaca

SEQ ID NO: 830726 - DNA, 98 bp, Homo sapiens
gaccgtcatctacctgctcaacccctgtcacctggtcaccatgatgcatatttttcggacgccgcccgatactacattccctgagcccacctgcctgt

SEQ ID NO: 830727 - DNA, 98 bp, Homo sapiens
aatttagtggccatcccaaagggtcagaatggcggcagtggagcatcgtcattcttcaggattgccctactggccctacctcacagctgaaactttaa

SEQ ID NO: 830728 - DNA, 99 bp, Homo sapiens
tctgcgtgcattctccactgccgtctactcggccactccggtcccgacacctagcctgcgaggaattctgctacccagtggaatgcctcgctcttactg

SEQ ID NO: 830729 - DNA, 100 bp, Homo sapiens
ttcttcttcgagtatttgtagaagggaatggaagttggatacactttgtgacttgtacgagacactgaccattacacaggctgttatttttctcaatacg

SEQ ID NO: 830730 - DNA, 98 bp, Homo sapiens
ttgtatcacaactaatgcatcatggagcctcaccaaacaccaccaatgtggtaaaatatacccaggaccataaacagatgaaaggtagaccaagtctg

SEQ ID NO: 830731 - DNA, 100 bp, Homo sapiens
cggacgaggaggagtctgctctgcggagatcatggggacagcctcccaagctgaaggaagggaaacatactggggagaaaccctttgagtgtcccaaatg

SEQ ID NO: 830732 - DNA, 103 bp, Homo sapiens
tacctgcaggcctcctacacctacctctctctgatcgagacgctccctccggagctcttccagtgccggaagctgcgggccctgcacctgggcaacaacgtgc

SEQ ID NO: 830733 - DNA, 98 bp, Homo sapiens
tttcctacaacactggtgataacacaacatttcctgatgctgaagataaaggagtcaactgagagttcaaatacaacaattgaggatgaagatgtgaa

SEQ ID NO: 830734 - DNA, 98 bp, Homo sapiens
ggaaccgttgattggagatatgcccttagttggagctttgtctatcttcttccttaggaaaccaaccaacaaagccgtggccaagggggacttgcacc

SEQ ID NO: 830735 - DNA, 99 bp, Homo sapiens
tttgtggtttatctaaaaaccaaagttcaaacacactccaccaggtggcatcatacctctgcttgttgccaactcttcctaaaaatgaagacacaactt

SEQ ID NO: 830736 - DNA, 98 bp, Homo sapiens
tcgctgacaggtccagttgcagatacaaacttggattttttccagtctgatccttttgttggcagtcgcctctaccttgcccagaacacaaaggtgct

SEQ ID NO: 830737 - DNA, 98 bp, Homo sapiens
atggccacggggtgccccggcccacagtcaacggggaggtctgggtcttcaacaaggtggactgtgcattgtcacttattcgacttgggatggagcgg

SEQ ID NO: 830738 - DNA, 100 bp, Homo sapiens
gaccgccaagagcgacgccgccgtgtgcccaacggtcggtgtccccggctgaggcagcgcggccgcagcagccctggccagacaccatttgatgtggctg

SEQ ID NO: 830739 - DNA, 100 bp, Homo sapiens
gagattgtaccccacgagctgccacacggcctgcactctgcgctttgagctactgggctgtgagctgaacgcaataattcggcatagacctgctcttgtt

SEQ ID NO: 830740 - DNA, 98 bp, Homo sapiens
gcataaggaactctatcccaggaatacagctttgcattagttaattggccttggtcctcacagctccaaaaagaaacaggatctcgataagctctatg

SEQ ID NO: 830741 - DNA, 100 bp, Homo sapiens
ttcgacttggagtctttgtccaggacgatcaccggcgtaatcaacccagcgttggacaaatactttccgtcagactctggagtgagaatcatagctgagc

SEQ ID NO: 830742 - DNA, 100 bp, Homo sapiens
gaagtgaaccggcaaatgctgcaggaactggtgaacgcaggatgcgaccaggcaggtgacaaacattaccaccccagctgtgcacgatgcagcagatgca

SEQ ID NO: 830743 - DNA, 100 bp, Homo sapiens
cgtagcctgccactccgtgcagggccaagatcagtcagggaaccaaggtcccggaagaaaagacgaccaacactgtctccaaatttgacaacaatggcaa

SEQ ID NO: 830744 - DNA, 98 bp, Homo sapiens
ggaaccagccaacaggagccctgagacagaccctccagctccccctgccttggagtcagacgtcgagcagagtatggggctgatgaacagcggggcag

SEQ ID NO: 830745 - DNA, 100 bp, Homo sapiens
ctttgatgagaactcagctgtccagcatcgtggcctataaacaagtcccattgtcaccatatggagacatcatagagaaatgaagatgcttacctgcagg

SEQ ID NO: 830746 - DNA, 100 bp, Homo sapiens
gcggcggcaagacctctccccctcggaggcggcgggcggaggcggcgggctgaccggttccctgatgtgttacctgcttctgctactgatccaaactgca

SEQ ID NO: 830747 - DNA, 98 bp, Homo sapiens
tggactccacaaggagaacaggagacccccaaaagggacccaacatgagtgaagtttcctgcaagaaacgggacgactatttggaatggccagagtat

SEQ ID NO: 830748 - DNA, 137 bp, Homo sapiens
aaggcttccagcccatcctgtccactgacacggagaatgaaatcgtcctgcctctgggctccttagatcaggaggcacttgaagtacagacaaagagaaaagtctaccaaggaaagggagaagagcaagctgaggac

SEQ ID NO: 830749 - DNA, 98 bp, Homo sapiens
taaataccacctcaagactcatcgacattgtatgcaaacctgttccattctttcttcgtggacaacccattccaaaaagaatgcttccaccagaagaa

SEQ ID NO: 830750 - DNA, 99 bp, Homo sapiens
cgagaagcctgaaaagtcgcagcgagctggagccgccggagctatgtttccagtgtcctctgggtgtttccaagagcaacaagaaacgaataaatctct

SEQ ID NO: 830751 - DNA, 98 bp, Homo sapiens
cgagccagaggggaaagtatttgtggtaataacccttaccgggagtttcactgaaggtgtgatgaatgcagactctgctaccattttggctgtttgga

SEQ ID NO: 830752 - DNA, 98 bp, Homo sapiens
gcgttggtggcgacggccgagtcagtggcacgtctagtgatgaaatgtgcaacttatacattatgtattacatggaagccaagcatgcagtttctttc

SEQ ID NO: 830753 - DNA, 99 bp, Homo sapiens
cgggcccgccatggacctcctgcacccatccgtgggctatccgggtggtctgtttttctggggggccaccaacacctcccgtgaatctaccatgtaccc

SEQ ID NO: 830754 - DNA, 100 bp, Homo sapiens
atacaccatgcaaaacagaaccttccaaatttccttttccaactaaggattcagcaatggtgatggacccactagtgaaaacgacattttcaggaaggtc

SEQ ID NO: 830755 - DNA, 98 bp, Homo sapiens
atgcagtcagctacgggaattcagtactctgtaacacccagctaccagtctattgaagacaatgaagtatatttgcctaatgatgaaatttggaccta

SEQ ID NO: 830756 - DNA, 100 bp, Homo sapiens
ggacagcaattaaacacagaaggaaatacccagactgttactacaacctcgggcgtctggcctggcatgcgtgggcagtgatgaacttcgaagctgtgct

SEQ ID NO: 830757 - DNA, 122 bp, Homo sapiens
atggccactccagtcggtgttgagcacggcgagcagtctcaggcctttagtgatgatgcagttggaattgatcacaccttttcagttgtacttcaatcctgaattaatctttaaacactttc

SEQ ID NO: 830758 - DNA, 98 bp, Homo sapiens
ccctgggtatgatctggaccatcatccttcgctttgctattcaggatatttcggttgaagtgtctttgcaagatataacaatgaggaaagctttccga

SEQ ID NO: 830759 - DNA, 100 bp, Homo sapiens
aaacaacatcttggttagaccctcggtgcctaaacaagcagcagaagccactggaagagtgtgaagatgatgataaccatgatgactacacagacttcta

SEQ ID NO: 830760 - DNA, 98 bp, Homo sapiens
tttgccttccatcatgctaacttcccacgaattactcaaggtgatgaggacaattgatgacagaatagtacatgaattaaacactacggttccaacag

SEQ ID NO: 830761 - DNA, 117 bp, Homo sapiens
tctgaagcacatgattattgagcataagattgtcatagctgatgtcaagttggttgctgatttccaaagcggggatctgatgagcttctttcttctggcatcattaacggacctttt

SEQ ID NO: 830762 - DNA, 99 bp, Homo sapiens
ccagagaaaggacgagcagcaagtcagggagcttaagctggatgttgagacctggcaacaggaacagcctgtggtgttacatacgtggacgaaggaatc

SEQ ID NO: 830763 - DNA, 100 bp, Homo sapiens
cagaagtgactcaaattttcaagtgccaaacggaggaatacctcgtatgcaacctcaggcttcagccagaaccaaagaggttgttgtaaatgtggatgat

SEQ ID NO: 830764 - DNA, 99 bp, Homo sapiens
ttaacgaggcagtttctagctactgcacgtacttcataaagcaggactctaaaagctttggggtgcccgggaaacatttgagaattactaccgaaaaca

SEQ ID NO: 830765 - DNA, 100 bp, Homo sapiens
acggggggagagaacaatgataaagaagaagaagagaagaaagatgaaacttcgagctcctctgaacttgatcttttccctgaattaattggaactgaag

SEQ ID NO: 830766 - DNA, 98 bp, Homo sapiens
ccatgagttggacagataccaaagaggcttctcccatggtacaagttgatgagaagggtgagaaagtgagaccaagtcataagcgttgtattgtaatt

SEQ ID NO: 830767 - DNA, 98 bp, Homo sapiens
gacctggaaattgcggcccctctttctcaacccagagcaaattgagacgtccggagcaaccggctgaccaagatcgagggtctgcagaacctggtgaa

SEQ ID NO: 830768 - DNA, 98 bp, Homo sapiens
cggccaacttccattgaacttcccagcactcgaaagggaccgaaatggagagcaaagccctgtgcctaaggatagagataaattttatttcaaattaa

SEQ ID NO: 830769 - DNA, 50 bp, Homo sapiens
cagcagcggcgccgtgctcgctccaggttcttagcatgataatcaacgca

SEQ ID NO: 830770 - DNA, 100 bp, Homo sapiens
tatgctcatcagtattatatgcagtaattgaggaacttcagcaggctttaatagtaaagcaaaatgaagagcttgaccgacagaggagaataggtaatac

SEQ ID NO: 830771 - DNA, 100 bp, Homo sapiens
cccaaagcccaaacccagcatctacatcagctgacacaaatgaccctgtgtttgttggaggcttcccagattatatcaaatccagtccctaaaatggaag

SEQ ID NO: 830772 - DNA, 98 bp, Homo sapiens
atgcagcagcagctcctgcctattctcctaacatgtatcctggagcgaatcctaccttccaaacaggaagacaaacttttgcttgagagccagctcat

SEQ ID NO: 830773 - DNA, 100 bp, Homo sapiens
ttgtttgggagtgggggcagacggcgttttgcgcccaactgacacgatgaggcgagtggtacgacagagcaagtttcggcatgtatttgggcaagcggtg

SEQ ID NO: 830774 - DNA, 98 bp, Homo sapiens
tatgccaccatggagaagcataaagaggaatgtggcttcggctatggggaggatgcacagtgtgtgacgtgccggctgcacaggttcaaggaggactg

SEQ ID NO: 830775 - DNA, 98 bp, Homo sapiens
gagaagagagctctggggtcgacacggagcggaagctgcacatctacgtgtggtattgtcagaataagccgcgctcagagtacatcgttgctgagtat

SEQ ID NO: 830776 - DNA, 100 bp, Homo sapiens
acccttccattccatcgatttggaattcaattcgtcataatctgtccctacacagcaagttcattcgtgtgcagaatgaaggaactggaaaaagttcttg

SEQ ID NO: 830777 - DNA, 99 bp, Homo sapiens
ccgccctgcactgccgcttcggtcactaccttgtcttaaaagaagaagcatctgattaccttgaattggatacaattaaaaatctcgtcaaaaaatatt

SEQ ID NO: 830778 - DNA, 101 bp, Homo sapiens
agtgacagtgtaatagaaaaacaagcaagaaaccttttaggagggccgcaagaacgagatgctgctgtccaaggtgaaagcgaaggcctcctgaacatccc

SEQ ID NO: 830779 - DNA, 98 bp, Homo sapiens
gacacccaagccttactcccagcccaaaaattctcaagatgttctgaagacctttaaggtcccccccaaagacccaaactgaatctaaagcctcggag

SEQ ID NO: 830780 - DNA, 100 bp, Homo sapiens
caagagtggggcctgggatgagagtggggtatttatctataccacaagcaaccacatcaaatatgctgtcaccactggacctttccaaagtgaaactgat

SEQ ID NO: 830781 - DNA, 100 bp, Homo sapiens
tttggggaccagagatggacggtcactcagcctatggaggttcagcagctggacatggagaaccaacgctcatcacctctgtcgttccccagtgttccac

SEQ ID NO: 830782 - DNA, 98 bp, Homo sapiens
ttgatattgaatatttcagaaaagatccaagaccattcttcaagtttgcaaaggtttccatttagctgcaagaaacagcactgtatttttcaaagcac

SEQ ID NO: 830783 - DNA, 100 bp, Homo sapiens
tcctgggcctcttcgacgctctattgctatgcagtacttggtaaccagtcggggagaggcacatttggagctgaatgcatttcgaaggaagcatgattgt

SEQ ID NO: 830784 - DNA, 100 bp, Homo sapiens
atcgtctctctcatcgaggcccaaaccgccaaggtcctttcccataacctgtgcacggtgctgaaggttcctcatgacccagttgcccttgaagagcact

SEQ ID NO: 830785 - DNA, 100 bp, Homo sapiens
cacatagccatgatcatgctcatggacatggacactttcattctcatgcaattctgtggtgttcttggtcacacatttatggagtttctgaagggcagtg

SEQ ID NO: 830786 - DNA, 100 bp, Homo sapiens
ggcggagctggcgcggcccctagctttctccttctggtgtggggcccgaggactgatcctttgaaatactccagccatgactaaaagagaagcagaggag

SEQ ID NO: 830787 - DNA, 98 bp, Homo sapiens
tgaatggacacagtgatgaagaaagtgttagaaacagtagtggagaatcaagttaccgaagtgcatgtttgggattttgttgaagaaagctggataca

SEQ ID NO: 830788 - DNA, 100 bp, Homo sapiens
taggagagaatagatatctttaaaattgagtcttctgtccaactgcaaggtggttagccagcgtttccctcagaacagcatcggtgcagtaggaagtgcc

SEQ ID NO: 830789 - DNA, 100 bp, Homo sapiens
gagaagcatcagaagcagctggagcggacctgaacccagacccaatcttagaggagaatcaaggacatttagagtgtttttggatccaaaccagtatcaa

SEQ ID NO: 830790 - DNA, 100 bp, Homo sapiens
agttctgtgttttggaaagcagccaggaaattctggaccttattcacaagtacacaatgttgtcaggacaggttcccttccaatctcatgaccgaagttt

SEQ ID NO: 830791 - DNA, 98 bp, Homo sapiens
ccccaatcagacgccgctcctccaactaccgcgcttatgccacggagccgcacgccaaggagcggcgccggtcagagagagccgagcaacagcgcttc

SEQ ID NO: 830792 - DNA, 100 bp, Homo sapiens
tgatataatggccaagaggaatcagaaacctgaagttagaaaggctcaacgagaacaagctatcagggtttttaatgaccacaacaagcaagcatgcagc

SEQ ID NO: 830793 - DNA, 99 bp, Homo sapiens
atcagtctctctccctgctctacaacgtgcctgcagtggccgaggagattcaggatgaagttggaaaacgggccttactatacatcatatcccccatca

SEQ ID NO: 830794 - DNA, 100 bp, Homo sapiens
agcaccggctccagtgggctctgttgctgaaaagccaggagtcaaaatgactgagcgctttgactgccaccattgcaacgaatctctctttggcaagaag

SEQ ID NO: 830795 - DNA, 98 bp, Homo sapiens
aagggacaatggtcaccgtctcttcagtaagactttgaccccgacgcaggcttcagtgattgccgcggatcagaagcctgagcactttggctcgagac

SEQ ID NO: 830796 - DNA, 100 bp, Homo sapiens
cattgatataaaaccaggcacacctccaatcgctggtagaagcaccacaccaacatctagtcccttccgctggtgcaactattatctcagccactggagc

SEQ ID NO: 830797 - DNA, 100 bp, Homo sapiens
tctccgtttcctggatgtgaacggaatgaaagctactggttgattttaaagtgcctgggcctcacaggtttggagatgtcccagaataaggcacaatgtc

SEQ ID NO: 830798 - DNA, 99 bp, Homo sapiens
ttcttcttcgagtatttgtagaagggggattgcagtggcaaagctaggctaggtcttggaggctggtgtaaggcgatgtgggtgaaggcaggaggctga

SEQ ID NO: 830799 - DNA, 100 bp, Homo sapiens
ctacagtgtggtcattgaggacaagttgacgagagagtcccaagtacgtccacggtcagccttgcgactgattcttgctattccaaatcctcttccacgt

SEQ ID NO: 830800 - DNA, 98 bp, Homo sapiens
ttgaggtcctacatctccgaaagcaagctcttctagaagttggaaaaccagtagattcccagacatcgcgaagtgaatctgaaattgtgccaaaagtt

SEQ ID NO: 830801 - DNA, 100 bp, Homo sapiens
aagggaattaatttttccatctaattatgacctccttcgccacttacagtatgcaacacattttcctatacctctgttcttcatgtgggggatggtcagc

SEQ ID NO: 830802 - DNA, 98 bp, Homo sapiens
acacaaaatcccagatctacctgacgggcctgcgagggttgaagattgtgaagcaatagcctaaggtgtagagaggagagagagtgaacagggagcgg

SEQ ID NO: 830803 - DNA, 100 bp, Homo sapiens
tgtcggagttgtagccatgccctagtgctgcttttgacacaaaaacggggttacgtgtggcagtgaagaagctctccagaccatttcagtccatcattca

SEQ ID NO: 830804 - DNA, 100 bp, Homo sapiens
attaccgagccagccagcaggaaatacagcatggcaggattcatcaaattgaatatgcaatggaagctgttaaacaaggttcagccacagttggtctgaa

SEQ ID NO: 830805 - DNA, 100 bp, Homo sapiens
ggaagccttggcaaatgcttcagatgcagaactctgtgacattgcagatgggcctttgggtccccgaggattagctgaagctacagagatgtgcactcaa

SEQ ID NO: 830806 - DNA, 100 bp, Homo sapiens
gtgatttctgcatttccaactgaggactttaggttcaagatggtgactgcagccatgctgctacagtgctgcccagtgcttgcccggggccccacaagcc

SEQ ID NO: 830807 - DNA, 99 bp, Homo sapiens
gataacccaagtcaaatctaagcatttaaaagacagaagctatggagatattttgcatagaatgaaggatctctgcagatacatgaacaactttgatag

SEQ ID NO: 830808 - DNA, 100 bp, Homo sapiens
gcaatcatgggtcaccaagagaggctgagagaccaggaggcaggtggaagtcatcataaagtttctgtttcacccgtcgtccatgttcgaggactctgtg

SEQ ID NO: 830809 - DNA, 99 bp, Homo sapiens
aggaaacggttgcagaaagggggaagctatgcgaaattatttaaaagagcgaggggatcaaacagtacttattcttcatgcaaaagttgcacagaagtc

SEQ ID NO: 830810 - DNA, 98 bp, Homo sapiens
cagacctggggcccctacctccctacagacagagccacaaggagtgactggctgcaggcaagaccaaggccaccactgtgggccctccttccagtcag

SEQ ID NO: 830811 - DNA, 100 bp, Homo sapiens
tttctttgtcatgtagccaagactggagaaacaatctgatgactatcagccagttcgtctgctcagtaaacctggggaactgagaagagaatatgaagag

SEQ ID NO: 830812 - DNA, 98 bp, Homo sapiens
gctgctctacttgaggaacatgacatttttgttccagaggatgatgatgatgatgactaacaggaaagaccacagcaagattctttcattcgtctcct

SEQ ID NO: 830813 - DNA, 98 bp, Homo sapiens
tgggcgatcacagtggaagacttatcgtgtgttatgacacagctctacattaatcatactcctccaccactgtccaagagtaaggagagagaaatgga

SEQ ID NO: 830814 - DNA, 99 bp, Homo sapiens
gctaatgaatgattttaaacttgtcattaataaaatagcatatgatgtgcagtgtccaaagagagatattgatgatgttaagaagttcaaaccgggtta

SEQ ID NO: 830815 - DNA, 99 bp, Homo sapiens
cgtggccttagctgtgctcgcgctactctctctttctggcctggaggctatccagcatggtcagtctggtcagcccgctttttgtacatcctatcagaa

SEQ ID NO: 830816 - DNA, 98 bp, Homo sapiens
ggaatgtggattactgccagatcctgaaagacatcacggtggaggacatgcttgagaaagagatccaagatcttgaaaaagctgaactgcaaatctca

SEQ ID NO: 830817 - DNA, 100 bp, Homo sapiens
agaggcaagtgggggaggagcgttccttgtcctccctctgcacaaggtaaatgcgaatgtaaggaacagacattaggaaatgccaaggcattctgtggaa

SEQ ID NO: 830818 - DNA, 100 bp, Homo sapiens
aatgctggagacccttcgcgagcggctgctgagcgtgcagcaggatttcacctccggcatctgcaaacatagagaattctgggcttccacacaactccag

SEQ ID NO: 830819 - DNA, 100 bp, Homo sapiens
agagatttccacagaaggactgggatgatacaccttttccacagggaattgagttgtcaatcctttcccatggtaccgtggcagactgtgctgttgttgg

SEQ ID NO: 830820 - DNA, 100 bp, Homo sapiens
ctgagaattgtgtggccaaacaggctctaagcagaataaattccctgaaaaaagaaaaaggaactctgtggactcagatctgaaaagcacaagagaatct

SEQ ID NO: 830821 - DNA, 100 bp, Homo sapiens
agaaaactgaagtttgccataaaagttgatggagattacctttggggctattcacgaaaagcagcagctctagagttcttaaaccgctttgaagaagcca

SEQ ID NO: 830822 - DNA, 100 bp, Homo sapiens
aagtatgacaacagcctcaagatcatcaggcgttacatagccatgtgccgcgagaagcagcccatggtgccagagtctctggctgactacatcacagcag

SEQ ID NO: 830823 - DNA, 98 bp, Homo sapiens
agtccctccagaaccgcgtgaccgagctggagagcgtggacaagagcgcggggcaagtggctcggaacacagctctaagcgaaagacatgaggcctca

SEQ ID NO: 830824 - DNA, 100 bp, Homo sapiens
aagatgctgccctccttcgtccggagaactcccgacgggaccgtttgacaacttaaatgctgcgcatgaaacctctaagttggaaattgaagctagccac

SEQ ID NO: 830825 - DNA, 99 bp, Homo sapiens
tgaatcacacgtgtaactactacctgcagccagaggaagacgtgaccattggagtctggtacaaagaggatggtgaagctttgctaattttgctaccct

SEQ ID NO: 830826 - DNA, 100 bp, Homo sapiens
cttggggtgcagggagtgatggtcagctaggactcatgactactgaggattctgtggcagtgcccaggaaaatttctaccttgaaccgtatctgaaagag

SEQ ID NO: 830827 - DNA, 98 bp, Homo sapiens
tggaaacaccatggctgcggcggcccagctctctctgacacaggatgtacagttacccagcacgtgtacctcctcctcctcctattgctcgggctgta

SEQ ID NO: 830828 - DNA, 99 bp, Homo sapiens
ggccctcaccgccctcaccacccctatccagacggctgcccttcaagtaccatttgatgaaggccggaacaactttgaaggggaggtcaccaaggagaa

SEQ ID NO: 830829 - DNA, 98 bp, Homo sapiens
tggtatggatttccaaagctagtgccatacagcggaaaggcaggaaactggtggtgacaaaagagaaagagaagaaagtggggctgtatacgatctat

SEQ ID NO: 830830 - DNA, 99 bp, Homo sapiens
gaggaaaaaagtttgtgatattgcggcagaactggccaggaatttaatagctgtttgagctcttctctggcttcttgaaatactttcctggggcacaca

SEQ ID NO: 830831 - DNA, 100 bp, Homo sapiens
taaacactgagcaaggcccagaatgttccctaaggcccaaccaaacagaagagggttctccaaaaaatgtggaatcctttgcatctatgctgagacattc

SEQ ID NO: 830832 - DNA, 99 bp, Homo sapiens
aaaggccatggaaggcaccatcgatggatcactgataaatcctacagtggcctgcactgcccaaagtcttggaaacttgctggatatgatgtaccggga

SEQ ID NO: 830833 - DNA, 98 bp, Homo sapiens
cgccctcaagcctatgaactgccctgcacactggatgctccagaccttgtatgattacttctggtgggaacgtctgtggctgcctgtgaacttgacct

SEQ ID NO: 830834 - DNA, 98 bp, Homo sapiens
catgggggacgacccccgattgggtccgatgcctaccctcggggtggagccggcagataagatttgtgaccaaatcagtgatgctgtccttgatgccc

SEQ ID NO: 830835 - DNA, 100 bp, Homo sapiens
tcaccgccgccgccgccaccactgccaccacggtcgcctgccacagaagcaattgtagagtctgccttgtacaaatgtgtcctgaagcccctgaaggaag

SEQ ID NO: 830836 - DNA, 106 bp, Homo sapiens
gtcagaagcgagctatagagttggcaacaacacttgatgaatctctcactaacagaaacctccagataacgaaggaggcccaacttcattcaataaggagcctgac

SEQ ID NO: 830837 - DNA, 100 bp, Homo sapiens
cctggacaacaacgtagccttcatcggcatgtaccagacgatgaccaagaaggcggccatcaccgtacagattgtccagaacatcgtgggcacagctctg

SEQ ID NO: 830838 - DNA, 98 bp, Homo sapiens
ttcatccgggtggggcagctgacaaagcgagtggacatcttcagctgtggaatagttatcaatactctggctgaccatcatcatcgtgggactgactt

SEQ ID NO: 830839 - DNA, 99 bp, Homo sapiens
gcgccgttacagacgtggctactatggaaggcgccgtggccctccccggaatgaatttgctcgccctgatacatcgaatgatagagtttgttgtacgtg

SEQ ID NO: 830840 - DNA, 98 bp, Homo sapiens
gaaacatggcaggctcggatgctggaaggtgggagtcaatcattttgacaagtctcctgaaaggaacagctagcaggaactgaaacctttttccattt

SEQ ID NO: 830841 - DNA, 100 bp, Homo sapiens
gactgcatggaagccaggtgcaaggagaaaggattttgaggagggaggtggggctggtgtccgagcacttctcgcaggccccgcagaggctgtccttcta

SEQ ID NO: 830842 - DNA, 99 bp, Homo sapiens
ctgcttagaaatgtataccacagagatgctaaaatccatatgtctgctggggtctcttcagtttcatcgaaaagtatcatcgagaaaggagaagaacac

SEQ ID NO: 830843 - DNA, 100 bp, Homo sapiens
cccgccatggtgtcatggatcatctccaggctggtggttacctgcagatgaaatggcccctcctcgatgtcccctccagcgccacagtcaaggacacgag

SEQ ID NO: 830844 - DNA, 100 bp, Homo sapiens
gcctcatctcatcttacaggagcagactagggaatgaaagctactggttgattttaaagtgcctgggcctcacaggtttggagatgtcccagaataaggc

SEQ ID NO: 830845 - DNA, 98 bp, Homo sapiens
cttacgaggaggtcaagcgcggggcgctgccctcgggagagtgtttgagcaacacacctccacttactgagtatttcctcaatgataagtatcaagaa

SEQ ID NO: 830846 - DNA, 75 bp, Homo sapiens
aattaaccagagaaggtgaaacgatcatcgagctaaaatatcgtgttggcttgcattgatgacaatgttgatatg

SEQ ID NO: 830847 - DNA, 100 bp, Homo sapiens
gcagcactatgctaaggaaactccaaggcttgccttcaagaataactgcgaactacttttatctgatgatggccgctatgtcttgttatcaataagggaa

SEQ ID NO: 830848 - DNA, 100 bp, Homo sapiens
cagttggagttggaatttgtgcaatgtttagccaacccaaattaccttaattgttctagtaaataccgcttgctgtgttttgatgttggtggctaagctc

SEQ ID NO: 830849 - DNA, 100 bp, Homo sapiens
tggggaatgcttttttatctcatattagtgcctgtgatggcatctttcatctaacacgatggccggctcctgccagagttcaacatggcggagcctccct

SEQ ID NO: 830850 - DNA, 99 bp, Homo sapiens
tttaatataacagataatgctgcaattaaaccaggtgtgtagaccacactccaaaactgaaactgtggatggcagccatgaaggaagatcccacagtct

SEQ ID NO: 830851 - DNA, 100 bp, Homo sapiens
gtgcatgacgccatcctgccgcagctggcgcagcccacgctcatgatcgacttcctcacccgcgcctgcgacctcggtgcatctgcagacgcagcaggag

SEQ ID NO: 830852 - DNA, 100 bp, Homo sapiens
tccaggttcccatggttgccggctcccctctcaggacaacccagatgtgcaacaaagtgcgatgtttgcagaaaaaacttcagcatgtgccaggaacaca

SEQ ID NO: 830853 - DNA, 101 bp, Homo sapiens
cgtggggacgttccccgacggccagaagttcgactccagtgccggtggtggtgtgcacattgagccccggtatagacagttcccccagctgaccagatccc

SEQ ID NO: 830854 - DNA, 100 bp, Homo sapiens
agctgacagagatacctacagacggagtgctgtgccacgctcgcctctatagcctgcagtcggacccagcaacctactgtaatgaaccagatggtgagag

SEQ ID NO: 830855 - DNA, 101 bp, Homo sapiens
ggcggcgggcatcttcttcgtgaggctgctcttcgagcggtatcctggatacagccatcgttgatcgggggaggaatgtggtgtctgcttctcgagatggg

SEQ ID NO: 830856 - DNA, 99 bp, Homo sapiens
ggcgacctcatccacgccatgccaggaacctctttcaggagctataaaagaaagggaggaatcatgtccacaattgcagctttctatggcggcaagtcc

SEQ ID NO: 830857 - DNA, 99 bp, Homo sapiens
actggttggcccagctccttggggtttccggctgcagggcggtaaggatttcaacatgcctctgacaatctctagttactatactggcaattgctggag

SEQ ID NO: 830858 - DNA, 99 bp, Homo sapiens
gacagcggcgagcagaactacggcgagcgggactcgctcagcagcagcctgaaaacttgctacaagtatctcaatcagaccagtcgcagtttcgcagct

SEQ ID NO: 830859 - DNA, 100 bp, Homo sapiens
tggccgagggatagcctatggaaagaagggactacatgcatgtactggcattgaaaacattgacgaagctattacattgcttgaacaaaataattgggac

SEQ ID NO: 830860 - DNA, 100 bp, Homo sapiens
agccgtcctttcacagcctcagaaagtgctcgcttcccttcgggggctttcgcgaatcccgaggcaatctcggaggcggacgtcaggcagcgctttggag

SEQ ID NO: 830861 - DNA, 100 bp, Homo sapiens
cggctacctgctgacacggaaccctcacctcaacaagatctgtctcgtaactgtgtaatcaaggaactagcaccacaacaggaaggtaacccaggagaag

SEQ ID NO: 830862 - DNA, 100 bp, Homo sapiens
agggcagtcccgcctgcgtcccagaagtgcctgcagttcagacccttctctcccctccactttctcccggatcaaaggtttggagtggctggtgtccctg

SEQ ID NO: 830863 - DNA, 99 bp, Homo sapiens
ccctccccgcctctgcgtctttgctcccggagcgcttgaaggagctgcggctcgagctaatccaagatatggggttccatgtcatttactgaatgaaat

SEQ ID NO: 830864 - DNA, 100 bp, Homo sapiens
tgtcacgaatgcttgaagacagagatttattcgtaatgcgactcaaagctgcacggcagtctgtttatgagcaacagtatcaaagtgctctattttgggc

SEQ ID NO: 830865 - DNA, 98 bp, Homo sapiens
cctgggacagcactgagcgagtgtggagagaggtacagccctcggcctacaagctctttaggatgttgagaacgatgggcctgagccctcagactggg

SEQ ID NO: 830866 - DNA, 100 bp, Homo sapiens
ggacattccaggcagaggcaagctgggatgaaagcagctccatcagtagtggactcagcgatgcctcagacaatctcagttcagaagaattcaatgccag

SEQ ID NO: 830867 - DNA, 98 bp, Homo sapiens
cgcgggagccgcacgcggcgatatggaagaggagggcaagaagggcaagaagagaatggatcttggagaatgtctgaaagtccatgacctggctttaa

SEQ ID NO: 830868 - DNA, 100 bp, Homo sapiens
gcatcagggaggctttcagccggagaagcgagtttcagctggtttcagccatgccacagagctccggcagtcatgggcccgctatagcagcagttcatag

SEQ ID NO: 830869 - DNA, 100 bp, Homo sapiens
cactggcacttgtcctcctgtttctatagaaactgggttggaagtcagagctgcacaaagggaaaggatgctgaagagtttctggcagaaggtttgcgga

SEQ ID NO: 830870 - DNA, 100 bp, Homo sapiens
tagccaaattgctcaactaagaccaagtcctcgctggactgctcagggtgccagacctcatcgtgtgaagatatgtgacgtgtataacgctgtcatggac

SEQ ID NO: 830871 - DNA, 98 bp, Homo sapiens
tgacctgacggagtatctggaaagctcgggacaggatgaatcgagagctccagatcatgagaaagctagatcactgtaacatagtccgattgcgttat

SEQ ID NO: 830872 - DNA, 99 bp, Homo sapiens
cttcaccacttacgaaatcagggtcaaggtgaaagtgggagatacattggatcttctcattggagaggataaagaagcaggaacagagacagttatgcg

SEQ ID NO: 830873 - DNA, 100 bp, Homo sapiens
gcgttctgtcaatggtctgtgctgaccctgtctacaaagtgtacgttgctgctttagttgcacttcctgcagaagaggattatttaccacttaaaccacg

SEQ ID NO: 830874 - DNA, 98 bp, Homo sapiens
aggcctggattgctgctttcaattactggcatccagaaattgtgtattcagacatagggcctgattacattccaacagaggaagaaaggagagtcttc

SEQ ID NO: 830875 - DNA, 98 bp, Homo sapiens
ttaagcgccggttcagagggtcagggaaggagaactccaggcacaggtgtggacaatgtggatctggaggccgcaacaaggaagggcatcttggttat

SEQ ID NO: 830876 - DNA, 99 bp, Homo sapiens
agcagtaacaacagcgaggaagaagaggacgacgacgacgaggaagaggaggtttctgagttgtaggacagtcccatctggacagcaacattgagaatc

SEQ ID NO: 830877 - DNA, 99 bp, Homo sapiens
ccgcccccggagctgctggtttcattcgaggtttcgggccgggcagagcggcttgggtaaatccaccttaatcaacaccctcttcaaatccaaaatcag

SEQ ID NO: 830878 - DNA, 98 bp, Homo sapiens
gtaacttggccaggctggccccgagcggaactggagaaagctgagggagactataaatattcaggaagagatagtttgatttttttggttgatgcctc

SEQ ID NO: 830879 - DNA, 98 bp, Homo sapiens
ctaaatgcactctttcgaaagaaaggtggcgctcaggcacgaggatggcgatgagaccacggagccaccccccagtgggtgccgggaccggaggaggg

SEQ ID NO: 830880 - DNA, 99 bp, Homo sapiens
gaaaatgtggacagtggagaaggcccagccaatgaagatgaagacataggaggtcctagctggactgctgcaccttggcaatatccagtttgctgcctc

SEQ ID NO: 830881 - DNA, 146 bp, Homo sapiens
cttgtgtctctgggagggcgctgctttccccggccacccggcgcgatgatccagaatgtcggaaatcacctgcgacggattcaaccctatgaaaagataaaggccaggggcttgcctgataatatatcttccgtgttgaacaaact

SEQ ID NO: 830882 - DNA, 100 bp, Homo sapiens
ctatggcatctatgttatcaaccagattgtcagaagcttcagttctggtaaaagagaaggtggggactttgtttgctgtgccctctctccccgtggtgaa

SEQ ID NO: 830883 - DNA, 100 bp, Homo sapiens
gattccttttctggcagtagcaagagcacttgtcatttacccttcgtggtgaccacagatccccagcctctgcccagaagttttctagcaggtcaacagt

SEQ ID NO: 830884 - DNA, 100 bp, Homo sapiens
cttctttaagggctacgggaagatcctggaggtggatctgaagaacgggtcccttaatatggactttgaaaatcaagataaggagaaagacagtaatagt

SEQ ID NO: 830885 - DNA, 100 bp, Homo sapiens
cccaccgtttgccaggcttgcaagaaactcctcaagggcctcttccggcagggcctgcaatgcaaaggtactaactagggagctctggcagtgaacctta

SEQ ID NO: 830886 - DNA, 100 bp, Homo sapiens
ggcgccctacagcctactggtgactcggctgcagggcagatgattctggaccagatgaagcctgaggagccttccagctctaagatagcaggataggaga

SEQ ID NO: 830887 - DNA, 100 bp, Homo sapiens
ccactcaagaatcgtaggccaggctgatggagagctgaacattactcttccagaagaggtctaccctgaactgcagatcaccaatgtggtagaagccaac

SEQ ID NO: 830888 - DNA, 99 bp, Homo sapiens
aagaaagacctcattaaagctcttgtggagaatatagatatggacacaagcctcattttggaatattgcagccatcattggctagtgagtccaaccttc

SEQ ID NO: 830889 - DNA, 99 bp, Homo sapiens
ggaaaatggcggtgtctacagtgttctcgacttcgtcgctgcaacctgggctggctgagttatggggctttgaagggagacgggatcctcatcgtcgtc

SEQ ID NO: 830890 - DNA, 100 bp, Homo sapiens
tttttgtatgcgatgaagatgctactttagaattaagagttaaaactgtgaaatactttaaaggttatgatgtgattgctcaagcccaatctgggactgg

SEQ ID NO: 830891 - DNA, 100 bp, Homo sapiens
ttttagtatatttccacagattggacagaaactggcgatggaatatgagaggagccctctggaaagaaaaggacagaccctgtgctttcatgaaagtgaa

SEQ ID NO: 830892 - DNA, 99 bp, Homo sapiens
actgaagaagcatgatattgagctttacatgcacttgaacagactagaaattgcaccacagatatatgggttcagccgaggaagagcggctggtcttgc

SEQ ID NO: 830893 - DNA, 99 bp, Homo sapiens
ttaaagatatggactccagttatgcaaaaagaggtttccaccgtgcacattatgaagaaaagaaatggaggtgggagtttaaataactattcctcctcc

SEQ ID NO: 830894 - DNA, 99 bp, Homo sapiens
atcattgaagtgcttggagtgcagaactgaaagagctccctcgtgaaagatgcttctgttcctctgattgatgttacaaacctccctactcctcgaaaa

SEQ ID NO: 830895 - DNA, 98 bp, Homo sapiens
gcacggacccatgaaccagccgggcggcgcggcggctccgcagggcgacataccttctgttgaataccttttacaaaatggaagtgatccaaatgtta

SEQ ID NO: 830896 - DNA, 99 bp, Homo sapiens
cctgcgaggcggaggcaggatgaagatgactgtggatttcgaggagtgtctgaaggactcgccccgcttcaggaatataaatagtttctggaaaggaca

SEQ ID NO: 830897 - DNA, 117 bp, Homo sapiens
atgagcatagtgatcccattgggggttgatacagcagagacgtcatacttggaaatggctgcaggttcagagtttgcctgcaatgagatttcattctctacatttaaaggacatcct

SEQ ID NO: 830898 - DNA, 98 bp, Homo sapiens
aagaaggagatgaggaaaatgatccagactatgacccaaagctgactacacagacttagtcttctccactccgtgttcctgcagctagagacatgacc

SEQ ID NO: 830899 - DNA, 100 bp, Homo sapiens
agatgaggctctttgtgttgtagacttgctaaaggagaagtctggtgtaatacaagatgctttaaagaagatattgatgatgttaagaagttcaaaccgg

SEQ ID NO: 830900 - DNA, 98 bp, Homo sapiens
ccttcaacagatccacctgtattcacttgccgacctgcagcagcttcgcagaatcaagaacggctatgtgcgtttaaagatccgtatcagcaagacct

SEQ ID NO: 830901 - DNA, 99 bp, Homo sapiens
aatccaagcctgcaactgcagagacgagagatctttctgctgtctatactcttggaaagcacatcctaagctttctctcctttgaaaacactaagaata

SEQ ID NO: 830902 - DNA, 100 bp, Homo sapiens
ctctcctgggatcggcccaaggccagttctccgcaggcttggcactgctgcaccaccaaaggcaaacttcattgaagctgacaagtattttcttccattc

SEQ ID NO: 830903 - DNA, 99 bp, Homo sapiens
gaagatcagggatttctggattctctacgggatctcatagcagattcaaatccaatgctcaccaagatggaggaacagagcccatggcccacttactac

SEQ ID NO: 830904 - DNA, 100 bp, Homo sapiens
tggccaacaccaccggcacagtgacggcttcagaggcttcctttgctccaataagctttgcaatcaaggccaaagaaaatgatctgcttcccctggaaaa

SEQ ID NO: 830905 - DNA, 100 bp, Homo sapiens
ccccagccgccgccggcggcggcggcgtgagccaccgcgcaggtcggcttgggaaaccaaaaattacacagagtttaatggcatctgtgaacagcacctg

SEQ ID NO: 830906 - DNA, 100 bp, Homo sapiens
aggggtcttcggctagcaagttcaccagcatccctgcagccttctggtataccatcgtcaccatgacaacactaggattgctcatttagaaagtggatgt

SEQ ID NO: 830907 - DNA, 100 bp, Homo sapiens
aagcggaaccatctgggagccttcctgatccgggagagtgagagctccccaggggagttctctgtgtctgtgaagtctcctctgagcctccggcctccat

SEQ ID NO: 830908 - DNA, 100 bp, Homo sapiens
tgacgaagctcccaaaaggcagactcgtcgaagagcggctaaaaacgttaggacaccaaaggcaccacagaaagccaaacaagcattccagagcctgcca

SEQ ID NO: 830909 - DNA, 100 bp, Homo sapiens
tggaggagaacttagtttcacatgcagcagaactgattaaaacagtggcatctcgctatgatgaatatgttaatgtgaaggatttttctgacaaaatcaa

SEQ ID NO: 830910 - DNA, 98 bp, Homo sapiens
gctgtatgtcaggccctgcccggctgtgaagagaacattcaagatagtgaggtctcggagaccttggtacaacgcaacggcgacttcctcatccggga

SEQ ID NO: 830911 - DNA, 124 bp, Homo sapiens
agaactgtgaagagaggagttgagaacatctctgttgacattcattgtgcttgaaggtttatctatactgttcacctgtgactaaggagttgttgttaacgagcccgaaatacagattttggaa

SEQ ID NO: 830912 - DNA, 100 bp, Homo sapiens
tgcttggctccctgcagtttggctacaacactggagtcatcaatgccccccagaagggtttttaagtaccggtgaccaggcagcaaaaggcaactatggg

SEQ ID NO: 830913 - DNA, 100 bp, Homo sapiens
ctgtggctgccatctgccgcctcctcaggctgccactccccaccaccgtccccagccccgttctgttccgggctgggactctgcccccggagcaccctcc

SEQ ID NO: 830914 - DNA, 100 bp, Homo sapiens
cggagtggggaagacctgcgtcctttttcgtttttcggatgatgccttcaatactacctttatttccaccatagacggaatcagtccccaatgcctggaa

SEQ ID NO: 830915 - DNA, 100 bp, Homo sapiens
ctcttacaacaaaatggttttccactccattgttgttagaagccagggccatgctatgatagtggaagcttatccaaaataatagatccagaagaagtga

SEQ ID NO: 830916 - DNA, 100 bp, Homo sapiens
aggacatcctggaagctgggaaaagtgccggtggtggtgtgcacattgagccccggtatagacagttcccccagctgaccagatcccaggtgttccagag

SEQ ID NO: 830917 - DNA, 101 bp, Homo sapiens
gagacaacaccgagtatgagaagtatgatctcgtgaaaccttgagagaaactgaatgacgaatgaaactattgttcctgtttcacacagaagaaaactgag

SEQ ID NO: 830918 - DNA, 100 bp, Homo sapiens
gccagacctgctgctgcttcaatgtccgcatcgcaaccaccgccctggccatctaccatgtgatacacaatcatcatcttactagttctctgtgttgctc

SEQ ID NO: 830919 - DNA, 101 bp, Homo sapiens
aaacttttcaagcctgaaggaaaggcagaactgcctgattacaggagctttaacagaatcagcatgattcttcagaggctcttcaggttctcctctgtcat

SEQ ID NO: 830920 - DNA, 100 bp, Homo sapiens
actctgcctgatgaccacagcagctacacagttccaggctacatgcaggacttggaggtggagcaggccctgactccagagatgggctttcaccgtgtta

SEQ ID NO: 830921 - DNA, 100 bp, Homo sapiens
gaaatagcttgtgctgctgctgctgctgctgctgcatgtctaccaggagaggagggaactgcggagcgggatgagagggccttaccaaaaggagatttct

SEQ ID NO: 830922 - DNA, 98 bp, Homo sapiens
ataactggagagcctctctacaatgctgtggtggtgaggactgacagcttctgcagaaagccttcatgcctgcaggagctacagaacagggcagggaa

SEQ ID NO: 830923 - DNA, 100 bp, Homo sapiens
atttacagccttgcatttagcagtttacaagccctgccaaggtaaccctgctggggtcagttatcttcacattccagcacacccagcatctggcaatatc

SEQ ID NO: 830924 - DNA, 100 bp, Homo sapiens
accatccctactgactcagaagtgaccttcctgaaagcgctgggagattctgagtggttcccacaggcagggaacgtggtgacaggagaaatggtagaag

SEQ ID NO: 830925 - DNA, 100 bp, Homo sapiens
ctctgctcttcctcccttcgctcgcaccatggaagaggatcacctagcccgggtagaagaggcaatcacccgtatgcttgtgtgtgccctgaaaactgca

SEQ ID NO: 830926 - DNA, 98 bp, Homo sapiens
agaaagcacagtctatgatgattataaatttgtcaccaagaaagaccttgaaaatttagatacactgaagagatggtgccttggcacccttgcctgga

SEQ ID NO: 830927 - DNA, 100 bp, Homo sapiens
ttgatttattaaatttaaatagattagtaactggcatagacaactatgggcaggtggccaaggtggaatacgtcaggaagaagccaaaattaaaagaagt

SEQ ID NO: 830928 - DNA, 99 bp, Homo sapiens
gctgattttaaaagatctggaacatcgaaaggaccaagtaacacagctttcacaagagcaaactctggcctgttctattctgactgcgctattgagtga

SEQ ID NO: 830929 - DNA, 100 bp, Homo sapiens
ctggaatcagtagctttcagcagagtaactcaagtgggacttacggtccacagatgagccagtatggaccacaagagcccataggcagcatgtcatccat

SEQ ID NO: 830930 - DNA, 98 bp, Homo sapiens
acataacatgccaccatctgccctcagtcagttggggtcctgggaactccaacaagggagcaaatcagagaaatgaacccaaactacacagaatttaa

SEQ ID NO: 830931 - DNA, 100 bp, Homo sapiens
accctggaatggagacaggagaagccctcagcttcggagcaaggtgttgggctggatcttgatagcagttgttatcatcattcttctgatttttacatct

SEQ ID NO: 830932 - DNA, 100 bp, Homo sapiens
tatgcttggcagcagaaggatttggcaacagactttgtttcttggagtccacttccaattccaaggagtggagtcaacatatcaatggagcaagtcacag

SEQ ID NO: 830933 - DNA, 100 bp, Homo sapiens
acgatccctgaatgggcccgtgggcatatttagtcattcatttttgatcaggagaaagaagacagccatcatttgaaagagtctcgctctgtagccaggc

SEQ ID NO: 830934 - DNA, 100 bp, Homo sapiens
cagtgttgtcatggacaaggacaaggcattgaagttgatatcgatgtggagcacggagggaaaagaagccgcctgacccccgtctctccagagagttcca

SEQ ID NO: 830935 - DNA, 98 bp, Homo sapiens
gcccgccgccgctgccgctgtcaccagcccggccccaggggtgccctgggctccgcggtccgggtgcccttggaggagccccctctaagtccagacgt

SEQ ID NO: 830936 - DNA, 98 bp, Homo sapiens
cggcgctggccccaaggcgctgccctgcgcaggagtgctgatggcagagattggtgaggatttggataaatctgatgtgtcctcattaattttcctca

SEQ ID NO: 830937 - DNA, 98 bp, Homo sapiens
ctgtcgcttctgcagtgcgtaggagcggccggggcgggaggctccgcggagccgaggcgtggaggtggaggagttactgatggccatggagaaggtaa

SEQ ID NO: 830938 - DNA, 100 bp, Homo sapiens
agaagatgaccttaacacagtagcagctggaaccatgacaggcatgttgtataaatgtacaggggatatcattttcaatgcccaatacccagaactgcct

SEQ ID NO: 830939 - DNA, 100 bp, Homo sapiens
ttttctccaatattacagatgtctgtgaggcaagcaaaaataatctatgccagcaattatgacaatgttagcagaccatgcagctcgtcagctgcttgat

SEQ ID NO: 830940 - DNA, 100 bp, Homo sapiens
catctttccaggaggctttggagcggctaaaaacctctgtcaaagctcgaaaaacagcagcagaggaaagaaaagaccagagctaagggaccttctgaat

SEQ ID NO: 830941 - DNA, 100 bp, Homo sapiens
ggaaaaccctggcactagccctgcccttgaagcctattctgagactgccaaggtcttcagtctgtcggaaaaggtaacagaagatggaactcgaaatccc

SEQ ID NO: 830942 - DNA, 100 bp, Homo sapiens
gtgcggcattatccacgaggcaaacgttcctgttcccgacatccggacgtgccacttctgcctcgtagaagacccttctgtaggatgcatttcaggctca

SEQ ID NO: 830943 - DNA, 100 bp, Homo sapiens
gctttgaagaaagatgacaccacctttgatgaggtcgtcacgctgtggtacagagcacccgaagtcttgctccagtccagctacgccacccccgtggatc

SEQ ID NO: 830944 - DNA, 101 bp, Homo sapiens
ccaaggactgcagctatggggctgttactagtccaacctctacccttgaaagcagagatagtggcatcattgaaataagcgggttttgaaaacaaaaaaaa

SEQ ID NO: 830945 - DNA, 100 bp, Homo sapiens
tgaggcttcaaattggcatggattttttcttccagagaaaatatcttcaactctcaaagtagaaccctggtcattcaatattaacagggttgcaactcag

SEQ ID NO: 830946 - DNA, 100 bp, Homo sapiens
ctgcacggcagtctgtttatgaggaggcagttcccatgttatacgcagcagatacttacggagcattgtaatgaagtgtggttctgtaaattctctaatg

SEQ ID NO: 830947 - DNA, 100 bp, Homo sapiens
tggccctgtaccacactgaggagcgcggccagccctgctcgcagaattaccgcctcttctttagcaattaagttggaatatgcaaggttggttaagttgg

SEQ ID NO: 830948 - DNA, 100 bp, Homo sapiens
ctgtgttaaattcagcccctcttccagataccatttggctttcggctgtgcagaaaaactgttcttgaaaaccacctgctatttagtcattgacaagttt

SEQ ID NO: 830949 - DNA, 100 bp, Homo sapiens
tgaggcggtcctcctagcggcctgcttcagtatcagacacagcacagcagccatctgaagagcaaagcaagtctcttgaaaaaccgaaacaaaaaaagaa

SEQ ID NO: 830950 - DNA, 100 bp, Homo sapiens
gtccacgcacctggacgacgcccggcgccagcacatcgcaggtgtctcccagtctgctaaagccctaaggccatcaccatggacttccagcatcgccccg

SEQ ID NO: 830951 - DNA, 98 bp, Homo sapiens
agcatcttggctgaccttgagtgcagctccccctataagcctcggcctccacaggctgaccccgcactacatctacccaccagccatcgtgcagccca

SEQ ID NO: 830952 - DNA, 98 bp, Homo sapiens
ggatccctgagctcgtcaagcagctgtcggccaagctcatcgccaacggagatgttgcagtaaagatcctaaaggttgtcgacccaaccccagagcaa

SEQ ID NO: 830953 - DNA, 150 bp, Homo sapiens
tcggtctgagccaaggagtatttttgaatatgaacctggcaagtcatcaattcttcagcatgaaagaccaatcgaaagctgctttgcgtcgcagttggagcagcacccccaccgcaggtggcattgaagggagcgtgaagctgcacgagg

SEQ ID NO: 830954 - DNA, 100 bp, Homo sapiens
cgagatgaatcctgcggcagaagccgagttcaacatcctcctggccaccgactcctacaagtttcaccagtgatcattaaagaatgggcagcttacaaag

SEQ ID NO: 830955 - DNA, 101 bp, Homo sapiens
cggcgcggccatggaggtctacatcccgtcctttcgctatgaagagagcgacctggagcggggatacacgagatttgagtgaaaaccagatccaggggatc

SEQ ID NO: 830956 - DNA, 100 bp, Homo sapiens
agtgctaaaggcccccctgaaaaacggatgagacttcaggaggtaccttcttccaaacccggtggcgggacaggcctggccggcctctgcagagacgtcc

SEQ ID NO: 830957 - DNA, 98 bp, Homo sapiens
gagctcatccaggccgccggcattctcctccggctgccgcaggatgtctcgggctgttcgtcttccagtcccctgtcctgttcaacttggtaccttaa

SEQ ID NO: 830958 - DNA, 100 bp, Homo sapiens
catccagcgacaaggactttaggaacagatggagtcggataactgttcaggaggagatgatgactggacccatctgtcttcaaaagaagtggacccgtct

SEQ ID NO: 830959 - DNA, 100 bp, Homo sapiens
aacaatccacctaagaaattcagaggtgaagagtgcgacattgacataaatgaatgtgacagtaacccctgccaccatggtgggagctgcctggaccagc

SEQ ID NO: 830960 - DNA, 98 bp, Homo sapiens
gagtctagaattcacacagagccacctagggactgctgagatgtcctctattcttgaagagcgtattcttggagctgatacctctgttgatcttgaag

SEQ ID NO: 830961 - DNA, 98 bp, Homo sapiens
ctgattggcaacatgttagctttgaagtggatcctaccagcacctgttcttcccggagcctatcagcaaagccattcccaaggctatggctacatgca

SEQ ID NO: 830962 - DNA, 98 bp, Homo sapiens
gcctatgctgtcgccatcccactggctgcaggcctcctgctgctcctgtttgtggtttaattggttggggtcagataagaagaggagtgacaatcaag

SEQ ID NO: 830963 - DNA, 99 bp, Homo sapiens
ctctcgtctccttcctggtttggggtctcagcatcagaggagcccaggaggaggaccctcccgatccccagctaatgagactggacaatatgcttttgg

SEQ ID NO: 830964 - DNA, 100 bp, Homo sapiens
gtatttcagctggctggaggaattggagaaaggccccaaccaggccttgtttgtatgaagtccagcacatctgtggttgagcttgttatgctgctttgtt

SEQ ID NO: 830965 - DNA, 100 bp, Homo sapiens
gtcatcctcaaacaccagctactgtgaactctgccacttcaggtttgcagtcgagcgcaaacccaggccgttagtggagtatctttttgccacatacgtt

SEQ ID NO: 830966 - DNA, 99 bp, Homo sapiens
gggggctggtcccagaagatggcggaggcggggctcagagtcaagatctccactgaagttggcatcacaaatgttgatctttccaccgtggataaggat

SEQ ID NO: 830967 - DNA, 98 bp, Homo sapiens
gcgttcttccattaaatgaggatagtccgttgatgtatcagccacaaaaaatggacttgactatgcactcagccacataaagaagatccctaatagtc

SEQ ID NO: 830968 - DNA, 100 bp, Homo sapiens
atgtttggatggagctttgtctttgaggactttgtctctgatgagctgagaaacaaagccacccagccaatgaaggattggcctaatgaagaagttcaac

SEQ ID NO: 830969 - DNA, 100 bp, Homo sapiens
ctcatttccatcatttcctgctaagccaaacagagaagtgcagcagagaccgagagatgatggactcatggatttagcaataaatgactatgattttaat

SEQ ID NO: 830970 - DNA, 98 bp, Homo sapiens
ccgtcggtctgcagcgcggctgagaattcagatcaggaaggaggtggaaagaaaaagaagaaaaagaaggacaagaaacacaaaaaggataagaagca

SEQ ID NO: 830971 - DNA, 100 bp, Homo sapiens
cggagcatgaggacgtgtgggggaaagatctaggagagagggagaaattgatgctgccagaaagaggggacagttacagaagcgaagaccttgagaagga

SEQ ID NO: 830972 - DNA, 100 bp, Homo sapiens
gaatacagagagaaaattgagacggagctaagagatatctgcaatgatgtactgccatccagtccaatggatcagatgggcaagatgagacctcagccat

SEQ ID NO: 830973 - DNA, 98 bp, Homo sapiens
tcactcaggcaccttccaccaaccgccagatcggacaaaacttacctggggtccctacttatggttttacatgcttcgggctgctacatcaactctct

SEQ ID NO: 830974 - DNA, 98 bp, Homo sapiens
gcgatggattgctctattaggacttgggaccttccttctgggtggctagtgcggatctgggaagaacgagtaagcttaaccaagctaagagaaaaggt

SEQ ID NO: 830975 - DNA, 99 bp, Homo sapiens
caagtttatctcctttctgtttaaagatggaaacttatttaaggatggctgacttaccgtatcaggtttcaccttgcttaaatgtcctgtcacgactgt

SEQ ID NO: 830976 - DNA, 98 bp, Homo sapiens
tgtgtactttccatttgccttcctggttgttgcgaagctctttggtgaataatagaactcaggccaaggtagcggaggagctgggcatgcaggagtac

SEQ ID NO: 830977 - DNA, 100 bp, Homo sapiens
tgttaaacagaagatacctttgttttcagcagtatagatcgaatcactcagaattcagcagaagagaaggaagactctgtggacaaaaccaaaagcacca

SEQ ID NO: 830978 - DNA, 100 bp, Homo sapiens
ccgggacatgcatcgtcccctggactctctcaacagaaccttctaagtctcagacacgtaaacccaagtgtggcaaaggaactcattgctctcgaaatgc

SEQ ID NO: 830979 - DNA, 99 bp, Homo sapiens
gtactgctcaccagagtgatcctttcctacaaattggattttctcattccactgtcaaaggtacatggtttagatccaaacacatggaaaactgttgaa

SEQ ID NO: 830980 - DNA, 100 bp, Homo sapiens
caagctcagaactgagaagctgtcaccacagagttacactgttagaccttatgatagccaagataacgagtgatgagccactcaccaaggatgacatccc

SEQ ID NO: 830981 - DNA, 98 bp, Homo sapiens
gaagaaatacttggtcccatttcttttcgcctgggaggtatctttccactattagcaatgcgcttccattgaagattgacatcattaaacatccaaat

SEQ ID NO: 830982 - DNA, 100 bp, Homo sapiens
gccttctccctgggattgcggtcgcagcttcactcattgatgcccatgcaggaggactagaaatagaagacttgttttcttcacttaaacatatccaaca

SEQ ID NO: 830983 - DNA, 99 bp, Homo sapiens
gcggaggcggcggaggccagggaggaagatgtcgtaatgagcgatctgaagaaaacccttgctgtgttattagataacattttgcagcgcattggcaag

SEQ ID NO: 830984 - DNA, 98 bp, Homo sapiens
acattggaacttagtgttatgccaaaagatgaagacattctccaagtgctgatgaccaaacacccaggcaaacgtctgggttgtggacctgaaggcga

SEQ ID NO: 830985 - DNA, 100 bp, Homo sapiens
agacgacaagcacacactatggcgctgaaacggattaataaggtccagcatgccagcaaacagatcagtgctgagaagcagtacaaagggatcattgatt

SEQ ID NO: 830986 - DNA, 100 bp, Homo sapiens
ccggaggtggctctgagggcagggacgtgttggacacgctgactttgtaggctccgccaagaggcgccgcaggaggctgctttgaatgctgcatcaagtg

SEQ ID NO: 830987 - DNA, 100 bp, Homo sapiens
cggggatggcgtcccccgggggcccgtactgcacatcgtggtggtcggatttcaccacaagaagggctgccagccacgagactcaaacaacttgctggga

SEQ ID NO: 830988 - DNA, 98 bp, Homo sapiens
cctcacctggtcaatgcagacggacagtacctcttctgcaggtactggaaacccacaggcacacccaacatgccaatgaagatgtggaaagaatgtta

SEQ ID NO: 830989 - DNA, 101 bp, Homo sapiens
cccagacagaggggagcacagagaaagagaatgatgaagagaaaggcccggagactgattacatcccagtagaccaagaagagttaagagattatgtcaaa

SEQ ID NO: 830990 - DNA, 100 bp, Homo sapiens
gtgaagaccccagttttgctgaccttattcaccatgacttatcagatttggagcaagaggtggtggtggccttcccccgaagaaatttggtaatcctggg

SEQ ID NO: 830991 - DNA, 100 bp, Homo sapiens
ttcttcctctttctcgactccatcttcgcggtagctgggaccgccgttcaggatgagttagatgaactccgtgctgagatggaagagatgagagacagtt

SEQ ID NO: 830992 - DNA, 100 bp, Homo sapiens
gggaggttacgcagcaaaccatccagaagatatggctcgtggacagcagaaaattcagtctcagcagaaaaatgccaaaaagcaagctggacaaaagaag

SEQ ID NO: 830993 - DNA, 100 bp, Homo sapiens
agttggatgccaagaaaagaataaacttatccaaaatcgacaagtacttcaaggacttcagggccacaggtgctgccaagatgctccagggcacctgctc

SEQ ID NO: 830994 - DNA, 99 bp, Homo sapiens
gcggaaccatctgggagccttcctgatccgggagagtgagagctccccaggggagttctctgtgtctgtgaaactctgttacggcatggtgcaaatcca

SEQ ID NO: 830995 - DNA, 140 bp, Homo sapiens
caagtttcacatccttgtctgtgaagctaaactcaatgctgctgtgtgggaagaagatttgtaaagaaaactcttaggttcttcattagaagctgtaaccacctgtgaactatgtaaagagaagttggagcttaacctgg

SEQ ID NO: 830996 - DNA, 100 bp, Homo sapiens
tccttgtcgaagttgaaggtgacaaccggtatattgcaaataccgtagaggttggcgtgcagtggtgtgatctcagctcattgcaacctctgcctcccgg

SEQ ID NO: 830997 - DNA, 98 bp, Homo sapiens
atggagcaggcttgcaatattaaacttccttgtggtcatagatgcaaagagatgtgtcatcctggtgaatgtccctttaactgcaaccagaaggtaaa

SEQ ID NO: 830998 - DNA, 100 bp, Homo sapiens
gggtagggagctggcacagtccgattaattgtccttgggtcgaggtgtctcgtcggaccctttggggctcagtggagattgtgaagaaggatgagttctc

SEQ ID NO: 830999 - DNA, 100 bp, Homo sapiens
ctgagctgcgaggaaaatggcggcgggaggcagaatccagagaccacatttgaagtatatgttgaagtggcctatcccaggacaggtggcactctttcag

SEQ ID NO: 831000 - DNA, 98 bp, Homo sapiens
cttgaaagaagctgcagcggaggaaggcgaggttcttcccactagtaaaagcagccaaatgatcaccttcacctttgctaatggaggcgtggccacca

SEQ ID NO: 831001 - DNA, 100 bp, Homo sapiens
aatgccctttctttatcaaagacaaccaaaagttacaacagttcagagtaatcgtcagtatttaaacagatcacatcatgcgtgagtacaagctagtggt

SEQ ID NO: 831002 - DNA, 100 bp, Homo sapiens
tctgagatgttaacagaaatggtccctggacaggaggattcatctgatctggagttgctgcagcctccacctcagatatatgacaagcagttggatgaaa

SEQ ID NO: 831003 - DNA, 99 bp, Homo sapiens
gcggacttccactcttctttgtcattactgtgacggctatcaaacaggcacttttaaatcaacttagagctgtgtttgatcaaattattgaacttcaga

SEQ ID NO: 831004 - DNA, 100 bp, Homo sapiens
aggcccacttaagttgggaaagattaagggctgaaaacacagttaaatcactttcaaagttaaaagactattaagaacacaagatggggactcctgcttc

SEQ ID NO: 831005 - DNA, 101 bp, Homo sapiens
cagccacagacggaacaagcatgcaggatattatcaactcactggtaacaacagtattcatgctcatcgtatctgtgttggcactgataccagaaaccaca

SEQ ID NO: 831006 - DNA, 100 bp, Homo sapiens
aaagtggaattgcatgggaaaatcatggaagttgattactcagtctctaaaaagctaagatttacactgactgggccaaccactacctagcaaaatcagg

SEQ ID NO: 831007 - DNA, 100 bp, Homo sapiens
ccagtatgacaaagtgcagttgtacgttgacatctcccccgggactgtggactggaaccacatctactttgaaagggagagataccaatgtactggtata

SEQ ID NO: 831008 - DNA, 100 bp, Homo sapiens
ttgctgacatgcatagcaacctctccaactatcaccagagctctgcgtgcctcttgctgtgccctacctggacaaacccccaactccgctccacttctac

SEQ ID NO: 831009 - DNA, 100 bp, Homo sapiens
ttctttcttggctattcagaccttaccaagaacgttaaaggaaacaagtagaaatcagcagtggagtgtctgtggatttttacctcctataactccacca

SEQ ID NO: 831010 - DNA, 100 bp, Homo sapiens
cctagaaattccccccgaagaagactcccccacatctggttgggccggtgcacaaacagcgtggtcaagtatgagctgatgcgcccctccaacaaggccc

SEQ ID NO: 831011 - DNA, 100 bp, Homo sapiens
aaccgaggagtacgagctcaacggcggcctgcctccgggcacacccggctccccggacgcctcggaaacatgccctgaactgtcacagaatgaaaccagc

SEQ ID NO: 831012 - DNA, 98 bp, Homo sapiens
ctggctactgcatcttatgatactcgagtatatatctgggatccacataatggagacattctgatggaatttgggtatttcgaaaaaagcctggtttt

SEQ ID NO: 831013 - DNA, 100 bp, Homo sapiens
aaggaaacctttccaacacagatgtccaagctgccaaggtactagatggaaacttgagaaaggactgcttattgataacagctaaggtattcctggaagc

SEQ ID NO: 831014 - DNA, 140 bp, Homo sapiens
ttcccgtctcccagcgtggatgagggcgcctgcagatcccggctagggcacggaccgcctaggccgagatcccacagccaacaaagattctggccaagagtcagagtctattccagaatatacggccgaagaggaacggg

SEQ ID NO: 831015 - DNA, 100 bp, Homo sapiens
cacttggaatcacgggttgaagggagaaaactggttgtcctggatgtttgaaaagttggtcgttgtcatggtgtgttacttcatcctatctatcattaac

SEQ ID NO: 831016 - DNA, 98 bp, Homo sapiens
gccgcgcccggggccgtgcgctctcgggccactcggccgcaggtggagtggctgaaacttctcagcaggcgcatctacactagtgacctgaggagaga

SEQ ID NO: 831017 - DNA, 99 bp, Homo sapiens
cccagctctgcagccacatactatccgtttgttcaggaaccaccagtgacagaccctgcctctttcttgtcgcagtcagtttcatcatcagatagaaac

SEQ ID NO: 831018 - DNA, 99 bp, Homo sapiens
ccttgtcgaagttgaaggtgacaaccggtatattgcaaataccgtagaggtggatgggcaggtggtagcactgctggtacagaatctggagcgcctgga

SEQ ID NO: 831019 - DNA, 121 bp, Homo sapiens
tgtaattttactcatattagtagccaatgcaattgtgggtgtatggcagcccccattcactggggagaatagaaagaaaacaattgacaaaatcctcaaatgtaaactcaatttgcctccc

SEQ ID NO: 831020 - DNA, 98 bp, Homo sapiens
gacctactgcagccacgcgggcgagcggctgtgtggatgtcggcgaagccgcgggcgaggtggaaattaaaggtggagcacatgattattacaatgtt

SEQ ID NO: 831021 - DNA, 98 bp, Homo sapiens
acagcctcaaccttcataaacagggcccttggaagaaaatcctcgctgtgtccaggctgaggcggggggctaatgacagtgtgagctctagatggtgt

SEQ ID NO: 831022 - DNA, 98 bp, Homo sapiens
gtccgttggccttcgtacccgtcttgattgagtcaccttcaggccattcagaggaggaaagagaggggaatatgaagtcagccaagccccaagtgaac

SEQ ID NO: 831023 - DNA, 100 bp, Homo sapiens
tccggagagtggagaggaggcagtggccctggtggaagacttgcagaaagaacctggaagacagaggctggagattacgccttcccatacattatattag

SEQ ID NO: 831024 - DNA, 111 bp, Homo sapiens
aagtcgttttttaaagagtatggacaaatagaatctgtacgatttcgttctctgatctgaagaagacacttgaatcatgggtgacgttaaaaattttctgtatgcctggtg

SEQ ID NO: 831025 - DNA, 98 bp, Homo sapiens
ttagagactgaaatcactgcaccttaaaaacaaaagattgagctgcactgtattcctgagaaggtaaagcttgatgctgaaagggaaaaactagagag

SEQ ID NO: 831026 - DNA, 100 bp, Homo sapiens
ggaaatataacattcttggcacaaatactattatggataagatgatggagccttggtcatcatttgatatatacacccggaaagggccgctggaaaaccc

SEQ ID NO: 831027 - DNA, 98 bp, Homo sapiens
atgttagaattgaagcctataatatttgtcacctgaactacttcacattttccccaatatatgaccccaagactgcttctgagacagaaacagatatc

SEQ ID NO: 831028 - DNA, 98 bp, Homo sapiens
cagtgacagcaagtccattcagaagcctcccagaagttcctgccgaatcgtcttcgtcacccccggggtccgaggtagcctcccttacacagcctgag

SEQ ID NO: 831029 - DNA, 98 bp, Homo sapiens
gccttggagcgaggctatcacaagctgcaccagcttctaaccgagttctggagacagcctgtatttcttggatcttggcttccttccatcttcaaagc

SEQ ID NO: 831030 - DNA, 100 bp, Homo sapiens
aatccaccccgaagctgttacacttaattaaccctcaaactgcccagtgagaactcctgtagcctgtaataccagctgtgggtactactctcagtgttgg

SEQ ID NO: 831031 - DNA, 100 bp, Homo sapiens
gggaagcagcagcggccaggatgaatcccaggtgctctggagctggatggtgaagtcaaaatgcagatcttcgtgaaaacccttaccggcaagaccatca

SEQ ID NO: 831032 - DNA, 100 bp, Homo sapiens
aaacaactcattaatgctgcaaactagcaaggagaatcatgctttagaatggaaaactcctctctgtggaaaggagcaaccgaatcgtagtggatgaagt

SEQ ID NO: 831033 - DNA, 99 bp, Homo sapiens
tcagacatgaatactgtgacactgaccaccaggccaacttaacatcagcagatatcctgtctcagatgaagagggtttgaaagtattcttgaagggctg

SEQ ID NO: 831034 - DNA, 100 bp, Homo sapiens
cactcacctgtgcaaccccagggacctggaaagacagacaggatggggaggaggttcttcagtgtatgcctgttgccaccttccagagaagaggtacgag

SEQ ID NO: 831035 - DNA, 98 bp, Homo sapiens
gtgaagatcggacactacgtgctgggcgacacgctgggcgtcggcaccttcggcaaagtgaagaagaaactccagaaaatcttgccaaacttctgacc

SEQ ID NO: 831036 - DNA, 100 bp, Homo sapiens
aatgattttaattggtaataaagcagatctggatcatcaaagacagacccctggctgtggagtgagcaacaggtatgccagtggcttctctgggccacca

SEQ ID NO: 831037 - DNA, 98 bp, Homo sapiens
agagcaagcccgcacgtgtgaaggcatccactgatcaaatggggagcctgcggccttgtgttggcaggcaatgcagtcattttccttacaattcaagg

SEQ ID NO: 831038 - DNA, 100 bp, Homo sapiens
agcgccgtcccgtccgacagccaggcccgggagaaggacttgccatgaggtgttgaagccttgtttcactgagttggagagactggacctaaatggcgca

SEQ ID NO: 831039 - DNA, 98 bp, Homo sapiens
caatgaagtggtggccatcaagaaaatgtcttatagtggaaagcagtctactgagacttcacgaaaacctcgtgaagagcgagatgtgtctcaatgtg

SEQ ID NO: 831040 - DNA, 100 bp, Homo sapiens
ccgccatcgaggcacagcacttgctcaagaggaaaccaggaaatgaatgttccattgaacagatggaacatgttcggggaatgcaggagaaattagctcg

SEQ ID NO: 831041 - DNA, 100 bp, Homo sapiens
gccttggaacatgaatatgaaccatatagcaggctaaaatcagccttcaaaagtatgttcgggaacagattctactagcagtagcagtaattgtaaaaag

SEQ ID NO: 831042 - DNA, 100 bp, Homo sapiens
ccttaacgtggagctctccaagtctattatcctcccagtccacaacgctgaaccgtggctggacgaatgtttgaggtctgttttgcaacaggactttgaa

SEQ ID NO: 831043 - DNA, 100 bp, Homo sapiens
cgaggccaggagccaggggcccagaagatggactcaccctgtcacccaggttggactgcactggcctcaacctcctgagttcaagtgatcgtcccacctc

SEQ ID NO: 831044 - DNA, 100 bp, Homo sapiens
gcacggcctcgtgcccttcgccttcgtgcgcttcgaggacccccgtgtacctcctttattcctgaagcccgggcagtgcttgacctggtcgaccagtgcc

SEQ ID NO: 831045 - DNA, 100 bp, Homo sapiens
gttcacaggcttaactccaagactgtgttcgggagtccttggaactgtggtccatggtaaagttttacaggttcgagtagttggagttacctgtgcagcc

SEQ ID NO: 831046 - DNA, 50 bp, Homo sapiens
ccgccgctctgtctacaacccgagcacccaccaaggctccggatgtgttc

SEQ ID NO: 831047 - DNA, 98 bp, Homo sapiens
aaaaatagggtctggcttcttttctgaagtgttcaaggtactccaaagattcaggtttactcacgtcatccagcagagaatggaaagtcaaatttcct

SEQ ID NO: 831048 - DNA, 100 bp, Homo sapiens
agcgcctggcagagcagatcgcgaccctttgtgccaccctgaaggagtacccggctgtgcggtatcggggaagtgtatgctgacttgtaaagtgaagaag

SEQ ID NO: 831049 - DNA, 98 bp, Homo sapiens
taacttcaaaatctcctttattacagatgacccaatgccattacaggaggaagtggtgaagttgactgagaaatgccttaataatgtcattgagagcc

SEQ ID NO: 831050 - DNA, 100 bp, Homo sapiens
agcagaaacaatggttgcatctgcagatggtttagtttatgaaccactcgatcaagtcatccgccaaagaagcctgtccagtttggaactgttcctctcc

SEQ ID NO: 831051 - DNA, 100 bp, Homo sapiens
attcctttcctgctagaactttcagaatctcaggcgggtgaggtggatttagttttggagaaggaggtggctggcctctggatcaagatcccatgcacag

SEQ ID NO: 831052 - DNA, 98 bp, Homo sapiens
agccggaggactgtgctgtgcctctctcgcccacattttccccaagcactctcaggaacctggcaacagatgtgattttgaagatacagctcagtacc

SEQ ID NO: 831053 - DNA, 99 bp, Homo sapiens
acccacttgcagcatggagtcgcccgcctcgagccagcccgccagcatgccccagtccaaagatgccatggacaatattaccaggcagaaccaattcta

SEQ ID NO: 831054 - DNA, 98 bp, Homo sapiens
ccgacaccgagcccgcccgacccgggctcccacctgctcctccagcgcaccagatgaaggtcaccgtgtccaaagggggcgaccgggacagtgacgac

SEQ ID NO: 831055 - DNA, 100 bp, Homo sapiens
tttcatctcttctggggcaggggccagggccaggagtcggtgatggaggcaacgagcttgggatgggtaaagtcaaggaggctgtgaggaggcacatacg

SEQ ID NO: 831056 - DNA, 99 bp, Homo sapiens
tccaacccagaaccgggagaaatggatctactactgcaatggccatgggttctgagcaaggttcaaccagtcaagaacaggccttatctgctcagcaag

SEQ ID NO: 831057 - DNA, 99 bp, Homo sapiens
ctcctctttgctaaacctgtgcctgaacattgtgcctcggttcaggaagatttgactgaagagaaaaaaagggaactggagcataatgctgaagagacc

SEQ ID NO: 831058 - DNA, 98 bp, Homo sapiens
gggatttcatcgctgaggtggatggagaagcagctgggggccttggctgtaaggacccctaaggacgactgcaagaacattgccaacatcatgaagac

SEQ ID NO: 831059 - DNA, 131 bp, Homo sapiens
ctacctgcagctgaagagcacggactctggagccaaagatcttgccgtggaccttattgaaaaatttgcccattgtgcatcttcacgacaaatcatctctcattggaagaactgcacacgacatgactgtc

SEQ ID NO: 831060 - DNA, 98 bp, Homo sapiens
tcggaggatccgagtgtgaatttcctgaagaacgttggggagagtgtggcagctgcccttagccctctggatttaaattccaggttgtcatcaatggc

SEQ ID NO: 831061 - DNA, 98 bp, Homo sapiens
gcatagtacaatgaggcagccagcggatcttggcttcctgcctgacacagctcacttcaagaagtgcacaatgtcagaacgtggaattaagtgggctt

SEQ ID NO: 831062 - DNA, 100 bp, Homo sapiens
cagcaaaagaaggagggtcctctcagtgattaagagagcctccttttcacctgaccagaagaggctggggtgagtttcccgtcagagttcaagttcattt

SEQ ID NO: 831063 - DNA, 98 bp, Homo sapiens
gccgtccaaaatccaccaaagaaagtgacctctgagaaagtgagccagaaacatgctgagcctttgacagatttcagcaacgtccctgatatcacaac

SEQ ID NO: 831064 - DNA, 100 bp, Homo sapiens
gataacttgtactggagagaaatcctacaagtgtgctgtgcggtcagagaagaaacgccttaggaagccaagcaagtggcttttggaatatacagaagaa

SEQ ID NO: 831065 - DNA, 99 bp, Homo sapiens
ctttagcctcaggaggcagctatccaagctgagtcagtgctgattctctcaaatagagcttgaaggataaatcttcatttttgtttcaacaaaacttcg

SEQ ID NO: 831066 - DNA, 100 bp, Homo sapiens
ctggaacttctgataagacacttggtcaagccgactgcagcagtggcccagggcaaagagtgtgcgtcatcgatgagattgggaagatggagctcttcag

SEQ ID NO: 831067 - DNA, 98 bp, Homo sapiens
gtgttgctgtcaaggctgacaatttgaaatggagcagtcaatgaatatgctgaattccaaccatgagttgcctgatgtttctgagttcatgacaagac

SEQ ID NO: 831068 - DNA, 100 bp, Homo sapiens
ccccagatccatttacactttacagaattgcaccgaagaagccaacttcagccggagccagccaagacgaaggctctccagactgtcatcgaaatgaagg

SEQ ID NO: 831069 - DNA, 100 bp, Homo sapiens
catgtaccccccgccgctgatcgaggagccagccttcaatgtgtcctacaccaggcagcccccaaatcccggcccaggtgtaggagctgcacgatctggg

SEQ ID NO: 831070 - DNA, 51 bp, Homo sapiens
gtgtgtgacggggctcctgatgcttgtacaataactgcatctgcgacgtgg

SEQ ID NO: 831071 - DNA, 100 bp, Homo sapiens
gtcttctcgtcggattgcccatgcacttgttgcagaaacagccaaggctccttgccagaggcctccactcactccagacccctatagcccgtcgctgtca

SEQ ID NO: 831072 - DNA, 98 bp, Homo sapiens
gttggtcttctgatagcaactttaatgtgtaggttgtgacagttggaagtgtcatgtacaacatgcggcgattaagtctttcacccaccttttcaatg

SEQ ID NO: 831073 - DNA, 117 bp, Homo sapiens
ctccatggccagtgaggaagtcttgaagaatagagccataaagaaagcaaagcgcagaaatgttggatttgaaattctggacaatcaggaagtccaagccacaatgatcctgccaag

SEQ ID NO: 831074 - DNA, 101 bp, Homo sapiens
aacgggcagccggacaggaagccgccggccctgccgcgccccatccgcaacctggaggtcaagttcaccaaggctctccgtgtgaaatggtcccatctcag

SEQ ID NO: 831075 - DNA, 50 bp, Homo sapiens
ttccaccaatattcctgaaaatgaaaaatgttaaggatctcatggattca

SEQ ID NO: 831076 - DNA, 99 bp, Homo sapiens
ttcggccatctttgctcctccctgcaactaactccattcttaattggaagtaaaaatgttgagtagttcaaaatctatgaaggaactcactgaagaaca

SEQ ID NO: 831077 - DNA, 100 bp, Homo sapiens
tgacttgttcacatgtggcaaatgtaaaaagaagaattgcacttacacacagccctgggcatttccagctcgagagttccttcgaaagaagctgattggg

SEQ ID NO: 831078 - DNA, 98 bp, Homo sapiens
tgtctgggtgcggactcggagaagccctcgagcatccccacagtgtttctaagacctcagagaaatttggaatctatagacccgcagtttacaatccg

SEQ ID NO: 831079 - DNA, 100 bp, Homo sapiens
agcagatggctcgagaatacagagagaaaattgagacggagctaagagatatctgcaatgatgtactgatcttgtagaaaatttcagctgtagcccttgg

SEQ ID NO: 831080 - DNA, 138 bp, Homo sapiens
cgcgaccggtttctgagggttgttcaccttgctgctcagacgctccgagaagcttcaggcagcataacacttacagaggagaaggcagagcccccccaggctatgaatgccctgatgcggttgaaccagctgaagcca

SEQ ID NO: 831081 - DNA, 100 bp, Homo sapiens
tcagatgcctcgcagagcaccaggcccaccgtgaaagatgctgtgtctgattggtctcctatgcatgaagctgcaatccacggacatcagctgtctctga

SEQ ID NO: 831082 - DNA, 100 bp, Homo sapiens
ttttcatcctctcactcagatgatgtatagccctcagaattctgattatcttttagctctcagcactgaagaaaactgtggtatgtctgtgtgtaatggt

SEQ ID NO: 831083 - DNA, 100 bp, Homo sapiens
ttccccaaatggtcccagatcaggtcttatatctgtagcaattactctgcatcctacagctgctgagtgcagtcattggagaaatcgatgaagaaacaga

SEQ ID NO: 831084 - DNA, 100 bp, Homo sapiens
ctttgggtcggccagtcatgtatcaaagactgtttgttcaacatatctacaatctcggtactacaggttctgtggacaatcacaatgggaatccaaggag

SEQ ID NO: 831085 - DNA, 100 bp, Homo sapiens
tttgtaacttttgatgatcatgatacagttgataaaattgttgcatttgatgaatacagaaatatcagccaaaaggacattgtggacagcataaaaggag

SEQ ID NO: 831086 - DNA, 98 bp, Homo sapiens
cagctggttctctctgcgccttgtcaacaagaatgccgggtctaagttgtagattttatcaacacaaatttcctgaggtggaagatgtagtgatggtg

SEQ ID NO: 831087 - DNA, 100 bp, Homo sapiens
ggacgagtaccacgccaccaccgagaccgtcattagcatggcccaggagaaatatcactttcctgattcctggtttctacagctacatggaccttgcgta

SEQ ID NO: 831088 - DNA, 100 bp, Homo sapiens
cagagggtgagatggatgagtccagcattctaagacgaagagggctccagatcgaaagctgctttgcgtcgcagttggagcagcacccccaccgcaggtg

SEQ ID NO: 831089 - DNA, 100 bp, Homo sapiens
gtttttgcctacagcacggcgacaatacccaaagacagagagaccaggtcatagtaatgggagctaccaatcgtcctcaggaccttgactcggctataat

SEQ ID NO: 831090 - DNA, 100 bp, Homo sapiens
ctactgccgcttcagttctcccggtgtggccacgagtcggagtaatcaagtcagaggattatatgacttttatctgcctagagaagaactatggatctac

SEQ ID NO: 831091 - DNA, 99 bp, Homo sapiens
tccgttgcctgctcccggagggagacgcgctgccgaggagaacccagcggagtccggcagcgtcttctcttgagggagcaatttggagaagagctggaa

SEQ ID NO: 831092 - DNA, 98 bp, Homo sapiens
taagaagcacctggatgagacatttgctacagcatcccacattaagtcaacgcaactcttctgacctctgggactactgcaacagtagccctattgcg

SEQ ID NO: 831093 - DNA, 100 bp, Homo sapiens
aggatcagttggctttagcaattggtgaaatgacaatggatgctctgttggctcgattgaaacttctgaatccagatgaccttagagaagaaatcgtcaa

SEQ ID NO: 831094 - DNA, 100 bp, Homo sapiens
gccagtacagcaccggcaagaccaccttcatcaggttcgacgaggtgctttataaatcatctcaggactttcaacccaggcatatcgtcagttaccttct

SEQ ID NO: 831095 - DNA, 100 bp, Homo sapiens
ttggtgaagtcggccagcctgagcaagcggaggacctacgccggcctggattcactttataggaacagcttcagcttcagtgatgaaaaactgaattctc

SEQ ID NO: 831096 - DNA, 145 bp, Homo sapiens
agagatctagcgactgaagcagcatggccaagccgtgtggggtgcgcctgagcggggaagcccgcaaacagtccaaccctgtgatgattgatgccaaagaagtgtcagctgcacacagggcccgctacttctggggtaaccttcc

SEQ ID NO: 831097 - DNA, 100 bp, Homo sapiens
tcccggcgtacttaagcaggtagtaatgatggacagacccgagagggactcacttatgggaattcatccgcgacatcctcttgaacccagacaagaaccc

SEQ ID NO: 831098 - DNA, 98 bp, Homo sapiens
caaagtcaagctggagcagcaagtggatgattggaacagcccctggaccacagcagccttcggcagctggttctcgacaattatatcctgaaggagaa

SEQ ID NO: 831099 - DNA, 99 bp, Homo sapiens
cagtccgttgctttactttttgcttcaccgacatagtcattatgccgaagagaaagggttctgatgactgtcttgtgaaaatatgggcaacagatgatg

SEQ ID NO: 831100 - DNA, 100 bp, Homo sapiens
cgctgagcagattggctgtgtggagttgcaccagcgtgcccgggagtacatctacatgcattttggggagattcttctgctgatcgacattgagcagtcc

SEQ ID NO: 831101 - DNA, 100 bp, Homo sapiens
gcgctttgatcaacctttagaggcttcaacctggctgaagaatttcaaaactacaaatgagcgcttcctgaaccaggggtggacgatgctgagtcagaat

SEQ ID NO: 831102 - DNA, 98 bp, Homo sapiens
gtgtccgaccgagagtcctggtgactttgaacatgctggtgccgctagccaagctgtcctgcctgggatgtacagttacccagcacgtgtacctcctc

SEQ ID NO: 831103 - DNA, 100 bp, Homo sapiens
cctcagtccagctctgtcatcactcaggcaccttccaccaaccgccagatcgggtctgcactgctccccattgccttccctcccgcctcaccagttgatc

SEQ ID NO: 831104 - DNA, 100 bp, Homo sapiens
gtcatcccaatgaatgccaaaatccacattcatctcaatggaaggatcctgccttaagtcaacttatttgtttttgccgggaaagtcgctacatggatca

SEQ ID NO: 831105 - DNA, 100 bp, Homo sapiens
tacaagcttacgtctctgctcttcagtacaatcctaatctccctggaaaaggagacatgaatgtctgcaatgatacttcctgacaagaagttgatacaag

SEQ ID NO: 831106 - DNA, 100 bp, Homo sapiens
aggaaggacacttggaaattgaacaagcgtcacttgacaagcctatagaatcggtaatattttcatatctcgaacctcaatcccaaatgctgcctctgaa

SEQ ID NO: 831107 - DNA, 98 bp, Homo sapiens
agcttttccacagaatttgggcctgaaaatctgagctgcgaagaagtggaatacttttgtaacaaaggctggctacagcaaacatcattcaagatgtc

SEQ ID NO: 831108 - DNA, 98 bp, Homo sapiens
tgtccgtggagagtgcctgctccaactacgccaccactgtgcaagtgaaagacagctgatattgcccacctgtgtgccaggcactgcgctacaaagat

SEQ ID NO: 831109 - DNA, 99 bp, Homo sapiens
tgagcaatagcacgaggcctgttgtctaccaagtgcagtttaaatagaattttgcccctggactctgaagaccctggactttgtgaagttgttagagta

SEQ ID NO: 831110 - DNA, 100 bp, Homo sapiens
ccgcactcctgttcctggtcctgacgcccccctcccgcccggaaagctgcccagccaccagcaaccccccagatgccatggacaatattaccaggcagaa

SEQ ID NO: 831111 - DNA, 100 bp, Homo sapiens
cgcccgccgccgccgccgccgccgcccctgttgcgatggcgcagaaaccccgttgacaaggcactgctttttcatgacgttcacctgtggcagatgatat

SEQ ID NO: 831112 - DNA, 106 bp, Homo sapiens
gcaactagcggcgggtcgtgggcacctccaggctcagacgtgcagcttctggaatacgaggcgtcagctgctggcctcatccgatccttctctgagcgtttcccag

SEQ ID NO: 831113 - DNA, 100 bp, Homo sapiens
ggatgaaactgatggctctgaagaggtcaaagaaacgtgggagatcatgaatcagacagataaaaatcaacaagaaatcccatcataccttaatgatgaa

SEQ ID NO: 831114 - DNA, 98 bp, Homo sapiens
attgtgtggccttagcgatctatattccctttccagaagatgattccaacgccaccaattccaacctggcagagactccccctaatgggccagattgt

SEQ ID NO: 831115 - DNA, 98 bp, Homo sapiens
acaactggccacagctgtgcttcttgcttgtactcccagagtacctcatccacgctttcttctgtgtcatgtttctttgtgcagcagagtggcttaca

SEQ ID NO: 831116 - DNA, 99 bp, Homo sapiens
gctctttttgaacattcagtggagacaccccttgtcagagccgacccgtttcaagaccttaggtatcctgaagaacttgcctggcacacaaatttaagt

SEQ ID NO: 831117 - DNA, 100 bp, Homo sapiens
aaacggcgagagtgggcgagaacgtccactgcgggccggcgaaagctggtattgttgcagcatctggcagtgagactgaggatgaggacagcatggacat

SEQ ID NO: 831118 - DNA, 100 bp, Homo sapiens
gggagcaccaggatctcgggctcggaacgagactgcacgatatggctcgtggacagcagaaaattcagtctcagcagaaaaatgccaaaaagcaagctgg

SEQ ID NO: 831119 - DNA, 98 bp, Homo sapiens
gctgggtcagctctacggctgcgagattcaaccctatgaaaagataaaggccaggggcttgcctgataatatatcttccgtgttgaacaaactagtgg

SEQ ID NO: 831120 - DNA, 100 bp, Homo sapiens
gacagttcatccgaccctgctaacccagactcacataagaggaaaggatcgccatgtgacacactggcatcaagttcgtgtctgggatgtccggccattt

SEQ ID NO: 831121 - DNA, 100 bp, Homo sapiens
aaatggcctccaaatgatgctgcatgcagtcttcaaggtggacacacacatccatgcggccgcctgcatgaaccaaaagcatctgctgcgcttcatcaag

SEQ ID NO: 831122 - DNA, 100 bp, Homo sapiens
tccaaaccagtggtgatcctgccctgccaacacaacctgtgccgcaaatgtgccaacgacgtcttccagcgagaaccctctgcccacagtggagattgcc

SEQ ID NO: 831123 - DNA, 98 bp, Homo sapiens
ttcccgctggcggcgggcatcttcttcgtgaggctgctcttcgagcgatgttcctcctgctgatcaagagaagctttttatccagaagttacgtcagt

SEQ ID NO: 831124 - DNA, 100 bp, Homo sapiens
agcaatgctggagagcattggtgtgcccttggagaagctcaagttcatcaaaggcactgattaccagctcagcaaagtatgcccagctttttgcagcact

SEQ ID NO: 831125 - DNA, 99 bp, Homo sapiens
ggaaacgcgagttggaggagaaggtcaaggcagtggaaggtgctgccacgggacctggagaaggaggatgccccccaggagaaggagcgaccgctccag

SEQ ID NO: 831126 - DNA, 98 bp, Homo sapiens
ggagggagcaccccagtaatgttgggagtcctagaggagctctgcctgcagttgaacacaaagacctggaggagactcccacctccttcagggagaag

SEQ ID NO: 831127 - DNA, 100 bp, Homo sapiens
gatgatacaccaaccacttgtgctaccatctgtcaaaactttggatggccctactttcaggacaaaactttcggtttgaagaataagaaaggagcaaagc

SEQ ID NO: 831128 - DNA, 99 bp, Homo sapiens
tccttccgagaaatggagaatcagccccataagaaatacgaactcacggaaatctccttccgagtgtggatgtgcgggggcagcctagagatcgtcccc

SEQ ID NO: 831129 - DNA, 100 bp, Homo sapiens
catttgcccattctcaggaagagcttgaaaagaggctggcaggatgtacagtttttatcacaggtgcaagccgtggcattggcaaagctattgcattgaa

SEQ ID NO: 831130 - DNA, 100 bp, Homo sapiens
caatgtgacctttaaaacctatgaaggtatgatgcacagttcgtgtcaacagtgtttgaaagatgtatggtgatcttgaaacctccagacacaagaaaac

SEQ ID NO: 831131 - DNA, 98 bp, Homo sapiens
acaccctcgtgctgatggtgccactgatgcacgaggtggacacgtccatcaccgggtgtgtagtatgcatgtgtgattttgagtcaaggcagctactt

SEQ ID NO: 831132 - DNA, 99 bp, Homo sapiens
ccacttgaactctgccgaattcctgtgccacctcctcctttagaaaactgatcttaatacagttttcggctttgtgagaaaccttaccatcaaacacga

SEQ ID NO: 831133 - DNA, 100 bp, Homo sapiens
gaggccaagttagcaggagaccatattgagtatgactgccaggggcatgaaggggatgtgcttccagggcatttgctggcagggcgtctcgtgatctctt

SEQ ID NO: 831134 - DNA, 98 bp, Homo sapiens
gtcaccctgaagaccctccagcagcagaccttcaagatagacattgaccccgaggagacggaagtggttctgaaagatggaagaattgaaagactaaa

SEQ ID NO: 831135 - DNA, 100 bp, Homo sapiens
acctcatgatccaccggcctcggcctcccaaagtgctgggattataggcgtgagccaccgtgcctggctgaaggttccgctgtgtggcagctgattgctt

SEQ ID NO: 831136 - DNA, 100 bp, Homo sapiens
tccccgtcgtcctggtgctgcagcggagtctaccatggctcaagaatctcccaaaaattcagcagcagaaattccagtgactagtaatggagaagttgat

SEQ ID NO: 831137 - DNA, 101 bp, Homo sapiens
ctagaagaaactacagaatatgacggtggctataccagggactctgttctgattaggtttacccaaggtccagcctagcccctaggcaccatgtcggacag

SEQ ID NO: 831138 - DNA, 51 bp, Homo sapiens
aggggaatcagcctagcaaactggagtgttggtggtcttcaatggtgtgga

SEQ ID NO: 831139 - DNA, 100 bp, Homo sapiens
tggctacaagccaagaaataccgaagccatcagaagttggaagaggatgtgtgctgtgtttggtggaatttattgtcttcgccattcagtacagtgcctt

SEQ ID NO: 831140 - DNA, 104 bp, Homo sapiens
gagtatttgctgggccgggtaccatggacgtgggcgaacttctgagctaccagatggcccactgcgtgaccttggttcagctgtccatttcctgtgaccatctc

SEQ ID NO: 831141 - DNA, 99 bp, Homo sapiens
ttatccattaacactcaagcctttctacatgagggataatgaagatggccctcagcacacgcgatgtgcattttgtaagcactttggagccactatcaa

SEQ ID NO: 831142 - DNA, 99 bp, Homo sapiens
tgaaacctcctagtagaaaaagttcttgggacaaacttcatttgaagcctaaagaaactgttccaactcttgctccaaaaactctttcagtagcagcag

SEQ ID NO: 831143 - DNA, 99 bp, Homo sapiens
cactttgaagcaaaatattccaagactcaagctaacctacaaaggttgtctaccttcataacaacaatatctctgtagttggatcaagtgacttctgcc

SEQ ID NO: 831144 - DNA, 100 bp, Homo sapiens
ttgtggaggatatgcagagagagcttgggagactgagacaacagatgcctgaggaaacccagacccaagaccaaccgatggaggaggaggaggttgagac

SEQ ID NO: 831145 - DNA, 100 bp, Homo sapiens
actgaagaccacttacaaggcttccaccagcaagaaatcaatgtggactgaacataaatcacctgatggaaggacttactactacaacactgaaaccaaa

SEQ ID NO: 831146 - DNA, 100 bp, Homo sapiens
atgaaaatgtcacaggagaatataagtgtccatgacagtgtgatcagggtgccaaagcatgctttctgcgggacattcctttctcggccatctactttcc

SEQ ID NO: 831147 - DNA, 60 bp, Homo sapiens
cccagattctgccaattcgttttcaggagcatctccagcttgccgggattgctgtccttg

SEQ ID NO: 831148 - DNA, 100 bp, Homo sapiens
gtcttcctcctgggggagtcatccgtcgaggatccctttgtggccttccacatcaacaagggccttgtgaagaagtatatgaactctctcctgattggag

SEQ ID NO: 831149 - DNA, 100 bp, Homo sapiens
ctctttctgggcatgttcctctctggcatggtggctcaaattgatgctaactggaacttcctgacctgaagattatcggctataagagaataagaattgc

SEQ ID NO: 831150 - DNA, 98 bp, Homo sapiens
taccctttgtgtcatcctccacagctccagggaaggcactcaaaagtggggggcaggaaaggaaagaaggattgtccaaatgtggaagatgcaagcag

SEQ ID NO: 831151 - DNA, 100 bp, Homo sapiens
ctgaaattcagagaggggaagtgatttgcctcagcttgtactaattctgcttggtcagaatcgtgatggcattgtgttcagcactgatgactattttcac

SEQ ID NO: 831152 - DNA, 100 bp, Homo sapiens
ccccaggtgcagcagcagcagacagcagtacagacagctcaggctgcccagatggtggctcccggagtccagctcacccgacgactgccacccatcaaag

SEQ ID NO: 831153 - DNA, 99 bp, Homo sapiens
cctggctcgccgtcccctacacggatgaggcccggcggtcgcgcctcaaccggctgtacggaatccaaggaaagaccacagcaagattctttcattcgt

SEQ ID NO: 831154 - DNA, 99 bp, Homo sapiens
tggcttttcctttggtaataccagcaccataggacagccaagcaccaacaccatgaattatatccagatcgagagacagaagattctgaaagggttcaa

SEQ ID NO: 831155 - DNA, 100 bp, Homo sapiens
agaaccaagttcaggcttcatctttggatatcaacaggctggttttaacctacgcaaagttaacaaacacataaagtttccggaaatcttagatttggct

SEQ ID NO: 831156 - DNA, 100 bp, Homo sapiens
ccaggacaaccaagcattttcatgaaacaaccccaaataaaggaagtggaaccacttcaggttgcaaattgctttataaacatgacttggcaaaacgctg

SEQ ID NO: 831157 - DNA, 98 bp, Homo sapiens
ctgtggttaccttagatgcaagtgatgatggaatcttggccaaaatcgtgatgcctcaggagcagtacactcaccaccggagcaccatgcctggctct

SEQ ID NO: 831158 - DNA, 100 bp, Homo sapiens
gtgacaaccggtatattgcaaataccgtagaggagttttttgagaaccctgcttttcgtcccgatgggctgaaactctatcctaccctggtgattcgtgg

SEQ ID NO: 831159 - DNA, 99 bp, Homo sapiens
cgcagggaacctggagagggtccagccctcagtgccccggccagaggcgggaaggggctctagagcttcggcaagaaattatagagcagcttctatcaa

SEQ ID NO: 831160 - DNA, 100 bp, Homo sapiens
ctgagactctgcgagtattcagactgattacgtctcaaggacctgaaagcagaaaggagagaaatgaaagagaatgcctgaggatggagataaaatcccg

SEQ ID NO: 831161 - DNA, 100 bp, Homo sapiens
gggcaccgttgagctgttgcaactgttctgctgcctgagattcctgaacgcctctgcgaacaaactggaaagccttcctccagccacgctttccgaagag

SEQ ID NO: 831162 - DNA, 100 bp, Homo sapiens
ttcatggctagggccttccagtatgtcaaggagaacggaggcctggactctgaggaatcctatccatatgtagcagtgctacaaggctttggcccaccaa

SEQ ID NO: 831163 - DNA, 98 bp, Homo sapiens
catcactattggcaatgagcgcttccgctgtcctgagacactcttccagccctccttcattggaagtgggaaaactcttgcctttgccatcccaatga

SEQ ID NO: 831164 - DNA, 98 bp, Homo sapiens
gttaatagtggcatggaagatccatttgcagcagctgtcgattcggcagaccgaagtcctcggcccacttctgcacctgccattactcagggtcaggt

SEQ ID NO: 831165 - DNA, 100 bp, Homo sapiens
cgagaccgtgaccgagagcgtgaccgagagcgcgaatatcgtcatcgttagaaggttccttgtaatggcttcagtgacattgagaaccttgaaggaccag

SEQ ID NO: 831166 - DNA, 100 bp, Homo sapiens
cctcccggtcaaagtcaactgcaagcgagttatgtggagtttagacccagccagatcctgggaagactctgcctgaagcccttgattattgcactgtttg

SEQ ID NO: 831167 - DNA, 100 bp, Homo sapiens
gttgctggccaaaggggcctgtgtacttgctgtagatgaaaatgactactggacttggaggatcagcagttgcaggtcatgcctcagacaagattgaaaa

SEQ ID NO: 831168 - DNA, 100 bp, Homo sapiens
ttggattccgatgcaactgatagcagctctgatgacgatttggatgaatatacccttagaaaaaatgtggcagtcaaatagtagtgatagtgaagaactt

SEQ ID NO: 831169 - DNA, 98 bp, Homo sapiens
gaagctcatgctgctccagaagatgctgcgaaagctgaaggagcaaggacaccgagtgctcatcttctcgcagaaagaggagcgtgtctctgaactgc

SEQ ID NO: 831170 - DNA, 100 bp, Homo sapiens
gctgctcctgagggtgctggaccccctgctctgcgacttcctggggtgtccgcaatgttgccagtgtctgtctgcagattggctacccaactgttgcatc

SEQ ID NO: 831171 - DNA, 98 bp, Homo sapiens
agcctacttgccacagtatgcacatatgcagacgacagcggttcctgttgaggtattgcctaaggctggtgcactgaactccaacgatgcctttgttc

SEQ ID NO: 831172 - DNA, 100 bp, Homo sapiens
cattctttcttggcatttttgaatacgcctaccgatgctctggatcaatttgaagggtccttggtgaattttgtcatggttatttaaggaaccttgccta

SEQ ID NO: 831173 - DNA, 99 bp, Homo sapiens
ggtgagtgggaagatgctggggactggccagtgggccaccgacctctacagtggctatctggcctttgtttggtctccatcatcaccagttccagtagt

SEQ ID NO: 831174 - DNA, 98 bp, Homo sapiens
gactacagctttgtgcccgagggcttcgcctgcaacctgtcagccaagctccacttcatggttctcctggcagggctgggggacaccgaggcccagca

SEQ ID NO: 831175 - DNA, 100 bp, Homo sapiens
ttgtagccataagtggacttgttctaggtgataaacatgggaatgctttatggcttaatgaaagagagtgctcaattcagagaagaaatcagaaggtggt

SEQ ID NO: 831176 - DNA, 100 bp, Homo sapiens
aatgttccctgacaatttcgttaaggtgttggtggaatgagcgttgcatgtgtcttgaagagaaaagcagtgctttggcaggactctttcagcccccacc

SEQ ID NO: 831177 - DNA, 100 bp, Homo sapiens
ggagcaacttggcgaggttcagactcttggagccagaagctacatgacccctaaacgtctgttctctggggaggcagtaaggggccgtggagctggcctc

SEQ ID NO: 831178 - DNA, 100 bp, Homo sapiens
gtgctgaatagactgcacctggctatcccaaccaggagggacgataaggttacagattatgccattgccaggcgcatagtagatttgcattcaagaattg

SEQ ID NO: 831179 - DNA, 98 bp, Homo sapiens
ctgttggaggaactggcccggaaacaggaggacgccaccatggcggagctgcaggaggtgcagatcacagaggagaagccactgttgccaggacagac

SEQ ID NO: 831180 - DNA, 100 bp, Homo sapiens
aggagagtccggccgcgacaggacgatatgtcacagatctaagcagcagggatttaattactgtacatcagccatttcctctccattgacaaaatccatc

SEQ ID NO: 831181 - DNA, 100 bp, Homo sapiens
gcacacactatggcgctgaaacggattaataaggtgctgactgggttacttttttaaacactaggaatggtaatttctactcttctggacttcaaactaa

SEQ ID NO: 831182 - DNA, 99 bp, Homo sapiens
gatggcggtgcaggagtcggcggctcagttgtccatgaccctgaaggtccaggagtacccgaccctcaagaatcagggagtcccagtaaagggaagtcc

SEQ ID NO: 831183 - DNA, 100 bp, Homo sapiens
ttcgccgaggcaccgaggcactcagaggagcctccgaaagccgccaggactctgctgtgaacctgacgggcaccaacggcagcaacagcatcagcatgtc

SEQ ID NO: 831184 - DNA, 100 bp, Homo sapiens
tgtttgatatcaccaaactggaggatgcctatgtattccctggggatggcgcatcacacaccaaagggactttgaacatgtcggggatcgccctcagcag

SEQ ID NO: 831185 - DNA, 100 bp, Homo sapiens
tctgtgatgtctgcaaccacatgatagtgggtggaatgcaagctttaggacttcacctgacagatccaagtcaacgtcttgttcagaactgtctttggac

SEQ ID NO: 831186 - DNA, 98 bp, Homo sapiens
ctctggcagtcatcgtgcctgaaggagtacatgccctttatgaagatattcttgagggaaagcaagtcttgctctaattcgaaaaatgattcattttt

SEQ ID NO: 831187 - DNA, 100 bp, Homo sapiens
cgccgctgccgcagccttcgcaggccctgattacgtcaaacagagatttcaggaaggtgtagatgctaaagaaaatccagaagaaaaggtaccagaaaag

SEQ ID NO: 831188 - DNA, 100 bp, Homo sapiens
ttgagaggacaagcccagattccaaaacttatgtcaacaaggagcaaggaccaaccccagtggagaaaaagaagaaaggaaaaaggaaaagtgaaactac

SEQ ID NO: 831189 - DNA, 100 bp, Homo sapiens
gcaaatcatgtgaagtattttaaagtccgagatgtcagctattgaaaacatggcagaaaagctagagagcttcagtgccctgaaacctgaggccagtgag

SEQ ID NO: 831190 - DNA, 99 bp, Homo sapiens
attcttcaaactagtggtgtttctgaatttactaaaaagagaagcaaactagtacttcctgcccctcagatggcccataccttcaaatattagagcaac

SEQ ID NO: 831191 - DNA, 99 bp, Homo sapiens
tcaggatgaaaaccgaagaagaggcccggactcatacagagattgaaatgttccttagaaaggagcagcaggacgccaggaaagcatgtgcagatgcaa

SEQ ID NO: 831192 - DNA, 100 bp, Homo sapiens
ttttttatttttgctttgacacctcaacaagttagagagatatgcatatccaggctgcatcccatatctatcaaaatcaatttgttcaaatgatcctcaa

SEQ ID NO: 831193 - DNA, 100 bp, Homo sapiens
agcagctcttggtgcagactgtataccgatagtttttgcagatccagtcaaaaaagcatgtggggttgctcacgctgtactataaccaagagtggacatt

SEQ ID NO: 831194 - DNA, 100 bp, Homo sapiens
tgggggattttgggctggcagcccggttggagcctccggagcagaggaagaacttggagaccctctggaggctttcccagtgttcaagaaatatgataga

SEQ ID NO: 831195 - DNA, 99 bp, Homo sapiens
tttgtgattgtccgcaggcctaagctaaatcgagagaactttccaggaagtgaccaagttcactcctggatgctagctacaagccaagccttagacact

SEQ ID NO: 831196 - DNA, 100 bp, Homo sapiens
gaccgggaaggagcatcccaggacctaccagaatctgggcaactgtactcctgatgatattggtctgtgaaaccccgtatggctgctatgttctccacca

SEQ ID NO: 831197 - DNA, 100 bp, Homo sapiens
tgaccaggcctctccggacaagaggactgaagcagatggcaactctgatcccaactctgtgtctcagtttgaaactgaattctacatcagtggacttgca

SEQ ID NO: 831198 - DNA, 100 bp, Homo sapiens
ctaccatggtatgacactgaaatctgtaacggccgcttggaatgttgggccatctgtccttttgacatgaattttccctgtaatgggggtagagctggta

SEQ ID NO: 831199 - DNA, 100 bp, Homo sapiens
ctgaactgctcattttcagtgtcccgattgtctatgagaagtacaagacgtgcactgctgcctttgccaccaaagacagactgcggacacacatggtgcg

SEQ ID NO: 831200 - DNA, 99 bp, Homo sapiens
tcgcccccacctgtggactctgaccgcaaacaaggagagcctactgagcagcctgagtggagttatgcccagccaagtcttcagtatatccaggggcaa

SEQ ID NO: 831201 - DNA, 100 bp, Homo sapiens
tgtgaagaagaatttcgatctccgccctggggtcattgtcaggtgggataatactgaaattgaaaaacttagcccatgggacatggaaccaattcctgat

SEQ ID NO: 831202 - DNA, 109 bp, Homo sapiens
cccagaggaaatgttctcttcacggtggaaaacacagatccagagtgttactggcttacaaattggattgagttctcctgtgcctcctgttggctctctttgcatctgg

SEQ ID NO: 831203 - DNA, 98 bp, Homo sapiens
agcaggctggaccagcccttcatccccagatctgcggaaccagccctacatccgcgcagacacaggccgccgcagtgcccgtcggcgtcccccgggcc

SEQ ID NO: 831204 - DNA, 99 bp, Homo sapiens
tatttgtggcttaaactcttggcatttggctttgcctttctggacacagaagtatttgtgacaggtcggcttgggaaaccaaaaattacacagagttta

SEQ ID NO: 831205 - DNA, 100 bp, Homo sapiens
ctcttctaagctgaataaagctgttttggaactgtcaggtacctcaaagcgtaaggtcatcgagcagctcggtgggaagcagctggtcatgaaccacatg

SEQ ID NO: 831206 - DNA, 100 bp, Homo sapiens
attttttaactgaagatagtgcctttcagccctaccaggttccccacgtgtgaaagtcaagaatctgattgaaagcatgcaaataaatgggtcagtgttg

SEQ ID NO: 831207 - DNA, 98 bp, Homo sapiens
ctcacatcgtggagatggacaggagacctggaatcattgttggtttccattgtttactgcagtgtatcagatctgctacgaaagcagaccagttcaag

SEQ ID NO: 831208 - DNA, 100 bp, Homo sapiens
ggtgttggaacttcgttgcttgcttgcctgtgcgcgcgtgcgcggacatggcctcaaacgagctgtaggtaaaacttgcctactgatcagttacacaacc

SEQ ID NO: 831209 - DNA, 100 bp, Homo sapiens
tagtagttgttgagcagagggaaagggataggagaaggatgtggactgcagtgctgcagtgccaggacattggctccctggattatcaagagtttgtagt

SEQ ID NO: 831210 - DNA, 100 bp, Homo sapiens
cccggaagtcaccattggagctcatcagactgaccgtgtcttacatcagttcagagaggagttggtgtcctttgaggaggtagctgtgcacttcacctgg

SEQ ID NO: 831211 - DNA, 100 bp, Homo sapiens
gcagacccactggatgagggcccgaaaatggtttcagcacctgtgtcaggacatagctgtgatttctgccaagctaacaggtatgcagaacagcttaatg

SEQ ID NO: 831212 - DNA, 100 bp, Homo sapiens
gcttgatatatggtccaaatccaactatcaagtattccagaagtgtccaggaggagcatttacacccaatatgcgaaccaccaaggagttcccagatgat

SEQ ID NO: 831213 - DNA, 100 bp, Homo sapiens
gcttgtccctgtttcgccacagttcctaccttatgagctcggttttcttatgcttataagagtggaacagtgcctggatcaaagtggaacagctgaagcc

SEQ ID NO: 831214 - DNA, 100 bp, Homo sapiens
aatctggaacgggtggccgattactgcgagaacaactacatacagacctgtcatttactccatcctttatagtgatgctacaggacgaagaggaatggat

SEQ ID NO: 831215 - DNA, 100 bp, Homo sapiens
gaccgccagctctgtccgctgcccacagcctagcagtcgggaccgtactgagactccgtgggaaggaggcttgtttaaactacggatgcttttcaaagat

SEQ ID NO: 831216 - DNA, 95 bp, Homo sapiens
tcaggagacatgcggtctggatcggattttggaggcattgaagctgctgctgagcccgggaggtatgatctcgtgaaaccttgagagaaactgaa

SEQ ID NO: 831217 - DNA, 100 bp, Homo sapiens
gcttcgagaagattggctacacaggcacgttgcccctggcctcgcaggagtcggccgtggtggaggacctgctgtacgtgctggtgggcgtggacgggag

SEQ ID NO: 831218 - DNA, 98 bp, Homo sapiens
ccggggccgcgctgagggcgcccagctgacttctgctggatgtgtctaggagattggaagactcatggcagtgaatactatgagtgcagtcgttacaa

SEQ ID NO: 831219 - DNA, 100 bp, Homo sapiens
ccactgactcctacttcctctgtatagagcaactgttgaactcagctgcctgtaggccttgccccgggccagctgtatacataccctgcccgctgctggc

SEQ ID NO: 831220 - DNA, 100 bp, Homo sapiens
tgggagcagaaaagcaggggtgtcgtcatgctcaacagagtgatggagaaaggttcggacctgaaggagaagaaggagaaggtggaggagaaggcaagcc

SEQ ID NO: 831221 - DNA, 98 bp, Homo sapiens
ccgccaggccctgcaggacctgctttcggagtacatgggcaatttgcaggacgaggagcggaggcggcagcagcagttagaagagatgcgcaagcggg

SEQ ID NO: 831222 - DNA, 100 bp, Homo sapiens
gaaggaagaaatccaggagaatgaagaagcagtcaaaaagatgcttgtggaagccacccgggagtttgaggaggttgtgagacggggtttcgccatgttg

SEQ ID NO: 831223 - DNA, 100 bp, Homo sapiens
gaaggcagcacaggacctggaaaaattacatgaaggtactggtcctcgtgttatttctgcttttgtggagattatttttgataattcagacaaccggtta

SEQ ID NO: 831224 - DNA, 98 bp, Homo sapiens
agggtctgaagattggggacacgtcaatgcaaaatcatgctgccgtgttccgtgtgggaagcgtgttgcaagaaggttgtgggaaaatcagcaagctc

SEQ ID NO: 831225 - DNA, 100 bp, Homo sapiens
agttctctgatttttatattttattcctcttcctatccaatccctgccttttgagtccaggtgcctctaaagagagcaatcactacacttatggctggga

SEQ ID NO: 831226 - DNA, 100 bp, Homo sapiens
tctcccgaagccacacagaagtgaaggttgtatgtaaactggaggtttatgagaggaatcgaagcccagttcttagctctgcagaaggggttcaatgagc

SEQ ID NO: 831227 - DNA, 98 bp, Homo sapiens
ggatggtcttgaaacacaaatggtttttggtgaattttgtggtatgccagcttgttgctctgtttgctgctttctggtttcgcatctacttacgtcct

SEQ ID NO: 831228 - DNA, 98 bp, Homo sapiens
cgagctgagtggttgtgtggtcgcgtctcggaaaccggtagcgcttgcagcatggttgctgaaaagccaggagtcaaaatgactgagcgctttgactg

SEQ ID NO: 831229 - DNA, 100 bp, Homo sapiens
agatggcggacggcccggatgagtacgataccgaagcgggctgtgtgccccttctccacccagaggtgccagtgacggggtggcccgtgagctgatgacg

SEQ ID NO: 831230 - DNA, 100 bp, Homo sapiens
aaacagcctcaagaaaccagtaacagattgtgttatttcataacagtgtatcatgtatgccactgattccaggggacactcccctgctttcctccaacct

SEQ ID NO: 831231 - DNA, 100 bp, Homo sapiens
accaacgcggtgcgcgaccgggagctggacctccgggtctgcagatctccaggggagcccaccagcctagtcaacatggcctcggaagacattgccaagc

SEQ ID NO: 831232 - DNA, 99 bp, Homo sapiens
ggcggagctgacggtggaggttcgcggctctaacggggctttctacaagctgttttcactcattagctcctgaggtaaacaaattgaaaaaatgagcga

SEQ ID NO: 831233 - DNA, 100 bp, Homo sapiens
ttgatagatgtcataacagtatttggagaactcactgatgaactggagaccatggccaaaatggaggtgaaaacctcacttctggacaatatgattggag

SEQ ID NO: 831234 - DNA, 100 bp, Homo sapiens
gaagaaagttcctgtcatcaaaaaaccagaagcaccgcctcctaaaggtggcccacaaactctttaacaacttgaaataaatgtgtggacttaattcacc

SEQ ID NO: 831235 - DNA, 99 bp, Homo sapiens
acacacaggtgaatttaaaggagcagccctggtgtcacctatcagtaaaaggaattaggaccacaggatctacacagtcgaacttcaacttttatgtta

SEQ ID NO: 831236 - DNA, 100 bp, Homo sapiens
ggaaaaatgcacttatgctgataaatatacccaaacaccctggagacgaattcctgaaaatggcattcctatgaagaaagcacgaaatgatgaatatgag

SEQ ID NO: 831237 - DNA, 98 bp, Homo sapiens
gctctagggaccccccccgcgcctgcacttagccccgcgcccgagcacctgttcttcccggagcctatcagcaaagccattcccaaggctatggctac

SEQ ID NO: 831238 - DNA, 100 bp, Homo sapiens
aggcctcgctggagatcgagtaccaagtactgatgctttgggttggaaaaaattgtacacagaattttctcagccaagttctaggagttcaaaactatgc

SEQ ID NO: 831239 - DNA, 100 bp, Homo sapiens
gctgccggaaggggtcccgaagccccctgcaggaactctacaacccaatccagtcttcccaagggattgttgaagaaacttctgaagagggaaactctgt

SEQ ID NO: 831240 - DNA, 100 bp, Homo sapiens
ctcaaggtgacaggccagagcccaggtccccaggacagtgcaggtggattctcaatatcctcctgttcagagacttatgaccccaaagccagtttccata

SEQ ID NO: 831241 - DNA, 51 bp, Homo sapiens
gtccctgctggaggagcgcttccggacaggccgacggtcgcaaggtcctac

SEQ ID NO: 831242 - DNA, 100 bp, Homo sapiens
ggcccgagtgagccggacgaagtggacaagttcaaggccaagttcctgacagcctggaacaacgtcaagtacggtcccacgacagtgatgtccgagggcg

SEQ ID NO: 831243 - DNA, 100 bp, Homo sapiens
cagacctatgtcacgatcttcattccagctcttcctctgtctgtgatcctggaaacatacgtgtgactgaagctcccaaacacccaatctctgaagaact

SEQ ID NO: 831244 - DNA, 100 bp, Homo sapiens
taccgtgatgtgatgctggagaatttggcccttttgtcctcactagcattagtgaccagaaggatcccaaggatcgaatggttcaggttgtgaaatggta

SEQ ID NO: 831245 - DNA, 100 bp, Homo sapiens
cacagagcctctccctgggccagaactcagcgtcccggcctgcggggaagttctgctgggttctatgttgcatttgctggtctggcctttgcgtccttct

SEQ ID NO: 831246 - DNA, 100 bp, Homo sapiens
cgttttgccagtcacctctcaactgtgtgccaaaggtaatctatttaaagaagacaccagaagaagcctacagagcactcctgtctggctcaaacccccc

SEQ ID NO: 831247 - DNA, 100 bp, Homo sapiens
cctccaggtggcccaggagatgaaggctgagtactgggcagtctcatctctcactggtgcaaaagctacagacctgtctctgtggcagtgatccaccatc

SEQ ID NO: 831248 - DNA, 98 bp, Homo sapiens
aaaggactcatatctttggaacatctggatcctcatccccgaaattcctgtggagtacaatgtcttactcaatgatggaagtgtaacacctctggcct

SEQ ID NO: 831249 - DNA, 100 bp, Homo sapiens
gaaccagaaaatgttgatgatttctggagcagtgccctacaagcaaagtctgcgggtgtgaaagttgatctctctaatgtattagatcttcatgcctttg

SEQ ID NO: 831250 - DNA, 98 bp, Homo sapiens
cggaaggggcaagacgggttcagttcgtcatggggctgtttggaaagacccaggagaagccgcccaaagaactgaaagttgaagttgatggtagttta

SEQ ID NO: 831251 - DNA, 100 bp, Homo sapiens
tgaccagttctggagctactggaatagccttatgattctgcagatgactggtctgagcatattagctcttctgggaaaaagtactactacaattgtcgaa

SEQ ID NO: 831252 - DNA, 98 bp, Homo sapiens
gccacagagttagctgggagtctaccaagttcagggcgacagctcagtgaagtcttcattcagttaccttcaaggaaagaattaccagaatactatga

SEQ ID NO: 831253 - DNA, 98 bp, Homo sapiens
ttatttgcctgtggatgaaaccctgattcctacaggaccgcagctgaatgcacagctagaaggttggctttcacaagtacagtctacaaaaagacctg

SEQ ID NO: 831254 - DNA, 50 bp, Homo sapiens
ccctgaatcttggtgtttggacataggagacatgcgaggattcatgacag

SEQ ID NO: 831255 - DNA, 99 bp, Homo sapiens
ccaactctgcccttatggaattggacaaagaataatcatgggccagactgggaagaaatctgagaagggaccagtttgttggcggaagcgtgtaaaatc

SEQ ID NO: 831256 - DNA, 100 bp, Homo sapiens
cttggtttggacatactacatggatcagcctgatcctgcctgaagatggtgccactggtggctgtggtatcagggccccgtgcccagctctttgcctgcc

SEQ ID NO: 831257 - DNA, 100 bp, Homo sapiens
gctttgataccaagaattaaaaatgcttgtctacaaacatcttcccttgcggatgtttttcgaaatttgagccacttgcctacctttagttcacctgcta

SEQ ID NO: 831258 - DNA, 100 bp, Homo sapiens
cgcttctactggaaggaccggctgctgaagatgaagatggctgggctgaacgccatccagacgttggaccgacagttacaagacatagtgtacaaattag

SEQ ID NO: 831259 - DNA, 100 bp, Homo sapiens
cgtcagctgccatcttagttgtctacctggatcgggcccaggatcttcctacatgcgtcgggatgtccaggaaatttttcgcatgaccccccacgagaag

SEQ ID NO: 831260 - DNA, 100 bp, Homo sapiens
gtgaaagaattcaggaagtagcagatgagctgcagaaaatgaaagatgtagcacttaagcctcaggaacgtgtggagaaacgccagacgcccctgaccaa

SEQ ID NO: 831261 - DNA, 95 bp, Homo sapiens
tgaatatgaccctatggaagcagaagaagctgaggatgaagaagatgttgaacgcatgaggaatgggattgatatcctggttggaacaccaggtc

SEQ ID NO: 831262 - DNA, 99 bp, Homo sapiens
acagaatcacgccttgtgaagagatcatccctaagcaggagagaagctactaaagacccaacatgagtgaagtttcctgcaagaaacgggacgactatt

SEQ ID NO: 831263 - DNA, 100 bp, Homo sapiens
gaaacatggcggcggcgggtgttgtgagcgggaagttattggagggtggtgaagagaggatggagacaccccaggaagaccacctcaggggacagcacta

SEQ ID NO: 831264 - DNA, 100 bp, Homo sapiens
ggagccggagcagaagcaaagagcatttttcagttgaaggacagttggaattcagagcccttctatttgtcccacgacgtgctccttttgatctgtttga

SEQ ID NO: 831265 - DNA, 100 bp, Homo sapiens
gactgatttgcaacccttccgggaagccatagctctgcatgaaccccagctcaaagggattgtgacaaggttattcagccagcagggatacttcctgcag

SEQ ID NO: 831266 - DNA, 98 bp, Homo sapiens
ctgggtcctacgccaacagatatgggagggttcgatctggggctaatgttctaatttgtggtccaaatggctgcggaaagagttcacttttccgtgtt

SEQ ID NO: 831267 - DNA, 100 bp, Homo sapiens
ggcgactcctcgggcctccaaaggggcccaggctggaaccccctgaagctgtgccaagatgtgtgacgacgaggagaccaccgccctggtgtgcgacaac

SEQ ID NO: 831268 - DNA, 98 bp, Homo sapiens
atggcctggagaagaaagatgttttgcctactgttgatccggctcctacccagagattctacccagtgaaactcccacagcaacgcaggtagatgggg

SEQ ID NO: 831269 - DNA, 100 bp, Homo sapiens
aggcgaggacgaggacgaggacgtcaagaaatctgctttggaaaacatgttatccgagacccagtctcggtactcctgcaagctccaggacatgcaagag

SEQ ID NO: 831270 - DNA, 100 bp, Homo sapiens
cctggggcaccggaaaatccgccgccaggcgctgtccccgacacgggcctgcctgctccgcttcagcggactctcgctggtctacctgctcttcctgctg

SEQ ID NO: 831271 - DNA, 100 bp, Homo sapiens
caacttgaagatgacaaggatgaagagctttatgatgatctacttccccttaatgaacaaaatgaatactgcattgagggacggacttctggtcttcttc

SEQ ID NO: 831272 - DNA, 100 bp, Homo sapiens
gaagaaccactgattgagcccctgatggagccagaaggggagagttatgaggacccaccccagagctgtgtgtgggggacccaagtcctgagctcggagg

SEQ ID NO: 831273 - DNA, 98 bp, Homo sapiens
acaggcacgacaagtttctggacactctccgagaggtgaagtttgtgatggacgcctctgaccccacccagctctctgcatcctgtgtgcagctctta

SEQ ID NO: 831274 - DNA, 109 bp, Homo sapiens
gtggaggaaagcatgggagccaagagtatgaggagctggtgtctgtgtcagatttgtagctgcgggtaattaataatgcttgtgctactcaagccatagtgagtgtgtt

SEQ ID NO: 831275 - DNA, 101 bp, Homo sapiens
ccgagcgctgtggggagcggcaacgccggtggctcggggccccgcggaaaagatgttgatgttagtgaagattcacctcctcccctacctgaaagaactcc

SEQ ID NO: 831276 - DNA, 100 bp, Homo sapiens
ggcagcgcgggatcccagcctcaggcgtgcgcggacggtgtgcgggttgctgcttttgctcagaggacatccatgaccctaatggtctttttgttcaaga

SEQ ID NO: 831277 - DNA, 100 bp, Homo sapiens
ataagtccctagaactggcgattggacgatttgaaagtgaagatttgacctccatagttgacaaacatgctttattagatgtaacaccaaatgcagttga

SEQ ID NO: 831278 - DNA, 98 bp, Homo sapiens
caggctaaaagtgtctgctgctgctgccgccccccactccgcctccgggagagggcagactttgacgacactgcgacatactcagcagtggccaccaa

SEQ ID NO: 831279 - DNA, 98 bp, Homo sapiens
atgaccctgctggacacagagcagtcgtatgtggagtcgctgcgcaccctgatgcagagtaaatatcggcagcatccccactcattcaagtacacagc

SEQ ID NO: 831280 - DNA, 112 bp, Homo sapiens
gcagtcggatagacaataccacaacaacacattttgcagagggcatatcaagagaggagatttctttcacaactcatccagaagtttatctctgtgctgaaatcagtcccac

SEQ ID NO: 831281 - DNA, 100 bp, Homo sapiens
gtaagctcggcgacagccctagcagcgaggccaaaacaggtgacagcagggacatgtctcgggagatgcaggatgtagacctcgctgaggtgaagccttt

SEQ ID NO: 831282 - DNA, 98 bp, Homo sapiens
ccagctctactccttctctgcctctcagagcctagaacagaattccagccaagttttccccacctggtggccttttctagctcgcagctcctcagaca

SEQ ID NO: 831283 - DNA, 100 bp, Homo sapiens
caggacttcctactccaaccattaaatggatgaaaaatgaggaggcacttgacacagaaagtgcctgaaacagtatgttgagctcttgatcaaagaagga

SEQ ID NO: 831284 - DNA, 100 bp, Homo sapiens
cgagcatctcatctgacgtgagttcaagtacagatcacacgcccactaaagcccagaagaatgtggctaccagcgaagggtcccgggattcttgagctgt

SEQ ID NO: 831285 - DNA, 100 bp, Homo sapiens
aagtcccagatcagcgcagacagtggtgtgagcctgacgtctagttcccagcttatggaagtgacagggaaaaatcaggatgaatgcatagtggccctac

SEQ ID NO: 831286 - DNA, 98 bp, Homo sapiens
ctcaggacttggtttgccttcttctaagtgggttcacccagaaaatgcagttaatgctgaagcttcattaaggaggatccagaatgaagagagtgtgg

SEQ ID NO: 831287 - DNA, 100 bp, Homo sapiens
ctgtgttaaagcctttatggaagggtatccgccaacacagaggaaagggtctcgactctgaagacagagttcctgccgctcctaagtgtgtcatttgtct

SEQ ID NO: 831288 - DNA, 98 bp, Homo sapiens
ttgcaggaaatgtgaatctcaggagagagcagccagagtggtaaaatatacccaggaccataaacagatgaaaggtagaccaagtctgattttagata

SEQ ID NO: 831289 - DNA, 100 bp, Homo sapiens
ctggggcggccggccaggaaccacccgttaaggttgctgaaaagccaggagtcaaaatgactgagcgctttgactgccaccattgcaacgaatctctctt

SEQ ID NO: 831290 - DNA, 98 bp, Homo sapiens
tggtgtccgcctggaggatgcttctcatcattgccaccactcatgtgccccacctcaaccagaatgcctggaacaacctggagaaatatagccgcagc

SEQ ID NO: 831291 - DNA, 98 bp, Homo sapiens
ttaattttagggtcctttatatagaagggagaccttcatcccggggatctctatcctttcaccaggaagccactgttcatcattgtggattcgtctaa

SEQ ID NO: 831292 - DNA, 99 bp, Homo sapiens
aagagctggtgcatgatgacgagctgcatatctatgtgagactgaattttcctcttagacttcagctaaaactgtgtattgcatcaggctgagagcaga

SEQ ID NO: 831293 - DNA, 99 bp, Homo sapiens
cttcatccaccagagtgacctgaaggtggacgagaaccagaaggcctattaccccagcatcgtggccaacaggtttttgccaatccagaagactgtgta

SEQ ID NO: 831294 - DNA, 100 bp, Homo sapiens
ctattgctgcagcatttgccaaggagacatccctcttaggcatcattcttaacaaagaagttaaatattggtgggaaaagagtaaaccttgccatatggg

SEQ ID NO: 831295 - DNA, 100 bp, Homo sapiens
gccgcgggaatgtcaggcctttcccagtcaccatgacaggagctatttgtgaacagcccaattgcagaggttacacatcgatactgagaatctccgggag

SEQ ID NO: 831296 - DNA, 99 bp, Homo sapiens
actcacccatggacatccaggtgctgagccaggagcggcagcctttctgtgctggagaatctggtaaaagcaccattgtgaagcagatgaggatcctgc

SEQ ID NO: 831297 - DNA, 99 bp, Homo sapiens
aagctaaagtggattcaggagtacctggagaaagctttaaacaaagcctggaaacctggccggcgtcaggcacatcatcctggtcctctcaggaaaggg

SEQ ID NO: 831298 - DNA, 100 bp, Homo sapiens
tgaatcatcaccaggctgcttactggaaactggatgcagcaaggaaataggatttaaccgctctctgcctcccagagaagcagggccctgagcggaagag

SEQ ID NO: 831299 - DNA, 100 bp, Homo sapiens
atcgcggcgctcatccacgaagggtgtgccctggacagacaagacaaggctctggcttcatcatgtgcagcggcaaagagaacccggacagtgatgctga

SEQ ID NO: 831300 - DNA, 100 bp, Homo sapiens
cagcaccttggcgaagccttgggtttctttcttaaaggactgatttttagaactccacatttgagattcccctcttcccgcggcctcgccatggcgaccc

SEQ ID NO: 831301 - DNA, 129 bp, Homo sapiens
accaaaagagaaattttagcacaactccggacacttgttttccagtgtgatcttacccttaaagctcttcatgattgtatccaaaaaaccttgaatgaatggagttcccaaatcaacccagatttggtc

SEQ ID NO: 831302 - DNA, 99 bp, Homo sapiens
ttttgtgtccaggcataagaaatttgacgctcaaatctaatccaagtgaaaatgaagaaaaggaagcacagtctcaacttataaaatctgatgaaatgc

SEQ ID NO: 831303 - DNA, 98 bp, Homo sapiens
aacaaatcaaactgcaaatctgggatacgggtaaaggagctggaagtgcgaaaattgatgcatgtgagaggagatggaccctggtattactatgagac

SEQ ID NO: 831304 - DNA, 99 bp, Homo sapiens
cagaaggttcaagatgtaaagaagactattcagaaaaagatgattgacgctttctcagagtacattcacgcccaggtggcatctggcaaagggaaactc

SEQ ID NO: 831305 - DNA, 98 bp, Homo sapiens
gaccaactccaggcacagcggagccggcgcggggtccacaaagaaacgtattttagaaacttgaaaaagaaactgacccagaacaagctcatcttgaa

SEQ ID NO: 831306 - DNA, 99 bp, Homo sapiens
gtgggctgggcagcagctgctgtggaagggctccttcaagcccagcgagcatgatccaattctggtacagcagttgcgccggacatacaaatatttcaa

SEQ ID NO: 831307 - DNA, 100 bp, Homo sapiens
agcgccacctcaatgatgatgatgtcacaggttctgtgaaaagtgaaagggagctggtacatacactacctcttctttgagcacaaaatctacaaccaca

SEQ ID NO: 831308 - DNA, 100 bp, Homo sapiens
aaagagaagactgatagagacttcgttaagatgcttttactgactctgctatcagtgctaaagtgaatggcgaacacaaagagaaggacctggagccctg

SEQ ID NO: 831309 - DNA, 100 bp, Homo sapiens
gatgagaggatgtggtggtctactctgatgtcaatcttgagggctaggtagagttggctttgtgggacacagctgggcaggaagattatgatcgcctgag

SEQ ID NO: 831310 - DNA, 100 bp, Homo sapiens
cgtagcgacctgctttcagccatccgtcaagacatttatgcagtgtgtgattctttctaaaacaactccctggaagagaggacatttaattcaacaattt

SEQ ID NO: 831311 - DNA, 100 bp, Homo sapiens
cgaaacgtgataagaagcacctggatgagacatttgctacagcatcccacattaagtcaacggagggtgcatctgcccggaagactcagactcctgcagc

SEQ ID NO: 831312 - DNA, 98 bp, Homo sapiens
gctgaggaaccagatatcttgaaaagctgccagaaaggtcgtcagcttgttctggaaactctttatgctttgacatcgagtacaaaaataatcaaaga

SEQ ID NO: 831313 - DNA, 100 bp, Homo sapiens
tgaggactgactggggttctgagactccctgtcccggaccgcagaagcaaccgtgacaagtggtgcccgaccagggacctgaacgaggaaggtctgccag

SEQ ID NO: 831314 - DNA, 98 bp, Homo sapiens
aagaagtgggattactggattatatggacacaattacttgtgcccaaatgactggctgttgaacgaagggaaatgttactggttttcaacttctttta

SEQ ID NO: 831315 - DNA, 100 bp, Homo sapiens
gatcttcgctgcggacttggttcggagggacgtccgcttctggtggacagattgagcaaaggtattaatctctggagaagacacatccacagttagcact

SEQ ID NO: 831316 - DNA, 98 bp, Homo sapiens
ttggagccatgatgctgctggaatctcctatagatccacagcctctcagcctttggagactcgacttatttcagagaccacatctgtgtgcaaaccag

SEQ ID NO: 831317 - DNA, 100 bp, Homo sapiens
aaagtgtaccagtcggcagcatggagcgttatccagactagcgagtgggaggcagatgtaaaatctggaacgcagattttagtttgttggaaggagaaat

SEQ ID NO: 831318 - DNA, 101 bp, Homo sapiens
atttttcatgacctttctcatctgactcgtgatctgcccatcttgttactccctagcagtgtggtaaggtattaataggggaccctattaccacatgtctt

SEQ ID NO: 831319 - DNA, 100 bp, Homo sapiens
cttgcaccctaacagctcgacagaaccttggcgtccacaaaaagtgtaaacaggaacatcgataagtagtgtaaaaacttgcacaatgaaatccgaagcc

SEQ ID NO: 831320 - DNA, 98 bp, Homo sapiens
tttcgacagcgaacatgtcgcggcctgtcaggctggcagtgatggtgaaagcataggaaactgccccttttcccagaggctcttcatgattctttggc

SEQ ID NO: 831321 - DNA, 100 bp, Homo sapiens
gccggcaaccagctgtaagcgagtttttggctttcacccccaaccagtgaccaaagacttgaccactcaaagtccagctccccagaacactgctcgacat

SEQ ID NO: 831322 - DNA, 99 bp, Homo sapiens
agtttggtcaaagcaaccgaaaaggagagtttcctggtgaatgaaaactttgccattgatttgatagcagagcagcccgtgagcgaggtggagactcgg

SEQ ID NO: 831323 - DNA, 98 bp, Homo sapiens
aggatgaactcatttcccaacttcaggaagagctggaacaagcacatcatgattgacttggggactggcaacaacaacaagattaactgggccatgga

SEQ ID NO: 831324 - DNA, 98 bp, Homo sapiens
ttggagtccacttccaattccaaggtccagcctgatgagtgaagaggctaagcgaggagcacccaacccttggctctttgaggagccagaggagacca

SEQ ID NO: 831325 - DNA, 98 bp, Homo sapiens
ggagtcatggactacaagtgaaacaggactcagcccaggagagtgttattactcgagatattcatcgtacatttcccgcacatgattactttaaagat

SEQ ID NO: 831326 - DNA, 100 bp, Homo sapiens
gagaccgtgaagattccaagttcaggagaactcgaccgggtcgagctgtgcagttttagcgggtacaagatctaccccggacacgggaggcgctacgcca

SEQ ID NO: 831327 - DNA, 100 bp, Homo sapiens
agcttcatctgcgatggacagaataactgtcaagacaacagtgatgaggaaagctgtgaaagttctcaaggctctcaaaattagagagatgtgtaattgt

SEQ ID NO: 831328 - DNA, 111 bp, Homo sapiens
agggctcgagtctacctggatgaaaactacaaatcccaggagcacttcacgctggagcaggctctgcggctggagcctggggagctggagacgcaggagcccagggggctg

SEQ ID NO: 831329 - DNA, 100 bp, Homo sapiens
gacttcaactactcctaccccaccaagcaagctgctctgaaaaggttttgagcaaaattttggactgtgaagcaaggcattgggtaagtaaataaaatta

SEQ ID NO: 831330 - DNA, 99 bp, Homo sapiens
cagtggttctgctggattgataaacccagctgctacaggtcccagcgactccagtttgatgtctcttcccccaatggcatcttactcttccgagaaacc

SEQ ID NO: 831331 - DNA, 100 bp, Homo sapiens
tgctgtcatgatatgaaagattccagtgctcattggtgggcagtattacttatgggaattgctctgatcatgctaatggctggatttattaagatatgca

SEQ ID NO: 831332 - DNA, 100 bp, Homo sapiens
tggggaggcctgccggtgcaacgagatggagtgggctggcgcctcgggagagcgaatcgagggcggcggatggcccactgcgtgaccttggttcagctgt

SEQ ID NO: 831333 - DNA, 107 bp, Homo sapiens
gtggataagcacaaagtcaagagacagcgattggacagaatttgtgaagaaaaagcttgtggtgaaggggggcaaaaaaaagaagcaagttctgaagttcactcttg

SEQ ID NO: 831334 - DNA, 98 bp, Homo sapiens
cctcaggttgctgcatggacacatggacgagtgtctcactgtcccttcaggagaacatggtgaagagcagcggagctgggaagttatcaattccaaac

SEQ ID NO: 831335 - DNA, 103 bp, Homo sapiens
caggtggtgctagaaaagccaaatggctttagtcagagtcccacagccctgtacagcagcccacctgagacaacctcatcagccttgaaaggtgccatccagt

SEQ ID NO: 831336 - DNA, 99 bp, Homo sapiens
gggaggctccgcggagccgaggcgtggagatggaatggggcgagtccttgctcaagatgtatatgcaaaagacaatttaccccccttcccagcatcagt

SEQ ID NO: 831337 - DNA, 100 bp, Homo sapiens
tgagggtgtacaaatacccctttgaattaattatggctgctgaccggttccctgatgtgttacctgcttctgctactgatccaaactgcagaacttctca

SEQ ID NO: 831338 - DNA, 100 bp, Homo sapiens
ctgcctcagcctcccgagtggctgggattacagggatgcttcctttggaaattgcacttacaatctcaccattctcgactgtttgcagggaatcagaaag

SEQ ID NO: 831339 - DNA, 98 bp, Homo sapiens
ggccgccgcccgagcgctcgagaaagtcctctcgggagaagcagcgcctgttcccggggcagatccaggttcagaatctttggaagaactaccagaaa

SEQ ID NO: 831340 - DNA, 99 bp, Homo sapiens
tgggggtcatcacagagaaggagacccaggtgaccatgctcgacagctgaccaaggccatgatgcgaaaggccacggccagccgcctggtcacgcagcg

SEQ ID NO: 831341 - DNA, 100 bp, Homo sapiens
ccactcatccaccgttgcctccagcccacccacctccagcaatactggagtaaccgcttcctaaaccattttgcagaaatgtaagggtgttcggttgcgt

SEQ ID NO: 831342 - DNA, 100 bp, Homo sapiens
aatctggttcagattttacagctctggtgatgcagtttggcaaagggaagtcgtgttgctaccggtttctgaccaaaggtcagcagtggatctggctgca

SEQ ID NO: 831343 - DNA, 100 bp, Homo sapiens
gcagctcaatgagaaaatctccctgctccgcagcgacatcaccaagctggaggtggacgccatcgtcaacgccgatctgccgacaccccaggccatcgag

SEQ ID NO: 831344 - DNA, 99 bp, Homo sapiens
gcggctgcacatcctcaacgggacccacatccacatccagcaggtgtcggacgaccaggtgtcacgtcttgaaattttaaatgtcctcagtgactctct

SEQ ID NO: 831345 - DNA, 100 bp, Homo sapiens
ggcggccctggaacctggatatcgcgcgagcaagatggaaagttgccttttgttcctccggaggaagaatttattatgggagtttccaagtatggcataa

SEQ ID NO: 831346 - DNA, 100 bp, Homo sapiens
acccagcccccatggcttcagaagaggtggtacagaagttggtcctgccctttgggcgactgaactacctgcccctggaacagcagtttatgccctgcct

SEQ ID NO: 831347 - DNA, 98 bp, Homo sapiens
cgccggcggcggcggcgccaggacatggagctcgagaacatcgtggccaactcgctgctgctgaaagcgcgtcaagtatcttaaatagtgaagatgga

SEQ ID NO: 831348 - DNA, 100 bp, Homo sapiens
aatccacaagctttttcatacagctcccaatgtaccccactatgctactgtgatgcagatccatccgccctagcaaaatatgttctggctttggtaaaga

SEQ ID NO: 831349 - DNA, 99 bp, Homo sapiens
tgaggactccaactgtgtgccaagagagttcccctgctggtgcctcctctgtagtaaaggaaagacttttgccatgggcttcatgacgggcaccatttc

SEQ ID NO: 831350 - DNA, 100 bp, Homo sapiens
ccgaagaaggcttccacactattcattcaggaaggcatgaatatgcattcagcttcgagcttccacagacatctgggacataggaggacaaccccgattt

SEQ ID NO: 831351 - DNA, 100 bp, Homo sapiens
cagaacatctgggagaatatttaatggaaaatcgcttggttaaaacctgacacttttaacaggggaaagttgctcagacagcttgcatgtcagcctgcca

SEQ ID NO: 831352 - DNA, 99 bp, Homo sapiens
atggggttcgcagctgcatagggcggagaattgcagaactggagattcacctcgtcgtgatccaggaggccatgatggatttcttcaacgcccagatgc

SEQ ID NO: 831353 - DNA, 98 bp, Homo sapiens
gctgccggaaacgcgagatcagcccctctccgagagcctgaaccactcctcacagataaggtaaaggttgttgctgttgatgcagagttgaatgtctt

SEQ ID NO: 831354 - DNA, 100 bp, Homo sapiens
catcttccggccaacttccattgaacttcccagcactcgaaagggaccgaaatggagagcaaagagtgacgtcagaatcaagttcgagcacaacggggag

SEQ ID NO: 831355 - DNA, 51 bp, Homo sapiens
cgctgggcctggcttacttcactgtacactgcagcctgctcccggctcctg

SEQ ID NO: 831356 - DNA, 100 bp, Homo sapiens
ggcccgcacagtttcgacgtgtccttccagcagtcgagcaccgccaagtcggccacctggacggcacattgcaagcaacccgtgccttgatggtggttgg

SEQ ID NO: 831357 - DNA, 99 bp, Homo sapiens
caagatgatggccgcaggaaaccgggtataggaggaagaggaattccagagacgctgtaacactctgatttcattgattgagaaagaaaatatggaaat

SEQ ID NO: 831358 - DNA, 100 bp, Homo sapiens
ccgcacctgcagcgagtgccaggaactcttctggggagaccccgacgtggagtgccgaggaggtacactcagtgaaatttgcaaactctcgaacaagttt

SEQ ID NO: 831359 - DNA, 98 bp, Homo sapiens
gcaaagaacactgttgttgccacaggcaaaacaagctatcgatcagggaagatctccagttataatagataacactaatatacaagcttgggaaatga

SEQ ID NO: 831360 - DNA, 100 bp, Homo sapiens
acccacaacctttaagcagcagaggagcacgaggatcgtgggagctaagaagcccacagcagcagaacttttaaaatgcaaattcttccagaaagccaag

SEQ ID NO: 831361 - DNA, 100 bp, Homo sapiens
ctcgcaggtggactcggtccgtggcttcggaggcaagtttggtgtccagatggacagagttgatcagagagagcaggagattcggatgggtcagatggct

SEQ ID NO: 831362 - DNA, 100 bp, Homo sapiens
tagggccttccagtatgtcaaggagaacggaggcctggactctgaggaatcctatccatatgtagcagtgtggcagatgcctggagagccctcaagaatc

SEQ ID NO: 831363 - DNA, 98 bp, Homo sapiens
ccagaagctctttgtgtatgaccttcacgcagtcaagaacgacttccagcttcttgacctgagcaatggagaacctaccaggaaacttcctcagggtg

SEQ ID NO: 831364 - DNA, 98 bp, Homo sapiens
ctgcgcatctacttcctggaggagcgcatgcaacagaagtatgaggccagccgggaggacatctacaagcggttgcgctacaagtcagacctgatcgg

SEQ ID NO: 831365 - DNA, 98 bp, Homo sapiens
ggccatggccgccgccgatgccgaggtttttctttggactcagggaaaggtattgtttctaaagatgagatcacttttgtatctggtgctcccagagc

SEQ ID NO: 831366 - DNA, 100 bp, Homo sapiens
ccaggccccgcggctagccccttcccacaggctctctccgctcgattttgtcaccgttatgtgggaagcgaatccagtgccacttgaagaatggatgatg

SEQ ID NO: 831367 - DNA, 98 bp, Homo sapiens
cagtgtttgaaggagaagagagcaagggaaatgatgtcactctgaaactcaggctggaatacactggcatggtcatacctcactgcggcctcaaactc

SEQ ID NO: 831368 - DNA, 100 bp, Homo sapiens
cggatagtttcctggtcccaagtgggtgtggagccttccattatgggaataggaccaattccagccataaagcaagcttttctatttgtgatgaaaacac

SEQ ID NO: 831369 - DNA, 100 bp, Homo sapiens
tgcaagcagatgctgactcagcctgttccattaagattttatggccggaagatggtgaatatcttgatggcgaacactaagtttgatgcatttctgaagc

SEQ ID NO: 831370 - DNA, 100 bp, Homo sapiens
cgacaccccagggagtagggctgaggaccgcaaaaatcaatctgccggatggagtgctgtgatgtgccagccgagacactctacgacgtcctacacgaca

SEQ ID NO: 831371 - DNA, 100 bp, Homo sapiens
gtaagagactccaaggacaactgcaagggggaagtagagagataacaaaagctgctcagagtctcaatgaacttgtaaacaaatccgagctatgctgggc

SEQ ID NO: 831372 - DNA, 100 bp, Homo sapiens
ttgtttgtcagcagccaaggtgtttccaggaagttcagagagaacaggtcaaaatgcagatcttcgtgaaaacccttaccggcaagaccatcacccttga

SEQ ID NO: 831373 - DNA, 100 bp, Homo sapiens
ctggtctggttgcctcttctgcatcgactagcaaatgtggaaaatggttttagctgaattttgggacatggccactgcttcaccaaggtctgatactagt

SEQ ID NO: 831374 - DNA, 100 bp, Homo sapiens
agctgctgcaccgcggcgccgacatcaattacgccaatgtggacggactcactgccctgcaccaggtggatgcccggagcataccagtgttagcaaaatg

SEQ ID NO: 831375 - DNA, 100 bp, Homo sapiens
cccgccgctgctgccgctgctgctgctgctccacacctgcgtcccagaggcggggtttcaccatgttgcccagactggtcttgaactcctgagcttaagc

SEQ ID NO: 831376 - DNA, 100 bp, Homo sapiens
agcgaggctatcacaagctgcaccagcttctaaccgacactccagttctcgcctgaattaccaaagcagcgttcagggatcctctcagtcccagagcaca

SEQ ID NO: 831377 - DNA, 98 bp, Homo sapiens
aagatgcccaggagaagctggagctggcagagaaaaaggccaccgataataatccagtcctagcacctccaagcctgagcaagatgattcagatggcc

SEQ ID NO: 831378 - DNA, 100 bp, Homo sapiens
gaagaagctgaggctggtgtttaagagtttggacaaaaagaatgatgccctcaggattctctctcggaccaggagggctacctgagcagctccagcagca

SEQ ID NO: 831379 - DNA, 100 bp, Homo sapiens
ggggtcgctacggacttaaaatctccgcaccgcaccctccacctcaggtccattgcaaaagaacttgcagactggcttattagcaacaatgtggtggagc

SEQ ID NO: 831380 - DNA, 100 bp, Homo sapiens
atactgacctgtaaatcatcctttagctgtttttggaaggaagaaagatggaaagcggtgcagttctgctggaatccaaatcctccccatttaacctact

SEQ ID NO: 831381 - DNA, 100 bp, Homo sapiens
atccccctcaccaatttagccattccaggagactttgaatgtgattgatcctggcttgatggacctaaatgggatgagtgaggatgccctggaatgggat

SEQ ID NO: 831382 - DNA, 99 bp, Homo sapiens
tcacgctggtttgacttccccttcaccagagaagaagccctgcaggctgataagaagctgaacctcttcagaacatcaggagagcattctgggtaatac

SEQ ID NO: 831383 - DNA, 100 bp, Homo sapiens
cgaaggctatttcgccgctggcgtcaggactattttcacgttttaatgccgagagcatcagacatcgatgagtcatcagtgatgcagctggccgagatgg

SEQ ID NO: 831384 - DNA, 98 bp, Homo sapiens
ccgggtccgcatcgagaagatgagctcagaggtggtggattcgaatccctacagatgctgatcaactaaaggaaaaaataaaagatctagagacacag

SEQ ID NO: 831385 - DNA, 100 bp, Homo sapiens
gccgccctgcccagctgcctgcccccggaggtgcccacgcagctgcctggacaaggcccagctgtgctgctgtgttaacctggaggcattatggaacagg

SEQ ID NO: 831386 - DNA, 100 bp, Homo sapiens
cctcaaactgactttgcagccacggagaggtcctgcagacattcgctttgtctgggagaagaatgggcgagctctggagacctgtgtccctgtgcagacc

SEQ ID NO: 831387 - DNA, 99 bp, Homo sapiens
cagcgagcagatgcggacgcttttttccttcctaggagaaatcgaggagctgcggctctaccccccggacaggaacgaatgcaggaatttgggaactga

SEQ ID NO: 831388 - DNA, 98 bp, Homo sapiens
ccatgcagttccacctgatgttctactgcacgcggacactgcccaatgtgctggccctgcctgtaggactggaaggatcaccagcacatatgcggcca

SEQ ID NO: 831389 - DNA, 100 bp, Homo sapiens
gacaaaacagaaattaacctggtctcatttcgtcgtacaatttatcttgctattcagtcaagaattggcagagggggtcgatttgggaggaaaggtgtgg

SEQ ID NO: 831390 - DNA, 101 bp, Homo sapiens
cacagccatctcacatttccaagtacattctcaggtggagacctggtgtcagtgtggaggcagttgatccagtgttccaagctaaaatgttggatatgttg

SEQ ID NO: 831391 - DNA, 99 bp, Homo sapiens
gaggaagtgtggacagtggacctacatacaatgtcccttcagtctgaatatgttcattactaaggccttgccactccagtgaaagctgttcttctctta

SEQ ID NO: 831392 - DNA, 103 bp, Homo sapiens
ctcagagcagagcaccgaaagtggccactaccagcatgaagagcccaacaattcaaactgagatcgcggattcaggtgtggctctatgagcaagtgaatatgc

SEQ ID NO: 831393 - DNA, 100 bp, Homo sapiens
aaagacttgatggtctggtagaaacaccaacaggatacattgaaagggctgtcatcagtgatccagagcaaaatttagccattgagcaaaaagaaagtga

SEQ ID NO: 831394 - DNA, 99 bp, Homo sapiens
aagccccggccacctcggcctcttcctgttgcaccaggttcttcgaaaactgaagcagatgttgaacaacaaggccagtctatccatatggggatgggg

SEQ ID NO: 831395 - DNA, 100 bp, Homo sapiens
ttatattttgtcttctgtgtggattcttcagaaagtgaacttggcattttagatctaattcaatcatatttgaagacattttcctactcaaacgctgagc

SEQ ID NO: 831396 - DNA, 144 bp, Homo sapiens
ataatcaactgccatttcaaagaatatagatggttttgaaaagttcatgctgtcccttcattgaattttaggttgtacgtggacactataaaggtcagcaaattggcaaagtagtccaggtttacaggaagaaatatgttatct

SEQ ID NO: 831397 - DNA, 50 bp, Homo sapiens
atctcccaagagctccgagggcgaggatgaatctggttatagatggacaa

SEQ ID NO: 831398 - DNA, 100 bp, Homo sapiens
agaacttcccccacggaggcgccatggacacgcactttgcaaacatgagatcgttgatccagagctctcaatccagcagctcagagtaaaccctcctgat

SEQ ID NO: 831399 - DNA, 98 bp, Homo sapiens
tgagcctcttgccaaagtgtcccttttaaaaggtcacagtcctctttgcaggacagcacatctccaagagcccatttgaagtgagtgttgacaaggcc

SEQ ID NO: 831400 - DNA, 100 bp, Homo sapiens
aggatgccctggagacacacaggcagacccatactggtattgttgcagcatctggcagtgagactgaggatgaggacagcatggacattcccttggacct

SEQ ID NO: 831401 - DNA, 100 bp, Homo sapiens
tttcaatgtagtcaatgtgacatgcgtttcatacagaagtacctgcttcagagacatgagaagattcatactgcctatcagcttatcactgtggtgatcg

SEQ ID NO: 831402 - DNA, 98 bp, Homo sapiens
catgccagcaaacgtctacactgtacatgctttttattacaagactacggagcataggaggaaaattcatcatctgggaggagtggatgcgggccatc

SEQ ID NO: 831403 - DNA, 100 bp, Homo sapiens
gcgcggaccgggccaggctgcttgaagacggtttgccagtcagtccttagaagaacaacacaggaatgcccagtgcggacatctctagacttagaactgg

SEQ ID NO: 831404 - DNA, 100 bp, Homo sapiens
aaaggaccatacgagtcctagatgtcaataaccagtccttcagagaacaagagcactactatggatgtaggagcagtaggagatctcagacgaattaaaa

SEQ ID NO: 831405 - DNA, 100 bp, Homo sapiens
gttaaaccagttgtgatgctaccaatatggcgagaatctttaggacataccagaattctgcttggtcagaatcgtgatggcattgtgttcagcactgatg

SEQ ID NO: 831406 - DNA, 98 bp, Homo sapiens
tcctcctccatcttcttgaggttggctttctgccagatctccgggcggctgcttctttagatacggtgctgcggtgtgtcgcggggtgcccaggcctg

SEQ ID NO: 831407 - DNA, 100 bp, Homo sapiens
cctcagacgcggtggagccgccggagtctgagaaggacaatgccgtcttctgtctcgtggggcatcctcctgctggcaggcctgtgctgcctggtccctg

SEQ ID NO: 831408 - DNA, 98 bp, Homo sapiens
atagacagcaatggatagatgccattgaacagcacaaggttgacagatttgcaatggaattagaacaaagccgaaatttgagcaataccatagtgcac

SEQ ID NO: 831409 - DNA, 100 bp, Homo sapiens
tcctaaagttctacgactccaacacagtgaagcagaaatatctgagctttactcctcctgggtggcacctgtggaaatgaaacggagaaataagatccag

SEQ ID NO: 831410 - DNA, 100 bp, Homo sapiens
gactgtgattcactagtgtgcctctgcgaatttaaagctcatgaaaacagaatgctggaagccaagcttgcacattctaggcagccatttggaagattct

SEQ ID NO: 831411 - DNA, 99 bp, Homo sapiens
agaagacggtcaccgtggagtttttcctggtgggacaagacaacgggccggtggaggtgtccacattgcagtgcgcgtcccgggacgactggcgctgtg

SEQ ID NO: 831412 - DNA, 98 bp, Homo sapiens
cgcagagggcaggcaggaggtcggagcagctccgcgaggaccgcaccatcccgctcattccaaaagaatgcaatggtgtaaagattccagttgatgcc

SEQ ID NO: 831413 - DNA, 98 bp, Homo sapiens
cgttccaaccagttcaaagcttgttgtctttgatactacattacaatttgcacagcggaaaggggctggccgtgtggtgcacatctgcaatctccctg

SEQ ID NO: 831414 - DNA, 100 bp, Homo sapiens
ctgggacccggccggttacctgctctactgcccctgcatgggccctagactggagctggttacagacggaagaagaagagcacagctgcctggagcaggc

SEQ ID NO: 831415 - DNA, 50 bp, Homo sapiens
gtactggagagaaatcctacaagtgtgaatgtcaaaactggaccaatggg

SEQ ID NO: 831416 - DNA, 149 bp, Homo sapiens
cagaggtgatcatccgcaaggctgccaaagccaatgggattgttgtgccttccactatctttgacccgagtgagatacctttttcgagcctatatcgtggcacctggctaccaaagtactgggaatactctgctgtggcctattttttg

SEQ ID NO: 831417 - DNA, 100 bp, Homo sapiens
gtgcggagagactccttgggggtcgagcacataacggggttcgggtgtctcgtgtgtgaacatcacagggaatgaaagctactggttgattttaaagtgc

SEQ ID NO: 831418 - DNA, 100 bp, Homo sapiens
tgtgacttgtggtcactgatgagtggaccaagtgaaggtggagctggtctcttgggcagcctgacatctggtccactcctctgtcctatgccgggatcat

SEQ ID NO: 831419 - DNA, 99 bp, Homo sapiens
ctgctctgctcttacaaggatccgagtgtgatccctcacatccacaaatctctgattggaaagaagggacagcagaaaactgcttagagggatgcttta

SEQ ID NO: 831420 - DNA, 100 bp, Homo sapiens
accctgggctgcagctgcctaatgagacctgcagccagttacctactgcgagccggccttctggtgctccatctcctactacgagctgaaccagcgcgtc

SEQ ID NO: 831421 - DNA, 98 bp, Homo sapiens
gactcattattttaacatttgggagaaacacagccagaagggaagctgccaaagaatgtcgacgtcgaaagaaagaatatgtaaaatgtctggagagc

SEQ ID NO: 831422 - DNA, 98 bp, Homo sapiens
cattttgtggaattcgtgaaacttgtccgtgccaaatttcctgaacacaccattatggttgcacagacagcagatggtgtggatgctgacctctggaa

SEQ ID NO: 831423 - DNA, 100 bp, Homo sapiens
ctttgctggtgcagtgagagcagcttcaggggcccagatcattgatctgatgatgctggtcatcgatgtgaccaaggggatgcagacccagtcagcggaa

SEQ ID NO: 831424 - DNA, 101 bp, Homo sapiens
actgtttactcgaagagaacatgtaaaaagacattccctgattacaccaccaccttcactgtcagatccacttaaagagctttttcgacaacaggaagttg

SEQ ID NO: 831425 - DNA, 99 bp, Homo sapiens
tcagagttactgtttgacttgacccaggatacaggattatcacattaccaagggggaccaacactttctatggcagatcaacaacccctccccgtcgta

SEQ ID NO: 831426 - DNA, 99 bp, Homo sapiens
ctagcttccctgtatgtgatgatgaccgtcaccaactggttcaacatgacgtatcccagactttactcaaggcaacactggacagtgttgtagaagaat

SEQ ID NO: 831427 - DNA, 100 bp, Homo sapiens
gggtcagagtgatagatcattcacaatatctgtgtcgttcttggcagaaattatattttccagcccgtgtctgcagtgttcctttctgccgaaattctcc

SEQ ID NO: 831428 - DNA, 100 bp, Homo sapiens
agataaaggagatggtggaactgcccctgagacatcctgccctctttaaggcaattggtgtgaagaagatggctgtgccacccacgtatgccgatcttgg

SEQ ID NO: 831429 - DNA, 100 bp, Homo sapiens
tccctgctgctctacattttcaccaagatctcggaaaactgtggtatgtctgtgtgtaatggtaaaatatatatcctgggcggaagacgggaaaatggag

SEQ ID NO: 831430 - DNA, 100 bp, Homo sapiens
agcagagtttgccgagaggtctgtggcaaagttggagaaaaccatcgatgacctagaagaaagttcaggagccctggaaaggagaaggaataagacggca

SEQ ID NO: 831431 - DNA, 98 bp, Homo sapiens
cttcaaagaaacattaagaacttggatcccattcacctgaggcacccgaagaagagaccatccatatttccaggaaaaagaagatgtccctgtggaaa

SEQ ID NO: 831432 - DNA, 100 bp, Homo sapiens
catctgagaactgtgtccttccattcctgagtccagcacttcccaggccagtaatgctacagccctttgactatgatccgaatgaaaagagtaaacacaa

SEQ ID NO: 831433 - DNA, 98 bp, Homo sapiens
tttgaggacacttgtggagagctcgaattccagaatgatgaaattgtgtcaaactgtgctgaaaatatccgcaaacacattctgcatactggcaaaca

SEQ ID NO: 831434 - DNA, 98 bp, Homo sapiens
acaatcaatacgattggaaccagcacaagtacaaggtttcccaaactctcgattgcctcttgcaagcagatgacctgggagcaaatgttatggcagaa

SEQ ID NO: 831435 - DNA, 98 bp, Homo sapiens
aggaagcaagatcattagttgaatcggccagcattgaaacaggggaccgtgtctggaggatgcctctcttcgaacattatacaagacaggttgtagat

SEQ ID NO: 831436 - DNA, 98 bp, Homo sapiens
cccggaccctggaagagaagagggtggctaatgattaaggagtggacgcttctcttgtgagccagctggaggtcttacctctttgactgaaccaccca

SEQ ID NO: 831437 - DNA, 100 bp, Homo sapiens
cggaggtgacagcgggctggggactggcggctgcaactgcctgccgcgccgagggaccgccgggcggcggaaagcagggcttttaccaagatggcctcag

SEQ ID NO: 831438 - DNA, 100 bp, Homo sapiens
tcaagtgaagcaaaagcctttcatgattatgctgtgagctggaggcctgcagccctgatgccgacatgctggactacctgctgagcctgggccagatcag

SEQ ID NO: 831439 - DNA, 100 bp, Homo sapiens
ctcagagctttacgatgtcacttgggaagctggacgcacagaacagtctctccgtgggaggagacattatggggcgtccaccaccacccctccctggcca

SEQ ID NO: 831440 - DNA, 98 bp, Homo sapiens
ggacgcccgctgagcttggcgcacgggccgaccagccctcccaggcccaatacttcaaagcatcctacctctgctcaatatatattacttggagagga

SEQ ID NO: 831441 - DNA, 100 bp, Homo sapiens
cctttgtctcccccagccccctctccaccagcagccccatcctcagtgctgacaggtgccttcttcatcccctacctcgtcttcctctttacctgtggca

SEQ ID NO: 831442 - DNA, 98 bp, Homo sapiens
ccagaaggtgctggacccgaagaaggacgtgctgacccgcctgaagcacctgcgggcgctgctgggtgctggagaatctggtaaaagcaccattgtga

SEQ ID NO: 831443 - DNA, 98 bp, Homo sapiens
aggtgatgatgaacacccagcccatggaggagatcggcctcagcccccgcaaggatggcctttcctaccagctgattccgcgccgcttagattgggag

SEQ ID NO: 831444 - DNA, 100 bp, Homo sapiens
ctgaccttgagtgcagctccccctataagcctcggcctccacaggcagctgttgtgctgtgtatggacgtgggctttaccatgagtaactccattcctgg

SEQ ID NO: 831445 - DNA, 100 bp, Homo sapiens
ggaaaactcctgaggagattcgcaagaccttcaatatcaaaaatgactttactgaagaggaggaagcccaggcagcggaggaggagaaagagatggacct

SEQ ID NO: 831446 - DNA, 100 bp, Homo sapiens
tgggactctccggccctgtgcagttgccgccaagctcctggacaagaacccattctcggtcagtaacccgaaccctctgcttccttcacctgccagtctc

SEQ ID NO: 831447 - DNA, 129 bp, Homo sapiens
agaagttgcaaagaatactcattgcagcagccttcctcattatcagaaattaaaggtctatgcttggggctgtggagcttgtctaggttgtggttcttcagaagctactgctttgagacccaagcttat

SEQ ID NO: 831448 - DNA, 100 bp, Homo sapiens
tagttggattttcacgtgctcttgctaaagaggtagcaagaaagaaaattagagtgaatgtagttgcaccaggtttatctggcaagactgaggcaaataa

SEQ ID NO: 831449 - DNA, 98 bp, Homo sapiens
tggctccggagaatgaaggaaggctggtgcacatcattggcgccttacggacatccaagacatcaacgagtgtgtgacggacctgcacacgtgcagcc

SEQ ID NO: 831450 - DNA, 136 bp, Homo sapiens
ctgagatcaaatggcacttcattggccacctacagaaacaaaatgtcaacaaattgatggtaatagtagacgtcgccatgaaagtgaagaaggagatagtcacaggagacacaaacacaaaaaatctaaaagaagc

SEQ ID NO: 831451 - DNA, 100 bp, Homo sapiens
gcaaatccaagaaggggctgtcctcgtcctccagctgttatctggaaggcccgacaacaagctcaaatacgtcaccaaatggcagaggacagcaaagcag

SEQ ID NO: 831452 - DNA, 100 bp, Homo sapiens
tgaaaaccaaactgatctctctgggttggcttcaggtaaaagatacctgctttcttcagcctatgtagacagccacaaatgggaagcaagagaaaaagaa

SEQ ID NO: 831453 - DNA, 100 bp, Homo sapiens
ttgccctgacggtggtaggatgcatcttcatggttattgagggcaagaagatgtgtcagaagaattggatacaaaactccctcttgatggtggattagac

SEQ ID NO: 831454 - DNA, 100 bp, Homo sapiens
ttctggtggggagatgaacccaacctagtgggtgtaatacatcatgaactgcagggacttttccagatttctcagaataaagtagcagttcttcttctag

SEQ ID NO: 831455 - DNA, 100 bp, Homo sapiens
cgcctccttgaagctgccgctgtcgctgctgctcgttcgagtcgcagtcgaggctttgggcaatccaactccctcccgacggctggctctgtgggcggtg

SEQ ID NO: 831456 - DNA, 99 bp, Homo sapiens
ggaagcgtgcgtccctggcgcttccttcttctcttccggcggagaggtctgaagaactgttgcccaattcaacagtgccagcattccaactttgttaaa

SEQ ID NO: 831457 - DNA, 106 bp, Homo sapiens
tccctaaggacagcttttgatttattaaatttaaatagattagtaactggcatagacaactatgggcagagtccctgtgaagcaggaagagtgagggcaggttcac

SEQ ID NO: 831458 - DNA, 99 bp, Homo sapiens
ttcaatgatgtgtgcaataatgaatcattagtatcggacacagaaacgctggttgcatgtacattcatggaggagtggtgaacatccatgaaaacaaac

SEQ ID NO: 831459 - DNA, 100 bp, Homo sapiens
gaaatagcttcttttggagaaaggattaagaagggttatcaggaaacacaatgttaggagtcagtcatgttgtcaccacaagtgttgggatgtgtgatat

SEQ ID NO: 831460 - DNA, 100 bp, Homo sapiens
cttgtacccctatgatggcatccacccggacgacttgtctttcaagaaaggagagaagatgaaagtcctggaggaatatgccatctctatggcccgaaaa

SEQ ID NO: 831461 - DNA, 99 bp, Homo sapiens
gctataatgggtatggaggaggacctggagagatggacagagacgtatgtgcgttggtctcctaagggcacctacctggctacctttcatcaaagaggc

SEQ ID NO: 831462 - DNA, 100 bp, Homo sapiens
gccgccaccgtctgaactaggatgtcccgacatgaaggaggtggtaagagtttgtgttaccagctccctgcctgtgtttctcctggggtcactgttgtca

SEQ ID NO: 831463 - DNA, 100 bp, Homo sapiens
gcagcggtcccagcggcagcagcagcggcgggaggagcctccgggcccgatctgctcaacttcaagaagggatggatgtcgatcttggacgagcctggag

SEQ ID NO: 831464 - DNA, 99 bp, Homo sapiens
atgcatgaaagcctggaatggttggcaagtcgaacaaagtcagctttctccaatctttctacatcccagatttctgatgaagaattgaaaagaagagta

SEQ ID NO: 831465 - DNA, 101 bp, Homo sapiens
agaagatcacaccactcacgctcaagttcacagccatgaatgaaccacagtgcttctacaacgagtccattgccttcttttataaccgaagtggaaagcat

SEQ ID NO: 831466 - DNA, 100 bp, Homo sapiens
gatgaacgggaccgggttcagaagaaaacgttcaccaagtgggtcaacaagcacttaatgaagatcgtgatgcttgtaaatgagaatcctctgctgacag

SEQ ID NO: 831467 - DNA, 100 bp, Homo sapiens
catttctcttcctcctcaggaagccacaaattcttcgaagccccagccaacctatgaggagcagcagcagttgcaagctcagcatctttctcatggccac

SEQ ID NO: 831468 - DNA, 99 bp, Homo sapiens
gcagccttcttggacaacagctcacttgtctacacagtcaaaagaaattatcagttcattgcctagcatagtaaatgacaaatatggaaggaaggtcct

SEQ ID NO: 831469 - DNA, 99 bp, Homo sapiens
ggggacctatcgctgcactgagcctggagaccccctgggaggcagcgccgccatccacctctatgtcaaagatcaaatttttggctctcatctgcacaa

SEQ ID NO: 831470 - DNA, 100 bp, Homo sapiens
agccagcgccttcatcctggggctgcgatgaatgatatggaacctagcaaagctgttccactgaatgcatctaagcaagatggacctatgccaaaaccac

SEQ ID NO: 831471 - DNA, 136 bp, Homo sapiens
aggctgccgcgcagagcccggattccgcgactgccggggcaccgcaggttttggactcgctgaagcgtctgaggacacagacctgccctacccaccaccccagagggaggccaacatctacatggttcctcagaac

SEQ ID NO: 831472 - DNA, 100 bp, Homo sapiens
ctcgagaaagccacacacatagggatcggccatcacaacagcagcctcttcgaaatcaggacctggtgtcaaagatgcttcatgtagaccctcatcagag

SEQ ID NO: 831473 - DNA, 100 bp, Homo sapiens
cttccattgaacttcccagcactcgaaagggaccgaaatggagagcaaagccaataggagctctgaacccaaaaagagcagcattcttcgctgagcgtta

SEQ ID NO: 831474 - DNA, 100 bp, Homo sapiens
tctgacatggctaagcaggctcaggtgcccctggcagcagtcatcaaaccgctggcaaggctgcccccagaggaggtacaccagaggatcgcttcctggc

SEQ ID NO: 831475 - DNA, 101 bp, Homo sapiens
cagagatccaagtgcgcgccctggcgggtccggaccaagggcatccgcttcgatcctgaaattccgcaaacactacgactagagtttgctaaggcaaacac

SEQ ID NO: 831476 - DNA, 99 bp, Homo sapiens
gcaattgacaggaactacgtcccggggaaggctgtcacccttgacccaaactttctggatgcttatatcaatttaggaaatgtcttgaaagaggcacgc

SEQ ID NO: 831477 - DNA, 99 bp, Homo sapiens
aatttcataaaatatgcatgctagcaaaagcacagaaagaccacttaagcaaacttaatataccagacactgcaactgctccagaaatcctgaactatg

SEQ ID NO: 831478 - DNA, 100 bp, Homo sapiens
agttctcgggatccttctgtcatagaaactcacatgagacaaatgcgctcagcttcaattgagacaaagcatggaggacacaagaatgggaggaaaggcg

SEQ ID NO: 831479 - DNA, 100 bp, Homo sapiens
agaagtgttatttcagacatatttgatggaacaatcattagttcagtgcagtgtctgacttgtgacagggttcgattgagtgaaacagacttcaaagtta

SEQ ID NO: 831480 - DNA, 98 bp, Homo sapiens
tggacagttagtcacccacctacatgttgaggtaaagtgttgagagaggagaaccagtgcattgctcctgtggtttccagccgcgtgagtccagggac

SEQ ID NO: 831481 - DNA, 90 bp, Homo sapiens
cttcagccttgatgacggccatcttcccccgatttcgggcagacaacttgaacaagctgaagaacctatgcagcaagacaatcggagaga

SEQ ID NO: 831482 - DNA, 100 bp, Homo sapiens
cttctccttcgcatccgacgcaaccggcagcagcgctgccgccgcgtcctcagccaccgctccctcttcccacgaggaggcctaccagaaactggccagc

SEQ ID NO: 831483 - DNA, 99 bp, Homo sapiens
tgttccaccttcagagcgtcacggcgtacgccctcatggggaaaatctccccggtgactttcagatatcatggaaatcaggacagtggcagttggaatt

SEQ ID NO: 831484 - DNA, 98 bp, Homo sapiens
actaaacatgaagagcttgaaagcgaagttcaggaagagtgaccctcaaaaccatctgagagacctaaaaccacacacagaccagatgcacctcaaat

SEQ ID NO: 831485 - DNA, 100 bp, Homo sapiens
tcaatctctactcgaagaagaaagagaagaaacgttttctcaggttgaagccatccttgtcaatatatttggtggtatcgtcaactgtgccatcattgcc

SEQ ID NO: 831486 - DNA, 100 bp, Homo sapiens
tgtgtttctggatgactgcctggacaagggagttcagcttttgggagactgactgggctatgaaggtctgtgcagacttttgcagacaaatcaaaacaag

SEQ ID NO: 831487 - DNA, 100 bp, Homo sapiens
ctcaagccgaagccttcagtgggactcccccagcagatacattctcatagtattattgattccacagaatacagccaacctccaggtttcagtggcagtt

SEQ ID NO: 831488 - DNA, 98 bp, Homo sapiens
ggatgcctctcagctgccacctgcctttgacctttttgaagcctttgcaaaagccttagattttagtgatgatgaaaaagagaaggaagccaaacaga

SEQ ID NO: 831489 - DNA, 99 bp, Homo sapiens
cgagcctcccaacctcaccgggcagcacaaggtcatggtaaaatcccagacagaactaagaaagactccagtgtctgaagccagaaaaacacctgtaac

SEQ ID NO: 831490 - DNA, 99 bp, Homo sapiens
gcagctggacgagctggagaaggccatcaccacgcagaacgtcaacaccaagtgcatcaccatccccagcctatccctcggccagatcctgtgcataat

SEQ ID NO: 831491 - DNA, 100 bp, Homo sapiens
cgcggtagatgatgatgatgaaggcatggagacctatgatagtatttctgctgcaagtacttctgatgttcaagatcgcctgtcagctcttgagtcacga

SEQ ID NO: 831492 - DNA, 100 bp, Homo sapiens
ggagagagccatctcgccaaacaaagtgccctactatatcaagtgttaagtgtgatgcttccataatacatttggatgctgtcagctaagttcacttctg

SEQ ID NO: 831493 - DNA, 100 bp, Homo sapiens
ctgaaaagtcgcagcgagctggagccgccggagcataatgggagtgttgagtaacaagtgtggctttcagctccagtatcaaatgattttttcaatatgg

SEQ ID NO: 831494 - DNA, 100 bp, Homo sapiens
agcggaacaaggacacaacgtcactctcatggtgcaattagaagagggtcgactgagtgaggctgaagaggcgctgtacctcattgccaagaggaaccgc

SEQ ID NO: 831495 - DNA, 100 bp, Homo sapiens
tgttattgcacttgtgcgaacaaagcttttctgatatgatgggaaatacaaatgaaccaagcacacgtgtccgagggccacctacagatgctcctgcagt

SEQ ID NO: 831496 - DNA, 100 bp, Homo sapiens
gaggagcagggcctgactgcgcaggttttcaaaaacattaagactgttatgaaagcctttgagctcattgatgttaacaagactggactggttcgaccgc

SEQ ID NO: 831497 - DNA, 138 bp, Homo sapiens
acgagagaggcaccgggatcgtgaccgagaccgtgaccgagagcgtgaccgagagcgcgaatatcgtcatcgttagaagatgcagagaggtgttcataaagagcaatatcagatggcaccccaaaaaaggatatgaaa

SEQ ID NO: 831498 - DNA, 100 bp, Homo sapiens
gaaaactgggtcgagcggtttcttttggctcacaattatcctagagtgaggacttgaactcttggtgtaataacagaagctacaataaaaatcagaccag

SEQ ID NO: 831499 - DNA, 100 bp, Homo sapiens
ctttgatctaagggttcagcctttcaatgtgacacaaggaaagtattctacagccggtctgtgtgatattagtgaagggactgttgttccagaggatcgc

SEQ ID NO: 831500 - DNA, 98 bp, Homo sapiens
agaaatggccaattgtacaggcctttgcacttgagggcattggaggggatggattttttaccatgaaatatgaggatctttcgaagatggtttggctg

SEQ ID NO: 831501 - DNA, 98 bp, Homo sapiens
ggggaacggaggccagagctgcgtttttcagaagaagtgaagtcaagatgaagaaccatttgcttttctggggagtcctggcggtttttattaaggct

SEQ ID NO: 831502 - DNA, 131 bp, Homo sapiens
acatgttaggctatactgatcatcagttcactgagctcacgcgcctgtacctcaccatccacagattgtcactgctgttccaagggcacacgcagagggatttggaattcctggagagttgcctttgtgag

SEQ ID NO: 831503 - DNA, 99 bp, Homo sapiens
catctatgaggagaccaaaataaaactaacagtctatgatgtcaaggataagtctcatgacaccaatccattccaatatatggccatgtggctctttgg

SEQ ID NO: 831504 - DNA, 100 bp, Homo sapiens
gggtggtctcagcttatctacaatcatatcacaactaatagggatgccaaaggaaaaatatgatcctccagatcctcgcagaatttataccatcatgtca

SEQ ID NO: 831505 - DNA, 100 bp, Homo sapiens
cattgagaagttcagctgttgtagagggtgggcttggtggaatcaaaaatccgaatcctggttggaagcttggagaagaatgaatttattacactggctc

SEQ ID NO: 831506 - DNA, 100 bp, Homo sapiens
atgcaatttttacatcaccaacaggtgaagaaaacctcatgaatagcaatcacagagactcggagagcatcactgcttttctgggagaagaggctacaag

SEQ ID NO: 831507 - DNA, 50 bp, Homo sapiens
ggagcatcccggctggagcagagccagatatgaggccccaggattcctgg

SEQ ID NO: 831508 - DNA, 100 bp, Homo sapiens
aaaataacccagtgaagatgataaagcatgtcagggaacttgctgagcaactattcaaaaatgagtgatcgacacaggaattgccctatttgtcgcctac

SEQ ID NO: 831509 - DNA, 100 bp, Homo sapiens
caaacgcctggatcagccacaaatgtacccccagtacacttactactatcctcattatctccaaaccaagacgaagagagattgcagagagagagcgtcg

SEQ ID NO: 831510 - DNA, 99 bp, Homo sapiens
aatcagcgagactccgtgggcgtaggaccctccgagccaggtagtaaacctattgatggcaattttgctgactgtggaagtgactcatccaaactccat

SEQ ID NO: 831511 - DNA, 98 bp, Homo sapiens
gttcgctgaggagcagctgcgagccgaccatgtcttcatttgcttccacaagaaccgcgaggacagagaacccagcgggtgccgcttctccacccgag

SEQ ID NO: 831512 - DNA, 100 bp, Homo sapiens
cttatgaacgccttgttgcccagttccccagttctggcagattctggaaactgtacattgaagcagagtattggatgaacgaatatacctcatccattgg

SEQ ID NO: 831513 - DNA, 100 bp, Homo sapiens
gtgcatgcttagaaatgtgtcagttcgtcttgctcagcagatatctgatgaggttattatcaacccttactttgctaagcaagaaactgaactgttacaa

SEQ ID NO: 831514 - DNA, 100 bp, Homo sapiens
acaagaaaagctgcacttgaggcccagaatgcactgcacaatattaaaactttacctggggaaacttggatttaactggccagaagcaggtattcaaagc

SEQ ID NO: 831515 - DNA, 100 bp, Homo sapiens
cctggatgttcctggatgcctgacatcacattgatacatgctggaggtctggctcagataacaacgaacttgatgcaagtgataggtttgccaaggtcag

SEQ ID NO: 831516 - DNA, 99 bp, Homo sapiens
agacagatctttgatgaagatcagaatgatccccttctgccaggtggatgaaaatactaggaaaagtttatttaagttacgttctacatgggatgaaat

SEQ ID NO: 831517 - DNA, 98 bp, Homo sapiens
acaatgtcggggatggacctccagatttccttactggtgcagcggaactgctgcctgacgctctgcaacttcagcatccccgaggagctggaattcca

SEQ ID NO: 831518 - DNA, 113 bp, Homo sapiens
cacatggcggcagatgtcagctggcatagtctgggccttgaacaaggattccttaggaccatgggagctattgtaaaccatggctgtgtggatacaagctcagcagctccaag

SEQ ID NO: 831519 - DNA, 100 bp, Homo sapiens
atacaacacaattataaaatgtcagcttttaaggcaggtagatcaatctacaacagcttttatgtgtattgcaaaggcccctgtcaaagagtgcagccgg

SEQ ID NO: 831520 - DNA, 100 bp, Homo sapiens
aacagataactgaggacaatggacctgcctgggcatagacttccttaagatttacattggtgcagaagcatacagtggaatttaaccaagtggcgatggc

SEQ ID NO: 831521 - DNA, 100 bp, Homo sapiens
ggcccagggggcccaggagagtataaaggcgatgtggagggtgcccggcacaaccagacgcccagtcacaggcgaggagctggaagctatcaaagctcga

SEQ ID NO: 831522 - DNA, 100 bp, Homo sapiens
atacaagaatgtgaaatttgttctcaagcacaaatcacaagatttctgttgtgaaggatgtggctctgccatgaaggatgtcctgttgcctttaaaatct

SEQ ID NO: 831523 - DNA, 100 bp, Homo sapiens
gaaccttggagggaatgcgatcagatctgtccagtttgatgcctttgtgaagatgaagaatcttaaagagctaatcccgtcagtgctgggtgaggagctg

SEQ ID NO: 831524 - DNA, 98 bp, Homo sapiens
tgcaaatgaagttgatggaattacactgtgatacgactgactgtagacgttacatccaagaggaaataatccaggcaaggaagcacaagctgatcaag

SEQ ID NO: 831525 - DNA, 100 bp, Homo sapiens
gtcatcacccgcttatctgagactagtggcctcggttcttcctgtgtcctgtgtttggagagagatcacaggaggcctaagaaagctgtcaagataaaac

SEQ ID NO: 831526 - DNA, 99 bp, Homo sapiens
gcgcggaatcctttggatgctggtgctgctgaacccattgccagccgggcctccaggctgaatctgttcttccagccgtttccctggggagatggtaac

SEQ ID NO: 831527 - DNA, 100 bp, Homo sapiens
ggatgtttcggaatgggcattgtcgccaattttcagacaggggcaagtgtccgagtggtgaatcagctacttacagagatggatggtctggaagcacgcc

SEQ ID NO: 831528 - DNA, 100 bp, Homo sapiens
ccgcgctcggtccagtcttcccggctggaagaattaaacaaccaccatgtcgagcaaaaaggcaaagaccaagaccaccaagaagcgccctcagcgtgca

SEQ ID NO: 831529 - DNA, 99 bp, Homo sapiens
cagctgctgcaatcgcttgggagagctcctgggccacccctcctttcaggtcaagggacatttgcatgaccgctacggacagctggtgaatgtctacac

SEQ ID NO: 831530 - DNA, 100 bp, Homo sapiens
ctgtgacagctgcctccaggtgtttgaatcgctgagcgatatcacagaacacaagattaatcaatgtcaactgacaggtccttcacagggtggtccaggt

SEQ ID NO: 831531 - DNA, 101 bp, Homo sapiens
caggacgccttctgcaactccgacatcggagcagcagccaagctggacagatgacctgcctctctgccacctctctggggttggctcagcctccaaccgca

SEQ ID NO: 831532 - DNA, 100 bp, Homo sapiens
agcgccgtcccgtccgacagccaggcccgggagaagtggtatcacggaaaacttgacagaacgatagcagaagaacgcctcaggcaggcagggaagtctg

SEQ ID NO: 831533 - DNA, 100 bp, Homo sapiens
agcagtcctaccatgtcagccttcccagtagctgggaccacagttactggctgaccaacaaagttcctatcaaaagacccagcacaggtcttctcatgta

SEQ ID NO: 831534 - DNA, 98 bp, Homo sapiens
tcttcctgccttggcctcccagagggttggaattgcagatgtgagatttattgacgttggcggctacaaacttcttaacaattggctgacgtattcaa

SEQ ID NO: 831535 - DNA, 99 bp, Homo sapiens
ctaaactgagggagctcatcaggctaaaggatgagttaatagctaaatctaacactcctcccatgtgatggcatcagctgagaagggaaggaagcccat

SEQ ID NO: 831536 - DNA, 100 bp, Homo sapiens
cttttcgtaaagggaagtcatttctactggacttcatgcttagatacatgtataacaagaagtcaatgaaaggattctattttgcaaagctgtattatga

SEQ ID NO: 831537 - DNA, 100 bp, Homo sapiens
gccaggtttactggagtaggtgttagtaaggttatgatgtgattgctcaagcccaatctgggactgggaaaacggccacatttgccatatcgattctgca

SEQ ID NO: 831538 - DNA, 100 bp, Homo sapiens
gcaggagatcgagagcaccgacaccgcctgtgtggggcccaccctccgatgagcgtgaagccgtgcagaagaagaccttcaccaagtgggtcaattccca

SEQ ID NO: 831539 - DNA, 98 bp, Homo sapiens
agaagcctgaaaagtcgcagcgagctggagccgccggaggtataagtgtgctagcggagtgtctagattgtcctgaattgaaagcaactgcagatgac

SEQ ID NO: 831540 - DNA, 100 bp, Homo sapiens
gtgccgattcttttacctgagaaatgctacgaccaacttttcgttcagtgggacttgcttcacgtgttccttgcctgtatctccccttggttcaatagct

SEQ ID NO: 831541 - DNA, 100 bp, Homo sapiens
tcattcggttatcaagtattacccagagcaagagccccagctgctcagcggcatcggccggatttccctgcaggtctggtgagctgtaccttctttctgg

SEQ ID NO: 831542 - DNA, 100 bp, Homo sapiens
acctcaccaaggccagcacataggagagatgagcttcctacagcacaacaaatgtgaatgcagatgcaatcaatgccccagtcacctgctgttataactt

SEQ ID NO: 831543 - DNA, 100 bp, Homo sapiens
gcgatggaagaggatcaggagctggagagagatccagaaagtgagacagataatgactcccaggaaatatttaagttggcaaaagatgtgctgattcaag

SEQ ID NO: 831544 - DNA, 100 bp, Homo sapiens
cgggcaccagggcttcgccagcgggccagcaacaaagtgcaaggaacgaggcccagcaaaaagcagagacggtacagggccagaaggatctgagagagtg

SEQ ID NO: 831545 - DNA, 100 bp, Homo sapiens
cggtacatgatgctggccagggaggccgagatgctgttcacaggaggctacgggctggagaaggacccgcagagatcagagattttattccctcaaagtt

SEQ ID NO: 831546 - DNA, 100 bp, Homo sapiens
ctggaggtgatcaagggagaccatgaatttactgactacatgatacggtccaatgagaggctaatccaaaaatgtgattttcccattatgaagttttcac

SEQ ID NO: 831547 - DNA, 100 bp, Homo sapiens
tgatccctacggtggtggtggtaactcacacttgtttcagtactatactggcaattgctggagaagattttgcaattgttgcttctgatactcgattgag

SEQ ID NO: 831548 - DNA, 100 bp, Homo sapiens
gatgtctttaatgaaaagggatggaactacattcttgagatcctatagcaatggaactcagcgatgcaaatctgcaaacactaacagaatatttaaagaa

SEQ ID NO: 831549 - DNA, 98 bp, Homo sapiens
agagagggccttctcccgcttctctcctcctcctctccacgctggggggatcctggatataagcttaccaaagtcagcaacaatatgctacacagctg

SEQ ID NO: 831550 - DNA, 99 bp, Homo sapiens
gaggagggcaagaagggcaagaagacggaatcagtccccaatgcctggaaattcctcattggattactgtgttttaaacagaatttcgtgaacagcctt

SEQ ID NO: 831551 - DNA, 100 bp, Homo sapiens
aaatgataaaaaagtggctgctattgaagccctaaatgatgacacggcatcagcgaggagatacgcatcctctaaccttagatgaaattttggatgaaac

SEQ ID NO: 831552 - DNA, 98 bp, Homo sapiens
atacacacacctgttgccattatagagctggaattaggcaaatatggacagaatgaactctggaagcccagccagggacaatgcaccttcacagagat

SEQ ID NO: 831553 - DNA, 98 bp, Homo sapiens
gatagttctgtgacttcatcttctgatataaaagaccagtgtcttaagtaccaggcaggaatgggccacttgtgtgtaacaaaagatggactgcgctt

SEQ ID NO: 831554 - DNA, 100 bp, Homo sapiens
ctgttatcccagttctacaagaggaagaggatcacctagcccgggtagaagaggcaatcacccgtatgcttgtgtgtgccctgaaaactgcagagaatcc

SEQ ID NO: 831555 - DNA, 98 bp, Homo sapiens
gattgacccaactccggagcagtggaagcagattgcttctgtcatgaaggacctgttcactgttcaaaaaatacacttaatggagatttggcatcagc

SEQ ID NO: 831556 - DNA, 98 bp, Homo sapiens
ctgaccgctcaagagattctacatcagtttggtttcactcagaccggttccaactatgggagcccacgccccgcccatgccaacatgaatgccaatgc

SEQ ID NO: 831557 - DNA, 99 bp, Homo sapiens
ggatagcgtggagtgacggtgccaccgcggcgcagttgctggagaatgtaaccctaatccataaaccagtgtcgttgcaaccccgtgggctgatcaata

SEQ ID NO: 831558 - DNA, 100 bp, Homo sapiens
tgaggtccaagggatgcaagaagctctgcttggtactactattatgaacaacattgttatttgggacagagcagaatgggctgatatagatccggtgccg

SEQ ID NO: 831559 - DNA, 98 bp, Homo sapiens
ccagccgaccttgagctccaggagttcgtctcttacgtctgcggaagtgcagctgcctcagttcttagcgcaggccagaacacaaagcgtgaatccgg

SEQ ID NO: 831560 - DNA, 100 bp, Homo sapiens
ctgcggcaaacagtacaagtactacactccctaccaggagcatgtggccttacacgcccccatcagctactgcagcactggggtgtcagttgttggtccg

SEQ ID NO: 831561 - DNA, 99 bp, Homo sapiens
cgtggaccgggccctggctgagggagtattgctgaggacctcacaggagcccacttcctcggagaccagcagaagtagacactgtggatgcattccagg

SEQ ID NO: 831562 - DNA, 98 bp, Homo sapiens
aagtcttgtctgcaatcatcaacaaaacaattattccccgacttacaggtatccatcatcccacgtggcaaaggactaggttatgctcagtatttacc

SEQ ID NO: 831563 - DNA, 100 bp, Homo sapiens
atatttgtgggatttgtctgacagaacgcaatggaaacagagcgtggcattcgctccatctcccccagatccttgaggaatcaccacactgtcttccaca

SEQ ID NO: 831564 - DNA, 100 bp, Homo sapiens
atgccctcttcgtggaagccatccacacagacaccgacaactggcacagcctccaggttggcgggctcatctgcgctggggttctgtgcgccatgggcat

SEQ ID NO: 831565 - DNA, 100 bp, Homo sapiens
caggagcaacactatcagcagtacatgcagcagttgtatcaagtccagcttgcacagcaacagaaccctcggcctcaggaaagtcggacagtattcagtg

SEQ ID NO: 831566 - DNA, 98 bp, Homo sapiens
ttatttacagatttgttcgtactctttttagtgctgcacagctaacagctgaatgtgcaatagtaactttggtaatgaaagcatgggatgctcatgtg

SEQ ID NO: 831567 - DNA, 100 bp, Homo sapiens
tggctgcccctcaggacccctgctacgtggagaaaacctcggataagatggctctgagtaaatcaatgcatgcaagaaatagatacaaggacaaacctcc

SEQ ID NO: 831568 - DNA, 101 bp, Homo sapiens
gagtgacatcaaaaacttctgttccgctgtgcaatatggcaacgctcagcttacaaaacactacacagcaaaataatgatctgctagactgctaacccgag

SEQ ID NO: 831569 - DNA, 100 bp, Homo sapiens
tggctcttattgctgaaagactacccatgctatatccagaagtaattcaacagggtatgagtattatagaacaattagaccctgtatcttttagcaatta

SEQ ID NO: 831570 - DNA, 100 bp, Homo sapiens
ttccacaacatctgctgaagacatttgatgagaaggagttagaggtttattgatcatctaatggtgatgtttggtgaaacaccctcttgggacctagagc

SEQ ID NO: 831571 - DNA, 100 bp, Homo sapiens
cttgaaaagaagtcagctgttgcagataaacatgaattgctcagccttgccagcagaaggagaacttatggattgtgatggaaaatcagaatctagtcct

SEQ ID NO: 831572 - DNA, 100 bp, Homo sapiens
gtagcaccaggatatgtcttgaggcaagtgaggcctatctggttggcctttttgaagacaccaacctgtgtgctatccatgccaaacgtgtaacaattat

SEQ ID NO: 831573 - DNA, 100 bp, Homo sapiens
tttacttacaatgggagatctagtattgcagtcagagatcagtagtgaacagggtgatgcacccagtcagcttgaagagtttcaaatggaccctaccact

SEQ ID NO: 831574 - DNA, 98 bp, Homo sapiens
gcccgtctgcatggcccactgcatccgcctggcgctcatccgcttccacgtcaaggggctttgaccacgacctttgaagagcttcattttgagatcaa

SEQ ID NO: 831575 - DNA, 98 bp, Homo sapiens
ccttttccctctccctttccctaaggagagcttgtttcatatccatatcccactgtattcctgctaatctgctaatgcagtaaattggaggaaaactg

SEQ ID NO: 831576 - DNA, 98 bp, Homo sapiens
ttattatggctgctgttgtccaacagaacgacctagtatttgaatttgctagtaacgtcatggaggatgaacgacagatgtccggtctgtgctacgac

SEQ ID NO: 831577 - DNA, 98 bp, Homo sapiens
caggacacctttatccagtttcctggatggaccaagtccacagtttggaaagagttgctgttagcaaccatcggggaacagttcacagactgtgccgc

SEQ ID NO: 831578 - DNA, 100 bp, Homo sapiens
taacggtggtggagaacccaaaggccctttctggttactgtggctttatggcagccaacctttatgctcgttccatatttggtgaagatgcacttgcaaa

SEQ ID NO: 831579 - DNA, 100 bp, Homo sapiens
cgacctggcggtggggctgcggcgcctgggactgcaccgcaccgagggcgagctccagactgggccagtgccattcgcgtcgcagctctggactgcatgg

SEQ ID NO: 831580 - DNA, 100 bp, Homo sapiens
cacagtagcagctggaaccatgacaggcatgttgtataaatgtacagttctgtggctcctgatggatctgagaagatggacgtggaggatgaaaatctgt

SEQ ID NO: 831581 - DNA, 151 bp, Homo sapiens
tgcagtgtatgatggacacggtggacctgcagcagctgatttctgtcatacccacatggagaaatgtattatgaaactggccaagaagcggaaagagaccatgagcagcacccgacaggagatgactgtgatggtgaactcaatggacaag

SEQ ID NO: 831582 - DNA, 99 bp, Homo sapiens
gagaccccgtcggacccatggtttccagtgcagcgcggagtgggcgatgccagcgtgccaggtgtagacggggcactgccttcagagcaggtcctgcca

SEQ ID NO: 831583 - DNA, 98 bp, Homo sapiens
cagtccgggcaggggcagcgggagccggccggatttcagcaacgtccctgatatcacaacaggtctgaaaaggagtcagacagatggcactctggatc

SEQ ID NO: 831584 - DNA, 100 bp, Homo sapiens
cgctgggacctaccctgactacgggagttgggaggacccgggacaccgcacagccgggaaatggatgagagggccttaccaaaaggagatttcttccctc

SEQ ID NO: 831585 - DNA, 100 bp, Homo sapiens
agtgtctgtgtcccactggtttctctggaaacctctgtcaggtccagatacttcgtctgcttcggatcctgggccggaaccacgaggagagcagtgagac

SEQ ID NO: 831586 - DNA, 100 bp, Homo sapiens
gtatcacatcaactccgtccatgctgaggtggaacggcacatgtgtgatggggacattgttatcttcaaccggcagccaactctgcacaaaatgtccatg

SEQ ID NO: 831587 - DNA, 98 bp, Homo sapiens
acagtcctcgtcagcactgactttcagctatggaatcgaaatgtcctggccccgtacgcggtgccctcggagctggtgctggtggaggagatcccgcg

SEQ ID NO: 831588 - DNA, 98 bp, Homo sapiens
ccggagcttctcagaagacagagggttttcttttgaggcagcaagctcattatgatgctatggataatgatatcgttcagggagcagaggaccaggga

SEQ ID NO: 831589 - DNA, 100 bp, Homo sapiens
gcaaggaacgctttctggagctggcacctgactttgtgggtgacattctctgggaacatctggagcaaatgatcaaagtgtgctgcaggaaagaatttaa

SEQ ID NO: 831590 - DNA, 99 bp, Homo sapiens
tggtcactctctgaaaagttcaacttgagtgacagctggagtatcagccttggaagtatatacgccaaaagaaatcttcgtggcaaatggtacacaagg

SEQ ID NO: 831591 - DNA, 100 bp, Homo sapiens
cttgaacttaatacagcaagaaagaccatcaagtttaccaacttcagattttcctgtccttgatcccagctggactgctcaagaagaaatggccctttta

SEQ ID NO: 831592 - DNA, 98 bp, Homo sapiens
tgaaagtggaggctgcgaaaataggcacatagctggcaacctggaataaaaaatccctatcgtggtgttgttgtgtggcctgttcctgaaaacattga

SEQ ID NO: 831593 - DNA, 100 bp, Homo sapiens
tttaagcccccatatctaagcaaaggaactgctaatggcagcattagccgctgttgggcctcctaatcctcgggcagatccagagtgctgcagtattctg

SEQ ID NO: 831594 - DNA, 100 bp, Homo sapiens
aaaaagaatgcacattaaagccatgcccgaggatgctaaggggcagacccctttgctgatgcaagtaagggtgatgacctgcttcctgctggcactgagg

SEQ ID NO: 831595 - DNA, 98 bp, Homo sapiens
tctgatatgctgattccacgttgcaaaagtgaaaatttacactgactgggccaaccactacctagcaaaatcaggccacaagcggctgatcaaggact

SEQ ID NO: 831596 - DNA, 98 bp, Homo sapiens
tgcggggcatcaccaaaatgaggaaaggaaacagattcattgtctgtctgaggatgagttaagttcttctacaagttcaactgataagtcagatgggg

SEQ ID NO: 831597 - DNA, 100 bp, Homo sapiens
agcagttacttccactcaagaatcgtaggccaggctgatggagagctgaacattactcttccagaagagaccaccatgcgggacctgtcccagatgctga

SEQ ID NO: 831598 - DNA, 100 bp, Homo sapiens
acttcgaccagcttcatcctcagacaggacatggatttgattgacatactttggaggcaagatatagatcttggagtaagtcgagaagtatttgacttca

SEQ ID NO: 831599 - DNA, 100 bp, Homo sapiens
ccacagcaagctcccttatatactgaccccaattcttggcattcagaaacattctcaggaaggtatggtgtttacacggtttctagacaccctccttgaa

SEQ ID NO: 831600 - DNA, 100 bp, Homo sapiens
gacagcagagatggagcatcttgtgcagagttggtgtcttttaaacatcctcatgttgcaaacccacgacttcaagaaaccactgattgcttgtgtggag

SEQ ID NO: 831601 - DNA, 100 bp, Homo sapiens
catatcagaaagatggcatatcagatatgcaagtctgtgaattaaacagcataccaattgtgacagagcagcccctcatctctgctggagaaaacagagt

SEQ ID NO: 831602 - DNA, 100 bp, Homo sapiens
gccgccgctgggcgcgggcttggctgactttgcccaccctgcgggcagccccttagaactgccattggatgtccagaatcccctgtagttgataatgttg

SEQ ID NO: 831603 - DNA, 100 bp, Homo sapiens
agactacggtttgagctcagatatcgggctgaacggtcaaagacattcacaacatggatgtgggctcgggatgagtttgaaggcctcttcaagcagccag

SEQ ID NO: 831604 - DNA, 143 bp, Homo sapiens
agaacaagggatgctgaggcttctgatcccagccgccaggcagttttacagggctctgttaacaaatgacagggtagccacccagctggttgtgagcattcgtgtacaaggagacaaacgcctcagcagcctgcgccgctgct

SEQ ID NO: 831605 - DNA, 100 bp, Homo sapiens
tgggttcgttgtatttgtgacatctgtgggtttaatccaacagaagaagagcgatcgtcttctgatcaaaggaggtaaaattgttaatgatgaccagtcg

SEQ ID NO: 831606 - DNA, 100 bp, Homo sapiens
caaaaactaccattcgcctgatgaactctcagtggatgatctcttcagggaagcagatatcgaacccaatggcaaagtgaagtatgatgaatttatccac

SEQ ID NO: 831607 - DNA, 98 bp, Homo sapiens
agatgggcacacctggctatcggggtgaacgcatcaatcagctcatccgtcagctgaactagacccagggtcttgctctgttgcccacgctggagtgc

SEQ ID NO: 831608 - DNA, 98 bp, Homo sapiens
ccatgcaagggagcagcaggagagacagcgagaagagcttctgtctcgaaccttcaccactaactgaacagcctatcccgctccaagtattgttaagc

SEQ ID NO: 831609 - DNA, 100 bp, Homo sapiens
ctcagggtggagatgtcagcccttcagaaacagtattacaatgagaaagatcagtctaaagaaaaggagaagaaagtgaaaaaaacaattccttcctggg

SEQ ID NO: 831610 - DNA, 117 bp, Homo sapiens
acggcgacttcttcgccgccgccgaaggcccgcagcaatgaaaacctcgacaaaatagatatgtctttggtgtgaccgcaacaagggaaaacatggcttatactgtggaatgcctgc

SEQ ID NO: 831611 - DNA, 100 bp, Homo sapiens
agtcactgcagcactggtggaacttgaggatcaaaatggtttcaatcccagaatactatgaaggcaagaacgtcctcctcacaggagctaccggttttct

SEQ ID NO: 831612 - DNA, 98 bp, Homo sapiens
ctcattcagaacttcattggcagaagttgactgagatcagaggccctgtgatgatcgtgtcagagccatcatcaaccactttaaccccaaaattgagt

SEQ ID NO: 831613 - DNA, 99 bp, Homo sapiens
tctgttccctggaggactttctctggtacccgggctccacattcatggatcatgtgttacgctatcaggacactccaggagtcaaaatgattgtggttc

SEQ ID NO: 831614 - DNA, 98 bp, Homo sapiens
gcggagggcacagtgttccctaaatctatagaaacacctaatgtcagggcagaccccttcaaagaactaaggagtcttgtggataccgtatatgcatt

SEQ ID NO: 831615 - DNA, 100 bp, Homo sapiens
ccatcaccagaacccagcagcttgccagcatcgttgcaggtttgatctgtggatgaaatgaatcatgattttcaagctcttgcattagaatctcggggaa

SEQ ID NO: 831616 - DNA, 99 bp, Homo sapiens
ttccagagagcggcggaaaggataagcctcgacttagaagctaccgagttaccctaagaaaggttttggaaggtgacaatgaaatgtgaagaagttaca

SEQ ID NO: 831617 - DNA, 98 bp, Homo sapiens
gggatttttgagctggtggaagtggttggaaatggcacctatggacaagtctataagctcatccaggtgctgttggaagatgaaaccactgaaagcgc

SEQ ID NO: 831618 - DNA, 100 bp, Homo sapiens
agcgactgcaggcagaagctgagacggctaagtgacatcgatgtggcccagcagttcagcttgaatcagagtagagtggaagagataaccatgagagaag

SEQ ID NO: 831619 - DNA, 98 bp, Homo sapiens
aaaaactgggaagatgtaccaggagaccaggtcaagcccgaccaatacactgaggccctggcccagagggacaaattgttgtgtccactgtatcctgg

SEQ ID NO: 831620 - DNA, 99 bp, Homo sapiens
tggaaaacaatgcccagactcaatttagtgagagcacagaaaattctatactatccattgcactggttacttgagaagctggcctccaaatattgttgg

SEQ ID NO: 831621 - DNA, 98 bp, Homo sapiens
gaaaaccagttattgaatatcaagaggaggagttgttggattctcaaagttggattggtggaaacaatgaaccattgacaggctttacatggcgaggt

SEQ ID NO: 831622 - DNA, 98 bp, Homo sapiens
ggggcccgccgccccgcgggggagggcggagctggcgcggcccctagctttctccttctggtgtggggcccgagaatgattgaagatagtgggaaaag

SEQ ID NO: 831623 - DNA, 98 bp, Homo sapiens
aagtgaaccggcaaatgctgcaggaactggtgaacgcaggatgcgaccagaagtgacagtgtgttcgtgttcttctgaggtgtcagcaaagtttgttc

SEQ ID NO: 831624 - DNA, 100 bp, Homo sapiens
gaaggtgggcgcaggtgaggggccgaggtgtgcgcaggtcgcaatggaagaagagatcgccgcgctggtcattgacaatggctccggcatgtgcaaagct

SEQ ID NO: 831625 - DNA, 98 bp, Homo sapiens
gaaactgatctcaaacagcgacgagagatccgtgcaggcacagccttttacattgatcagtgtttgagcaacacacctccacttactgagtatttcct

SEQ ID NO: 831626 - DNA, 100 bp, Homo sapiens
gaggagacccagctcttccaggactttgagccagtccagaccctgctgctgtcttcaaagaagatgccatggacaatattaccaggcagaaccaattcta

SEQ ID NO: 831627 - DNA, 99 bp, Homo sapiens
tcagctaggactcatgactactgaggattctgtggcagtgcccaggtggtagactcggaaaagtgaagggtccaacattccgaatatcaggagtacagg

SEQ ID NO: 831628 - DNA, 99 bp, Homo sapiens
ccagtcccttgtgtatggcaaagtggatagcttctggaagtgaatggtagtgtctagaaagggtatgtcccttcaagagagaggtgccaatgtccaacc

SEQ ID NO: 831629 - DNA, 100 bp, Homo sapiens
cgcgagatctctgtctgtggagatgtgtacaccttgcgagaaaccaggtcggcccagcaacgaggaaagctgacaaatcttcctattttcaagctgaaag

SEQ ID NO: 831630 - DNA, 100 bp, Homo sapiens
tatttttatcctttttcccctgaagctcgtagagaaatgtgctgggattaaccccttggtgtcttcagtctttcttccggccaggacacacactccttgg

SEQ ID NO: 831631 - DNA, 100 bp, Homo sapiens
caccctggccctcgcggtggctgcctttagagaagttgccccagtgcaaggcactgcattcgacctgagaaagccagtggagcttggaaaacacctgcag

SEQ ID NO: 831632 - DNA, 98 bp, Homo sapiens
ttgcagaaaatcctcactctgagtacggtctcacagacaacgttgaggctaaagaattacctccaaagccattgtcaagaccacagcagtcatctgca

SEQ ID NO: 831633 - DNA, 100 bp, Homo sapiens
gaacattggtctaaagtctttccaaaaggtcaaggttcacaaggtgtcagttgtacccgaggcgttctcagcagcagcaagtacctgtggtggatttcca

SEQ ID NO: 831634 - DNA, 50 bp, Homo sapiens
tcagcgaccgggagaacatagacggccctcgggaccaaggatcacgtcat

SEQ ID NO: 831635 - DNA, 100 bp, Homo sapiens
gagctacagctgcgggagagccgggtaccggccgtggaagcggccaccgactactgtcagcagctgtgccaggtaatgactttacatgagtttggaactg

SEQ ID NO: 831636 - DNA, 100 bp, Homo sapiens
cccttctgtcagcaggacaatttccctgaactaagcgagggcttcgtgggacacatatgcaacatgcctatgatttttacaagcctgatatgctatctga

SEQ ID NO: 831637 - DNA, 100 bp, Homo sapiens
gaggacacgggctgcaacctgcagcacatcagcgaccgggagaacatagacgatgagattgtggggaacctgggtgaaggcacctttggcaaggtggtgg

SEQ ID NO: 831638 - DNA, 101 bp, Homo sapiens
ccctgctgctggccagctgcagcctcagccccacaagatacaatgtctctttgctatatgaccttgaaaatcttccggcatccaaggattccattgtgcat

SEQ ID NO: 831639 - DNA, 102 bp, Homo sapiens
aacacttctgaattgggagattgcctcggacctccagacgccgaacatctcagtttgcacagcggaaaggggctggccgtgtggtgcacatctgcaatctcc

SEQ ID NO: 831640 - DNA, 100 bp, Homo sapiens
ccgacccgcgggcgaggccgggtacctgggctgggatccggagcaagcgggcgagggcagcgccctaagcaggagatggcagcagaaaaggccaaagcag

SEQ ID NO: 831641 - DNA, 98 bp, Homo sapiens
cgagcgcttgatgtgcgcggagagcaatcgccgggacagctgcaagcttgccttgcgccatggactggcagccagacgagcagggcctgcagcaggtc

SEQ ID NO: 831642 - DNA, 100 bp, Homo sapiens
tacttttgagtcggtggactgaacatgactgatgtatataggtttccactgtatccaaaaggaggggagaagttgcagtttgattatggtgtctatcttc

SEQ ID NO: 831643 - DNA, 98 bp, Homo sapiens
gagacattgtcactgttgtgtcacctgcgctgctggaccgagagtgtggtgctcaccttgggcacatttttgatgatgggcctcgtccaactgggaaa

SEQ ID NO: 831644 - DNA, 98 bp, Homo sapiens
tgggaagatggcgaaggtctcagagctttacgatgtcacttgggaagactgaagtggccgcctccccatcgggtgcctggcagaggctccatagagtc

SEQ ID NO: 831645 - DNA, 100 bp, Homo sapiens
ttgttcctcaccaacctgccagaggagaccaacgagctcatgctgtccatgcttttcaatcaccccacaggagacaggatccgaagcaaagttgagctga

SEQ ID NO: 831646 - DNA, 99 bp, Homo sapiens
ctcgttgatgagagcattcgaagtgacctcagcagggcatccagagtattgggaaagggtcgttgtggtgcatagacccagagtatagacaaaatctaa

SEQ ID NO: 831647 - DNA, 100 bp, Homo sapiens
ctccatctacctaggcctctcacaagtcagaatgaaggaacgatttccgtagttgaaggagaaacattgtatgtcatagaggaagacaaaggcgatggct

SEQ ID NO: 831648 - DNA, 100 bp, Homo sapiens
caatgctggtcaccccagctcctcagcagcatgaagaagaggacctggatgatgatgtcatcctgacagaagaatgcttctagtcacaacagacaccctt

SEQ ID NO: 831649 - DNA, 100 bp, Homo sapiens
cctcagtgcattagaccgctgctattctgtctactgcaaaaagatccatgcccagtggcagaaaggtgaacttctagatccatgtggttatatcagtcct

SEQ ID NO: 831650 - DNA, 100 bp, Homo sapiens
cagagaagagtaagaggttctgaatatgatgattttttggacgaattcatggaggcagtttcttccaagctgaacatgaactaaatctggcaagaaaaat

SEQ ID NO: 831651 - DNA, 98 bp, Homo sapiens
gagcacagaagagggagaagtggctgctctgcgcctcacggccagatcccaggaggtgaaacagcagaaatgcctgacatgtatccccctggagagta

SEQ ID NO: 831652 - DNA, 98 bp, Homo sapiens
cattatccaggagtccgccctggactaccgcctggatcctcagctccagctgcactgctcagacgagcacctgttccgcgagcctgagaagaggcccc

SEQ ID NO: 831653 - DNA, 99 bp, Homo sapiens
ccctgttagtctgactttgaagaagaccagccttccagactcgcttggtgccctgacagatgttcgcacacaagccatgtaccagatgatggatcaagg

SEQ ID NO: 831654 - DNA, 127 bp, Homo sapiens
cgcagcctgcctttccttccccctcggaaaatggttcccactgccgggcgaggttacgactatggctatgtctgcgtggagttttcactcttggaagatgccatcggatgcatggaggccaaccagg

SEQ ID NO: 831655 - DNA, 98 bp, Homo sapiens
gcaaatgtgactgccatggagtgaagggacaaaaggaggaggaagccaagaatctggtgagcgaagccatcgcagctggcatcttcaacgacctgggc

SEQ ID NO: 831656 - DNA, 100 bp, Homo sapiens
cgcctgtctcttccgggctgtaggatgcccaggctgaggaagagatcaagcaagagatgaacacactgcagcagaagctgaatgagcagcagagtgtgct

SEQ ID NO: 831657 - DNA, 100 bp, Homo sapiens
ggcggctttagtggcagcatgaagcgcaccccgactgccgaggaacgagagcgcgaagctaagcatatagcactttctacattgtgggtttaatattatc

SEQ ID NO: 831658 - DNA, 100 bp, Homo sapiens
gaggaggcacccacaggctgctgggaggagagcataaggaatatggaaggagactgtccctctgactggaaaacagactctacatgtaggatggtaacct

SEQ ID NO: 831659 - DNA, 100 bp, Homo sapiens
agagataacaaaagctgctcagagtctcaatgaacttgtggaagagaaagccaatacccacctcctcttgggcatgtgcttagacgcctgtgctcgctac

SEQ ID NO: 831660 - DNA, 100 bp, Homo sapiens
cttttggtggctcgatgttaccctcatattttcagcactaattttaggaaaccaaggtgtatgttggtaacctgggaactggcgctggcaaaggagagtt

SEQ ID NO: 831661 - DNA, 100 bp, Homo sapiens
cctatacctgcgacattggccaggcccagtcccgggcccagctcctagtgcaagtctgcagggcaggcactcgggaagggaagatggatgtaaagtgtgg

SEQ ID NO: 831662 - DNA, 98 bp, Homo sapiens
cagatcaacgtcctccgggaccggagtcagaaccctccgcagagtaaaggaggcctagaaggagagccagagtgcgatcagaaaaccagccgtgcgct

SEQ ID NO: 831663 - DNA, 100 bp, Homo sapiens
ttttatggacgagttcttttctgaggatttaggttgagtccccaggctgtgaattcaattgcaaaacgatacagcaccaatggaaagatcaccttcgacg

SEQ ID NO: 831664 - DNA, 99 bp, Homo sapiens
tggtggggagatgaacccaacctagtgggtgtaatacatcatgaactgcaggaagacccttttgaggacttctttgggaatcgaaggggtccccgagga

SEQ ID NO: 831665 - DNA, 100 bp, Homo sapiens
aagaagattacaacagactgagaagagaagtggagcaccaggagactgcctatgggctgctcttcacctatcgtggtgaagtttgctgacactcagaagg

SEQ ID NO: 831666 - DNA, 103 bp, Homo sapiens
ggaggaaggagcagcctcggcccgacgtgcccatcacagtgttctccgtggcccgatgcccccacagcctatgtgaataacagcccttccccagcgcccactt

SEQ ID NO: 831667 - DNA, 98 bp, Homo sapiens
acgaactggacgccctcttctctcagtatgtggtcaacttcggggccgggggtttctaagcatgaattgaggaacagaagaagcagagcagatgatcg

SEQ ID NO: 831668 - DNA, 100 bp, Homo sapiens
agggcttccaaggctcccagtgtcagttctgctctgatcccaataaatacggacctcggtgtaacaaaaggatctttctttcatcaaggtgataaacgtg

SEQ ID NO: 831669 - DNA, 98 bp, Homo sapiens
atcggattcctcagctacgaggaggcgctgaggagaggtgccagttcaacagattctgacagtgaaagtttagctttcaaatcaagagctggagctat

SEQ ID NO: 831670 - DNA, 99 bp, Homo sapiens
tcaaaaggtgatctggacaaaggaacaggtatctcagatgaacctggcctatgttaaagcagcagactgcatttcagaaccagttaacagggagcctcc

SEQ ID NO: 831671 - DNA, 99 bp, Homo sapiens
tggtatgataccagcaactggtctattatatcatttaaaccacatggctatctaaagaggtgctgtatttctctgaatccctcgtgcccacggcaagga

SEQ ID NO: 831672 - DNA, 98 bp, Homo sapiens
gattatcactccacttgatgaacatcttagaagcagaccaaactgtcgagatgtgagaaccagagaagttggaatccaagaaattcatcacaaagtac

SEQ ID NO: 831673 - DNA, 98 bp, Homo sapiens
ctgcatgcacgagccaggaactgcgcagcctcttcgagcgccgcggacgcgtcatcgagtgtgacgtggtgaaagcctcgccgctcctgctatttgcc

SEQ ID NO: 831674 - DNA, 98 bp, Homo sapiens
ttcattcagatgtggtggaatatgccaaggaaaaactggagagcttcatcaaaaatagtgatagctttgataagtatatgtctcgagtccacggtatg

SEQ ID NO: 831675 - DNA, 136 bp, Homo sapiens
cacttcgacctgagctgggaggccactagcagccagttccggcccgaggacaccgactaccagcagaaagtttcctacactactgaggtttaggggcactgtgaagcaaaagccacgcctcagaatcccaggcgga

SEQ ID NO: 831676 - DNA, 100 bp, Homo sapiens
atattgtgaactttgttcacaccaacttgcgcaaaaacaacagacagccctatgctgtcagtgaattagcaggcagaaacatttagttgtaataaaataa

SEQ ID NO: 831677 - DNA, 99 bp, Homo sapiens
ttaactgtggggtgctgaatggcaatggcacaaagttctctcgatcagggcatacatctttcttcgacaaaggaactcctctttcctaaaatggagtcg

SEQ ID NO: 831678 - DNA, 100 bp, Homo sapiens
atggcgagacacagtgccaacaccagcatgcatgcccgcaacctggccattgtctgggcacccaacctgctacgaatgctgcggaacaaccgcatcagct

SEQ ID NO: 831679 - DNA, 98 bp, Homo sapiens
aaacgcttccatctttatccagaggctatggagttactagtagagaaagcaatcagcagtgcttctagccctcagagccctggggatgcactgagaag

SEQ ID NO: 831680 - DNA, 98 bp, Homo sapiens
attgccgaaatcacccatctacagcaacaattacagaatctggccaacctatttgtggaaatggaatggtagaacaaggtgaagaatgtgattgtggc

SEQ ID NO: 831681 - DNA, 98 bp, Homo sapiens
tcagcaatatgcagctattgaacgtttgacatgtggcaagtttgaattgagatgtgctacgcccagcggcagcaggatgagtgcggaggcaagcgccc

SEQ ID NO: 831682 - DNA, 100 bp, Homo sapiens
agccgggcctagcccagagacatggagagttgctacaacccagtcaccatggggacagccgccctgggtcccgtctgggcagcgctcctgctctttctcc

SEQ ID NO: 831683 - DNA, 98 bp, Homo sapiens
gagagcgtgaccgagagcgcgaatatcgtcatcgttagaagtcaaggcctggccgacaacaccgttattgctaaagtaaataatgttgtgtgggacct

SEQ ID NO: 831684 - DNA, 98 bp, Homo sapiens
aagcctacactatctgtggcactcttcagtacatggctttccagagtgttgaatcttccaccagaaaacttgatcacatcaatatctgcagttccaat

SEQ ID NO: 831685 - DNA, 101 bp, Homo sapiens
tctaaattcatctgtcttctagcaaagcccaactgcagctctctagaacaggaggatttcatccctctacttcagttacatgaacatgcagcctacttggt

SEQ ID NO: 831686 - DNA, 100 bp, Homo sapiens
atttatcaaatcgagtcactgtcaactagccgatggcggagtctcttctcttcaactgcctcactggcttttccttatagtcctgttgcaagactcagcc

SEQ ID NO: 831687 - DNA, 99 bp, Homo sapiens
ccaaccctgctttcatggagggacctgtgaggccacagcaggatcacccctgggtttcatctgccactgccccaagctttacaacaaatacccagatgc

SEQ ID NO: 831688 - DNA, 100 bp, Homo sapiens
tcatcgtcaaagaagaagaaaacaaaggtagaacatggaggatcgtcaggctctaaacaaaattctgttacccagataatatcactcctgacactgaaga

SEQ ID NO: 831689 - DNA, 100 bp, Homo sapiens
gtgtggttcttttctggcatcgtaggaggtggcctgctggacatggatttgattgacatactttggaggcaagatatagatcttggagtaagtcgagaag

SEQ ID NO: 831690 - DNA, 98 bp, Homo sapiens
gactgacaacatcatctatgtctacaagattggagaagattggtacaggtttgcagattccgccagcagcacagcaagctctacagatgagtggctct

SEQ ID NO: 831691 - DNA, 98 bp, Homo sapiens
tggacatatcaagcattggtgcacgatgtactgcttgcttttctcccctgaccatgctctgaggatgccgttccctgtccgcacctgtgttctgtgtc

SEQ ID NO: 831692 - DNA, 100 bp, Homo sapiens
aaagtcctcgctcgtcaccagcaagcttgcgggaatgtctacacaaggaagtacaggatttggcttttctagatgtcgtatccaaacttcgcagtcatga

SEQ ID NO: 831693 - DNA, 100 bp, Homo sapiens
ctcacagagagattgaggataaacctgttgccaccagtaacatacaggagctgcaggctcagatttctcggcatgagagacggggtttcgccatgttggc

SEQ ID NO: 831694 - DNA, 100 bp, Homo sapiens
gatgtagaagcaagaaagcaggttaacaggaagaaagctttactgactcgtgtccaggagattcttgacaatgttcaggacatgaggctctgcctgcagt

SEQ ID NO: 831695 - DNA, 100 bp, Homo sapiens
tgaggagtccttgatgatgaatcggttggcaaacgtccgaaaggaaatcctggagtctgagataaaaggggatctcaacaaccctcaggattcagaagtg

SEQ ID NO: 831696 - DNA, 99 bp, Homo sapiens
ctaagaaggcgctgaagggcaaggaaagcagcatagagaatgagatagccgtcctgagaaagtacagaaggtttgggattcagcatcacttccagagat

SEQ ID NO: 831697 - DNA, 99 bp, Homo sapiens
ctttatgggcattactatgttagttggaataactggactcttttacactcaactaattggcatcatcacaggatccttctaaagtaaatattctggtac

SEQ ID NO: 831698 - DNA, 98 bp, Homo sapiens
gagcagatcaagaccctcaacaacaagtttgcctccttcatagacaagggaatcttttaactgagccagtcggctacttggaatcttgtttctcggcc

SEQ ID NO: 831699 - DNA, 100 bp, Homo sapiens
gaaagagcgccttgggacagggggatttggaaatgtcatccgatggcacaatcaggttatcaatactctggctgaccatcatcatcgtgggactgacttt

SEQ ID NO: 831700 - DNA, 100 bp, Homo sapiens
ccatgcttaatgcaaaagaccttctacaggacctgaaggacagcaatcagacctattgctttgagagctgtgacctccattgctcgtgctctgcctggat

SEQ ID NO: 831701 - DNA, 100 bp, Homo sapiens
tctttgacagagagcaagtctgctcatgtgcagactcagactggccaaaattcaatccctgctttagctcagttcaacctggtgtgtgctgactcctgga

SEQ ID NO: 831702 - DNA, 100 bp, Homo sapiens
tgtttccaggaagttcagagagaacagagccatcatcaaccactttaaccccaaaattgagtcctacgctgctgtgaatcacatatcccaactgtcagag

SEQ ID NO: 831703 - DNA, 100 bp, Homo sapiens
ggcgcctaaagtctgagagagggaagtcgcctctgtgctcccaccgctggagtcgctggccacagtggaggagacagtggtgcgggacaaggcagtggag

SEQ ID NO: 831704 - DNA, 98 bp, Homo sapiens
aagcgggctgtgtgccccttctccacccagagaggaccttatcatgtccttcactgtatccatggcaatcgggctggtacttggaggatttatttggg

SEQ ID NO: 831705 - DNA, 100 bp, Homo sapiens
acgcccctccagccttcgagtcgttcttgctcttcgagggcgagaagtgagccctattcccagaggcaggtggtgctgaccctgtaacccaaaggaggaa

SEQ ID NO: 831706 - DNA, 100 bp, Homo sapiens
tatacagcaaatcttcagatacagagattaagttccaaattgattaagatcgttggaaacccggaatataattttggggtcatgatcagagttcgactct

SEQ ID NO: 831707 - DNA, 100 bp, Homo sapiens
cagatattccaaaaggctattctttcagtgtattcaagaaaaacatcaacggcaggaaattctaagaaactgtagtgaaaagtacatcatgcaaaatgac

SEQ ID NO: 831708 - DNA, 100 bp, Homo sapiens
aggagtggagtgatatcagacaccgagcttcagcaagctctctccaacgagcctggcagagagcaggtgtgtgatacacgtcgtcaggtgactgaccgag

SEQ ID NO: 831709 - DNA, 100 bp, Homo sapiens
gaaggaaacttcaatgtctaccttagcgatttgatcccagtggatagagccattgaagacaccagacctgctgggtcatgctgacagccctgctcctgtg

SEQ ID NO: 831710 - DNA, 100 bp, Homo sapiens
aatcagtgatgctgtccttgatgcccaccttcagcaggatcctgatgccaaagtagcttgtgcctatatatgcaaacagatttgcagtaccaacctatgc

SEQ ID NO: 831711 - DNA, 75 bp, Homo sapiens
agagaacagagagggtgataaggaagaagaccatgctgggaccttccaggtgtgggcagaagaaaaagctagtga

SEQ ID NO: 831712 - DNA, 100 bp, Homo sapiens
tctgaggctctcaaagatgcccaggagaagctggagctggcagagaaaaaggccaccgataaacccgggatggacgtggccgacgcctacgtgactttcg

SEQ ID NO: 831713 - DNA, 98 bp, Homo sapiens
caaaagcgcactaaatcgtctccaagacacatcatctcagagttggagcacctgacgtttgtcaacacggatgtgggccgctgccgggcatggctgcg

SEQ ID NO: 831714 - DNA, 100 bp, Homo sapiens
acattttgttaagattcaggtcaaagacagagtctccgggaccattatggcagtcaagtggacgggtgggcattcttctcctgtcctctgcctgaatgca

SEQ ID NO: 831715 - DNA, 100 bp, Homo sapiens
ttacattgcagccatcagcgctcgttttgtgcagcttcagcacaatgacattgacaaacggggtctatccatgttagttcagctatcactgaagaccaaa

SEQ ID NO: 831716 - DNA, 101 bp, Homo sapiens
gctgctcttcctgaggttttcctaagccatcccctggcggaaccgcccccagagcttatcaacaaacttaactttttggatgaagcagaaaaggacttggc

SEQ ID NO: 831717 - DNA, 98 bp, Homo sapiens
tgcccgctaccccaagaagatccactaccacaacccacctgagctggccatggaggccctggagatataaaccacagtacttcaggatcccattatga

SEQ ID NO: 831718 - DNA, 100 bp, Homo sapiens
tcctcctgcagttactgagaataaaactgttacagctacttttggttatccattcagatacaagtccaattctgctcaactgcttgttgaggctcgagtt

SEQ ID NO: 831719 - DNA, 98 bp, Homo sapiens
ataatatccaatcagtacaacaatgagccttcaaacatatttgaggtcgaactggaaggtacacccttatagagaaatggagagatactgaaagacac

SEQ ID NO: 831720 - DNA, 98 bp, Homo sapiens
aacttcctgatctctctcgctgtgagacatgtctgagactcctgctcagtgtagcattaaggtgtggcagaaaaaacacagcttctgaaattgaatgt

SEQ ID NO: 831721 - DNA, 100 bp, Homo sapiens
gccggccgcctggtcatggcgcagccgggcccggcttcccagcctgacgatgttcctcctgctgatcaagagaagctttttatccagaagttacgtcagt

SEQ ID NO: 831722 - DNA, 100 bp, Homo sapiens
tgaaatatgtggattccaatctctgttgcttcatcccaggaaagtatgatcttagctttgataaatgactgaagctggagaagccgtggttgaagtcagc

SEQ ID NO: 831723 - DNA, 99 bp, Homo sapiens
tagactcagtcgccttcatggaatgtcttcaaagaatattaaaaaatctggagggactccaacttcaatgtatgcaggaagcaggcggtcaatgcctct

SEQ ID NO: 831724 - DNA, 100 bp, Homo sapiens
caaagaaacattaagaacttggatcccattcacctgaggcacccgaagaagagaccatccatatttccagggtccatatccacgacaacatgaagctgat

SEQ ID NO: 831725 - DNA, 98 bp, Homo sapiens
tttcgaacaagtgccaggactggtctgaggaacacacgttgagagaggatcagttcgacagcttagacaagcatacacaatggggaattgacttcttg

SEQ ID NO: 831726 - DNA, 100 bp, Homo sapiens
ggagcctgctccctgctcagctgcgctgaagccgacgtagcttctctgaacagacgcatccagctggttgaggaagagttggatcgtgcccaggagcgtc

SEQ ID NO: 831727 - DNA, 98 bp, Homo sapiens
cttgccagaaaggattctaataactcggtgtcaaagccaagacataaactcaaccccttctcttccaaaagaacgacaccgtaactatccgcactaga

SEQ ID NO: 831728 - DNA, 98 bp, Homo sapiens
gaagctaaagctaccaaagacgtagaaagaaatcttagcagacttagaaatggctgttgcgtattggaaattagtgttatctggaaggtttaaatttt

SEQ ID NO: 831729 - DNA, 100 bp, Homo sapiens
ctccaccgtttcctccaggacagcacctagtcgtggccggaggagtctcagagctgtcagaaaggtcatacttgaaaatatacgtcccatgaagaaaacc

SEQ ID NO: 831730 - DNA, 98 bp, Homo sapiens
ggcacccgggagtcatcttcaaagccctgaagtcaagtaagggagaattgactacgcttatacatcagcttcaagaaaaggacaagttactcgctgct

SEQ ID NO: 831731 - DNA, 98 bp, Homo sapiens
catgtactttaaagaaatacttttgagtcggtggactgaacatgactgatgtatatagaacggaaagatgctgaaggatgggagaccgttcagagagg

SEQ ID NO: 831732 - DNA, 98 bp, Homo sapiens
gaaatgttcaagtttaccaaaagagaggcaccgctggaacactaatgaggttgctgaaaagccaggagtcaaaatgactgagcgctttgactgccacc

SEQ ID NO: 831733 - DNA, 100 bp, Homo sapiens
gaggccctcattctcatcaaaggctccttccggattctcaagctgattgtcaggaggcagcctcctgtcagtgagtctcattggagaacgttgctgcaag

SEQ ID NO: 831734 - DNA, 98 bp, Homo sapiens
gaaaccgacgagaggacctcagctccaaggttgtctgcattcaaaagagcattctattaaagctaccttaatttggcgcttatttttcttaatcatgt

SEQ ID NO: 831735 - DNA, 99 bp, Homo sapiens
cgcgggcggcggacagattgaccttcagagcgaggtactccaaagattcaggtttactcacgtcatccagcagagaatggaaagtcaaatttcctgaat

SEQ ID NO: 831736 - DNA, 100 bp, Homo sapiens
gaaggacccacggcgtctgttcgaaggcctgtagtggtggagacacgcccagtggatgatcctactgctcccagcaacctctacatccaggaatgagtcc

SEQ ID NO: 831737 - DNA, 99 bp, Homo sapiens
tgaaggcaatgatttataccatgaaatgattgaatctggtgttatcaacttaaaagatgccacctctaaggtcatattggaattgctgttcctgatgta

SEQ ID NO: 831738 - DNA, 100 bp, Homo sapiens
cggattggttgttttttcctgtatgaagcggttggcaccactgaagtgaccgaatgaggtcttttccaatggtcaccttggaagtgaagaatatgatgtt

SEQ ID NO: 831739 - DNA, 98 bp, Homo sapiens
gtcatgagcacttcaacagttggaaccaaggcttcatcattcatcattatgctgggaaggttctagcaagaggagaagaaaggaggaaaccacaggga

SEQ ID NO: 831740 - DNA, 102 bp, Homo sapiens
atgcagtagccctctgggcctgggatattgtggttgataactgtgccatctgcaggaaccacattatggatctttgtgactcgaagaagccttccaaaaagc

SEQ ID NO: 831741 - DNA, 100 bp, Homo sapiens
cacttgattacccgttaagtcccccaaagatgagatttacctgtgagatgtttcatcccaacagcgcattggagtgactgtctggcatcaccaagatgac

SEQ ID NO: 831742 - DNA, 100 bp, Homo sapiens
ttgcacaagccaggaaaggacgcgtcgaagcgcgggcggcagaacctggagctggttgaaaaaggcttcagtaacttgaagaaacaaattgaaaatgcca

SEQ ID NO: 831743 - DNA, 100 bp, Homo sapiens
atctcactctgttaaagctggtctgttctaactgagattgcttccaagtatgatcatcaggcagaagaagatcttcgcaattggatagaagaggtgacag

SEQ ID NO: 831744 - DNA, 100 bp, Homo sapiens
tggtcacagccacactctgcaccgctaggccgtccccgaccttgcctgaacaagcacaccgttccggaaggcaaaagccttgtatgcctgcaaagctgaa

SEQ ID NO: 831745 - DNA, 98 bp, Homo sapiens
ggattttgtattttgtatttaacttgcattcaaaaaacaggatctcagttctcctttcttgtaaattgccagacttagaagacttgatgaaaagggag

SEQ ID NO: 831746 - DNA, 100 bp, Homo sapiens
tatgttgatgccagatgacttcaaagcctattcaaaaataaaggtggacaatcacctttttaacaagtgtaatgtctttgctgagaactcttcttctgga

SEQ ID NO: 831747 - DNA, 100 bp, Homo sapiens
tttgcattccaatggcctggatgaccggtcaaagctggagctgcctcaagagaaagaagacatagctcatccagcaagccgcctttggccgttcctccca

SEQ ID NO: 831748 - DNA, 100 bp, Homo sapiens
gttcctcgacatgtttctccagtgacacctcccagagaagttttgcatccaagaattgatgcccggagagctgatgaaaaccttggaatgcttcttgtag

SEQ ID NO: 831749 - DNA, 100 bp, Homo sapiens
tccagaggaatagctcctgcccccgccctctctgtttctccccaaaataaccattctccagatccaggtaaagtgaacagagttatctgtgacattccat

SEQ ID NO: 831750 - DNA, 98 bp, Homo sapiens
ccatagaagtgcctcctcttcaacatcctcccaaagggacagtaggcaggcagatgatgttgagggcaaaattagacaaatcattccacctggatttt

SEQ ID NO: 831751 - DNA, 100 bp, Homo sapiens
gctgccaccagtacgtcattcacaacaacaagtgcatccctgagtgtccctccgggtacacgatgaattccagcaagttggtcctgcactttggtggtgg

SEQ ID NO: 831752 - DNA, 100 bp, Homo sapiens
gtttgccatcccaaggccgaagccttatgtttgatcatcggccaaggtcctggcgagaactgcctctgcggctagctgattttggggtacttcataggaa

SEQ ID NO: 831753 - DNA, 100 bp, Homo sapiens
ccgattcaagaaggacaaagagatcatagccgagtatgaaagtcaagtcaaagagctccactggttcaacagcctctcctccagtttcgaccccagtcac

SEQ ID NO: 831754 - DNA, 99 bp, Homo sapiens
ggaactgggacttcacctccgcgctcttcttcgccagcaccgtgctctccaccacaggttcgccatcggtggtgtgaactcattgttaagcacaagttc

SEQ ID NO: 831755 - DNA, 99 bp, Homo sapiens
tgctcctctgcgctctggctcccggcgcccccggacccgcaccagctggtgtgatcccccccaattcagtgcttcattttgatgtacttctgatggata

SEQ ID NO: 831756 - DNA, 100 bp, Homo sapiens
cttgggtgattctgtccgttcagtgtggaactcttctgccctatcttatggtgtcctctgttgtcggcttctatagccttcgattttttggaaactttac

SEQ ID NO: 831757 - DNA, 98 bp, Homo sapiens
tttggaacctgctcagagggacctctatagagatgtgatgctggagaattacgggaatgtgttctcactgggttgggttcaatatacggagagtgccc

SEQ ID NO: 831758 - DNA, 100 bp, Homo sapiens
aagatgatgaggtcatctgcacttcattttactccaagatacaccccttagaaaatggagagctattactactgaactatttcacaaacccattttgaaa

SEQ ID NO: 831759 - DNA, 100 bp, Homo sapiens
cggcgccatgagtctgacttccagttccagcgtacgaggttcgatggatgatgtactggattgtttttgctctctatactgtgattgaaacagtagccga

SEQ ID NO: 831760 - DNA, 98 bp, Homo sapiens
gccaaaagaattacctgaatggagtgaaaaagtggctcacaacattttgtcagaacctgatgtagcttcaagtgatgccacgaatattgaatgcagca

SEQ ID NO: 831761 - DNA, 100 bp, Homo sapiens
ggcctccagcaagatctccgatgactcttgtgaagcagcaggcgccaagtgatgaaggctgccaaacgagggattctttcatctggtcggggcagaggaa

SEQ ID NO: 831762 - DNA, 100 bp, Homo sapiens
cagggttctggggatgctacagttcatcagaatgtagccgtgagttcaggcagtgggcagaatgatctggaaaagatgaccagcatcctggaagctgtgc

SEQ ID NO: 831763 - DNA, 100 bp, Homo sapiens
gcctgacggtcgaggctacacctgccgctgccacctgggccgctcggggttgcggtgtgaggaaggcaaacctgtatgtgggactggtggtcatgtgtgg

SEQ ID NO: 831764 - DNA, 100 bp, Homo sapiens
agagacaatgatggggctcttccccagaactacaggggctctggccatcttcgtggctatctatgtgcctgctgatgacttgactgaccctgcccctgct

SEQ ID NO: 831765 - DNA, 100 bp, Homo sapiens
gctgcgtcaccgccgcccccccagacaagatggacaccgcggaggaagggagcctgcacacatgatcctgaccgtcggaaacaaggcagatggagtcctg

SEQ ID NO: 831766 - DNA, 100 bp, Homo sapiens
ttacctttccaagccaatgcccaagacattataaacgatcccctaacaacagtgagagagcaatgcgagcagttggagaaatgtgtaaaggcccgggagc

SEQ ID NO: 831767 - DNA, 99 bp, Homo sapiens
gaggcccctgccgtgtggacccgtaaaataaaatgggttgtggagatgttggaggttcccaataaacccacacaactgtcgtacaagtactactttatg

SEQ ID NO: 831768 - DNA, 100 bp, Homo sapiens
ccaagtctctgacttgtgcttggcagcaacatgaagatcattttgaatttttaaggggccctgagatagctttgcttcgtaagcgcctgcaacaactgag

SEQ ID NO: 831769 - DNA, 100 bp, Homo sapiens
acctccatttcattgagatgatatattgagcccatgcgtagccttttatttgagggaagaatgacatctttggggagcctctgaacctgtatgcaaggcc

SEQ ID NO: 831770 - DNA, 100 bp, Homo sapiens
ctccttgagcaaaaaagaaaagttgtttcctccaacattgatgttcctccagcaaggtgcaaatatatacagagcttcataatcagcccaagaccacata

SEQ ID NO: 831771 - DNA, 132 bp, Homo sapiens
cgagcagcagcgcatccggaatgagcgggagaaggagcggcagaaccgcctggctgaagcattgtcgggcatgtgggtgacggcaacttccactgcatcctgctggtcaaccctgatgacgccgaggaactg

SEQ ID NO: 831772 - DNA, 98 bp, Homo sapiens
aagaaccccatggcctcgctgatgctgccagaatcagaaggggagttctgcagtctgcgctcctcagaccaccggcaggtgaacagcctgatgcagac

SEQ ID NO: 831773 - DNA, 100 bp, Homo sapiens
gaaaaaaagacttcaagaaaaccttagaagagaagcatttagagagcatcagcaatactcctctggtgcaagtgtggtagctattgacaacaaaatcgag

SEQ ID NO: 831774 - DNA, 100 bp, Homo sapiens
attgaattagatctaaaagccacccaggccttggtcctagcacccactcgagaattggctcagcaggaggctgagctccagagggtccagaaggtccgag

SEQ ID NO: 831775 - DNA, 100 bp, Homo sapiens
catcaacatctcgctcttctccagctatttcagcaatgcccctgtggtacaggtgcctgggaggctgttccccatcacgattcacaatgacatcctttca

SEQ ID NO: 831776 - DNA, 100 bp, Homo sapiens
cggcgcaccccagactacttcctataaatttctcctgggaaacctgcctttgaagctgaaaccccacgtagtgttcttgaagaaattggactgacataac

SEQ ID NO: 831777 - DNA, 100 bp, Homo sapiens
aagactgagatctctgagatgaaccggaacatcagccggctccaggctgagattgagggcctcaaaggccagtctgtggctccagcagccttgtttctag

SEQ ID NO: 831778 - DNA, 98 bp, Homo sapiens
gaagagcggccccgcggggggcgatgaccgtgcgctgaccctgactcactccagccctgccaaggtaaccctgctggggtcagttatcttcacattcc

SEQ ID NO: 831779 - DNA, 100 bp, Homo sapiens
gaagaatggaggaccatccataattcctatctttaaaagaggggatgtacgtatttttgcatgcagtgaaaggaacacctttcgaaactcctgaccaggg

SEQ ID NO: 831780 - DNA, 99 bp, Homo sapiens
aaaaaacctctgaccgtgaagagacatgagatgattgccaaacccccaggtatgccaccatatacaccatgttcccagtgttctccttagtgctggacc

SEQ ID NO: 831781 - DNA, 100 bp, Homo sapiens
tgccagcaagcagtggtttataaacatcacggatattaagactgcagccaaggatcaagtagatatagctgttcaagaactccttcagctaaaggcacag

SEQ ID NO: 831782 - DNA, 98 bp, Homo sapiens
caggaggagtacctcggccaagaaaattatgcatgcgttagggaagctctgagagaatggctgtggaaggtaagaatgattgatgttggctgatattg

SEQ ID NO: 831783 - DNA, 100 bp, Homo sapiens
gtgatgcttaagctggtggagaaactcggcacatctactatgcttcttactagaataaactgtgcagattggtctgatgtatgtactaagcaaaatgtta

SEQ ID NO: 831784 - DNA, 100 bp, Homo sapiens
caacgagaaggggggcatcccaggcaaggcagctaccaagcacaggtgtgaagaccagcatctcagacatgtcgaaaaagatgttttgatccctaaaata

SEQ ID NO: 831785 - DNA, 100 bp, Homo sapiens
ctggaaacatcttaaatggaagaatttgcaccatcctgggattgtaaacctggaatgtatgtttgaaaccccagaacgagtctttgtagtaatggaaaag

SEQ ID NO: 831786 - DNA, 100 bp, Homo sapiens
atataaatgaagtcacacaacactgggtcttatgtgactggcttctatcaaagtttgcaaggttcatttatgttcatgggagtgatatggagctggactt

SEQ ID NO: 831787 - DNA, 98 bp, Homo sapiens
ccaaagcctgcccagacggctcacctgtgcgggatggaacaaaagctctttcagtctcacatggcaacgaaaacaacttgtatgtcttcacaaggatc

SEQ ID NO: 831788 - DNA, 100 bp, Homo sapiens
ctggctccctcgactggttgatcagcagattggaaagactggaagcttcttcaggaaaaagaccacatcagtgtcagatttgtaagaaagcgtttaaaca

SEQ ID NO: 831789 - DNA, 98 bp, Homo sapiens
gagagcaactgtgcacctcagaaaactcaatgacaggcctcaacaccctcccccagcctcccattccctgctggacgccctctccccaggccgcacag

SEQ ID NO: 831790 - DNA, 100 bp, Homo sapiens
aacaagcaagcatgcagcttactgcttgaaagacctcagtgtgaacagggctgtgtgggatggaggagggtgcatctcccaaggggacgtcttgaaccgt

SEQ ID NO: 831791 - DNA, 100 bp, Homo sapiens
gcagaaaaaatcagccttcactcgaactgtgtcccctggatctgtatcacctattcatggacagttatggctgattgtcctcacacaattggtgttgaat

SEQ ID NO: 831792 - DNA, 100 bp, Homo sapiens
gccaaaaatgctcaacagaagaagagcttgagtttggggccttctgcagctgaaatcaatcaaggtgacgcatccaaagaagacattgacactgctatga

SEQ ID NO: 831793 - DNA, 100 bp, Homo sapiens
ctccctctggatccttctggcctgcctcatgaagatagatgcctgtgaggagccaccaacatttgaagctatggagctcattggtaaaccaaaaccctac

SEQ ID NO: 831794 - DNA, 98 bp, Homo sapiens
gaaatcaatgttagcagatagccagcccatacaagatcgtctggaatgcttgctgattcctctgcacacttctaaggctgagaacctgaggaacccag

SEQ ID NO: 831795 - DNA, 100 bp, Homo sapiens
tgaatatgggcgccctttcctcatcatcaaggatcaggaccgcaagtcccgtcttatgggacttgaggccctcaaggcctgtctacaagtcattttgctt

SEQ ID NO: 831796 - DNA, 98 bp, Homo sapiens
tgaagaagtgaagaaattattggtacctgcagatcttaagattgaaagtgatgttcaagaaccaactgaaccagaggatgaccttgacattatgcttg

SEQ ID NO: 831797 - DNA, 151 bp, Homo sapiens
caaagtcctcggacaaaacctaggaagtcaactgttggtacattatttgcagttgggggaatggattcaacaaaagttttgtttggctatgccaccacagtcatccccagggtctatacatactatgtttcaactgtattatttgccattt

SEQ ID NO: 831798 - DNA, 100 bp, Homo sapiens
gctgagtgtgcatatggtgactgttgtaaagactgtcggaattttgattcagctaaagttccatcagatgagtattgccctgcttgtagagagaagggaa

SEQ ID NO: 831799 - DNA, 98 bp, Homo sapiens
aaagatgccctctgaatctttgtgtttggctgcccaggctcgcctcgactccaaatggttgaaaacagatatacagataggaaccaaggctttagcct

SEQ ID NO: 831800 - DNA, 98 bp, Homo sapiens
agaggatagatttatacttggcactgttatctgctgtttctgcttcaacttattttgggagaggccagccgccatgtcatgaagacactcaagaagcc

SEQ ID NO: 831801 - DNA, 100 bp, Homo sapiens
tatgtggccatgaatggtgaaggctatctctacagttcactccagaaacatgacaaggaggactttcctgcctcttggagatcagaggaggaaatggcag

SEQ ID NO: 831802 - DNA, 127 bp, Homo sapiens
agccagtcaggagaaagtgagaatgagaatgagttggataactctctaaactctcagtctaacacgaatacagacagctccttgctcggattgaacgtatggaaaggcggatgcagctggtaaagaa

SEQ ID NO: 831803 - DNA, 98 bp, Homo sapiens
gcagccgctgagacggtttttcacaaggcactggagatattattgctgtcatgataacagaattgaggggtaaggatattttgagttatctggagaaa

SEQ ID NO: 831804 - DNA, 98 bp, Homo sapiens
agaagcctgtacctgttttatacttgcttttgcttcagcgttctgtggttgtcaacaggtgaccttgggaaaggtgttgaaagtgatcgtcgtcatgc

SEQ ID NO: 831805 - DNA, 98 bp, Homo sapiens
aaatcaaggaaggctgctggtgatcatgctaagggtcttcatataccacgattaacagagcaacatctgaatgaattgatgacgaagaagtggctatt

SEQ ID NO: 831806 - DNA, 98 bp, Homo sapiens
gggggccaactctgaggagtccactgcagcagaaatgggacgtcggtcatcagatactgaagaagaaagcagaagcaagagaaaaaagaaacaccgta

SEQ ID NO: 831807 - DNA, 100 bp, Homo sapiens
aggcccacccctggctttctgactatgatgaccttacgtcagctacctatgataaggatgtaaatgaagaccctggagaagatgtggccctcctctctgt

SEQ ID NO: 831808 - DNA, 99 bp, Homo sapiens
cccagtcggtgctccggggaggtcacctgacgaggagagtgcctggaagagctgggatgtctggttgagtcctatggcatgaatgtttgccaaccaacc

SEQ ID NO: 831809 - DNA, 100 bp, Homo sapiens
ttccggccaacttccattgaacttcccagcactcgaaagggaccgaaatggagagcaaaggacactttcttcatgagcaacaaaccccaaagatacaaag

SEQ ID NO: 831810 - DNA, 100 bp, Homo sapiens
cttcgaaaagctgccaagttgaaaatggacgagtaatcgcctgctttgattcattgaaaatctgttacctaaagcaataaaaaatggccagaggatcagt

SEQ ID NO: 831811 - DNA, 113 bp, Homo sapiens
gatgattccttcttggggaaactcggagggaccctggcccggaggaagaaagccaaggaggatggctacgaattcctggagatcctgaaacaggttgcccgggacaatactga

SEQ ID NO: 831812 - DNA, 98 bp, Homo sapiens
gagtcgcggaacagcaggcccgagcccaccgcgccgggccccggacgccgcgcggaaaaggaccaccgcacagtctcaagtgtagtgaagtcaggaaa

SEQ ID NO: 831813 - DNA, 98 bp, Homo sapiens
agaagctcatgagcagcctgcccaacttctgcgggatcttcaaccacctcgagcggctgctggacgaaggaagaagaaatgccagaggtagaaattga

SEQ ID NO: 831814 - DNA, 100 bp, Homo sapiens
agaactggcatcaaatactcacaacatagctcaggatctgtcaaacaaaagttcttatggactcaaagtttgatgaaggaagcacgaaagatggtgagtc

SEQ ID NO: 831815 - DNA, 100 bp, Homo sapiens
ggctcacctgtgcgggatggaacaaaaggctgaagtggagagatcgcctgagcccaggaggtcaaggctacagtgagccgtgactgcaccactgcactcc

SEQ ID NO: 831816 - DNA, 100 bp, Homo sapiens
gagaagcggcacacacgggactccgaagcccagcggctccccgactccttcaagggcgcttgactttggcagatattgagagaatagccccattggctga

SEQ ID NO: 831817 - DNA, 100 bp, Homo sapiens
ccatggaaatcgctgagaagcacctggatattcctaaaatgttggatgctgaagtgcgaagaaccctgaagagcggcctgaccccagaagaagccagagc

SEQ ID NO: 831818 - DNA, 100 bp, Homo sapiens
cttaattattcagaatgctgcggttttccaagaattcttcaaagaactacttgaaaatgcagagaaatccctgaatgatatgtttgtgaagacatatggc

SEQ ID NO: 831819 - DNA, 100 bp, Homo sapiens
caccccaggagtatacaccaaggtctcagcctatctcaactggatctacaatgtctggaagaatgtcgaggtcttggcgagcaggagcaacacttcagag

SEQ ID NO: 831820 - DNA, 98 bp, Homo sapiens
ggcaatagaagcctggatcaactttaataaagaggaaagagaggcttttgcagagtcactcaggacaagcttgaagtagggacggggtttcaccgtgt

SEQ ID NO: 831821 - DNA, 100 bp, Homo sapiens
gcccagggagagcaaggcgcgcggcgactccggtcggccctcctccacgctgacttccgggtctcactctcccacgcctgtaagaacgctgtgaagacgg

SEQ ID NO: 831822 - DNA, 100 bp, Homo sapiens
gaatggaatcgaataccattatgtgacaattaccctggatttacagcagccttccttgaatccagaagctggcaaacagcatcagccatgcagacctatt

SEQ ID NO: 831823 - DNA, 98 bp, Homo sapiens
ctgtcctccccacccagaggcacagtcagcttaaggaagaggatcacctagcccgggtagaagaggcaatcacccgtatgcttgtgtgtgccctgaaa

SEQ ID NO: 831824 - DNA, 99 bp, Homo sapiens
ctttaccaaaaaggcctcgcacattcagttggacagatatgagggaaggcaccattggagatatggctatcctgggtataacagaaagttttcaagtga

SEQ ID NO: 831825 - DNA, 98 bp, Homo sapiens
tcctctgatgactccggatattctaggatcttccggagctgccgtgcatacctgtgtgaaagcaaccttccactggctgctaatttacagaagattgt

SEQ ID NO: 831826 - DNA, 98 bp, Homo sapiens
gacagatccgtagggaggacaccgtgacttcccggacgctgggaaatggttctggcctataggaacaagacattttcagtaatggaagaaggagcttc

SEQ ID NO: 831827 - DNA, 100 bp, Homo sapiens
attgaatatgcacaagcagctgtaaaagagaccaaagggaggaaaatcggtgggaataaaattaagctattcaaggatgcttggttgttgcacatgcatt

SEQ ID NO: 831828 - DNA, 100 bp, Homo sapiens
cagtttacatgtggatttattcattctggagatacaatggcaaggaaacagctgtgagcaccatgtggcggagcacactgctgagagctacatgctgcag

SEQ ID NO: 831829 - DNA, 98 bp, Homo sapiens
aaggtgtggcagtcctcatttctgtggaatctgaagaagcccacgcagattttaattcccactctagattctgggaaatcctcattgacgattcaatt

SEQ ID NO: 831830 - DNA, 100 bp, Homo sapiens
ggaaattagctatcttggctgagcagtatgatcacagcattaatgaaatgctctccacacaagccggattgtcaatgaggcagatcagattccgatttga

SEQ ID NO: 831831 - DNA, 99 bp, Homo sapiens
acatggcagtcccgaacacaggatgaacatccgaagacaatgttctccaaagataaggagcaatttacagcaatgagggatttatacatgaaaaatgga

SEQ ID NO: 831832 - DNA, 100 bp, Homo sapiens
aacggcaagatgtccagtaatgtcccggcggatatggaaggaggaagaggagcgaaggcggcgtgaagaggaagaaagagaacgtctgcaaaaggaggaa

SEQ ID NO: 831833 - DNA, 134 bp, Homo sapiens
tacaatgtactggatcgaaatgtccatgagaaaaagcttggagataaagttgctttttactgcggcagtacatacctgtgaaaatgaagagcaaagccttctggatcttttcttgggagtatgccatgatgtat

SEQ ID NO: 831834 - DNA, 98 bp, Homo sapiens
atcccgagcagcgtcatgtacccctgctcggggaccagttctacaaggaagccattgagcactgccggagttacaactcacggctgtgtgcagagcgc

SEQ ID NO: 831835 - DNA, 100 bp, Homo sapiens
aagataaccgtccaggaatgagaggaggccatcagatggttattgatgttcaaacagagtatgggctcacaagaagatgattcaggaaacaaaccatcca

SEQ ID NO: 831836 - DNA, 100 bp, Homo sapiens
agatcctagtgaaaactttagaggtgctgactgggttacttttttaaacactaggaatggtaatttctactcttctggacttcaaactaagaagttaaag

SEQ ID NO: 831837 - DNA, 100 bp, Homo sapiens
gaaagcccatcctttcaaaatcaacttagaatcagaaccacagtcgcaatgtatctgctgagcaaaaagatgaaaacaaagaagcaaagcctcgatccct

SEQ ID NO: 831838 - DNA, 100 bp, Homo sapiens
gaggtgctggatcacaatgaatgtctaattatcacagagaatggatcttggagaatgtctgaaagtccatgacctggctttaagagcggattatgaaatt

SEQ ID NO: 831839 - DNA, 125 bp, Homo sapiens
gccacacccatcagcgcggctacctgctgacacggaaccctcacctcaacaaggtcctcgatgggcttcctggaatattggtgtgtttatttgcatcagatgtgctggaattcatagaaatcttg

SEQ ID NO: 831840 - DNA, 98 bp, Homo sapiens
gaaggttcagttggcaaaccagatatatgacttggaaggaaaatcacctcggcagtgtttgaaggaaggatactgcaactctttgaagtacgcatttt

SEQ ID NO: 831841 - DNA, 100 bp, Homo sapiens
agtatatgcagaggaggtcccacaggctcctgccctggactaccgagtatgaaaagacacagactgtactctcagaactgaagttgaagtttgaaatgac

SEQ ID NO: 831842 - DNA, 98 bp, Homo sapiens
tggaaatggcacctatggacaagtctataagaattcctagaggacctgtgcaacaacctcttgaggatcgaatcttcactcccgctgtctcagcagtc

SEQ ID NO: 831843 - DNA, 100 bp, Homo sapiens
gaagagccaaggaataaacatgcaatgaacccaaaagggacacagagatagcatggatttacagaggtttaaagaaacatcaaacaagataaaaatacta

SEQ ID NO: 831844 - DNA, 100 bp, Homo sapiens
ccaaggagactgcaggctacctcaggggccgtccccaggacactgtccggatcttccctccctggctctcaataaacaagactgggtagatggtgagccc

SEQ ID NO: 831845 - DNA, 100 bp, Homo sapiens
atgaggaggggccatggccagcgacggggccaggaagcaattctggaagcgcagcaacagcaagctcccgggcagaatagcctaacatggcagaccagag

SEQ ID NO: 831846 - DNA, 100 bp, Homo sapiens
cgggagctgggtcaccggcttgaggggctgcgtgaggcgcggaggcaggaaagaaaccttgactggttccccaggatgagagccatgtcattggtcagca

SEQ ID NO: 831847 - DNA, 100 bp, Homo sapiens
tggagattttgatgtggatgatgccaaagttttattagggatcatagacggtatttctatgtaaacgaacagtcgggcgagtctcagtgggagtttccag

SEQ ID NO: 831848 - DNA, 100 bp, Homo sapiens
ccacaatgctctcaagctagctcacaaagacaccaaagtttctattaaaaaaaatctggtccttcatcagaactaggaaagcactgatttaaacatttgg

SEQ ID NO: 831849 - DNA, 98 bp, Homo sapiens
tactttggtgcatgaagctcaactcaactatttctacatctctcctggagatttgttcctgatcttgaagatattgtaaattttgaagaactagtaaa

SEQ ID NO: 831850 - DNA, 134 bp, Homo sapiens
gcgagagtggggctgcctccccaggcgcccgcacccgcagcctcaagtcccccaagaagagggccacagttcctccagctcctccatcctgccgtctccagggtgtgccccatgtgggggcaaacgtgaccctg

SEQ ID NO: 831851 - DNA, 98 bp, Homo sapiens
ctgcacttcgcattttggcattgacatttaattttagggtcctttatatagaagggagagtaggggaaagtggagatgacattggaaatcctcaacga

SEQ ID NO: 831852 - DNA, 99 bp, Homo sapiens
cccatcctgcacttccgagccgcccggccacccttcgtcatctgcgtgaagctggatgcagcagtctcggccctggctgctctatgcagtgaatattac

SEQ ID NO: 831853 - DNA, 100 bp, Homo sapiens
ggtcttctgtggtgggaagggcattaagacaaaaagcccttttgaacaggtggctggctttgatctggacgggacgctcatcaccacacgctctgggaag

SEQ ID NO: 831854 - DNA, 98 bp, Homo sapiens
ataaattgaccggtgtgtttatatcagttttagagaatgtggcgtggagaaattctcaaggaaagagtaaaatgctggtgatgtgctgagggaacaga

SEQ ID NO: 831855 - DNA, 100 bp, Homo sapiens
agggcctcctcaagaagggcgcgtgctacggggacgacgcgtgcttcgtggcccggcaccgttccgcggacgtgctcgggaacctcagaacctgttctgg

SEQ ID NO: 831856 - DNA, 98 bp, Homo sapiens
aacccagggactggcgcactcacagctttccagtgattgcctcaccatcctatccatgccattctgctattcctcatgctggtgcctctctaccacca

SEQ ID NO: 831857 - DNA, 100 bp, Homo sapiens
actgtgcagaatctacaaattttgctactgtcagatggattgactatggaaaagttgccaaattgggaggttatattcaaaagaaaaaggaactgtgggg

SEQ ID NO: 831858 - DNA, 98 bp, Homo sapiens
aggtgaggacttactttcatgagtttggtcacgtgatgcatcagatttgtgcacagctagagatgatcgctatggaaaatcctgcagacttgaagaag

SEQ ID NO: 831859 - DNA, 100 bp, Homo sapiens
gtggctttggattcagaaaaggtggaccagatgacagaggaatagccaggccagaagaaggaaggcctgtggtgagtgggacaggaaatgacatcaccac

SEQ ID NO: 831860 - DNA, 100 bp, Homo sapiens
gtccagctctccggtcatctttgcaggtggtcagatcatgtttcactccttcggcaacaagcaagggccccagcacgggatgctgatcaatactccctac

SEQ ID NO: 831861 - DNA, 98 bp, Homo sapiens
cagatgttcagatatatcttgaattttctacgaacatccaaactcctcattcctgatgatttcaaggtggctacagtttcagaaaagtcacgtataat

SEQ ID NO: 831862 - DNA, 98 bp, Homo sapiens
gcgaagtggagagtgacatgcagttggatggcggtgactgcgtggaaagaccacagcaagattctttcattcgtctcctcctagcctgggggaccagg

SEQ ID NO: 831863 - DNA, 98 bp, Homo sapiens
tgacttattcgagtggttttgtgtgaagacactgaaagtgtgctgctctccaggaacctacggtcccgactgtctcgatataattggtgattacaact

SEQ ID NO: 831864 - DNA, 108 bp, Homo sapiens
ctgatgtgtgctttggccatgtggttccccagaaggtatctaccaaagatctttcggaatgaccggagtttcataatagaagagcagagtttcttactatgtgaagat

SEQ ID NO: 831865 - DNA, 100 bp, Homo sapiens
gcccgtggtccttctccatattcgagattgtagaaggcatgaaacaaaaaatgtggagtattgaaaatattgccttcggttctggtggaggtttgctaca

SEQ ID NO: 831866 - DNA, 98 bp, Homo sapiens
caagatccagatcgggatttacgtggagatcaagcgcagcgatgctagagaccgttggatggcagcttaaccttcagatggctcactctgctcaagca

SEQ ID NO: 831867 - DNA, 75 bp, Homo sapiens
tgaatcagaaattgagaagctgagctcgtccgcatggtgctgaatggctgaggaccttcccagtctccccagagt

SEQ ID NO: 831868 - DNA, 100 bp, Homo sapiens
tgtttatagtagactgaatccacatagagaaagtgatggggttatacattggctcttcaaagacgttcacctcatcagagaaatccctgactcctttgca

SEQ ID NO: 831869 - DNA, 100 bp, Homo sapiens
aggaatggctggaaggagaagatctttctgaagagctcaaaaaggaaaatcctttcttgaggcaagagtttgaatcagcttgggtactgacaaatattgc

SEQ ID NO: 831870 - DNA, 100 bp, Homo sapiens
aacggcacactcacccgccggcatcagaagtcattgtattcaaagaagaataagcaagaaagaaaagaaggaaggaagagaggtagacagatacaagatg

SEQ ID NO: 831871 - DNA, 98 bp, Homo sapiens
gagtcaacagggaagcagaggagaaccgggagccattcagaaaagttccaatttgagccgctgtgaaaaaggcctccaccagcctctcaccagaagag

SEQ ID NO: 831872 - DNA, 98 bp, Homo sapiens
gtgcctcaaagtctacctgagcgcccaggaaacagaccttatcctgacttttaatatatcaatgcaccgatcttggtggatggagaatggaccaggat

SEQ ID NO: 831873 - DNA, 112 bp, Homo sapiens
tgaaggaagctgccttgtacccacatctcccgccagcattgcagtgtcgagatggctatgaaccctgtgtaaatgaaggaatgtgtgttacctaccacaatggcacaggata

SEQ ID NO: 831874 - DNA, 98 bp, Homo sapiens
ggactctccattccagaaccatggcccaatttgtccgtaaccttgtggagaagaccccggcgctggtgaacggtagatgatgagctggagatcaaggc

SEQ ID NO: 831875 - DNA, 98 bp, Homo sapiens
tagccgggagttacaccgccaccgccagatggcaggagaggagaacttcaaggaagagctcagatcccaggatgcttccaggaacttgaaccagcatg

SEQ ID NO: 831876 - DNA, 100 bp, Homo sapiens
aagagcctggaaaatggagcagacctggacgaggacacttgtattagctttaatagaagagaaatggaggagccatagaatattaaggatgaattcagga

SEQ ID NO: 831877 - DNA, 100 bp, Homo sapiens
gaaatgtaaagaaggttctctttgtgtgagtaagcaagaacctggcacgtgtggttctcaaatataggcattctgatgggaacttgtgtgttaaagtaac

SEQ ID NO: 831878 - DNA, 51 bp, Homo sapiens
agaacctccacagtcaagaggacggaatactcccccagttgcaagaggcgc

SEQ ID NO: 831879 - DNA, 126 bp, Homo sapiens
cggctgcagcagcaagtcccatcggaggacctccctgccctgtataccgagggaacaggtgggaccagggagattggatctgctctcaccaggatgtgcatgaggcacagaagcattgaagccaag

SEQ ID NO: 831880 - DNA, 99 bp, Homo sapiens
gcggatcaggatcggaagcctgcgtaactttctcccttgatccgggagtctttccactgggtcttagtggtgcaatggctagtataagcgtgcgttcga

SEQ ID NO: 831881 - DNA, 100 bp, Homo sapiens
atccgcacccacacgggcgagaagccctacgagtgcaacatctgcaaggtccgcttcaccaggactttccttatcccagttgattgtgcagaatacactg

SEQ ID NO: 831882 - DNA, 100 bp, Homo sapiens
caacatatgatgaaaaccccatgaagataacaattggtgtatatgatccctgtaacttagcccagtaccctggatggcctttgaggaattttttggtcct

SEQ ID NO: 831883 - DNA, 100 bp, Homo sapiens
ctcctgaacatcttaaagaacctttggtatacatgaggaaagcacagattacggtctttggtcaaacaattagagagaggggaagcttcagtggtagatc

SEQ ID NO: 831884 - DNA, 98 bp, Homo sapiens
ccttagtgaggctcagagatgcctgtaccgtgatgtgacgctggagaacctggcacttatatcctccctggatgtgtgcaacagcaccgatcttccgg

SEQ ID NO: 831885 - DNA, 100 bp, Homo sapiens
ctgccagactttaaatgttgctggaagcatcatcacaaaggcatatttggaagttacagatggtaaaatgtcggttccaggaccttaccaggcggccact

SEQ ID NO: 831886 - DNA, 100 bp, Homo sapiens
ccagaggactttcttccagcttctgctgtccttctttgtggagagcaaggccacggcagagacaacgtgtgtaccccaagtgcacatggctgaccacccc

SEQ ID NO: 831887 - DNA, 99 bp, Homo sapiens
tgagcatttcctcgtggaggacagttactttcctgagaacatgtgctcacgtgtgcaatacaggtggagctgatcagaataatgttcagcatcaacccc

SEQ ID NO: 831888 - DNA, 100 bp, Homo sapiens
cttcaatccgctctactggaatgtggaagactatgaccgtctgaggcctttatcttacccaatgaccgatgtcttccttatatgcttctcggtggtaaat

SEQ ID NO: 831889 - DNA, 100 bp, Homo sapiens
agctttcagtcctgatggcaggtatctggcaagtggttcttttgacaaatgtgtacacatctggaacacgcaggtttctgctttgggacaaccatacatc

SEQ ID NO: 831890 - DNA, 98 bp, Homo sapiens
cgtgtcttacatcagttcagagaggctgaccggttccctgatgtgttacctgcttctgctactgatccaaactgcagaacttctcattcatccccaag

SEQ ID NO: 831891 - DNA, 100 bp, Homo sapiens
gtacctgtggactcagcagcagcaactgtgggactttttgactacaattctcaacaacaggctggtgagattggagagatgaaggatggagtcccagagg

SEQ ID NO: 831892 - DNA, 100 bp, Homo sapiens
gagaaatgcccgggctgctgtagcaggagaggatggcagaatgattgctggccaggttttagggtgaagcaagaagcatttcatttgcacatctttcttg

SEQ ID NO: 831893 - DNA, 100 bp, Homo sapiens
tgaaacatggcaggctcggatgctgctggggcagaagatcaggggaaaattgcggatgatctgaatgatagcagtgaccaccagcaacctacagagctgc

SEQ ID NO: 831894 - DNA, 98 bp, Homo sapiens
tgacttagaatcttcccttttttactccattcaagagcagcattcataaatttccaggattggaggttttaaagcaggaaacagcagttgttgaaaac

SEQ ID NO: 831895 - DNA, 100 bp, Homo sapiens
gaggtgcggtcagctcgctgcagcttcaacggagacttcgtgtgcggacagtgtgtgtgcagcgagggctgcctccttttctgaaagagttcggaacatg

SEQ ID NO: 831896 - DNA, 100 bp, Homo sapiens
cctccagagagcaagtggtggaaaactctgagagaaaaaatgaagagcaatgaagctgcatccaaggttatcaatactctggctgaccatcatcatcgtg

SEQ ID NO: 831897 - DNA, 99 bp, Homo sapiens
aatgattgctcaagacttctttgtggctttgctaaaggacaggaagtaaaaatgttgagtagttcaaaatctatgaaggaactcactgaagaacagcag

SEQ ID NO: 831898 - DNA, 99 bp, Homo sapiens
gcctccccagccacgtggaactgattactacagcatcccatttcccacacccactactccgctgactgggagggatggtagcctggccagcaaccctta

SEQ ID NO: 831899 - DNA, 98 bp, Homo sapiens
ggaactccagagtatttggctccagaaataattctcagcaaggtggtgacagctactggaacacttgctttaggtgtcaacatgccttgtaaatctgt

SEQ ID NO: 831900 - DNA, 98 bp, Homo sapiens
ttccttgtgaaacctcctagtagaaaaagttcttgggacaaacttcatttggggaaatcagccttatggtcccacctgttacattatcaggacaaccg

SEQ ID NO: 831901 - DNA, 99 bp, Homo sapiens
taccatgtccgcccaggcgcagatgcgggccctgctggaccagctcatgggcacggctcgggacgaccttctctgatggatgacctctgtgaagcaaat

SEQ ID NO: 831902 - DNA, 98 bp, Homo sapiens
aagaagcggtgacccttgtggaggatatgcagagagagcttgggagactgagacaacaggttccgcaggctctgcgtctggtgtggaagagctcacgg

SEQ ID NO: 831903 - DNA, 100 bp, Homo sapiens
atctttttcaataaggtagagattgttggcatgttgcagattatccagccaagaagatgaaaactacagagaagggatttggcttggtggcttatgctgc

SEQ ID NO: 831904 - DNA, 108 bp, Homo sapiens
tatgcgtttgtcactttttgtacaaaagaagcagctcaggaggctgttaaactggtagccaatctgaattctaaggacctctcatataccttaaaggattatgttttt

SEQ ID NO: 831905 - DNA, 100 bp, Homo sapiens
gagtggcattgccaacctttacagacctatccaagaaagaccacagcaagattctttcattcgtctcctcctagcctgggggaccaggctcgaactgacc

SEQ ID NO: 831906 - DNA, 98 bp, Homo sapiens
gataaatcaggaatagattctcttgaccatgtgacatctgatgctgtggaacttgcaaatcgaagatactgcttttgcaaaaaataaagatgatggaa

SEQ ID NO: 831907 - DNA, 100 bp, Homo sapiens
ctatgaacagtctggccacctctgtattcagcatagctattcctgttgatggtgatgaagacagataacgaaggaggcccaacttcattcaataaggagc

SEQ ID NO: 831908 - DNA, 100 bp, Homo sapiens
agctcggggtctggatattcctaaagtccagcatgtcatccattaccagaaccctggaatggcgatttctggcgtgctgctggtcttctgcctcctggag

SEQ ID NO: 831909 - DNA, 100 bp, Homo sapiens
gttttggttttgatatggattatacccttgctggatctcatagatcagaacatactggagcctgtaacccgtgcacagagggtgtggattacaccaacgc

SEQ ID NO: 831910 - DNA, 100 bp, Homo sapiens
ccgagatgtctcgctccgtggccttagctgtgctcgcgctactctctctttctggcctggaggctatccagcaaaccaggcgatgcggaagaagctaatc

SEQ ID NO: 831911 - DNA, 98 bp, Homo sapiens
aggagttgccgcagccccaggctgagacaggcctggtctccaagtcctctcctaagaagcctcgtggacgtaacatcttcaaggcccttttctgctgt

SEQ ID NO: 831912 - DNA, 101 bp, Homo sapiens
cagaaacctgttttttttctggagctgatcttagaaacctctgcacagaagcagcggaggaggaaatggcaggtcctaatcaactctgcattcgccgctgg

SEQ ID NO: 831913 - DNA, 98 bp, Homo sapiens
cttgggtttctttcttaaaggactgatttttagaactccacatttgagaaccgggctgtgggtcggcccaaggggaagctgggcccggcctccgcggt

SEQ ID NO: 831914 - DNA, 100 bp, Homo sapiens
actgtgtccaacaatgtgccgggttccgatttcagcatcggggcagacaccgccctgaacactatcaccgacattccctcccaggctgtccctcgccgcc

SEQ ID NO: 831915 - DNA, 134 bp, Homo sapiens
tggggctgggcatcaacggcaaagttttgcagatcttcaacaagaggacccaggagaaattcgccctcaaagaatccaaccacccaggtcaaacaggaggttttgtgcgagtacccccaaggttgccaccgagg

SEQ ID NO: 831916 - DNA, 99 bp, Homo sapiens
tttccgtagatggtggctttctttggacccttgacatcaaccagttactatttgttctaaatggagcccctggatttataaacttgtgcgatgctttga

SEQ ID NO: 831917 - DNA, 99 bp, Homo sapiens
aagagcaaagataagaagagaaaaagagaagaagatgaagaaaccagcttgatatgttgatcttggagtctctgtggatcgttatgagccggaatgtga

SEQ ID NO: 831918 - DNA, 100 bp, Homo sapiens
ataacacctccgaccccctcatccgctgggactcctacgacaacttcagtgggcatcgagatgacggcatggaggaattccagtgctgaccatcgagtcc

SEQ ID NO: 831919 - DNA, 98 bp, Homo sapiens
agacattgatgaattggcatgtaattgtaccaggttacagcagctggacatattaggagacgaaaccagacagagggtcaagtttacagatgaccgtg

SEQ ID NO: 831920 - DNA, 98 bp, Homo sapiens
ccatcatcactctgtacaatggagcatttgactcttcctcggcagtcttccttattattaaggatgtacagttacccagcacgtgtacctcctcctcc

SEQ ID NO: 831921 - DNA, 100 bp, Homo sapiens
catcgagactatcgctaatgagtatagcgaccgctgcacgcccaacatgaaccgtgaagaccggaatgtgctgcgtatgaaagaacgggaaaggcggaat

SEQ ID NO: 831922 - DNA, 100 bp, Homo sapiens
ggtcctgtacagcatcgccgagaaggattacagtttaaagacaatttctgtgatcaagttgtcatttggaagattaaacccatttcacgaggacttggag

SEQ ID NO: 831923 - DNA, 99 bp, Homo sapiens
ttattgcaagttgtgactacaactgttctaatgaggtcctatctattactgctatgttgtcaggcgcttcatctaattgatgaaatggatttgaatggt

SEQ ID NO: 831924 - DNA, 98 bp, Homo sapiens
gcattctcaactctgcctggacaggctgcagctggaggctattcataaggcaccacctgtaatctactatgtccctgacttcatctccaaagaagagg

SEQ ID NO: 831925 - DNA, 100 bp, Homo sapiens
gggggcgtacaggcgcagcggccgcagcagcagcggcagtcacaggcacatcagcaaagaggaccgcagctgaatgcacagctagaaggttggctttcac

SEQ ID NO: 831926 - DNA, 98 bp, Homo sapiens
aacagctgagggaacagcagaaagtccttcatgaaaccattaaagttttagaagatcgcttcttggacacttaatgattgttggcaagaaatgtgctg

SEQ ID NO: 831927 - DNA, 100 bp, Homo sapiens
tttgtcgtcaccacaaatccagtgaacaacgatggcattttgaaaacagcaaaggtgagcgaagcaggtgttcacagaccccatgttggtggaattcatg

SEQ ID NO: 831928 - DNA, 99 bp, Homo sapiens
tccggcttccgtcccggacagagcccgtggtcgcgcaggtgggcaatgggcactccaatgaggcagccttgatcctccacagaaaagggtttgattgtc

SEQ ID NO: 831929 - DNA, 98 bp, Homo sapiens
tgaacaccatccagaagacacagagacagtcattttgtttactcattcagccctgttgcaggtcccaataaactcttcataaggttgacagaagcacc

SEQ ID NO: 831930 - DNA, 100 bp, Homo sapiens
tcggatttcaccacaagaagggctgccaggtgccaagtctagtggtggcagggaagacttggagtcatctggactgcagagaaggaactcctctgaagca

SEQ ID NO: 831931 - DNA, 51 bp, Homo sapiens
tgaagagggaagacacgcggaaacagacaggggcaagtgtccgagtggtga

SEQ ID NO: 831932 - DNA, 98 bp, Homo sapiens
agaaaggcagcggatcgtctggaggaagagatagaggaacatgcttttgacgacaataaatcagaaatcacattctgcctgatgaagatctggcttcc

SEQ ID NO: 831933 - DNA, 100 bp, Homo sapiens
ccgctgctcagcgtcctcatgtggggggtaaaccactcgattgctcgctgtaagcagctcatctgtgaccccagctacgtaaaagatcgggtagaaaaag

SEQ ID NO: 831934 - DNA, 99 bp, Homo sapiens
agaaagccagatggctgaacatcaggtgactgcttagaaaactgcacagcatctgatgaaattagcgaataagaacatcaaccatgtcttacactccag

SEQ ID NO: 831935 - DNA, 100 bp, Homo sapiens
ggaagtgagacttatttttctctctggactgtgcatagcagtagctgttgtttgggctgtgtttcgaaatgaagacaggagtcagtggatcggtggggaa

SEQ ID NO: 831936 - DNA, 100 bp, Homo sapiens
ttaggctgtgctgtgaactgtgaacagaagcaagaaatgaatactgcattgagggacggacttctggtcttcttcttcctaattgttccccttattgtct

SEQ ID NO: 831937 - DNA, 101 bp, Homo sapiens
ctgggccctctggccccaagggctaccgtggacagaagcactatgttggccatggaaatgctatcaatgagctgaaattccatccaagagatccaaatctt

SEQ ID NO: 831938 - DNA, 100 bp, Homo sapiens
gttcaactactagatgactttaaaatatcaggagttaatggaacacgatctacggattttggaaatgttagttttgtggttcctggaattcatccatatt

SEQ ID NO: 831939 - DNA, 99 bp, Homo sapiens
agcatctcctggaaagatgtaaatctcccaagtccaaagggttgctccttgagggcaggacagttcttatggctttatccgttgcgtaagcacagagag

SEQ ID NO: 831940 - DNA, 100 bp, Homo sapiens
aatggacacagcagcctgtgtgaccctgaaacatcgatatgccagaatttagcctatgaaatcatcctaaccctgggacaggcattcgaagtcgcttacc

SEQ ID NO: 831941 - DNA, 135 bp, Homo sapiens
gctccattggcacaaccaagcttcgcctggtggaattttcagcttttctcgagcagcagcgagacccagactcggtatgtgacgcattcccagactcttcagccaactgagcatcagcttcttcacagcaattgg

SEQ ID NO: 831942 - DNA, 100 bp, Homo sapiens
ccggcttctgctgttgctcttctccgccgcggcactgatccccacaggaggagagacttcagcatgcaaaccttcatctgttcggcttgcaccgtcattt

SEQ ID NO: 831943 - DNA, 98 bp, Homo sapiens
cgtacagaatacattcagccgtcagattcaaccctatgaaaagataaaggccaggggcttgcctgataatatatcttccgtgttgaacaaactagtgg

SEQ ID NO: 831944 - DNA, 100 bp, Homo sapiens
caattctgccataagccctgtcctccagctgaaccttcacctagccccaggattacaaggaaaagcaccaggcaaaccaccatcacatctcattttgcaa

SEQ ID NO: 831945 - DNA, 100 bp, Homo sapiens
aggccaaacagagaatgtggttcagctcatcaacaagggcgccagggtagcggttaccaagactgctgatcttggacttgatattggtgcccagggagaa

SEQ ID NO: 831946 - DNA, 123 bp, Homo sapiens
cccgtgatggtcacctgaaccggaagaagctggtctccatctgtgagcagtatggtttacagaatgtggatggagagtatgactatgaatatgatgaaaatggtgacagagtcgttttaggaa

SEQ ID NO: 831947 - DNA, 98 bp, Homo sapiens
aataagaatgttcccaggaaggaccttgccattcatgacaactcacgtaccatctatgtggtggataatgaggtcaagattgacttcgtacccaggca

SEQ ID NO: 831948 - DNA, 100 bp, Homo sapiens
gagagagagcgcgagagatggagatgggcagacggattcatttagagctgcggaacaggacgccctctgatgtctcctctgagcctccggcctccataag

SEQ ID NO: 831949 - DNA, 99 bp, Homo sapiens
aatcatcaggaatccattatggtgtcattacatgtgaaggctgcaagatctgtgactttggcctggcccgtgttgcagatccagaccatgatcacacag

SEQ ID NO: 831950 - DNA, 100 bp, Homo sapiens
ttgaggtttctaccaaccagcaacagtggaccatggttgctgacagaactaaagtctcctgcaactcagtgtggaggctgctggccctgccatctgtaag

SEQ ID NO: 831951 - DNA, 100 bp, Homo sapiens
tattgcttgctgttcctaatttatacagtgatgctggcatttcgatcagcttacgaggaaatatttcagtaaaagcagttaaaaaagaagtagaaaagaa

SEQ ID NO: 831952 - DNA, 98 bp, Homo sapiens
catcacctgccaccgtgctgggctcacagagccagattccaggggacggcaaaacagaacagaaaggcggagataaaaagaggggtgttaaaagacca

SEQ ID NO: 831953 - DNA, 99 bp, Homo sapiens
atgaagatagcatcagaaagcagcaagtttcggacagtacaaagaacggtgatggtacgaagcgccgtcacagggattatggacccagaacagatgctg

SEQ ID NO: 831954 - DNA, 100 bp, Homo sapiens
cccagagccccgcgtttcagccctagggaaggtagaaaatctttatcctcaaattggctgggtagaaattgatcctgatgttctttggattcaatttgtt

SEQ ID NO: 831955 - DNA, 100 bp, Homo sapiens
gccggcacctccagattgagattgagggattaattgggcggactactggaagtcacagccaaagaaattctgtgattactgcaagtgctggatagcagac

SEQ ID NO: 831956 - DNA, 100 bp, Homo sapiens
cccggcccagccatggccccctggcgcaaagctgacaaggagcggcacggcgtgggattgacttggcctctacttcttgttaaggaaattcatctcttgt

SEQ ID NO: 831957 - DNA, 100 bp, Homo sapiens
agggataggagaaggatgtggactgcagtgctgcagtgccaggacatctgctttacaagaacacagcaaactaagaaagggtatagtggccactgcgggc

SEQ ID NO: 831958 - DNA, 98 bp, Homo sapiens
agggattctcatgcctcagtcccccacggaactgggactacaggcccttcataacacaaggcttttatctgcttattccgccattgatcccagagtga

SEQ ID NO: 831959 - DNA, 99 bp, Homo sapiens
gtccgcggcgcgcccggcccgggagctatgaagacatgattggtgaggaggtgccatcggatcaatactactgggctcctttggcccagcatgagcgag

SEQ ID NO: 831960 - DNA, 100 bp, Homo sapiens
cgctgttctcccaccaggataaactgcggcagatcctgtctcagccagctgttcaggagactggaagtgttcacacagagccccggagctatgtggagtc

SEQ ID NO: 831961 - DNA, 100 bp, Homo sapiens
caccctcctgctcggctggtcctactacgcctacgccatccagctgtgcatagagcagtcattatggcgaaccttggctgctggatgctggttctctttg

SEQ ID NO: 831962 - DNA, 99 bp, Homo sapiens
gatgaccgtcaccaactggttcaaggtgtacaactatgagcctttgacacagctcaagaatgtcagagcaaattactatggaaaatacattgctctaag

SEQ ID NO: 831963 - DNA, 100 bp, Homo sapiens
agaattgtcagatttcgctttgatgaatcaggtcccgaaagtgctaaaaagtccagttacaacacagggatcacaacaaacacaaccgccacagaagcac

SEQ ID NO: 831964 - DNA, 100 bp, Homo sapiens
ccacacacgttctgcaaagtcgacaagaatctcaataacagtatgatccgttataaagaagagtttaaaaagtccaaggataagtgtacatttgtgactg

SEQ ID NO: 831965 - DNA, 99 bp, Homo sapiens
agaggcccaacaacacctgttgcttttgttggtgctgttgttgcagctgctcctgatccctttcagctccctgcaaaaacagaaccaataaaagaacga

SEQ ID NO: 831966 - DNA, 100 bp, Homo sapiens
gctgattcctgccttgtcttctccactgttcctggaggaatccgagaagagcagagcggagggagccccagacacgctcctttgggacccagatcatcgg

SEQ ID NO: 831967 - DNA, 127 bp, Homo sapiens
tgtcctcaactttctgggcgttcatgatcctggccagcctgctcatcgcctactgcaagttacactgttagaccttatgatagccaagataacgagtgatgagccactcaccaaggatgacatccct

SEQ ID NO: 831968 - DNA, 100 bp, Homo sapiens
tggatttggatgctgcaaaaacgagactaaaaaaggcaaaagctgcagaaactagaaattcaggcacattcactgaaatccccgccagcaatattcgaag

SEQ ID NO: 831969 - DNA, 99 bp, Homo sapiens
gggattcccagccatggcagattcctccgggcagcagggcacacaagtctctgaattttgtctcaacactgctccagattactatgtcggaacagctgg

SEQ ID NO: 831970 - DNA, 100 bp, Homo sapiens
ctggtcctcctcctcctgctgtggctgagccttggggtgaagacagacctaagtcaatgttagtctaccactgtacgtctggtaacctcaatccctgcaa

SEQ ID NO: 831971 - DNA, 100 bp, Homo sapiens
gggactccattccaaaaaaataagaaaaacagaaaaataataattacatctgcaaagaccttatttccaggccataggaaaaggatacagagtagagttt

SEQ ID NO: 831972 - DNA, 101 bp, Homo sapiens
ggggaatgccttgccttggcccatctctggaataccaggaatgcaacattttgccctgcccaggctggtggttcgtgagcacttctgaggagcagggctgg

SEQ ID NO: 831973 - DNA, 100 bp, Homo sapiens
gccctggagaaaaagctgaaccaggcccttttggatcttcatgccctgggttctgcccgcacggacccccatgtgcggtggctactaaagttcgaaggca

SEQ ID NO: 831974 - DNA, 98 bp, Homo sapiens
tcctttggaagttattccgtagcataagagctgaaacttcagagcaagttttcattgggcaaaatggggtgtgggaataagtatctttggaagaccag

SEQ ID NO: 831975 - DNA, 100 bp, Homo sapiens
attcgttttcaggagcatctccagaatgaagtgatcagccagcagctgtgcgtcatcttcacacactgctacgggccctaccccatccccaagctcacag

SEQ ID NO: 831976 - DNA, 100 bp, Homo sapiens
atgcagcaaatactcagaaacatccttccagaaggagcgaactgaagaggttctacacaattgccctaccacttatgtcttggatgaagatgaacctcga

SEQ ID NO: 831977 - DNA, 99 bp, Homo sapiens
agcagcagcaagttagtggattaaaatctcccaagaggaatgacaaacaaccagctcttcaggttcaaaccttgtactactcagctgatcacaagctgc

SEQ ID NO: 831978 - DNA, 99 bp, Homo sapiens
gcagtccaagtcccggaagatcgcgatcctgggctaccggtctgtgggatttccatttaaacagggttaatttggaagaatcttcaggagtggaaaact

SEQ ID NO: 831979 - DNA, 100 bp, Homo sapiens
cagttggtggcctgggcagcctgctggaccctgccaagaagtcgcccatcgcagcagctcgtacgtaggaagcctggacgtgccaaggcccaacagcagg

SEQ ID NO: 831980 - DNA, 98 bp, Homo sapiens
cgaattccagaatgatgaaattgtaatgtatgacaacatgtccacaatggtgtacataaaggaagacaagttggagaagcttacacaggatgaaatta

SEQ ID NO: 831981 - DNA, 100 bp, Homo sapiens
cagttatgaagaacacttggagaaacatcgaaaggttggacgtgataagtatgagcctgcagctgtttcagaacaaggtgataaaaagggcaaaaagggc

SEQ ID NO: 831982 - DNA, 109 bp, Homo sapiens
accatttgaaggaacagcatcctgacatcgaaaacccggacctcgcttacctgcatgctgtccaagtggtaagaagttcagaagcaagcctcagttggcaaggtacctg

SEQ ID NO: 831983 - DNA, 100 bp, Homo sapiens
tcatattatacagtgcgacagctagaattggaaaaccttacagaatgttacgttcataacttactaaggattagtgtatattttccaaccttgaggcatg

SEQ ID NO: 831984 - DNA, 100 bp, Homo sapiens
aagggacggatacaacgactagaggtactctcatttacacatcccatctcatttcattctgctgaaacatttgaatcattactggcttgtctgaaaatgg

SEQ ID NO: 831985 - DNA, 100 bp, Homo sapiens
tgatgttggagaactacagaaacctggtctccctagtaggagagaagtttgctgaggaatgccttcaagcacaaagtgatgaatgactgccttcaagtct

SEQ ID NO: 831986 - DNA, 99 bp, Homo sapiens
gagccttggaccctttggaaccgaaagtcaccttcaggccattcagaggaggaaagagaggggaatatgaagtcagccaagccccaagtgaaccacagt

SEQ ID NO: 831987 - DNA, 100 bp, Homo sapiens
aaaaattcagaaaagagcaacttggagctgtaaagggcctgctttcttccccgggcgatgtgcagagatctttgccaggggtcaaagcgtcgggaagctt

SEQ ID NO: 831988 - DNA, 100 bp, Homo sapiens
ttcttaaaggactgatttttagaactccacatttgagttggatgttgatggacagatagactctattcatctactcctgtcaccaagacaggtgcacttg

SEQ ID NO: 831989 - DNA, 100 bp, Homo sapiens
gaccatcctgctggtcagcactgcggctggtttggactggtctgaagagagcggagaggaaccagaggactcagagcaggcctcgccctaccaggttgca

SEQ ID NO: 831990 - DNA, 100 bp, Homo sapiens
accaaaaggacgtctatgatatccctccttctcataccactcaagggcaattctgtggtgttcttggtcacacatttatggagtttctgaagggcagtgg

SEQ ID NO: 831991 - DNA, 100 bp, Homo sapiens
ttctgcttcaagttcccggctcccaggtttattctcccatagcatgtggtggctttctagaagatgaccatagaggaccttccagattttccattagaag

SEQ ID NO: 831992 - DNA, 99 bp, Homo sapiens
gctgattcctatgtataagttaatggagaaaagagatatgaatgaagtggaaactcaattcaagctggagaccatggccaaaatggaggtgaaaacctc

SEQ ID NO: 831993 - DNA, 100 bp, Homo sapiens
tgcagcgccgtgtggcacgacacaaaaatcaggaccagttgctcttctgtgatgactgcgatcgtggctaccacatgtactgtctcaccccgtccatgtc

SEQ ID NO: 831994 - DNA, 100 bp, Homo sapiens
cttggagagcccagagcgacccttcctggccatcctgggcgggcctgtctacaagtcattttgcttgggcatttcactcagtagcagaagaagaactgct

SEQ ID NO: 831995 - DNA, 100 bp, Homo sapiens
agtgctatgacaagaccaaggtcaacaaggacaacaatgagatcgtggacaagatcatgggcaaaggacagatccagaattatatccagatcgagagaca

SEQ ID NO: 831996 - DNA, 98 bp, Homo sapiens
aaccagttgcgaaatggtctgaggcagagtgtggttcagtctgcaaccaccactccatcaggctctcctcggacctctcaacaaaacgtttataatcc

SEQ ID NO: 831997 - DNA, 100 bp, Homo sapiens
cgtagatacaaatttttggatgatgatggatccatttctcctattgaggagtcaacgagtggtaaaatttcagccttccctttggccttgggactcagtg

SEQ ID NO: 831998 - DNA, 100 bp, Homo sapiens
cgggtcctcctagaaattccccccgaagaagactcccccacatctggatggcaagattattttatcataaaccccagtttgccattttggatgaatgcac

SEQ ID NO: 831999 - DNA, 100 bp, Homo sapiens
agcagccctggtgtcacctatcagtaaaaggtggatcggatcattttctgtgtcttcttagaagttgacttcaaaatctacaaaaagaaaatgaatgagt

SEQ ID NO: 832000 - DNA, 100 bp, Homo sapiens
taaggaattggtaaaagatgtttattctgcagcaaaaaagctgaagatggatcgagtaaagcagctatcagttgagggatttgcagttgataaaatggct

SEQ ID NO: 832001 - DNA, 99 bp, Homo sapiens
ctgattcaagtgttggcggatggaagggaggagactcctgaccctcagaatgagccatccaaaactctgtttgtcaaaggcctgtctgaggataccact

SEQ ID NO: 832002 - DNA, 99 bp, Homo sapiens
agatgtggtggaatatgccaaggaaaaactggagagcttcatcaaaaatagtgatagctttgataagtggatgaaaatactaggaaaagtttatttaag

SEQ ID NO: 832003 - DNA, 99 bp, Homo sapiens
tgggggttgatacagcagagacgtcatacttggaaatggctgcaggttcagaatgatgactttgaccagtttgataagcctggcgcggaacggtcgtgg

SEQ ID NO: 832004 - DNA, 50 bp, Homo sapiens
ccaacatccagctacgactggtacaagggattgtggtccatcaggagtct

SEQ ID NO: 832005 - DNA, 99 bp, Homo sapiens
ccatggacaagcaaaatattaaacttttagacctgaagccatacaaagtaagctggaaagcagatggtactcggtgatcgagtgtggatcaaagactgg

SEQ ID NO: 832006 - DNA, 100 bp, Homo sapiens
tgagaggtcacctactcatccctttcactgaagaagtggggaaaacaaggctcagacaggtgttccatgccttcctgcgtcacagcgttccatgtcacat

SEQ ID NO: 832007 - DNA, 98 bp, Homo sapiens
ggcagtatcaacggagtctccggggagatacaactcgtcaacgaatcaaattcagtgatgacagagtatgcaagagtcaccttctcaactgttgtcct

SEQ ID NO: 832008 - DNA, 50 bp, Homo sapiens
tagaacatcactgttaaccctagaggtagggaagacatatgagctactca

SEQ ID NO: 832009 - DNA, 100 bp, Homo sapiens
agaactcgatggtgttgtgagagatttctgcagtgaagattgctgtaaaaaatttcaggattggtactacaaggacagtcattttgtttactcattcagc

SEQ ID NO: 832010 - DNA, 98 bp, Homo sapiens
tcgccttcgccgaccggctacgcgccgtggacacagacggggtggagcccatggaatcggtcctggaggacagcttccttcaggcaaaagaagaactg

SEQ ID NO: 832011 - DNA, 98 bp, Homo sapiens
gcactggactcatggaggctgagcatttattcaggagagtgggcgctccctttctcttcctggaagatcagtcccaccccccatttctacatctcctt

SEQ ID NO: 832012 - DNA, 98 bp, Homo sapiens
gagcccgctgtaattggaagaccagattttgaacatgccgtggaagcttctaaactttctagtcaagttctgatctacaatggccaactggacatcat

SEQ ID NO: 832013 - DNA, 100 bp, Homo sapiens
aatggaaagaagtttgattccagtcatgatagaaatgaaccatttgtctttagtcttggcaaagatgacacacaataatttttggttgaagaagatagaa

SEQ ID NO: 832014 - DNA, 100 bp, Homo sapiens
acagtgactccaggatttctgaagactattgtggaagaagcatccattaagagttcaacctggtcattgctatcatctgtataatggtcttagagcaagt

SEQ ID NO: 832015 - DNA, 98 bp, Homo sapiens
ttccatgtcaacatagtcctgatggagtcccctgtttccacaccagcagtgctgccaatacaccttttggtgccagtggtcaacaatgacatctcatc

SEQ ID NO: 832016 - DNA, 100 bp, Homo sapiens
ggggttaattcaacagttcaccaccattaccgagataatcattcaggtcttcgtgagctaaggccaaacaaacaaaaaacacttgctttgatggactgaa

SEQ ID NO: 832017 - DNA, 100 bp, Homo sapiens
atcaagagcaccctgatttggctaggcgcacagcagtgaatcagtggctaacctggttagaaactgctgaagaagaagaatcagaggaagaagctgacta

SEQ ID NO: 832018 - DNA, 100 bp, Homo sapiens
tttttcattgttccactggacgctcatcagagggaagatctttttcctcaattgtgctgaagctgctgaaagatggcagaagaagtggtggtagtagcca

SEQ ID NO: 832019 - DNA, 100 bp, Homo sapiens
gccgccgcgggatccgagtgcgggcgcgggcgcgggcgctcccggcgagccacgacattcacggcatggtgtaactcccacctccggaaggcggggacac

SEQ ID NO: 832020 - DNA, 100 bp, Homo sapiens
ggctcttatgctcagaagaagggcagtgccattgataggatagcagaccccacgttagctgaaatgggaaaaaacttgaaggaggcagtgaagatgctgg

SEQ ID NO: 832021 - DNA, 100 bp, Homo sapiens
gctgcttttgatgtctgacaacgtggatcgttgttttgaaactgtttctgaaagatctatccagcactccgatggccagcaacaacaccgccagcatagc

SEQ ID NO: 832022 - DNA, 100 bp, Homo sapiens
catagattggaatattggtgggccagcaatcctcagacgcctcacttaggacaacttcctgcctgacacagctcacttcaagaagtgcacaatgtcagaa

SEQ ID NO: 832023 - DNA, 100 bp, Homo sapiens
accaaggagttctgggctgcagatatcatctttgctgagcgggcttattccgcagtggtttttgacaggtttttgactaaaggccagaatgcattggtag

SEQ ID NO: 832024 - DNA, 100 bp, Homo sapiens
gtcaagccactcttcaatatggaagataaggcgattgaccgaggcctggcttttgaacttgtctatagccctgctatcaaagactccacaatgagaaggt

SEQ ID NO: 832025 - DNA, 98 bp, Homo sapiens
gcttgggagaatgagctgcagaagatgacccgggggcaggcgtctgtagaggcttctggtgaaatcgcattatgcaagactggatttcctgaagatgt

SEQ ID NO: 832026 - DNA, 99 bp, Homo sapiens
gagcatggctatgggagaaggaaggcaggcagcaggcagatgtgtcttgctgaatcagggctctcttatccctgccatcgacttacagtgggaagaaga

SEQ ID NO: 832027 - DNA, 100 bp, Homo sapiens
tagcacatcacctacactaccacggccacactcaccactccatggccacacagcttggtgtaaaaattgccaaagcagttgcctgccacaactttgtaaa

SEQ ID NO: 832028 - DNA, 100 bp, Homo sapiens
aagaacagtgttctacccatggtttacagagcactagaagctccttccattcagatccagtaatccttcccctctaccaccggatatggctcctgggcag

SEQ ID NO: 832029 - DNA, 127 bp, Homo sapiens
gagcctttcaagggtgaaatgaaccgtggcaatttcttagagatcaagaataaatttctagctcgaaggtttaaggaaattctgaaacagccacacctacaaatgtagacttgcctcaggtcatccc

SEQ ID NO: 832030 - DNA, 100 bp, Homo sapiens
ccaatcttgtgtgggcactgaagggggactacaggttcgagaaccccaactgtaaacttgaagacaagactgaagatggagaggcactagattgtaagaa

SEQ ID NO: 832031 - DNA, 98 bp, Homo sapiens
ggagttgggaggacccgggacaccgcacagccgggaaatgatcggggtactgtgcaaaaagtggttgttcttcctactaacaactctgtcagtggcga

SEQ ID NO: 832032 - DNA, 100 bp, Homo sapiens
ggacaagcgactctccatggtttctctcaggttctgagactctaggcaggctggcaggcaacaccttagggtagcaacacaagtcggaatagaatggaac

SEQ ID NO: 832033 - DNA, 100 bp, Homo sapiens
tgatcagagcgatggacacgctaaggatacagtatgtgtgtgaacagaataagatccctcatccacctacatcaggcaactggagagcaaagtgaggctg

SEQ ID NO: 832034 - DNA, 100 bp, Homo sapiens
cccgccaaccgcaaccattgacgccatgtcgggttattcgagtgaccgagaccgcggccgggaccgagggacttcctgatccatttgctaaggtggtggt

SEQ ID NO: 832035 - DNA, 100 bp, Homo sapiens
ctgtgttgaacttcacagccttgctcattgagtacagcttttcccggcatctgtacagttccatagagttttcatggagtgataatgaaaggagcagcag

SEQ ID NO: 832036 - DNA, 98 bp, Homo sapiens
agaagtaatggctcaactgatttacagacaaatcagatggcaactcttggggaagctcgcctaagggaaatggaagccttgcagtctctcagactcgc

SEQ ID NO: 832037 - DNA, 99 bp, Homo sapiens
gagcaaggagcgcggaatcggggagcgtccggagctagctggatcctctaggcagttcagagtctgtcatctgaaccatgaggatctggtggcttctgc

SEQ ID NO: 832038 - DNA, 140 bp, Homo sapiens
gaaaacaggccgaagtggctaaccaagaaactaaagaagacttacctgcggaaaacggggaaacgaagactgaggaggagcacacagcacgctgcactgtggggaccgctgtcctttggtctgcatgctgctcatcgcat

SEQ ID NO: 832039 - DNA, 100 bp, Homo sapiens
acaggaatttgctggacctcctctcagcacagccagctccgtgccctctttttaagacaattatctcctatattgatgagcaatttgagaggtacctgca

SEQ ID NO: 832040 - DNA, 100 bp, Homo sapiens
tgcagaaggtctctggagacatcttcagcagattacctaaaacctcgggcagaagaggagaggaggatagcagcagaagagaagaagaagcaggatgaac

SEQ ID NO: 832041 - DNA, 101 bp, Homo sapiens
caaccggctccagggcactggtaatttggctagaggaccgcgcggaggcagcgggctgcttttctaacccaaactgtatgtcttgatgacactacagtaaa

SEQ ID NO: 832042 - DNA, 98 bp, Homo sapiens
ggagcgccatggcctgcatcctgaaggctcgcttctcatatgtgcggatgaaatatcttttcttttcctggttagtggtttttgttggaagctggatt

SEQ ID NO: 832043 - DNA, 100 bp, Homo sapiens
gtctcagaatattcaagaagatgatcttcaacatttgcaactggtattccctctcgagtggtttccactcaacaagcccagtgttggggactacttccac

SEQ ID NO: 832044 - DNA, 99 bp, Homo sapiens
actgagaactcggtgggaactagaggatgtcagggagggggacccagattttagtaaagaagaccagcatctcagacatgtcgaaaaagatgttttgat

SEQ ID NO: 832045 - DNA, 129 bp, Homo sapiens
tgaagaggcagaaggagcaggctctgcgggaggtggagcacctgaagagatgccagcagttggaatcgaagcctcttaaaatggcagatgacttggacttcgagacaggagatgcaggggcctcagcca

SEQ ID NO: 832046 - DNA, 100 bp, Homo sapiens
attcttctaatatttatcagcctgttccctgagattcttctgatagtattaaagaatgtaagaagaagaagtgccaggggttcttttcctatgactccat

SEQ ID NO: 832047 - DNA, 100 bp, Homo sapiens
accattggtctgcaggacatcactttagatgatgccgttggacataccagatggtcgaagagctccacttcctgctcattaccggagcagtagtactcgc

SEQ ID NO: 832048 - DNA, 98 bp, Homo sapiens
tgcccgagactcgtggggctggatgggaatcgtagtcttcctaggagttaatttcagaggcaggaaagtgtccggtcccagcataaaggtatccagtt

SEQ ID NO: 832049 - DNA, 98 bp, Homo sapiens
ttaccaacgccatcaccgacctcatcagtgagctgtccctgctggaggagcgcttccgggtattcaaaacctttgaccacatggcccgtcaggatgat

SEQ ID NO: 832050 - DNA, 100 bp, Homo sapiens
tgctcctcatgattttaatactggtgaacttggccatgaccatctggattctcaaagtcatgaacttcacaattattcaaccctatgaaaagataaaggc

SEQ ID NO: 832051 - DNA, 98 bp, Homo sapiens
tcaccgtgtttcccgccaggaccatcagcacgtgcccatcgacatccagaccagcaagctgctcgatctgaaactcagcaccgaggctctgctcccca

SEQ ID NO: 832052 - DNA, 100 bp, Homo sapiens
gggcagtggtggggttgctacgcctggccattcggcttctccggagagaagagatcagtgctcagattagaatcccccactcggagtctaagcatggatg

SEQ ID NO: 832053 - DNA, 98 bp, Homo sapiens
tcataggatataaagagaaacctcaagatgtggatttaccttatcccctcaacaacttttcagtggcaagtgtctcgaaataatgatgtgtggcagaa

SEQ ID NO: 832054 - DNA, 99 bp, Homo sapiens
ttggatccaaagagaggccaacattttttgaaatttttaagacacgctgcaacaaagcaggcatctaataggattcaggaatcaaagaatcagtgtact

SEQ ID NO: 832055 - DNA, 98 bp, Homo sapiens
atgaccgtggagcagaacgtgctgcagcagagcgcggcgcagaaggaacatcatttacagcgagcaatttcagcacagcaagtgtttagagaaaaaaa

SEQ ID NO: 832056 - DNA, 98 bp, Homo sapiens
gcttcatttctctgcagcaagaggaaaggaaagatgtgttcgggtttttctagaacacggaggtaaatcaacagactgggaagatgatggttggggag

SEQ ID NO: 832057 - DNA, 100 bp, Homo sapiens
aaattagcatttgaaatcatagatcagtatttctctggtgatgatattgatgaagaccctagccttgttccagaggcaattcaaggcggaacatttggtt

SEQ ID NO: 832058 - DNA, 100 bp, Homo sapiens
cgagaaaaggatcctgtctctggcccgcaatcaccccttcctcactcagttgttctgctgctttcagaccccccgagttcctggggaaaaccccagggca

SEQ ID NO: 832059 - DNA, 99 bp, Homo sapiens
tcgggtcgtggagccaggagcgacgtcaccgccatggcaggcatcaaagatctcttccgttccctgctggcagttcatcagctggatcagccacatggt

SEQ ID NO: 832060 - DNA, 98 bp, Homo sapiens
cttggccactgcttgctggtcggtcctgaaagccaagaggaggctgctgatggaaaccatcaacacaggcccttttgtgatgcgttccacgtgtagga

SEQ ID NO: 832061 - DNA, 100 bp, Homo sapiens
cccaaacttcttaacccctagaccggtttttagtccattgactatgcagcctaatgtgttggagtttccagatcaaaagatgtgccaccatttggcccac

SEQ ID NO: 832062 - DNA, 100 bp, Homo sapiens
gaatacgtttagcttcaaaaatgacaagttcgataaaagtgtgcagaccaagcctgcagactgcagagccttaatagacaaactcaaagtttgtaatgat

SEQ ID NO: 832063 - DNA, 100 bp, Homo sapiens
aagctgtttcgggccagcgacccgctgctcagcgtcctcatgtggggggtaaaccactcgggccgttgctccagggagaactgcaaatatcttcatccac

SEQ ID NO: 832064 - DNA, 100 bp, Homo sapiens
gaaattcgccccgattaaagactgtgttgcattatcagttaattggccttggtcctcacagctccaaaaagaaacaggatctcgataagctctatgagct

SEQ ID NO: 832065 - DNA, 100 bp, Homo sapiens
gccgtcgggattactatgacagaggatatgatcggggctatgatgatcgggactactatagcagatcatacaggttttgagcaaaattttggactgtgaa

SEQ ID NO: 832066 - DNA, 100 bp, Homo sapiens
tctcatatgtctcaggcttccatgcagcctgccttaccggtttggacatatttgactcttttccccccaggttgaattgaccaaagcaatggtgatggag

SEQ ID NO: 832067 - DNA, 100 bp, Homo sapiens
ctacaagggatcaagatcagctccaggcctgggaaagtgaaggatttggccctggaagaggctgttctggaggagctgacccagaaggtagcccaagaac

SEQ ID NO: 832068 - DNA, 98 bp, Homo sapiens
ctagggacccatttctcctcctttgacagggacatcagtggagccttctcagacccacaggtgtccctggccagtgtccttccacctgtccacaagca

SEQ ID NO: 832069 - DNA, 98 bp, Homo sapiens
cagtgggcctgcagccaaggaaggaggcctgcaaattcatgacaggattattgaggagttggcatcctttggaagagttcgtgaaagctttctgccca

SEQ ID NO: 832070 - DNA, 99 bp, Homo sapiens
aaaagagcaaatgcagcatttttgataggtgcctatgcatatgtccgtggttcagaccctgtattaaagcttttggacgacaatgggaacattgctgaa

SEQ ID NO: 832071 - DNA, 98 bp, Homo sapiens
cagaagccatttcaggagtacctggaggctcaacggcagaagcttcaccacaaaagcgaaatgggcacaccacaggtggtcgtcggttttctgagggt

SEQ ID NO: 832072 - DNA, 128 bp, Homo sapiens
gggactatcaggacctcctgcaggtgaagaccggcctcagtctggaggtggcgacctaccgatgtgtcatccccacaccagcgagcctctgccaagatgaaaccgatagaagaaggagcagaagatga

SEQ ID NO: 832073 - DNA, 98 bp, Homo sapiens
tctcagggaccagtacatcagagaaacccaactccatggacactgcaaatacctcacccttcaaagtaccagactatgacttgagccagctgcagcag

SEQ ID NO: 832074 - DNA, 98 bp, Homo sapiens
aagaactggaggtttgtgcaatttgagaccggtcggcactgtgcagagatcagagtactaagagacagattttccgcagatttccagtggccccactg

SEQ ID NO: 832075 - DNA, 98 bp, Homo sapiens
tcccaccgccccaccgtacttgcaagaaagcagccccagagtgtaagacgaatggaatgcaagccttttctcaaggtcttaatgagcaacagcaacag

SEQ ID NO: 832076 - DNA, 100 bp, Homo sapiens
ttccgcacaggcctgctgaactgggtgctttatatagggcttcacaggctgctcaagaagccgagatcaatgccagaaaagccaaaaactctgttactag

SEQ ID NO: 832077 - DNA, 100 bp, Homo sapiens
atcgcagtccggaggtgaggcggaactctgaggtgtacatcggtgagctcccgcaggacttcctccgcatcacgcccacacagcagcagcggcaggtcca

SEQ ID NO: 832078 - DNA, 100 bp, Homo sapiens
gcgccacctcccccctgcctccctctccgctgtgatcactgtgtccactactatgatcttcgtaacactaaacagccaatcatggtattcaaaggacacc

SEQ ID NO: 832079 - DNA, 100 bp, Homo sapiens
gacaccaaggaccagagcccctcacgggcaccagggcttcgccagcgggccagcaacaaagtgcaaggaagacaactgttagttttgtggcttactgctg

SEQ ID NO: 832080 - DNA, 100 bp, Homo sapiens
aagtgagcagctatttgtggcagacaggacatgatccaagtttggagcctcttccatcaagtggacctgattttggaggattaggagaagaagctgaatt

SEQ ID NO: 832081 - DNA, 100 bp, Homo sapiens
aataatgaaatgctgactaaggaacaaggtgatgtaataggaataccatttaatgtggattctcagaccagtatccttcaggggttctcttactctgatt

SEQ ID NO: 832082 - DNA, 98 bp, Homo sapiens
ctaccagaaggcggatgatgggcgtcccttcccccaagttatcaaatccaagggcggtgttgtgggcatcaagacaggcaatctatacctgcgggggc

SEQ ID NO: 832083 - DNA, 98 bp, Homo sapiens
aactttggaggccccctggaaggctttaggatccagatgaaggatttgggggcagagcacttggcaggtcatgaaggggtccaacttctcgggttgtt

SEQ ID NO: 832084 - DNA, 129 bp, Homo sapiens
cagatttccaggatgtcctgaaggagccctcaattgcattggaaaagctgcgggaactcagctttagtgacccgtttgatggagctgcaccgccagtgggaattacttttggagaagatgcgagaaaaa

SEQ ID NO: 832085 - DNA, 51 bp, Homo sapiens
tcagcctgatcttattggagacaaggcttccgagtggacctgccaatcaag

SEQ ID NO: 832086 - DNA, 51 bp, Homo sapiens
ctcgtgccgctgagcctggcgcagatcggtactccaaagattcaggtttac

SEQ ID NO: 832087 - DNA, 100 bp, Homo sapiens
tattgagaaggctgaggaactcagcaaccagctagctactcgagagttgcaggcagaggcaccaaggctggcagaatatcaagcatatatcgattttgag

SEQ ID NO: 832088 - DNA, 100 bp, Homo sapiens
acagataaaaatggatttttgcagtacgatgagatggagtctcactgtattgcctaggctggtcttgaactcctgggatcaagtgaacctcctgcctcag

SEQ ID NO: 832089 - DNA, 100 bp, Homo sapiens
gtggagttcagaagagcactggccattggcgaagtcccagaagtgaaggtaatatctcagtaagctcaagcacttcagatggaagcacatttacaagtga

SEQ ID NO: 832090 - DNA, 100 bp, Homo sapiens
tattggggtagagctggttgacaacgagttggccattctctatatgaacagcaagaagtcagaggaggagatgttaaagtaacccatcttgcaggacgac

SEQ ID NO: 832091 - DNA, 134 bp, Homo sapiens
agggtcgacatgttaaaacgggtcagttggcagccatcaaagttatggatgtcactgagaagcggccagcttgatgtccgggagctgatctctctctaccccttcctgttgcccacctcctcctccttcacccg

SEQ ID NO: 832092 - DNA, 51 bp, Homo sapiens
catttagcgcatcatgtgatccggtattgcggaatgctgcagcactcctta

SEQ ID NO: 832093 - DNA, 100 bp, Homo sapiens
taagttccgtgaactcagtactgatgcccagtggggcattcgtcttggtaaacttggtatgtaaccttctgtaatggaagatgattgaagacaaggggcc

SEQ ID NO: 832094 - DNA, 100 bp, Homo sapiens
tgactgagaatgcagaggtgaaacttggtcactctgtgagactgctgggtcagaaaaaggataatggaaggcggcttgggggagcacgattggatttgcc

SEQ ID NO: 832095 - DNA, 100 bp, Homo sapiens
ggacagaccatgcctgtgttgccagggcctccagtacagatgccgtctgttatatcgcttcttggacacttaatgattgttggcaagaaatgtgctgctg

SEQ ID NO: 832096 - DNA, 100 bp, Homo sapiens
ccaggttgttgcaagaggtcttctttcaggcaatcctgcttgctgtgtgcttaatcatttctgcatgtgcaagttgggcatcgatgggctgattgttacg

SEQ ID NO: 832097 - DNA, 100 bp, Homo sapiens
gtccctaaacctgctgctccacctacaaaaagccagagcccagaggtggagcagttagggagggttgtggaactggacagtgacatggtagatatcaccc

SEQ ID NO: 832098 - DNA, 100 bp, Homo sapiens
attgaaacattaaatgacagttcacataagaagttcttcgatgtatctaaacttggcaccaagtatgcgccatcatgaccgggtcctataacaacttctt

SEQ ID NO: 832099 - DNA, 100 bp, Homo sapiens
gtcttggaaatccattctgaattctctgtatgagttgctggaagccgaggcagttgttgaaaccaaaatggagaacaaacccacctcctcagaattgcag

SEQ ID NO: 832100 - DNA, 98 bp, Homo sapiens
tcctcctggggaacccgttcagcacaccagtggggcagtgcctcgtgacccaggaggctctcacgtggagtccccagaacagcatcaactcctcacga

SEQ ID NO: 832101 - DNA, 99 bp, Homo sapiens
gagctcggaggcggcgaggagcgcctgcctgaggagagcagagcaacaagatatggatttggatatagaatttgatgtacaccttggaatagctcatac

SEQ ID NO: 832102 - DNA, 100 bp, Homo sapiens
agtccacacagtctcaagaagaatttaaactggaggacctgaagaagctagaaccaaattgtatctgctgtacagtattgtcatcaaaagtacattgttc

SEQ ID NO: 832103 - DNA, 100 bp, Homo sapiens
cagcagtggcagcatggagaaacgcaagtccatgtacacgcgagattataagaagcttgggttcattggttttgactctgggaggagggctgccttattt

SEQ ID NO: 832104 - DNA, 100 bp, Homo sapiens
tttcgtggtgagagttggcaggggaagatgctcatgaagcagcaggaccggctggaggagcgagagcaggacattgaggaccagctgtacaaactcgagt

SEQ ID NO: 832105 - DNA, 98 bp, Homo sapiens
cacgcccccacatctgctcaaggagatcattctggtggatgacaacagcagtaacgatcagcttgaacgggtctttttacgacttggccatgctgaaa

SEQ ID NO: 832106 - DNA, 99 bp, Homo sapiens
gcagattcccctctacatagacgacaccctgacgattttatcatgtgggcaacctgctgcaactggttctgcctggatggacagcctgaggaggtccca

SEQ ID NO: 832107 - DNA, 100 bp, Homo sapiens
tctgcatgtttccaagagcaacaggaaatgaacacattgcagatgaagatcagcttcgtgcaaagggttatgacaaaacaccagacttcattttacaagt

SEQ ID NO: 832108 - DNA, 100 bp, Homo sapiens
gctacagcccagacgcccaggcgtgccttgtttttggattcagttctcctgtgtgcatggctttccaaaaggagaaactggccaagaagcggaaagagac

SEQ ID NO: 832109 - DNA, 99 bp, Homo sapiens
aactccagcctgtccggctcgtcggtgtcctccggagctcatgggacacatgtagctagtatagctgctggacactttccagaagaacctgaacggaat

SEQ ID NO: 832110 - DNA, 100 bp, Homo sapiens
gctcgggggccaactctgaggagtccactgcagcagatccaggtccagagagcatcgcagacatcgatctcgctccatgtcacgtgaacgcaagaggaga

SEQ ID NO: 832111 - DNA, 100 bp, Homo sapiens
gtcctctgcgctggaatcagtcactgtcagcgacagacccctcggggtgtccatcacaaaagccgaggtcagattgtcaagcatggagatatcaagtgtg

SEQ ID NO: 832112 - DNA, 99 bp, Homo sapiens
gaatttccttgtgcctccattcccgggaggggggagcggcgttggaggccaccgtttccaggaatatgcactttctggttggaatttgaataacatgcc

SEQ ID NO: 832113 - DNA, 98 bp, Homo sapiens
ctctgaagaggtcaaagaaacgtggactatatcatcatgtacatagaaaaatccaaaggattctgcaaaaaagctactagaaccactgacttcatcaa

SEQ ID NO: 832114 - DNA, 100 bp, Homo sapiens
ctgaggtcaatgagtgcaacagcaacccctgcgtccacggggcctgccgggacagcctcaacggcctcctgctcttcatggatgaagcagacgccttcct

SEQ ID NO: 832115 - DNA, 100 bp, Homo sapiens
taaacttcgccaactccgctgcctttgccgccaccatgcccaaaacggaataaacatcatcctgaccttcatctctgggcttgttccgggaagcgaaaag

SEQ ID NO: 832116 - DNA, 98 bp, Homo sapiens
gctatggaaaagttggcccctgagccagagctccagcagccttgttagggcgtggcctgaggcttggataagtgggattgtgccggctgcggaagaga

SEQ ID NO: 832117 - DNA, 99 bp, Homo sapiens
tgatctagtgcttctcgaaaaaaaccttcaggcggcccatgggtttgtggtaaatatgccagctctagaacacatgaatcagattttacacatcttgtt

SEQ ID NO: 832118 - DNA, 98 bp, Homo sapiens
tcaaaaagatgcttgtggaagccacccgggagtttgaggaggttgtggaatacggggtgctttgcattcaggaatacagaaaaaacagcaaagtggag

SEQ ID NO: 832119 - DNA, 98 bp, Homo sapiens
ctttaagaaaggaatgaacatgtatttaaccaagttccaacaaaagaatgctgccgcaggctcactcagtaacttgatggattttgtgaagaaaacag

SEQ ID NO: 832120 - DNA, 99 bp, Homo sapiens
cactcgcgcggggggtaattcggggtctgggttctggtgccgcgcagctttccccgaagaagctcattcacacagaagacccatttaatgatgaacatc

SEQ ID NO: 832121 - DNA, 100 bp, Homo sapiens
gttcctattgattcatcagattttgcattggatattcgcatgcctggggttacacctaaacagattatcaccacgaggtgtataagatcccagaattcag

SEQ ID NO: 832122 - DNA, 98 bp, Homo sapiens
gaacttatcagagattgagaatgtccatggatttgtttctcattctcatatttcaccaataaagtatttaggtcagttaacgtccataccaggatacc

SEQ ID NO: 832123 - DNA, 100 bp, Homo sapiens
ctgggtggaaaacagagcgaagggggagtgtccggttgatcccagtttgtcaggcaggccactgtgttgaaagacagagaagcgaagacagagacgtgga

SEQ ID NO: 832124 - DNA, 100 bp, Homo sapiens
atcctctccaaagaaggaggagactgtagcaagtggtggtgaagacgctggagcagctggcgcaacaaggcaagatcaaagagaagatgtacggcaagca

SEQ ID NO: 832125 - DNA, 100 bp, Homo sapiens
agtgaaagattttcagtcaaccagttagatagtgaccactgggcacccattcattatgcatgctggatttacttcatttgggtcactaggtcacgggggc

SEQ ID NO: 832126 - DNA, 100 bp, Homo sapiens
gcaaaaacattcaagaatgagagcgagaacacctgtcaagaacctgcacttgttgccaagtcttccatcttactagatgtgaaaccttgggatgatgaga

SEQ ID NO: 832127 - DNA, 100 bp, Homo sapiens
ccagggcagagggcacctgagcggctggagagcctgttggagaaacacaaagagctgctgctgttcttgaagggtttttcagagtcggagaggaacaagc

SEQ ID NO: 832128 - DNA, 100 bp, Homo sapiens
gacacgattcagtatctctaacttggactgaccccaagaaaactggtggttctccaattacagctctgcttatgataatgtcaacaaagttcgagtagct

SEQ ID NO: 832129 - DNA, 98 bp, Homo sapiens
caaggaaaattaaaatcaagtaagaaactggcctctgagttaagttttgattttcgcattgaatctgtagcctaggaaatcaactttttccttaaaat

SEQ ID NO: 832130 - DNA, 100 bp, Homo sapiens
ctccttgcaggactccggccagaacagatatcagacaccccgaagaactttctctcttaaagaaacccagagatccaacaaagaaaaaaaagaagaagct

SEQ ID NO: 832131 - DNA, 100 bp, Homo sapiens
caataccaggcttcctccttccaggaatcattgagaagaagagcaagttagtaccttgtaccaaaacatcaaccttgtggagccaagattaattcagcca

SEQ ID NO: 832132 - DNA, 99 bp, Homo sapiens
cagccggcagccgcagagcggggaggaggcggtggccctgctggaggagctctggacagccctcagcgcctttttccaggagaccaacatcccctacag

SEQ ID NO: 832133 - DNA, 100 bp, Homo sapiens
tttggggaccagagatggacggtcactcagcctatggaggaattggtggtaaagaccctgattgtagcagaacctcatgtcctgcatgcctatcgaatgt

SEQ ID NO: 832134 - DNA, 98 bp, Homo sapiens
gggctgctccaggccaggccatgcgggatgatgataaaagctttaggagagcaccttcatggagaaaaaagtttagaccaaaggacattcgtggctta

SEQ ID NO: 832135 - DNA, 100 bp, Homo sapiens
ctaccagccccccgagcccagaagcaggcacctctctgtcagtgaattcacataaaagggcatcagaaaaatacaaagacaacccatcaatatcaggagc

SEQ ID NO: 832136 - DNA, 100 bp, Homo sapiens
tatgacttagtccgaacaattggaggagacctggtggaaaaggttgatctcatagacaagtttgtacatccaaactcctacagaagaatggtcagctgtc

SEQ ID NO: 832137 - DNA, 98 bp, Homo sapiens
tccagcatgaatcccgaatagctgaccggttccctgatgtgttacctgcttctgctactgatccaaactgcagaacttctcattcatccccaaggcct

SEQ ID NO: 832138 - DNA, 100 bp, Homo sapiens
cttgccgttaaccccacaggttgtgcccgttctgaacctaaaatgagtgcccatgtcaagaggtttgtgttaagtctagggacaggaagatggttggcga

SEQ ID NO: 832139 - DNA, 100 bp, Homo sapiens
tgttcgtccgcggagatctctctcatctcgctcggctgcgggaaatcgggctgaagcgactgagtccgcgatggagattctgaaggaagatttccattag

SEQ ID NO: 832140 - DNA, 100 bp, Homo sapiens
agaattaaagtctaactctccaaataaaaacacaccttgactttagtcagatacatcactgtctgttaaaggaaaccaagcgtgaagtggaagtctaaca

SEQ ID NO: 832141 - DNA, 98 bp, Homo sapiens
cgtcccattcccatctccacgacagcacctccagtccagacccctctgccggtgatccctcaccagaagatgaccacaaaaggacctggagacagctg

SEQ ID NO: 832142 - DNA, 100 bp, Homo sapiens
agaaaccctctcagatgatgatttcgtgaatgtagcttcacaagttgtcctcgaagaaggtacaattgcttttaaaaattgggttaaaacaggcacagaa

SEQ ID NO: 832143 - DNA, 100 bp, Homo sapiens
agcgacagtggaaagtacacaattaaggccaaaaatttccgtggccagtgttcagctacagcttccttaatggtccttcaacctctggatggactcttcc

SEQ ID NO: 832144 - DNA, 100 bp, Homo sapiens
cagctccagcaggcgctggctcctgctcaggccaatttaacctttgacccagctgctctactgcctggggcctcacccaagagtcctggactcaaggcta

SEQ ID NO: 832145 - DNA, 100 bp, Homo sapiens
gacgggctgcaggcgggggtgctgcagaggacacgaggcggcgggctggagacatggaccgcggcgagcaaggaaatcttcagaggaactagacatggac

SEQ ID NO: 832146 - DNA, 100 bp, Homo sapiens
gctacaggaagctctctcccagcttgatttccaatgggaaaaagttaacaaaatgtacaaggaccgacaaggctgttaaaaagaaagctggctttatcac

SEQ ID NO: 832147 - DNA, 100 bp, Homo sapiens
gaggtgctcaaaacgcccgtgcggaccacggcctgtcagcacgtcactattcctgatcagagaactccagttgcttcaacacacagtatcagtagtgcag

SEQ ID NO: 832148 - DNA, 100 bp, Homo sapiens
ccaatcttgtgtgggcactgaagggggactacaggttcgagacctttctgagaaaagtctacagcattctttctctgcaggttctcttaactacagtgac

SEQ ID NO: 832149 - DNA, 98 bp, Homo sapiens
taaagatttttatcagtttaccttcaccttcgctaagaacccagggcagaaaggtttaggtcacacagcggcagtgataaagagcacagggatgtgga

SEQ ID NO: 832150 - DNA, 100 bp, Homo sapiens
aaccaggacgatttaaggatttttaccagtttacttttaattttgcaaagaatccaggacaaaaaggattagtttttggtgttgagccagacttgaccag

SEQ ID NO: 832151 - DNA, 100 bp, Homo sapiens
tgaggacacttgtccagcgagccccactgctcggggaggaggagccacggccggggacaggagaccagcataaacactttggggactgagaggataagcc

SEQ ID NO: 832152 - DNA, 99 bp, Homo sapiens
ctcatccactgctcgctgcctctccagccacagaccccgcacctggaggaggacttgaaggaggtgctgcgttctgaggctggcatcgaactcatcatc

SEQ ID NO: 832153 - DNA, 99 bp, Homo sapiens
tccgaggcggtgttttattacaaggaacacagtggttccactgtaccttccattttgaacaggatgcagacaaaccagactcccccaacctataacaaa

SEQ ID NO: 832154 - DNA, 98 bp, Homo sapiens
tgtttgttatcggaacctcaggcacctacagacgatcaccctagataacaatccactacaatcacctcctgcacaggaggactttcaagtagaggtac

SEQ ID NO: 832155 - DNA, 99 bp, Homo sapiens
tcgaaccgcccgcaggcccgtcgcagctccattaatgcaactaccattacactaaggtgtgatgaatgcagactctgctaccattttggctgtttggat

SEQ ID NO: 832156 - DNA, 100 bp, Homo sapiens
ccggcgtctgcaccccggcagcgcgaggaaatgcccaaaggctgtacagcagtcatgacgctggcatctgcttggcttctggggagccctcgggaaactt

SEQ ID NO: 832157 - DNA, 100 bp, Homo sapiens
cagccgcctggctccctgccttgggtagagtacgtgtttacagataaaactggtacactgacagaaaatgagatgcagtttcgggaatgttcaattaatg

SEQ ID NO: 832158 - DNA, 100 bp, Homo sapiens
atatctgggtcctggactactttggtggaccaaaaatcgtgacaccagaagaatattataatgtcacagttcatttgaaagatgatgacagtggggacca

SEQ ID NO: 832159 - DNA, 100 bp, Homo sapiens
atcagaactacatcttaagggaagcatcagatggtgaaggagaaggagacacagaagtgatgcagcaggagacagttccagttcctgtaccttcagagaa

SEQ ID NO: 832160 - DNA, 98 bp, Homo sapiens
tgacaaactgactcccaaggggccgggccagggaggagtctgctactagtcttatcagctcttaaaaacagaaactcatctgtccaagttcgtggcag

SEQ ID NO: 832161 - DNA, 99 bp, Homo sapiens
gggtcatgtatacaataatcagtgtcaaaatgcagatcttcgtgaaaacccttaccggcaagaccatcacccttgaggtggagcccagtgacaccatcg

SEQ ID NO: 832162 - DNA, 100 bp, Homo sapiens
cctaccatgtcagccttcccagtagctggaactacagatacaaactggactctcaggacaaaacgacaccagccaaaccagcagcccctcagcatccagc

SEQ ID NO: 832163 - DNA, 100 bp, Homo sapiens
atggacaagcgaatttcagtcagtacgcagaagaaacatgtccttcattcaccaggctgagctttcacagtgcagtggttggtacgggactaaatgtgag

SEQ ID NO: 832164 - DNA, 100 bp, Homo sapiens
accaccctcacatcattgccatccatgaaggaggcaagtgaggcctatctggttggcctttttgaagacaccaacctgtgtgctatccatgccaaacgtg

SEQ ID NO: 832165 - DNA, 100 bp, Homo sapiens
tggagcctcagttggaagcagccgatccagcctgcggagcctgtggggcagatatatttttgccatcatggatcagtttggagatatattagaaggtgaa

SEQ ID NO: 832166 - DNA, 100 bp, Homo sapiens
atttaaccagcatggctacttcatattttggaaagcagtttttaagacaagctcgattatttgatgaacctcagcttgctagtctttgtctagatacaat

SEQ ID NO: 832167 - DNA, 98 bp, Homo sapiens
gttcttacaacatggcagacattgacaagagactttgaatgtgattgatcctggcttgatggacctaaatgggatgagtgaggatgccctggaatggg

SEQ ID NO: 832168 - DNA, 100 bp, Homo sapiens
actgtaataaatgcatctattttgaagctaagaaaaaacaggatctctatatgtgtgttatccaagataaattctgtgggattataaacatttcagtaga

SEQ ID NO: 832169 - DNA, 100 bp, Homo sapiens
gagcattgtgagctccgtattctctgaagcctggaaacgaggcactcagttggaagagtccagcaaggtttccaatacttatctacaggaatcgccatga

SEQ ID NO: 832170 - DNA, 100 bp, Homo sapiens
gcccggtgcggcaagatcgtgtatcccacggagaaggtgaactgtctggataagcaattctgtggtgttcttggtcacacatttatggagtttctgaagg

SEQ ID NO: 832171 - DNA, 100 bp, Homo sapiens
attattaaagatgaagagagttcttcaagagatctgcaactatgtgggaccagcaaaggttattgttcagttggtcacaaatggaaaaaatatccacctg

SEQ ID NO: 832172 - DNA, 102 bp, Homo sapiens
gcagtgccgggccagacatggcggaaggcagtagaaactgatgaaggaattgaagaggagataccggattcaccaggaatagaaaagcatgataaagaaaag

SEQ ID NO: 832173 - DNA, 100 bp, Homo sapiens
ttggacagcagattttggtttaatatctgattgggacaacattcagacccatttccagtcatgacatcctccaggacaaatagcaaggaaatacagttcc

SEQ ID NO: 832174 - DNA, 98 bp, Homo sapiens
cagaggggagcacagagaaagagaatgatgaagagaaaggcccggagactgacctgacatgaaacgcagatctagtggcagagaggaagatgatgagg

SEQ ID NO: 832175 - DNA, 100 bp, Homo sapiens
tctcaggagcctagtggatgctcagatcagagacctgcagaggacctcaacatccgagtggaaaggtgtgatccctcacatccacaaatctctgattgga

SEQ ID NO: 832176 - DNA, 100 bp, Homo sapiens
aaaccactgaggatcagattttgaagagagatatgccaccagcatttattaagtattctctgaaaccaaatgaccaaatcttggctgaagacaaacacaa

SEQ ID NO: 832177 - DNA, 100 bp, Homo sapiens
ccagccaccgcccccgccccaagccggcctaccccagatcatccaaaagacccagatgatgtggtaccagttggccaaagaagagcctggtgttggtgca

SEQ ID NO: 832178 - DNA, 100 bp, Homo sapiens
atgtgagaaacatgtattggttattctaacagacatgagttcttatgctgaagcacttcgagaggtaactcgggaccaaatgaagatgtttatacagcag

SEQ ID NO: 832179 - DNA, 98 bp, Homo sapiens
ctggttcaagcggtggcgggagcctgtcagagtggaaatcttgtccacagctaccgaggcactggcggcatcttcgaggtgtgctggaacgcccgagg

SEQ ID NO: 832180 - DNA, 99 bp, Homo sapiens
gccaacatgcagttacaacagcatacagcatttctcccaccagaagagaagctgaatttggacgacagccagtgggaggacatccacgttgtcaccgga

SEQ ID NO: 832181 - DNA, 100 bp, Homo sapiens
ctctacatgtaaaaggccactgactcctacttcctctgtatagagcaactgttgaactcagctgcctgtagcaccatatgaaggcggagtatggaaagtt

SEQ ID NO: 832182 - DNA, 98 bp, Homo sapiens
cacactccaggaatgccagtgcatcttttgcacagctgttcaagggcagacggggtttttgaggaggattcgcaaattgacatagccacagtacagga

SEQ ID NO: 832183 - DNA, 99 bp, Homo sapiens
tggcgttaactgtgcggaggcagacaaatcgatggtaaaccagagaagccttcagtaacatatgcaacatatcgaggcccaagacacattgggaaatat

SEQ ID NO: 832184 - DNA, 100 bp, Homo sapiens
ggcaaactgtcagaaaagagtagcctgggctgtctggaaatctgagctttaccgatttgttacaactcaagcaagggccagcagaaattctcttttgaca

SEQ ID NO: 832185 - DNA, 100 bp, Homo sapiens
gggacctcggcggagcaggagggccttcaagaaggagaccagattctgaaggctctcaccacacacttgttcatgggcgcagcaaagaagagggatccac

SEQ ID NO: 832186 - DNA, 100 bp, Homo sapiens
cttttatattcatctcaaaaacaaaattctgaactcaggacttggcaagctcgggctcaagttcactacaggtcacaaaacatgatgtcttgttggctac

SEQ ID NO: 832187 - DNA, 100 bp, Homo sapiens
gccctggaatatgaagagacatgagctggtgaaagaaccgccagcctaactatgggacagctttacgagaaggaaaaagatgaagatggattcttatatg

SEQ ID NO: 832188 - DNA, 100 bp, Homo sapiens
aaggacgagaagtgtggctcagaggtgaccactccggagaacagttcctccccagggatgatggacatgcatgagggatttgttattgcgaatgatgtgg

SEQ ID NO: 832189 - DNA, 99 bp, Homo sapiens
catagccatcgacttcggggagcagtgttggaaaaccttggacagacaattgtccccgatttgggatcactggaaagtcagcatgattttcgaaccccg

SEQ ID NO: 832190 - DNA, 100 bp, Homo sapiens
caggaaccaccagtgacagaggtatgagtattatagaacaattagaccctgtatcttttagcaattacttgaagaaataccataatactatatgtggaag

SEQ ID NO: 832191 - DNA, 98 bp, Homo sapiens
aaattatttgcgcatttcaagaagaacaacctaactccagatatctacctaattgattgggcatttgatgtagaactactgtacatagcacagttctt

SEQ ID NO: 832192 - DNA, 99 bp, Homo sapiens
acttacacagcagcaacagcctgctacaggaattccagagacgctgtaacactctgatttcattgattgagaaagaaaatatggaaattgaggaaagag

SEQ ID NO: 832193 - DNA, 148 bp, Homo sapiens
gccccggcgaggaggcgcggaaccatggccgatgggggcgagggcgaagacgagatccagttcctgcgaactgttgcactgctgtgatccatcctcatctcctaaagatgcatcctgacttatctccacacttgcacactgaagaatg

SEQ ID NO: 832194 - DNA, 100 bp, Homo sapiens
ctgcaccacagctctccaggacataagaccacagcccctgtcaaagggaacaggaagcagtccacggagggtgacgccctagacccacctgcatccccca

SEQ ID NO: 832195 - DNA, 98 bp, Homo sapiens
tgaggttattgtttcatttactccaaaggatcctgaagcctgcgaggaaaggtatctggccaggaacagtcttcacggggacaaagaattttatctat

SEQ ID NO: 832196 - DNA, 100 bp, Homo sapiens
cgccccacccgcatgctctttgtcactccccggcggcagcacgaaagtaccatatggctgagagctagcaaggaaaactcaggaccatgatggctcagtt

SEQ ID NO: 832197 - DNA, 100 bp, Homo sapiens
tgagccacagtgtgatcccagctttaaaggagatgcaggagaaaatacggcattgctagctctcgtggcattatccttcagtggggctattggactgact

SEQ ID NO: 832198 - DNA, 100 bp, Homo sapiens
ggtctctgacccccatccggccctcatggctttgtgtctggagctcttgaagcaatgatgaatttttagatgtgatctactggttccgacagatcattgc

SEQ ID NO: 832199 - DNA, 100 bp, Homo sapiens
gtgccctgatctccgttggctgcttggccatatttgtcactgtgatctccctcttggtgtacaaataagatttgtgaccaaatcagtgatgctgtccttg

SEQ ID NO: 832200 - DNA, 99 bp, Homo sapiens
ttcaagttggtgttcttgggggagcagagcgggctgaccagggtcgcctcctggactgcgtggtgcgatggggaagcctcactgaagggaagatcaggg

SEQ ID NO: 832201 - DNA, 100 bp, Homo sapiens
ggcgagcagtctcaggcctttagtgatgatgggaataaccagcaagtacctgtcaagaatgaagtagatcattgtgaaaatttgaagaaggtggacacaa

SEQ ID NO: 832202 - DNA, 100 bp, Homo sapiens
ggagacacccactttgactccgatgagccatggacgctaggaaatgccaaccatgacgcatgcacatctctgaaagccaacaagaattcttcagaatgct

SEQ ID NO: 832203 - DNA, 98 bp, Homo sapiens
ggacggcagtgctgaggcggaacaggccgggcaccaaggcgcaggttgatctgttccagctgcaggtgaacaccctacgacgttataaacgacactac

SEQ ID NO: 832204 - DNA, 98 bp, Homo sapiens
acaacttcatccagcccttatacaaagacctttcggggtgtggatgaatggaacatagctcgcctcaatacagtcttggatgtggttgaagaagagtg

SEQ ID NO: 832205 - DNA, 99 bp, Homo sapiens
tctgtgccattacttttctggttcacattctggattttcaatcaaaggttattctgcatatgacttcaggctggcactgatcccagtttatcctttgag

SEQ ID NO: 832206 - DNA, 98 bp, Homo sapiens
tggaacatggacaggaactgtggacagtgaagagaggcctctcccaaagcacctgcgcagtatcaccttttgccatgatagcatttctttcattggac

SEQ ID NO: 832207 - DNA, 100 bp, Homo sapiens
tcttatttagccggagtgagaagcaagaaggccctggacacagcaatatctctgggctttcacaggaggcatacacggaatacctgaggagcatccacta

SEQ ID NO: 832208 - DNA, 125 bp, Homo sapiens
gccggcggcggctgcgggctgagcggcgagtttccgatttaaagctgagctgcgaggaaaatggcggcgggagcttctagaggccacccgcatcccctgcctcctggccccatccgtcttcaaag

SEQ ID NO: 832209 - DNA, 98 bp, Homo sapiens
acgtgaacaacctgaacgtcaccgaggagaagtaccaggaggcgttggccaaggcaatcccacagagtattgatgaggaaactgaagtttggagcgat

SEQ ID NO: 832210 - DNA, 100 bp, Homo sapiens
taacccaaagatcgtgcagctcttggcaggagtagctgatcaaaccaaggatggttactgcaacaaggaggtatacaataaggagaatcttttcaacagc

SEQ ID NO: 832211 - DNA, 100 bp, Homo sapiens
cgggcattatattatctcttggaaaaggaactcgaatcatttatgacagaaagtttctgttggatcgtcgcaattctcccatggctcagaccccaccctg

SEQ ID NO: 832212 - DNA, 100 bp, Homo sapiens
tggccctgtgatccctcaagactggtccacggagtgtatgaccacaaacagccatcaaggtgtcaaggagcagaagcttttgaaatccagcattctggat

SEQ ID NO: 832213 - DNA, 98 bp, Homo sapiens
caaggtggtggtcatcgaacactcctctacggacatgccatattgctgcgccattcctatagtggcatggttcactactgtgatagacaaagtggcaa

SEQ ID NO: 832214 - DNA, 103 bp, Homo sapiens
cttggccaagtccatccaccacgctcgcgtgctgatccgccagcgccatatcagaaatcttcccaaggctgcagacaccgacggatttgctttgggagccaga

SEQ ID NO: 832215 - DNA, 98 bp, Homo sapiens
acgtgttagacaagttcatgaggtggaataacactcccatggatgaagcactgcactttggacaccatgatgtatttaaaattctccaagaataccaa

SEQ ID NO: 832216 - DNA, 98 bp, Homo sapiens
atgagtgggaaccatttgcagaaggtttattcttcagtccaaggaagcaattcacagtcagctgttagagaagcagaaaatagcagaagaaaaaatta

SEQ ID NO: 832217 - DNA, 98 bp, Homo sapiens
gtacctcctaggactctatgacacggccggacagagtcaacctatttgatttcttgacaagaccacaatctgatcccaaagatgtgctccacaaatcc

SEQ ID NO: 832218 - DNA, 100 bp, Homo sapiens
gcgtgctccagaacacgggcagcgtgggcatgtctctgaccatctggacggtgtgtggggtcctgtcactatttgtgattcgcctttgccagtctcatct

SEQ ID NO: 832219 - DNA, 98 bp, Homo sapiens
aacatctcaccaatttcaaatccggccacgaataccatgttctgtcccctaaggcggtcccaaaaggcaatggcacagtctcctgtccccactgccgg

SEQ ID NO: 832220 - DNA, 100 bp, Homo sapiens
gagctacgcgagcgccgcgaacttggtggccagcgccgcgcccggggccgtgcgctctcgggccactcggccgcagggaatcccaggatttcctggaaac

SEQ ID NO: 832221 - DNA, 98 bp, Homo sapiens
ggaggcgtgatgcttaagctggtggagaaactcgatcttcataaacaatgaatggcatgattcagtgagtggcaagaaatttcctgtctttaatcctg

SEQ ID NO: 832222 - DNA, 50 bp, Homo sapiens
gccgccgcgaggccgggaaggtgaagtggtaagcatccgtggcattcaag

SEQ ID NO: 832223 - DNA, 100 bp, Homo sapiens
tctgagaacttacgcagatcagccgaattaacgtcttcaaggacccagttgctgatcccaacaaaaggtccaaaaagggccgattatctttacataggac

SEQ ID NO: 832224 - DNA, 98 bp, Homo sapiens
cccggacatcactgaagaggacctggaggccatccggctgcgggaggaggccatcctgcagatggagcaagaaagtacgactatcagcagccacaaaa

SEQ ID NO: 832225 - DNA, 99 bp, Homo sapiens
cttttgcacctccgggagctgctgctgatcttggatgaggtggaaaaaagacgaggcatctctcctgccctggttcagccactcatgagaagtgtcatg

SEQ ID NO: 832226 - DNA, 100 bp, Homo sapiens
tgagccttcagaatcagacactgcccgatatgttacatcaaaaattcttcatctggctcagagtcaaggtggaaatggatattgttgaaaaactggtgaa

SEQ ID NO: 832227 - DNA, 100 bp, Homo sapiens
gtactaacttggcatgccgcaatggacatctccagtcaggtgctggagaatctggtaaaagcaccattgtgaagcagatgaggatcctgcatgttaatgg

SEQ ID NO: 832228 - DNA, 98 bp, Homo sapiens
tggcgcctgcaaagaaggccaagcctgccatgccacaagtggagacctttggcgacttggcctttggcgacatcttcctccacctgctcacgggcaac

SEQ ID NO: 832229 - DNA, 100 bp, Homo sapiens
gggtagcttcccgacttatcgacatgagcaggcaccaagggtgtccgcaatgttgccagtgtctgtctgcagattggctacccaactgttgcatcagtac

SEQ ID NO: 832230 - DNA, 100 bp, Homo sapiens
caagaagtcgcccatcgcagcagctcgatggcaccaaaagcgaaggaagctcctgctcatcctaaagccgaagccaaagcgaaggctttaaaggccaaga

SEQ ID NO: 832231 - DNA, 100 bp, Homo sapiens
ttgttctgtccttggtgtgtggtgcattcgtgaaattctgcagcacatcggcgaaaggaaaacccttttgtaacaatgagaccttcggccagtatcctct

SEQ ID NO: 832232 - DNA, 99 bp, Homo sapiens
gcatcacatttgttgaatcagtctggtggtgctggagaagattgccagctcttgcaagcttaggatatgaaaagagctgtgtgttgttcaattgtgcag

SEQ ID NO: 832233 - DNA, 100 bp, Homo sapiens
ctcccaagtagctggaattacagcctctctacatatgacatcgtgatcactacctatagcctcgtggccaaggagattcccacaaacaagcaagaggcag

SEQ ID NO: 832234 - DNA, 100 bp, Homo sapiens
gtcaatcgtaggaagaacacagtacagtgaaaccaatccgtaatctaaatggacattcaattgggcaatatagaatacatgctggaaaaacagtgccgat

SEQ ID NO: 832235 - DNA, 98 bp, Homo sapiens
tgaatccacatagagaaagtgatgggcctcttatacctagaagtcccacaagcagcgttgccacgccttccagcaccatcagtacacccaccaaaaga

SEQ ID NO: 832236 - DNA, 100 bp, Homo sapiens
gtggacattgctagcaatgagctcccaaagccatccagttaagggaagaaagtcggaggctggctttggctgcgaaaagagaaaaaagaaaagagaagag

SEQ ID NO: 832237 - DNA, 120 bp, Homo sapiens
gagggaacatgctgagaaactgatgaagctgcagaaccaacgaggtggccgaatcttccttcaggatatcaagattggcctggggtacatcatctaaagatcctaggattgctgcaggtc

SEQ ID NO: 832238 - DNA, 120 bp, Homo sapiens
ggaagagattgcagagctgaaggcggaacggaacaacacgcggatcctcacagccaccgtggacaatgccaacatcctgctacagattgacaatgcccgtctggctgctgatgacttccg

SEQ ID NO: 832239 - DNA, 113 bp, Homo sapiens
cgggtgtgagagtccgtaaggagcagcttccaggatcctgagatccggagcagccggggtcggagcgggttatgaagacagtatggagtttccagaccatagtagacatttgc

SEQ ID NO: 832240 - DNA, 100 bp, Homo sapiens
tctcatgtatcttcagttggcttctaatgtgacagagctgaatgaacctctctccaatgaagatcgaaatctcctctctgtggcctacaagaatgtggtt

SEQ ID NO: 832241 - DNA, 100 bp, Homo sapiens
cctgcagactccattgccccatttcaggaggccctgggggtcgtgctgcacaaggactccaagtggtaccagcagtggaaggacttcaaggagaacaacg

SEQ ID NO: 832242 - DNA, 100 bp, Homo sapiens
cagccccgagcgggacagcgcggcggggagcgacgagcaagaaactatattcagtctttgactcagatgccgaagatgaactttgcgaatgtatttattg

SEQ ID NO: 832243 - DNA, 100 bp, Homo sapiens
acttggcacttagaaccgcagcagggacgtcggtttgctatcgggactcggcgaggacgttgcagaatgaagaagagtctggagaacctgaacaggctgc

SEQ ID NO: 832244 - DNA, 99 bp, Homo sapiens
ttggattctaatgcagttcatcacatcattcatgattttcagcttagcagtgtctgcaaaaacgaatcttttcctacaacctgttaactgactggactg

SEQ ID NO: 832245 - DNA, 99 bp, Homo sapiens
actcctccactcgtacccacactcgaccgcggagcccttgcagccatgagggaacagctcaaaggataagtatgctgtgcgcttcatccctcgggagaa

SEQ ID NO: 832246 - DNA, 100 bp, Homo sapiens
ttccagggagggaacaaagcccacagcaccggacccctatggtgtagccgtgggtggaactgtggggcactgcctgtgcacgggattggcagtaattgga

SEQ ID NO: 832247 - DNA, 112 bp, Homo sapiens
tgtggtcgcgtctcggaaaccggtagcgcttgcagcatgttccagaaagaacgcttcaacatcgacatgccgcaccgcttcaaggttcacaactacatgagccccaccttct

SEQ ID NO: 832248 - DNA, 100 bp, Homo sapiens
ctgatggtgatggagattttgatgtggatgatgccaaagttttattaggttttgggtcctgctcctcggtggtgttccttcttagacaacttgaccgaag

SEQ ID NO: 832249 - DNA, 100 bp, Homo sapiens
gacagtttagcagaacagcctccgcggctccggggagaagcatgaatacaactttgtctgagagccccttcaagtgtgatcctgatgctgccagagccat

SEQ ID NO: 832250 - DNA, 100 bp, Homo sapiens
aacttcaatgtctaccttagcgatttgatcccagtggatagagccattgaagacaccagacctgctggatgttttactgtgcctggctaactatagtcga

SEQ ID NO: 832251 - DNA, 98 bp, Homo sapiens
catcctcatgcaggtggtcccgctggagggcgaagctgtgctcaggcccgggctggacgcagagccagagctgtccccagaggagcagagggtcctgg

SEQ ID NO: 832252 - DNA, 98 bp, Homo sapiens
ataattttgcctttggtcctgaggtggatcaccagctgaaggagcggtttgcaaacatgaaggaagggactttgaacatgtcggggatcgccctcagc

SEQ ID NO: 832253 - DNA, 99 bp, Homo sapiens
gagctcgcgatgagtggtctcggcaggctcttcgggaagggcccgcagccttcaggccgtgcctaggctggtgaagctcttcaaccacgccaaccagga

SEQ ID NO: 832254 - DNA, 100 bp, Homo sapiens
gccatttcacatccagcagaggaggcgggggcagccgctgagacggtttttcacaagctggtgctcaagaccgaatcggctgggcttttggcctaggatt

SEQ ID NO: 832255 - DNA, 98 bp, Homo sapiens
cagctcctgcccctgtccgggggatgactgattctcctccgccaggccctgggcagtgacggggttcgggtgaccatggagagtgcgctcaccgcccg

SEQ ID NO: 832256 - DNA, 100 bp, Homo sapiens
agaccattggcaccaccgtgggccgcaggaggagagatgagcagcttcaaggttactgactttttatgatgtttggtggctatgagactatagaagcata

SEQ ID NO: 832257 - DNA, 100 bp, Homo sapiens
caagaaatgcaggaagttcagagttctaggagtggaagaggaggcggctatggctttggaggtggtgccggtagtggatttggtttcggcggtggagctg

SEQ ID NO: 832258 - DNA, 120 bp, Homo sapiens
cgaaaactacgagcacaacaccagcgtcgtcaagaagatccacattgaggtagtggacaaaggtccatgtgaaatctgaggtccttgctgtcaagttgtcacaagaaataaactacgcaa

SEQ ID NO: 832259 - DNA, 100 bp, Homo sapiens
gaaggccaccatgctgggccggaccaacatcagtgatgaggagtctgagcagtggatgattcaacagccacacaaagcagcaacattttttggatgcatt

SEQ ID NO: 832260 - DNA, 100 bp, Homo sapiens
tcacccagcatttcatccctcgtcgaaaggattggattggcatctttagaatgagacaaaaggacccagtgaaaggaatgacagcagatgactaaagccg

SEQ ID NO: 832261 - DNA, 100 bp, Homo sapiens
agccatcatggaacccaaacctcagaagagtccagtgaaagcaagttgaatacattggtgcagaagcttcatgacttccttgcacactcatcagaagaat

SEQ ID NO: 832262 - DNA, 98 bp, Homo sapiens
gcgaacatgtcgcggcctgtcaggacaaccctccatatgataagggagccttcagaatcgaaatcaactttccagcagagtacccattcaaaccaccg

SEQ ID NO: 832263 - DNA, 100 bp, Homo sapiens
acctgcctggagcaacgaaaagagccctggaatgtgaagagacaggaggcagcagacggacatccagagcaaggtccgtggtcctgtcagtggaagcccg

SEQ ID NO: 832264 - DNA, 98 bp, Homo sapiens
gcaagcatgcagcttactgcttgaaagatcgacgtaattaacacattccagacgggagcctcttttaagggagtcctaaggcgacagaacatgggtca

SEQ ID NO: 832265 - DNA, 100 bp, Homo sapiens
tgtacatcaaggcctccggcagctatgcaggtttggtgcacctcgatttggaggaagtagggcagggcccttatctggaaagaagtttggaaaccctggg

SEQ ID NO: 832266 - DNA, 100 bp, Homo sapiens
actctgttcaagagacatgcactgaacttctgaagataatcgagaaataccagctaagactcaatggtttgtactacagaaagtgccagttaatttccaa

SEQ ID NO: 832267 - DNA, 100 bp, Homo sapiens
ctgactcctacttcctctgtatagagcaactgttgaactcagctgcctgtagccaaaagaatctctgagtatgttgaagcttccagatcttccacagaat

SEQ ID NO: 832268 - DNA, 100 bp, Homo sapiens
agagcgcgaatatcgtcatcgttagaaggtcccgttcatgaaacagtgtatgatttctggaggatgatttggcaagaacaatctgcttgcattgtgatgg

SEQ ID NO: 832269 - DNA, 98 bp, Homo sapiens
ttttgcacctgcaagacatgtctgaaagtgatgctattgctgagattagagccatttgtattgaagaaattggagtatggatgaaaatgtatagtgat

SEQ ID NO: 832270 - DNA, 100 bp, Homo sapiens
aaacgacccaggaatgcgcctcgcgaagaccccaggactgatgtcaaggcatacgatgtgacacggatggtgtccatgccccagacgacagcaggcacca

SEQ ID NO: 832271 - DNA, 100 bp, Homo sapiens
aaggaagaaaagatcacgttgatgaactcgagcctgagcgacataagggagtgaggattctttggacaccagcctgagagctcacggggtccatgccact

SEQ ID NO: 832272 - DNA, 100 bp, Homo sapiens
cagcaatctgtcaatcaccttgttaaagagattgtctccagctttaagaccacgacatcgagagctgcctgccagctcgtgaaggagtacatcggccacc

SEQ ID NO: 832273 - DNA, 98 bp, Homo sapiens
caagccaacaacagtgacggaatgcctccatacatgtggagtattgctcctggaaaatccaaaaggtgacaataggttggaccttttaaagctgaaga

SEQ ID NO: 832274 - DNA, 100 bp, Homo sapiens
cttctatggccgcttcaggcacttcttggatatcatcgaccctcgcacactctttgtcactgaggctgttttggagtcagcggaagatcaccaaggccag

SEQ ID NO: 832275 - DNA, 100 bp, Homo sapiens
gagacctaagggcggcgactacgacggcgttgatatcggtggtaacgacggcctcagcaggcggggaagatgaaaggtgtttcctgaggttataggcggg

SEQ ID NO: 832276 - DNA, 100 bp, Homo sapiens
gcataatattagctaaagctgtaatttctaaacatccaggaacagagctaccatagaggaggcatactccaggtcaatgacaaaactagcaaaatctgca

SEQ ID NO: 832277 - DNA, 99 bp, Homo sapiens
agctcaccaggaaactttcccttcactctgccagctgggtaaatacaccacgagtccctggagaagtgggagcgtctgaccgtggcggatgcgctggag

SEQ ID NO: 832278 - DNA, 128 bp, Homo sapiens
acgagctgttcgacgtaaagaacgccttctacatcggcagctaccagcagtgcataaacgaggcgcagcgggtgaagtactactataattccttgacccagcagtacctttactgggatggggaaaaa

SEQ ID NO: 832279 - DNA, 50 bp, Homo sapiens
aaagaaccatctcccaaacaggatggtgctccagtgaaccacccagggaa

SEQ ID NO: 832280 - DNA, 100 bp, Homo sapiens
tgaggtttcagagcgcagccatcggtgcgctgcaggatgtaattggctgtactcaggagatggatttcattctttggcctcggaatgatattgaaaaaat

SEQ ID NO: 832281 - DNA, 100 bp, Homo sapiens
ccctctatcccgggtcgctgctgtgttctggaaaggcacattgtaccctggatgcagcaggagtcagtggatcggtggggaaaatgctgcttaccctggg

SEQ ID NO: 832282 - DNA, 100 bp, Homo sapiens
gttgttcattgtttgtcaccacaaaaaggacaggtggttccaggaaagaaatcactgaacactgggaatggcttgagcaaaatctcttgcagacactctc

SEQ ID NO: 832283 - DNA, 98 bp, Homo sapiens
gagctgcagaagtatgagggatggtcagactggatatttctgaagatttgtacccctaagtgctcaaaacagaaaacttgtggaggccataaaacaag

SEQ ID NO: 832284 - DNA, 99 bp, Homo sapiens
atggcgctcctgctcctccaggcgctgcccagccccttgtcagccagggctgaacccccgcagtctgatgccaatgcaagttacttaagagcagctcga

SEQ ID NO: 832285 - DNA, 100 bp, Homo sapiens
acagcagatttcccaagagcagcggaaaatgatccagtcacagaggcggggtttcaccatgttgcccagactggtcttgaactcctgagcttaagcaatc

SEQ ID NO: 832286 - DNA, 99 bp, Homo sapiens
aacttaacagcttcggtgaagaaacctccacattactgaacatttggaggtgtcccaatgaaaagggaaccgggggattgggcacctgctctgtaaaga

SEQ ID NO: 832287 - DNA, 100 bp, Homo sapiens
gcgggagaggcccagcgggagtcgcggaacagcaggcccgagcccaccgcgccgggccccggacgccgcgcggaaaaggatcatcctgaacatggggtcc

SEQ ID NO: 832288 - DNA, 100 bp, Homo sapiens
ggcatgaggaagctgggggcatcttctccccaggctcccagccaacctctgataaaccctcccagcggccatcagagagcacaaattgtagccctacccg

SEQ ID NO: 832289 - DNA, 100 bp, Homo sapiens
atcaacggcaaagttttgcagatcttcaacaagaggacccaggagaaattcgccctcaaacgtcaagggttccacactgttgggagtcgctgcaagaatc

SEQ ID NO: 832290 - DNA, 100 bp, Homo sapiens
attattattttctatgtccgttgttgtaagaagaaaacatcagctgcagagggtccaggccttggacaagattcgctatgagagcctgacagacccttcg

SEQ ID NO: 832291 - DNA, 98 bp, Homo sapiens
tatctcttccatttgatcaccatggcacacatgcttcagatactacttacagtagacacagcgggtcacagaaagtcgagagagccaaatgacgattg

SEQ ID NO: 832292 - DNA, 100 bp, Homo sapiens
agggtcccgggactggtagagacactgcggaggtttcgaggaactgtggaaggtgcatcagtgaagaaatggaccaatgtgtataatcatggaatctcct

SEQ ID NO: 832293 - DNA, 100 bp, Homo sapiens
cctagcgccgctgggcctgcaggtctctgtcgagcagcggacgccggtctctgttccgcaggatgggagactcatgcatctgtatgccgtgtgcgtggac

SEQ ID NO: 832294 - DNA, 98 bp, Homo sapiens
cacataggggtttctgttaaggaactcgatttatatttggcatactttgtgcatgcagcaggtaaacgcaaagcactgaagttgaattttgcaaatcc

SEQ ID NO: 832295 - DNA, 125 bp, Homo sapiens
ttgaggagagagatgaagcaattgcacgagccaagcatatggaaatgtctctaaaagtcacctgtgaaactggaaaaacatctgcacagtgctagatctgaagagggaagactatattatgatgg

SEQ ID NO: 832296 - DNA, 100 bp, Homo sapiens
aacgtgcccaatttgttacacatgggcagtgctttcctcagtgctatttttcttgccttagcgacataccagtctctgtacccactcaccttgtttgtcc

SEQ ID NO: 832297 - DNA, 100 bp, Homo sapiens
aaactgcagcatttcttttacccatactgagtcagatatatacagatggtccaggagaagctttgaaggctgtgaagacttcacagagaatgcagttgtc

SEQ ID NO: 832298 - DNA, 100 bp, Homo sapiens
acccaaacaccctggagacgaattcctgcatctccttggaaacaatgccatctttgaatgtgagagataaacctagtttcagcatgtctgcagcagagac

SEQ ID NO: 832299 - DNA, 99 bp, Homo sapiens
gatcccaaaattattgaaaacactcgaaggactatgtcttcagcagtggtgcagttatatgcagcagatcggaactgtatgtggtcaaagaagtgcagt

SEQ ID NO: 832300 - DNA, 99 bp, Homo sapiens
agatgtggagctctccttgcagatcggtgacacagttcacatcctggagatgtacgaggagcctggagaaagttcttgtggaattcagtcacaaggagt

SEQ ID NO: 832301 - DNA, 100 bp, Homo sapiens
atacaagtaaacaagcagaaaatggacaaccagaaccacaaaacaaggttccggctgaggaccttacattgacattcagacttcacagagaatgcagttg

SEQ ID NO: 832302 - DNA, 98 bp, Homo sapiens
caagaggatctggggagatgatgacacgttctccagttaaggctgaagccgacgtagcttctctgaacagacgcatccagctggttgaggaagagttg

SEQ ID NO: 832303 - DNA, 99 bp, Homo sapiens
ggtgagctggagaacctgaagtagcaaaggcaagaaggcaacgacgttccatctgtggaaggacctaccaaccaggtgctgaccttaaggaaagagcca

SEQ ID NO: 832304 - DNA, 100 bp, Homo sapiens
ccgaaggggcgtctgcggctctccgccgtccccagccctgcctctccctgggctctggcgtgatgggaaggctctggagaggttcctgcaggattacttt

SEQ ID NO: 832305 - DNA, 98 bp, Homo sapiens
gccagatctcagaggagcctggctaagcaaaaccctgcagaacggctgcctaatttacagcaaccatgagaatggaggctccagagtgaaattaatga

SEQ ID NO: 832306 - DNA, 100 bp, Homo sapiens
actataatctgcagaatgcattcaatctggctgaaaaggaactgggacttaccaagctgctggatcccgaaggtggtgttcccactgatgaagagcaggc

SEQ ID NO: 832307 - DNA, 112 bp, Homo sapiens
tctacagcaggagcaagcggtggtgcttatggtagccaaatgatgggaggcatgggcttgtccacatgaaatgaagatcacctctgcctatctacaggacattgagaatgcc

SEQ ID NO: 832308 - DNA, 100 bp, Homo sapiens
ttggggacgctctcagctctcggcgcacggcccaggacactcatgaggaccatgatacttccactgagaatacagacgagtccaaccatgaccctcagtt

SEQ ID NO: 832309 - DNA, 100 bp, Homo sapiens
aaacagtatctcacctccctaaactggttaatagtggcatggaagatccatttggtagttattactagtaaaagcggagagatcttgtatcgtatttcac

SEQ ID NO: 832310 - DNA, 100 bp, Homo sapiens
ccaggatgtctacaaaattggtggtatacaatgttactagggaggcccccatttgaaactacaaatctcaaagaaacttataggtgcataagggaagcaa

SEQ ID NO: 832311 - DNA, 98 bp, Homo sapiens
gctctcctcgcccctcgttcccttgggaaccgcctgggaactccgccatgtcatccacttcgcccaacctccaggtgacttcatggtcatgacgattt

SEQ ID NO: 832312 - DNA, 98 bp, Homo sapiens
tagactctagccgtcccactgaccctctgagccacagcagcaacagcagctcagaaagtctggcaagttgatgagcagatagatcactacaaggaaag

SEQ ID NO: 832313 - DNA, 99 bp, Homo sapiens
aaaaactggagccagtccttttgccaggaattgtactctcagagatgttgagaaaagatacatgggtcttggaagataattactcaaaatatgcaggga

SEQ ID NO: 832314 - DNA, 99 bp, Homo sapiens
tcgatgagaggctggtatacacctccttctcccaaggggaaagctctggcaatttaaatgacccaaataaggaggcactggctaagacggaagtgtctc

SEQ ID NO: 832315 - DNA, 99 bp, Homo sapiens
cgagctggaggccctggagtccatctaccctgactccttcacagttggaagcaagaattggataagacttctcaggcgtctgcacaatccctaatggcc

SEQ ID NO: 832316 - DNA, 100 bp, Homo sapiens
actgaagatagtgcctttcagccctaccagtgttctagaacagatcagacattttgtaatgatgcctgaaataaacactaaccacctcgacaagcaacag

SEQ ID NO: 832317 - DNA, 100 bp, Homo sapiens
tttcactaattgtggcattcacataactctcaggagccttctccgcagttggcttcctcggtagcttccacacggagcatgcccgagagcctggacagcc

SEQ ID NO: 832318 - DNA, 112 bp, Homo sapiens
agaagtcattttaaactatggacgactccgaggaacattgagcccagtggttcccagacacaggtaatcttgggcacctccaagagcaaagtttaggagaagagggaagtca

SEQ ID NO: 832319 - DNA, 99 bp, Homo sapiens
ttggttcggagggacgtccgcttctggtggacagattgagcaaagtgacagctggagtatcagccttggaagtatatacgccaaaagaaatcttcgtgg

SEQ ID NO: 832320 - DNA, 100 bp, Homo sapiens
gcccatcccagtggcggctgccaaggagacgtacatagtggaatgtcatgggatcacccttcttccccagttcttgggcatgtaccggcttaatgttgat

SEQ ID NO: 832321 - DNA, 98 bp, Homo sapiens
cgggatcccagcctcaggcgtgcgcggacggtgtgcggtgccatacaaattatattcctgtctgtggatcaaatggggacacttatcaaaatgaatgc

SEQ ID NO: 832322 - DNA, 98 bp, Homo sapiens
ccgcagcgacaacatggaggccgtgaagaccttcaatagcgaggctctccaagagattctaactcagtcacagtttgaaccactactgaaccactgct

SEQ ID NO: 832323 - DNA, 100 bp, Homo sapiens
ccgagagcgcgaatatcgtcatcgttagaaggaggcccagaagattaacaatggctcaagccaggcggatggcactctcaaaccagtggatgaaaaagag

SEQ ID NO: 832324 - DNA, 100 bp, Homo sapiens
aaaaccaagaaggagattttgaagatgcagatacccagatcaggaaacagagctcagtgcagcccactaaattgctcagggccctacagctaacaagcgg

SEQ ID NO: 832325 - DNA, 101 bp, Homo sapiens
ctgaaaggagagacacttgtgaacattcaagtgaagcaaaagcctttcatgattatgtccaggtgcaggtacagcagtctccgcaacaggtctcggctcag

SEQ ID NO: 832326 - DNA, 98 bp, Homo sapiens
aggctggaaaggactccggaaaggccaagacaaaggcggtttcccgctcgcagagagccggcttgcagttacagatttatggtaatggaaagactagg

SEQ ID NO: 832327 - DNA, 100 bp, Homo sapiens
acacccgtttgacacggtcaagtcacccacaaaagctgtatataatgccagacattggaatcatccagattcagaagaactgcctgggccaccagtagta

SEQ ID NO: 832328 - DNA, 100 bp, Homo sapiens
tgctgctggacgacacggtgccgctgacagcagccatcgaggcgagccagagcctgcagtcccacacgctgtcaaagctcgaaaaacagcagcagaggaa

SEQ ID NO: 832329 - DNA, 100 bp, Homo sapiens
cggatatcacctttgccactgacattgcagagctgtgggctgtgttccacaagttcaaaggtttgaattcctcagcaacatctacagcaaataatagccg

SEQ ID NO: 832330 - DNA, 134 bp, Homo sapiens
tttttctaaagagtcttgttatttcttctttgagaaaaacctgaaagatgtctcagttgaaatgttccttcttgcctatgctgtgcgccacaccatccaggtgtaccggctctccaagtacaacacggaagaat

SEQ ID NO: 832331 - DNA, 100 bp, Homo sapiens
gtgctggtcatttttggaggcctcactgggtattcctctgatgcttcttggacacttaatgattgttggcaagaaatgtgctgctgatctgggcctgaat

SEQ ID NO: 832332 - DNA, 100 bp, Homo sapiens
ctgaccagaagaggtttagtgccctcctgagtgactgcgtcaggcatctcaatcatggcaacttcagcaacagcaggcagaattggaagtgcaccagaga

SEQ ID NO: 832333 - DNA, 100 bp, Homo sapiens
tgcgagtggtggctatccaaggagttcaaaccaagctgtacttggcaatgaacagtgagggatacttgtacacctcggaaagaccacagcaagattcttt

SEQ ID NO: 832334 - DNA, 100 bp, Homo sapiens
ggaagagagcaacgccagagcccaggtgcccagaggactttcttccagcttctgctgtccttctttgtggagagcaaggaaatggatcagacaatggctg

SEQ ID NO: 832335 - DNA, 98 bp, Homo sapiens
cgaccagggacctgcccgcctgcggctgctccggcttacagattgcagtggatcaaaggaaaatgcttcatgtattgagcaaaataaagaaaatcaga

SEQ ID NO: 832336 - DNA, 98 bp, Homo sapiens
gaagggcggaaagggtggccgagcgcgggcggaggacggagaagggggcggcgagggccggaatctcgaggaaaatgtttcaacgtgcgcaagagttg

SEQ ID NO: 832337 - DNA, 100 bp, Homo sapiens
gtatagatgcagcatatatccagttaatatatccaggtaccactctgattgtggactgcaatgtaacagacaccaaggataatacaaatctacgatgctg

SEQ ID NO: 832338 - DNA, 100 bp, Homo sapiens
aaggtgcccagctgcagggcggcagtaatgaggaattcctcctgatcagcagagactgatctttgctggcaagcagctggaagatggacgtactttgtct

SEQ ID NO: 832339 - DNA, 99 bp, Homo sapiens
agcattggtactaatggccaactcaagttggcgagctttagcccctctcctccttctccgtaccctaccactgttggaccagtggagagcagtggattg

SEQ ID NO: 832340 - DNA, 100 bp, Homo sapiens
gtgcggtgcacagttttcgaaggaggatgccctggagacacacaggcagacccatactgagctggactggccattatggaggaggagctgcagcattccc

SEQ ID NO: 832341 - DNA, 100 bp, Homo sapiens
gtgggctaaagtgaaacattcagcatccctgtctggtatgccttctcgatgctagttctcaagactgctatgatattccacgagcatttccaagtgatag

SEQ ID NO: 832342 - DNA, 100 bp, Homo sapiens
gctggcagcacttccctgagccactctccaggctgctccagtactcaagggaacggattctggctgtgactcagtcactgacactgagcctgaggacgag

SEQ ID NO: 832343 - DNA, 100 bp, Homo sapiens
caacagtaatctgcagagaatgggctcctccgagtcaacagattcagacgaagttatacggaagcgtctcctcattgatggagatggtgctggagatgat

SEQ ID NO: 832344 - DNA, 100 bp, Homo sapiens
agataaagtgctaatcttcagcctcaaagtcctcagaaggaatgattacggacctgaagccaaagaacaagatgcgctagtggacagattgctgaccagg

SEQ ID NO: 832345 - DNA, 98 bp, Homo sapiens
aaagacacctggccagcggtccagagctgatgcagctatccagtcagttcgctgctattcccatgggtcacaggagacagatgaggagtttgatgctc

SEQ ID NO: 832346 - DNA, 99 bp, Homo sapiens
aatcctggctatatagttgggaagccactcttggctctgactgatgatataagttactcacgtgatggcaatgggaagctgggcctggtggagttcaac

SEQ ID NO: 832347 - DNA, 100 bp, Homo sapiens
ttcaaaacaactggaatatttagcaaggattcaaggctttcaggaaatctggcattttttaaagtttgcgccccacaaagaggaaatattccaaaggtac

SEQ ID NO: 832348 - DNA, 100 bp, Homo sapiens
gtatggcagtgtcagctgtacagccacactaactgtgacagtggggttccagcgtgtttctgtgttataagaagtctgtacctgcttcaaatgcaatagc

SEQ ID NO: 832349 - DNA, 99 bp, Homo sapiens
agaactcctactccttttaagaatgcgcttgctgctcaggagaaaaaatatggacctcttaaaattgtgatttggaggccaatcactgccaccttttat

SEQ ID NO: 832350 - DNA, 100 bp, Homo sapiens
tgaaccaacaaatgctcaatttctggagtctgttaagagaggatgccagatatacgaaacccagaaggaactcagtacagttcccatcctcagatggcag

SEQ ID NO: 832351 - DNA, 99 bp, Homo sapiens
gcagatgtatgggtgaagatccaagatgttctacaggaggaatttgatggggtcctgagagaggaggctgtggccaaagcactccatcacttggggcgc

SEQ ID NO: 832352 - DNA, 98 bp, Homo sapiens
tgtggggagactctacagctttacattattgtgacttttcttccacgaacataaacagtccacaggaagaggttgaactaaagaagttgaaacatttg

SEQ ID NO: 832353 - DNA, 100 bp, Homo sapiens
gcaaaaatcccatctaccgcaactctcagttcgagagtaaaggtatatttgcttacttaaactaccatgttcctcgaacgagacgagaaatcctggagac

SEQ ID NO: 832354 - DNA, 100 bp, Homo sapiens
acctggatcccagtctttcaatggcttcaagacaaccagaagtgcctgaccatcatcaaagaggggatgctgaccaaacagaacaattcattccagcgat

SEQ ID NO: 832355 - DNA, 98 bp, Homo sapiens
ggaaatattaacctggccatggaaatcgctgagaagcacctggatattcctaaaatgttggatgctgaagaatttggaggttttggttcagttagtgg

SEQ ID NO: 832356 - DNA, 98 bp, Homo sapiens
ggaaaaataatcaaggcaactcgtttcaggcaaagagagctcgacttaacaagattactgatttgctgctgcttccaggagaagtggagcaggatgta

SEQ ID NO: 832357 - DNA, 100 bp, Homo sapiens
gccccgccgccgcgcacctgccttcgctcccgcaccggtcctcgatgggcttcctggaatattggtgtgtttatttgcatcagatgtgctggaattcata

SEQ ID NO: 832358 - DNA, 98 bp, Homo sapiens
tcttctctttaaatatttgatgaaattcaccagtgaagccgtgacatcctgggatattctttgttgagaggtgaaggtaggcaatgaagttgctacag

SEQ ID NO: 832359 - DNA, 99 bp, Homo sapiens
ccgtcggggagcaccgagcccaggtagtatttatgaagattcatgtgctagtcatggtccaatgagtttgggagaattggagttggagccaaattctaa

SEQ ID NO: 832360 - DNA, 100 bp, Homo sapiens
gatcgctgtgatcgtcacttgcctaaattatacagatctgtgattgaagatgtcattaatgatgtgagagacatctttctggatgatggagtggatgaac

SEQ ID NO: 832361 - DNA, 100 bp, Homo sapiens
ctcgatataattcagtacgacctttagccacattgtcatatgctagtgatctctataatggttccagtatagtctctagattcccacaactccatgctgt

SEQ ID NO: 832362 - DNA, 100 bp, Homo sapiens
gctattggatcctgcacagcttggaactgctagatgaacccatcccccagatagtggctacagatggtggtgaccgcggtggcttcaaaaattttggtgg

SEQ ID NO: 832363 - DNA, 100 bp, Homo sapiens
ctcaaaaggtgatctggacaaaggaacaggtatctcaggccatttcataattctgaatcatgtctgataacggagaactggaagataagcctccagcacc

SEQ ID NO: 832364 - DNA, 99 bp, Homo sapiens
ctggacgttaaagggaagcgggtcgttatgagatcactggggtgatcctgctggctgttggagtctggggcaaacttactctgggcacctatatctccc

SEQ ID NO: 832365 - DNA, 100 bp, Homo sapiens
ggaactctatcccaggaatacagctttgcattagcatcagacaacagtcagcgctttcgagaaacctgttttgcatttgccttgacaccacaacaagtgc

SEQ ID NO: 832366 - DNA, 100 bp, Homo sapiens
agcagccgccgccagagaggcccgcccaccagttcgcccgtccccctgccccgttcacaatgagaacgtatttaccgggcagtcaaagatctattcctac

SEQ ID NO: 832367 - DNA, 100 bp, Homo sapiens
gacgtacagcgggccgggaaaagtggcactgaggctctggaacttctgcccagctctccttgatattaacctggctgcagagccaaaagtgaaccgagga

SEQ ID NO: 832368 - DNA, 100 bp, Homo sapiens
attccaaagggaactgaaattactattgcctttgattttgactatggaaattgcagggccagccagcacaagcctctccatcaagtggaagacaatctgg

SEQ ID NO: 832369 - DNA, 100 bp, Homo sapiens
gtaccctgatggagtcccttgcaggtcccaggtgtgacaccttcagcaggtctcagggaagatggcagccctaggggacattcaggagtccccttctgtc

SEQ ID NO: 832370 - DNA, 98 bp, Homo sapiens
tgaagaacactttcaagaaccaggtcgggtattcaatggatcgggaaaacccattgacagaggtcctgttgtactggccgaagacttccttgatatca

SEQ ID NO: 832371 - DNA, 98 bp, Homo sapiens
cggaccggcgtccccggcgcgaagaggctggactcggattcgttgcctgagaaatcgagctatagcagattatcttcgttcaaatggctatgaagagg

SEQ ID NO: 832372 - DNA, 100 bp, Homo sapiens
tggcaaaaagggcaagacaaggtgaagaggataatgagaggagttggatttgtcttctagttctcagatgtctcccctttccttatatggtgaaaactct

SEQ ID NO: 832373 - DNA, 100 bp, Homo sapiens
gttggaatcatgatgataatcatagcagcacttttcacagcatcagcagtcatctcactagttatgttcaaaaaagttatcaggacaccccatgggagag

SEQ ID NO: 832374 - DNA, 100 bp, Homo sapiens
cgcccctgcggctgcagctggaccggtgctactgaaattgttcagttactgcgtgaaggtgaaagtcaaccggcagcaactggtcaaactggaaatgaac

SEQ ID NO: 832375 - DNA, 98 bp, Homo sapiens
gaaggttgtgaccaaaagaggctccgcacgaaagcaagagattatcaaagtcactgaacaactgatcgaagctatcaacaatggggactttgaagcct

SEQ ID NO: 832376 - DNA, 100 bp, Homo sapiens
aggcagctcgcggtcatgggcggctcagcctccagccagctggacgagggcaagtgcgcttacatccgagacgaaagtaggcggtacgaaccctaatgga

SEQ ID NO: 832377 - DNA, 100 bp, Homo sapiens
cggctctgcgcggtccccgccagcgccccatcctgagccggttctggctccttggcagcaatggctgtatttgaagataagtttaggccagacatggagg

SEQ ID NO: 832378 - DNA, 98 bp, Homo sapiens
tgcgcaattctgactccacaaacacctttgacacttggattggacttaatcttaaacctctggagttcaagaccttttaaaaagggctaaataaacaa

SEQ ID NO: 832379 - DNA, 100 bp, Homo sapiens
gagggagagaaccagcacttctgggacgcacagagaccgtgaagattccaagttcaggagaactcgaccggagcagtatagcatcaagttctagaggaat

SEQ ID NO: 832380 - DNA, 98 bp, Homo sapiens
gggaaagcataggccgtgccccgaccggactggacgcatttttatacataggggaaaatggtatcatcggaggcaagctgtaaaagaattacatagta

SEQ ID NO: 832381 - DNA, 99 bp, Homo sapiens
tgcaatgtcaagagctttctggaaacctccacagctgttgagaaaaaggagaaacctcttccaagacttaatatccattctggattctggattttggca

SEQ ID NO: 832382 - DNA, 98 bp, Homo sapiens
gaaatgttcaagtttaccaaaagagaggcaccgctggaacactaatgagattatgtttgagaccttcaacaccccggccatgtacgtggccatccagg

SEQ ID NO: 832383 - DNA, 99 bp, Homo sapiens
cgacgactgcaagcagtttcgggaggagttcaacgtggatccataaagaacccagccaacccgcagagggaggggaggggctgagctgtgaggagagcg

SEQ ID NO: 832384 - DNA, 99 bp, Homo sapiens
ccaccgcaaggactggagaaggaggacagttatgggatggatgggaaggttaatcagccccgtctcactgcagacatcaactggcaaggcctagaggag

SEQ ID NO: 832385 - DNA, 99 bp, Homo sapiens
gctgtccctgcggcttctggggcaaagagattgttctgaagaccgtgctctaagggcatttgaaagactgccaggtagtgcgagcctgagatggtctgg

SEQ ID NO: 832386 - DNA, 98 bp, Homo sapiens
gaagaggatgataaaaatgcccaagggagaaagaggcatgttaagccaacaagtggaaatgccttcacttttcatgcaacacccaacacttataagcg

SEQ ID NO: 832387 - DNA, 98 bp, Homo sapiens
gcaagagcacgctatgagagatacagtggcaatcaggttctcttttgaatcctggttttgacttcagtggagcagaaatctcaggaaactacactaaa

SEQ ID NO: 832388 - DNA, 100 bp, Homo sapiens
atttcatcctcaagtttccgcacaggtttgagcacaaaatgaacataattagggaaaataaggatctggcatgtttctacacaacaaaacattcatggag

SEQ ID NO: 832389 - DNA, 116 bp, Homo sapiens
ctgacagaaggtcagtgccagctggcctgactttacagtctgttagtccccagagcctccaagggaaaacggctctccctgcatgtcctatccaggccacctgtgaggctgcttcc

SEQ ID NO: 832390 - DNA, 100 bp, Homo sapiens
tatgttgtgtcatttcgaaggggagtgaggattctttggacaccagcctgagagctcacggggtccatgccactaagcatgtgcccgagaagcggcccct

SEQ ID NO: 832391 - DNA, 100 bp, Homo sapiens
ggtgtcaatgtccagcactgtgcagggcagcaacatctttgagagaacggaggtcctggcagccattgatctgtgtgctgaagggacccatggatgtgag

SEQ ID NO: 832392 - DNA, 100 bp, Homo sapiens
atttccgagaactcccatcagtttctgtatagtgtaaaaggtgtcctgatggcaaatttcaagggccacgcgcttccagggagtttcttcctgatcattg

SEQ ID NO: 832393 - DNA, 100 bp, Homo sapiens
agtcttccgtcacttagctgaccatgggcaactttctgggatccagcgagcgacatgcctgtacaggtcagaaaagagtgaaagatgctcagggaggagg

SEQ ID NO: 832394 - DNA, 98 bp, Homo sapiens
tgaaggacaagctcctacaaggcaggcagtattgggtgcaggcgggccttttttgaaggactacattaccattcaaagtattgcagcttcctccattg

SEQ ID NO: 832395 - DNA, 99 bp, Homo sapiens
actcggtggaggaacctctttattggacttaatcagcatacccatcacaggtgacaccttacgtatcgtcagtgaagcaggagcatcaatctacagtgt

SEQ ID NO: 832396 - DNA, 100 bp, Homo sapiens
ctttggggcccctggatttaatactacgacagccactttgggctttggagccccccaggccccagtaggtctgctgagaacagacccagtccctgaggaa

SEQ ID NO: 832397 - DNA, 99 bp, Homo sapiens
tccgccatcgatgcatcccagacccccgatgtcgtgttcgcaagcatcctagcagccttctccaaagccacatagctaaagttgcagacaagatccagc

SEQ ID NO: 832398 - DNA, 99 bp, Homo sapiens
ggcaaggtctactacatagaccacacgaaccgcaccaccagctggatcgacccgcgggacaggtttaactatagatcaacacatcatcttgcatctcat

SEQ ID NO: 832399 - DNA, 100 bp, Homo sapiens
atgccagaccgtggaagatttaacgaatggggttgtgatggcccaggttcttcaaaagatgtatgccaatgtcttcctgcagcctgttacagatgacata

SEQ ID NO: 832400 - DNA, 100 bp, Homo sapiens
ggacttcagaaatatgaatatgttttacatccaagaactacaggctttacttttgtggtagaccgtctaagagaaggaccatggccaacctggagcgcac

SEQ ID NO: 832401 - DNA, 100 bp, Homo sapiens
accccgagcgaggccaaccttcaggaggaggaggccaattataggcagagcatcgacaagttgaagtacagctcggtgactgacaccccacagattgttc

SEQ ID NO: 832402 - DNA, 99 bp, Homo sapiens
tctgggagccttcctgatccgggagagtgagagctccccaggggagttctctgtgtctgtgaaatctcacattcttgaaggtggcattgaagagcacta

SEQ ID NO: 832403 - DNA, 100 bp, Homo sapiens
ggccatcaccacgcagaacgtcaacaccaagtgcatcaccatccccaggtgtcgtgaaaactacccctaaaagccaaaatgggaaaggaaaagactcata

SEQ ID NO: 832404 - DNA, 100 bp, Homo sapiens
atcagttttacttggaccggaagcaaagcaaagtagactgggtacaatgtgatggtggctgtgatgagtggtttcatcaagtttgtgtgggtgtatctcc

SEQ ID NO: 832405 - DNA, 100 bp, Homo sapiens
gaatgtgaagagacaggaggcagcagacggacatccaggccgcctgatcttcgacaacctaaagaagtccattgcctacaccctgaccagcaatatcccg

SEQ ID NO: 832406 - DNA, 98 bp, Homo sapiens
ggaggctgtgcgcatgcagcacctgtgtggcccagagttgctcagaattggagcagagcctgagacgtatctgcagatcctgtcatcagctggcaagt

SEQ ID NO: 832407 - DNA, 100 bp, Homo sapiens
tggtctcagatgcatcaacgtttgctcactgatctattattttcaatagaaacagatatacagatgtggagaagacgaggagaagaccttttcatgtgta

SEQ ID NO: 832408 - DNA, 98 bp, Homo sapiens
ccactacgtggaacgacccgcgcgtgccctctgagggccccaaggactatgacttgagccagctgcagcagcctgacactgtggagcctgatgccatc

SEQ ID NO: 832409 - DNA, 100 bp, Homo sapiens
caaagagttgcttcagaggcacagaaagttacagagctgtgttccagatcatctccctggtaatttaccccgtgaagtacacccagaccttcacccttca

SEQ ID NO: 832410 - DNA, 98 bp, Homo sapiens
gagccaggagcatcctgaagctgacccaggtagtagtatttatgaagattcatgtgctagtcatggtccaatgagtttgggagaattggagttggagc

SEQ ID NO: 832411 - DNA, 100 bp, Homo sapiens
gagagcaatacatcatcatctttggagaatttagcgacggcgcctgtgaaccagatccaagcttcaacggaccacaccaaaatgccatctcaaatggaac

SEQ ID NO: 832412 - DNA, 99 bp, Homo sapiens
ccacagatcccatcagaggcaccccagacacacttcggaaccaaaaagaagcttcccagagccggggccaggagccccaagcgccctctagcagcaaac

SEQ ID NO: 832413 - DNA, 98 bp, Homo sapiens
agcatctgcaagagatcaacatcgccaccaggaccaccttcctcctgccaggtcacccaacctgcctgcagtttaccctgaacatgaccgaggctgtc

SEQ ID NO: 832414 - DNA, 100 bp, Homo sapiens
gaggagtcctggacacccaactacaagcagtgttcatggagttcattgaattatggcatagatcttgggaaaattgcgttggatgaaaaatctgacaaac

SEQ ID NO: 832415 - DNA, 99 bp, Homo sapiens
tagatctagaagtcactttggaagaagtatatgcaggaaattttgtggaaaggatgacggccgaggcgcaccggcgcgtggtggtggagtacctgcggg

SEQ ID NO: 832416 - DNA, 98 bp, Homo sapiens
cacaacagaatgctgctcattttctactgtctacaaatgggccctcgtttaaagcaagcagtttgaaagcagataaaaagttagaatttgttcccaca

SEQ ID NO: 832417 - DNA, 98 bp, Homo sapiens
agacctgtacactgaccttcgagatggacggatgctcatcaagctgctggaggtcctctctggagagaggctggtttatcttgcagattatggacttt

SEQ ID NO: 832418 - DNA, 100 bp, Homo sapiens
cagatgcccaccggaatggagaaggaagaggagtcggcttaagtccactccccgccctaagttctctgtgtgtgtcctgggggaccagcagcactgtgac

SEQ ID NO: 832419 - DNA, 98 bp, Homo sapiens
gacctggaggaagcccatcgagagaagagcaaaggagactgcaccatccgtgctgaagccgacgtagcttctctgaacagacgcatccagctggttga

SEQ ID NO: 832420 - DNA, 100 bp, Homo sapiens
ataatgtcgacctgccggagtcgaggattccagggtcgaacactcggtcgcaatggaagaagagatcgccgcgctggtcattgacaatggctccggcatg

SEQ ID NO: 832421 - DNA, 100 bp, Homo sapiens
gaattgacagaggtgatataccagacctttcacaggtacttcaaaggctcatcaagtcccgaggaaagtctcagtccaaacacctcaatgtccaaatagc

SEQ ID NO: 832422 - DNA, 98 bp, Homo sapiens
atgagatacatagcaaccatcactgataagcactggatgtgtgtgagaagtggggagaaatgccaccactacaacccaaacatatgagggaagccgtt

SEQ ID NO: 832423 - DNA, 100 bp, Homo sapiens
tgggatccaggaacacatcgatctgggtatcaaatatgacccaagcattggtatctacggcctggacttctatgtgttttcagatgcttcaagtgttgtg

SEQ ID NO: 832424 - DNA, 98 bp, Homo sapiens
ccggcccagcagctgcagccgcagcctgtggctgtgcagggccccgagccggcccgggtcgagtttgaaggaagaaagtactgtgaacatgactttca

SEQ ID NO: 832425 - DNA, 98 bp, Homo sapiens
ctgtgtatgtaggagtgaatataaaaggacttcatctcctcaacatggaaactaaggaagatgatgttgatgttaggcctgcaagaaaaagcgaggct

SEQ ID NO: 832426 - DNA, 100 bp, Homo sapiens
ggatgttgcagatgttttacttcaagcaggggctgatttactgctgtacaagcctttaaagaagcaagacaaaatgttgctgaagttgagtcatcaaaga

SEQ ID NO: 832427 - DNA, 98 bp, Homo sapiens
aaaggcaccgtgacaggccaagtgcaggggccagaagacaaagtcaattccatgaaacctgtaggaagtgtcagggactctggaaagaacataatggc

SEQ ID NO: 832428 - DNA, 98 bp, Homo sapiens
taccatgccctacgcccactgcaaagggatgatgcagtgtgtgattgcagtcgcggacaaagtattcgatgccttcctgaacatgatggcggataaag

SEQ ID NO: 832429 - DNA, 99 bp, Homo sapiens
aaccacttacaccgttctacaaaatgaagaccaagatcactccatggatgaaatgacagctgtggtgaaaattgaaaaaggagttggtggcaataatgg

SEQ ID NO: 832430 - DNA, 100 bp, Homo sapiens
cagcccaagctctgggcccgctacggccctggaatactgatttgcctgataatgtggaagaagtgaagcttttacttcatatgtgggtagctctgtttta

SEQ ID NO: 832431 - DNA, 98 bp, Homo sapiens
tctcgacagccttttactgtgaacagagacaaaatctggctctgtcacccaggctagagtgcagggatgtgatcatagttcactgaagcctcaaaact

SEQ ID NO: 832432 - DNA, 100 bp, Homo sapiens
tctaccatcaaataatgactgtctctctcaggctcggtgaaggaaatactcatgaccagccagatgtcttaaggaatgcttttgaaaagaacagaggcgt

SEQ ID NO: 832433 - DNA, 74 bp, Homo sapiens
aacttattcccttcaattcaagtaacaggaagctgtgctgaatggtttggtggccactgaggtgttgatgtggt

SEQ ID NO: 832434 - DNA, 98 bp, Homo sapiens
tggtgctggctagagtgtatacgtttggacccaagcttaacttttccaatgtggaatcctgggccttcattgtcatggctgagtacgggaccctcctg

SEQ ID NO: 832435 - DNA, 100 bp, Homo sapiens
ggtacctcgcctcggtgcagggctccgccccgtcgcctggaaaggaatcccgttctgcttccagaagtggaagtgctcacggatcggggaaatctgcaag

SEQ ID NO: 832436 - DNA, 100 bp, Homo sapiens
caaggaggtttacaaaatagacatgccgcccttcttcccctccgaaaatccgcaaacgattaattctgtcagacaaagggcagctggattggaagaagat

SEQ ID NO: 832437 - DNA, 98 bp, Homo sapiens
ccacttgctcctcaggaaccctattttggactgaccaaacttggaaatcatgtcttagagatcaaggagccaagagatgagacaagcctgggttccta

SEQ ID NO: 832438 - DNA, 98 bp, Homo sapiens
agcatggacatattaactcttacctgaagcccatgttgcagcgggactttattaccgctttaccagcgtggggtagagcagcggctgccatgctcttc

SEQ ID NO: 832439 - DNA, 100 bp, Homo sapiens
tgcggtcagctcgctgcagcttcaacggagacttcgtgtgcggacagtgtgtgtgcagcgagggctgattccaactccacagagtgaccagagagaggac

SEQ ID NO: 832440 - DNA, 98 bp, Homo sapiens
ctgtgttctgcttttttcattgttccactggacgctcatcagagggaagatctttttcctcaattggtctatgttaacaatgaatgggcaaccagtgt

SEQ ID NO: 832441 - DNA, 98 bp, Homo sapiens
gagcgacagaaaacttggaactaagctggaggacaccgagtactcttatgcagtccccatgtctgaacaggaattaagaataactcaaagtgaatttg

SEQ ID NO: 832442 - DNA, 100 bp, Homo sapiens
caaaccccagtactcctctgcccaacactgtacctcagttcattgccagagagccatccatgaaccagagaatcagtcagagtgctccagtgaaacagcc

SEQ ID NO: 832443 - DNA, 100 bp, Homo sapiens
atatccttcaagatgcctgaagacaatcggaggggtatacaagcaagcgaggtgagccaatccaaggagcaccagcagtttatcaccttcttacagagac

SEQ ID NO: 832444 - DNA, 100 bp, Homo sapiens
gcaatagaatcgttcaagaattctatgaccctatgaccccagtcaatgccagggaacgtgtgaaagaagaattgtggggaaaaaaaagcaagcataacca

SEQ ID NO: 832445 - DNA, 100 bp, Homo sapiens
cagtgtcagcgacatcattgtggtggccaagcggatcagccccaggtcgagtcccagacaccagaagtctgaatttggagaaggctggggtagatactag

SEQ ID NO: 832446 - DNA, 99 bp, Homo sapiens
aaagctctggagaaaatgcagcgggaagaacaatgtattttatatcttggaccaaggcaaggggagagccagttgcgcagagccctgcaaccagcagtc

SEQ ID NO: 832447 - DNA, 100 bp, Homo sapiens
gcatgtggtagaatgcatttcctgggctccagaaagctcatattcctccatctctgaagcaacaggatctgagggcagcaaggcgaaccccatccctact

SEQ ID NO: 832448 - DNA, 98 bp, Homo sapiens
gaacaccgggtggctggtgcagccgaggtcttcgggaattccagcgaggctgaagtgagtagtgaatatagtatggacaaggcaatggttgaatttgc

SEQ ID NO: 832449 - DNA, 98 bp, Homo sapiens
gcattgctgaaaatgatgttggaaatgcacaagctggagcccaactgataatccttgaacatggaggactgacaaatggtagtggtcgatatatctct

SEQ ID NO: 832450 - DNA, 100 bp, Homo sapiens
acgagaatatttgacttctcatctggaaatacgctttaccaagtgctccttgtcttctgagatgttgggcccctcttgggatggagatgaagcagaatcc

SEQ ID NO: 832451 - DNA, 100 bp, Homo sapiens
gaggaggcgcggaaccatggccgatgggggcgagggcgaagacgagatccagttcctgcgaactggcacagtcttttgctgagcgcctgcgcctgggaat

SEQ ID NO: 832452 - DNA, 100 bp, Homo sapiens
agaagggagcagagatgttttccaaacgtatggacagctttttatcctccgttgcagacatggttcaaagactagacttggactagaactttcaccattg

SEQ ID NO: 832453 - DNA, 100 bp, Homo sapiens
tccatcctgctggcagctttagaaattatgaggagtcaaatcctaaggatccagcggcagtgacagaatccaaagagggaacagaggcatcagcatcgaa

SEQ ID NO: 832454 - DNA, 100 bp, Homo sapiens
gacaatgtacttttgggaatggaaggatctgttaagctcatctataggatcgggtgaaccaccaaccggcaattgaaagctgcacagcctgaaattacct

SEQ ID NO: 832455 - DNA, 99 bp, Homo sapiens
taaagccaagctcatctctgagacccggaggaggttcgaagctgagtatgtgacagtggatgactgcgggccggggcattctgcacgctgagatgcctt

SEQ ID NO: 832456 - DNA, 98 bp, Homo sapiens
aagccacagattgtcgcctgcataatgtcttcaatgacttccttatgctctctaatacccagttcatagagaatgagaatgtactactcatcacctcc

SEQ ID NO: 832457 - DNA, 100 bp, Homo sapiens
ccagatggatgtggcctccatcctacatctcaataggaaattcgtagacatagtgtttcacagccaatggtgcggattataggggaacacagaactggac

SEQ ID NO: 832458 - DNA, 98 bp, Homo sapiens
gaaggaaaagagtcctggaatatgaagagacatgagatggtggaagaatccccagctagagatgatcgctatggaaaatcctgcagacttgaagaagc

SEQ ID NO: 832459 - DNA, 98 bp, Homo sapiens
agaactcaatattagtttaacttcaataggtttattgatactgcttttgcaaaaaataaagatgatggaaaatggtactattttgatgacagtagtgt

SEQ ID NO: 832460 - DNA, 99 bp, Homo sapiens
agggagctctatagtcggagtggagaactgcaagcccaagccagtgacctggaaaaaatccacctggatgagaagtctttccgttggttgcacaacgag

SEQ ID NO: 832461 - DNA, 100 bp, Homo sapiens
caggtgctgaagacccaccccggagacccccgcttccagtgcaggtgtggatgaggtcaccattgtcaacattttgaccaaccgcagcaatgcacagaga

SEQ ID NO: 832462 - DNA, 98 bp, Homo sapiens
gcagaggattcgcagcgtgagcgccccgcagcccgctcaggaccagggcttcgtgctgtgtcactccatcgctgggggtacgggttctggcctgggct

SEQ ID NO: 832463 - DNA, 99 bp, Homo sapiens
gaggctctgcggctggtccaggccttccagtacacagacgagcatggggaagagtgcctggaagagctgggatgtctggttgagtcctatggcatgaat

SEQ ID NO: 832464 - DNA, 100 bp, Homo sapiens
cgaaccaaagctgaacaaggcaactgttcaaccaggagaaaagacagcaatggaccgagctgactccactggaacccattctctgtacacaacatacaaa

SEQ ID NO: 832465 - DNA, 100 bp, Homo sapiens
ctttggtgctctcttttgtgggccagacaagatggtcagtaggacagaaggtaacattgatgactcgctcattggtggaaatgcctccgctgaaggcccc

SEQ ID NO: 832466 - DNA, 100 bp, Homo sapiens
tctgactcgtgatctgcccatcttgttactccctagcagtgtggtaagtacctattgttaagcagacttgggagagccaggcaagtctcattgaatacta

SEQ ID NO: 832467 - DNA, 100 bp, Homo sapiens
gaagttgacatctgacgacgtgaaggagcagatttacaaactggccaagaagggccttactccttcacagatcggtcccagtagggatggcacaatcagc

SEQ ID NO: 832468 - DNA, 98 bp, Homo sapiens
aatgctagaaaaattgactgtatcctatgatgaagcagttggaatgttaaagaaattcatcaggctgctgactatctcaaagtggaagaggtggtcac

SEQ ID NO: 832469 - DNA, 98 bp, Homo sapiens
ggatgatgccttcaatactacctttatttccaccatagagtccctgtgaagcaggaagagtgagggcaggttcactgcagctcagcagcatgtctgca

SEQ ID NO: 832470 - DNA, 99 bp, Homo sapiens
aatgaaatgcagaaaaaagatcacaagcaactctggatgggattgcaaaatggtgaactactgagttcttcattatgtctgatggagattatgattacc

SEQ ID NO: 832471 - DNA, 100 bp, Homo sapiens
cagagccatccttcgggagaggatatgtagcgaggaggaacgcgctaaggcaaagcacctggctggaatcgatggagaaagcatcggcaactgtcctttc

SEQ ID NO: 832472 - DNA, 98 bp, Homo sapiens
gtcaggattcatctccagagaagaaggtgaagatatctcttccaaacgcatgatgaaggaggtcttgtcaacagggcaaggcaatacagaagtgatcc

SEQ ID NO: 832473 - DNA, 100 bp, Homo sapiens
gttaatttcaaagcttttcccatggaggagtcagaaataccatcagaggaggggtactgtgactttaatagtaggccaaatgagaactcttattgctatc

SEQ ID NO: 832474 - DNA, 100 bp, Homo sapiens
tggaatatgccaaggaaaaactggagagcttcatcaaaaatagtgatagctttgataatctcgtttcctctcagtccatccacccttcatggggccagag

SEQ ID NO: 832475 - DNA, 98 bp, Homo sapiens
tagacctggaatcgcccaagtccctctactcgcgagatggagatggacacatggatcatttactgccaggctgtgaagataaaaattgccaaaagagt

SEQ ID NO: 832476 - DNA, 100 bp, Homo sapiens
aagcaggcgaacccgcggcgcaataacggtaaagtaccttttattcatgtgggaaatcaagtagtatcagaacttggtccaatagtccaatttgttaaag

SEQ ID NO: 832477 - DNA, 100 bp, Homo sapiens
cttgcattggcctccggcaggcgccccccgggggcgggaagctggtattcctccacctcgtcctggcatgatgcgcccacctttggtgcctccccttgga

SEQ ID NO: 832478 - DNA, 100 bp, Homo sapiens
ttctcctccaaggtctacatgattacctgaagtttaataaatataagcttaccaaagtcagcaacaatatgctacacagctgctttgctcaaagcaagag

SEQ ID NO: 832479 - DNA, 99 bp, Homo sapiens
agacactacacatctgtcctccacagaggctttttgtgtgttttatcatctaaaatccaatccctcgactgcaaaattcaaaatggggctcaaggtatt

SEQ ID NO: 832480 - DNA, 99 bp, Homo sapiens
caatgtcaacaggaatgcagcagtggagctgacacggagacacatcggtatgagaaagtgccagtcatcttggttgggaacaaagtggacctggaaagt

SEQ ID NO: 832481 - DNA, 98 bp, Homo sapiens
tctacggggagccaagtcacttaaaagtatcaggagatgcatcgaaggtttgagaatgctcctgattctgccaaaacaaaagctctgcaaactgttat

SEQ ID NO: 832482 - DNA, 100 bp, Homo sapiens
aggagaagagctatggacacagagaatttttccaagttacagctacctagcacatggattaattgatgtatgttgagtttatggagctgccttttggtgg

SEQ ID NO: 832483 - DNA, 98 bp, Homo sapiens
tccctggctgcgtgcacagcgccttgttccagcagggcctgatccaggacaaggaagatggggagccaaagaccaagcatctcagagaagaggaggaa

SEQ ID NO: 832484 - DNA, 100 bp, Homo sapiens
ccgagaaataacatttgaaaatggagaggtacttgttttggctccaacaagggaactggcaaaccaagtagccaaagacttcaaagatataactaggaaa

SEQ ID NO: 832485 - DNA, 100 bp, Homo sapiens
gagctcttcagaaaccaggctgctttcaggaacattgctgtggattcccagacatgcagccgtcttggttgaaactattaaaaagggaattcatgatgct

SEQ ID NO: 832486 - DNA, 98 bp, Homo sapiens
agtttttggagatgttcgttggtgtgggccctgctagagtggcaaatattaagaaggagactcatattgtgtggtacaaagatgagagggagatatca

SEQ ID NO: 832487 - DNA, 98 bp, Homo sapiens
gtacaatcagatcagctgtgaacagcttacatagcaaatctaatagcgggtattcccctacatctcagccatggtgaacaacggctccctcagctatg

SEQ ID NO: 832488 - DNA, 99 bp, Homo sapiens
tcacattcaagctgataggctgcgctaccggaatgtcatccagcgagtgattaggatttgaccctaaagcatggctggaggactggtgcaatcatccca

SEQ ID NO: 832489 - DNA, 100 bp, Homo sapiens
ggattctggacttgccagccccacaatcatgaacgtcaaggtcgtgggaaataaaaggcagttctacacagactgcagcaacggttgcatctgcatatcc

SEQ ID NO: 832490 - DNA, 98 bp, Homo sapiens
ccagtgtctgagcctacaactgcgctatcttccctggatttttcttcaccttttccttactcatgagccagggagagccataatgcaagccattccta

SEQ ID NO: 832491 - DNA, 98 bp, Homo sapiens
tggaccatcatccttcgctttgctattcaggatatttcggttgaagacattgtatgcaaacctgttccattctttcttcgtggacaacccattccaaa

SEQ ID NO: 832492 - DNA, 100 bp, Homo sapiens
cgcggggtccgctatggcggcggcagccgagggcgtactggcgacccggagtgatgagcccgcccgaggttgtaggtcataaagaaggtctggatgttat

SEQ ID NO: 832493 - DNA, 100 bp, Homo sapiens
atcagaaaggtgcgaaaaaaggtgaaaggtattcttgtggatattgggcttgacagctgcaaggagttactgaagagatgtagaagaattacagctaaaa

SEQ ID NO: 832494 - DNA, 100 bp, Homo sapiens
aagccctcaaggatgcccggtccccatcaccggcacacattgtcgtcttcaatgaaatttatccagtatggacttactcttacctggtgctactgtttcc

SEQ ID NO: 832495 - DNA, 100 bp, Homo sapiens
actctacctggatgcattttaactaatcctgaggacttcatccggtcaccatctacctattcttcaaatggtcggatccgcacaagacggcaaagctctg

SEQ ID NO: 832496 - DNA, 142 bp, Homo sapiens
gctgttgatgctgtaattgctgaacttaaaaagcagtctaaacctgtgaccacccctgaagaaattgcacagaaacacagtgctctgtgcctatacagtgtacggataaaacagataaacaagaagcgctgtttaagcctca

SEQ ID NO: 832497 - DNA, 98 bp, Homo sapiens
tgtagacttgctaaaggagaagtctggtgtaatacaagatgctttaaagaagtttttccagaggcctcaaatacagcctcctagagctaccatcccga

SEQ ID NO: 832498 - DNA, 99 bp, Homo sapiens
ttcacttccctcggtctgggcttctctgaggcggcgagagatggtcaggtctggagctcgaccgggccaggtgctaactgccaaagaaaggaaaactca

SEQ ID NO: 832499 - DNA, 100 bp, Homo sapiens
caggcccagctgaccacctcctgctgcagctctactctggacacctgcaggcctgatcacttgaacggacatatcaagcaggtgcacacttctgagcggc

SEQ ID NO: 832500 - DNA, 100 bp, Homo sapiens
agagatctcctccgagccatgagaaataagagcctccaaggcaggtcatcctgacactgcaacccactttggtggctgtgggcaagtccttcaccattga

SEQ ID NO: 832501 - DNA, 100 bp, Homo sapiens
atggcatccgtcctaccggaaacctaggaaaagcagaaaaatatggctcaggagactaaccagaccccggggcccatgctgtgtagcacaggatgtggct

SEQ ID NO: 832502 - DNA, 100 bp, Homo sapiens
cttctgactgagaagcagaagctgcgggtttgtttggcagctgtgggcttagtgggagacttgtgccgtgccctgcaatccaacatcatacctttctgtg

SEQ ID NO: 832503 - DNA, 99 bp, Homo sapiens
agaagtggataaatcagtgctgctttctttaggacgaaaggtttgtggtaaatatgccagctctagaacacatgaatcagattttacacatcttgtttg

SEQ ID NO: 832504 - DNA, 100 bp, Homo sapiens
aggacaaggaaggctgcattcctgtggcaccaccaggtggaagatggaggtatgttctcagtcggcgtggcacaagcctaatggaagatgatgaagagcc

SEQ ID NO: 832505 - DNA, 100 bp, Homo sapiens
aatcagttctctctctttcttgttggctctggaggctttggtggaaaacggacatcagacaaagtcaagatggttaccataagcgaacagacaggaaatc

SEQ ID NO: 832506 - DNA, 100 bp, Homo sapiens
gctgacatcaagtcttccttggtgaacgagtctgaaatcatcccggccagcaacggacacgagggaaacggcaacaagcctcccagtactgacctgaaaa

SEQ ID NO: 832507 - DNA, 100 bp, Homo sapiens
gtatttttattggaagaggatctaggagaaatatggaaccacccctttagtttgggctgcacgaaagggtcatttggaatgtgtgaaacatttattggcc

SEQ ID NO: 832508 - DNA, 101 bp, Homo sapiens
aaagatcttgtctcgctggcctgcgacccagccagccagcaacctggaccgggctgaaatctctttaatgatggagggaagcaggcagacgcgagtgtctc

SEQ ID NO: 832509 - DNA, 100 bp, Homo sapiens
ctgcccctgggaaaccagagagtcggagggagtccatctggagcggccaacacccctaccccacggaggatgagaagaggcagatcgcagcccagaccaa

SEQ ID NO: 832510 - DNA, 100 bp, Homo sapiens
ggaggcagaggtggaggcgctttgaaagggcccttgcggatgtcatgagaccacagggccactgcaacactgatcacatggagagagacctaaacatcgt

SEQ ID NO: 832511 - DNA, 115 bp, Homo sapiens
aacaattcaacctcaaatttctaatttcaccaacaactatttattgagggctaggtggtccgtactgagaagaacagtttgaacaaccgattcttaccctggaatgaaattgaga

SEQ ID NO: 832512 - DNA, 100 bp, Homo sapiens
gagagcgcgaatatcgtcatcgttagaaggacataagcagctctatgaccaatagcacagctgccagtagacccccggtcaccctgaggctggtggtccc

SEQ ID NO: 832513 - DNA, 98 bp, Homo sapiens
acgggcgaaggcagcatcagccatgaggagcagaagtcagtccggctggactcacaccacccggcaagaactgctcactacggctccctgccccagaa

SEQ ID NO: 832514 - DNA, 100 bp, Homo sapiens
ctccctgccgacatcggcctcctgcagaacctccagaacctagccatcacggccaaccgggtacatccagacactgaaggaccacaggccccggatggtg

SEQ ID NO: 832515 - DNA, 100 bp, Homo sapiens
ggaacgaaagagaagctctatctcccctccaggagcccagctatgaactccttctccacaaatgtgttcagagcaacattgttttgttgacacaagcatt

SEQ ID NO: 832516 - DNA, 100 bp, Homo sapiens
tgtgacttgactcttcaaacacaaaggcattgagatgaagttcaagaatatgctgtttcctatgattgtctgcccagcctggatccctgagctgaattcg

SEQ ID NO: 832517 - DNA, 100 bp, Homo sapiens
tgaccttccagcttctgagggagaagtctggtccatgcctgtacctgttgaacgaaggacggcatcagaattaatgtaactacactgaaagatgatgggg

SEQ ID NO: 832518 - DNA, 100 bp, Homo sapiens
gcataaaggttataaatcatcaccagaccagtttgtcggcatctttgctcagaataggccagaggcatcgttggcttcacagtatgactgatgatcctcc

SEQ ID NO: 832519 - DNA, 100 bp, Homo sapiens
gaaaacaatcggcaaggggaattttgcaaaagtaaaattggcaagacatatccttacaggcagagaggaacttcacagaccagctgcggaagatttccaa

SEQ ID NO: 832520 - DNA, 98 bp, Homo sapiens
aaggggacgggacggacggtgatggtggtcgccgcggcggcgtgtgcgcccctcagcgtcgagggcgaggcccccagcagtgagactggcacatccct

SEQ ID NO: 832521 - DNA, 100 bp, Homo sapiens
gatggacttgctacctcttgggtgaactctagcaattacaagggtgggagggatgaaggaaattatctggacgatgctctcgtgagacaggatgcccagg

SEQ ID NO: 832522 - DNA, 100 bp, Homo sapiens
acaagtctctgaagccgtgcccgttcttcctggagggaaagtgccgctttaaggagaactgcagtttgtcagaggaatggctgtgaatggatgcctggaa

SEQ ID NO: 832523 - DNA, 100 bp, Homo sapiens
ccggcatggcgctccggggcttctgcagcgccgatggctccgacccgctctggattaaagagtctattgttggggaaatcagacgggaaattgtaagtgg

SEQ ID NO: 832524 - DNA, 100 bp, Homo sapiens
ccaaggaaatccagcttactccacagatagccaagacttatcgatgcggtatgaaaccaaatactgctattaagctccttcgagaactcatagaacggaa

SEQ ID NO: 832525 - DNA, 100 bp, Homo sapiens
cgcaagaagaagaagcagctgaagccgtggtgctgaaggttggaatttctcaagagaacaagaaggaagtggaaaagaaactgactgtgaagcctataga

SEQ ID NO: 832526 - DNA, 100 bp, Homo sapiens
cccagatcctcgcagggcaacaccctgtgataattccaggtgattctctacatctgcagcttgaggtatcgagaaccttccctgcgaacttcagaggaac

SEQ ID NO: 832527 - DNA, 100 bp, Homo sapiens
ccgcgatcatcaggtggcagctttgagtgagcgctatgacaaattgaaggttgtttacattcagagctctatcaataagaggaatacatattacagtgaa

SEQ ID NO: 832528 - DNA, 98 bp, Homo sapiens
ttctccgcggcgaaggtgaagagttgtcccagctcggcccgcgggggagccccgggagccgcacggaatcctatccatcttcttcaccgatatggttt

SEQ ID NO: 832529 - DNA, 100 bp, Homo sapiens
cctggactgcactacaccgtgcacattctctgttctaagtgccttaagagaggatcgcccaatccacatgcttttccagcttcagcgccagtcagcaaag

SEQ ID NO: 832530 - DNA, 98 bp, Homo sapiens
tacgtgctcacggtcaacgagcggggcaaccactgcgagtactgcttcaccagatcaaactccgaccccaacgagattcctgaagaactgcgaggagg

SEQ ID NO: 832531 - DNA, 100 bp, Homo sapiens
tgtctcttcgggatttgcgacgctgtcacaggttccagggtataccccgcgaatgaagggcctgctttcttccccgggcgatgtgcagagatctttgcca

SEQ ID NO: 832532 - DNA, 100 bp, Homo sapiens
gtgggctacaaggactcgccctccgtctgggccgccgtccccgggaaaacgttcgtcaacatcacgccagctgaagatgagtggggtaaaaccccagacg

SEQ ID NO: 832533 - DNA, 98 bp, Homo sapiens
tacctgggggagataatgtaactgtgtgcaaggataacagttaagggaagaaagtcggaggctggctttggctgcgaaaagagaaaaaagaaaagaga

SEQ ID NO: 832534 - DNA, 98 bp, Homo sapiens
acttcatttcattgctactaactacctcatcttcagtcaaaagcctgaatttcaggatctttcagccaatatatcaattgtagatatagatactaatc

SEQ ID NO: 832535 - DNA, 98 bp, Homo sapiens
cactcccagaggacaactatgaaaggaccacgccggatggcagtgttggtgaggcagagcatatggaaaatggacctgatcccaaccttgaagaaagt

SEQ ID NO: 832536 - DNA, 100 bp, Homo sapiens
cgggacagtctggacgagaatgaggctaccatgtgccaggcgtttactgaagcatttgaaagggaactaagaagacataaagttcaagagaatattggac

SEQ ID NO: 832537 - DNA, 100 bp, Homo sapiens
tgggtgatcatggttcagcgctttagcctcaggaggcagctatccaaggttggaatgttgcatcagcaggtagaagaacatgaaaaaatcaagcaagaga

SEQ ID NO: 832538 - DNA, 98 bp, Homo sapiens
accaacacctgttccgaaaaaagtggaagcaccaccacccaaagttgccactctaaattcagaagaggagagcgaccctccaacctacaaggatgcct

SEQ ID NO: 832539 - DNA, 99 bp, Homo sapiens
cggagtgagaagcaagaaggccctggacacagcaatatctctgggctttcacagagatgtggtgcaattgctgaacaaaccccgattttgttgttgttc

SEQ ID NO: 832540 - DNA, 51 bp, Homo sapiens
caccagaatccagctcacgctggtgctggaggcatgcatgaagaactgtgg

SEQ ID NO: 832541 - DNA, 98 bp, Homo sapiens
cgaaccccgggacacgcaggaacggctccagcatcaagatccgtctgacaggaatattgtaatacagtccagctagattctgggatagattaccggaa

SEQ ID NO: 832542 - DNA, 99 bp, Homo sapiens
gaggagagcatcgactggaccaagatcgagcccagcgtcaacttcctcaagtcgcccaaaggcaagctgtatgggagaggttcgactgatgataagggc

SEQ ID NO: 832543 - DNA, 99 bp, Homo sapiens
tcacagacccgagggaagatgtctgaaggtggaaggaaatccagcctgctccagaaaagcaaaggcagcctggcatcctcgctacaacctcattgttgt

SEQ ID NO: 832544 - DNA, 100 bp, Homo sapiens
cagtatgaggcaagcgcagggggacggggaccagcagctgtcgccgccgctctcagatattctctaagccgctttcatcatgggagaaatagagcagagg

SEQ ID NO: 832545 - DNA, 98 bp, Homo sapiens
agcagtcaagaagaacatgccccaagttattcgtcagtgaggcggaaattgtggtgtacttgttgagacggtttaagcggaagcatcttactgccatt

SEQ ID NO: 832546 - DNA, 98 bp, Homo sapiens
gagggttggggccgtcttcctcatccttccttttctcggggctcccgtgggaggttcgggaactccaggagcagctggcccgacagcaggtccatgtg

SEQ ID NO: 832547 - DNA, 100 bp, Homo sapiens
agttatgcctgcccagcttaaggtcctaaccatgccggagacctgtagataccagcctttcaaaccaattcacatatgctgagtttaccacatcttagga

SEQ ID NO: 832548 - DNA, 100 bp, Homo sapiens
ctgcgagccccgggtcccgccctggggccggcgatgtgccaccgaggctgaggatgatggtagattgccagataacgaaggaggcccaacttcattcaat

SEQ ID NO: 832549 - DNA, 100 bp, Homo sapiens
gagacttcgacttcctagatgtggagctggaggatggagaggaagacagtgacccgcccattcatgaaagtctcagcatagaaaatacattgtgggcaag

SEQ ID NO: 832550 - DNA, 99 bp, Homo sapiens
ggaggcagaggtggaggcgctttgaaagaatcatattctaagaactcagccactcaggtatccaccatggtgctgggtcctgaacagaagatgtcagat

SEQ ID NO: 832551 - DNA, 99 bp, Homo sapiens
gcctcgcctggatgtgagtttcagccaggcagtataactccaactgtggaactgaatgggcttgctatgaaaaggggagagcctgccatctacaggcca

SEQ ID NO: 832552 - DNA, 100 bp, Homo sapiens
agggaaaggacaagatgaagtggaaggcgcttttcaccgcggccatcctgcaggcacagttgccgattacaggcttctagcagtgcagggaacttgggag

SEQ ID NO: 832553 - DNA, 100 bp, Homo sapiens
ggaggaagaattcccaagccaaagctttccagtggagccacatgttcctcctgatcgaggaccaaggtgcccagggctatgagctgttcttcaagacaag

SEQ ID NO: 832554 - DNA, 100 bp, Homo sapiens
cctgaccatcgggacgtcagagcgcggctcagatgtggcctctgcccagcttcccaacttcaggcctacctcctcatcgaggaggacatccgggaccttg

SEQ ID NO: 832555 - DNA, 100 bp, Homo sapiens
gaagcctctgattggcacagtgctggccatggaccctgatgcggctaggcatagcattggccccatggctgggggttatggagtgatgggtgacgatggt

SEQ ID NO: 832556 - DNA, 100 bp, Homo sapiens
atgatgccccacttggtgaatggagatgcagctcagcaggttgtgaactaaaggccgacaaagattatcactttaaggtggataatgatgaaaatgagca

SEQ ID NO: 832557 - DNA, 98 bp, Homo sapiens
ttacacagtaccatggaggatccttaccaaatgtgagccagctgcggagcagtgcgtcagagtttcagatggagctaacacccattatggagattaac

SEQ ID NO: 832558 - DNA, 99 bp, Homo sapiens
cgcgcccggcctgagtgagtcttaatccgtggccatctgcgttcctgcaggcttcatctggccctatggtcccctgatattaatgactgcagccagaac

SEQ ID NO: 832559 - DNA, 99 bp, Homo sapiens
ttgctttttgatggccatggcataaggaactctatcccaggaatacagctttgcattagtactatactggcaattgctggagaagattttgcaattgtt

SEQ ID NO: 832560 - DNA, 100 bp, Homo sapiens
tgctacacaaagagttaagcatccactcatgtgaagtcaaccctaccacttatgtcttggatgaagatgaacctcgattccttgaagaagttgattacag

SEQ ID NO: 832561 - DNA, 98 bp, Homo sapiens
ttccacgcatgcggttgtcatgtatgctcgaggaactgactatagcatcttggagatttcttataggaaagacgtgcaggacacccacacgtacagtg

SEQ ID NO: 832562 - DNA, 100 bp, Homo sapiens
ccgatgtggtggacacactgaaacagaagaagcttgaggaaatgactcggactgaacaagaggttgctgccaaacaaggtgaatccgacccagagaggaa

SEQ ID NO: 832563 - DNA, 98 bp, Homo sapiens
ctatgatgccccactgagtgaggctggggacctcactgagaagtattttgctctgcgaaacatcatccagaaggatttccatggagctgtcatgaggg

SEQ ID NO: 832564 - DNA, 100 bp, Homo sapiens
agctcatctctgagacccggaggaggttcgaagctgagtatgtgacagatgggggactcaaggagatttcaccaccacccatcctcggcctgtggtcaaa

SEQ ID NO: 832565 - DNA, 100 bp, Homo sapiens
gtttgctctcatgaacatgcaatgagaagactgatcaatctgggtgcttcaaggatgaccgcatcgtcttctggacttggatgttctccacctacttcat

SEQ ID NO: 832566 - DNA, 98 bp, Homo sapiens
cagtacatttctgcaattgagaaacaggcacacaagtgtgaggagttgctaaatgctcagtttgaaggttgcgagaaggccttttcaaggcttgaaaa

SEQ ID NO: 832567 - DNA, 100 bp, Homo sapiens
aagaggacaaatttgacaaagaagaatataggaaaaaaattaaggcaaagcatcgggtatactatcccatgccacacaaaggcagctcattttgatatag

SEQ ID NO: 832568 - DNA, 100 bp, Homo sapiens
ttgaaaacgttaagtattttctaccaagctgggacttccaaagctgggaatcctattttttattatgttgcacggagtactatactggcaattgctggag

SEQ ID NO: 832569 - DNA, 100 bp, Homo sapiens
cttgggggtcgagcacataacggggttcgggtgtctcgtgtgtgaacatcacagtgtaaacaggaacatcgataagtagtgtaaaaacttgcacaatgaa

SEQ ID NO: 832570 - DNA, 101 bp, Homo sapiens
ggagcctcaggcggcagcgcttctaggaagccagttgagggaagttctccatgaatgtacgtcacaatgatgatgaccgaccaaatccctctggaactgcc

SEQ ID NO: 832571 - DNA, 100 bp, Homo sapiens
ctgactgggctcctgagcttcatggtggagaagggccccaccctgggcagtatagagacgtcggacttcacggcttgggcctggaacaggacaggcaggg

SEQ ID NO: 832572 - DNA, 100 bp, Homo sapiens
tagaaatcatttccatcaataccggaaactggcgatggaatatgagaggagccctctggaaagaaaaggacagaccctgtgctttcatgaaagtgaagat

SEQ ID NO: 832573 - DNA, 99 bp, Homo sapiens
acttctggtggttgccactcacctgaggatcgtggtgatggtggatgaggcacacgaaaggaccctacacacagacattctctttggattgatcaagga

SEQ ID NO: 832574 - DNA, 100 bp, Homo sapiens
atttccagaacaggcctgctgtgcagaggaggaggtggcggtgggcggaactcctagcggacacctcgtggagtccggccggaagagcaaccgagatgaa

SEQ ID NO: 832575 - DNA, 123 bp, Homo sapiens
gtttgccaatgttggagccgtctgcaaagtgtccccggcaagaagagccccccaagatgaacccagtggtggagccactgtcctggatgctgggcacctggctgtcggacccacctggagccg

SEQ ID NO: 832576 - DNA, 100 bp, Homo sapiens
ccaaagcctgaacaggcagggccagacccaggtgtccctggccagtgtccttccacctgtccacaagcatggggaacatcttcgccaacctcttcaaggg

SEQ ID NO: 832577 - DNA, 100 bp, Homo sapiens
aattgtcaagatgtggaataagaactccataagatttgtgaccaaatcagtgatgctgtccttgatgcccaccttcagcaggatcctgatgccaaagtag

SEQ ID NO: 832578 - DNA, 100 bp, Homo sapiens
tacacatttccagcaggctgcagatacgagtggacaaggagaatgaagttgaagaggtaaaagaggagggtccaaaagagatgactttggatgagtggaa

SEQ ID NO: 832579 - DNA, 98 bp, Homo sapiens
ccgttaccctgtgatctgcaagtcctgggagacgcacagctaagatgcccggacatcctggaagctgggaaatgtggaggtgaagccggtgctgccaa

SEQ ID NO: 832580 - DNA, 99 bp, Homo sapiens
taccggccgtggaagcggccaccgactactgtcagcagctgtgccaggtatgatctcgtgaaatcttgagagaaactgaatgacgaatgaaactattgt

SEQ ID NO: 832581 - DNA, 99 bp, Homo sapiens
gacaaccgtacccggctgtaccggcagatcctcaggggcaagtacagttactctggggaggtgctggaggtggtgagagccaactatgacacgctcacg

SEQ ID NO: 832582 - DNA, 99 bp, Homo sapiens
acaactcaaatttgcttcccagagaaatgatattcaggagaagtgtgtaaagtttgaaggaagaaagtactgtgaacatgactttcagatgctctttgc

SEQ ID NO: 832583 - DNA, 98 bp, Homo sapiens
ccgaggccagatcctctggttccggggcctgaaccgtatccagactcagcatatgtccatttggagaggccccatttcaagtgctcagtggctgctgg

SEQ ID NO: 832584 - DNA, 150 bp, Homo sapiens
gccctaccaaggctggatgatggtagattgtacttgcctgggagaaggcagcggacgcatcacttgcacttctagaagaaccagattttattgatgatatagaagaaaaaactcctattagtaatgaagtagaaatggaatcagaggagc

SEQ ID NO: 832585 - DNA, 100 bp, Homo sapiens
aaggttgtgactttagtatacactacccgtacagtgaggacgcccgccagggtgagcagtacatgaacacccggtgcccagcctggtgtgaccgcatcct

SEQ ID NO: 832586 - DNA, 100 bp, Homo sapiens
acgaagctattacattgcttgaacaaaataattgggacttagtgcatgattatgatatgagggtggatgatttccttcgtcgcacacaagctgttgtcag

SEQ ID NO: 832587 - DNA, 100 bp, Homo sapiens
ctttggatgctcatgaaatttgtctgcaagatatccagcacagacgcagtcttcagcaaggaagtgctgggaacgccctggagtgaacccaggaagatgc

SEQ ID NO: 832588 - DNA, 99 bp, Homo sapiens
acacgagcgagattcctctggttctggtgggaacccagggtgctgcgacaagagactttggacaaaaattgacttgagtaggtgtaaggccattgtgcc

SEQ ID NO: 832589 - DNA, 100 bp, Homo sapiens
ctctaaaaagtaatgggatgaataaaattggactcagagtttccattgacactgatatggctctaagtatgcagtcatctccaaatggccagtttgtagc

SEQ ID NO: 832590 - DNA, 98 bp, Homo sapiens
agtacttgggatcccccagttccaaagtgtcttaaagcccatggtaactggagtccttggagtggctggggaacatgcagccggacgtgtaacggagg

SEQ ID NO: 832591 - DNA, 98 bp, Homo sapiens
aagtacctccttttcagctacaacatcatcttctggtttctgatgaagaattgaaaagaagagtagctgaggagctggcattggagcaagccaagaaa

SEQ ID NO: 832592 - DNA, 100 bp, Homo sapiens
cgaacccgttcccgagccgtggagatttttaccacttgtgcccatatgatctgtaacatggaggagctggaaaagaaatgattctggggaccattctgac

SEQ ID NO: 832593 - DNA, 99 bp, Homo sapiens
cagacatcaactttactctcaatacaaatgaaagttcttcaggagacatatgaagcaaaaaggaatgaattcctgggagaactgcagaagaaagaagaa

SEQ ID NO: 832594 - DNA, 100 bp, Homo sapiens
accaccgtgctggaccgcttttacaatgcagatctttgtagaatttgatggctgtaactggaagcaacactcctgggtaaaagttcatgctgaggaagtt

SEQ ID NO: 832595 - DNA, 98 bp, Homo sapiens
ccagcagcgccccctctagaagtttctgaggaacaggtaattaataaaatgtctccaacatctctaaagatcacactaaggcaactcatggaggggtc

SEQ ID NO: 832596 - DNA, 100 bp, Homo sapiens
cagctgaattcattgaggaccagtcaattctaaactctgcttttctaacccaaactgtatgtcttgatgacactacagtaaagtttgaaatatgggatac

SEQ ID NO: 832597 - DNA, 99 bp, Homo sapiens
aaatctcctgctgtgaaccagcagaatttttgaacaggcaatggtggcttgctatccgggaaatggaacaggttatgttcgccacgtggacaaccccaa

SEQ ID NO: 832598 - DNA, 100 bp, Homo sapiens
cccggcagcagcccgacgcaaaccaaggatctggggatcttcgcactatcccaagcttttgcgagaattgaagcaccctaatgtgattgcattgcagaag

SEQ ID NO: 832599 - DNA, 98 bp, Homo sapiens
aaaggatctgcagctagtacctgtattcttaccattgaaaggtctcacgtattgcagggaaggtttggttgtgagatcgagaataacagaagcagcgg

SEQ ID NO: 832600 - DNA, 100 bp, Homo sapiens
cgaggcatgggggtccacactgcaatgtttttgtggaacatggagaaaagccatatgtttgtacagttcctgggtgtgacaaaaggtttacagaatattc

SEQ ID NO: 832601 - DNA, 98 bp, Homo sapiens
aaaaaacgatgaaatgaaagctatggatgttttaccaattttgaaggaaaaagttgcatacctttcagggcacacgtgtttcacgttgacaggtttgc

SEQ ID NO: 832602 - DNA, 99 bp, Homo sapiens
cttagaggacttccctttggatgtagcaaggaagaaattgttcagttcttctcagggatgcccgggtagttaaagacatggcaactggaaaatccaaag

SEQ ID NO: 832603 - DNA, 99 bp, Homo sapiens
ccagttatgtgtgacagagcaggatttattcaagatactagccttatcctctatgagcaattttccagattattcaaagtatcaggatgggcatgtgaa

SEQ ID NO: 832604 - DNA, 100 bp, Homo sapiens
gagcacttggagaagaagggaccccaggtcagagactggagccattacttcaagatcatcgaggacctgagggctcagtacgagctcaactggaggcagt

SEQ ID NO: 832605 - DNA, 101 bp, Homo sapiens
tgaaaaggagaaaatgaatgccaaatgggacacgtcctatggaggatacgtttcatcactggcccttgcatctggaactggtcttttcaaatgtggtatag

SEQ ID NO: 832606 - DNA, 100 bp, Homo sapiens
ccaagtcccatcactggtcgcactgagggtgaagtggcaggaggaggaggaggggctccggctggtctgtggtgaggccttggtggatctcctgctggtc

SEQ ID NO: 832607 - DNA, 100 bp, Homo sapiens
tagtgttttcttatttagccggagtgagaagcaagaaggccctggacacagcaatatctctgggctttcacagccactgaggcggctcccagctgcgttg

SEQ ID NO: 832608 - DNA, 98 bp, Homo sapiens
cggcaaaggtgtcgtggtggtcattaagcggagatccgggttgccattaggggactcctgaggtcctatctccaggctgcggtgactgcactttccct

SEQ ID NO: 832609 - DNA, 98 bp, Homo sapiens
ggctgccgtgtggcgatgtggagaagacccggcgggctgaagccgacgtagcttctctgaacagacgcatccagctggttgaggaagagttggatcgt

SEQ ID NO: 832610 - DNA, 98 bp, Homo sapiens
agaagcggaaaggggaggccatggcgctgaacgagaagcagatcctggagaaagtgaacagtaggtttgtaggcgggctctacgaggcggtgaatgag

SEQ ID NO: 832611 - DNA, 155 bp, Homo sapiens
caagtgtgtaccatgctgctattgtcatcttccttgaattctttgcgtggggccttttgacaactccaatgttgactcttaaagaaagtggttattgtacaggtcatgaaccagattccctggagttcagtactgtaggaggatgggtatctact

SEQ ID NO: 832612 - DNA, 100 bp, Homo sapiens
gagaggatccaggaggaggagttgcagagggaaaggtggcccagacagcgtgtatgtcagcttgcaagcatttagccacatccttgatgcaacttttgtt

SEQ ID NO: 832613 - DNA, 98 bp, Homo sapiens
agaaataaggacaaaagccaagaggaggacagttcgctacacagcaatgcatcgaggttcacgcaaagaatctgctccacaagttttgcttccagaag

SEQ ID NO: 832614 - DNA, 100 bp, Homo sapiens
ctggtggattatggatcagatccaaatcagccgctttgtagttcagaatgtttctgcacagaaagatggagaaaaatctagagtaaaagtcaaagtgcga

SEQ ID NO: 832615 - DNA, 100 bp, Homo sapiens
ccagagacagaagcagatggattcgtccttttaggtcaaaatgcagatcttcgtgaaaacccttaccggcaagaccatcacccttgaggtggagcccagt

SEQ ID NO: 832616 - DNA, 100 bp, Homo sapiens
gtgccctcaatgagcacatgaccagcttagcttctgtcctaaagttcttccctgtggaacagtagagacctagtctgccttctttcacaagataatcctt

SEQ ID NO: 832617 - DNA, 100 bp, Homo sapiens
gtatctcaaagggaagaaactagagcccagcgataaggaagaggagcaggacttggatggtgagaaggggccatcatcggaagggcctgaggaggaggac

SEQ ID NO: 832618 - DNA, 100 bp, Homo sapiens
gcatcattttcacctcgcgtcgcgcccgggaggaaggaacgaggcaaggagctaaagcagcgtgcgttcagccctgggcttttacaaagttgatcacagt

SEQ ID NO: 832619 - DNA, 99 bp, Homo sapiens
ttaaagctggtctgttctaactgagattattgcttgggttagaatatgccctactggtttggtggactcctaaagtagaacatcaagggggattcccta

SEQ ID NO: 832620 - DNA, 100 bp, Homo sapiens
gtgggctgtgttccacaagttcaaagcttcaaggttactgactttttatgatgtttggtggctatgagactatagaagcatacgaagatgatctttatcg

SEQ ID NO: 832621 - DNA, 99 bp, Homo sapiens
aactcttaacatcaatgggcaaatccccacaggagaaggagtaagaccatgaattatggcatttcttaaatgaagcgttcaagaagtgagagaatgtca

SEQ ID NO: 832622 - DNA, 100 bp, Homo sapiens
ggtcatcaccattggcaatgagcggttccgctgccctgaggcactcttccagccttccttcctgggtattgatgaagatgaccctactgctgatgatacc

SEQ ID NO: 832623 - DNA, 98 bp, Homo sapiens
accaggaggtgccggtggccgcgctcggacccgatgggaataactgggaacacaagtccatttggacagccctttagtcaagctggagggcagccaat

SEQ ID NO: 832624 - DNA, 100 bp, Homo sapiens
gtccgggttgcgcctcctggagccgcccccgggacgtcagtcctggaggaggcgaggacctgcgaccgcatcaagcagtccgccagcggaaccaagcggc

SEQ ID NO: 832625 - DNA, 99 bp, Homo sapiens
aaagtttttccaaatattcatctgtacagttacatcatgctgatgacagcttcctggtcctcaccacagatggaattaacttcatggtgaatagtcaag

SEQ ID NO: 832626 - DNA, 100 bp, Homo sapiens
gtcgaagcaagacttaccctaagcgaatagcacaaacacagccagctgtcacagcaaactgtacaatggcagttgagtgggttttgaaaaacgtctgaat

SEQ ID NO: 832627 - DNA, 100 bp, Homo sapiens
gagtggaggctgtcgcccagagagagcgccgtcggataatttttatggtgggacgaggatacctgtctccagatctcagtaaggtacggagtaactgtcc

SEQ ID NO: 832628 - DNA, 100 bp, Homo sapiens
gtggaggggaggattttgaggacacttgtggagagctcgaattccagaatgatgaaattgtacaattgcagcatgactttcccagggccctgattttcag

SEQ ID NO: 832629 - DNA, 101 bp, Homo sapiens
caagctggtcatctgtcctgatgaggagattgtgaagacctttgagatttcagagcctgtgattactccaagtcagaggcagcagaagccaagtgcttgat

SEQ ID NO: 832630 - DNA, 100 bp, Homo sapiens
ctaatatttaagaaagaagatgttaactttcagtgtacacttgactgtgaagtggctgtgagagtgggtggagagttcttctttgaccctcagcctgcgg

SEQ ID NO: 832631 - DNA, 100 bp, Homo sapiens
atccgggttggtgcaggactttgatgctagcctgtccgggatcggccaggaactgggtgctggtgcctatagcatgagatggagtttcgcccttgttgcc

SEQ ID NO: 832632 - DNA, 99 bp, Homo sapiens
gagagcccacaggtgctaaagagagcagtaccctgatggagtcccttgcagtaataaaagactagtggccttagtgcccatgcccagtgaccctccatt

SEQ ID NO: 832633 - DNA, 100 bp, Homo sapiens
gaaaacattacacctgccaatcatgggggtggtaatgaaggtaattaataatgcttgtgctactcaagccatagtgagtgtgttactgaactgtacccac

SEQ ID NO: 832634 - DNA, 101 bp, Homo sapiens
aactgaaggcaactttgtctatcgcacaggggcctttatcatctgctggactcctggattggttttgttacttctagacgtgtgctgtccacagtgcgacg

SEQ ID NO: 832635 - DNA, 100 bp, Homo sapiens
agtcctgtactggactgcatcaggccgcgtctcctcaggttacgccccatggtgtccatcctgccagcagactgattcagaatgggaggcttttgcaaag

SEQ ID NO: 832636 - DNA, 98 bp, Homo sapiens
agaccttcctggccaagtccagacctgagctcctggagtggaaatcctcattgacgattcaatttgttgaaggccaatttgtggactcctacgatcca

SEQ ID NO: 832637 - DNA, 100 bp, Homo sapiens
tttaacggagatcctgatgaagttcgagcactaatatttaagaaagaagatgttaactttcagaattcctggaaaactcaagcaattcgtatttgactta

SEQ ID NO: 832638 - DNA, 100 bp, Homo sapiens
gagactttcacaataagagcagaggatggaacacttcagtgcattcaagggtaaaggagctggaagtgcgaaaattgatgcatgtgagaggagatggacc

SEQ ID NO: 832639 - DNA, 98 bp, Homo sapiens
agcttccgggagggcggctcgcagaattaaacaaccaccatgtcgagcaaaaaggcaaagaccaagaccaccaagaagcgccctcagcgtgcaacatc

SEQ ID NO: 832640 - DNA, 99 bp, Homo sapiens
agagactgagccttgagcagaggaacctatacaaagaagtgatgctggaaaatctcaggaatctggtctcattgggtatcttattgacagccggtggtt

SEQ ID NO: 832641 - DNA, 99 bp, Homo sapiens
cagcagcaacagcttcgaaggcgaccttccttgctttcagaatttcacccaggttctgacagtgtgttaacagggcacaaccattatgtgatgtgtgct

SEQ ID NO: 832642 - DNA, 51 bp, Homo sapiens
ggaccgcgtcctgcgccggagcaggacaatgccgtcttctgtctcgtgggg

SEQ ID NO: 832643 - DNA, 98 bp, Homo sapiens
tctcacaaagaaatctcgtatgtctttacctcagagaaagcaaaccaggaggaggacatccctgtgaagttgggagctgaaagtgccgacagcattgg

SEQ ID NO: 832644 - DNA, 100 bp, Homo sapiens
ccagccgagcaccctccaagcagaggaaagaaagaaatctcgttttgggaatgctttccacctgtgtcgggaagttctgcgtttgactaagctggtggtg

SEQ ID NO: 832645 - DNA, 100 bp, Homo sapiens
ccgaggtgggagaattgcttgaggccaggagttcgagaccagcctagaaacttgtggtggagaatgttgatgtgttaacacaaatgaggaccagctttga

SEQ ID NO: 832646 - DNA, 100 bp, Homo sapiens
tcagtgtcttctccatgctctgctgcttctggcctctgggcatcgcagccttctacttgtcccatgaggagaccaggcacctggatgagatgaagtcggc

SEQ ID NO: 832647 - DNA, 100 bp, Homo sapiens
cggcgagacgcgcagcgccggcgcccgggagacccaggaggagcccgcagggaagcaatgttatggaagatcaggatttgttggaaattggaatccttaa

SEQ ID NO: 832648 - DNA, 100 bp, Homo sapiens
gatttgttaaggattccaagtaactcttatttgatgccagcctgaagccaaaagtagaatgtagtgtggtgacagagttcactgaccacatttgtgtgac

SEQ ID NO: 832649 - DNA, 98 bp, Homo sapiens
atcaccggcgtgccccaccatgtcagacgcagccgtagacaccagctccgaaatcaccaccaaggcatctcgtccccggtgaagaagacagagatgga

SEQ ID NO: 832650 - DNA, 100 bp, Homo sapiens
tcacaagctaatggatggttccttgcaaagggcacgtatagcattggtaaagaacgatcgtccagtggagaaatcttctctacatataccctcagagtct

SEQ ID NO: 832651 - DNA, 98 bp, Homo sapiens
cagttccaaagatgatgaatctgaaaggaaatccggaattatcacagaggatagctgggagtatggccaccctgctccacgatgcggtaatgaatcca

SEQ ID NO: 832652 - DNA, 100 bp, Homo sapiens
aaatccgacggaccaaattatcagcactttttattaatttgatcagtgatccttcacgttggccaaaagaatgcaatggtgtaaagattccagttgatgc

SEQ ID NO: 832653 - DNA, 98 bp, Homo sapiens
cggcggagacagctggtgtctgaagccgctcgcgcccagggctgatcccttatccaacatggttctaaccttcagtactaaagaagatgcagtttcct

SEQ ID NO: 832654 - DNA, 100 bp, Homo sapiens
ggaccacctggaagcctagaaatgcaaagtgcctgcattcgtgaggatgattgctcccgagggctccttggtgtttcatgagaaagcctggaatgcgtac

SEQ ID NO: 832655 - DNA, 100 bp, Homo sapiens
aaaactggagcagaaattggaggctcagcataggtatgaaattgaaggctgtgaagtgatttgggccattaaagataaagctatagggaatactttcttc

SEQ ID NO: 832656 - DNA, 100 bp, Homo sapiens
caagtggacaggatctgactgctcaacagatgtaaaaaaagattggtctgaccatgctctctggtgggaaaagaagagaacttggcttctgaagacacat

SEQ ID NO: 832657 - DNA, 100 bp, Homo sapiens
agctgaagatgctgccaaaagcataaccaatggcagtgatgatggagctcagccctccacctccacagaacgctcactctggggaagctggttgccatgt

SEQ ID NO: 832658 - DNA, 138 bp, Homo sapiens
tcctagactgaagtcagtaggaattccagtattgtgtctaaattctgtggatgatgttttctcacccagtcatggtggccagagaacacagacaaaaagtggaccagttattctagcagatgaaattaaaaatcctgc

SEQ ID NO: 832659 - DNA, 100 bp, Homo sapiens
ccctgtacctcacgtattgtgccaatcacccttctgcagtgaatgtcctcacggaacacaggtgacagagctgaatgaacctctctccaatgaagatcga

SEQ ID NO: 832660 - DNA, 100 bp, Homo sapiens
attagctgcatacagttctgtcttttggtggaaacagctctactccaacaaccctggggtgatggccattgccactttggctgcctgttataataaccag

SEQ ID NO: 832661 - DNA, 98 bp, Homo sapiens
tgctggaaacgcaagacggtgccgagaagcagctgcgaggtaaactgtcttgagccccaccctcacctgcctgtgctggcaaccagtggcctagacca

SEQ ID NO: 832662 - DNA, 99 bp, Homo sapiens
gaagaattgcagcagggagatactatagcacgactgccttgtctatgcatatatcataaagggtgtaggaatgtgggtgtagacggaactccagaaacc

SEQ ID NO: 832663 - DNA, 98 bp, Homo sapiens
ttccacagctccctcagcccttggcgagcgagggagagatgacatgctggacgtggagaccgatgcctacatccactgcgtcagtgccttcgtcaagc

SEQ ID NO: 832664 - DNA, 100 bp, Homo sapiens
aactatggacgactccgaggaacattgaggcctgttacatgaacagaatatggcaaaaatgagactacttacttttatgggaatggcagtagaaaataag

SEQ ID NO: 832665 - DNA, 100 bp, Homo sapiens
gtcgcagcccccgcgctggtgcagccaccctcgctccctctgctcttcctcccttcgctcgcaccatggctgtctgtccccagaccccagagcacgtccg

SEQ ID NO: 832666 - DNA, 100 bp, Homo sapiens
catggggatcttagagaagatctcggagatcgagaaggagatcgctcggacacagaagaacaaggcctttgacgacccctatgccctggtggtgctggct

SEQ ID NO: 832667 - DNA, 98 bp, Homo sapiens
gcatcttcccaccaccttaaaccactggtacatcaagagagtgtacacatgattgaagtcacaagtaatttgattaatgaaactctagcaaatcaccc

SEQ ID NO: 832668 - DNA, 98 bp, Homo sapiens
gggcagctggacgagctggagaaggccatcaccacgcagaacgtcaacaccaagtgcatcaccatccccagtaagactttgaccccgacgcaggcttc

SEQ ID NO: 832669 - DNA, 98 bp, Homo sapiens
aaccaaggagctgcgctgctacagatgttaccacttctgtggctgctaccccactcctgggccgtccctgaagggttccgagtctgaggaagacataa

SEQ ID NO: 832670 - DNA, 98 bp, Homo sapiens
tggaccacacaaagtcttactggcaggaggaagagcgcaggcgccgtgaagaagagatgcggcggcagcaagaagaaatgatgcggcgacagcaggaa

SEQ ID NO: 832671 - DNA, 98 bp, Homo sapiens
cggcgctgcctgtggagatccgcggaggccgacaggattcgttggctgccgtccccgctgctgtgcattgggttattaatgctgcactggctttagca

SEQ ID NO: 832672 - DNA, 99 bp, Homo sapiens
cagtccccacaggagtgggaggcgatccaggccttgacggttttgtagtgcatccctgagcatgagcacagaatgaagcggcgtttggatgaccaggag

SEQ ID NO: 832673 - DNA, 100 bp, Homo sapiens
gggaactgctggggaaggcgattggcatcgatctctccatcccttccgaggcccgacttcggtgctgttccagaattcaaagaagagaaactgcagctgc

SEQ ID NO: 832674 - DNA, 98 bp, Homo sapiens
tgagcatagtgatcccattgggggttgatacagcagagacgtcatacttggaaatggctgcaggttcagaatatggtttggagtgcctttttcgatac

SEQ ID NO: 832675 - DNA, 98 bp, Homo sapiens
cgatggggccgcagcggcggctgtcccctgccggggccgccctactctggggcttcctgctccagctgaatggttatacgccactgcacatcgctgcc

SEQ ID NO: 832676 - DNA, 100 bp, Homo sapiens
acaggtgtaattaccccagaagagaactgtcaagtaatccacctctggctaccatccttattcctcctcatgctcggattcaagcagctgcttcaacccc

SEQ ID NO: 832677 - DNA, 100 bp, Homo sapiens
ctggaaccacctggacgaagagcaggccagcccggacctctggagtgcccccagcccagagcccgatcgcaccccctccctccctggcggagcccctgaa

SEQ ID NO: 832678 - DNA, 98 bp, Homo sapiens
agacggctcacctgtgcgggatggaacaaaagaacccttaggagaaatcttgagagtggacagcaattgtgaagatcgccagagagttctgtgtttca

SEQ ID NO: 832679 - DNA, 98 bp, Homo sapiens
gcacctactgtgttctcaacaccgtgccacctatagaagggcagaaaatttgagacggtgatcgccgtaacagtaaatttggcttacaattggggccc

SEQ ID NO: 832680 - DNA, 100 bp, Homo sapiens
gatacaagacaaaggggcaggataagcagtgtgaaccatctccaatgatagtgtaacacagccagcctcgaagacttccctctgagttggaatgataatg

SEQ ID NO: 832681 - DNA, 99 bp, Homo sapiens
gaagcatgaagctacccgaggcaatgcagcagctcaggtcacccaccggtctgaagaggaggatgagagacaaagaaaaaagttgtctggctgcctctg

SEQ ID NO: 832682 - DNA, 100 bp, Homo sapiens
atgtggggggattctcgacctgctaacagaactggaccttttcggtggcacaagaatggctcaactctccaaatagagagaatttctatcagttgcaagt

SEQ ID NO: 832683 - DNA, 100 bp, Homo sapiens
ccgtcgctgtcgctgagagcctcacgagtcgaggtcctgcaggtggagctccggcagccgccctgccagagactgctgctactttgaaacgtacgataga

SEQ ID NO: 832684 - DNA, 100 bp, Homo sapiens
gctatttcagaactgttctcaggactcattattttaacatttgggagaaacacagccagaaggttggtcaaagaaaaagtgatgtatgaaaaagaggcaa

SEQ ID NO: 832685 - DNA, 99 bp, Homo sapiens
ggggagagtggctcatgggctgagtggataaaccacaaaatgggtaatatactatagctcccattgctatcacatgttttaccagaggcttggacatca

SEQ ID NO: 832686 - DNA, 124 bp, Homo sapiens
gtgcagctgctggtcaccctgagcttcctgcggagcgtcgtcgaggcgcagatcagttggccttatttcctcagtggaaatctactcactatgatgtggtagttggcgtgttgtcagctcgcaa

SEQ ID NO: 832687 - DNA, 100 bp, Homo sapiens
aggcagatcagattccgatttgacgggcaaccaatcaatgaaacagacacacctgcacagaagaagagcgtgatttctcctccaaggccgttgatctcca

SEQ ID NO: 832688 - DNA, 100 bp, Homo sapiens
ggagtcccaatgaaacgggcagccatggccctccacagcccgcaggcctcaggagtgcaagtagctgatgaagtatgtcgcattttttatgacatgaaag

SEQ ID NO: 832689 - DNA, 100 bp, Homo sapiens
tgtagattgtgcagtgctcgactgtgaggatggagtggctgcaaacaaaaagaatcagttgtctggaaacctgctgaggaaattcaaaaacagcaacggg

SEQ ID NO: 832690 - DNA, 98 bp, Homo sapiens
tcatgggctattttgtggaccgggtgagttctgcatcctggtacttcctcaatgtatttgggcttcggagcatttactctctgattctgggccaagat

SEQ ID NO: 832691 - DNA, 100 bp, Homo sapiens
gaagacttgaacttaatacagcaagaaagaccatcaagtttaccagtacagcagggaagaactggaaactcagagaaagaaactgcccttccatctacaa

SEQ ID NO: 832692 - DNA, 100 bp, Homo sapiens
gcagcaaaattcatcattcatgcccctcctggagaatttaatgaggttttcaatgggcctaaggatcattttctcggatgcatcacggctcatcttccgg

SEQ ID NO: 832693 - DNA, 99 bp, Homo sapiens
tgctgcgcttgtcaccatcatcaccgtgcccgtggttctgctgaacaaaggcagggccacctacagatgctcctgcagtggacacagcagaacaagtct

SEQ ID NO: 832694 - DNA, 99 bp, Homo sapiens
ggcgagaagccctacgagtgcaacatctgcaaggtccgcttcaccagcaccagtggctctgacagttctctctcagatggtcttcctgttcacctagca

SEQ ID NO: 832695 - DNA, 100 bp, Homo sapiens
tgcttgtaaaaggtttgaagaactgggagtcaaatttgtgaagaaacctgatgatgctcgtctcaatttggccctgctgtatttcaagtgctcggtagcc

SEQ ID NO: 832696 - DNA, 98 bp, Homo sapiens
cagctgtgagctggcaccgagaggttgaccatagtcggattaaactacatcaagaagataatgactatatcaacgctagtttgataaaaatggaagaa

SEQ ID NO: 832697 - DNA, 50 bp, Homo sapiens
agaggagatgcgtgataccaacggttccagcagcactgatgtgaaggaaa

SEQ ID NO: 832698 - DNA, 98 bp, Homo sapiens
aaggtcacaaattacattacccaatggtggaatattgtatacctcaacgaaggttttgggaacagtaaaatggttcaatgtaaggaacggatatggtt

SEQ ID NO: 832699 - DNA, 100 bp, Homo sapiens
ctgctgccgccccccactccgcctccgggagagtttgtgaagaaatatgggaacctttttagcttggagcttggtgacatatctgcagttcttattactg

SEQ ID NO: 832700 - DNA, 100 bp, Homo sapiens
ggaagaaggggtgaaacttctaagagaagcaatgggaatttacatcagcaccctcaaaacagaccccaccaacaactgaacgctttggtcaggctgctac

SEQ ID NO: 832701 - DNA, 99 bp, Homo sapiens
ccagttccaaagtgtcttaaagattctgaaaaagagttccacgtcctcccttatcgagtctttgttccccttcctggatccactgtaatgttgtgtgat

SEQ ID NO: 832702 - DNA, 100 bp, Homo sapiens
aaaaaaagcctggtgagactttcttcatgtgttcctgtagctctgatgagtgcaatgacaacatcatcttctcagaagggaataaccagcaagtacctgt

SEQ ID NO: 832703 - DNA, 100 bp, Homo sapiens
gttgcggcccaaaacttgattcagaacactaacatcgacaatggacaagctgtaggtaaaacttgcctactgatcagttacacaaccaatgcatttcctg

SEQ ID NO: 832704 - DNA, 98 bp, Homo sapiens
aaaacgggtccatctgatgaatcctatggttccaggattaacaggcagcaaaatgagctcttcagaagaggttggtgatgacaaaactgtgaagcagt

SEQ ID NO: 832705 - DNA, 100 bp, Homo sapiens
agcaatcaaaatgggacttccttgagggcaggcctgtcttgcatctgtttctccaccacctagcctggaatataggctgctaaggaagcaaaaaaggcta

SEQ ID NO: 832706 - DNA, 98 bp, Homo sapiens
ccaagaacctggagcccgtatcctggagctccctcaaccccaagcattgaagttgatatcgatgtggagcacggagggaaaagaagccgcctgacccc

SEQ ID NO: 832707 - DNA, 100 bp, Homo sapiens
ccagtcaccaccagtgttcagccacaaacccagcaagaacagcagatccaggttcagcagccgcagcaggttcaggttcagattcagaacaagaaagtgg

SEQ ID NO: 832708 - DNA, 100 bp, Homo sapiens
tccacttgcccgcttccacccggaaagccccccaggctgagtgcggcatgatctccatcaccgaatggcagaacatttatgcagtgtgtgattctttcta

SEQ ID NO: 832709 - DNA, 99 bp, Homo sapiens
gaagcttatggtacctgcacaccgacaggctggagcgcgagatctcacagaaagttctccgctcccagacatgggtccctcggcttcctgcctcggaag

SEQ ID NO: 832710 - DNA, 99 bp, Homo sapiens
cagtcctcggggagcagatcccccatctctggcagtgcagtgtgcctgggagctgtctggaacattccgcaagtgatctttgcagagctgtttcaactt

SEQ ID NO: 832711 - DNA, 98 bp, Homo sapiens
gcaggagcttttcgtaaagggaagtcatttctactggacttcatgcttagatacatgtataacaaggagcatctttccttgaagaagtacattattga

SEQ ID NO: 832712 - DNA, 98 bp, Homo sapiens
gagtctatgtctgtgtagcaaggaattaccttggagaggctgtgagccacaatgcatcgctggaagtagccacaaaatgatgcttcaacacccaggcc

SEQ ID NO: 832713 - DNA, 98 bp, Homo sapiens
cgcgcctgtcgggctgaactgaggttcatccctgagtccccccgatggctcatctctcagggacgatttgaagaggcagaggtgatcatccgcaaggc

SEQ ID NO: 832714 - DNA, 100 bp, Homo sapiens
acaggagcgcaattacaacttacaaatgtcgcttgagaccctgaaggttcaggataagtttgaggtgctgaattacacaagcattcctatctttctcccg

SEQ ID NO: 832715 - DNA, 100 bp, Homo sapiens
taataatgggaattcctacatctgcaaatgctcagagggatttgttctagctgaggacggaagacggtgcaagaatgcatactctcattcctcaagcgag

SEQ ID NO: 832716 - DNA, 98 bp, Homo sapiens
acacatttatgatgagcagccccccaatgtcgaggagtgggaaggatctgagtctctccctgcggagacagccctgaagaactcctgtaacgtcaagc

SEQ ID NO: 832717 - DNA, 99 bp, Homo sapiens
gaggaggaataatatttatggagcatatattatggaacacaggaatggatttgtaaactcaagagcttctccaaatttgattggagctactggtgcaaa

SEQ ID NO: 832718 - DNA, 98 bp, Homo sapiens
cacaacgaatcttcatcctgtcaagaaagaatcttcaagagggagacatagggaaaaggaagacataaaaatcactaaggaaagaactccagaaagtg

SEQ ID NO: 832719 - DNA, 99 bp, Homo sapiens
aagcccagacctgcagggttcgtggataataaactcaagcagcgagtcatccagcttttcagaagagctggtagatgaagctctgggtgctgtggctgc

SEQ ID NO: 832720 - DNA, 100 bp, Homo sapiens
tggagctggagacatgacaacacagtatatgccacagtatcagtcttcacaagtctatggagatgtaggtgaatgaaatcctgtgccgttcttcagtctg

SEQ ID NO: 832721 - DNA, 98 bp, Homo sapiens
gccgccgaatctccggccgaagagcggcggcggcagcggcgacagtgacaataccctcccctcccttgggctggacccctctctacagctaggagcca

SEQ ID NO: 832722 - DNA, 130 bp, Homo sapiens
tggccaggttatctccacccgtatccttcgagataccagtgggaccagcagaggtgttggctttgcaaggtagacgttacatccaagaggaaataatccaggcaaggaagcacaagctgatcaagatgtg

SEQ ID NO: 832723 - DNA, 100 bp, Homo sapiens
cctcctcagtgcgaagaagctgcagccgcacctggccaagggtacaggtttgcagattccgccagcagcacagcaagctctacagatgagtggctctttg

SEQ ID NO: 832724 - DNA, 100 bp, Homo sapiens
aaccccaggcagagacgggggaagcagcacgggatcccagcctcaggcctgcacggacggtgttggttgggaaagtgagtgagaaggttggaggagctga

SEQ ID NO: 832725 - DNA, 99 bp, Homo sapiens
cacttgattacccgttaagtcccccaaagatgagatttacctgtgagatgtttcatcccaacagactccctccccagctcggtcattagtgccatcagt

SEQ ID NO: 832726 - DNA, 98 bp, Homo sapiens
ccatcaaagccgagatactggctactgatgtgtctgtggaggatgaggaagggactggaagccccaagggccaaggagatctgttgaagaatgccaag

SEQ ID NO: 832727 - DNA, 98 bp, Homo sapiens
aagtcattggctgaagctgatgaacaggaagttgtggctgaggttcaggttcagaggatggcaagatccatgtctggaatggagagagcggtataaaa

SEQ ID NO: 832728 - DNA, 99 bp, Homo sapiens
tttgattcaagtcctgttctacctactgccaattggaaaggaaatctgaaatagagtactatgctatgttggctaaaactggtgtccatcactacagtg

SEQ ID NO: 832729 - DNA, 98 bp, Homo sapiens
tggttaaattaggcagttcttttacgaagttttcggctttgtgagaaaccttaccatcaaacacgatggccagcaacgttaccaacaagacagatcct

SEQ ID NO: 832730 - DNA, 120 bp, Homo sapiens
tgccgagccgacggagaaatggactcctcttctcgctcctgtggagtttcgtcttctgggaacttaagagatttgagaacttcataaaatctcgtcctccttttgatgttgtcattgatg

SEQ ID NO: 832731 - DNA, 100 bp, Homo sapiens
tttgtccttctctgcctgttgcacatcttgtaaaattggacaatggctctttagagagttatctgagtgatgactcactggttgtgtggaaggaagtcga

SEQ ID NO: 832732 - DNA, 98 bp, Homo sapiens
acttttcaagcctgaaggaaaggcagaactgcctgattacaggagctttaacagattgtctctggtcagaatgtgtgccccagtaatagcatgggaag

SEQ ID NO: 832733 - DNA, 100 bp, Homo sapiens
attaactgcctttcttctgtgggctgtgattttcagaggggaatgctaagagttacaggtcggttcacccagaagccagggggcatctcagtgaagcgct

SEQ ID NO: 832734 - DNA, 100 bp, Homo sapiens
cccgcttcgctgagggccttgagaaacttaaggagtgtgtgttgcgtgacgggctttgttcgcgggggtcacagctctcatggctgcagctagcgtgacc

SEQ ID NO: 832735 - DNA, 100 bp, Homo sapiens
gtgaatttttgaaagcattgaaaagagacagagtagaagaggaacatgaagatgaaagccgtgctggctcagagaagctgataaaatactgggaagcatt

SEQ ID NO: 832736 - DNA, 100 bp, Homo sapiens
aatcaactgggagaatgtaactgaaagatacatggcttgcaaaaagtaaaccacgatcgttatgctgagaagatatcaagtctcttactgcccatatagt

SEQ ID NO: 832737 - DNA, 100 bp, Homo sapiens
ctggtggccttttgtccctttgcctcatcccaggttgccttggaaaatgccaacgccgtgtctgaagagcagcccgacggccatggaggctgaagagacg

SEQ ID NO: 832738 - DNA, 100 bp, Homo sapiens
cttaataggcaatgggcagtcaccagcattgcctcgaccacactcacctctctctgctcatgcagagaaagcaattgagctgcgtctggcaaaaattgac

SEQ ID NO: 832739 - DNA, 98 bp, Homo sapiens
tggaggcacagctgcagtctgacgagaggggtgtggatgaggtcaccattgtcaacattttgaccaaccgcagcaatgcacagagacaggatattgcc

SEQ ID NO: 832740 - DNA, 100 bp, Homo sapiens
tcgtgtgattgactttgatgagaacactgctctggatgatgcagaagaggagtcctttaggaaggacttaaccaccaccatgtcgagcaaaagaacaaag

SEQ ID NO: 832741 - DNA, 98 bp, Homo sapiens
aacttttcaagcctgaaggaaaggcagaactgcctgattacaggagctttaacagttctgaaacacagacaacatcaagggggaaagaaagtgaagat

SEQ ID NO: 832742 - DNA, 100 bp, Homo sapiens
ctggagcatttgttgatctgttcaccactcatttgcaacttatatcgccagtccagcagctaaggatattttgtgcagtgtgtttcacataacagcagat

SEQ ID NO: 832743 - DNA, 100 bp, Homo sapiens
ccaatggacagcatgcctcaccaagtcacatgacaagcaatatgaattgagaattcgttatttgccaaaaggatttctaaaccagtttactgaagataag

SEQ ID NO: 832744 - DNA, 99 bp, Homo sapiens
gctgggtaggagtggtgaagctggaacagccagaattggacccgaaaccatgcctcactgtcctaggcaaggctaaaataaatgaagctgtagaatgct

SEQ ID NO: 832745 - DNA, 99 bp, Homo sapiens
caacatccagaacttccagctgcccccagctcttcttggatccctcgtggaaactacatagaatctaatcgtgatgactgcacggtgtctttgatctat

SEQ ID NO: 832746 - DNA, 109 bp, Homo sapiens
ccttgtgggatgtgaaaactctgttactgaaggctgagtcatcactagagagtgggaagggcagcagcagcagagaatccaaaccctaaagctgatatcacaaagtacc

SEQ ID NO: 832747 - DNA, 98 bp, Homo sapiens
acagaaacttcaggctttgcaaagagtccttcaaagtgaattctgcaatgctgtgagagagggcatgaacccaagctacgatgaatatgctgactctg

SEQ ID NO: 832748 - DNA, 100 bp, Homo sapiens
gctagaagaaaaggtgtacttgcaagaaacctcaggacttgagtaacagcaacatggctttggacgtggaccggatggttctttacaaaatgaagaaatc

SEQ ID NO: 832749 - DNA, 100 bp, Homo sapiens
tgcagcaggttctgttcttgcttgagtcttgcacaggctaagaatcttctctgtggcttttacggccgccatgcggagctgcgcttcttggacctggttc

SEQ ID NO: 832750 - DNA, 100 bp, Homo sapiens
gccccggcactgcctggctgcgagcacatgatggcgatacgggagctcaaagtgtgccttctcgggttggtgtggatgactacagctcagagtctgatgt

SEQ ID NO: 832751 - DNA, 101 bp, Homo sapiens
gctgagtgcgcatcaaatctgaagaaaatctacacagtacagacagtacagggcgtctctggccgagcctctttttgtggaaaacgacagcagcagcagtg

SEQ ID NO: 832752 - DNA, 100 bp, Homo sapiens
ctatggagcttcagtagcaaataaggacatcatctgctataacctacaagcagttggacaggatgaattagtgtccaagtccaaaaaacgctactatgtg

SEQ ID NO: 832753 - DNA, 100 bp, Homo sapiens
tggtgatggagattttgatgtggatgatgccaaagttttattaggaatttatcaaagagctgctttctcggataagaggcatgaggaaactgagccctcc

SEQ ID NO: 832754 - DNA, 98 bp, Homo sapiens
tgatccagaacttgcagcaacaatagcacatggattaattgatgtatgttgagtttatggagctgccttttggtggcttgctttatctgcagttttta

SEQ ID NO: 832755 - DNA, 98 bp, Homo sapiens
tttactctggggtcccggctgccctgtggcctcgctcctcggagggaatagccaggccagaagaaggaaggcctgtggtgagtgggacaggaaatgac

SEQ ID NO: 832756 - DNA, 98 bp, Homo sapiens
tttatagtagtttgtcttcttctcaacaaaatggatgttgtaaaggatctggtaaagctgtccgcaggcttgtccaaaaggaaacatcggaatgacca

SEQ ID NO: 832757 - DNA, 100 bp, Homo sapiens
cggtatggaggtgggctagaggccgacgccagccagagagcgtgaactttgaggcgctgatcatcaccatgtcggtagtcgggggaaccctcctcctggg

SEQ ID NO: 832758 - DNA, 102 bp, Homo sapiens
tacaagtgggtctgcgatggcagcgctgagtgccaggatggctctgatgagtcccaggagacgtgctatggggaacaggatggagcagctggaagtatggat

SEQ ID NO: 832759 - DNA, 100 bp, Homo sapiens
tgccggcacaggggctcttctgcgagaggaacaagaccaatttcttcaacgtgggaaactacctccgtatgttccgaggttctctgtacaagagataccc

SEQ ID NO: 832760 - DNA, 100 bp, Homo sapiens
ctaccacctcctccaccccgtggaaaacatccccgagatcatcctctactggaagcattccacggtgaatgaaaactttgccattgatttgatagcagag

SEQ ID NO: 832761 - DNA, 100 bp, Homo sapiens
agaatccctggggctggagccacaaaatgaaatgacatttcaacgagtttgtcatcatgtgagagagaatagaaatgagccgtcagactgctacagcatt

SEQ ID NO: 832762 - DNA, 100 bp, Homo sapiens
tccttcttcccacgctgctactgcctgggggctgaggatgacaaaaaagccttcataggctctctgtttcctcgagtcactcccagattagtggtgtcta

SEQ ID NO: 832763 - DNA, 100 bp, Homo sapiens
tggcttcagacagcatatttgagtcatttccttcgtacccacagtgcttcatgagagaaccgtaattcctgggcacacatggcagctcagaaatgttgcc

SEQ ID NO: 832764 - DNA, 100 bp, Homo sapiens
caaaatcaaacaaggcctgggcttgaaatttgctgagctggtgtataccgccacccaagatgctaaaacaaaataagaccaaggggaagaagatggctgg

SEQ ID NO: 832765 - DNA, 98 bp, Homo sapiens
gatggacaaggagaccaaagagaacaacctctctgaagaaggatgtggagctggccgagcacctcaacgccagcctggctttcttcctcagtgacctt

SEQ ID NO: 832766 - DNA, 99 bp, Homo sapiens
tctctttctggcctggaggctatccagcatacctttgtctggatatggaggaacaagcaatcttattttggaaggcgttaaaaaattatctgacagtta

SEQ ID NO: 832767 - DNA, 99 bp, Homo sapiens
accacttcaactcctcatattcccagaagggactgatctcacagataggtgatcttcagctttgcaaactggatgaactagattgcttgatcaaaggaa

SEQ ID NO: 832768 - DNA, 99 bp, Homo sapiens
gctgcgcctcggcccgctcttctccctgcttaacgagaaccatagactttgagaatcactacaagaaaaactccttgtggtgaaggttctaagacgtgg

SEQ ID NO: 832769 - DNA, 116 bp, Homo sapiens
ccgacgccacttcgtgttgggaagtgggagcgggagggccgggcaattcccgaccgaaccaaacggcactagatgaaccagccaagactgaaagtgtctccaaggacaacacatta

SEQ ID NO: 832770 - DNA, 100 bp, Homo sapiens
agttggacaaactttcagttcttaggctcagcgtcagttacctgagagccaagagcttctttgatggtgactctcctattccatctgtttcttcgggatc

SEQ ID NO: 832771 - DNA, 100 bp, Homo sapiens
cacgctagcttaaaaaaggaatttatggaccttactgcagaacgtcccaattcttcaggccaaggaggagatgttaaagtaacccatcttgcaggacgac

SEQ ID NO: 832772 - DNA, 100 bp, Homo sapiens
gcgtttaaagaactacctgttaatgcacaaaactatgttcgatttattgaagatgagcttcaaattccaggactgtacgggagccacttatatgtatggg

SEQ ID NO: 832773 - DNA, 57 bp, Homo sapiens
gtgtacctgactcctgactcagaacacggctcctaggtggaagagacttgccttgcc

SEQ ID NO: 832774 - DNA, 98 bp, Homo sapiens
ggagatcatccgcgtggttcatccccacaggccctgcaagcttgccttcctggatgctctgcagaaccaggctgaggccagcagcaagatcatcggcc

SEQ ID NO: 832775 - DNA, 99 bp, Homo sapiens
tttcacctgctattgtttcccccacccaggtcatgtttactggtgaaaatattcctgttcatcctcatgtttatagcaatggtcatatctgtttatcca

SEQ ID NO: 832776 - DNA, 100 bp, Homo sapiens
gtggtttttcctaatggaaaatcacatacctttccagagacaacaaccggatcccagtcatcgggcccctgaagatccgggagcagcagcggtcagctgt

SEQ ID NO: 832777 - DNA, 100 bp, Homo sapiens
gtggtgtggtgtatggccgtgggcatctcctacattagcgtctacgaccaccaagcttcggcagttatcccgtgtgaaccatcctaatattgtaaagctt

SEQ ID NO: 832778 - DNA, 100 bp, Homo sapiens
agccccgacgaacatttctgggtgacactcaacaggattcccggaatatattaaaggaatctgtgaacctgaactagaagaaagagaatgttaccccaag

SEQ ID NO: 832779 - DNA, 99 bp, Homo sapiens
ccagcccgcctctgtgccactttgcatcccacgccggaggaggcattaacgagaccgggtaagtataaaagaacgtgtggatcactttgctgagtacat

SEQ ID NO: 832780 - DNA, 99 bp, Homo sapiens
ccagtcatgtatcaaagactgtttgttcaacatatctacaatctcggtactacagaagactgtgcagtctttgtaactgatgaagagcaaggctttgtc

SEQ ID NO: 832781 - DNA, 100 bp, Homo sapiens
ggtttgcgtcctgcactgaaaggaaatgacggattttgtcactgctgaaactcaagagaaagaagacgttatcacacatttgcaagagaaggttgcatcc

SEQ ID NO: 832782 - DNA, 100 bp, Homo sapiens
cgtatcgccagcacgatcccaccgcacgttcagaagtcgggaaagatatggagagagatttgaaggctgactcaaacatgccactcaacaattctagcca

SEQ ID NO: 832783 - DNA, 128 bp, Homo sapiens
gaatgttctgtagctaatcatcttggttcagatgtggaaagttcttctgtgctgtatgcaggttcagaaacagcatatttagaaaacagatctaattctagacctttagaaagcaaaagatacggatc

SEQ ID NO: 832784 - DNA, 123 bp, Homo sapiens
caagtgcctcagcacagcaaatcaggagctgcagcagctcttctaccagtggaaggcaccatgaggatcatgctgctattcacagccatcctggccttcagcctagctcagagctttggggct

SEQ ID NO: 832785 - DNA, 112 bp, Homo sapiens
tcccccagccgcgggcccccgacgcgctgcagccggcagcccaccgccgccttcttggcgcgaccccaacccagccccaaagctgaaacctatcaacactcttcaaaatgca

SEQ ID NO: 832786 - DNA, 100 bp, Homo sapiens
ccgacgtccgggtgcacgtgccacgcacggctgaccccgcactacatctacccaccagccatcgtgcagcccagcgtggtgatcccagccgcccctgtcc

SEQ ID NO: 832787 - DNA, 100 bp, Homo sapiens
gaacagttgaggcaagaagcagaacaactgcggaatcagattcaggagttaaagttcctcgtaattttcgcttgttggaagaacttgaagaaggacaaaa

SEQ ID NO: 832788 - DNA, 99 bp, Homo sapiens
gctgccacgctcatctgccgcgggctggactacttcagcagcctgtgggctgaccggttccctgatgtgttacctgcttctgctactgatccaaactgc

SEQ ID NO: 832789 - DNA, 98 bp, Homo sapiens
ggaggagactctccctggaaaacttcccttccctttcgaaacatctgccaaagaaggtctgctgctttggtgtcagaggaaaactgctccttatagaa

SEQ ID NO: 832790 - DNA, 98 bp, Homo sapiens
aatgacctccccaactcgttgtttgcgtgcaatgttcaccagtcagtgtttgaaggagaagagagcaagaccttcactgcctggtgtaactcccacct

SEQ ID NO: 832791 - DNA, 98 bp, Homo sapiens
ttggctgaggctcagcaggagctacagatgctgcagaagcagttgggagaaagagatacaactcgtcaacgaatcaaattcagtgatgacagagtatg

SEQ ID NO: 832792 - DNA, 100 bp, Homo sapiens
gccgcgggcgcaccctcaacctcaaggcggccacctggaagaccgccagtggcacgtccctcactttgagaagatgctctatgaccaggcacagctcgct

SEQ ID NO: 832793 - DNA, 98 bp, Homo sapiens
caatggggctgccatcttctttcctaatcgacagacccgacggaaccatctcttcaccatgatgatgtgaatttcttcggagtaagaaatcctcagag

SEQ ID NO: 832794 - DNA, 98 bp, Homo sapiens
tgctggccaagaagatcatcattaaggacggaggcacggcactacctggcagcaccatctaaacctgtatcatctgctgtggtcccagttactcagga

SEQ ID NO: 832795 - DNA, 100 bp, Homo sapiens
gggaagctgcccccggattagacagcaggatgacaagcaccctcagctggctttggagggagcctgcacccaggagcccgtgctgggggcaccagcagcc

SEQ ID NO: 832796 - DNA, 98 bp, Homo sapiens
ctatgatataccaaagacagaagaagcatcttcaggttttcttcctggtgacaggcgctttgacttccgtccaaaacctgatccttattgtcaagcta

SEQ ID NO: 832797 - DNA, 98 bp, Homo sapiens
acaaagttggaagcaataccaaacagtggcatggaccacacccagcggaagatggatagaatgacagaagatgctcttcgcttgaatctgttgaagcg

SEQ ID NO: 832798 - DNA, 100 bp, Homo sapiens
ctttggccagcaccgtcactctcactgccattgccgagagtcctgttattgagattcttgtagacactgtttgggctctgtcatacttgacagatggagg

SEQ ID NO: 832799 - DNA, 98 bp, Homo sapiens
tgctgtcgcgagaagtggcggcatcgagaccatcgccaatgagtacagcgacaggtgtaccccgctgcctgctgtttcccggggagatcatgaaacga

SEQ ID NO: 832800 - DNA, 116 bp, Homo sapiens
tgtggtgtttctcctagctgtgaactgtgtcctaatcaggatggaattttcaaggagacagatgctggaagagtaaagccaatcccagctgaaggaatcaagtcaaatccttccaa

SEQ ID NO: 832801 - DNA, 100 bp, Homo sapiens
tgaggttgcacaaagcaatagaggacgaggaagatctcgacccagaggagaatccatatgctacactgaccatgactttggcacagaccaacttctgcaa

SEQ ID NO: 832802 - DNA, 100 bp, Homo sapiens
gcagtacctggatctcatcaaaaaggacaccagcaagctgttcaatgaggagtttaagtgctgtggggctgctaactacacagattgggagaaaatccct

SEQ ID NO: 832803 - DNA, 100 bp, Homo sapiens
aagaagaggaaagacttgtctcaggtgagacacagtaacctggttgaactctgcatctggaaagctgaagactgaagaaagataagagacattgactagt

SEQ ID NO: 832804 - DNA, 100 bp, Homo sapiens
tgaaggagtgtggactttttgaatttcaagaacagtaaagttggaacacagcagagggtgtgtaataaaatacagcttgtgatgaatggaaaatactacc

SEQ ID NO: 832805 - DNA, 99 bp, Homo sapiens
taagattcctttactacagcagccaaaacgagaagaagaagaagtgttagaccagggccttcacctaccaccatatccaggagatcatggtccagctgc

SEQ ID NO: 832806 - DNA, 98 bp, Homo sapiens
ctgggtcctacgccaacagatatgggaggacacatttgccagcaaagtggcagccacccaggaccagtatgcagacgcctccataggtaacgtcacgg

SEQ ID NO: 832807 - DNA, 100 bp, Homo sapiens
tcggcggtgagatcgtcagcgctgactccatgcagggacaacaccttccatccacatatgggacgccatgaccaaacacaccctctccatgctgcggtgc

SEQ ID NO: 832808 - DNA, 100 bp, Homo sapiens
ggccggggtgctcagccaggccgactacctcaacctggtgcagtgcgagacgctagagggaaatatatcctggacaattccagccatctctctgtcacaa

SEQ ID NO: 832809 - DNA, 100 bp, Homo sapiens
tggagagtcaacgggaccctggccgtctccagagccatcgcccatcgccgaagcaccattcaagttcgacatggaattggatgacttgcctaaggaaaag

SEQ ID NO: 832810 - DNA, 127 bp, Homo sapiens
aaacctgggctttaaaatcacctcctctgggacgccttcctctacttctcacagttcaggagctcttgtccctggcaaagcgaaagcgcagtgactctgaggagaaggagccgcctgtgagtcagcc

SEQ ID NO: 832811 - DNA, 98 bp, Homo sapiens
cattttgcatctgaaaccatacggtctcttgaagcggtctccgaatgtggagctctccttcccacagcgatcagaaggctcaaatgtctttagtggta

SEQ ID NO: 832812 - DNA, 98 bp, Homo sapiens
aagaccctcctgccaaaaggaaatgcatctttatgtcagaaacacaaagcagcccaaccaaaggattcacttgtcatggattagtgactggtcagagt

SEQ ID NO: 832813 - DNA, 100 bp, Homo sapiens
ggggttgatggtgctgaaaaaaaggaagactacaatgaaacagctccaatgctggagcagagtgcccttatgcctgcacagttgttttttaagacggaag

SEQ ID NO: 832814 - DNA, 100 bp, Homo sapiens
gagcgggccctggctcaggaacagggacagcacctcatcccctggatgggggaccacaagatcctcatcgacagtagcctgtttcctggaagtctttagc

SEQ ID NO: 832815 - DNA, 100 bp, Homo sapiens
aaagatctggaggacacagaataccaggcttgaattgctgtggtcagggaagagcctgctacagatggtcaaaaagatcctgctcacactaaaatatgaa

SEQ ID NO: 832816 - DNA, 100 bp, Homo sapiens
gatgacatatttttggacctgaaacagaaattctggaacacctatatgagctcagtgcctctgatgacagctccctgtcagatgggctcctcctggagga

SEQ ID NO: 832817 - DNA, 100 bp, Homo sapiens
tgctcacacttcagaatagagaagccgtgctggtatagaggactctaagaagtggggcatgctgtttctggtgaaccagctgtttaaaatctacttcaag

SEQ ID NO: 832818 - DNA, 98 bp, Homo sapiens
acaagacgcggctgccgtacgtggccctcgatgtgctctgcgtgttgctggatatccttggaacagaagatcttattgtggaagtgacttccaatgat

SEQ ID NO: 832819 - DNA, 99 bp, Homo sapiens
gcccggccgccgaggagcgggaggaggacgggaccccggcgcccccaccccatccccgggagttcttcaggagagaataccatgggtaccacctgaatg

SEQ ID NO: 832820 - DNA, 99 bp, Homo sapiens
gcaaaagactgggtgttgactgcagctcactgtaactttgagggccccaaggctgttgcagctcctcgacctgatcggttggtcaatcgcttgaagaat

SEQ ID NO: 832821 - DNA, 99 bp, Homo sapiens
tggaaaaaacctgagaacttcctgatctctctcgctgtgagacatgtctgagactcctgctcagtgtagcattaaggtgaatgccaaagatgacgaagg

SEQ ID NO: 832822 - DNA, 99 bp, Homo sapiens
tattcttctgcaggtggatcagaactgtgttcgcaattcttacgatgtcttctctttgctacggagccgggtgtgggctgagccctgcctgattgatgc

SEQ ID NO: 832823 - DNA, 100 bp, Homo sapiens
gccccgcagccgagccagcaagatccgagtgcactcgcgaggcaacctctgggccaccgcaaatcagccggcaccaggagcagttcatccagatgctgaa

SEQ ID NO: 832824 - DNA, 98 bp, Homo sapiens
gacagcttaatacaattactttgccagacttcagcgatcccgagacaggcatgaaaccagatttaaacaacgtatgctggaactgacggatacaaaca

SEQ ID NO: 832825 - DNA, 100 bp, Homo sapiens
gtgtaaacatgacttccaagctggccgtggctctcttggcagccttcctgatttctgcagctctgtgtgaaggtataaaacaccctgttacacatgtctc

SEQ ID NO: 832826 - DNA, 100 bp, Homo sapiens
cgcggaaagaagtaccttcgccggtcaccggctcctgcaggtcgtcctcttgagttctggcgccttgactactgggaagatgacttgcggcgccggcgac

SEQ ID NO: 832827 - DNA, 98 bp, Homo sapiens
ggtgtggcggagcgcgcggtgcatggaagagctaaggagcaaatccaagatctgtgccaatgtgttttgtggagccggccgggaatgtgcagtcacag

SEQ ID NO: 832828 - DNA, 100 bp, Homo sapiens
tgatgtcacatctaggagcatctacccatggacagacatgtcttcccatggagggtggtgattccactgaagcaactgccaaaccaaagagaagttttta

SEQ ID NO: 832829 - DNA, 99 bp, Homo sapiens
gactgtttacgggagatgctgctcttcccttacgatgactttcaggatttgaatttgttgaaatgagcagtcgtaaatcaaagagtaacagcttaattc

SEQ ID NO: 832830 - DNA, 99 bp, Homo sapiens
aggcgaacgcttcgctggccatttaggagctctgctcaaagccagacgtgttctaagaacggaagcatctgggctggatggaatttagcatcaagcaga

SEQ ID NO: 832831 - DNA, 98 bp, Homo sapiens
tgcagccgcgggaggtccggacactggcggccatggaactcaccgctaccaagtcaggattgttacccccaccacctgcgctccctccaagaccttgt

SEQ ID NO: 832832 - DNA, 98 bp, Homo sapiens
gccacctttaacgtggaccataagtccagcaaggaattccgcctaaaattgaagctcttccatctgatatcagcattgatgaaggcaaagttctaaca

SEQ ID NO: 832833 - DNA, 100 bp, Homo sapiens
agtcctgccagctgtccggcgctgggatcaggatcctcatgaccagccaaagagaagaagaattaggaagcataaatcaaagaaaaaatttaaaaatccc

SEQ ID NO: 832834 - DNA, 100 bp, Homo sapiens
acgtcggccttcgcgagcgtctgggcgggtggtagaatgattacggacctgaagccaaagaacaagatgcgctagtggacagattgctgaccaggggctt

SEQ ID NO: 832835 - DNA, 100 bp, Homo sapiens
aagaacggagactacttgtgtgtgaaagtagataggactccgaaaggcacccagccagaagatcagctgccatgttacttgactcacaccaaccctagag

SEQ ID NO: 832836 - DNA, 98 bp, Homo sapiens
cagaggctaagaatattaatggccagatctagttccgatgaagttaaattccgtcaagatttaatgaatattgcgggcacaacattatcctcaaaact

SEQ ID NO: 832837 - DNA, 100 bp, Homo sapiens
ctggcagacccgtagctaagacgccaggatttcctggaagcagagaaatgaatctccgccacctccctactctcggctgtctcctcgcgacgagtacaag

SEQ ID NO: 832838 - DNA, 100 bp, Homo sapiens
ctgtttaatttcttatatagagacctattcactgcaatgattattggtgcccaaatgtgagtctgcaaaagctgccagaacagtggctatggagtgtttt

SEQ ID NO: 832839 - DNA, 100 bp, Homo sapiens
ggctcgcaactcggcagcctccacccaccggcccaccctacatttagcgcatcatgtgatccggggaagtgtgaaatcggctgggcctactactgcacgg

SEQ ID NO: 832840 - DNA, 100 bp, Homo sapiens
gaccccgaagccagagccagagccagagcaggtcataaaaaactacacggaagagctgaaagtgcccccagatgagtacagaacctgctaaggccatcaa

SEQ ID NO: 832841 - DNA, 100 bp, Homo sapiens
gccgccgatgtcaagtacatcttcttgatgacaggaagctggaactcctagtacaggcaaggggagagccagttgcgcagagccctgcaaccagcagtcc

SEQ ID NO: 832842 - DNA, 100 bp, Homo sapiens
tgatggctcagaccaacaagttcaactatagtttacaggtacatacattacacccctatttctacaaagcttggctattagagcattatgaacattaatg

SEQ ID NO: 832843 - DNA, 99 bp, Homo sapiens
cgtacgcggtgctgcgagggcagaacctggccctgttcgtcttctgtaccaagagccgacgtgctgagcgttactggcagaagacgctgctgcagatgg

SEQ ID NO: 832844 - DNA, 100 bp, Homo sapiens
gcaaggaggtggtgctggaggatgagatcaactggcctgagaaggatgaggcacccccacctgatgcccaggatctgattaccttactcctcaggcagaa

SEQ ID NO: 832845 - DNA, 100 bp, Homo sapiens
atctggacctcttcaccaactacatctcactctacaacacgtgtatgaagggtggctgtgctggctctggctgtggcaaatgtgactgccatggagtgaa

SEQ ID NO: 832846 - DNA, 99 bp, Homo sapiens
cgtggaggagcaactgcagaggcattacgctggccacaacgatgacgtgaagtgataacaacgaacttgatgcaagtgataggtttgccaaggtcagac

SEQ ID NO: 832847 - DNA, 100 bp, Homo sapiens
cagtaattcacggcggagtcctttggtcccaggcatcatcacagttattgacaccgaaaccgttggagagggccaggtgaccaagaatatggcccaggtg

SEQ ID NO: 832848 - DNA, 98 bp, Homo sapiens
cttgggagtactcattcctgtaatagctgtggttctgatctacaatggccaactggacatcatcgtggcagctgccctgacagagcgctccttgatgg

SEQ ID NO: 832849 - DNA, 100 bp, Homo sapiens
agccccatttctgctctttcggctagcagccgtgtggctagaactacctctgatcatctttgaacattcctgcctcagaccactacgtggggccaaatgg

SEQ ID NO: 832850 - DNA, 100 bp, Homo sapiens
tgagctgggaaaactgtttcagttgcagactttaggcctgaaaggaggcgattatgcagccccttgatcataagaatctggatatggatgtgccatactt

SEQ ID NO: 832851 - DNA, 100 bp, Homo sapiens
agaagcagctgaagccgtggtgctgagatcttcaatgcagaagtgcttttccgagaagactgctccccggacgagttcatcgatgtgatcgtgggcaacc

SEQ ID NO: 832852 - DNA, 100 bp, Homo sapiens
aatgaggaagatcttcaaatgggcattcacaaggggcaagattcttgccaagagaattaatgtgcgtattgagcacattaagcactctaagagccgagat

SEQ ID NO: 832853 - DNA, 132 bp, Homo sapiens
gtgatcacatccccaccccacaggatctgccccagagaaagtcctcgctcgtcaccagcaagcttgcgggacccccagaggaagattagtcataattcgagtccaaggaagacggctaattctagcgatcaa

SEQ ID NO: 832854 - DNA, 100 bp, Homo sapiens
caaacagaaatttgtgctcaaaacccccaaggtgtgtaaagttgtgaacacaaccaccctcacctgcctggcaccctctctgaccacggactaccgccct

SEQ ID NO: 832855 - DNA, 98 bp, Homo sapiens
tccattgccttacctgtgcaataatgcttcttaataccgatctacatggccactggccaatccgccatggtatagttgaagattgggacttaatggaa

SEQ ID NO: 832856 - DNA, 98 bp, Homo sapiens
cgaagcatgaagaaggggtaaggcgtgagcccccaagatttcacgtggactaaagaggatggacatagaacttccacctctgctgtccctaacctgtt

SEQ ID NO: 832857 - DNA, 100 bp, Homo sapiens
cgaaggaagaggaatgggatccagaatataccccaaagagcaagaagtacttcttgtgcctacaccaactaatgttacaattgaatcctataacatgaac

SEQ ID NO: 832858 - DNA, 98 bp, Homo sapiens
acttcatccagcccttatacaaagacctttcgggtcctatctgactcctgtacgggatgaggaagcagagtctttacggaaagcacgctccagacaag

SEQ ID NO: 832859 - DNA, 100 bp, Homo sapiens
gaactcggcgccgccaaacagcccagctcgcgcttcagcgtcccggcgccgtcgcgccactcctccgattccagctcaaccaagataaaatgaatttttc

SEQ ID NO: 832860 - DNA, 98 bp, Homo sapiens
ctcgacttctcaatcccaagtggccaaaggttaatccctatatcctgaagaagaacatgatcctcatgacaaatcatttctatgcagcgatcttggga

SEQ ID NO: 832861 - DNA, 98 bp, Homo sapiens
aagtttgatgagattttttcagcaacaagccaggtgattggtgaaaacactaaacaaccctgagcccagggccaacccctacggaacaccactacttt

SEQ ID NO: 832862 - DNA, 98 bp, Homo sapiens
tcttctgcttcaggcctgccaaaagaaaagattgtgacagatcactggacccagcacctaggtaaaataccatgaagattttgaaaaaacaaagggga

SEQ ID NO: 832863 - DNA, 100 bp, Homo sapiens
cgggcccgcgtgctgagtggaaagttccgcatcccattttttatgtccacaggaaacttggatttaactggccagaagcaggtattcaaagcagagaaca

SEQ ID NO: 832864 - DNA, 98 bp, Homo sapiens
tatatcaagccaaactttgtgattcaggagaactggtcgccatcaagaaagtattgcaggacaagagatttaagaaatgctgagccgattatcaggat

SEQ ID NO: 832865 - DNA, 100 bp, Homo sapiens
tgtacagcaatctcctcctccactgccactacagggaagtgcatcacatgtcagttaattggcatgctgctggcctgctgtctgtcccggttcatcacgg

SEQ ID NO: 832866 - DNA, 100 bp, Homo sapiens
tggtggtcattaagcggagatccgatttaaagatcatccaacgctaaatgacagatatttgttgttacatcttttgggtagaggaggtttcagtgaagtt

SEQ ID NO: 832867 - DNA, 100 bp, Homo sapiens
tgctctcatgaacatgcaatgagaagactgatcaatctgtaacaaatgtggcaattattttggatctatcacctgtcatcataactggcttctgcttgtc

SEQ ID NO: 832868 - DNA, 98 bp, Homo sapiens
gcatcttcatccactggggagtgttttccgtgcccagcttcggtagcgagtggttctgtcgtgccaagcggacctcgtgaaggacaacggccacaagt

SEQ ID NO: 832869 - DNA, 100 bp, Homo sapiens
agaaactttagaatggaggctcggttcttctgacattcttaattacagtggcagaatgagaaatttagaaaagaacatgtttacaaaagaagctttagct

SEQ ID NO: 832870 - DNA, 98 bp, Homo sapiens
ctgtgagatgtttcatcccaacaacgagctgtacgctcagaaactgaagtacaaagccatcagcgaggagctggaccacgctctcaacgatatgactt

SEQ ID NO: 832871 - DNA, 98 bp, Homo sapiens
aactgctctccatggagagagtaactctgtccttattatcggaccccgaggatcaggaaaaactatgaggtaaataccggattgtatacgtaactcca

SEQ ID NO: 832872 - DNA, 100 bp, Homo sapiens
caccacccctggggacgggcctcccagcacacctcagctggtctggactcaggaagacaaaaccaaggtgtatgttggtaacctgggaactggcgctggc

SEQ ID NO: 832873 - DNA, 99 bp, Homo sapiens
gattaagcacagcagaaattaatgccgtggaagcaattcatagagctgtggaatttaatcctcatgttccaaaactcttgaagtcctattggctggata

SEQ ID NO: 832874 - DNA, 100 bp, Homo sapiens
gtcttctggcttcagtctggaagatccccagacacatgctaacaggatctacaggatgatcaaacttggtctgggtggaatgaatcttacttgttgaata

SEQ ID NO: 832875 - DNA, 100 bp, Homo sapiens
tccatggatctcctccgagctgtcctgcagcccagcatcaacgaggagatccagactgtcttcaacaagtacatgaagatgtctggcgataaagggattt

SEQ ID NO: 832876 - DNA, 98 bp, Homo sapiens
attttggaagaggaaccacaagaaaatcaaaagaaacttttgcccttatcagtaacacctgagctactacccacagatggcatgatccgaaaacactc

SEQ ID NO: 832877 - DNA, 98 bp, Homo sapiens
agaaaagcattgatgacttagaaggaagggaatttgaaggagaagaagaatatctggagatccttggcatcaccagggagcagtcaggcaaatatgag

SEQ ID NO: 832878 - DNA, 98 bp, Homo sapiens
ggtgagttcaactctgggaatcaaccaagcaacagagaaaaaaacagataccgagatattcttccatgtatctctcctctttgtcacaacctctttgc

SEQ ID NO: 832879 - DNA, 98 bp, Homo sapiens
cgactgctgtgcacatccaacctgctcaagaacaggtgcggactcgagacatgggcggctacagcaccacaaccgacttcatcaagtctgtcatcggt

SEQ ID NO: 832880 - DNA, 99 bp, Homo sapiens
tatgctgggagcggtgaagatggaagggcacgagccgtccgactggagcagctactatgcagagcccgagaaatcatgaccaccccaggaaaagagaac

SEQ ID NO: 832881 - DNA, 98 bp, Homo sapiens
actgaatgggcagctgatggttggagttgatgtcagtggggccaggtccattaatataagatttgccactctcttggatactcctggtgtggaaaatc

SEQ ID NO: 832882 - DNA, 100 bp, Homo sapiens
ggctagcaactactacaaaggagaaaacttcaggaggcagtacgacgagttctacctggcggagattgattataccggaacagagccttccagtccctgt

SEQ ID NO: 832883 - DNA, 98 bp, Homo sapiens
ggagtgtgatgcagaagtaccttgcagagagaaatgaaataacctttgacaagattttcaatcagaaaattgaatcgcctaccatttggtgcaagcaa

SEQ ID NO: 832884 - DNA, 100 bp, Homo sapiens
gaacagctgcttcagtctgcaagtatggagctcaagttcttaattattcagaatgctgcggttttccaagaagctgccagtaactcagattctagccatg

SEQ ID NO: 832885 - DNA, 99 bp, Homo sapiens
ttggccgaagtgcccgctgccgggcgcgggcctcagttggtacgccttattacatgtctccagagagaatacatgaaaatggatacaacttcaaatctg

SEQ ID NO: 832886 - DNA, 100 bp, Homo sapiens
caagccaaactccaggacattcacttacgccaccgccatcactttcatcacatggatcctcatccagtttgcatttagggagatgcagttaaagacttga

SEQ ID NO: 832887 - DNA, 100 bp, Homo sapiens
acctgtctcccagagttatcctcttcgtgaatatattaacttcaaaattcagccactgagatatcaccttccaggaacaacttgatacagagacaagtac

SEQ ID NO: 832888 - DNA, 100 bp, Homo sapiens
cggctccaaggagtactggtttgtgctgactgccgagtcactgtcctggtacaaggatgaggagggctatgagggcctcgtggagggaggtgagaacatc

SEQ ID NO: 832889 - DNA, 100 bp, Homo sapiens
aacactgagaacaaagaacggaagtccttccagaaggagcttgtgatggcaatcaggatgagtgaaaaattgatttgcagctgacctgcaaatggaatca

SEQ ID NO: 832890 - DNA, 100 bp, Homo sapiens
taactttagagttggaaaaaaaattggatgtggcaattttggagaattacgattagattgtatgcaggcccagaggtagatatatggagcagtggggtta

SEQ ID NO: 832891 - DNA, 100 bp, Homo sapiens
agtgtgaccgatgtcatatgctaggccactatacagataaacatttgcagagccatccctgcaggctactcagatgaagttgaaaagagctcgactagca

SEQ ID NO: 832892 - DNA, 100 bp, Homo sapiens
aaactgaaggagaagaagctggctcccatcacctacccgcagggcctggcactggccaaggagattggcgtccgacctccgatcatgaacgggcccctgc

SEQ ID NO: 832893 - DNA, 99 bp, Homo sapiens
aaacagaggaggaggaagtttctacagtaaataaaagagtagttgaacagctacggaagaacctgatagtaaagcaagaacaaccggacaagttccaaa

SEQ ID NO: 832894 - DNA, 100 bp, Homo sapiens
taaaccttgtgaagcgatgtgaacgtcaggttggtcaaagaaaaagtgatgtatgaaaaagaggcaaaacaacaagaagaaaagattgaaaaaatgagag

SEQ ID NO: 832895 - DNA, 98 bp, Homo sapiens
tactccaagatacaccccttagaaaatggagagattggggtggagcatgtggtggtgtatgtgaacaaggctgacgctgtccaggactctgagatggt

SEQ ID NO: 832896 - DNA, 98 bp, Homo sapiens
ttgtaccggcagctccttaccttcctggactgattcaggagaagctaaaacttacttatgaggaaaagtgtgaaattgaggaatcccaattgaagttt

SEQ ID NO: 832897 - DNA, 100 bp, Homo sapiens
ccactgagaagagaagaaatgcaccttgaggactctgccaactttattaaatatgagtcccatgaagctgaggtcttgaagcagctggctgagaaacgag

SEQ ID NO: 832898 - DNA, 100 bp, Homo sapiens
ctctccccgagttcttcaacggcaagaacaagtccaagactccagagatggagcagaaccatgtgtacctgggtgacaagaatgccctgaacctcacttt

SEQ ID NO: 832899 - DNA, 99 bp, Homo sapiens
tgtgtcggaactggctgaatcagactccgactgcgtccctgcagaggctggccaggcctagacagatttggaggccaatcactgccaccttttatttcc

SEQ ID NO: 832900 - DNA, 100 bp, Homo sapiens
tttcttggcccttgttcccccaaatgtctgactctgactctcggactgagaaacgcaagtgacaaagcataaatcatggacaccagagaataaggtggac

SEQ ID NO: 832901 - DNA, 107 bp, Homo sapiens
acaatgctaccctgctttttctggtgtcctgaacctggaagttgtgctttttaagctctgggtgaaccaggaggatgaggtggaggaggggcccagcgatgtgcaga

SEQ ID NO: 832902 - DNA, 100 bp, Homo sapiens
ccccgtgccccgaagacataaatccctgagtgcccgggaggagccttaacaagcgcacggagccctcaagatttctcacattggcaaactgagagatttt

SEQ ID NO: 832903 - DNA, 100 bp, Homo sapiens
cagaaaggaacatactctcaaaatatttacttatatcaattcctggacacagagatccatatcatagattttgacgatgaaaacaacattataaataaaa

SEQ ID NO: 832904 - DNA, 98 bp, Homo sapiens
caccccgggttcttttatgtgcatctgcaaaactggatacatcagaattgatgattattcatgtacagtgatcgaactgtgagaatttggaaggctcg

SEQ ID NO: 832905 - DNA, 100 bp, Homo sapiens
aagctccaggaccttctacgtacaggtcacagtgtccatgtaactaactcctggttaagaggatatggatagaaggcacatgttcaacttctggcttctg

SEQ ID NO: 832906 - DNA, 100 bp, Homo sapiens
aggcaacagaacttcatgtcctggatgtggcagggaacagagactctacaggggcaggtaattcactggtccacaagcggtctcctttacgtcgaaacca

SEQ ID NO: 832907 - DNA, 100 bp, Homo sapiens
gtttggcgactcctttgtctttgaaggcatgttgagtgagcaagtgaagaccaatattcaacaggcacaaatgaagctcgtgaccgagaacctgaaggag

SEQ ID NO: 832908 - DNA, 100 bp, Homo sapiens
gcatggtcgcccatgattttactgtcaaaattggaggcatcctcaaatccatcatgaagaagagagacggcacacctggtgcccaacccagctccggacc

SEQ ID NO: 832909 - DNA, 100 bp, Homo sapiens
cgaagagcgggacccgagccctgatgctgagctcaggagtagcagccaaggttcccaaaaaatagtcgaggagttgcaggaacctgtctctccagatacc

SEQ ID NO: 832910 - DNA, 100 bp, Homo sapiens
gtctacaaaggactcttctaaaaggatatgtgttgctaatacccatctttactggcatcctaaagcaaaacttagagagtaacctcaccaaccttattaa

SEQ ID NO: 832911 - DNA, 100 bp, Homo sapiens
ttcctatggaatgaggaggacgaaatggacatgacttggtatatgtctcgagtccacggtatgcaccctaaagagaccacccgtcagctgagcttagctg

SEQ ID NO: 832912 - DNA, 99 bp, Homo sapiens
cggcggtggcgcggcggagacccggctggggtcgtgtagggataaaaagaactgtaaggtggtcttttcccagcaggaactgaggaagcggctaacacc

SEQ ID NO: 832913 - DNA, 100 bp, Homo sapiens
cccggactcgtggagttgtgaacgccgcggactccggagccgcacaaaccagggctcgccatgaagccaggccctcgggaccaaggatcacgtcatgact

SEQ ID NO: 832914 - DNA, 100 bp, Homo sapiens
ggaagatgggaaagttattgaacggctgggccagagcgtggttgctgaccagttgaaagcaatggctgccatccggaagaaactggtgattgttggtgat

SEQ ID NO: 832915 - DNA, 100 bp, Homo sapiens
tcttcatgatgaaatttctgtaaatgaaacctgctcgatatagaagagccgtaagttatgacagtaaagagtactacatgcgactggcctctggcaatcc

SEQ ID NO: 832916 - DNA, 100 bp, Homo sapiens
ttgacacagaagagtactgcatggccgtgtgtggcagcgccagtccatccaagctgaatgatcgcgctgactcaagaagaagcctttgggaccaaggaaa

SEQ ID NO: 832917 - DNA, 98 bp, Homo sapiens
catgttcagcttcactgggttgaaccgaccaccgcacagtctcaagtgtagtgaagtcaggaaagactcactggttctccagtggaagccgccagtcc

SEQ ID NO: 832918 - DNA, 99 bp, Homo sapiens
tgcgatctcggctcaccgcattctccacctcccaggcaatgaagggctattggcctgtcagctgctcccatccatcccctgcttactgcattgccgagt

SEQ ID NO: 832919 - DNA, 100 bp, Homo sapiens
ataaaatcacatgctaaagcattaggctgtcatgctgtagtgggctacagtgaatcaactagcatctggcatcattcttaacaaagaagttaaatattgg

SEQ ID NO: 832920 - DNA, 100 bp, Homo sapiens
ctactttggtggaccaaaaatcgtgacaccagaagaatattataatgtcacagttcagataggatttttgggccttggtctcatgggaagtggaatcgtc

SEQ ID NO: 832921 - DNA, 100 bp, Homo sapiens
ggacaacagtagtagcagcagctgccttcttggacgcctttcagaaagtggctgacatggccaccaacacacgtggtgctggtgaatctggtaaaagtac

SEQ ID NO: 832922 - DNA, 98 bp, Homo sapiens
gcctttgttcaccgccaaccccttcgagcaagacgtggacttacagattccagtctgctgttagatgattattcatccaagttgagccccaaaccaaa

SEQ ID NO: 832923 - DNA, 98 bp, Homo sapiens
gtactctgtaacacccagctaccagtatttcactggccttgaatgtggacataagttttgtatgcagtgctggagtgaatatttaactaccaaaataa

SEQ ID NO: 832924 - DNA, 100 bp, Homo sapiens
ccatcccagacgaagacagtccctggatcaccgacagcacagacagaatccctgctaccaacattgaagagtggaagtgttcaggaacagtggctcacag

SEQ ID NO: 832925 - DNA, 100 bp, Homo sapiens
ttgtttttgttttgctgctggctgtgaaacttgtgctaggaagagacctgggaaattaagtttcttgcggaggaattggattcaagtacgtggctctggg

SEQ ID NO: 832926 - DNA, 99 bp, Homo sapiens
tttgatggtggaagtggtgaaacccaaacaacatctcctgctattccttgggctgcctttcctgcagatgacacccccaaccatggttgtgaagatgct

SEQ ID NO: 832927 - DNA, 98 bp, Homo sapiens
cggcagacggcgacagtggcggcggcgccatggcagggcttgcaggtgaagatggtggcacgtggtttcttgatctgaaaagcaagggtgggaatgtc

SEQ ID NO: 832928 - DNA, 98 bp, Homo sapiens
ttgagcagagggaaagggataggagaaggatgtggactgcagtgctgcagtgccaggtcccctgcctgtgcccttcaccaatggggagatacagaagg

SEQ ID NO: 832929 - DNA, 100 bp, Homo sapiens
ctgggattcgcgctgctgggcacccacggagcctccggggctggagactccatcctctgccaatggcccttcccgggagggctctaggctgccgcctgct

SEQ ID NO: 832930 - DNA, 100 bp, Homo sapiens
ttttattcccaacagacttgtctttggacaaaattgagaagaactcataaacttggcttcctcgcttctgctcctcagctccggagatcttccactcttt

SEQ ID NO: 832931 - DNA, 100 bp, Homo sapiens
gtccgcggagatctctctcatctcgctcggctgcgggaaatcgggctgaagcgactgagtccgcgatggagactgatgaagtatttctggaagcccagat

SEQ ID NO: 832932 - DNA, 99 bp, Homo sapiens
aaaccccaatctcagtggacaagggaggtggggaagacagggctccagctaccacaggacgggctctgggtatagccgttccagtcagggacagccgtg

SEQ ID NO: 832933 - DNA, 100 bp, Homo sapiens
agggaggtggagaggaagcagaagggctctgaagatgatgtctttctacctaaagatattgacctagacagtgtggatatggatgagacagagagggaag

SEQ ID NO: 832934 - DNA, 109 bp, Homo sapiens
gccagtccagttaacatcaaggagagaaatcaggaagattatgggaggactttccgtgacatttctgaagatctgaaatcttcagtaggttgatgtggtttcctctgca

SEQ ID NO: 832935 - DNA, 100 bp, Homo sapiens
cgcacagctactactggagcgcgccggctccctatctgggaaacaaagcctctactacgtggacagtgaagggaaccggatttcaggggccaccttctct

SEQ ID NO: 832936 - DNA, 120 bp, Homo sapiens
ctcctggggtctgagcattccttgctgattaggagcaagttcagatcagttcacttagcagccatggaaggccaccttcactgtttcaaattcctagtcagtagaatgagcagtgcgacg

SEQ ID NO: 832937 - DNA, 98 bp, Homo sapiens
ggcaagggggcaacgaggaagctcttaagagcgcggccggaaagcagaaattatggatccggatgagcaattggaaacccttcatgaagcactgaaac

SEQ ID NO: 832938 - DNA, 100 bp, Homo sapiens
tgcgtgttgtccacccaagatggagttcctcctggggaacccgttcagcacaccagtggggcagtgcctcgattcgtggtacagagaaaagcagcgtgag

SEQ ID NO: 832939 - DNA, 98 bp, Homo sapiens
tctcagaagcttctagagaaacttgtgtagctttgactgattgccttaatctcttcaccaaacaagaagggaggatgttaagcaagtttttggacaga

SEQ ID NO: 832940 - DNA, 100 bp, Homo sapiens
aatactgggcaaagccacaagtcatacgcaggcagtgcttcaaaaaactatggaacaaaacagatccttggagaagatgccaacaagattcagaagaact

SEQ ID NO: 832941 - DNA, 98 bp, Homo sapiens
atcagttgtgttacaattgaagaaacttggtattgatgacttggtacattttgattttatggatccaccaggaaaaaagtaatcctcttggaaagctg

SEQ ID NO: 832942 - DNA, 99 bp, Homo sapiens
tactacagtcgaatggccaactatcggaacacgagcgagattcctctggttctggtgggaacccaggcttagcagtgtctgcaaaaacgaatcttttcc

SEQ ID NO: 832943 - DNA, 105 bp, Homo sapiens
gctgttgagttagagccaacatgagtgagaaatcccaagttgaccgtcaagtccaacgctcgctgcagacatctagtggacccggcgctcgcggacggaagcgga

SEQ ID NO: 832944 - DNA, 98 bp, Homo sapiens
cctggctgagaacctcaacaacccacatgacattgtcatcttccatgagctgaagcagccaagaggatgaagtcagattcttttctccaggaaatgcc

SEQ ID NO: 832945 - DNA, 98 bp, Homo sapiens
gaggtgtcggaggtctcatctttgaactactgccggagcttctgccagattggccatcgggactttgatgtggagaagcgacttcggagagacctcag

SEQ ID NO: 832946 - DNA, 126 bp, Homo sapiens
ttgaagatctgggacttagcaggcaagagctgggctacagtggctttaatgagataggagtccatagaggccactgtattctattgaagaacatgtctaacagtaacactactcaagagaccctgg

SEQ ID NO: 832947 - DNA, 99 bp, Homo sapiens
tcctgagcgccccaggtagaatttcaaaggcttacggcaaccagctcctttttctgatgaaattgaagttgactttagtaagccctatgtcagggtaac

SEQ ID NO: 832948 - DNA, 99 bp, Homo sapiens
ttcagactgcattaccgtgtcctccatgtcaagttcctattcctatgccgcattgacaggaagattgagttccccctgcctgatgaaaagacgaagaag

SEQ ID NO: 832949 - DNA, 99 bp, Homo sapiens
gagaatcctgcaagtcactcctatgtcctcaacaaaaccagggcagctgcagttgtggatattggctccaataattgtggatactatgacttacaagca

SEQ ID NO: 832950 - DNA, 100 bp, Homo sapiens
ggctgcctcgttgagtcttctctgcatcccagccatcacctggatttacctgttttctgggagcttcgaaggccaggcacctcattgagaagtcagtgcg

SEQ ID NO: 832951 - DNA, 100 bp, Homo sapiens
ggctgggtggggcatcagtgatgggactgagtactggattgtccggaattcatggggtgaaccatggggcacctttcacagccagcaggcattggaatat

SEQ ID NO: 832952 - DNA, 99 bp, Homo sapiens
aacattttctttctgcctgaccttcatacctgatgaattaaaagacggatgtttccagtcctaaagattagtgtcacagggttggaccccaatgccatg

SEQ ID NO: 832953 - DNA, 100 bp, Homo sapiens
ctcacgttggagggcttcgcgtctgcttcggagaccgtaaggatattctctaagccgctttcatcatgggagaaatagagcagaggccgaccccaggatc

SEQ ID NO: 832954 - DNA, 100 bp, Homo sapiens
gggctggaatacccttctggagccatcatggagaagtcattgtattcaaagaagaataagcaagaaagaaaagaaggaaggaagagaggtagacagatac

SEQ ID NO: 832955 - DNA, 100 bp, Homo sapiens
gcctggcagccccgctctctgcaggtggctttgcaaaatgttacgagatgacagatttgacaaataacaaagtctacgccgcaaaaattattcctcacag

SEQ ID NO: 832956 - DNA, 98 bp, Homo sapiens
caaccatgcggacatcggcttctgcctggtgctctgcgtcctcatcgggcttatgttcgagactgcatcatctgctattaaaggtgctattcagctgg

SEQ ID NO: 832957 - DNA, 98 bp, Homo sapiens
gagcttcatggtggagaagggccccaccctgggcagtatagagacgtcggacttcacggtggtgaccagaagatggaggactggcagggtcccctgga

SEQ ID NO: 832958 - DNA, 99 bp, Homo sapiens
ggaagccccatcctccgggacatggccttctccattgatcagcgctacctgtacgtcatgtctgagagacagatgcctgtgaggagccaccaacatttg

SEQ ID NO: 832959 - DNA, 100 bp, Homo sapiens
ggagtgttcgttgtgccagcgactaaaaagaggagagaattcctctaatattattccacaacagatggccgcccatatgctgcgttctagaagcctacca

SEQ ID NO: 832960 - DNA, 98 bp, Homo sapiens
tcgcgggcggccgcttgggcgcacttgccgggtcaccttgtcccggaggcagttgcagtggtgcagaatggctgacctcagtcttgcagatgcattaa

SEQ ID NO: 832961 - DNA, 100 bp, Homo sapiens
tgactttcagctatggaatcgttttgagtatccgaggagcccaggaggaggaacccacagacccccagctgatgcggctggacaacatgctgttagcgga

SEQ ID NO: 832962 - DNA, 100 bp, Homo sapiens
accctctgccgagtctcaatatctgtcttcggtggactccttcggcagtccacccaccgccgccgcctcccagatgcacaccggctgcaccatgtcagca

SEQ ID NO: 832963 - DNA, 127 bp, Homo sapiens
aatccttcaactgctttctaccaagcgttccatttgaacacgttaaaggaatcaaagagcctctgggatagttggggaatggcggtcaatgtgtattctacctcgataacccaagagactatgagca

SEQ ID NO: 832964 - DNA, 109 bp, Homo sapiens
aaagttgcatttcctcgtcgagcgcaacccaagaaaattctaacgatgattcccaccgatgaggagaagcagaaaatccaggaagctcagctggccaaccctgaaatcc

SEQ ID NO: 832965 - DNA, 100 bp, Homo sapiens
ttttctacgataaatgaaagcatttcttcaagaaaaaggcacaggttccttgaacaggtgaatgaaatcctgtgccgttcttcagtctggagtgccttca

SEQ ID NO: 832966 - DNA, 100 bp, Homo sapiens
cggagccagcgtgggaggccgctgccgtcgcgcgccttgaaccccgagatgcccctgtccttcacaataagccgaggattctgggtgctgctttcctact

SEQ ID NO: 832967 - DNA, 100 bp, Homo sapiens
actattactacctcaaccaatcggacacctaccaggtggacggcacggacgacagaagcgactttggtgagactctgattccaactccacagagtgacca

SEQ ID NO: 832968 - DNA, 100 bp, Homo sapiens
tggattatgttataatgtggaacctggatgaatgtagagagaaagtacttcaaggcagcacagtcagtgctgatttcattatttgaactcaataccccag

SEQ ID NO: 832969 - DNA, 100 bp, Homo sapiens
gataaatggaaatgtaacaccacaggttctgaccaatggaacacaggtggaagttgttggagaaaacgccttaaaacgggaacagctgcaatatcagctg

SEQ ID NO: 832970 - DNA, 112 bp, Homo sapiens
gttgaagtttaactgtgaagagaaccagcacagtgatagctgctacaaactgggggcctactatgtgactggaaaagtggctgtgtggagtggtgtgaatgtggcaggtgtt

SEQ ID NO: 832971 - DNA, 99 bp, Homo sapiens
aaactacaggcggggacggcttctcgatccggggatttctttcacggtttgataatgtccttcccgtcagcctggcatttgacaaatgtacagcttgtt

SEQ ID NO: 832972 - DNA, 100 bp, Homo sapiens
agagtttaaacagccaaaacagttcattcatattcagcgaaaatcctgccttgcttcgttgggcctatgcaagaacaataaatgtctatcctaatttcag

SEQ ID NO: 832973 - DNA, 100 bp, Homo sapiens
tattttggaaagcagtttttaagacaatattctaccttgtaaatactgttatttgtatatactgtaaatgatgacatcggtgggcactaaccgagcccgg

SEQ ID NO: 832974 - DNA, 99 bp, Homo sapiens
gctcactgcaacctctgcctccccagttcaagtggttctcctgcctcagcctcccgagtagctgagattacaggttccttttgaggatggccacacaga

SEQ ID NO: 832975 - DNA, 100 bp, Homo sapiens
gtcatcactaattatgaatcagaagaactggatcttaccttgcccaccaacttcagagatttgtccaaggatggaaaaattcgagtcaccattcttgcac

SEQ ID NO: 832976 - DNA, 99 bp, Homo sapiens
cagccgcaaccactacggctggagcgcgctcatgcaggcggccaggaactctttgctgaatttggaacgctgaagaaggcggctgtgcactatgatcgc

SEQ ID NO: 832977 - DNA, 99 bp, Homo sapiens
accgagaccgtgaccgagagcgtgaccgagagcgcgaatatcgtcatcgttagaaggccaagtttcttcctaacagtggtgattctactctggccatgt

SEQ ID NO: 832978 - DNA, 98 bp, Homo sapiens
ccctgaaaagattgaaaatatctacatgcgaagtgagcctgttgctcaggtgtttgtccacggagaaagcctgcagccccctctcccaacaactccga

SEQ ID NO: 832979 - DNA, 100 bp, Homo sapiens
tgcagcttgagaacgtgtcggtggcgctcgagttcctggaccgcgagagcatcaaactggtgtccatcgccctgggcgctgcctatggcacagccaagag

SEQ ID NO: 832980 - DNA, 98 bp, Homo sapiens
tcttaaatccagagaaatatactgatgaacttgccactcagccaaggcgactgcttaacacactgagacttcacagagaatgcagttgtcttgacttc

SEQ ID NO: 832981 - DNA, 99 bp, Homo sapiens
cgcgagatctctgtctgtggagatgtgtacaccttgcgagaaaccaggtcggcccagcaacgaggaaagctgactgaagttgctgaagatcctcaacaa

SEQ ID NO: 832982 - DNA, 100 bp, Homo sapiens
ggacactgtgagggaacaagaccagagtttcacgatgtggacgagtgctcactagcagaaaaaacctgtgtgaggaaaaacgaaaactgctacaatactc

SEQ ID NO: 832983 - DNA, 99 bp, Homo sapiens
tctcatttctatgcacagtgtttctcaggaggatggagctagttagctgtctgttgtctgtagcccaggctagaaaatattaaccctgaagaaaatgac

SEQ ID NO: 832984 - DNA, 98 bp, Homo sapiens
tcaagctctgcaccggccatgagtatgcagccaagatcatcaacaccaagaagctgtcagccagagagccagcccctgggcaacaaagtggaaatgga

SEQ ID NO: 832985 - DNA, 117 bp, Homo sapiens
tctagctgaccagtttgacttcaagatgtatattgcctttgtattcaaggagaagcattcctctgaatattgatttgctgaatagcccagacttattggaagcaacgattggtgatg

SEQ ID NO: 832986 - DNA, 100 bp, Homo sapiens
tgtgaccacccctgaagaaattgcacagcaattctgtggtgttcttggtcacacatttatggagtttctgaagggcagtggagattactgccaggcacag

SEQ ID NO: 832987 - DNA, 98 bp, Homo sapiens
ctgcggtgtaaacagccgcggcgggcaggccaggactgtcagtgcccgcccctcggggcagagttctatatacccctggccacactgatgatcacatg

SEQ ID NO: 832988 - DNA, 98 bp, Homo sapiens
atggggtgatgagcagttgttccagacaagcaggctaatactgataggtggtgactatcctgttgagaagcaaaagatactttgcaagtaaaaaatat

SEQ ID NO: 832989 - DNA, 99 bp, Homo sapiens
tcggccgtgccctccgacagccaggcccgcgagaattacagaatgtctgaaggggacagtgtgggagaatccgtccatgggaaaccttcggtggtgtac

SEQ ID NO: 832990 - DNA, 100 bp, Homo sapiens
gaacatcaaagtctgggaagggatccctgagtctcccagagggtcattcatgggcagcgatgaaggccccaatcttcatctccttcttcattgctttgag

SEQ ID NO: 832991 - DNA, 100 bp, Homo sapiens
atcctgacagctgtgtactttgccctcagcatctcccttcatgtctgggtcatggtatcacagatgtcgtaagaatctgaatcctccaaaagacagatga

SEQ ID NO: 832992 - DNA, 98 bp, Homo sapiens
ttttttctaatggctattcaagctattgacctgaaaagtggttctggaaaagtgtaccaaggccctgcaaaaggtgctgctgatacaacaatcatact

SEQ ID NO: 832993 - DNA, 98 bp, Homo sapiens
gtcgccgccgccgccgccatgaacaactcgggcgccgacgagatcggaactgaagcgctgcggcatggcgcgcgcctgcctccaggccgtcaagtacc

SEQ ID NO: 832994 - DNA, 99 bp, Homo sapiens
gggaagtcgtgcacgaacaccaagacctgtcatttactccatcctttatagtgatgctacaggacgaagaggaatggataaaaacattggcgagcaact

SEQ ID NO: 832995 - DNA, 100 bp, Homo sapiens
ctggtggtggaagtgcggggctccaatggcgctttctacaaggtccctggtgctgaaccgcctgcgtccagttgccagcgggggtgggaaagcccaaccg

SEQ ID NO: 832996 - DNA, 98 bp, Homo sapiens
tccaatgagtatggcagtgtcagctgtacagccacactaactgtgacagtctccggagtagagatgaagagagaatttctaaacctggggctgtctca

SEQ ID NO: 832997 - DNA, 100 bp, Homo sapiens
tgtggttcaggactcccgacttgacacgatattttttgctaagcagagcttcttcgagacaccttcacttccctgggctatgaagtccagaaattcttgc

SEQ ID NO: 832998 - DNA, 100 bp, Homo sapiens
ttatgaggagagaactcagcgacactacctgggccatacagactgtgtgaaatgtcattgagaaggtcaaaacgaaattcagactctacggagttggcag

SEQ ID NO: 832999 - DNA, 100 bp, Homo sapiens
gatggccttcacaatccaagttccacaatatattgactactgccacaattccgaaatggcgaaaagtcttttgaagacagcctctctgtctggaaggaca

SEQ ID NO: 833000 - DNA, 99 bp, Homo sapiens
ttttggatggtgaaccctgaagtcggtgtctgctgcgttcacggcaggattcggttagctatatcgagaagtttactgactttcttcggctctttgtga

SEQ ID NO: 833001 - DNA, 98 bp, Homo sapiens
cggatgccccccggagccgcgggctggcaggttctctccataaatgaagaagggctaaggcgatgcgaagagaatacaaaagtctttggtcggcctat

SEQ ID NO: 833002 - DNA, 98 bp, Homo sapiens
aggaagctgaagcagaggtttcccaggagatcctaagaaaaagcttatatgttcagtgtgcaataaaaagtgttcttcagcatcaagcctacaggaac

SEQ ID NO: 833003 - DNA, 100 bp, Homo sapiens
ccctgcatcccgggctcggctgtccctgggcgctgcctatggcacagccaagagcggtaccggcattgcggccatgtctgtcatgcggccggagcagatc

SEQ ID NO: 833004 - DNA, 98 bp, Homo sapiens
tcgtgttcgtgagggccttttctgcaacaggtgtgccctggggctatgaagagaccaagacgctcctggctattcttagtagttctcaattttatgga

SEQ ID NO: 833005 - DNA, 99 bp, Homo sapiens
ctgggagtaacaacacccgttttggcattgctgctaagtacatgctggattgtagaacttctctctctgttcctaaaagtaaagctttagaggccacca

SEQ ID NO: 833006 - DNA, 98 bp, Homo sapiens
ttgtatacactggaacagaatcaacccagaacggatagctccctcctggaaaagatacgtcggtaacctttccagagatgtgacagaagctctaattc

SEQ ID NO: 833007 - DNA, 100 bp, Homo sapiens
taaaaaccccggagtcttcctgatccatggacccgatgaacatagacacaggacatggatttgattgacatactttggaggcaagatatagatcttggag

SEQ ID NO: 833008 - DNA, 100 bp, Homo sapiens
gatgaagatgaacacagtattgaaatgcatttgccttatacagctaaagccatggaaaggagacaaagaccaatccatttgagttttgatattgatgcat

SEQ ID NO: 833009 - DNA, 99 bp, Homo sapiens
tcatgtgcgatgatgaggaggactacgacctgattacaggacaggcccatgttttactgtgatcagcaaccagatgtgccagggacaactcagcgggat

SEQ ID NO: 833010 - DNA, 100 bp, Homo sapiens
ggtaccttggaaacctgtggaaaaatcaccgcccatggccagcccttggaagaggctacaacacagggacgagtgatccatatgtgaagtttaaaatcgg

SEQ ID NO: 833011 - DNA, 99 bp, Homo sapiens
ggccaatgatggctttgtacggcttagaggacttccctttggatgtagcaaggaagaaattgttcagttcttctcaggccctcgggaccaaggatcacg

SEQ ID NO: 833012 - DNA, 119 bp, Homo sapiens
taatttctatcaaaaccatcgtcgttacgtgaaatctcgagatgatagtcaactaaatggagattctagtgctttgcttataaaagcttcgatgatgaagaatcagtggatggaaatag

SEQ ID NO: 833013 - DNA, 100 bp, Homo sapiens
cgctggccccctccccggagggataatatggtctccggcgatggacgccccaaaagcaggtgttgacttcaaaatcaaaactgtagagctaagaggaaag

SEQ ID NO: 833014 - DNA, 98 bp, Homo sapiens
gagacctcgctgcgctcatggcgtcgcccgggaccaccgcacagtctcaagtgtagtgaagtcaggaaagactcactggttctccagtggaagccgcc

SEQ ID NO: 833015 - DNA, 99 bp, Homo sapiens
gcagcggtttccgcgggggcggaacaaacaggcagagccaagtgcgtcctggaggcttcccccgttgcgaaggatcccttggttccagtaccccattat

SEQ ID NO: 833016 - DNA, 98 bp, Homo sapiens
gcgttttatagactagcagatctctttgggtggtctcagcttatctacaatcatatcacattgagacatttgggaaatgatgaagtgcacattgtttg

SEQ ID NO: 833017 - DNA, 100 bp, Homo sapiens
ctatgcttggcagcagaaggatttggcaacagactttgtttcttggagtccacttccaattccaaggctaatgtaatgcttgaatatgatattgatgaag

SEQ ID NO: 833018 - DNA, 100 bp, Homo sapiens
actacagtaaggctgaaatcattgaagtgcttggagtgcagaactgaaagagcacctgttcttcccggagcctatcagcaaagccattcccaaggctatg

SEQ ID NO: 833019 - DNA, 98 bp, Homo sapiens
ctgccaagcagccttagccctagtgtagaggtgtatgtgctcaagaggccttatgtggatgagttcctgagacgcatgggggaactctttgaatgtgt

SEQ ID NO: 833020 - DNA, 99 bp, Homo sapiens
gctgggtgctggcacggggctggtgggcatagtggctgccctgctgggtgtctgatgatttgtgagcctcaagtgactactctgtggaatcatctgtcc

SEQ ID NO: 833021 - DNA, 98 bp, Homo sapiens
gtgctgaagcctttaaatgcagcatctgcgatgtgaggaaaggcacctccaccagatgacagaaggcaggcactgccaggtgcacctcctggatgata

SEQ ID NO: 833022 - DNA, 110 bp, Homo sapiens
gtcttcgctgcccttgttcagcagtgacatctacaggcagctgctctataagttatcaatagtctggctgtctatcgtcatcgtgagactgactttggtgtaggagttcg

SEQ ID NO: 833023 - DNA, 100 bp, Homo sapiens
ttgtacagagatgtgatgttggagaactatagcaatctggttttcttggatagactgaagaggagcaagaacagaaacagggagccagttacagatctat

SEQ ID NO: 833024 - DNA, 98 bp, Homo sapiens
cccgggaccgtttaaaaaactgcacccctgctggatgcatgctgctggcacaactgctggcggatctgcggtgatgagtgcctgttgtccaagttcca

SEQ ID NO: 833025 - DNA, 100 bp, Homo sapiens
agatgaacagactagccactttgcattgactggaaacaatggcatttacagaaagagtcaacagcagtggcaacaggctctcctttgataaagatgcgat

SEQ ID NO: 833026 - DNA, 100 bp, Homo sapiens
ggagctggcgtctctggagaaaggtacactgatgctgaagtactatgagccttcggaacttgtggagagactacaaagttttggttgttatggtcccttt

SEQ ID NO: 833027 - DNA, 100 bp, Homo sapiens
tacagtcagaggctgcttattgttgtgtcagtgaattaggagaacttggaaaggttcagtttcgtgacgactctgcagacagtgggcccatcccatgccc

SEQ ID NO: 833028 - DNA, 117 bp, Homo sapiens
gaaaccaggctgctttcaggaacattgctgtggattcccaggtctgtggtttaccagcagagttcaaaagaatctgccactttgcagccatttttcacgttgcagttggatatccag

SEQ ID NO: 833029 - DNA, 98 bp, Homo sapiens
tccagcactggactcatggaggctgagcatttattcaggtgaacacacaggatttcagaggattagtgcgggaggatgccgttctctacctgttagaa

SEQ ID NO: 833030 - DNA, 119 bp, Homo sapiens
tgatactttaggtgaaggagcttttggaaaagttgtggagtgcatcgatcataaagcgtgattttctatgatagcgactggaaccccactgtggaccagcaggccatggacagggccca

SEQ ID NO: 833031 - DNA, 100 bp, Homo sapiens
gagcatcggggtataggaagagaggtccgaaacccaagcggcttctgctgcaggaatggaagttggatacactttgtgacttgtacgagacactgaccat

SEQ ID NO: 833032 - DNA, 50 bp, Homo sapiens
cgggaatccaggacctccgggacgaaaggatttggggtggaaggcaggca

SEQ ID NO: 833033 - DNA, 100 bp, Homo sapiens
atgctttatttttgtggcaggcatctgtgggatctgtaatagaaatcccgtgctttgaagaagaggagcacttcaaggtgctggtgaagatgaccgccca

SEQ ID NO: 833034 - DNA, 51 bp, Homo sapiens
aaccataggatagagaaaccagacaaagaaacagccttggtataatagcac

SEQ ID NO: 833035 - DNA, 100 bp, Homo sapiens
gaaagagatgctttctacagttatggagcttccgacttcgactccttaccttaaaagatgctggagtcatatgtaactccaattttaatgagctatgtga

SEQ ID NO: 833036 - DNA, 99 bp, Homo sapiens
gctggagttcagtggtaggatcatggcttactgcagtctggaactcctgggctcaaaccatcctcccacctcagccttacatagggcctgattacattc

SEQ ID NO: 833037 - DNA, 101 bp, Homo sapiens
ctgcattggttccatccttgactgttactacagaaaaaattcgggaactggagcctctcctctgtcacagtgacaatccatctcagctcatctggacatca

SEQ ID NO: 833038 - DNA, 99 bp, Homo sapiens
agaaaaccatctccaaagccaaaggggttgctttgacagcagatactaagatccagagaatgccaagtgaatcagctgcacagtccttagcggtggcat

SEQ ID NO: 833039 - DNA, 99 bp, Homo sapiens
tgggaagtgaagtcagtgcctcagttgctggttttgctgttactgctcagtgtagtcacaccttgaataagaaatggaaaaccttgggatgttgataaa

SEQ ID NO: 833040 - DNA, 100 bp, Homo sapiens
ccaggcgggacgcgcacagtccctccacgcggaaagaagtaccttcgccggtcaccggctcctgcagggaggaagaaggcacctacgatcaaactctgga

SEQ ID NO: 833041 - DNA, 100 bp, Homo sapiens
aagagatgttacccagtatcttggtgttgctgaagagcgacaagactctgggacgatgaagaagccgcacaccactgaagagattggtgtgcccatatcc

SEQ ID NO: 833042 - DNA, 100 bp, Homo sapiens
aatagctcaaggaaacctttccaacacagatgtccaagctgccaaaattcataatgcactgaaaggaattccagatgaccgagatgggctgtttgacaca

SEQ ID NO: 833043 - DNA, 100 bp, Homo sapiens
tgcattttgggaaactcgactttggagaaaccaccgtgctggaccgcttttacaatgcaggtatcagtcagagccggatctctcattggctgttgcagca

SEQ ID NO: 833044 - DNA, 137 bp, Homo sapiens
tcccaagcactgaatgacgttaatgtagccaccaggcttccgggattaggggaacctgaagttgaatatgagagatctcactggcatcgaatctatggatcagtgtcgccataccttggaacagcataactggaaca

SEQ ID NO: 833045 - DNA, 98 bp, Homo sapiens
gtcatgggacctgccattaacgaaacaaaattaaggcagttctaacgtaactcagcagttgaaggcgcgattcttaccaagtccagttgttattaaga

SEQ ID NO: 833046 - DNA, 100 bp, Homo sapiens
gatttcagcctgcacggatggtcttgaaacacaaatggtttttgatggagcagcctcttcagtaagcacgaaacatgctctcatcatggatgaagtagat

SEQ ID NO: 833047 - DNA, 98 bp, Homo sapiens
gagaagccgcccaaagaactggcagtgctttcctcagtgctatttttcttgccttagcgacataccagtctctgtacccactcaccttgtttgtccca

SEQ ID NO: 833048 - DNA, 100 bp, Homo sapiens
cacgactcctgaagacacacctgcccctggctctgctcccccagactctgttggatcagaaggtcaaggtgaggtcccagcttgaagagaaagaaaacaa

SEQ ID NO: 833049 - DNA, 100 bp, Homo sapiens
catccggaaatcctgccaacagtgcaaggaagcctggttcagcaggtggccctaaggttggaggtatcatcttcaccaaataaagaaagtaatgaagaag

SEQ ID NO: 833050 - DNA, 100 bp, Homo sapiens
ctctcgccaagggccccaatgagtggcacacagtctactatcaccgacagatttggaggccaatcactgccaccttttatttccctgtgggtccaggaac

SEQ ID NO: 833051 - DNA, 100 bp, Homo sapiens
gtagaggtgcacgccgctggagaaagctttattgtgccaatggccacactttccaagccaagcgtttcaacaggttggcagaactgaggcagagattgga

SEQ ID NO: 833052 - DNA, 100 bp, Homo sapiens
taaggtgttaagtgtaaggatcttcatgatgaaatttctgtaaatggaacaaatgtggtatctggggctggcggtctgagaagatggaaactgttagcgg

SEQ ID NO: 833053 - DNA, 99 bp, Homo sapiens
tttcatggatgatttcttccatcaggtgaaatgacaatggatgctctgttggctcgattgaaacttctgaatccagatgaccttagagaagaaatcgtc

SEQ ID NO: 833054 - DNA, 100 bp, Homo sapiens
aaaagagaacaatatatgacaatatacactccttggaatgaagaaagggaggtcttcacttcagaaatccaagactcatattcatccagcttggtgtcaa

SEQ ID NO: 833055 - DNA, 98 bp, Homo sapiens
gactttcaaacatctgaagatgacaatttattagatggtgacactgcagttgcatcgagtacacactattctgacggcagacctggttattgtgatga

SEQ ID NO: 833056 - DNA, 99 bp, Homo sapiens
atgctcagctttgtggatacgcggactttgttgctgcttgcagtaaccttatgcctagcaacatgccaatcctgaacacttgcctttgcagactcagtt

SEQ ID NO: 833057 - DNA, 100 bp, Homo sapiens
atatagagatcaaatcagcaaatatgcaaggagattcttccatcacttgctcagtgaagcccaagagccaaaggaatcaccaccaccttctaaaacgtca

SEQ ID NO: 833058 - DNA, 100 bp, Homo sapiens
gcggggtaatggggggtcagagtgccggaccccagcacacagaagccgagacgaacctaaaggcagacccagaagagctttttacaaaactagagaaaat

SEQ ID NO: 833059 - DNA, 100 bp, Homo sapiens
agagaccgagtggatcatatcctgtgtaaacaggaacatcgataagtagtgtaaaaacttgcacaatgaaatccgaagccaaggatggagaggaggagag

SEQ ID NO: 833060 - DNA, 100 bp, Homo sapiens
ttgaggaaagagagagagcagaaaagaagaaacgggcaactaaaactccaatgagaatggatcttggagaatgtctgaaagtccatgacctggctttaag

SEQ ID NO: 833061 - DNA, 100 bp, Homo sapiens
gaggtttcagagcgcagccatcggtgcgctgcagcttggagaacagccatctctggaagaagccatcagaatagcgtctagaatccaacaaggagaaacg

SEQ ID NO: 833062 - DNA, 100 bp, Homo sapiens
agagttgccatttcgctgggatttttgggtggtgcaaagagctcttcagtatccccatcagccagtttccgaggtgctgagaagcacagaaactccgcag

SEQ ID NO: 833063 - DNA, 98 bp, Homo sapiens
gaaaagcaaaacacgaagaggttaaggagctgtaccaaaggttacctgctggagctgattgtcatatctcagactgatgtgtctatcagaggcacagg

SEQ ID NO: 833064 - DNA, 99 bp, Homo sapiens
gtggaccacatagacatttacgcggatgtcggcgaagagttcaaccagagcttactcacatagcatattggtatatcaaaatgaaatgcaaggaaccaa

SEQ ID NO: 833065 - DNA, 100 bp, Homo sapiens
tccgggcaggggcagcgggagccggccggatgggaataactgggaacacaagtccatttggacagccctttagtcaagctggagggcagccaatgggagc

SEQ ID NO: 833066 - DNA, 100 bp, Homo sapiens
gtcagctgcgtgattcccgtgattgcgttacaagctttgtctccttcgacttggagtctttgtccaggacgctgcatcttcctcccgtgaggctggccga

SEQ ID NO: 833067 - DNA, 100 bp, Homo sapiens
gaacagaaccaaccaggctttacagggccggcagacattccaccgctttgacaagttcaactccaaatacaaccctgtgggggccagtgagctgcgtgac

SEQ ID NO: 833068 - DNA, 100 bp, Homo sapiens
gtcggactcccggggccatggccggaatgcagtaccctcagcagcaggttcaggaagatttgactgaagagaaaaaaagggaactggagcataatgctga

SEQ ID NO: 833069 - DNA, 98 bp, Homo sapiens
agtgaggaagaaataatgacccaattacaagttctaaatgcctgtaagattggagatttaagcgagtggtattgcaggaagtccattctggctctggt

SEQ ID NO: 833070 - DNA, 111 bp, Homo sapiens
cggcgagctgggtggtctggagaccatggagaccctcacggagctgggcgacgagctgaccctgggagacatcgacgtgttttccaagcagtgaagcacttgccgtgttga

SEQ ID NO: 833071 - DNA, 98 bp, Homo sapiens
ttcaacacctttacatttagcagtattcccagagaaacatcaccttatttggctaatctccttttgggtttgcttcagagaaaccaaaaagatagaat

SEQ ID NO: 833072 - DNA, 98 bp, Homo sapiens
ccgagccagccgctgttttgccggaggagcccctcaggccgtatctcattcagttgctaaacttatattagttaatttccactggcaagtttcagaga

SEQ ID NO: 833073 - DNA, 99 bp, Homo sapiens
agcccagaggagaaactcgctcgccttcagaagacaggatgttggcaaaggatgaactgatgaccatacttgagaaatgtttcaaggtttttaagtctt

SEQ ID NO: 833074 - DNA, 100 bp, Homo sapiens
ccgaagcccacccagggagttgatgggccgttgctccagggagaactgcaaatatcttcatccacccccacatttaaaaacgcagttggagataaatgga

SEQ ID NO: 833075 - DNA, 98 bp, Homo sapiens
tctgcggctctccgccgtccccagccctgcctctccctgggctctggtggagctgatcagaataatgttcagcatcaaccccctggagaacctgaagg

SEQ ID NO: 833076 - DNA, 100 bp, Homo sapiens
caatggttagagaagaattttccaaatgaatttgcaaaacttactgtagacatccctttaaaagtagttggaatgttcccaagtagaggtgagaaaaggg

SEQ ID NO: 833077 - DNA, 100 bp, Homo sapiens
ggatagtgcttttgagccatctagtccacctggaaggccgctgtggtggaaggatgtttgactgcagagatgtggcattcactgtgggcgaaggagaaga

SEQ ID NO: 833078 - DNA, 100 bp, Homo sapiens
ccagcagacgcctccgaagctcaccgcttacctgccggctatgtcggaagacgacgaggactgctatggcaatgatgaaacaggcgcctatttaatcgac

SEQ ID NO: 833079 - DNA, 98 bp, Homo sapiens
gaaaattaactataaaggagagcgccaaaccattactgatgatgtggaggttaacagctatctttctgcagaatattactgaagaatgatcctgttca

SEQ ID NO: 833080 - DNA, 98 bp, Homo sapiens
ccacctcggtcgcgatgggggcgcaggaccggccgcagtgccacttcgacatcgagatcaaccgggagccgggatgtgtctagtccgaatgaagcagg

SEQ ID NO: 833081 - DNA, 100 bp, Homo sapiens
cgatattcaccaagcgcttcgctacaagtgggtgaatttgtaagtgatgtcctgctagttccagaaaagtgccagtttttccacaaagagcggatggagg

SEQ ID NO: 833082 - DNA, 100 bp, Homo sapiens
ggcagcgacacaattgtctgtgacagtaacagtacttgggatcccccagttccaaagtgtcttaaaggtgctgctgctaacatctgcagaagatttggac

SEQ ID NO: 833083 - DNA, 100 bp, Homo sapiens
cgtggactttcatgctttagaacaagatgccagcaaagaacagcagcttagggtaaaggagctggaagtgcgaaaattgatgcatgtgagaggagatgga

SEQ ID NO: 833084 - DNA, 98 bp, Homo sapiens
caagaactgccggcggctcttgtgctgcaggccacaatggtgcgcatgaatgtcctggcagatgctctcaagagtatcaacaatgccgaaaagagagg

SEQ ID NO: 833085 - DNA, 100 bp, Homo sapiens
aggcaatagctgaagaagaagaggaagtagccaaagagcaactaactgatgctgacaccaaagcttgacctcagagatgatgtggtgaaaattacaatcg

SEQ ID NO: 833086 - DNA, 100 bp, Homo sapiens
cgagaggatcatggcggatggccccaggtgtaagcgcagaaagcaggcgaacccgcggcgcaataacggagaggcagatgcgaaccagaacaatgggacc

SEQ ID NO: 833087 - DNA, 99 bp, Homo sapiens
acctgcgctcggacggcgctcggagggtcctcgcccccggcctgcctacctggctgctttgactctcccgcgaagacctttccttcactgttctactgt

SEQ ID NO: 833088 - DNA, 98 bp, Homo sapiens
ctgtgggacagataagacctcaggaaaacttgacattgaggcccagaagatgtccaggctttggtgagcgggaagcttgcacttcggtatgcagggag

SEQ ID NO: 833089 - DNA, 98 bp, Homo sapiens
gcgagaagcagtgggactgcttccttgacgccttagcttggagccccgttatgaggagtcggtgatggaggcaacgagcttgggatgggtaaagtcaa

SEQ ID NO: 833090 - DNA, 100 bp, Homo sapiens
gcggtatctggtacaagacggagctcaggtagaagctaaagctaaggtatccatcatcccacgtggcaaaggactaggttatgctcagtatttaccaaaa

SEQ ID NO: 833091 - DNA, 100 bp, Homo sapiens
aggacaccgacatggaacagggactcactggggcattccatattggaagaagagatttctacacatgaaaaaaatgcctttgtttagtaaatcacacaaa

SEQ ID NO: 833092 - DNA, 100 bp, Homo sapiens
tatcacctatagaaagaaatgagcagctttggataatgacgacagcaacccgaagacagggaaatttagctcggccatcgacaagcggtcaggggagaag

SEQ ID NO: 833093 - DNA, 100 bp, Homo sapiens
tgtgtgatcttgaagggaacaggggtatagaacaggctatgcttacaggcatcctctcattcgagagaagcctaggcacaagagtgatgtggaaatccca

SEQ ID NO: 833094 - DNA, 99 bp, Homo sapiens
agctggaagatggacgtactttgtctgactacaatattcaaaagcttggatatataagcagagtgacagcaggaaaagatagctatttagccttggtgg

SEQ ID NO: 833095 - DNA, 100 bp, Homo sapiens
gaacactcctttggttccaagcggggtaaagtcctgggcacaagccagcgtcacccatggagcacatggagatggtggacaagagcaaggaccaagtgtg

SEQ ID NO: 833096 - DNA, 100 bp, Homo sapiens
tcgactcggagggtttctgtgagagacaaattgcttgttaaagataaaataccatgaggagtttgagaagagccgcatgggccctagcgggggcgagggc

SEQ ID NO: 833097 - DNA, 98 bp, Homo sapiens
gatgaatcttttcttcttgaaattaggcagactcttcaaaacgcactcattcagtttgctactagctttggcgctgaccacaatgctgagcaggaagc

SEQ ID NO: 833098 - DNA, 100 bp, Homo sapiens
tgttgctttggagcccttcttatggagacattccctggcactctcttccatggcagcacctaaatgggctgaactccagtgcacccagttagacttggag

SEQ ID NO: 833099 - DNA, 100 bp, Homo sapiens
gccagcacctgccactcagagcgcctctgtcgctgggacccttcagatgctgcacttaaaaggatgcttgttttgatgtcctgctcattgttttccctat

SEQ ID NO: 833100 - DNA, 98 bp, Homo sapiens
atacatcctatctgccacacatccagcgtgagagctttcagcagaggccaaggcagcattgcttgaatttgaagaaagggagcgacagcataaacaag

SEQ ID NO: 833101 - DNA, 100 bp, Homo sapiens
ctatcatatgacaaaggctttgccgcagttcatcttcctccctgtgtactttccatttgccttcctgggtagttacttttggtgacgctgtccagttccc

SEQ ID NO: 833102 - DNA, 99 bp, Homo sapiens
ttcgggctgcctcggcactcgcccagggagccaagaagggaccaagtatattcaaaacctccagggcctgtttgcgcttccctttggtaggacagcaaa

SEQ ID NO: 833103 - DNA, 98 bp, Homo sapiens
ctaccgaagtctgcttctgcttccaaaggagaaccgcagtgaaaggttttgatgatgatggttcagaatttcatgaacatatatttctggagaaacac

SEQ ID NO: 833104 - DNA, 100 bp, Homo sapiens
taaagattacattccaggagcagaagttctggaagttgagaaagaagagaatgctgaaaatgatgaagttgtaaggctcctctctatgatctggctgctc

SEQ ID NO: 833105 - DNA, 100 bp, Homo sapiens
acagatgaaacatcagtctaccagctttgggctgatgctgacatcagcaatatatgaaatgtcccgaggtgaacaggatttaattgaggatctcaaactt

SEQ ID NO: 833106 - DNA, 100 bp, Homo sapiens
cagctcttaatactgcagcttttagaaaagatatctttcttagaaggagagtaccctcttatatatggactgattcttattccctgctggtgttctctag

SEQ ID NO: 833107 - DNA, 98 bp, Homo sapiens
ggacaagggacaggagcgaccagcacaaccctgcaattgtcaatggggtttattggtctgaatctctaaacaaagtttttgtagataactttgaccgt

SEQ ID NO: 833108 - DNA, 100 bp, Homo sapiens
gtccacatcgaggacgtcctccgggcactcccacgaccagatgagcgtgaagccgtgcagaagaagaccttcaccaagtgggtcaattcccaccttgccc

SEQ ID NO: 833109 - DNA, 101 bp, Homo sapiens
ccgagacccgccctaaccacactatttatatcaacaacctcaatgagaagatcaagaaggatgattctgatgatggtgggcctgcctgctgctggcaagac

SEQ ID NO: 833110 - DNA, 117 bp, Homo sapiens
tctagcaaatgcctgcaatggactagctctgctacagaacaccaaggctattatgcatcatgaaggccacatggatgatggcataagtttgtcgagatcccagcatgaagaatcacg

SEQ ID NO: 833111 - DNA, 98 bp, Homo sapiens
aggataaactacctacatagaggacatacctttggttaaaggagctgccgtcaggtcctcgatgggcttcctggaatattggtgtgtttatttgcatc

SEQ ID NO: 833112 - DNA, 101 bp, Homo sapiens
ccccgccccgctcaccttagccccgcgcccgagaatgttctgaaggatctggaaaagagaaaagctgatttaaataccatcacagagagtagtgctgccct

SEQ ID NO: 833113 - DNA, 98 bp, Homo sapiens
ctgcctttgcacctaaatcctggatggaagatagcttgaacagggctgacaacatttttccttttccggatatgacagcgcgtgatctgctacagcag

SEQ ID NO: 833114 - DNA, 120 bp, Homo sapiens
tgtgtaaacatgacttccaagctggccgtggctctcttggcagccttcctgatttctgcagctctgtgtgaagcgccagccagcctttgacacctttgatgggtccctgtttgctgtttt

SEQ ID NO: 833115 - DNA, 99 bp, Homo sapiens
tcaagatggcgtgcttgttggagaccccaatccgcatgagcgtcctttcggctaattcacctaaataagattgatcctcatgctccaaatgaaatgctc

SEQ ID NO: 833116 - DNA, 98 bp, Homo sapiens
acagttgctgtcatttctggagaagccctgggaataaagcagacctgcttggactgtaagaaaaatttttgcatgacctgttcgagccaagtagggaa

SEQ ID NO: 833117 - DNA, 98 bp, Homo sapiens
tctggatgtactggaattaaaaggatttaagagatcatggtgtgcatgttctaggggagaaactctggaaaccttgacaatggcaacagtgtgtctct

SEQ ID NO: 833118 - DNA, 100 bp, Homo sapiens
tggccacttacctgaatgaccacctagagccttggatccaggagaacggcggctggacttatctaaaaacagactggttgaagttccaatggaattgtgc

SEQ ID NO: 833119 - DNA, 100 bp, Homo sapiens
ccaacttgcgcaaaaacaacagacagccctatgctgtcagtgaattagcagatccaaaaggtaattctggcacttggagactatatgggagccacttgtc

SEQ ID NO: 833120 - DNA, 99 bp, Homo sapiens
gaagagttggatactcagcgtcgctggcagccgctgtacttgaggccattgcccaagtctggccaggctgatgggaccagcgaggagtctctgcacctt

SEQ ID NO: 833121 - DNA, 98 bp, Homo sapiens
cgctacgggaacatcaccttgcccatgtctcacgcggaacctgtggacaaagtggctgccatgagagagttccgggtgttgcacactgccctgcacag

SEQ ID NO: 833122 - DNA, 100 bp, Homo sapiens
gacaaagattattgaagcaagactaaagatgcacacttgactgaaggaggacagggaatctgaagactccggatgacatcagagctacttttcaacagcc

SEQ ID NO: 833123 - DNA, 98 bp, Homo sapiens
cacctcagctcggccggggccgcagtctggccacccgcttccatgcggttcgggtccaagatgatgccgaccatggtgaatccgggcagcagctcgca

SEQ ID NO: 833124 - DNA, 100 bp, Homo sapiens
tgtgcccatctatcagcaggctccgggctgaagattgcttctcttctctcctccaaggtggtctgagctcggcctatgggggcctcacaagccccggcct

SEQ ID NO: 833125 - DNA, 98 bp, Homo sapiens
acctttgatctaagggttcagcctttcaatgtgacacaaggaaagtattctacagaccgtgagtcccctagaagttactcatccactttgactgacat

SEQ ID NO: 833126 - DNA, 98 bp, Homo sapiens
gattctggagacaagctgaaacttgaccagactcatttagagacagtaattccagcaccaggtgcgggcggcacccagagactcacccgtgctgttgg

SEQ ID NO: 833127 - DNA, 100 bp, Homo sapiens
gcaaataacttttccttggagagtcataacatatcactgactgatgagaactggactgatgaccaactgcttggttttaaaccatgcaatgaaaacctta

SEQ ID NO: 833128 - DNA, 99 bp, Homo sapiens
gaacattgtttaccttggaagaactccgtgcccagatgctcataaggattgtcctctttctacaaaaggaagagagaagggcacagttacctaagtatc

SEQ ID NO: 833129 - DNA, 100 bp, Homo sapiens
aaaacgcttccatctttatccagagatcagccaaatggccgatgacacagtggcagaactggacaggcatctggcagtgaagaccaaagaactccttgga

SEQ ID NO: 833130 - DNA, 100 bp, Homo sapiens
tctggtcacgcccgagctctgatgcaagcgaagaaccttttccctaatacgtacctcattgtgggagcgtttcgtcagaacacacatggtatccagatga

SEQ ID NO: 833131 - DNA, 100 bp, Homo sapiens
ctcagatccccagatccagtgtgtgggagcaggaccagcagattaaagtatggacagccaacccccaacaatttgtagaagatgaagatgatgatacatt

SEQ ID NO: 833132 - DNA, 98 bp, Homo sapiens
gagatagctgttctccagcctttctggagggatgcagagcctttccttaggacaaacaagctgcagaagaaagatcagcaactggagcctaaaaaaag

SEQ ID NO: 833133 - DNA, 99 bp, Homo sapiens
ggagacccggctgggaagtgcaggcaaagccggctgttaccctgcacagccgtcaccctcaactttcccttcagccggttcttcttgatagcagtagca

SEQ ID NO: 833134 - DNA, 100 bp, Homo sapiens
gttaatgctgaagcttcattaaggagggtattgttgcagcatctggcagtgagactgaggatgaggacagcatggacattcccttggacctttcttcatc

SEQ ID NO: 833135 - DNA, 100 bp, Homo sapiens
ttactgcaggattttcagcttcagcaagcagggtacatccgggaaggcttcctggccgtgcagcatgctgtggaccgggccatcatggagtaccatgccg

SEQ ID NO: 833136 - DNA, 100 bp, Homo sapiens
aacaaaattctgaactcaggacttggcaaaagatctcttaggctttctgctcagaaggatttggaacagaaagaaaagcatcatgtaaaaatgaaagcca

SEQ ID NO: 833137 - DNA, 99 bp, Homo sapiens
ttcaagaccagcagagaccggaaggatcacatggaacaagcacatcatgattgacttggggactggcaacaacaacaagattaactgggccatggagga

SEQ ID NO: 833138 - DNA, 99 bp, Homo sapiens
cagttagaacctgtcacctctcagtgccccaggtgctaaagagctgtgcagaatttgtggaggagtatggagtggtggatgggatctaccgcctctcag

SEQ ID NO: 833139 - DNA, 98 bp, Homo sapiens
gagcttcctgataacgaggctgtggagcagcacaggttcgaaaacatggccaaaagaaatgccgagaaggaactgacagataggaattgggatcaaga

SEQ ID NO: 833140 - DNA, 98 bp, Homo sapiens
caaggctcttccctgaccattttctactgtccctgcgcgagttccgagactactgtgctatctgcttaagatgggagtggcctgggtctccaaaagca

SEQ ID NO: 833141 - DNA, 51 bp, Homo sapiens
gtttggaggatcaatgctggcttccacgtggtggacttgctttgtgaagag

SEQ ID NO: 833142 - DNA, 99 bp, Homo sapiens
gacgccaaggcgaggcaggactgtgtcaaggagatcggcctcttgaagatcacccggaagttcaggctgaattctgaaggcaaacttgagcagacggtc

SEQ ID NO: 833143 - DNA, 50 bp, Homo sapiens
gccgtaccgagctaccaggctgattgggaaaatgaggtacgttagtgttc

SEQ ID NO: 833144 - DNA, 100 bp, Homo sapiens
ctgaagtggcggccctgtattttcccaaaaaggaaacactactatgaagtatcctgtcatgaccaagggttatgcagggtcgggtggtctaccatgcagg

SEQ ID NO: 833145 - DNA, 51 bp, Homo sapiens
gatctccgccaccgtcttcaggccagatgcctttgaagatgagaaaccccc

SEQ ID NO: 833146 - DNA, 100 bp, Homo sapiens
gagcgaaagagaggcctcccggctcgacaagttcaagcagctgcttgccggccccaacacggaccttggagacggtggctcagggagtaaaggaaggcca

SEQ ID NO: 833147 - DNA, 100 bp, Homo sapiens
atttactaagaacatggagtctcccttatgcaatgaagccctggtagatcaactttggaaacttatgaattctgttaggaaaaatgaggctgacaatccc

SEQ ID NO: 833148 - DNA, 98 bp, Homo sapiens
acaaacaccgagaagaaggccagtgtggtaacctgtgtatggtgactggaggtgctaacctaggaagaattggtgtgatcaccaacagagagaggcac

SEQ ID NO: 833149 - DNA, 100 bp, Homo sapiens
gttgatcagcttcgtgatatcaaagagtgtgactgcacagaaaagttacaaaacaaatttgactttttgcgctcacagttgaatgatatttcgtcattta

SEQ ID NO: 833150 - DNA, 100 bp, Homo sapiens
aagcgatgagccagcctgcagagccaagcctgatgccagcatgaggatgtccggcttccagatcaacctcaacccgctcaaggagccactcggcttcatc

SEQ ID NO: 833151 - DNA, 100 bp, Homo sapiens
gctgtatctactcaagagtggaagttttcacagattgaaggccaaggacatggcgcagtatttgactgcaaatgctctcctgatggtcagcattttgcat

SEQ ID NO: 833152 - DNA, 98 bp, Homo sapiens
taatttacaccagcacttgaagcgcctggaaccggttattgcagctgactgcaaaagggtcacagtgctgaagtattttctggaagccctttgtggac

SEQ ID NO: 833153 - DNA, 100 bp, Homo sapiens
acctcgagtctgaggtctctgccctgcacgatgacctctgggagcagctcaatttggacacccagagtttgctgtcatcgtggaggtccacgcagccgca

SEQ ID NO: 833154 - DNA, 98 bp, Homo sapiens
tggttctggcccctctgctgcactgtggttgcacagagcattgaggatcaccatcaggaagtgattggtttctgcagagagaatggtttccatggctt

SEQ ID NO: 833155 - DNA, 99 bp, Homo sapiens
gagacgagaagcctgaaaagtcgcagcgagctggagccgccggagatggcagaaacggtggacacaagcgaaatggtcaacggcgctacagaacaaagg

SEQ ID NO: 833156 - DNA, 103 bp, Homo sapiens
tagtgactacattcgtcttattgctgcagtgaaagtagaagatgacggtgaaatgttccacacactggatgatggccacacaagatttacagatctaatacag

SEQ ID NO: 833157 - DNA, 99 bp, Homo sapiens
aaatccatcttcatcctaccgctccgcccatttggagtcaaaaacgtatgagaccaaaaaaatattttcagaaaatgatatttttgaaataaatttttc

SEQ ID NO: 833158 - DNA, 100 bp, Homo sapiens
aagtaaaaattggtcagaagatgatctacaattactaattaaagctgtgaatctgttccctgctggaacaaattcaaggatgtcctggaacaggtggagg

SEQ ID NO: 833159 - DNA, 100 bp, Homo sapiens
caagatggccgcttggggaaggaggcgtcttggcccgggcagcagtggcggcagcgcccgagagagttgactggtctgagtgtctccaatggaaaggacc

SEQ ID NO: 833160 - DNA, 51 bp, Homo sapiens
tggtcaaatttcagccatcagcaaagttgcatgctgagaatttgaaaaatg

SEQ ID NO: 833161 - DNA, 100 bp, Homo sapiens
agatgcacaaagaaagcgcctttctccaggctcaaaagagtatcaggttggtcaaagaaaaagtgatgtatgaaaaagaggcaaaacaacaagaagaaaa

SEQ ID NO: 833162 - DNA, 98 bp, Homo sapiens
gaagattaaattgcttactggtaaacgcgttcaactggcggaagacctcagtgacgcatccaaagaagacattgacactgctatgaaattaggagccg

SEQ ID NO: 833163 - DNA, 100 bp, Homo sapiens
gaattccaatcccagttcatttttgttctcctgaaaagaaagctgaacattcatctataaatcaagaaaatggcactgcaaaccctatcaagaacggtaa

SEQ ID NO: 833164 - DNA, 98 bp, Homo sapiens
gttgggtgatcatttcattgagatcaacctgaatgaccaggtgtaaagtgcaagagtaatatgctatgactgaggacctgacatgaaacgcagatcta

SEQ ID NO: 833165 - DNA, 100 bp, Homo sapiens
ctaagaaggaacctgctgctcccccaaaagagccaggctttcgaggactgactcctccaattccttgggaacatgcaccgcgtccccatttcccccttgt

SEQ ID NO: 833166 - DNA, 100 bp, Homo sapiens
agtactacagcaacctaacaaaaagtgagcggtatagctccagcgggtccccggcaaactccttccacttcaagattcttcaaacacctaaatgaaagtg

SEQ ID NO: 833167 - DNA, 100 bp, Homo sapiens
aaagttgccgaagatgagactgcccacgcgctcagacatgatatgcggctatgcctgcctcaaagatgataccacgagtcaacccaaaagttgctgggga

SEQ ID NO: 833168 - DNA, 101 bp, Homo sapiens
gaaagagtggatttcagcctgcacggatggtcttgaaacacaaatggtttttgccctttctaaggcacaaaatgatgtgatggaaatgaagatgcagtcag

SEQ ID NO: 833169 - DNA, 100 bp, Homo sapiens
ctcctaaaggctggtcctgccactgggacaggtgggatatgagcctcttcctccaacaataggacgaaatatttttgggcggcaagtgtgtcagcttcct

SEQ ID NO: 833170 - DNA, 99 bp, Homo sapiens
tcccatgatcaatctgatctcggttgggggacaacatcaaggtgacatgtacagccatgatgggaatactgatgagccagaatgggtaaagacagagcg

SEQ ID NO: 833171 - DNA, 98 bp, Homo sapiens
gaaaaggtgccaagagcttagttgaactccttagttgaaactgtgggacagccagacagaagagatagcataggagtgtgtgcagaaaaacaggatgg

SEQ ID NO: 833172 - DNA, 98 bp, Homo sapiens
cagtttctacaaataaaagatgggtggattattttctcgatggagggtgtgagctaccacgccttgcctgagttgatcttctacaagagttcaaacaa

SEQ ID NO: 833173 - DNA, 100 bp, Homo sapiens
ttttgtgcgacagacaggaggaagcctcttaaccgagccttgtaggctgaaattgcaggtggaaaggaatttggacaaggtttactgcgaggaaatgcgt

SEQ ID NO: 833174 - DNA, 98 bp, Homo sapiens
tagagaaggaggatcaaaatcagacagtgaagatataacaagatcagcaaatctaactgaccaggttttggggccttgtcacagatgccagatgattt

SEQ ID NO: 833175 - DNA, 98 bp, Homo sapiens
ggttaaactacagaacaacatatcgtatcagatggcagacatacatcatttaaaggattgttaaaggaaatgggctggcaggaagacagtgaaaatga

SEQ ID NO: 833176 - DNA, 98 bp, Homo sapiens
aattcaaaagatgtttgaaaagctgggaggagatgttaaagtaacccatcttgcaggacgacattgaagattggtcttctgttgatctaagatgatta

SEQ ID NO: 833177 - DNA, 100 bp, Homo sapiens
actcgcttctataaccacccggtgcactttgtcttccatgacaccaagttggatgccatgctggaggagttcaagaaggcctacagcctggctcccgcga

SEQ ID NO: 833178 - DNA, 98 bp, Homo sapiens
ttgtattctgtattacacttcagaaagtgtggaagcaaaggtcatctaatctttaaaaggctgaagccgacgtagcttctctgaacagacgcatccag

SEQ ID NO: 833179 - DNA, 100 bp, Homo sapiens
aggaacggctgaaacgaagagaagagagagagagagaagaaagggagaagctgaggagggattttatattggaagacatggatcttgctgccaacgagat

SEQ ID NO: 833180 - DNA, 149 bp, Homo sapiens
cctccctcctccgttcccccctcctcccccctcccctcagcggtggctcccaagaagtccgagacacgcggcctcccagaagttcctgccgaatcgtcttcgtcacccccggggtccgaggtagcctcccttacacagcctgagaagag

SEQ ID NO: 833181 - DNA, 131 bp, Homo sapiens
cgccattccctatggagcctacaatggcccagtaccaggctatcagcaaacacctccccaaggcggctatgagaggttttcctccgagtacccagaattctgttctaaaaccaaggccctggcagccatcc

SEQ ID NO: 833182 - DNA, 98 bp, Homo sapiens
taacatcccgtcctgactgctactggggccgtaactgccgcactcaggtgaaagctcaccacgccattgtgaacgtggcatcactgacacaatcagaa

SEQ ID NO: 833183 - DNA, 100 bp, Homo sapiens
ccttatgaacaagaaatcaagttctttgcaaaagtcattaaacagctgatgaaaaaggaattcactctagagttttcacgtgacagaaagtcaatgtcgg

SEQ ID NO: 833184 - DNA, 118 bp, Homo sapiens
atgcatgtaccgaccttctgaacaaggccaacacctatgcaggtacagcagggaagaactggaaactcagagaaagaaactgcccttccatctacaaaagctgagtttacttctcctc

SEQ ID NO: 833185 - DNA, 99 bp, Homo sapiens
tcctttcagcaccatgccaaacgcagcagccgttgccatggctgcaacacttacacagcagcaacagcctgctacagagtcaagggtccagagaaggag

SEQ ID NO: 833186 - DNA, 141 bp, Homo sapiens
tcacctctagtcactgtcgcagggacaggagtactccacagaggataaatttcaacctccggggccacaatagcgaggaccctatctgcagatgttctgaatacctctgagaatagagattgattattcaaccaggatacc

SEQ ID NO: 833187 - DNA, 98 bp, Homo sapiens
agcaaacaaaatctgaagattattacagtaaaaacaaaagaaaggcaagagaatacttactagttaaagaatgcactgctgcctgcaggcctgaggca

SEQ ID NO: 833188 - DNA, 99 bp, Homo sapiens
gccattgtcggctactgcgacgccaaatacgtctgggcagccacggccgggggcgtctttcagagcattacgggccgttgctccagggagaactgcaaa

SEQ ID NO: 833189 - DNA, 99 bp, Homo sapiens
ttttgcctccggttggggctgctgtttctcttcgccgacgaaatgtctttcctccaggacccaagtttcttcaccatggggatgtggtccattggtgca

SEQ ID NO: 833190 - DNA, 98 bp, Homo sapiens
cttcccaatcccactgatgaggatcagcccatgttgatgacagtgcaattttggattgccagttcagtgagttttatcatacgcctccacctggtttt

SEQ ID NO: 833191 - DNA, 100 bp, Homo sapiens
tctgatccctccagaaatggataatgagtgtgttgcacagacatggtttcgctttttacacatgttaagcatccgcacttccactaatagccaagtagac

SEQ ID NO: 833192 - DNA, 98 bp, Homo sapiens
aagcatggcactctggcgggcataccagcgggccctggccgctcacccgtggaaagtacaggtcctgacagctgagtctgactctatcacccaggctg

SEQ ID NO: 833193 - DNA, 98 bp, Homo sapiens
ctcgtgaccaacatgctgtgatgtgtgccgagggaggaattggcaagacatctgtatagattctgcttcatccgtgagagagaataagcaacctgaag

SEQ ID NO: 833194 - DNA, 100 bp, Homo sapiens
cagttcatcttcctccctgtgtactttccatttgccttcctggattggccaggtgaaacaggagctgtccagaaaggacacagaactactcgccctgcag

SEQ ID NO: 833195 - DNA, 98 bp, Homo sapiens
ggcattaggggtgatgccaaagccagaccccacggtcatcaacaagcacataaggaaattagtggagagatttaccgcattgtttctcagaagcaaat

SEQ ID NO: 833196 - DNA, 100 bp, Homo sapiens
tgaggcctccgaaaccttccctagctggatttggggacagaggagcgctgaaaaactgcttaaggttgaaaagagaaatttaagaaattgctgacggaat

SEQ ID NO: 833197 - DNA, 100 bp, Homo sapiens
catgtgaacactcaagtgaagcaaaagccttccatgattacatttctctatgaatcatcatcaagaactctgggagaacttttgaattcataaccaagcc

SEQ ID NO: 833198 - DNA, 99 bp, Homo sapiens
ttcgccctgccctgcccaccggggctgaaaattcctgaggaagatggttacaccatcacccccaacaccctcaagcaattaccagctctggctgggtcg

SEQ ID NO: 833199 - DNA, 100 bp, Homo sapiens
taccaggatagctgttgtttcagagaaaggtggacccccaaaagtacaagggcatatttaacggattctcagttacacttaaagaggatggtgttcgtgg

SEQ ID NO: 833200 - DNA, 100 bp, Homo sapiens
aagtgttttgtacattgggagagatcgttggttcacagggaagtcgcctggaaaaaccaatagtattttcacccgatggaagactaattgtgtcatgtag

SEQ ID NO: 833201 - DNA, 98 bp, Homo sapiens
cggaaggtccttagggaggaccccagacaccggagactgggaaatggtgcaatggatgagcttcatagtctggatccaagaaggcaagagttattgga

SEQ ID NO: 833202 - DNA, 100 bp, Homo sapiens
ctgcaccctggatggaaagcaggaacaagagttgaatgctcgagcccgggccctccaagctgcatctgcttcatgttcatttcggcccaatggatttgat

SEQ ID NO: 833203 - DNA, 100 bp, Homo sapiens
ctggagatgattaaaacggaatttacactgacagaagcagtggtcgaatccagtagaaaactggtcaaggaagctgatttgttaaggattccaagtaact

SEQ ID NO: 833204 - DNA, 98 bp, Homo sapiens
ggccattttgcaaatataaaggacatactgctgatctccttgatctttcatggtctaaaaataacatagctgatccagaagaactgttcacaaaatta

SEQ ID NO: 833205 - DNA, 100 bp, Homo sapiens
actcctatttgaagtatttgacgaaaatagactgattgtcactgctgttccaagggcacacgcagagggatttggaattcctggagagttgcctttgtga

SEQ ID NO: 833206 - DNA, 119 bp, Homo sapiens
aacagtttgtggcaagacaagctcagaactgagaagctgtcaccacagattcctgatgagttcgacaatggtgagtaaacaagcacagattctggagtccctgaccctctcaactctgt

SEQ ID NO: 833207 - DNA, 99 bp, Homo sapiens
aataacctgagtgaagaagattataggcttatgagagataacaatttgctaggcaccccagaagcatccgaaatcatgaagagcatcggtgaggccatc

SEQ ID NO: 833208 - DNA, 100 bp, Homo sapiens
aaaggggacagacgtaaacgtgttcaataccatccttaccaccagaagctatccacaacttcgcagagggatgtcctttaactccattgcctccagttag

SEQ ID NO: 833209 - DNA, 99 bp, Homo sapiens
gcattctgctgttgttgattttgaagcattaaatgttatcgtaagtactatactggcaattgctggagaagattttgcaattgttgcttctgatactcg

SEQ ID NO: 833210 - DNA, 98 bp, Homo sapiens
gaatatcctttgaagaattctgtgctgggaaggtgtggctcattgactttaatccatttggtgaagtcacagattcactgctgttcacctgggaagaa

SEQ ID NO: 833211 - DNA, 99 bp, Homo sapiens
ggagacaaagcagcgcccgtctgcttcgggcctctggaatttagcgctcgcccagctagccgcaggttccccttctactttgaactgaagatcgccttc

SEQ ID NO: 833212 - DNA, 100 bp, Homo sapiens
tccagaggaccaagagcatgttccagaggaccacgtacaagtatgagatgaaacgcttcgttaagggactcaggcagtacgggaagaacttcttcagaat

SEQ ID NO: 833213 - DNA, 99 bp, Homo sapiens
gcggaatcggggagcgtccggagctagctggatcctctaggcagtgagaaatgttttagatgaagataatgataatgttgggcaacccaatgagtatga

SEQ ID NO: 833214 - DNA, 100 bp, Homo sapiens
aagctgagaaagtcatcgatggcaccccctgtgaccagaacggcacggccatctgtgtgtctgggcagtgcaaggatttccgggaaaaaaatacagatca

SEQ ID NO: 833215 - DNA, 100 bp, Homo sapiens
atgcaacgccattcgccaggctcttcaggatctgctttcagagtacatgaacaacgatgttttcactccagaatgcaaattcaaggaatctgtgtttgaa

SEQ ID NO: 833216 - DNA, 98 bp, Homo sapiens
cgactagaggggatgcagatatgtatgatcttcccaagaaagaggacgctttactctaccagagcaaggacacaacatttgcctgcaacaaggacagc

SEQ ID NO: 833217 - DNA, 100 bp, Homo sapiens
cctttgatgagaactcagctgtccagcaaacggggattcagcgtccgatcctttggaacagggactcacgtgaagcttccaggaccagctcccgacaagc

SEQ ID NO: 833218 - DNA, 106 bp, Homo sapiens
tttgatccctgtgaatgtgtttgctctcatgaacatgcaatgagaagactgatcaatctggacacagcattgttggttttgccatgtactattttacctatgaccc

SEQ ID NO: 833219 - DNA, 99 bp, Homo sapiens
ctagagtctgaacgcaacagaattcagatgcgtagcttgcagcagcagttctccaggtgaaagaacttgtcctggacaacagtcggtcgaatgaaggca

SEQ ID NO: 833220 - DNA, 100 bp, Homo sapiens
gaggcaacctctgggccaccgcctcctgcccgaaggccacctgaacctaacggctccctgcaacgctgcctgcagctgccagccagaacactacagccct

SEQ ID NO: 833221 - DNA, 98 bp, Homo sapiens
aatgaacggcttgcaaaactttcagatggagtggctgtgctgaagatgataacaccctatgcccattgtcctgatctgaaaattcttggaaattgttc

SEQ ID NO: 833222 - DNA, 98 bp, Homo sapiens
tcaacgaaacctggcacggctcttgcttccgattgtaaaccatggctgtgtggatacaagctcagcagctccaaggagaagcccttcatcagatgcaa

SEQ ID NO: 833223 - DNA, 100 bp, Homo sapiens
gcgtgaccgagagcgcgaatatcgtcatcgttagaaggccagaagcggactcctagaagaggggagcagcaaggatggaatgacagccgtgggccggagg

SEQ ID NO: 833224 - DNA, 99 bp, Homo sapiens
tttcttcatgtgttcctgtagctctgatgagtgcaatgacaacatcatcttctcagaagtaccttgcagaagccggctggacagctgaaggaagagtgg

SEQ ID NO: 833225 - DNA, 100 bp, Homo sapiens
aaagctgccaagttgaaaatggacgagtaatcgcctgctttgattcattgaaaaataactgaagtgaagtgatggactccgatttggagagtagtaagac

SEQ ID NO: 833226 - DNA, 99 bp, Homo sapiens
tcatgtgaaaactcatcaccttaaggtgttaagtgtaaggatcttcatgatgaaatttctgtaaatgcaagcaggcagctggtgtggaagaatggcggt

SEQ ID NO: 833227 - DNA, 100 bp, Homo sapiens
tcctcccaggcccttccatggactgaccagggtcctgggtgccagtgcgacttcatgatagcatatcagaagagggctttcactacttggtgtttgattt

SEQ ID NO: 833228 - DNA, 100 bp, Homo sapiens
ccacccctcctgtaacccagcctgtttcacttcttggaaaaaaagtctctcatccctgacctcgagtgacccaagccagcagtgtcacaatctactcagc

SEQ ID NO: 833229 - DNA, 100 bp, Homo sapiens
gcggtccaacggagagacgccggccgtggacatcggggcagctgacctcgcccacgcccagcagcagcagcaacaggttacaggaggttccagtggcatc

SEQ ID NO: 833230 - DNA, 99 bp, Homo sapiens
ctggacgtgggatccacacagctcagaacagttggatcttgctcagtctctgtcagaggaagatcccttgagatggagtttcactgtgtcagccaggat

SEQ ID NO: 833231 - DNA, 98 bp, Homo sapiens
atcgcaaggatatgatatcatggaaccagcagcaaagaagtgctatctggaaagagagactccagggattagagctcgatctgcaaggcttcagtggt

SEQ ID NO: 833232 - DNA, 100 bp, Homo sapiens
gggctcttccccagaactacaggggctctggccatcttcgtgcttcatcactggtccagctgtaataccagggtacttctccgttgatgtgaataatgtg

SEQ ID NO: 833233 - DNA, 98 bp, Homo sapiens
gagtgcctaggagcccctccccaccttttccggggaagccctggtcggagcgagccggttagcgaccccgagagtacagtggctgtggctttcacacc

SEQ ID NO: 833234 - DNA, 99 bp, Homo sapiens
ctctctgaggtctttgaacaagaaattgacccagtgatgcaaagccttggatactgttgtggcagaaaggtccaggaggcccaggaggtcctgggggac

SEQ ID NO: 833235 - DNA, 100 bp, Homo sapiens
aggaaccgaaaaggcgaggagtatagtacggcaaaaaactgtcggaagcaagatttccagatgtagcaaatgggtttattgaggaaataattcattttaa

SEQ ID NO: 833236 - DNA, 111 bp, Homo sapiens
ccagatcaacctggagctctacgcctcctacgtttacctgtccatgataccaccaggccccgaaagagccatgagaaggaaggagtggaatatcactttgtgtctaagcaa

SEQ ID NO: 833237 - DNA, 100 bp, Homo sapiens
tcgaggcatgggggtccacactgcaatgtttttgtggaacatgatatgttgatgatgtgatcagccgcattgacaggatgtttcctgaaatgtccatcca

SEQ ID NO: 833238 - DNA, 135 bp, Homo sapiens
gtcattgccctgataatcacgtggtcagctgttgccatcgttatgtttgatttagtggattacaaaaacttttcagaaatgagccgtcagactgctacagcattacctaccggtacctcgaagtgtccaccatcc

SEQ ID NO: 833239 - DNA, 99 bp, Homo sapiens
aagcgtcaaactcaccaaaaacaacatctttccagaaagagacatatctgaagagatggattaagaatgctttggattaaggattgtggagcacatttc

SEQ ID NO: 833240 - DNA, 98 bp, Homo sapiens
ctgcacatccactcccggcaggagaattatatccagatcgagagacagaagattctgaaagggttcaatgaaatgagagtcatcttggacaatgagga

SEQ ID NO: 833241 - DNA, 100 bp, Homo sapiens
gcagcgtgcgttcagccctggggatgtgtgctgtgtttggtggaatttattgtcttcgccattcagtacagtgccttgtagtggacaaagaatccagaaa

SEQ ID NO: 833242 - DNA, 98 bp, Homo sapiens
aagagcagcctcacatggtgtgggccgacatgaagagctgccagatccaacaggctgtgagcccattcctgtgcgctatcttgagtggagcaacatcg

SEQ ID NO: 833243 - DNA, 51 bp, Homo sapiens
agcgtttcttgcaagaatgggagaatcaagctatagaagtggtctggagtc

SEQ ID NO: 833244 - DNA, 98 bp, Homo sapiens
aatcccagaggaaactgacggagacgcagatgtggacttgaaagaagctgcagcggaggaaggcgaggatgctgatcctcccgctggcttccagacag

SEQ ID NO: 833245 - DNA, 98 bp, Homo sapiens
acattcataatcagggtcttgcagccattgaaaagtgtggagaagctgctttaaatgaggagacatcacagctttcccagatcgggaggaaaaatatg

SEQ ID NO: 833246 - DNA, 98 bp, Homo sapiens
ctggacacggctagaaaagatctcatcaaatctgaagaaatgaacacaaaattgcaacgagatgtccgtgaatgttctaagaacggaagcatctgggc

SEQ ID NO: 833247 - DNA, 100 bp, Homo sapiens
acttatctggagcaaggaaaagagccctggaatatgaagcaacatgagatggtggatgaacccacagtggaaggcgggcacagagccatcttcttcaatc

SEQ ID NO: 833248 - DNA, 98 bp, Homo sapiens
aaagagacttttttctaaagaatgacctagatgtgaaggctggtggaggctgtgtaatgaccattggagaaatgctacgatcttttctcacaaaactg

SEQ ID NO: 833249 - DNA, 100 bp, Homo sapiens
cagcaagcctgtgtgcattcataagaattcggaatgtctgaaagagcagcagaaacgctactttccagatgcaaccttaaaatcagtgacaagaaacatt

SEQ ID NO: 833250 - DNA, 98 bp, Homo sapiens
ttgatggccatggcataaggaactctatcccaggaatacagctttgcattagtgcctgatttgagatggggtcccaggtctcggtggaatcgggagct

SEQ ID NO: 833251 - DNA, 99 bp, Homo sapiens
tctcaggcaaggtggggactgggcacatcatcaatacggtcatcatcagatttgaaatatttaaagtggatacaaaactatttcagcaatgcagacaat

SEQ ID NO: 833252 - DNA, 98 bp, Homo sapiens
atcttttctacagcttctgataatcaaccaactgttacaatcaaggtctatgaaggagtcagaaataccatcagaggaggggtactgtgactttaata

SEQ ID NO: 833253 - DNA, 98 bp, Homo sapiens
cgcagggggacggggaccagcagctgtcgccgccgctctcagggcccggcaggaagatgggctcccgtggacagggactcttgctggcgtactgcctg

SEQ ID NO: 833254 - DNA, 99 bp, Homo sapiens
cattccagaatatctcagatgagcagagactttagaagacagctttccatcgacactaggccctttagaccagcctctgaagggaatcctagcgatgat

SEQ ID NO: 833255 - DNA, 98 bp, Homo sapiens
tactggttcttgaaccgaagactcataatggtaaccaggagccgacaacaactcctgacgcaatggttcagccttttactaccatcccatttccacca

SEQ ID NO: 833256 - DNA, 99 bp, Homo sapiens
ccaaaatgggcaggctattcaatatgaacttcagtcattgggggaatccaatgcacaaatggtttggaataccttgtagcaggacatgaggatataaga

SEQ ID NO: 833257 - DNA, 98 bp, Homo sapiens
tgtggatggagtaagaaggagaaacacagtcttgcccctaacgttgtggcctttacccggaggtttaaccaggtggtcaaggtgaagccccatgacaa

SEQ ID NO: 833258 - DNA, 100 bp, Homo sapiens
ccggctccaagtttgactgtgcccttcatggaaaccactgggaggacctgggctttcagggggtgctttccagacaggccaaggacctctcgatgcccaa

SEQ ID NO: 833259 - DNA, 98 bp, Homo sapiens
gcaagtactccaggaagcacagagctgtaccagtacacggcccacgttgccaggaccgtataatagacgctggccccaaaggaaactactctcgattt

SEQ ID NO: 833260 - DNA, 50 bp, Homo sapiens
ggaagatgtagtccaacccacatcagcagaaggccaatgatgaggccaat

SEQ ID NO: 833261 - DNA, 100 bp, Homo sapiens
gccagaactacttcctcatgattgtttcagaacacaaatggaatcctggccatgctggatgaagagtgcctcagacctggcacagtcactgatgagacct

SEQ ID NO: 833262 - DNA, 99 bp, Homo sapiens
aaacagccacgctggatggaaacagtcaagagtacccaagtggccttggaccatctggagtctgtgcctgagaaactgagcctactagaagatttcaaa

SEQ ID NO: 833263 - DNA, 120 bp, Homo sapiens
ctagaagtcactttggaagaagtatatgcaggaaattttgtggaagactagagctggagacaccatccttggtgcctgtgaagaagaatgccagcacagtggtggtttctgacaagtaca

SEQ ID NO: 833264 - DNA, 100 bp, Homo sapiens
cagcagaaagcatttaaccagcatggctacttcatattttggaaagcagtttttaagacaaaacatatcctgcattagagacattaacagaacctcacca

SEQ ID NO: 833265 - DNA, 99 bp, Homo sapiens
atgggtgagctggagaacctgaagtagcaaaggcaagaaggcaacgacgttccatctgtggaaggacctaccaaccagagtacccaagtggccttggac

SEQ ID NO: 833266 - DNA, 120 bp, Homo sapiens
gtcgaccccagccagcgcagcgacggggcgctgcctggcccaggcgcacacggaagtggtgctgattttaacaatgcaggcctcactgccaaaagttcttcggttttgtgcttgtgctgg

SEQ ID NO: 833267 - DNA, 98 bp, Homo sapiens
aagcctcatttggtgatgaatgtagccaccacgcctacctgcatgaccagttctggagctactggaatagcctgtacaggtcagaaaagagtgaaaga

SEQ ID NO: 833268 - DNA, 98 bp, Homo sapiens
agcaccgtgatggttcgcgttggtggaggatggatggccttggatgaatttttagtgaaaaatgatccctgccgagttggcgggatgcacgaaacggt

SEQ ID NO: 833269 - DNA, 100 bp, Homo sapiens
cctggaccttatatcatgtatacaactgtagatgcaaatgggtatctgaaaaatggatcagatttgaacatggaattcaatccttcagatcatcctcggg

SEQ ID NO: 833270 - DNA, 98 bp, Homo sapiens
tggctggcggtgcctggacgtacaagtacactgaggaggggacggctccgtcttcacattgtgcacagatctgaggatgggattagcgaagctgtgga

SEQ ID NO: 833271 - DNA, 100 bp, Homo sapiens
ccggaggcctcgggggcgtacaggcgcagcggccgcagcagcagcggcagtcacaggcacatcagcaaagaggttgtccttctattcaggccactcttcg

SEQ ID NO: 833272 - DNA, 145 bp, Homo sapiens
cagagttctagggttctaagtgatgtccaggaaggaggaggaataatatttatggagcatatattatggaacacatgagaaatgttttagatgaagataatgataatgttgggcaacccaatgagtatgacctgaacgacagctt

SEQ ID NO: 833273 - DNA, 98 bp, Homo sapiens
agattaatcaatgtcaactgacaggatggagccactgccctcttcctagctgcccaaggtggttacttggatgttattcgattactgctggcttcagg

SEQ ID NO: 833274 - DNA, 98 bp, Homo sapiens
acccgccaagctgtcatcacaaaagagttgattgaaattatctctggtgctgcagctctgccacggcgtatgcctccgaggacggggtcctgaccgag

SEQ ID NO: 833275 - DNA, 99 bp, Homo sapiens
gcgttgcgattattgaccagtggatctgcgcacacgccagacgagttatttcctttgaggagggaggaattgagttacttcaggcccggatggatccac

SEQ ID NO: 833276 - DNA, 114 bp, Homo sapiens
taggaccagcgtgtcccccacatcctcccctgagtccggagctaccaaaaccatcctcctggagctggatggcctgttggaaatcaaccgcatgacccacaagctgctgagccg

SEQ ID NO: 833277 - DNA, 98 bp, Homo sapiens
agtagaggagtatcagttcagtatcgctacttcaaagggtactttttagaaccaaagattcaagtcaatctgaaagtcccagccagccaagtgacgct

SEQ ID NO: 833278 - DNA, 100 bp, Homo sapiens
ctgcttcccaagctcactgcactcctagtgggaagtcgccagaagggagagcactcggtgagggcagccggcaaagagaagtgcgtctacttcttctggc

SEQ ID NO: 833279 - DNA, 51 bp, Homo sapiens
gtaatttctgggaaacaagaaggtgctggagaatctggtaaaagcaccatt

SEQ ID NO: 833280 - DNA, 98 bp, Homo sapiens
ggggccgggacgccatgtccatggaggaccccttctttgtggtgaaagggttaatacaatctgttggaatgacactggagaatatattttatctggct

SEQ ID NO: 833281 - DNA, 100 bp, Homo sapiens
agagctgtggaggtgacacaggaccataagccagaacttcccaaggaaagagaacgaatcgaaggacttggtgggaggttgcttcatgtgcgaaatggaa

SEQ ID NO: 833282 - DNA, 100 bp, Homo sapiens
caaccatccatcatctttatagatgaaatagggaaagtcctggtcagcagcgaaatgggcatcagccggtcagcagtgctggtggtcgcctacctgatga

SEQ ID NO: 833283 - DNA, 100 bp, Homo sapiens
tcaaagctgtgatcaccctgatgtcaccgaatggccacagcttgtaaaagatctttgtagaatttgatggctgtaactggaagcaacactcctgggtaaa

SEQ ID NO: 833284 - DNA, 99 bp, Homo sapiens
ctggtctcatttcgtcgtacaatttatcttgctattcagtcaagatttttacctcaagtatccacagatctaacacctcagactttcagtgaaaaagtt

SEQ ID NO: 833285 - DNA, 98 bp, Homo sapiens
ccacagactcctacatgggcacagctctctgaaggaagccttgaggatggcccttgtccctggcaaagagacggaacctcactatgttgcccaggctg

SEQ ID NO: 833286 - DNA, 100 bp, Homo sapiens
cacgtgctggcaggaccactgcagacaaatgaatttctacaagtgtgaaagaattagaaaacttcaggaacttgttacagaatattcattaaagaaaaca

SEQ ID NO: 833287 - DNA, 99 bp, Homo sapiens
ctcgcggtgcgcaccgtttgcgacttgcaaaatgtttactgaattcatcctcaatgttcccatgggcttgctgaccatccagaaactctactgcttgat

SEQ ID NO: 833288 - DNA, 98 bp, Homo sapiens
acgagcgtaaggtccagctggtcaccgacagggatcacttcatccgaaccctcagcctcaagccgctgctcttcggttcttctgtgtggcagttcaga

SEQ ID NO: 833289 - DNA, 100 bp, Homo sapiens
ggtgattcttctcggtcaaacctttttgaagatgcaacgagtgcacttggaaatgggtatattgaaggtaaagagctagaaaactttttccaagagctgg

SEQ ID NO: 833290 - DNA, 100 bp, Homo sapiens
ccacggccgcctccggagcccgacgcgtgaataaccctataccttccaatttgaaatcagaagcaaaaaaggctgccaaaatattaagagaattcacaga

SEQ ID NO: 833291 - DNA, 100 bp, Homo sapiens
atccactgccttccaaagaaaatggcatctgagcgagaaggctctggaagttctggcactggggaacaaaaggaagatcaaaaggaggaaaaacagtaat

SEQ ID NO: 833292 - DNA, 101 bp, Homo sapiens
cctcagcctcctgaggagctgggactacaggtatattttggaacttcacatccaagatactatatctctgccaatgtaactggtttcaaatgtgtgacagg

SEQ ID NO: 833293 - DNA, 98 bp, Homo sapiens
cctgcctcagcctccaaagtagctgagactacagctttcagaaggagttctcactcgaagataaagaacagctcgctaaccacgaaagaggaatcgat

SEQ ID NO: 833294 - DNA, 98 bp, Homo sapiens
tggatgtgggatccggttccttggtgtcatccagccttagcaaaccagaggagagacagcgtctggagaccatcctcagtctctgtgctgaatacaca

SEQ ID NO: 833295 - DNA, 100 bp, Homo sapiens
cttctgctgaactgaaaaaaatactagccaatggccagctcctactgaagcccaagttcagcggcgtggagaagatcaagaccatcggcagcacgtacat

SEQ ID NO: 833296 - DNA, 100 bp, Homo sapiens
ttcagcgcatcggcagcggcacctacggcgacgtctacaagaattcaaagaagctttttcactatttgacaaagatggtgatggaactataacaacaaag

SEQ ID NO: 833297 - DNA, 98 bp, Homo sapiens
ctatggcagatttgaaaattcacccttgtagagtcattcctgcctttgagcggactcccttttaagattaccccacattcctaagcatgttcatatct

SEQ ID NO: 833298 - DNA, 100 bp, Homo sapiens
gatcgctgaggcctacgacgtgctcagcgacccgcgcaagcgcgagatcttcgaccgctacggggaggaagcatggcggacaccgacctgttcatggaat

SEQ ID NO: 833299 - DNA, 98 bp, Homo sapiens
aggatatgtagcgaggaggaacgcgctaaggcaaagcacctgagtgagtatattgctccatgtgactgtcggcgggcttttgtctctggattcgatgg

SEQ ID NO: 833300 - DNA, 100 bp, Homo sapiens
ctttgatgatggcccaggaatttataccagctgtagcaaaagtgggaagccaagcctttcctcccgtagccggatcgagctgggagatgtgacaccacac

SEQ ID NO: 833301 - DNA, 98 bp, Homo sapiens
tcgcttgcagttcagcgaccacggattctttctactaatccagatacttgttgaagtgctgactagtttcttggggaaagatgtcaaggaagagttga

SEQ ID NO: 833302 - DNA, 98 bp, Homo sapiens
cagcttgagcagtaccagaaagccattgagatctatgagcagaaaccctgaagctgttacagcgcctgctgaagtcaccaggctgccggaagatcccc

SEQ ID NO: 833303 - DNA, 100 bp, Homo sapiens
agctgctgttgaccttggcactggcaggatcaagtgatgctttttctggaagtgaggtttccacgggctcccttgctcagcagtatgcgcaccctaacgc

SEQ ID NO: 833304 - DNA, 100 bp, Homo sapiens
agcagactcactaacttatgatatcaaccttttcggccttccttgtcccgcaataacagcgtacctaattactgcaaaaatgatgaaggggatatattcc

SEQ ID NO: 833305 - DNA, 99 bp, Homo sapiens
gacgatctcattgacagctgcattcaatcttttgtggtttatcagatactatcattttggatataatatcaaactatctggtgcttcccaatcgaatca

SEQ ID NO: 833306 - DNA, 100 bp, Homo sapiens
cagcaccttgtccaggcgggcctcccgtttctggctccgggctgagcttcctggagaagaggaaggagacgttctcttccagatggctgaagtccacagg

SEQ ID NO: 833307 - DNA, 98 bp, Homo sapiens
ttgagtccgcatcgccacagctgaaggctgcgagggactaagagcagagcgtctgtagaggcttctggtgaaatcgcattatgcaagactggatttcc

SEQ ID NO: 833308 - DNA, 101 bp, Homo sapiens
ggagaaggaagaggtgtttgaaaaggaatcagtgtcattcaaggacgtaactgtagacttcagtagggatgagtggcaacaattagaccttgctcagaaaa

SEQ ID NO: 833309 - DNA, 100 bp, Homo sapiens
aggatggacctggcttctatactaccaggtgtcttgcgcccatgatgtctgaagtcatccgaatcctccaggctgcccttggagctggcttctctgacaa

SEQ ID NO: 833310 - DNA, 100 bp, Homo sapiens
gatcccaagttgtcgacgaccgacagggtggtgaaagatgaaaggttgtatcaaagttcttaaggaccaacctcctaatagtgtggaaggtcttctaaat

SEQ ID NO: 833311 - DNA, 99 bp, Homo sapiens
gcgacttcgatccggcgctgctggagttcctggtgtgcccgctctccaagaagccgctcagcctgagcctccaacaacaaacaaatggcagctggacaa

SEQ ID NO: 833312 - DNA, 98 bp, Homo sapiens
gaagaatgagaccatctggtacgtgcgcttcctgtgggagtgacccgccgcccccgacccagtttgcagatgctgaaggttactttgctgcttgcaca

SEQ ID NO: 833313 - DNA, 98 bp, Homo sapiens
acgcctagggctccggcgcgtcacgggcctcagctgggattcccgcgcccctcggacggccacgagactcggttgaaagaacagattttacagggtga

SEQ ID NO: 833314 - DNA, 98 bp, Homo sapiens
tcagttcccggccaggacacggtctgggccgccgaatctccggccgaagagcggcggcggcagcggcgatggtcatcatgggccagtgctactacaac

SEQ ID NO: 833315 - DNA, 100 bp, Homo sapiens
cctgtctgacgatagtccaaaaactgaagaagatggtggataagcccacccaggtgtgatccctcacatccacaaatctctgattggaaagaagggacag

SEQ ID NO: 833316 - DNA, 100 bp, Homo sapiens
gtgaagcggccccagcactcccagctgcgcagggcctgccaggtggcgctcgatgaagatgacgccaacagactcggggagaaggtgatcctgcgggagc

SEQ ID NO: 833317 - DNA, 98 bp, Homo sapiens
gaacttgctgagcaactattcaaaaatgaaggaaaatcacctcggcagtgtttgaaggaaggatactgcaactctttgaagtacgcattttttgagtg

SEQ ID NO: 833318 - DNA, 101 bp, Homo sapiens
cgaaggcggctttagtggcagcatgaagcgcaccccgactgccgaggaacgagagcgcgaagctaaggttacctgtgcatgacagatgagtggttctctga

SEQ ID NO: 833319 - DNA, 99 bp, Homo sapiens
ttctacaaggagcagctggagcgtattgagaggaaggtcaaaatgcagatcttcgtgaaaacccttaccggcaagaccatcacccttgaggtggagccc

SEQ ID NO: 833320 - DNA, 100 bp, Homo sapiens
gatgcttcagctcatcttaggctgtgctgtgaactgtgaacagaagcaagagtgtgaacatggctacgcctcttcattcccgtccatgccgagcccccga

SEQ ID NO: 833321 - DNA, 98 bp, Homo sapiens
acccctcagtggatcagcagcgattcattccacacgtatttagccatcagcatcagcaaagccatcaacacccaggaggcccccgtgaaggagaagca

SEQ ID NO: 833322 - DNA, 98 bp, Homo sapiens
tgggtacagttttcaaacctacacgttgatgttccaaaggatttgaccaaacctgtgggcagggtgccatttgccgtgcctgacaaagtgctgtggcc

SEQ ID NO: 833323 - DNA, 100 bp, Homo sapiens
aaacagacttgaaagtgcctgccaaagccaagctcaccaaactgaagatgccttctcagtcagttgagtgcgacttcatgatagcatatcagaagagggc

SEQ ID NO: 833324 - DNA, 100 bp, Homo sapiens
ccaagctgtacttgtcacctcgaattgagcacatttaaatcaaacggtattgagatggattgggttatgaaacataatggtccaaatgacgctagtgatg

SEQ ID NO: 833325 - DNA, 99 bp, Homo sapiens
ataaagtccatagatgcaggacctgggataaacacacttgttacctatgatatggttccagagcccaaaatcattgatgctgctttgcgggcatgcaga

SEQ ID NO: 833326 - DNA, 100 bp, Homo sapiens
tccagcatttttacggacccaatcatgagcactgctttaataggggcctgctttcttccccgggcgatgtgcagagatctttgccaggggtcaaagcgtc

SEQ ID NO: 833327 - DNA, 98 bp, Homo sapiens
agggactactccaccctcacctccgtctcctcccacgaggaggctgaggatcctgcctgcatccccatcttctgggtcagcaagtgggtggactattc

SEQ ID NO: 833328 - DNA, 98 bp, Homo sapiens
ttgctgatgccacctcatcaagaagcatgatggacaggatgtttgccctcgagctaagaaacctttccagcttggacctacgtcatatcactgaactg

SEQ ID NO: 833329 - DNA, 98 bp, Homo sapiens
ggacccagcgggggcagcgcgatgaggcgggtgaccctgttcctgaacggcagccccaagaacggaaagaccttcactgcctggtgtaactcccacct

SEQ ID NO: 833330 - DNA, 100 bp, Homo sapiens
aacttcaagacacttacgggtttcttctgtttgatactgaaaagcaggaaaaccgtcttcagatacagtccctaagcccaagagagccccaaaacagaag

SEQ ID NO: 833331 - DNA, 100 bp, Homo sapiens
ccaggaagtgaaaatgtgctgcctcgagagccgctggtgagatttgtggatttaaaattcacgggcagaatgtcccctttgatgcagtggtagtggataa

SEQ ID NO: 833332 - DNA, 100 bp, Homo sapiens
gaagactttgtcctggtggcagaaacaaccatggccaggatacgaagggaactactggagaccacgtgccgcctggccaacacgctgaagaggcatggag

SEQ ID NO: 833333 - DNA, 98 bp, Homo sapiens
agagctctcctccttcttcctcaactatctcgctgacacgcagcttgactaaaatcgtaccactttttcattttgtttcattggaaaagctagatgtc

SEQ ID NO: 833334 - DNA, 100 bp, Homo sapiens
agtgtcaacttaaatacaagttccaaagacaatgatgagaagattgtgcagaatgctatcatccaaacaataggcattgtctgcctcatcaatattatcg

SEQ ID NO: 833335 - DNA, 100 bp, Homo sapiens
cggtcccggcgcccggcgagggcgcgcggctggtgtccgccccgcccgaaagggccacccgttcatcgtgcagttcaatgatggaaatgccgccgtggtg

SEQ ID NO: 833336 - DNA, 100 bp, Homo sapiens
acctgccccatgacatgtattctcgccaaagtggaacaggtgaagttcgatgccacatccatgcatgtcaagcctcaggtggctgcccagcagaagatgg

SEQ ID NO: 833337 - DNA, 98 bp, Homo sapiens
tcgataaatcagacagaacagttaatcctcaatttaagcctgatctaacccctagaaacaggtgtgttctactccctcttctgggaatgaagcctccc

SEQ ID NO: 833338 - DNA, 98 bp, Homo sapiens
tcggcgcccgcctgaaccgagtagaagacaagacggcaccgaaagcgaaggaagctcctgctcctcctaaagccgaagccaaagcgaaggctttaaag

SEQ ID NO: 833339 - DNA, 100 bp, Homo sapiens
cgacagtgactaccatgacgaaaacatgtactacagccagtcttctatgtttccacatcggtcagaaaaagatgaacaagctgaaagctggatacctaat

SEQ ID NO: 833340 - DNA, 100 bp, Homo sapiens
atggcagtgctgggccttccagttctcagactgcaaaattcaaaatggggctcaaggtattcgtttcatctacaccagagaaggcagaccaagtggcgag

SEQ ID NO: 833341 - DNA, 98 bp, Homo sapiens
tcaggaagctcagcaagactggagtccctgatggaattatgcagtttattaagacagccgctcaggaagcaatcttgcatgcgtctggaaatggcaca

SEQ ID NO: 833342 - DNA, 100 bp, Homo sapiens
ctcgactctatcaactggataaaagcactttcagcttctggtcaggactctattcagagactgaaggcactgagtcacatgatgcattattggaatttgg

SEQ ID NO: 833343 - DNA, 100 bp, Homo sapiens
agacgagtggtgggagaaccagccgactggagcaggcagcagcccagaggcggggtttcaccatgttgcccagactggtcttgaactcctgagcttaagc

SEQ ID NO: 833344 - DNA, 100 bp, Homo sapiens
gaattcagcctcagtgatgtccatgagttactccacaggatccgctgaacataggatgttgccacaaaatctacctcgtgtatttttctctttcactcat

SEQ ID NO: 833345 - DNA, 98 bp, Homo sapiens
aagcgtgcgtccctggcgcttccttcttctcttccggcggagagacaccaatgggaatcccaatggggaagtcgatgctggtgcttctcaccttcttg

SEQ ID NO: 833346 - DNA, 100 bp, Homo sapiens
cagttgtgagattcccttgcaaatttacatacgagaatggcttgtgaaatcatgcctctgcaaagcaaaatgatgcttcaacacccaggccaggtctctg

SEQ ID NO: 833347 - DNA, 100 bp, Homo sapiens
tgaaacagattggaaattaattgctatcaatgcgaatgatcctgaagcctcaaagtttcatgatgctgtctttgcatttcaactacgcaacccagtgcac

SEQ ID NO: 833348 - DNA, 100 bp, Homo sapiens
tttggctcctcctccagactcaaaggtggcccatgtgagcaagtttagtgagaacagtggattggggataagcctggaagcgacagtgggacatcatttt

SEQ ID NO: 833349 - DNA, 100 bp, Homo sapiens
tggagatggccaggtcaattatgaagagtttgtacaaatgatgacagcaaagtgaagaccttgtacagaatgtgttaaatttcttgtacaaaattgttta

SEQ ID NO: 833350 - DNA, 99 bp, Homo sapiens
gcctactcgcccgccaccctgcgctgccgccgctctgaggagttaaagtttgaaggatgacctctaggaagaaagtgttgctgaaggttatcatcctgg

SEQ ID NO: 833351 - DNA, 100 bp, Homo sapiens
cagaatttgaccaacatcaccatgtcgcgggaggcagacctggactttgcaagccatatccagaagacccagcagtttataaaccactctcccaggaaga

SEQ ID NO: 833352 - DNA, 100 bp, Homo sapiens
aaggactcctactgaaaacaatcctagtgtgttaattgtaacctacaaggagcctgcaaaatcatctactcagtttggatcctacaagcaagctgaatgg

SEQ ID NO: 833353 - DNA, 98 bp, Homo sapiens
ccatatggttacagcacagctgcccctgcctatgaaaccaatagagccatggcgactccctctgctgccttcgaggcccttatgaatggtgtgacaag

SEQ ID NO: 833354 - DNA, 109 bp, Homo sapiens
tgcagctcgggacttcggcctgacccagcccccatggcttcagaagaggttatgaagacagtatggagtttccagaccatagtagacatttgctacagtgtctgagcga

SEQ ID NO: 833355 - DNA, 100 bp, Homo sapiens
agcgtggtccggaatggaaaagtgggactggatgctacaaactgtttgaggataactgacttaaaatctggccggagaattttcatccttgggccttctc

SEQ ID NO: 833356 - DNA, 100 bp, Homo sapiens
gagaacacagatgaaaaacttcgcaatgaaaccaggcgggtaaacatggtggacagaaagtcagcctcttgtggtgctggagaatctggtaaaagcacca

SEQ ID NO: 833357 - DNA, 98 bp, Homo sapiens
taaaaagattcccaggatgtgagcaacacgggaccggacatgtctcaggaaggctatggaactagatctcaacctcctctggcccccggaaaacctaa

SEQ ID NO: 833358 - DNA, 108 bp, Homo sapiens
gacggtaggagcctccgtgcggagaccactgttcaaggccacaggtttggtgcacctcgatttggaggaagtagggcagggcccttatctggaaagaagtttggaaac

SEQ ID NO: 833359 - DNA, 100 bp, Homo sapiens
ataaaaattatttatccaacagctcctcccagcatcgagagtaaacatgaggttacgatcctgggaggacttaatgaatttgtagtgaagttttatggac

SEQ ID NO: 833360 - DNA, 100 bp, Homo sapiens
ttactcctccaacaccaatcatcccagacggaaacaattgaagatgttgaagaaatgctcaacaaccttcctggtgtgacatcggttcacagtcgtttct

SEQ ID NO: 833361 - DNA, 98 bp, Homo sapiens
atcattgtgaagcagctggaggaagacctgtatgacggccaggtgctgcagaagctcttggatcttttgcgggtgattcatgtagctggaaaagaaac

SEQ ID NO: 833362 - DNA, 100 bp, Homo sapiens
agaacccaatggaatcctgcatattggacatgccaaagccatcaatttcaactttggctatgccaaggcctgggcaatatttaagggaaagtataaggag

SEQ ID NO: 833363 - DNA, 100 bp, Homo sapiens
ccatcgtgtgcctgatgatcacgcagctggctggcttcagtggaccatgagatgcgcctacttctccctggagaagctcgaggaagcaggaatgctggag

SEQ ID NO: 833364 - DNA, 100 bp, Homo sapiens
aaccaggcgtccaggacgccgctgaccaccctcaacacggatatcagcatcctgtccttgcagggagagtcccgtattctcagagtaaaagttgtttctg

SEQ ID NO: 833365 - DNA, 99 bp, Homo sapiens
agaacatccagtattatgagaagaagaagctcattcacacagaagacccatttaatgatgaacatcaggagaggcaagaggtggaaatgttggctaaga

SEQ ID NO: 833366 - DNA, 100 bp, Homo sapiens
cacaggggagtaacctgtggtgctttgtgaggtcatcacggcgcgacgacgagctgcagttgtgggcaccttgtatgcgctggattttcctctacgtgct

SEQ ID NO: 833367 - DNA, 100 bp, Homo sapiens
aaggaagtgaggcagaggcccacatgcccccaccgttcacatgagtgagatcattggccgagacctgagtggcttccctgcacctcctggagaagagcct

SEQ ID NO: 833368 - DNA, 100 bp, Homo sapiens
gacgatctgcacttcgcattttggcattgacatttaattttagggtcctttatatagaagggagagtaggatattcggaatcagcggaggtaccgacaga

SEQ ID NO: 833369 - DNA, 100 bp, Homo sapiens
cgcgaatatcgtcatcgttagaaggcagaagctcctcctggggtagagacagatcttattgatgttggattcacagatgatgtgaagaaaggaggccctg

SEQ ID NO: 833370 - DNA, 98 bp, Homo sapiens
ttaaaacaattgctgcacgaaacactgaaattttggcagagaatggtgacttcttggccctggatcttggaggaaccaatttccgtgtgctgctggtg

SEQ ID NO: 833371 - DNA, 99 bp, Homo sapiens
gacaaagatgctcaggctgctcttggctctcaacttattcccttcaattcaagtaacaggagaaatcaatggttctgccaattatgagatgtttatatt

SEQ ID NO: 833372 - DNA, 98 bp, Homo sapiens
gctgctggaccacaaaccgctgccagaaaagattgattatgtcaagtggccaggcatggaaggagcaaagaaggttcactctgacagcactaaggaac

SEQ ID NO: 833373 - DNA, 100 bp, Homo sapiens
aggaggcttcaagacaaagggccccttacacaccagacaggtaatggtttttacaaaggaccaaacagaaaaggaaatagatgaaatccacagtaaatat

SEQ ID NO: 833374 - DNA, 100 bp, Homo sapiens
aaatggtcttaaaatggttgatgagccaatggaagagggagaagcagattcttgtcatcccccaggatacaattctttgccattgaaattgctcggaacc

SEQ ID NO: 833375 - DNA, 100 bp, Homo sapiens
ccagctggtgatcatgttgatccaaatatttccatggttcaagctgcttcagcaggacccccatctctgagaaaagattcgactccagttatagccaatg

SEQ ID NO: 833376 - DNA, 98 bp, Homo sapiens
aggccagcccttagcctggacaaagtctctgcctacattgagggaacttcaactgaggacaatagccggaggcagaagcagttgttaaaccagaggtt

SEQ ID NO: 833377 - DNA, 98 bp, Homo sapiens
actgcgaggccctggtgcccgtcatccaccgtgatctcaagtccaacaacaatccctctcgagagctgaagacgctttgtgaggaggaggaggaaggc

SEQ ID NO: 833378 - DNA, 98 bp, Homo sapiens
tgttctcctgcccggcctatgcctacgtgctcacggtcaacgagcggggcaaccactgcgagtactgcttcaccaggagtacaagcgcaagctagcca

SEQ ID NO: 833379 - DNA, 100 bp, Homo sapiens
ctttcaatagacagtgttgaggaccatcttgcctggagcaaggatgtgaagttaccccagatgtaaacatttcaggccaaaaatttaacattaaactcct

SEQ ID NO: 833380 - DNA, 98 bp, Homo sapiens
gcagaccaatggacaccttctaagagtttggcgagtcagtgactgaagcgcccgtccattccaaggacatagctcgccttttgcaagaaaaggagtta

SEQ ID NO: 833381 - DNA, 100 bp, Homo sapiens
ctgttgttccagaggatcgctgcaaatctccaacctctgataacaacgaacttgatgcaagtgataggtttgccaaggtcagacctctcatcatccggat

SEQ ID NO: 833382 - DNA, 74 bp, Homo sapiens
tcctccttctttgttcaagactgggcttccaccgagcagatttgctttgaggtcacattgatatgaaatatgga

SEQ ID NO: 833383 - DNA, 100 bp, Homo sapiens
gggatcgatgtttcaatattggaagcgctttgatttacagcagctgcagccagcgtcccatgctcggtggccccagaaaagtcagtgtgtaggcctcagc

SEQ ID NO: 833384 - DNA, 100 bp, Homo sapiens
agaggctgagcgcggagacctgggacctgctgagactccccctggagcggatgcagtgcaagctgtttgtctttgacaagacctcacagtcctgggtgga

SEQ ID NO: 833385 - DNA, 98 bp, Homo sapiens
caggccgcttggttctgacccagctgagggatgatatcgctgatttagtagaagctaaaaagttgcttaaggaagccgtagtgttaccaatgtggatg

SEQ ID NO: 833386 - DNA, 100 bp, Homo sapiens
gcgtgccccgacgtacagcgggccgggaaaagtggcactgaggctctggaacttctgcccagctctccttggtgttctttgcagaagatgtgggttcaaa

SEQ ID NO: 833387 - DNA, 100 bp, Homo sapiens
aagaatcctgagagcccatttatgttttccttacatctcaatgaagcaagggactatgaaggacgtcttgcatggctggtatacttagttgggacagttg

SEQ ID NO: 833388 - DNA, 100 bp, Homo sapiens
gaacatacgggcaagtttataaggggttcagctgttgcaaaaataattggtaataatgtcaagaaacttcagaaatttgcctccacagtcaagatgtggg

SEQ ID NO: 833389 - DNA, 100 bp, Homo sapiens
caacaagatggtgagcatgatggagggtgtcatccagggtgagaggatcacactgctccggcaggtagatgagaactggtacgaagggaggatcccgggg

SEQ ID NO: 833390 - DNA, 100 bp, Homo sapiens
agcacatgaagccgagcgtggagccggcgcctccagttagcagagacacgttttcctacatggggcacacgtgtttcacgttgacaggtttgcttgggac

SEQ ID NO: 833391 - DNA, 100 bp, Homo sapiens
tgaatgatttcggaatcaagaatatggaccaggtagcccctgtggctaacagttacagagggacactcaagggtatttgaagtataccatacaactgttt

SEQ ID NO: 833392 - DNA, 100 bp, Homo sapiens
tattggtgaaatgggaaaagactacatttatgccgtaacaccgttacttgaagatgctttaatggatagatatttagcttcctgtggtatactgatgagc

SEQ ID NO: 833393 - DNA, 99 bp, Homo sapiens
ggcaaatcctccatcagttctgaccccttgttgaaatgggacagttggcagcggctctgatgagcccgagaagaggcctgcccttgggtgcggagtctc

SEQ ID NO: 833394 - DNA, 100 bp, Homo sapiens
tccaaaccagctctgcagtgtcccgaaaccagactgtgatgactgggagagcgggctgaatgcaatggagtgtgcattacatttggaaaaaaatgtgaat

SEQ ID NO: 833395 - DNA, 98 bp, Homo sapiens
ccagctcccctcacccaacgtcgtcctgacatttaccccggtaactgctgggcatttaaaggctcccaggggtacctggtggtgaggctctccatgat

SEQ ID NO: 833396 - DNA, 98 bp, Homo sapiens
gccgaccagggacctgcccgcctgcggctgctccggatcaggatcctcatgaccagccaaagagaagaagaattaggaagcataaatcaaagaaaaaa

SEQ ID NO: 833397 - DNA, 123 bp, Homo sapiens
gactgcttattgataacagctaaggtattcctggaagcagagtaaataaagctcatggcccaccagctagaaagttgttgacctcctgtactggagagacattaagaagactggagtggtgtt

SEQ ID NO: 833398 - DNA, 100 bp, Homo sapiens
aataaagtggatctggacctctacagaagagagggagctccagattccagaaatgcactcggtgatggaaagagagccactattctgaagaacacttggc

SEQ ID NO: 833399 - DNA, 98 bp, Homo sapiens
ggaaaggttgaagttcaagagctcagaccctaaagcgcatattaaatttcctattgactacccctattcaccacctaccttcagattcttgaccaaaa

SEQ ID NO: 833400 - DNA, 106 bp, Homo sapiens
agctatttgctgagggacagcgagagcgtgccaggcgtgtactgcctatgtgtgcttttgcatttatgtcggatcctcagtgaaaataaaagccatgatagttcaa

SEQ ID NO: 833401 - DNA, 99 bp, Homo sapiens
tcctttcagatgcctggatgaatttgatgtctacatgaatcttggacttgttaataccacttactaaccgggcctgtgacactgggctaaacaaagtaa

SEQ ID NO: 833402 - DNA, 98 bp, Homo sapiens
ttggcgaagccttgggtttctttcttaaaggactgatttttagaactccacatttgagaccagcatctcagacatgtcgaaaaagatgttttgatccc

SEQ ID NO: 833403 - DNA, 100 bp, Homo sapiens
attttggtcaataatgctggagtgaataatgagaaaaactgggaaaaaactctgcaaattaatttgaaccttctgaggaaaggaggccatacagaaattg

SEQ ID NO: 833404 - DNA, 100 bp, Homo sapiens
tgtccttcatcctcaacgccctcacctgaatgcacgctgtactagcatctcctgggagctgaggcagaccctgtcagttgtatttgatgccttcatcacg

SEQ ID NO: 833405 - DNA, 100 bp, Homo sapiens
catggtgttgatctgtttaggaagtggtatcatgagagatatagcccacttagaaatcacaaactttgaccagaataagctggaagaagaaatgagaaag

SEQ ID NO: 833406 - DNA, 99 bp, Homo sapiens
atctggttattatcaggttcacgccaacagtacctcattgctctttggcgactcttattgtcccagaaatcctggatagaaagcactttgaccaagagg

SEQ ID NO: 833407 - DNA, 100 bp, Homo sapiens
ccctgcagaccaatggacaccttctaagagtttggcgagtcagtgactgaagcgcccgtccattccaagagtccctgcaggaagcatcacccaggctggc

SEQ ID NO: 833408 - DNA, 98 bp, Homo sapiens
acgacagggaccccgagatcgagctctttgtgaagaggaccttatcatgtccttcactgtatccatggcaatcgggctggtacttggaggatttattt

SEQ ID NO: 833409 - DNA, 100 bp, Homo sapiens
gcctggcatactttgaagatcgtcatggggtgatgggctttggcctctacctaatggatggaaatgtcagtaacatttacaaactggatgccaagaagag

SEQ ID NO: 833410 - DNA, 100 bp, Homo sapiens
cgagaggccagctcagacctcccggctcgacaggcggcgcgggcggcggaccacggaggggtgatcgtgaacatcactgccaccctggggaaccgggggc

SEQ ID NO: 833411 - DNA, 100 bp, Homo sapiens
cactctttgggtacctcactttttatggtgaaaacttttggcccgtttggaagcggcagccaggacaacctgactatgtacatggatttagtggacggca

SEQ ID NO: 833412 - DNA, 100 bp, Homo sapiens
tgatcgaattggtggaaaggttgaagttcaagagctcagaccctaaaaattatacccatctaccaaaagcagatatttttgcgcttgccctcacagtggt

SEQ ID NO: 833413 - DNA, 100 bp, Homo sapiens
ggtttgacactggactctcagagggaagcacacaaccattattatcccatgttgcactagcagttgcaagtaaactcacttctgctttatttaatgctgc

SEQ ID NO: 833414 - DNA, 100 bp, Homo sapiens
ttgcctatccagaagaaaatacactactcatcaaggaagaaccagacttcacagagaatgcagttgtcttgacttcaggtctgtctgttctgttggcaag

SEQ ID NO: 833415 - DNA, 100 bp, Homo sapiens
agatagttcgagagaagaaaattttagaagttcatattgacaaagggggaacacacctgaaactagaggaacagcttatgtggtctatgaggacatcttt

SEQ ID NO: 833416 - DNA, 99 bp, Homo sapiens
gttcacgttccgcgaggacctcgcgctcggcacccagctggcgggggtccataggctgctgcaggcgccgcacaaggttacaggaggttccagtggcat

SEQ ID NO: 833417 - DNA, 98 bp, Homo sapiens
gacccaatgaacatctgggatgacatcatcacaaatcggacagcggggattttcagtttgattgacaccctgtggcccccagcgatacctctgaaaac

SEQ ID NO: 833418 - DNA, 100 bp, Homo sapiens
agttcaccctcagaaggtgaccaagttcatgctgtgtgctggacgctggacagggggcaaaagcacctgctcgagatcacccctgacctgctacctcggc

SEQ ID NO: 833419 - DNA, 100 bp, Homo sapiens
catcatccagctgcctcaaatcgtcgtagtgggaacgcaggcatttgggcagtccttctccatccaccggaaggttgctgaagatggagagactcgggag

SEQ ID NO: 833420 - DNA, 98 bp, Homo sapiens
gtcatcaaaattgctcctgagacagctgttaaattctgggcatatgaacaggaatccttcaactgctttctaccaagcgttccatttgaacacgttaa

SEQ ID NO: 833421 - DNA, 100 bp, Homo sapiens
atgggagaccaccgggatgggcagccggcccgctggggctggaggcacgggcccatcaacgtgaaccattacgccagcaagaagagcgcagccgagagca

SEQ ID NO: 833422 - DNA, 100 bp, Homo sapiens
ggaggggctgcgcaagcggttgtcccagcgcctcaaagtgcccaaggagcgcctggctcttctccacaaagacacgtaatcattaccaaatgaggaggaa

SEQ ID NO: 833423 - DNA, 100 bp, Homo sapiens
ggcgagatcgagctcgagctgcagcggatacagaagatcattgagacactgacacagcagcttcaggcaaagggaaaagaactaaatgaattccgggaaa

SEQ ID NO: 833424 - DNA, 118 bp, Homo sapiens
tttgttttcaatgacaccaagttggacgctatgctggaagaatttaagaaagaactctcagaaattgagcccaatgtattccttcgaccttttctggaagtgattcgctctgaagata

SEQ ID NO: 833425 - DNA, 98 bp, Homo sapiens
aagcttcttctggttggaaacttgtcaaatttcatcagagagtaaaacttgtctcggcacagagtcaagtaaagaaagccaacatacagtggagcccc

SEQ ID NO: 833426 - DNA, 100 bp, Homo sapiens
cctgcgctgcctgcccgagccggagcgccagctcagcgtgcccatcccggggggcagcaacggcgacatccagcaaggtcatttggatccaggattccta

SEQ ID NO: 833427 - DNA, 100 bp, Homo sapiens
aattccttttcgaccttcaatccagttccaaggactccacggggtataccaagcttggctacgcaggcaacactgagccccagttcattattccttcatg

SEQ ID NO: 833428 - DNA, 100 bp, Homo sapiens
acctggggaactgctctactactgccatgaaactgtttgatgactggatggcatccaatggaactcaaaggttgaggaacaggttagcaccactgagaga

SEQ ID NO: 833429 - DNA, 99 bp, Homo sapiens
aatttcaacgtggcccatgggctggcatggtcatattacatcggatatctgcggctgatcctgccagcctgtgactgtgaccccaggggcattgagacg

SEQ ID NO: 833430 - DNA, 100 bp, Homo sapiens
cttcttcctctcggtcgccatgcatcagatcatgcccaaagcggagctccctgggtcctcagcagtgaggctggcctccctgcgtgacctgcccgcccag

SEQ ID NO: 833431 - DNA, 98 bp, Homo sapiens
ttcgggagaacctggaggaggaggccatcatcatgaaggacgtgcccgactggaagctcttcggggacgtctgctacaactgcagccatgtgattgaa

SEQ ID NO: 833432 - DNA, 100 bp, Homo sapiens
gacgttattctgatctcaccaccctggtggcctttccctccagctctgtctatcctaccaagcaagttgtcctcgaagaaggtacaattgcttttaaaaa

SEQ ID NO: 833433 - DNA, 100 bp, Homo sapiens
gcaacttgttcctgagctgtgcaaccaatcagagtccagtggagaagcaaacagctaccggacatccagcatcatatttaagtgtgatgaagatgaggac

SEQ ID NO: 833434 - DNA, 100 bp, Homo sapiens
tggctgtgctggccttagtgccccaggatcagggaggactggattatacttactcagctgttaagagtaggcaatttcttcagttcttccacaagaaatc

SEQ ID NO: 833435 - DNA, 99 bp, Homo sapiens
ctcgccgtggtcaagttcaccatgagaggacagtgacaataccctcccctcccttgggctggacccctctctacagctaggagccaatggcagaagaca

SEQ ID NO: 833436 - DNA, 100 bp, Homo sapiens
ctggggagtctgattcagatgacaactgtacagatgtcactgcttccttcaaaatgtctactgttcacgaaatcctgtgcaagctcagcttggagggtga

SEQ ID NO: 833437 - DNA, 100 bp, Homo sapiens
cgagggcgaagacgagatccagttcctgcgaactgtcttctgcatggcctcctgcttgctgctttcaccattgctggtggatggcatctctgctgggaca

SEQ ID NO: 833438 - DNA, 98 bp, Homo sapiens
gacgaggaaagaggaggaaaacaaaagctgctacttatggaagatacaaaggtgttttagagcactttgctgcaagggaccaccacctgcacgaccag

SEQ ID NO: 833439 - DNA, 100 bp, Homo sapiens
tggttcgaatgagaaaccagtcccttggacagtctgcaccttctcttactgctggcctggttcttctgagctatgaaggggcccagatttaagggctatt

SEQ ID NO: 833440 - DNA, 100 bp, Homo sapiens
caagctgagaaagtcatcgatggcaccccctgtgaccagaacggcacggccatctgtgtgtctgggcagtgcaagatgaagatgacgccaacagactcgg

SEQ ID NO: 833441 - DNA, 99 bp, Homo sapiens
gggcagagaccatgtttgacaagacgcggctgccgtacgtggccctcgatgtgctctgcgtgttgctggtccgatacatacttctgcatgtctatgcga

SEQ ID NO: 833442 - DNA, 98 bp, Homo sapiens
tgacaacatttttccttttccgataatttttatggtgggacgaggatacctgtctccagatctcagtaaggtacggagtaactgtccaaaagccatga

SEQ ID NO: 833443 - DNA, 100 bp, Homo sapiens
gcccggtttggcactgctcctgctggccgcctggacggctcgggcgctggaggatcttagtaagagccctaagaccatgaaaaagctgctgcccaagcgc

SEQ ID NO: 833444 - DNA, 100 bp, Homo sapiens
ctctagctattgccttattttttctcatggatgttcttcttcgagtatttgtagaaggggcttccgttacaagatgaggtctgtgtatgctcacttcccc

SEQ ID NO: 833445 - DNA, 131 bp, Homo sapiens
gaagagaagcagaattatacctagaagtctactaatggacagttagtcacccacctacatgttgaggctattgagggcacctacattgacaagaaatgccccttcactggtaatgtgtccattcgagggcg

SEQ ID NO: 833446 - DNA, 98 bp, Homo sapiens
tgctagcaccatgcttgtacagcctgcagaaccggccaattcctgtccccccagcagcatggcatcgtgtgctgaaccctctgagccctctgccccac

SEQ ID NO: 833447 - DNA, 98 bp, Homo sapiens
gccggtggagcagctgggctcggcgctgaggtttcgccctggctacaacgaccccatgtcagggtactccaaagattcaggtttactcacgtcatcca

SEQ ID NO: 833448 - DNA, 98 bp, Homo sapiens
aaaacccttgggtgcagatcatgatgtttaagaacatgacgccgtcacccttcctgcgattctacttagtgtctttctcgagaagcaggtggaaacat

SEQ ID NO: 833449 - DNA, 100 bp, Homo sapiens
gggacctggactatgagaagaggaacgagttgaagcagttaatatggctgaaggaatcattcacgacacagaaaccaagatggaagaattcaaggaccaa

SEQ ID NO: 833450 - DNA, 100 bp, Homo sapiens
acgcaagcaaaatgcgttaggaaaatgtgatgcatgtctcagtgtttgatgaaggccggaacaactttgaaggggaggtcaccaaggagaacctgctgga

SEQ ID NO: 833451 - DNA, 100 bp, Homo sapiens
caaaaacaaaattctgaactcaggacttggcaagtttattacagaggtcagctgggaagagctaccactttaagtgtaactcctgaaatggaaagagtga

SEQ ID NO: 833452 - DNA, 99 bp, Homo sapiens
cgctgagttcctgcgtacctatgccagcacagagcaggagcaggatgcagaggagaacggaaaacgggccttactatacatcatatcccccatcaccag

SEQ ID NO: 833453 - DNA, 100 bp, Homo sapiens
tgagcttcattcagatgtggtggaatatgccaaggaaaaactggagagcttcatcaaaaatagtgatagctttgataagagtgttgtggtgcctgtaaag

SEQ ID NO: 833454 - DNA, 98 bp, Homo sapiens
ggcaaggaggcagcctgtggaggaactgggacaaagtggccttggagagtatgcctctgctaggcttcaccattgctccagaaaaggaagagggcagc

SEQ ID NO: 833455 - DNA, 100 bp, Homo sapiens
agcactgactttcagctatggaatcgggtggctgttgcaccacgccctccctcctgcccctgaggcccggaagccaggcgaggagcccaggaggcctttg

SEQ ID NO: 833456 - DNA, 112 bp, Homo sapiens
tgaccccaaatcttcttttcagagagtagctggagtgtaccttttcatgatcatctggcagcacttttctgtagaaggtcagttggaattcagggcattgctatttattcct

SEQ ID NO: 833457 - DNA, 100 bp, Homo sapiens
actttggtgccctcaacatctctcagagacgaaaggttgaactcccaccacctgatcttggaccaagttctgcactaaatcagacactcatgttgctgcg

SEQ ID NO: 833458 - DNA, 100 bp, Homo sapiens
ttctacttcgcatccgtccctttgtatcagggcttcctcatggtggggtcgcaatggaagaagagatcgccgcgctggtcattgacaatggctccggcat

SEQ ID NO: 833459 - DNA, 99 bp, Homo sapiens
cctgatgttgctaaatgtagacaatggttagagaagaattttccaaatgaatttgcaaaacttactgtaggaaagctatttttgatacaccagatgagg

SEQ ID NO: 833460 - DNA, 100 bp, Homo sapiens
ccagcaacagcagcaactgccgcacccttgaaaggaggcccctgccgtgtggacccgtaaaataaaatggggaaatgatcttcattggttagcatgtgcc

SEQ ID NO: 833461 - DNA, 98 bp, Homo sapiens
gaggacctgtggaaggcatggaagtcatcagaagggttctatggcctggatgagtctgacctcgacaaggtcttccacttgcccaccaccactttcat

SEQ ID NO: 833462 - DNA, 99 bp, Homo sapiens
gtagttgaagattataattcagtggataaaactaccacaggcagtcgatgatgtgaagaaaggttacatcaaagcagaagaaaagtcctatcaattaca

SEQ ID NO: 833463 - DNA, 98 bp, Homo sapiens
gtgcaatttgccaacgtgctcaccatggagcccatcgtgctgcagtacgtgcctcatgatcgcttcaacaaggccatctggctgctgtgcacaggcgc

SEQ ID NO: 833464 - DNA, 98 bp, Homo sapiens
gtaaaactattttgggaaacatttcatgagtttccattggaaaagaagaagaagtttctctgtgatcagaggactgctgaaattttggccaaaaacct

SEQ ID NO: 833465 - DNA, 100 bp, Homo sapiens
tggaacacccgctgtcctctggcctcccacacggagataggcctcatcaggcttctccgccgggagatagcagcagttttccaggacaaccgaatgatag

SEQ ID NO: 833466 - DNA, 98 bp, Homo sapiens
ccacagaatcacttaattcttccttgtccaatggaacaagtgatgctggaatttatgctttctcaagatgttgaacatgagcgtctctttgacctcat

SEQ ID NO: 833467 - DNA, 98 bp, Homo sapiens
ctctccctgctctacaacgtgcctgcagtggccgaggagattcaggatgaagttggcacattttacaatatgggataagctattggaaagatctcgga

SEQ ID NO: 833468 - DNA, 98 bp, Homo sapiens
gcagcattactttgctgtgaatgtgaagaatcagaaatctttactgattccaatatataattgaccctgcaatcctgcgcccgggccgcctggacaaa

SEQ ID NO: 833469 - DNA, 100 bp, Homo sapiens
aagtggtggaagcacggagcccacgactcccgatagtgagagacctgctcaagctctcttaagagattatgactcaaaagcctcgaaagtttgactgtga

SEQ ID NO: 833470 - DNA, 100 bp, Homo sapiens
tgcgggtgcctttgaaaatcaacgacaacttgagcacaggttattgacccagtggctccacgatatgttgcattactgaagaaagaagtgatcccagtga

SEQ ID NO: 833471 - DNA, 98 bp, Homo sapiens
cgtggctgcgtcaccgccgcccccccagacaagatggacaccgcggaggaagtttttcagttatgggacaaaaatattatatcaaaacactgaagctt

SEQ ID NO: 833472 - DNA, 98 bp, Homo sapiens
tcaccggcgtgccccaccatgtcagacgcagccgtagacaccagctccgaaatcaccaccaagaacccagtgacttgattgtaaaaatttacagagcg

SEQ ID NO: 833473 - DNA, 98 bp, Homo sapiens
tgcaaccccaagatgtcggagacacggtggaaacgcttatggtgcctcatctccagacatggagcccagctatgggggaggtctctttgacatggtaa

SEQ ID NO: 833474 - DNA, 75 bp, Homo sapiens
caaatgaacaaggatctcccaggaagcagaacatcagagagccatgcagagacgtgctatccgtgatgccaaaac

SEQ ID NO: 833475 - DNA, 98 bp, Homo sapiens
cagggtctgcagggcctgggccgccgctgctacctgcagcgccgtgtggcacgacacaaaaatcagagatcctggcaaatgggtgtttcttcccagaa

SEQ ID NO: 833476 - DNA, 100 bp, Homo sapiens
gtcaccaaatgggcatcatcatgacagcaggattgacatgtacgtggaggggacactggatctgctggaactgcttatcatgcatcctttcttaaaacca

SEQ ID NO: 833477 - DNA, 99 bp, Homo sapiens
gatagcaaagaagataaagttgacagcagaggcagagatgccacttcaaatgaacaacaagagcttttctgtcagaagttgcagcagtgttgtatactg

SEQ ID NO: 833478 - DNA, 131 bp, Homo sapiens
acaagaatttcatattttacttttattggtactccagtccaggcaacaaatatgaatgacttcaaacgaaacaactctgctcatggtgattacatgcaaaataacgagagcagcttaatagagcaagctcc

SEQ ID NO: 833479 - DNA, 100 bp, Homo sapiens
agcacggttccagaagatgagagggatgcaggtggtttagattagaatccaaacaaggaaaacgaatcaaaaacaggggtgagataaaggtcaatattca

SEQ ID NO: 833480 - DNA, 130 bp, Homo sapiens
tgtgtgaggcccaaaatgaggctggcagtgaccactgcagtagcattgtaatagtcaaagcaacattttgtgattttccaaaaataaaccatggaattctatatgatgaagaaaaatataagccattttc

SEQ ID NO: 833481 - DNA, 100 bp, Homo sapiens
accccggtacatctgaaagccgggaaatgtctctgcgatatgataccagctattttgtggagtattttgccttggatctcctgatggagaatggggagtg

SEQ ID NO: 833482 - DNA, 100 bp, Homo sapiens
ctgaacttgaaacacttcaaagaaacttggatttaactggccagaagcaggtattcaaagcagagaacaatccctgggtgacccccattgcagaccagtt

SEQ ID NO: 833483 - DNA, 100 bp, Homo sapiens
gctgagggagcaagaggtgtcggaggtctcatctttgaactactgccggagcttctgccagctccttcgagaactcatagaacggaagaccagctccttg

SEQ ID NO: 833484 - DNA, 100 bp, Homo sapiens
gaataagagatgtgattaatgtattccaccacctccgccagttaagaggaaaaaggtggacttaggtgaaggcaagatttgcttctgttgtgaagaattt

SEQ ID NO: 833485 - DNA, 100 bp, Homo sapiens
gtgaaatttgtgaagagaaatgatatcatcaaaattggtcactcagcctctgaagaagcttcgggttcagactcaggcagtcagtcggaaagtgagcagg

SEQ ID NO: 833486 - DNA, 100 bp, Homo sapiens
aagaccttcatatttcccaagatgccactggtgaagaagtgtcatcttgcattacaacatataagaagacaccacctccagtcccacccagaactaccac

SEQ ID NO: 833487 - DNA, 98 bp, Homo sapiens
gccatggagcccgactcggtgattgaggacaagaccatcgagctcatggttattaatgctgcactggctttagcagcaaaaccacagagtaaactggc

SEQ ID NO: 833488 - DNA, 98 bp, Homo sapiens
caacatcgctatgcaggtgcggaagctggtgggcactcagcaccctctgcttaccacagccaggcttctctgcagaatgtcaaacaaagatcgacaca

SEQ ID NO: 833489 - DNA, 100 bp, Homo sapiens
acaccgagaagctgatccgcgagaaagacgaagaggtcgcaatggaagaagagatcgccgcgctggtcattgacaatggctccggcatgtgcaaagctgg

SEQ ID NO: 833490 - DNA, 98 bp, Homo sapiens
ccaccagggtatactggctcctcttgtgaaccaataggagctctgaacccaaaaagagcagcattcttcgctgagcgttatgaatcatgggaagatga

SEQ ID NO: 833491 - DNA, 98 bp, Homo sapiens
tcgacatcatcatcttttcttgaaaacatacatatgatagttgagaaagacacatattctgatcatgaagaaataaacacaagttaaatatgactaag

SEQ ID NO: 833492 - DNA, 98 bp, Homo sapiens
gcctccattacactgctgagtcacacacaacgcttgttatgttttcatcacttctctccagaaggtaatggaactgctggtccatctgaataaacgta

SEQ ID NO: 833493 - DNA, 100 bp, Homo sapiens
gactctggaggaggagctgcaggaagcgatccggagggcgcagtctgggttctgcccgcacacattcctcgccaccttcttggtgtctgagaacctccag

SEQ ID NO: 833494 - DNA, 101 bp, Homo sapiens
gcggacagcatcagcctcgagctgcgcaagcccgacggcaccctcgtctccttcaccgccgacttcaagaagtttctttgttggaacgaagctcaactcat

SEQ ID NO: 833495 - DNA, 100 bp, Homo sapiens
ccgcatcctagccgccgactcacacaaggcagggtcaaatacaacctgaactccctgtcacatgatacagccactgggcttatacagtatgcattggacc

SEQ ID NO: 833496 - DNA, 136 bp, Homo sapiens
tcaacaaaggatgccacggttatactctgcaaggtggtgttccagtggcaaacagctgtataaactcttgtaaacaggcctccctccacttcaatgtctataccaattgctggtgaatctgaatctttgcaagaag

SEQ ID NO: 833497 - DNA, 98 bp, Homo sapiens
ggactgcagcctcggcggtcagcaggataacaaagccattgacctttgccgattgtgttggggacgaacttcctttaggatgggaaaccgtatatgat

SEQ ID NO: 833498 - DNA, 98 bp, Homo sapiens
ggggccttccacaccccctccgtgggtgtgtggagcacgccaagatgtcccttgtgactgtccccttctaccagaagagacataggcacttcgaccag

SEQ ID NO: 833499 - DNA, 100 bp, Homo sapiens
gggccattttggtctccctttggtgaagcacaatcaggaactcctcctcccacatctgatggagctaccaatcatcagatctcctctgcctctggggtgc

SEQ ID NO: 833500 - DNA, 100 bp, Homo sapiens
accctggaggaatgtcagcaccagaccaagattttgcagccccagaccagacctcgtctctcgcctggaacagtgggaggagccgtgggttgaagaccgg

SEQ ID NO: 833501 - DNA, 99 bp, Homo sapiens
ggagcgcctcgtcgacatgagtgatgtggaggaaaacaacttcgagggcagagccttagaaaatttacgtgtatacctgtgtgagaaaatcatagctga

SEQ ID NO: 833502 - DNA, 100 bp, Homo sapiens
tctcagtcaaggcactcagctcaaatacacacacctgttgccattatagagctggaattaggcaaatatggacaggacgccaggaaagcatgtgcagatg

SEQ ID NO: 833503 - DNA, 99 bp, Homo sapiens
ccgcgatgtcagctcagtgctgtgcgggccagtgtcttcattggctgctctggcatggagctgatatcacacacgtaacaacgagaggttggacagcat

SEQ ID NO: 833504 - DNA, 100 bp, Homo sapiens
aagaagcccagcttttccatcctggagatctacaggatttatcaaatcgagtcactgtcaaggcggcaccttcctacttctgcccagccacagccctccc

SEQ ID NO: 833505 - DNA, 98 bp, Homo sapiens
ggaagatgaggacagcatggatgggctggagacaacagaaacagaaacgattgtggaaacaggaatcctatccatcttcttcaccgatatggtttgtg

SEQ ID NO: 833506 - DNA, 98 bp, Homo sapiens
aattttggaccagctttttcgtttcatttcctcactttgcgttgtagtcgtctcaaaggggattcagcaatggtgatggacccactagtgaaaacgac

SEQ ID NO: 833507 - DNA, 100 bp, Homo sapiens
agagtcaaccagaaagagattgggtacttaatggtgaactactgagttcttcattatgtctgatggagattatgattacctcatcaagtttttagctttg

SEQ ID NO: 833508 - DNA, 98 bp, Homo sapiens
agagttcaaggaggccttccagctgtttgaccgaacaggattattgcatcgagcttttagtgtcttcttattcaacaccgaaaataagcttctgctac

SEQ ID NO: 833509 - DNA, 100 bp, Homo sapiens
agtcagcctggctgccggcttgttcttactggccctgagtctttgggggcagcctgcagaggctgcggacacatgctaaccaagagtgagaagaaccagt

SEQ ID NO: 833510 - DNA, 98 bp, Homo sapiens
ggagacgggtgaggtacaggctcagtctgcggccaagactccgtcctgcaagggaacctcagaacctgttctggatccacagcaaatccaagcatttg

SEQ ID NO: 833511 - DNA, 100 bp, Homo sapiens
ttccaagtcagctccatccatccccaaggagaacttcagttgcttgactcgtttggatcacaaccgagctaaagctcaaaagttaccccccaagcgtcca

SEQ ID NO: 833512 - DNA, 98 bp, Homo sapiens
gagatgtgagatggcttccactggagaggagcacatggatgaagtatgctcctcgcagcttctaacttcagtaaggcgcatggttttgacccttaccc

SEQ ID NO: 833513 - DNA, 100 bp, Homo sapiens
catcattgcagctgcatgttcaagaagtggccggagagttctgcatgttgattcgttgttcctactgaaggattggtctccatattaaagaagaggaatg

SEQ ID NO: 833514 - DNA, 98 bp, Homo sapiens
aggagctagagcgaatactggaagagaataaccgaaaaattgcagaagcacaagccaaactgtacaaaactttttaccaacaaaaaaaagcaagtagt

SEQ ID NO: 833515 - DNA, 98 bp, Homo sapiens
aatgaatgtctaattatcacagggaatatccccggctcggctgtgctggtgtttgacatccatgtgatcgacttccacaacccttcggactccatcag

SEQ ID NO: 833516 - DNA, 99 bp, Homo sapiens
acagaatcaccagcactggctgaagattcatgatgttgctatcaaaagttgagaaattgtcagaagaaatcatggagataatgcaaaatttaagtagta

SEQ ID NO: 833517 - DNA, 100 bp, Homo sapiens
gtgccttagtgttcctggagaggaggatttcagatctagccagggtgaacgcccgactgcaagctgggaaaaagacctcgatgaagttctgcagacccac

SEQ ID NO: 833518 - DNA, 99 bp, Homo sapiens
tttgctgtacatcgtattacacctgaggaggccaaggctcttgtcaggatggtgaagctgttcatcggaaacctgccccgggaggctacagagcaggag

SEQ ID NO: 833519 - DNA, 99 bp, Homo sapiens
gaaagaggaggaaaacaaaagctgctacttatggaagatacaaagggtcacagtaatgaaaggcagtaatagaaataaggatcattcagcagaaggaga

SEQ ID NO: 833520 - DNA, 100 bp, Homo sapiens
caatcgaaaggccacaagaccccttggggaaaatggaatctgaaccctcagcagttttataccatgttccgggaagatgatgacgacgatgaatgtgggg

SEQ ID NO: 833521 - DNA, 98 bp, Homo sapiens
gataatgaaagtcttggtggattttctattgaagatgtccaaaaggaaattaaaagaggcacgaagctgatcagtgtactgttacccggacataccta

SEQ ID NO: 833522 - DNA, 99 bp, Homo sapiens
atgttttgaaactggcaaaatcagttaatgaaattatcaggaaggagttttcaggacctcctgccagaaatcagacgtaaaagaagccattatagcaag

SEQ ID NO: 833523 - DNA, 100 bp, Homo sapiens
gaaggacctggaggcgcacatcgactcggccaacaagaaccgggacgaagccatcaaacagctgcggaagctgcagactcaatatcaagacaggcaaact

SEQ ID NO: 833524 - DNA, 100 bp, Homo sapiens
cagccactaactacaatcaccatcttgttggtgcttcctcatgtattgaagaattccaatcccagttcatttttgtctagtgatccttcactgtgtggtg

SEQ ID NO: 833525 - DNA, 100 bp, Homo sapiens
tctgtcactctgacatcagtgagtacagagaatggaatcaccttgaaaatgccacagcagaccatggcaaaagttataaccaccgtactgaagttccctg

SEQ ID NO: 833526 - DNA, 98 bp, Homo sapiens
attctcgtactcttaataaacacttcgagagttcttccaaagtcgcccaggcaccttctccatgcattgcaagggagcagtatgcagaggggaagatg

SEQ ID NO: 833527 - DNA, 98 bp, Homo sapiens
ccggtggagtatggcaaggacagttgcatcatcaaagaaggagacgtggggtcactggtgtatgtcatggaaggtgactattatatggttaaaaagat

SEQ ID NO: 833528 - DNA, 100 bp, Homo sapiens
cctgtttttggaagcgactaggttggtccgaatcatccaggaccagtggctgtaggacaatttcaccggtcatttcgtcgagatagtttgtctccttact

SEQ ID NO: 833529 - DNA, 102 bp, Homo sapiens
ttgtacttggaaaatactcagtttcctgcttactgcttcattatggattatacagacaagttggatggcttgaggactggtactaaaaggaaacgtgactgg

SEQ ID NO: 833530 - DNA, 99 bp, Homo sapiens
aaaatctctaaatgcagattccagaaaaattacagcacatctcagtgaatttgcaagtgagagagtggactccagagattgtcatttcaggacactttg

SEQ ID NO: 833531 - DNA, 100 bp, Homo sapiens
cggctgcacaactgcaggaacaccgtcacgctgctggaggagcctagggactccacgtaccccagctgggtctcattgttccagaactgcattagttaag

SEQ ID NO: 833532 - DNA, 98 bp, Homo sapiens
gtaatcctgggagcaccagcgctgccacttgtacccgcagacattatgaaagataaggagggttcctgcccccaggtgaacattaactttccccagct

SEQ ID NO: 833533 - DNA, 100 bp, Homo sapiens
gaatggaacaaaccttacctttattggagacaaaaccgatgggaaggccattgtgactatgtggtgattacagttgtcttactactgagtttcctactga

SEQ ID NO: 833534 - DNA, 98 bp, Homo sapiens
gtgaagttctttaagcccccatatctaagcaaaggaactgtttgtggggacattcatggacaattctttgatttgatgaagctctttgaagtcggggg

SEQ ID NO: 833535 - DNA, 99 bp, Homo sapiens
gtctggcaacggcgaccgcctctgcttcaatgtgggccgggagctgtacttctatatctacaagggggtccgcaagttctttggggtgactttcaagat

SEQ ID NO: 833536 - DNA, 100 bp, Homo sapiens
ttgctgccaactatagagatgaaaattcacagctgctgtgctccattgaagtgacttgtgaatcagccagtgtgatggctgcgacactggctaatggtgg

SEQ ID NO: 833537 - DNA, 98 bp, Homo sapiens
aaagccccaatcttagcaagtgcggggaagagctgggtcgactcaaggcaacttcagagtggacgttggattacccccctttctttgcatggtttgag

SEQ ID NO: 833538 - DNA, 100 bp, Homo sapiens
cggcggcccagctctctctgacacagacttatctaaaaacagactggttgaagttccaatggaattgtgccattttgtatcactggaaattcttaatctg

SEQ ID NO: 833539 - DNA, 100 bp, Homo sapiens
ctggccctgatcctccagatccccacacagaacacccagatcattcccagtgaccccttctgggtgccaactactgaggaggaatacttgcactttgggg

SEQ ID NO: 833540 - DNA, 143 bp, Homo sapiens
ttgcagagtcgctaggtggaagtggatatagtgttgagagattgtcagttccgtatgtaccacaagtaacaggtgaaagaagaacgtccagaaaaaataccagatttaaaattattggtagagaagaaatttttggctttaca

SEQ ID NO: 833541 - DNA, 100 bp, Homo sapiens
gctttcccgattcttcgacaaagtccaggacctgggcagagactccaagacaagctcagccgaggtcaccatccaggtccggcaggttcggctattccag

SEQ ID NO: 833542 - DNA, 100 bp, Homo sapiens
gctggggctccctgtatgcatggtgtggggttggtgtgattagcttcgcagtctggaaagctttaggagttcacagtgaatataaatagtttctggaaag

SEQ ID NO: 833543 - DNA, 98 bp, Homo sapiens
acctgctcaagaccgccttccccagcgtccaggtgaaggtaggcaatgaagttgctacaggaacaggacctaataaaaagatagccaaaaaaaatgct

SEQ ID NO: 833544 - DNA, 99 bp, Homo sapiens
ggacatggtgtttcttaggacttcagaaaaagcaggttctgactcagaagatcttttggaagaattgctgtgctgtttgatgcagttgatcactgatat

SEQ ID NO: 833545 - DNA, 98 bp, Homo sapiens
gctgaggatgacaaaaaagccttcataggtgaagtattacagacacttagcacctgatcacttgctgcaaatatgtcatcgactaggacctcttcttg

SEQ ID NO: 833546 - DNA, 98 bp, Homo sapiens
gaatcctcaagagggggtcccgaggggctagagaagcagatggccttgtttttggacaaaaggcaacatgcaggttctggtgacttacggtggcgatc

SEQ ID NO: 833547 - DNA, 98 bp, Homo sapiens
gaactcaggcgcctcttcttagttgatgatttagttgattctctgaagacccctgtaaaagagcccaacagtgaaaatgtagatatcagcagtggagg

SEQ ID NO: 833548 - DNA, 100 bp, Homo sapiens
aaacagcggataaacttcagtgatttagatcaggacaccgagtttccaggtgtggttgcaagacccattggagaattcaggagcaatgctgactatcaat

SEQ ID NO: 833549 - DNA, 98 bp, Homo sapiens
cggggtcctcggcctcctctggttccagaaaagaaggcagacggtaacaagtactccttgctggattgaacttcatctgaatggacctctacagtggt

SEQ ID NO: 833550 - DNA, 100 bp, Homo sapiens
atcaaatggcacttcattggccacctacagaaacaaaatgtcaacaaattgatgggcctgaggagcgatgcgacaggcatgatggaggtcgagtcctcct

SEQ ID NO: 833551 - DNA, 100 bp, Homo sapiens
catctgcgaagtggttgagaagcctgtacctgttttatacttgcttttgcttcagcgttctgtggttgtcaacagattccaacaatgtctcacccatctt

SEQ ID NO: 833552 - DNA, 100 bp, Homo sapiens
agaatatgatacagatgtattcaaatggatcttcaaaggctcatgctgaagattcggttatggaccatcatttccggaagccagcaaatgatataacgtc

SEQ ID NO: 833553 - DNA, 140 bp, Homo sapiens
cgagacccggacagaggcaagcaggggcgccgtgggtgccagagaggcggaagaggaggcctgatggggagtcacagatgctgggaagtatggcccgaaagaaacctcgaaatacctcaaggttgcccctggctttaaac

SEQ ID NO: 833554 - DNA, 100 bp, Homo sapiens
cggcgcccccggacccgcaccaggtaattgtcatgagaaaaccctggacaacagccatgacaaacagaaatattttgacaactcacagtcactggatgct

SEQ ID NO: 833555 - DNA, 100 bp, Homo sapiens
caagctgaaccccaaacccaaattcttcgttctgtgcggcgacctcatccacgccatgccaggtgagactgtggagatgagaaggtggtggacactcgtg

SEQ ID NO: 833556 - DNA, 98 bp, Homo sapiens
cgcagcctgacttggagtatgggggtccttacgcctggattatgtttgagaccttcaacaccccggccatgtacgtggccatccaggccgtgctgtcc

SEQ ID NO: 833557 - DNA, 98 bp, Homo sapiens
gaaaagtcgcagcgagctggagccgccggaggctggtgagattggagagatgaaggatggagtcccagagggagcacaacttcagggaccggttcatc

SEQ ID NO: 833558 - DNA, 100 bp, Homo sapiens
ggagcgcggtgctgccggtggagcttcagattatctttctcaaggaatagatctttctggaatagaagtgatagaaaatgatctactttttattgcaaga

SEQ ID NO: 833559 - DNA, 100 bp, Homo sapiens
ccctgtgaacctgggaccagtgtgaatttggaagggatcgtgtggcatgaaacagaagaaggtcatggcaaaaccccaaaagatgccgcgtcagttcgag

SEQ ID NO: 833560 - DNA, 100 bp, Homo sapiens
tcagaatggaatgacgcctttaatgtgggcagcatatagaacacataggtggcctgccatgggtatccatggtgacaagagtcaacaagagcgtgactgg

SEQ ID NO: 833561 - DNA, 100 bp, Homo sapiens
tgaagaggtatgaagtggctggacgccgagtgctcttctactttgatgaggatggcactggatctttaaaacgcagtggttcctttagcaaactccgggc

SEQ ID NO: 833562 - DNA, 100 bp, Homo sapiens
ttggatgcactaaaagtcaccgccaatattgtgtttggatatgccacgtactctgtggatatccccttggacaaaactgtcgtcaataaggatgtcttca

SEQ ID NO: 833563 - DNA, 100 bp, Homo sapiens
gctccaaggcctgggccgcttcctgcaagaaaacaagcagcttctgcacgacgcactggcccaggacctgcacaagggaagcagtgggacttgcagttcc

SEQ ID NO: 833564 - DNA, 98 bp, Homo sapiens
ccctgtgaatgtgtttgctctcatgaacatgcaatgagaagactgatcaatctgattaccagagactgatgactgtggcggagacgattacagctctc

SEQ ID NO: 833565 - DNA, 99 bp, Homo sapiens
gctggttgttccgttgcgagctgcagctgcgatctctgtggtaggcccagatcagtgtgcgtgtgaccaccatggatgcagagctggagtttgccatcc

SEQ ID NO: 833566 - DNA, 98 bp, Homo sapiens
tgaggcaccacgtctctaccgagcacaaactccacgaagccaacgcccagctcaatctgaaattgaagtgtctgtctctgcaaggaatatcagaaggc

SEQ ID NO: 833567 - DNA, 102 bp, Homo sapiens
ccgccactacctcctggctgccgtgaataggcagcctaaagagaatgtgatcaatgggcaggactacgaagtgatgatgcagattgactgtcaggtgatgga

SEQ ID NO: 833568 - DNA, 100 bp, Homo sapiens
agggccaagggcaccatggctgaggtggagctggccctgctacagcgctcctaccaggacctggcctcgcagatcaacctcatccttctggaacgcctgt

SEQ ID NO: 833569 - DNA, 100 bp, Homo sapiens
tgactccataaactattggattcataacctgctccatgcttgaaaacatggggattggaattcgaccctacagcttggggcctgggctcctctgaccatc

SEQ ID NO: 833570 - DNA, 98 bp, Homo sapiens
tgctcttcatcctcttctgcattgggatgattactgtggaaccatgattattgatggagaagaagctccagttgcctacacgttggatgataccaaac

SEQ ID NO: 833571 - DNA, 98 bp, Homo sapiens
aatccatgcactagataagcaaacatttaaaggactcatatctttggaacatctgtgttgtctacatctactggcctaacaaaaacagtgtataatcc

SEQ ID NO: 833572 - DNA, 100 bp, Homo sapiens
ccttcgtccctgacatcatctctgtgcactgataataaccctgcagaaacatctgccaaagaaggtctgctgctttggtgtcagaggaaaactgctcctt

SEQ ID NO: 833573 - DNA, 100 bp, Homo sapiens
ctaaggagccctgccgaggagctgaaggccttcagagtccttggggtgattgacaagaactcggttgcctttgaggatgtggctgtgaacttcacccagg

SEQ ID NO: 833574 - DNA, 98 bp, Homo sapiens
cggaagaggaaggaacaaaaggtcccggaccccccggatctgacggggcgggacctggcgccaccttgcagattacatgaagcagatgacatttgaag

SEQ ID NO: 833575 - DNA, 51 bp, Homo sapiens
ctaaagtcgcacctgcggacgcacacagacaatgcagatcttcgtgaagac

SEQ ID NO: 833576 - DNA, 100 bp, Homo sapiens
tctaaactcatccttaaaggggtcatactgctgttggttgaatctggcgatgtggaacccatggatatggagggctgactatatacaccatgttttttcc

SEQ ID NO: 833577 - DNA, 98 bp, Homo sapiens
gcacatcctcatccgagcctttgatttgagtggcctaccatctgggtgtgaatttggccaggcagatatgcagaaactggttccaaaggatgagaagg

SEQ ID NO: 833578 - DNA, 100 bp, Homo sapiens
agcgaatcggtggccatgatctctagatatggacatttctggaattacagagccccctctacattgagcacaagacagtgacgaatccacattcttcagc

SEQ ID NO: 833579 - DNA, 100 bp, Homo sapiens
ctggtcccaagtgggtgtggagccttccattatgggaataggaccaattccagccataaagcaagctcggttgctgatgctattagaacaagccttggac

SEQ ID NO: 833580 - DNA, 100 bp, Homo sapiens
aagaagaggaaatgactgagtcccaggttcagaatttaacattacgcagccagaagttgggtgtattatctagctcacagaatggtccaccaaaaagcac

SEQ ID NO: 833581 - DNA, 127 bp, Homo sapiens
gatgatgatatccttctcaaccttgtgggatgtgaaaactctgttactgaagcaattctgtggtgttcttggtcacacatttatggagtttctgaagggcagtggagattactgccaggcacagcac

SEQ ID NO: 833582 - DNA, 100 bp, Homo sapiens
tattcctgggatattgtcgtccagagagttgggtccaaactcttctttgacaagagagacaactctgactttgctccctgtgctgtcaggaatctacagg

SEQ ID NO: 833583 - DNA, 98 bp, Homo sapiens
agaagttgcgaaggatccccaacggggaggccaacgtgaagaaggatgcccgctgtctgtagccccggcatggtgcccgtggccctgcccccggccgc

SEQ ID NO: 833584 - DNA, 119 bp, Homo sapiens
cagcaaatcacatacttagatggatttgatcaggaggataatgaagcgccggactctgaagaggaggatgatgaggagctgacagattgctgctccatgcattctgtccagtttcctaa

SEQ ID NO: 833585 - DNA, 99 bp, Homo sapiens
aggaggcccggcagtcgtgtcagaagaaggttttttattggcacctcagtctcaacattttcttttcggattcatgaggaaagagaaatcctggggttg

SEQ ID NO: 833586 - DNA, 98 bp, Homo sapiens
aggcgtggaaaatatcccagaccgactcagaattacagagctttccagagcttatataccttggcagcccaatggatccaatggtgatgaagagacct

SEQ ID NO: 833587 - DNA, 101 bp, Homo sapiens
cttttgcctctttctctcaggctttcctacaactcatgcccagcagcagcaagcaggttatccggtgttggctcctgctgcttactatgaccaaactggtg

SEQ ID NO: 833588 - DNA, 100 bp, Homo sapiens
gtggagatgtgattactagatcattatgtctctgctggatgaaccgaatcctaacagtccagccaatagccaggcagcacagctttatcaggaaaacaaa

SEQ ID NO: 833589 - DNA, 100 bp, Homo sapiens
gcagaaatggactcagggaagagactcacatgctttgtattatgcagatatgccagcagaagaaagagaaaagaaattggcttcctgctcaagacaccga

SEQ ID NO: 833590 - DNA, 98 bp, Homo sapiens
gctgtctctggggtctggctctgccccttttcttcttctgctgggaggttggggtctctgggagctctgcaggaaccacagaggacacattaataact

SEQ ID NO: 833591 - DNA, 99 bp, Homo sapiens
acaccccgacggcagtccatgacggtgaagaagggagaggccacagacatctgtgacccaaatccaatcctgatgctcatgctttgtgtctacatgtat

SEQ ID NO: 833592 - DNA, 99 bp, Homo sapiens
cgggccgggcggcctccggggctgccagagcagcaggggagagctggtgacggcctccaaggccatcattgaaaaggagtaccagccccacgtcattgt

SEQ ID NO: 833593 - DNA, 100 bp, Homo sapiens
gagacagcttgagaaaagggactttggaaaaaggctgtctctagacagcagtcttgtgatcttaccaatatatttgagtccttcctgcctcagttattgg

SEQ ID NO: 833594 - DNA, 100 bp, Homo sapiens
actgctatgggaattctgaatacaattgatacacttcttagtgtagttgaagatcataaagagatttaggcctattaaaggaaggcaggaagaactaaag

SEQ ID NO: 833595 - DNA, 99 bp, Homo sapiens
gaacagctccggtctacagctcccagcgtgagcgacgcagaagacgggtgatttctgcatttccatctgagttctggaggctgagaagtccaagatcaa

SEQ ID NO: 833596 - DNA, 106 bp, Homo sapiens
aacgacgttccatctgtggaaggacctaccaaccaggatcccaaaatggctgggcgaaaacttgctctaaaaaccattgactgggtagcttttgcagagatcatac

SEQ ID NO: 833597 - DNA, 100 bp, Homo sapiens
gcccccacccctctccgtccatggccccagatgacacttcagggcacacgtgtttcacgttgacaggtttgcttgggacgctagtaaccatgggcttgct

SEQ ID NO: 833598 - DNA, 100 bp, Homo sapiens
ggagcgcgcggcgggagagccgggggagcgctctcggagggagcgcgctttctttggagtcggcgaaacccgggtgcttcagaactgggccctttttcag

SEQ ID NO: 833599 - DNA, 98 bp, Homo sapiens
tggagggagatggtggccctaacacagggggaatgggagcctattgtccagcccctcaggttctgcggcatgaggaatttgaagaaggctgcaaagct

SEQ ID NO: 833600 - DNA, 99 bp, Homo sapiens
gcaggatggcgcggccgagtccccgtacggccacccggcgggtcaaaatgcagatcttcgtgaaaacccttaccggcaagaccatcacccttgaggtgg

SEQ ID NO: 833601 - DNA, 100 bp, Homo sapiens
agatggcaggagtcgggagctgcggcaactgatggagaagctccccgcagccaccgccacccattggaatggccaacaggggacctgcatatggcctgag

SEQ ID NO: 833602 - DNA, 98 bp, Homo sapiens
ggctttcaaggactttgatgttggcgatgtgattcgcctttgccagtctcatctcgtgtctgctttgttaagttccatgatccagactcagcagttgt

SEQ ID NO: 833603 - DNA, 100 bp, Homo sapiens
tgctaaccgacctcaaggtggccacctccctgctgctgctgctcttcgccatcttcatgggcctgcgggcctccaagtgtgtcccggcatggatatccgg

SEQ ID NO: 833604 - DNA, 100 bp, Homo sapiens
atggtgttgctgctgtactccttctccgccagctgaagatgagtggggtaaaaccccagacgccatgaaagctgccatggccctggagaaaaagctgaac

SEQ ID NO: 833605 - DNA, 100 bp, Homo sapiens
acatggagagtctggccttagcacatgcagatgagaagtccttaggttttcctcctccaccaggcgctccacctccatctcttataccaacaatagaaag

SEQ ID NO: 833606 - DNA, 99 bp, Homo sapiens
ttcgcgcccgccgacccgcgccctgctccctctcagcacctgggcggacgatgacctctcccgacaggatgacaatgatcccccaaaagaatatgatcc

SEQ ID NO: 833607 - DNA, 100 bp, Homo sapiens
aacgatctcgtaagaaggattcagttattgcttacaactcagaaggtaaaagtaatccaagtgaagtagtagaatttactacttgccctgataaaccagg

SEQ ID NO: 833608 - DNA, 146 bp, Homo sapiens
tcagaagaaggctggaaacagaaacccaacctcaatgccatccgctctctggaggccgtgatccgggtgcacacccaggtcagcgcacggatgaagagctggacctcatctttgaggagctgctgcacatcaaggctgtggcccac

SEQ ID NO: 833609 - DNA, 100 bp, Homo sapiens
ttacgccccctatcctatccgcaaacaacctaatctgggagcctgcaagtgacaacagcctttgcggtccttagacagcttggcctggaggagaacacat

SEQ ID NO: 833610 - DNA, 98 bp, Homo sapiens
cagataagtgcgaggaaatggaggaaggctacactcagtgctcccaatttctttatggaaggatctgagtctctccctgcggagacagccctgaagaa

SEQ ID NO: 833611 - DNA, 98 bp, Homo sapiens
ttcgcttcacggcgccgagccgcggtccgatgccggtggtggtgtgcacattgagccccggtatagacagttcccccagctgaccagatcccaggtgt

SEQ ID NO: 833612 - DNA, 100 bp, Homo sapiens
tctgcttgaagaactgaacaaggttgatgccttccctcccaatggttatggcttatacaacatagtggggaacgcatgggaatggacttcagactggtgg

SEQ ID NO: 833613 - DNA, 100 bp, Homo sapiens
tgaacctgtacgccacctgggaggtggaccggagctcgtccagctgcgtgcctagccacagcgtcctgtgtttactcatgaaaatattcaaggtgggggg

SEQ ID NO: 833614 - DNA, 101 bp, Homo sapiens
ctgttctgccggaatttgaaaagtgcctagatgcagaggatgctatttatggaagaaatggttatgattatggccagtgtcggcttcgtgtggagttcccc

SEQ ID NO: 833615 - DNA, 100 bp, Homo sapiens
caagatttaatgacctcaggtttgtcggtcgaagtggaagaggtcctggcctggccttcattgcctacccaaaagctgtgacaatgatgccgctgcccac

SEQ ID NO: 833616 - DNA, 98 bp, Homo sapiens
taagctcaactctagccagctaggttcctggtgctttgggggttccgctgtgtggcagctgattgcttccttcctgaggcttccaatctcaggaacgc

SEQ ID NO: 833617 - DNA, 98 bp, Homo sapiens
taggatttgttagaaaggagacccgactgcaactgctggattgctgcaaggctgagggacgagaacgaggtgacagatcagtcagtgaaagcatttgc

SEQ ID NO: 833618 - DNA, 100 bp, Homo sapiens
caggaaagtctaagggatatggctttgtctcctttttcaacaaatggaaactggcgatggaatatgagaggagccctctggaaagaaaaggacagaccct

SEQ ID NO: 833619 - DNA, 98 bp, Homo sapiens
gatagtgatgagccagctaaatcccctgaagatttgcctgccctcagtggttaacttttttgctgcaatcacaaagccaagcaatggggctggacaca

SEQ ID NO: 833620 - DNA, 100 bp, Homo sapiens
tttatccatatagtattttactaggtcatgaagggaagatggctgtggaaggtgttttaaagaatgccagaggattcaacatgagcatacctatgcctgg

SEQ ID NO: 833621 - DNA, 100 bp, Homo sapiens
cctagtagttcactacaatactggaggaattccaaggatatttcagacatggtcagatgttgaaggccagaggccggctctgctcatctgcacagctgca

SEQ ID NO: 833622 - DNA, 99 bp, Homo sapiens
taaaatgggagagaatgaagcaagtttacctaacacgtctttgcaaggttacaggaaatacaggaggcagaggaacaaataaaagacaccacgagaaac

SEQ ID NO: 833623 - DNA, 98 bp, Homo sapiens
gctgcctggccttcgagtgccctgagaactaccgccgctccgcagccacatacaaggcagatccaaccatccccaccgtggtcctacgatcagtccta

SEQ ID NO: 833624 - DNA, 100 bp, Homo sapiens
gtatattcggaaacctatcgattacacagttctggatgatgtgggccatggtgtcaagatgtgtgatattggtgatgcatctagaggcagcttatcatcg

SEQ ID NO: 833625 - DNA, 100 bp, Homo sapiens
cttggtgtgactatcagctcaggcctaattttaccatagcaatggttgtggatgatgtgggctgctggggcagtagcagccatgtctagcatcacctttc

SEQ ID NO: 833626 - DNA, 99 bp, Homo sapiens
tttacttcatttatttcattgtataacacatctatgaaggtcatcagactagtgctgagtcttggggtactggcagagctgtggctcgaattcccagag

SEQ ID NO: 833627 - DNA, 98 bp, Homo sapiens
gtgtggaggaagatgttccgggctctgatgccaggcccttccatactttgaccggctagactatgtgtccatgatgtgtaacgaacaggcctattctc

SEQ ID NO: 833628 - DNA, 116 bp, Homo sapiens
ctcgcaactcggcagcctccacccaccggcccaccctacatttagcgcatcatgtgatccgggtgtggacgatggcgctgacatccccagggagctggtggtaggcatctatgaga

SEQ ID NO: 833629 - DNA, 100 bp, Homo sapiens
gaccccacccgccgcacatccccagccattttcctgagttccctgatccccacacctacatcaaaactccgatgaagttctcgctggagaagctgcacca

SEQ ID NO: 833630 - DNA, 75 bp, Homo sapiens
cgggagctgcggaccgaggttggctcgatgctgttcccaggtactagcaaaggccagacgtcttactcaacaact

SEQ ID NO: 833631 - DNA, 98 bp, Homo sapiens
actgcgaggaaaatgagcagtctctgcccccgccggccggcctcaacaacaattgtggcaattaataaagacccagaagctccaattttccaagtggc

SEQ ID NO: 833632 - DNA, 100 bp, Homo sapiens
cggagcacctggtcctataggacctccaggatcaccagggcttccaggaaaagcaggtgcctctggatttccagacaatcatgacatcatctccatgaag

SEQ ID NO: 833633 - DNA, 100 bp, Homo sapiens
tgggacagcttctccgcctggctgcactgcgtgtgtgtggtgggcttcgacctggagctgggccaggccgtggagttccagttcagacatcataagagat

SEQ ID NO: 833634 - DNA, 100 bp, Homo sapiens
ccttattcctgagcattcaagccctgttcaagattgccagatatcccaggaaagtgtctattgaagacaatgaagtatatttgcctaatgatgaaatttg

SEQ ID NO: 833635 - DNA, 100 bp, Homo sapiens
tgcagggccccgagccggcccgggtcgaggttagtagcaaagatgaagattttcttgacctttctgttgatgtggagcagaatacatccattacccactg

SEQ ID NO: 833636 - DNA, 100 bp, Homo sapiens
gataattggagtccagcactaaccatttctaaagtcctcctttctatctgctcacttcttacagactgtaatcctgatttgttcccgacaaggagttttc

SEQ ID NO: 833637 - DNA, 100 bp, Homo sapiens
gttgaaagtgaaatgtcatgcctctgaaaatgaagcagggagaaggttttaaggtgaaaacgaagaaagaaatccggcatgtggaaaagaagagccactc

SEQ ID NO: 833638 - DNA, 100 bp, Homo sapiens
gaggcagcagtggcagtccatcgaggggaccaaactctccatcacccagggattcactccttctccagttgcacagccacacccttcagctggccttaat

SEQ ID NO: 833639 - DNA, 98 bp, Homo sapiens
cccatcgtgcgggtcttgcaaagggctgcccctgatggggcctggcaatgactgagcaggcccagccccagaggacaaggaagagaaggcatattgag

SEQ ID NO: 833640 - DNA, 100 bp, Homo sapiens
tcaggatcacagccttctctaaagaagtattcctctccaaagagctgcaggccttcaacagccttattaggctatttactgaggacccactggatgtcaa

SEQ ID NO: 833641 - DNA, 100 bp, Homo sapiens
cccaacttaaccaatgctctgcctcagggtgcaaatgccaaccaagaccaagatcactccatggatgaaatgacagctgtggtgaaaattgaaaaaggag

SEQ ID NO: 833642 - DNA, 100 bp, Homo sapiens
gcttcttctggaagaccagccaacaggaagtgctggactccctggtcagcaatgtcaacattgagctgctcaatgccctccgctaccatatggtgggcag

SEQ ID NO: 833643 - DNA, 100 bp, Homo sapiens
aagcatataagtggtcaaacaaggaccaaaagatctcagattgctataactgaaggtatatttgaacttccaaatctcacaattcaagctacaagagcac

SEQ ID NO: 833644 - DNA, 99 bp, Homo sapiens
gagattgcgagggagcgatgcggtgcagcgcggccaaacgtaccaagaaagtcgggatcgtcggtaaatacgggacccgctatggggcctccctccgga

SEQ ID NO: 833645 - DNA, 98 bp, Homo sapiens
aaggaggacgccggcgtcttctgctcaggatttcagatgcatgccaggtttccactgattgccagaactcgagatcactacacatggatccccaaaat

SEQ ID NO: 833646 - DNA, 100 bp, Homo sapiens
gaccccagcaaaagaaaaatattgctgtacctaaattcaagtgttggtaaatcatgcttattgctacagtttacagacaagaggtttcagccagtgcatg

SEQ ID NO: 833647 - DNA, 98 bp, Homo sapiens
acctgaaggagatcaacctgaggccgcagatgtcccaggatcagttcgacagcttagacaagcatacacaatggggaattgacttcttggaaagatat

SEQ ID NO: 833648 - DNA, 98 bp, Homo sapiens
ttctatcccaagaagtggtggttaatcttttacaagaaaccaaacaagcctttgaaagatgtcatagggggctatttttggagcattacaagatatac

SEQ ID NO: 833649 - DNA, 98 bp, Homo sapiens
aagattcatctttttcactaattgtggcattcacagggcccttccgagatatcaccgaagtattagaacaacgctacaggcctttggagccaacgttg

SEQ ID NO: 833650 - DNA, 98 bp, Homo sapiens
gagataaaaccttctgacccaccattggataatcagatgaaacattcttttgattcagcatcaaataaggtgctaagtgtggtggctcacacctgtaa

SEQ ID NO: 833651 - DNA, 100 bp, Homo sapiens
ccggaaggagatccgcagaggacagtcatcagatgtgttcagagcaacattgttttgttgacacaagcatttagaagaaagtttgtgattcctgacttta

SEQ ID NO: 833652 - DNA, 101 bp, Homo sapiens
caggagcctgccccgccctggggacgaagagctgcagctcctcctgtgcggcttcagcgccagtcagcaaagtaaataaatactgtgcttcttccaacttt

SEQ ID NO: 833653 - DNA, 98 bp, Homo sapiens
acacggcctgcatcgggcccacgctcagaaaagagtagttgaacagctacggaagaacctgatagtaaagcaagaacaaccggacaagttccaaatac

SEQ ID NO: 833654 - DNA, 100 bp, Homo sapiens
cgggcacctctgcagctgcagaagtgaaccggcaaatgctgcaggaactggtgaacgcaggatgcgaccaggtttaccaaagatgcaggtcattaggaac

SEQ ID NO: 833655 - DNA, 98 bp, Homo sapiens
atcatcataggcttatgtcttgctgcaggatggcaccaagcattatgaaaagcctaatggaccacaccattcctgaggtttaaaattcacggcaccat

SEQ ID NO: 833656 - DNA, 98 bp, Homo sapiens
cggccctcctctaatggagaagcaagtttttgcctacagcacggcgacaatacccaaagacagagagaccaggatcttagaaatgaagttgaaaaatt

SEQ ID NO: 833657 - DNA, 100 bp, Homo sapiens
gttcttgttctgtggagaataacggctgcacctggagattgacgcagagtgggcggcggtggtgctgggtggtgaaagtggtgaaaaccctgctactgag

SEQ ID NO: 833658 - DNA, 99 bp, Homo sapiens
aaattccccccgaagaagactcccccacatctgggttttggatacaaaggaccttacaatagaaaaagtagtgatcaatggacaagaagtcaaatatgc

SEQ ID NO: 833659 - DNA, 100 bp, Homo sapiens
ctcagactactgtgtgtggattcagaaagtcaagctgcaataggatctgtggctttggacacagcaaggtcacatggagagaaacaattagaagactatg

SEQ ID NO: 833660 - DNA, 101 bp, Homo sapiens
ccacctgcaagcatggcaaagactggcaaaagcacaaggattctcgctgtgacagagacaacaccgagtatgagaatcactcagcctctgaagaagcttcg

SEQ ID NO: 833661 - DNA, 100 bp, Homo sapiens
ttagcgtgagtgatcactctcaatcccgggggtgagcccctccagactccgaataggagatcaagagtttgattcattgcctgctttactggaattctac

SEQ ID NO: 833662 - DNA, 134 bp, Homo sapiens
agcaagttagtggattaaaatctcccaagaggaatgacaaacaaccagctcttcagctattcaaagtgtgattagagctgggcttggtggcttgcatctacagttccagctacccaggaggcagaagcaggagg

SEQ ID NO: 833663 - DNA, 100 bp, Homo sapiens
gacctaggtcgcggcgacatgtcatatttgatcagaaattggatgaaccttcgggatgctgagacagggaagatactctggcaaggaacagaagacctgt

SEQ ID NO: 833664 - DNA, 100 bp, Homo sapiens
cgcccgctccgcgctgcttcccccgcgccgcctccccgcgccgctcgcgcagccatgtccgaggagaagcccaagtaagactttgaccccgacgcaggct

SEQ ID NO: 833665 - DNA, 98 bp, Homo sapiens
gtcgcccacatgtggttcgacaaccaaatccatgaggctgacaccaccgaagatcagtctggacctaaaaaacatgggtgctaaaaatgtgtgcttga

SEQ ID NO: 833666 - DNA, 100 bp, Homo sapiens
gaaggagaggccctagaacccttcgcctcaacagcatcaagaagctgtccaccatcgccttggcccttggggttgaaaggacccgaagtgagcttctgcc

SEQ ID NO: 833667 - DNA, 100 bp, Homo sapiens
tgggcctccagcttcgcgcgctgttgggagccttcggacggtggaccctgcgcctgggaccgcgtccgtcctgactggattatggacagaacttggaaat

SEQ ID NO: 833668 - DNA, 100 bp, Homo sapiens
tgagctgtcactgccgaaaacaggccgcaagagaggctgaagccgacgtagcttctctgaacagacgcatccagctggttgaggaagagttggatcgtgc

SEQ ID NO: 833669 - DNA, 98 bp, Homo sapiens
gaatggccgcggtgtggcagcaagtcttagcagtggacgcgaggatgaccccataggaaatattaacctggccatggaaatcgctgagaagcacctgg

SEQ ID NO: 833670 - DNA, 100 bp, Homo sapiens
ttggaaacagaaggcctcttacggatccctggagctgccattagaatcaaggtggcccgaggcagccgggatgacagctctccccaggaatcctgctgcc

SEQ ID NO: 833671 - DNA, 101 bp, Homo sapiens
aaagaaatacttttgagtcggtggactgaacatgactgatgtatataggtatgggctacgtgagttcgtggtgattgcccctgctgcacacagtgacgctg

SEQ ID NO: 833672 - DNA, 100 bp, Homo sapiens
ctggggttactgtaaatgggaaggacaggcagagctaaacaagatgcagacagacatgctgaactatctggaagtccactgaaaagcaaaagcactagga

SEQ ID NO: 833673 - DNA, 100 bp, Homo sapiens
agatccatctgcaccacggtgctgctaaaccaggtggacaggtgaaatgtcagtatatctctgctgtggataaagttatatttgtggatgattatgcagt

SEQ ID NO: 833674 - DNA, 98 bp, Homo sapiens
ccaagttattcgtcagtgaggcggaaattgtggtgtacttgtgttaatccctatatcctgaagaagaacatgatcctcatgacaaatcatttctatgc

SEQ ID NO: 833675 - DNA, 98 bp, Homo sapiens
aagctggtgggcactcagcaccctctgcttaccacagccaggtcatcaccgagtggtcttctcacatcatccttcaggcagcaccaagagtcactggc

SEQ ID NO: 833676 - DNA, 151 bp, Homo sapiens
cagcaacctttgagggagaaggacatcatcatcaagagggagatggtgtcccaatacttgtacacctccaaggctgttggatggcaagcatgtggtgtttggcaaagtgaaagaaggcatgaatattgtggaggccatggagcgctttggg

SEQ ID NO: 833677 - DNA, 100 bp, Homo sapiens
caataaccagtccttcagagaacaagagctcatcaaacggatgattgatgagacatccagtggaggtgtcacaggcaatgacgtcattatgcacttcacg

SEQ ID NO: 833678 - DNA, 100 bp, Homo sapiens
ctggaatgtagcaataatgagaagttagaacctggctctgatgtggaggttaaagatgcagaactggataaagaaggttatccttctcaaccagttgaac

SEQ ID NO: 833679 - DNA, 142 bp, Homo sapiens
gatacagttaatattggagatgtatcctacaagttgaaaattcctaagaatccagaacttgtgccacagaactacacaggtagatcaatctacaacagcttttatgtgtattgcaaaggcccctgtcaaagagtgcagccgg

SEQ ID NO: 833680 - DNA, 99 bp, Homo sapiens
cggagagctgcaagccggtgcagcagccttcagcttttggcagcatgaaagttagcaatcaaccagatggcaacagcaccagattctcagagattaaag

SEQ ID NO: 833681 - DNA, 99 bp, Homo sapiens
tcgctggaaccatgtaaagaagttcctcgagcgatctggacccttcacacaccctgatttcgaaccgagcactgaagtttctgagtcccttcaacatga

SEQ ID NO: 833682 - DNA, 98 bp, Homo sapiens
gccctttctcctcggcactgtattctttacctgcttcccaatcccactgatgaggatcagcccatggagaatgtactactcatcacctcccacctgtg

SEQ ID NO: 833683 - DNA, 100 bp, Homo sapiens
ctactcatcaaggaagaaccagacataaatatttcttcaacccacccaaattcctttgacttcaaacttgaaccccagggcacagatccttaaggtcatc

SEQ ID NO: 833684 - DNA, 98 bp, Homo sapiens
agcggcagcatgcatctgatgctctctctccagtccttgctgaagagactttccgttacatgagatcttcagaggcagactggaaaactggacaccca

SEQ ID NO: 833685 - DNA, 100 bp, Homo sapiens
tacttcctctgtatagagcaactgttgaactcagctgcctgtagctgaaaatgtgtgtctgacatgcaagctcagtggggcagagacccgtggattgctg

SEQ ID NO: 833686 - DNA, 98 bp, Homo sapiens
gccccggcccctgccctggttccgttgcgcgccccggatgtggcgcggctgcgcgaggagcaggaaaaggtcaatgtgacggtggactacattagacc

SEQ ID NO: 833687 - DNA, 99 bp, Homo sapiens
aggtggaaggagggagggagccgcaggcgcagacccacccgccatgaagccccccgcaggactctgaagacctactgggtgagcaaaggcagtgccttt

SEQ ID NO: 833688 - DNA, 100 bp, Homo sapiens
ggaggaagtctatgaacccaaccctttcagtaaatacttggaagataacagcgacctcttttctgaacaggatcggaaactccatggtacagctcagcaa

SEQ ID NO: 833689 - DNA, 51 bp, Homo sapiens
tggggccattgaagacatcatcacaggccaggagaaacagaacaccgtgtg

SEQ ID NO: 833690 - DNA, 101 bp, Homo sapiens
agcaagcggtctctgagtcggagtccactccccaggtactctgtggatatccccttggacaaaactgtcgtcaataaggatgtcttcagagatcctgctct

SEQ ID NO: 833691 - DNA, 100 bp, Homo sapiens
gacatacctggaggactattcggcagagtacatcattcagcaaggtggctgggaacggaagtttgtaggtggatctggtcaagtgagcgaacggataatg

SEQ ID NO: 833692 - DNA, 100 bp, Homo sapiens
agcctcccgagtagctgagattacagaaatgagtggtggattggctccaagtaagagcacagtgtatgtatccaacttgcctttttccctgacaaacaat

SEQ ID NO: 833693 - DNA, 98 bp, Homo sapiens
gggcgtccgcggagcagcttccccccgcgcctctcttcgcctcgcctcgggacccgcggtccccgctcttgctgattcgaaatcagagcaaagcctct

SEQ ID NO: 833694 - DNA, 50 bp, Homo sapiens
gttctctaggccttttagaaaacatggtttctaagcatgaattgaggaac

SEQ ID NO: 833695 - DNA, 98 bp, Homo sapiens
aggtcttggtgctggcactgcagagccgagagcaggccgaggagtggctgaaggctaaagtggataatgagatccttaattacaaagacctggcggct

SEQ ID NO: 833696 - DNA, 98 bp, Homo sapiens
tgcctccagaaaatccctcaagatcgacctacatcagaggaacttttaaagattcgattacgtatcctccctggcacggagcaggaaatgctatataa

SEQ ID NO: 833697 - DNA, 100 bp, Homo sapiens
ggaggcctggactgcagctgccatgtaccaggccaccagggtggttctcttcccaaagtggaagccaaattcatcaattatgtgaagaattgcttccgga

SEQ ID NO: 833698 - DNA, 100 bp, Homo sapiens
atatcatgtatcaacgccagcagctccctctgccctatgaacagcttaagcacttttaccgaaaaccttctccccagctggatgaaaaagaaagtcggcg

SEQ ID NO: 833699 - DNA, 98 bp, Homo sapiens
ctccttgagtgatgaacaggagaattctcacaccctcctcagtcacaacgcatgcaacaagtttgtgaagaaatatgggaacctttttagcttggagc

SEQ ID NO: 833700 - DNA, 98 bp, Homo sapiens
ttttcttcagcgcccaggatgcagccggctaagggctctggaggccacgggcatgatgcttcgggtcctggtgggggctgtcctccctgccatgctac

SEQ ID NO: 833701 - DNA, 100 bp, Homo sapiens
ccgggtgtccccgcggcgcaggaggcggtggagcgcagagcgggcgagcgcgaataaaagccgccctcattctaggggagaatataatgtttacagcacc

SEQ ID NO: 833702 - DNA, 100 bp, Homo sapiens
cgctgctcaaggacacggtctacaccgacttcgacgcatttgatgaatacagaaatatcagccaaaaggacattgtggacagcataaaaggagaattatc

SEQ ID NO: 833703 - DNA, 125 bp, Homo sapiens
cagattcctcggagcaggatgaacagacagacacagagaaccttgctcttcatatcagcatgatgtaggtgcaaaaaactacagacatctctgtgctgtttattacaacaagaatcctgggtttg

SEQ ID NO: 833704 - DNA, 100 bp, Homo sapiens
aataagctatatactttggttacctatgtacctgttaccactttcaaaagaatgtatcctgtcaggtataatgtcagtgaatggcaagaaagttcttcat

SEQ ID NO: 833705 - DNA, 98 bp, Homo sapiens
acagagctgcttgcggccaagtacaagattatgtctggccactacctagatatttgtgccccgtctggatttctttagatgttttattttcaacagcg

SEQ ID NO: 833706 - DNA, 100 bp, Homo sapiens
gcctcctacgtttacctgtccatgttcaaaagaatgctgaaccgggagctgacacacctctcagagatgagccgatcagggaaccaggtgtctgaataca

SEQ ID NO: 833707 - DNA, 127 bp, Homo sapiens
tggggctataccgtgaagggcattcagaaatacaaagcaaagattgtttttgcagtcactcagcctctgaagaagcttcgggttcagactcaggcagtcagtcggaaagtgagcagggaagtgatcc

SEQ ID NO: 833708 - DNA, 99 bp, Homo sapiens
gcaactgcaagcattctgtggtctgcccggccagctctcgcttctgcaagaccacgaacacaggttgaattgaccaaagcaatggtgatggagaagcct

SEQ ID NO: 833709 - DNA, 100 bp, Homo sapiens
cctgctctattaccagaccaactacctggtggtggctgccatgatgatttccattgtggggaacttgaaatgcaggctcgagctcatggactttccctta

SEQ ID NO: 833710 - DNA, 100 bp, Homo sapiens
aaagttgtgtcagtgaatacaaacaggattgtcaccagacctgcaatctatggagcagattcggagaattatgagacctactgatgtccctgatacaggt

SEQ ID NO: 833711 - DNA, 100 bp, Homo sapiens
gcttctgtcctcagatcgactggatggttcctgtcacgttacaactgctagtttggacggagaaactaacctgaaggtagaatgtcatccgtatttcaac

SEQ ID NO: 833712 - DNA, 99 bp, Homo sapiens
tggaacttgccctgtctcctcgcagatgaggtagcacaggcggagtgcagcggaggcccctgccgctgccgtcatgccgttcccgtttgggaagtctca

SEQ ID NO: 833713 - DNA, 100 bp, Homo sapiens
cggcgcagaaatgaggcagaagcggaaagagtcgggccacaaaaagttaaaaagtaccatccagagaagcacagaaacaggcatggcagctgaaatgaga

SEQ ID NO: 833714 - DNA, 100 bp, Homo sapiens
gagctcataacccctactccacagctgtgagtacctcagacaccattcgcttttcacccaagatgatttgatgtcttataaaactctgatgaaccatgat

SEQ ID NO: 833715 - DNA, 100 bp, Homo sapiens
aagattctggccaacgcagacaccatgaaggtgctgggagtgcagcggcctctcctacagggtacctatgatggcgggcctgcatgagatgctggaagac

SEQ ID NO: 833716 - DNA, 100 bp, Homo sapiens
taaccccctctccctccttgcgcgttccgggtctcactctgagatttgcccacctgatgaccttgccagcttgccatcatgcaaagaaaatcctgaagat

SEQ ID NO: 833717 - DNA, 100 bp, Homo sapiens
ttgaaggagcagtctatctttgccctggccaacgtcaacattgggagcctcatctgcaatgtaggggccggtggacctgctccagcagctggtgctgcac

SEQ ID NO: 833718 - DNA, 99 bp, Homo sapiens
gtggaggttcgcggctctaacggggctttctacaagcatcaacaacagcaacttgtgattggcggtgaccggatattcagttgcacatccccacatcaa

SEQ ID NO: 833719 - DNA, 98 bp, Homo sapiens
cacctcctcgccagcagccgtccggagccagccaacgagcggacacgggtttctggtggaccgggatggacaagtgtaccagggctccttccatgaca

SEQ ID NO: 833720 - DNA, 98 bp, Homo sapiens
ctactcacagataggaattgaaggcatcctgacatcgaggcccaggagagaggagtccggtgtctacttgagaaacagctccccaatggcgactggcc

SEQ ID NO: 833721 - DNA, 50 bp, Homo sapiens
gaggagttccagaagcatgaagtgctacagttgaaactccagcagcgccg

SEQ ID NO: 833722 - DNA, 100 bp, Homo sapiens
cgttctatttctctagctattgccttattttttctcatggatgttcttcttcgagtatttgtagaaggctctctgatgtaaaggatggagtaaatcaagc

SEQ ID NO: 833723 - DNA, 100 bp, Homo sapiens
agagacgtcatacttggaaatggctgcaggttcagatcctggtacctgggctagcttggttcctttccaagtgtcaaataggacacccatcttaccggcc

SEQ ID NO: 833724 - DNA, 100 bp, Homo sapiens
ctcacatttccaagtacattctcaggtggagacctgatgatcctttcaaaaataaagccttgttatttagcaacaacacgcaagagttgcatccggatcc

SEQ ID NO: 833725 - DNA, 100 bp, Homo sapiens
ggagtcatttccaaaacttttcagctatcttcccatccaatacttggtgactggtctattcaagttcaagtgaatgtgcttgtgaatgacttcttcttgg

SEQ ID NO: 833726 - DNA, 100 bp, Homo sapiens
aagtaaggctgcctctggacggaggagtgaggggggcgaggaaacgcagaatagccaggccagaagaaggaaggcctgtggtgagtgggacaggaaatga

SEQ ID NO: 833727 - DNA, 115 bp, Homo sapiens
acagagctatgaacagaatatcaaacagattggcacctttgcctctgaagaggcagaaatccaggcagaacttgaacgtttggaaagagtcagaaatcttcacatacgtgagctg

SEQ ID NO: 833728 - DNA, 98 bp, Homo sapiens
tcagagaagctaatcgcctatttgcagtaaatcagaaaaacatgactgcattggagttacagccaagttctacttctgaatctatggatcaactacta

SEQ ID NO: 833729 - DNA, 100 bp, Homo sapiens
catcagccgcagcgagatgctggagatcgtgcagatcaccggcgtaatcaacccagcgttggacaaatactttccgtcagactctggagtgagaatcata

SEQ ID NO: 833730 - DNA, 100 bp, Homo sapiens
tgatgcaggtgccagatttggagctggggctactgctggcaacattcctgaaactggagcacccatcctaactgatgatgttagcctgcaggtgttcatg

SEQ ID NO: 833731 - DNA, 100 bp, Homo sapiens
agactgcagatcttgcccctcacccagaagagaaaaagaagaaacgttctggattcagagacagaaaaactcttgttcatctgatagtgaaacagaagat

SEQ ID NO: 833732 - DNA, 98 bp, Homo sapiens
agtgataattccatctgtgtgcaagaagagaggtacagaaagcagtcaacactgcccagggattgtttcagagatggacagagctcctccaggacccc

SEQ ID NO: 833733 - DNA, 100 bp, Homo sapiens
aaggaagaaaacacaggagccggagcagaagcaaagagcttttatgaaatgtggaagtgaggacactgctccagttattatatttgtttccaaaatgttt

SEQ ID NO: 833734 - DNA, 98 bp, Homo sapiens
tggaaggaaccgctctcgcttcgtcctacacttgcgcaaatgtctccggagacccgtgtacagtatcatctcagttggagttagaagaagcctttaga

SEQ ID NO: 833735 - DNA, 100 bp, Homo sapiens
ctttgcacattatgaaaagcgtcaagaagaggaggaagccatgcgtagggagaagatgtatggtcttatgcaaagggacttcctcacatgtttcagcagg

SEQ ID NO: 833736 - DNA, 98 bp, Homo sapiens
aaagacttaaacctcatggccccaggtctcactatacagatggaggagatgtataagaaagctcatgctgctatacgagagaatccagtctatgaaaa

SEQ ID NO: 833737 - DNA, 146 bp, Homo sapiens
tttcaaattccctttctttgaagccatatgttggtttgtagccaaaaacttgctggaaaccctgaaaggtgcttttcagtgggaagaattggaagaagatatcaggaagaagttgaaagattctggggatgtttcaaatgtaatcg

SEQ ID NO: 833738 - DNA, 100 bp, Homo sapiens
agccatcagttattcagtctccacaagtccaaacagttcaggtgagaagccttataagtgctcatgggagggatgtgagtggcgttttgcacgaagcgat

SEQ ID NO: 833739 - DNA, 100 bp, Homo sapiens
ctcggcccctgagctccaggccgtgcgcatgtttgctgactacctcgcccacgagagtcggagaaggacagaataacgggctcccagattcacaagcccc

SEQ ID NO: 833740 - DNA, 101 bp, Homo sapiens
ctctttctctcaggctttcctacaactcatgcccagcagcagcaagcaggctgcccccaagtgtaactccagcactgtgaggtttcagggattggcagagg

SEQ ID NO: 833741 - DNA, 98 bp, Homo sapiens
tttaggggattctgcaccaacactgcacttaaataagggcacacctagtcagccttccttgaatccagaagctggcaaacagcatcagccatgcagac

SEQ ID NO: 833742 - DNA, 100 bp, Homo sapiens
ctggggatattatcaaatctactactgttcatggcaggtgttaatgttgactttgcaaaatgatccacccactttggaaacaggggtagaggataaagaa

SEQ ID NO: 833743 - DNA, 100 bp, Homo sapiens
gaaccgtgcactatattgcagttggacatgagaaccgtgcaaatttctgatctagaggatgattatttcagaaactggaatcccaacaagccctttgacc

SEQ ID NO: 833744 - DNA, 100 bp, Homo sapiens
aacatttctgggtgacactcaacaggattcccggttcccgtgtcagtggctatgatgacacctcaagttatcactccccagcaaatgcagcagatcctcc

SEQ ID NO: 833745 - DNA, 98 bp, Homo sapiens
tggttttcatcacccccaaccccctgagcaagatttcctgggtcaacaggttacatttggccaaaatcggactcctccctgcatcccatgactcggag

SEQ ID NO: 833746 - DNA, 100 bp, Homo sapiens
catagactttcagctacttgaagatagccatcagccgctacgtgactcttttctccagaagctgaacatggttatgcctccatgttaccatacaataaca

SEQ ID NO: 833747 - DNA, 100 bp, Homo sapiens
tggctaacagaattggcaaatatcgcgaccagtccacaaagtccactgatgcagtgctcattttacaatagcccctcatatggaaaatttgaaatgcaga

SEQ ID NO: 833748 - DNA, 98 bp, Homo sapiens
tcctaggcgacgagacccagtggctagattccacctgctcctacgaagcccgactttgatggtcctcgagagaagatgcagaaactgggagaaggtga

SEQ ID NO: 833749 - DNA, 100 bp, Homo sapiens
taccatcatcctgagcaccttcctgctgattggctgggtggccttcatcatcacctatcccctggccataggaaaaggatacagagtagagtttcatgaa

SEQ ID NO: 833750 - DNA, 98 bp, Homo sapiens
tgtgtaacgactgtaatcaggttgtcaaaccgcaggcatttcaatcacattatgagtcctcgaatgccaccttgctgaccaatgcagagaagattgcc

SEQ ID NO: 833751 - DNA, 100 bp, Homo sapiens
cgtcggattgcccatgcacttgttgcagaaacagccaagattgctggactcgctgaagagagactacgcaggaaagccccagccacccatcaaatcagag

SEQ ID NO: 833752 - DNA, 98 bp, Homo sapiens
cggccatccgggcggggccgacggagcgcggcaggacttggctggacggcgcggccacggagaagggcgcggagactttgaatgtgattgatcctggc

SEQ ID NO: 833753 - DNA, 99 bp, Homo sapiens
acgaagaaaggatgatggcatttctcttttaatatctgatactcagcctgaaggtgctggagaatctggtaaaagcaccattgtgaagcagatgaggat

SEQ ID NO: 833754 - DNA, 133 bp, Homo sapiens
gaaaaagaggtcaataatgaaagtggagagtcacagaggggaacagatttcagtgtcctccttagctctgcaggtcaacaaaaatctctcatttacttcaccaccagcagtttcctcacaacagtctaagtta

SEQ ID NO: 833755 - DNA, 100 bp, Homo sapiens
aaagactgggccgttactgattgagctacgaggaccaaggtcaatctatgctgtatttgaatccgacgttaatctgaaaggaatccctgtgtatagattt

SEQ ID NO: 833756 - DNA, 98 bp, Homo sapiens
cggattcgcattcccaattttaggtggcagtcgcaacccatactattcggacagatggcacagaaaccgctgcgccttgcacactggtttttggctgt

SEQ ID NO: 833757 - DNA, 98 bp, Homo sapiens
gacgcctccaggatctgtcggcagctgctgttctgaggtatggagtcggcgggcattcacgagaccacctacaacagcatcatgaagtgtgacatcga

SEQ ID NO: 833758 - DNA, 100 bp, Homo sapiens
tataagatcccagaattcagcaacgatgttaatggggaggccaaagagacacagcccatttttttagatgtcaaataaggagttgtttccaccaagtcct

SEQ ID NO: 833759 - DNA, 109 bp, Homo sapiens
attctgaatacaattgatacacttcttagtgtagttgaagatcataaagaggagaacgtatttaccgggcagtcaaagatctattcctacatgagcccgaacaaatgct

SEQ ID NO: 833760 - DNA, 100 bp, Homo sapiens
ttcaagatcggcagaggcgccctcgatctcttttcagagctcttgagctttggggaacactgatatttgcatttaatggggaacaaaagatgaagaagga

SEQ ID NO: 833761 - DNA, 100 bp, Homo sapiens
ccgaagtgatttccagaggatttacactaccctgcttttacatggaaacatcatcacctctcttagaatggcacctgcttacctacccagaagtcttgct

SEQ ID NO: 833762 - DNA, 100 bp, Homo sapiens
gacaaactgggaaaaagtctacagggtgatccagcagcagctctgcttgaggataacttcaaactaatgtgtactaatgccatgatttacaataaaccag

SEQ ID NO: 833763 - DNA, 100 bp, Homo sapiens
ttctggcttcttaacttgcaccctaacagctcgacagaaccttggcgtccacaaaaaggcgtttagagaaaatggcagacgatattgatattgaagcaat

SEQ ID NO: 833764 - DNA, 98 bp, Homo sapiens
aacactccgaggccaggaacgctccgtctggaacggcgcaggttgccaagagggtgatcctgttgtcgggcacaccagccatgtcccggcccgcagag

SEQ ID NO: 833765 - DNA, 100 bp, Homo sapiens
accttaataaccagcggagctgacacagccaagtctagatgttgatggaatatatcgagttagtggcaatctggcaacaatacagaagttaagatttatt

SEQ ID NO: 833766 - DNA, 123 bp, Homo sapiens
tttgttgaaatgatccaaggagttgctgcttttccaggaatgaaagacattcaggatcaacttgaacgaatatttctgataaactgccagggagaagaatgagaagacaggagacaaactgtt

SEQ ID NO: 833767 - DNA, 100 bp, Homo sapiens
caggaagagcaaagctgtcctaggccaaccagagattcatctttcatgcagtgacatgttgataaaaaatgatggggcagtacgaataggaataattgat

SEQ ID NO: 833768 - DNA, 51 bp, Homo sapiens
ggccattgaagacatcatcacagtggccttgtccagctcggtcatgtgtcc

SEQ ID NO: 833769 - DNA, 100 bp, Homo sapiens
ctcctgagaagctgggactacagcatgaacaaggctcagttatgatgtttgagcaccttattaattctaatggaattaagcctgtcatggaacaatatgg

SEQ ID NO: 833770 - DNA, 100 bp, Homo sapiens
tgggaaaatcatggaagttgattactcagtctctaaaaagctaagggctgaaaacacagttaaatcactttcaaagttaaaagactattaagaacacaag

SEQ ID NO: 833771 - DNA, 100 bp, Homo sapiens
ctgagtcctgcccttctgtatcctgtgaaagacctgtcttgagaaaaggccagtgttgtccctactgcatagatcctggcgcccctgtgaaattgccttg

SEQ ID NO: 833772 - DNA, 100 bp, Homo sapiens
ttaagaaaacagagcgacgagcaagaagcagcccaaagtcgaatgattcagacttgcaaggttgaaatcacaaagattagacacctttttagataggtgt

SEQ ID NO: 833773 - DNA, 100 bp, Homo sapiens
caagcaatcctaccatgtcagccttcccagtagctggaactacagtgcctgtccattggggtcctggacatcttcgggtttgaagacttcgagaggaaca

SEQ ID NO: 833774 - DNA, 100 bp, Homo sapiens
cggcaaccaagaacatcctggagatattctgctaaacacaactgtggaagttttgccttttaaggtggcacgcactacccttcttcctggcctcctgaag

SEQ ID NO: 833775 - DNA, 100 bp, Homo sapiens
tggtgtccacgtgatcattggggggcacgattctccctctcctagaggcggaattgaatgatctggcacgggaccctccagcacagtgttcagcaggtcc

SEQ ID NO: 833776 - DNA, 100 bp, Homo sapiens
agatgagcttcttcagttagtaacccaggcagatgtggaaacagagatgcaacaggcacagaaagctgaaggtgctggagatgccaagtgaagtgtgtgc

SEQ ID NO: 833777 - DNA, 106 bp, Homo sapiens
cttgctcggccgatgaagtgcagaggtttttttctgatacagtttatgtaacttgatggaagaaaatggaattactccaaaaagacaagtgctcaagcagcaaaat

SEQ ID NO: 833778 - DNA, 100 bp, Homo sapiens
tctcagaagacagagggttttcttttgaggaaaatgtttataggaggccttagctgggacactacaaagaaagatctgaaggactacttttccaaatttg

SEQ ID NO: 833779 - DNA, 100 bp, Homo sapiens
tggaaagctttaggagttcacagtatgaacaagagaactgggcaacccatgatccacatctacctggacaaggaaacaggaaagcccaaaggcgatgcca

SEQ ID NO: 833780 - DNA, 100 bp, Homo sapiens
ccaggctccagttgtccgcggttcctcctcctgtcgctgcccgtgtgattactgagactcagcgccgactaccaggaacgcttcaaccccagtgccctga

SEQ ID NO: 833781 - DNA, 100 bp, Homo sapiens
cctgaaagagaaaggccaatcactgctgactaagaattcattatattggcttagtacacagaaattctgcagatggctttggtgtcaggatgatgctggc

SEQ ID NO: 833782 - DNA, 99 bp, Homo sapiens
tggaatgtatgcatatgctggctggttgaagagatggaagccaggcggctctttcagcagattctgtctgctgtggattactgtcataggcatatggtt

SEQ ID NO: 833783 - DNA, 98 bp, Homo sapiens
cgagcagcgtcatgtacccctgatgtacagttacccagcacgtgtacctcctcctcctcctattgctcgggctgtagtgccctcgaaacgtcagcgtg

SEQ ID NO: 833784 - DNA, 100 bp, Homo sapiens
accagttctaaatgtcagttataagccacagaaaattagtcccaaatcaactctcatttaagaaaaactactgaatatgacagcatcagcccaaaccggg

SEQ ID NO: 833785 - DNA, 98 bp, Homo sapiens
ttaggtgcttttatattcatctcaaaaacaaaattctgaactcaggacttggcaatttctcttcagcaacgggtagcagaattggaaaaaattaatgc

SEQ ID NO: 833786 - DNA, 99 bp, Homo sapiens
aacgaataacatgatggaatatggagactcatgcatctgtatgccgtgtgcgtggactgcctggaaggggttcacaagatcatctgcatcaagtgtaag

SEQ ID NO: 833787 - DNA, 100 bp, Homo sapiens
gatcttgcctgaaaatgaaccaggaagcagtatcatgccaggaaataaacatgatgatggtacgcaaagtgattcagagaacgctggggctcacaggcgc

SEQ ID NO: 833788 - DNA, 100 bp, Homo sapiens
cagcagttcaacttggacgtcagagaatgtgaacattgatcattcttagaagagctgctgtaacacataggggaagtgaaaactaacagatgaaagtttt

SEQ ID NO: 833789 - DNA, 100 bp, Homo sapiens
agacttgctagttaggattttattactggcagcatgtatatcttttaagcggccagcttgatgtccgggagctgatctctctctaccccttcctgttgcc

SEQ ID NO: 833790 - DNA, 99 bp, Homo sapiens
ttcgttccccccgagttcgacgtgaccgggaacacctttgagggggggccctcagcctcttggccttgaacgggctgttcatcttgattcacaaacaca

SEQ ID NO: 833791 - DNA, 99 bp, Homo sapiens
aagaaacaagtgacatcaactctttttcagtgtatgctgatggtagcatatgtttagatatccttcagaatcgatggagtccaacatatgatgtatctt

SEQ ID NO: 833792 - DNA, 100 bp, Homo sapiens
cgggaggacatctacaagcgggaactgcaagcacatgttgaccagataactgaaatggcagcagtaatgaggaaagccattgaaattgacgagcaacagg

SEQ ID NO: 833793 - DNA, 99 bp, Homo sapiens
gatgaccccttacgtggtgacacggtactaccgggcgcccgaagtcatcctgggtatgggctacaaagagaacggactcgggtcaagctggaaagcctg

SEQ ID NO: 833794 - DNA, 98 bp, Homo sapiens
cctgcagcgatttcttcgagctcgaaacatctctggcgttgttctggctgaccactctggtgccttccataacaaaaatgattctggggaccattctg

SEQ ID NO: 833795 - DNA, 99 bp, Homo sapiens
cctgcagtacctgcagaaggtctctggagacatcttcagcagtaatctatgccagcaattatgacaatgttagcagaccatgcagctcgtcagctgctt

SEQ ID NO: 833796 - DNA, 100 bp, Homo sapiens
gccccatggtgacggtggccctgtcagtggctctcttggccctcctgaaatgattgtagaaggcatgaaacaaaaaatgtggagtattgaaaatattgcc

SEQ ID NO: 833797 - DNA, 51 bp, Homo sapiens
ggtcatctcgcagaacgccatcaaccagcttggtatgtgtgcaacagagag

SEQ ID NO: 833798 - DNA, 100 bp, Homo sapiens
aggagcttcaggttgtccgagcatctgggaatgtatgctgatggtagcatatgtttagatatccttcagaatcgatggagtccaacatatgatgtatctt

SEQ ID NO: 833799 - DNA, 99 bp, Homo sapiens
ggaccttgtatggacagaactggctcaatgaccaggtggatgaaaatactaggaaaagtttatttaagttacgttctacatgggatgaaatattccctt

SEQ ID NO: 833800 - DNA, 100 bp, Homo sapiens
tacaagctatacgagtttatgttctactctgccagggaagaaattgtgataggaactgaggtaatggaactgctggtccatctgaataaacgtataaaaa

SEQ ID NO: 833801 - DNA, 98 bp, Homo sapiens
gctcgatcgctgcccgccgccagcatgttgggcgccccggacgagagctccgtgcgggtggctgtcagagcagcggaaagagctcagtgctagaaagc

SEQ ID NO: 833802 - DNA, 98 bp, Homo sapiens
ccagcagagccgggctgctgcagcagccaccagcgctgggacgcggcggcagcggcggcggcggcggccctccggacagaatgaccgagaacatgaag

SEQ ID NO: 833803 - DNA, 100 bp, Homo sapiens
tttgacgtgcaactcaaagacctggaaaaatggcagaataatctgcttccatcccgccagtttggagagcctacgactagatttgcatctttacgtcctg

SEQ ID NO: 833804 - DNA, 100 bp, Homo sapiens
caagcaatcctaccatgtcagccttcccagtagctggaactacagctctattatcaagtcctaaattttggaatgattgtctcatcggcactaatgatct

SEQ ID NO: 833805 - DNA, 100 bp, Homo sapiens
tgggacagatatgaagagtttgttggactcaacgaggttcgagaggcccagggaaaggtgacagagttcatccacacgctggagagccagcgcacctttt

SEQ ID NO: 833806 - DNA, 100 bp, Homo sapiens
tttatgttctattgtgcgcactggcaaacgtatgtttctggaacattgcgatttggaatgttacgtcggcgctgctaccgtgggtgctgctgcatggtgg

SEQ ID NO: 833807 - DNA, 100 bp, Homo sapiens
ctggtcagccttcagggaccctgagcaccgcctggtctctttcctgtggccagcccagcacaggaagtcctggagaacctgaaggaccgctggtaccagg

SEQ ID NO: 833808 - DNA, 99 bp, Homo sapiens
tctaattgttactcattccaatcaggctgctgatactttggctgtgaggcaaaaaaggagaatttatgatatcaccaatgtcttagagggaattgactt

SEQ ID NO: 833809 - DNA, 100 bp, Homo sapiens
ctggagtttgcagcccagtaccctcccacctttgaccgggtttcatggggaagggtatcgggaaggctatgaagaaggcagtagtttgggtgtgatggag

SEQ ID NO: 833810 - DNA, 98 bp, Homo sapiens
aaatctaggcttcgttgggcctttgaaaagccagctttatcttcaagccaggatgaagggagactgggcaagactcttacgccccacactgcaatttg

SEQ ID NO: 833811 - DNA, 100 bp, Homo sapiens
ctgactacgaatctgtgaatgaatgcatggaagcctctgcctgtgagtttctggatattgtagagctgctgctccagtctggtgctgaccccactctccg

SEQ ID NO: 833812 - DNA, 100 bp, Homo sapiens
gaccgtgccctggtgcgagctggcctgtctccactaactctggaccctaaaacagctcacccaaatctggtgctctccaaaagccaaaccagcgtctggc

SEQ ID NO: 833813 - DNA, 100 bp, Homo sapiens
ggtgcgctgctcaaggacacggtctacaccgacttcgacggggatgaattgcccgagctggacaacatggctgacaactggctgggctcgatcgccagag

SEQ ID NO: 833814 - DNA, 50 bp, Homo sapiens
ccccaactttccgcggagttcaaggccaagtcctgtatctgccatgtctg

SEQ ID NO: 833815 - DNA, 99 bp, Homo sapiens
ggtcggactcccgcggcgggaggagcctgttcccctgagcattagtgccagcagtagttcccaagggctgtctcagccatccacccagacgactcagta

SEQ ID NO: 833816 - DNA, 100 bp, Homo sapiens
cgctcagctttccctaaggcagccatcaaaagggtctgtaatattgtggcagggcaacgatgtatcaagaagctaacagacaatcagacttccactatga

SEQ ID NO: 833817 - DNA, 98 bp, Homo sapiens
ttgttggaaatggaacatacgggcaagtttataagatattcccactctggccactgcccaaaggggctcttatctgaggaatactgctgacttcgtgt

SEQ ID NO: 833818 - DNA, 101 bp, Homo sapiens
ctgaggtccagatgaaagagaagtttctggtcactccccaggattatgcgcgttgaacaagagatttttcaatcaagactttggaactacgaagatggaag

SEQ ID NO: 833819 - DNA, 100 bp, Homo sapiens
aagatggctgcagccaaatgccgcaaccggaggagggagctgactgatacactccaagcgtggttttcccggattgtgtgtaggtgtgagatcaaccatg

SEQ ID NO: 833820 - DNA, 98 bp, Homo sapiens
gctcttcaaactcacagacaacatacaggacgaattctgtgattgggttattatacccctgcattgacagacatctaggagaaccacataaatttaaa

SEQ ID NO: 833821 - DNA, 100 bp, Homo sapiens
gaaactgaggggacataatcatcactcagtagaaaatgcttggacagaagagatgagtactatttccactaaggcctagaattgcctactgtacaaatag

SEQ ID NO: 833822 - DNA, 100 bp, Homo sapiens
gaccttccccttcaactcttttctctcgggcttcatctcttgtgtggggagtttcatcctagcggaatatcctccgaatcctaaatctagagctccaagg

SEQ ID NO: 833823 - DNA, 100 bp, Homo sapiens
aggggaagaagatcaaaacccaccatgccccagaaattgatgatgcaatgcgcaactttgctgaaaaagtgtttgcctctgaagtcaaagatgaaggagg

SEQ ID NO: 833824 - DNA, 98 bp, Homo sapiens
gagctcggtacctgactgagggcagccgtggctcagtgaaagatagaacacagcaaggctttcctacagtaaagaagcgatccaagcagcggaagtta

SEQ ID NO: 833825 - DNA, 98 bp, Homo sapiens
gtgcgagtggggaagctgctaacccgacccggattggcgctgaggtggcccgtggggcagatctacacagactgggccaatcattacctagccaaatc

SEQ ID NO: 833826 - DNA, 99 bp, Homo sapiens
ttaggagcgcagtggcggcgcaaccagccttctagggcggcggaggcagtatttggcagtcgtattcagagataaacccctggagctatgggatgttag

SEQ ID NO: 833827 - DNA, 100 bp, Homo sapiens
ccagccagtgtcaacacgacaccggataaaccaaagacagcatctgagcacagaaagccagctgaggtgggtgtcctggttggcaaagaccggtcaagtt

SEQ ID NO: 833828 - DNA, 99 bp, Homo sapiens
gaagaaacggcgtttagagcaacagatcgtggatctgaaagtgacaagcattttagaaaggactgggcacttggagtcctgcatgccaaaatcattgca

SEQ ID NO: 833829 - DNA, 98 bp, Homo sapiens
cgccatgggccagtgcggcatcacctcctccaagaccgtgctggtctttctcaacctcatcttctggtcttatgcagggaaatatgtgccagccattg

SEQ ID NO: 833830 - DNA, 100 bp, Homo sapiens
agacaaacaattattgacactgtggatccttatcccatgggcaaacctcctttgcctagaggctatcacacgaaagaagattggcccatgcacaagctgg

SEQ ID NO: 833831 - DNA, 100 bp, Homo sapiens
gctgggctgaggcgccgcggtaccatgaggcgccggtgaatctggattgggaaagtcgacattaatcaactcattattcctcacagatttgtattctcca

SEQ ID NO: 833832 - DNA, 100 bp, Homo sapiens
cttacgaaaatttgtgcaacacatcaagagcttgttgattggtgctggctgtgccctctaccccttgggctgggacagtgaggaagtccggcagacttgt

SEQ ID NO: 833833 - DNA, 100 bp, Homo sapiens
atgtcacaagattgaccacattgatcacaacttagaaggttttgactccgtggtatcatctactgagaaactcagtcatccgaccacaagcagaccaaaa

SEQ ID NO: 833834 - DNA, 98 bp, Homo sapiens
ttcctcagatcctagagaaactggaacgagccagtaccaaaatgttggacaggtgacctggtactgcttgatgtatgtccccttacacttggtattga

SEQ ID NO: 833835 - DNA, 99 bp, Homo sapiens
aataaattcttttgaactagatcgagctgatagagaccctagtaacatgtgctattaccacagctactggcactccatggtctatgtgccacagatgca

SEQ ID NO: 833836 - DNA, 100 bp, Homo sapiens
aacgagaagaaccggaagctctttgaccttctggatgtccttgagttcaaccagcatgcatatgcgctagaacttctatttgatcagttgcatgaaggag

SEQ ID NO: 833837 - DNA, 98 bp, Homo sapiens
cgtcatggcctacccgggatacggaggagggatctttaatctcatgaagtacgacagctacagccgcttcttaaagtctgacttgtttttaaaacaca

SEQ ID NO: 833838 - DNA, 100 bp, Homo sapiens
atgtccttctctgaatgatgaatacttttactactgtgacaacattaacgacctccttaactacgtgttttgctcaagaaacttttgggaaacagtacaa

SEQ ID NO: 833839 - DNA, 100 bp, Homo sapiens
agagccgagccaggactatgtgccagccagccaggtagaatgtaagaaagctcagccgaaagaagtcatgttcccacctgggacaagaggccgggcccgg

SEQ ID NO: 833840 - DNA, 100 bp, Homo sapiens
aggccagagttgtgggccgccgtcggcagcaagaacagagagagaggtggacagatctgagagatactgaggtttgtggtaaatatgccagctctagaac

SEQ ID NO: 833841 - DNA, 100 bp, Homo sapiens
acatacatgttggctcgcacagatatggaaaatcttgtgaagatggttctggtaaaacaaccctcatgactaaactacaaggagctgagcatggcaaaaa

SEQ ID NO: 833842 - DNA, 100 bp, Homo sapiens
gataaacagtccaccatttgaccaaccaatgagtcgaaggtctcgtagagcttccttattccccacactgcttaatggccacatgccagtgccaatcccc

SEQ ID NO: 833843 - DNA, 98 bp, Homo sapiens
atgatttgctggcagctgctgacaaggttccagcaacagatagaaatgctttaagttcactctggggaaagctggcctctgaaatcttaatgcagaat

SEQ ID NO: 833844 - DNA, 98 bp, Homo sapiens
aggcattattggattcagtcacaacagatgaagacagcaccaggttccaaatcatcaatgaagcaagtaagggtcacagtgtcatccgttcagctacc

SEQ ID NO: 833845 - DNA, 99 bp, Homo sapiens
aacagggtgtggcagaagcagcaggaaagacaaaagagggtgttctctatgtagaccattcctcaagaattttgtatccaaggcccaaaagtttgttac

SEQ ID NO: 833846 - DNA, 103 bp, Homo sapiens
tataaagatcattccatggctccaagtttaaaagaactacgtgttttatccaacaggaattgcattttgtgaaaaaagaacaagaattttctgcaaggatcat

SEQ ID NO: 833847 - DNA, 123 bp, Homo sapiens
ggaaagcaccatgacgtccatccatttcgtggttcacccgctgccgggcaccgaggaccagctcaatgacaggaggaggaagccaagaatctggtgagcgaagccatcgcagctggcatcttc

SEQ ID NO: 833848 - DNA, 100 bp, Homo sapiens
tgattcccgtgattgcgttacaagctttgtctccttcgacttggagtctttgtccaggacgaacgtgctggccaaagcgctctatgacaatgtggccgag

SEQ ID NO: 833849 - DNA, 98 bp, Homo sapiens
gggcaataagctgctgttcaggtaccccttccagagaagccaggagcacccggcgtcccagacaacctcactctctatgtggaagtagcctgcaatgg

SEQ ID NO: 833850 - DNA, 100 bp, Homo sapiens
aagttcgagttccagccccacatgggggatgaggatcaagcaccccaacattgtagccctggatgacatctatgagagtgggggccacctctacctcatc

SEQ ID NO: 833851 - DNA, 98 bp, Homo sapiens
agtccagatgacaactatcttgttgcttgtggcccagatgactgctctgagctttggctttggaatgtacaaggagctgccaagatgctgctggactc

SEQ ID NO: 833852 - DNA, 100 bp, Homo sapiens
ccggggtcatcctagggaaaacactatcctctgagatcccagatcatgaggtcaaatgccgaggcagaagacagtctttaaagtgtaatcctgatgcttg

SEQ ID NO: 833853 - DNA, 100 bp, Homo sapiens
aaggaacaaaggaggagcaaccggatcctgcaacaaacaagtgactgggctgctgtttccccaggtgatctttgcagagctgtttcaacttccagcaccc

SEQ ID NO: 833854 - DNA, 100 bp, Homo sapiens
cggggacatgtctaaccccggaggccggaggaacgggcccgtcaagctgcgcctgacagctgtcactgaagtgtagagctcctgaagtctctcaatacat

SEQ ID NO: 833855 - DNA, 100 bp, Homo sapiens
aaaaagctgccctgagacggtgtcccgccgaaagagctccttaataagcatttatagtcagtttttggcagcaatagaatcactaaaggcattctgggat

SEQ ID NO: 833856 - DNA, 127 bp, Homo sapiens
aaggttcacttcaaggagactcaatttgaactcagagtactgggaaaagatgtagtgggcagcagtcagtgacaggtgtaacctctgtggatgacagcaacagttactggaggatacgggggaagag

SEQ ID NO: 833857 - DNA, 100 bp, Homo sapiens
gccatcttcggaccccccaacaccctctacgaaggcggctacttcaaggtgactgggtacctggatatgtgatcgagtattcttctgggtgtttctatga

SEQ ID NO: 833858 - DNA, 98 bp, Homo sapiens
gcgatcctgaatgggggcggcgtgcccgccggggggctagtggccacgctgcagagcctcgctcatctttgggtgaaaaattgtcgggatcttctgca

SEQ ID NO: 833859 - DNA, 100 bp, Homo sapiens
ctaccatgaatgaaatgaagagttattctcaagctgtcacaggatgcctatagaaggttcctattttaccagttccagagtgggaggcaaacgaggaatt

SEQ ID NO: 833860 - DNA, 107 bp, Homo sapiens
acggcaataaagcaaagaaacaaaagacaactctgcttttccagaaactgtgccaggatcacgatcccaccaaatattttggttgtgagctgggagcacagacccag

SEQ ID NO: 833861 - DNA, 98 bp, Homo sapiens
tgcaacttgacgggaacttttcaactgacttttacttttgacgaccaccatgactgagatcactgctgaagggaaatcctcattgacgattcaatttg

SEQ ID NO: 833862 - DNA, 101 bp, Homo sapiens
cttcattcagatgtggtggaatatgccaaggaaaaactggagagcttcatcaaaaatagtgatagctttgataacgccgacaccatgtggatccaggttcg

SEQ ID NO: 833863 - DNA, 98 bp, Homo sapiens
tgttgccgggtgatagttggagcggagactaacagtccacaggaagaggttgaactaaagaagttgaaacatttggagaagtctgtggagaagatagc

SEQ ID NO: 833864 - DNA, 100 bp, Homo sapiens
ctgatgaaaaatagagctgatcaccgttccagccccaacgtagcaaatattggcaaaacacttgaatgatggtaaaatcaatcagcttcctcttttcctt

SEQ ID NO: 833865 - DNA, 100 bp, Homo sapiens
cagttcccttggggactgggattggcatgctttagctatctgaacgaaacttccctttggggagttaagttttccagcaattctgtggtgttcttggtca

SEQ ID NO: 833866 - DNA, 99 bp, Homo sapiens
cctttctcacgatcccattttatttgcaaaagtggtgcgcataggcaagtcatttatgaaggagcttgcaaaccatactgggtacatcaaagttgactg

SEQ ID NO: 833867 - DNA, 100 bp, Homo sapiens
tacaagctgtggatctcttgcatattccgctccagaaattctgcttggtgatgagtatgatgcacctgcagtagctgatttgatggagttggacatggcc

SEQ ID NO: 833868 - DNA, 98 bp, Homo sapiens
agtacacagacgagcatggggaaggtctgccatgtgaatctggaggggcagccgttctactccaagaaggacagacccctgtgcaagaagcacgcaca

SEQ ID NO: 833869 - DNA, 100 bp, Homo sapiens
tgaacttccttttgagccaaaccaagaagttcctgtagcaccttcacagtccaggcaaggagatgagtatgatgtatgtgccatttgtttggatgagtat

SEQ ID NO: 833870 - DNA, 100 bp, Homo sapiens
gctgctggtgaatctttggcacttctctttgaattggccagaggaatagagagtaattaccgaattgatgggatatgagccagaagaacttttaggccgc

SEQ ID NO: 833871 - DNA, 98 bp, Homo sapiens
aagcaatgacaaacgccgcttctcaaaaggtgggaagacggacttccaatcgagtgactgcctggcacggattactcttgtctctgctgctcctggga

SEQ ID NO: 833872 - DNA, 100 bp, Homo sapiens
cctgtttctcacatttgtttcattgaagaaatagttaagtaagtacaaggtggactgtgcatgcctcaaagaaaacccagagtgccctgttctaaaacgt

SEQ ID NO: 833873 - DNA, 99 bp, Homo sapiens
tacagtctgcacagctgggttggactgatagctgtcatatgctatttgttacagaataacaagcctttgtattcatttgaagataatgcagactatgtt

SEQ ID NO: 833874 - DNA, 100 bp, Homo sapiens
ctgaatcaacatgggcaatgagaacagcacctcggacaaccaggaatggttttagggaagactgttgccggatgacaaggctgtcactattgttctgtac

SEQ ID NO: 833875 - DNA, 98 bp, Homo sapiens
gcgctggagagggggcgctgagctgttggggccctggagagtgaatttgtttcctgccagcttcaccaatggattgatctcatttttggctataaaca

SEQ ID NO: 833876 - DNA, 98 bp, Homo sapiens
tcctgagcgtgtctgtgtgcgagtggcgtgacgacagcatgtacgatccctgaatgggcccgtgggcatatttagtcattcatttttgatcaggagaa

SEQ ID NO: 833877 - DNA, 98 bp, Homo sapiens
gaaaagctgccaagttgaaaatggacgagtaatcgcctgctttgattcattgaaaaatcgagagctccagatcatgagaaagctagatcactgtaaca

SEQ ID NO: 833878 - DNA, 99 bp, Homo sapiens
ctttccggaagttagatgaattgtacggcacttggcgtaaagccgcttccctcaagagtaactacaagttatcactgagtcctgaagtcctagatttga

SEQ ID NO: 833879 - DNA, 98 bp, Homo sapiens
tcatgaaagaaatcttagataagaaggttgagaaggctcggaagacgttcctgaagcttgccttctgtgacatctgtcagaaattcctgctcaatgga

SEQ ID NO: 833880 - DNA, 99 bp, Homo sapiens
tggtctacaaagatggggagcatggagaggagttgtcactcagcccagtccatcagtttctcagcccagtacttctcagagtgaagaaaaagctcctga

SEQ ID NO: 833881 - DNA, 100 bp, Homo sapiens
actacaggaacctgctttctctcgatgaggataacatccctccagaagatgatggagggagcgaggaaccaccggatcgaagacagtcaagtgtagactc

SEQ ID NO: 833882 - DNA, 109 bp, Homo sapiens
tggggtctagaagatgacgaagacatgacacttacaagatggacagggatgataattgggcctccaagacatacatctgtggatggatatactgaaccacacatccagc

SEQ ID NO: 833883 - DNA, 100 bp, Homo sapiens
ctgctggacgccactttccggggtgcacagcaagtgggccggtgcataaacttctcccgagttccatctcagtaaaagggaagcaggaagaccaagaagg

SEQ ID NO: 833884 - DNA, 100 bp, Homo sapiens
agactttcaaagatggaatcacaaacggcgcacattggtatgatgtggaaggttacctgtgcatgacagatgagtggttctctgagtatgtctacgaagt

SEQ ID NO: 833885 - DNA, 99 bp, Homo sapiens
ggcagaagctccaggagcagttgctggtgctgctgaagtccctagggaaccaccaattcttcccagatccctaaagaagtggctgacatctttaacgcc

SEQ ID NO: 833886 - DNA, 100 bp, Homo sapiens
acaatgtcatgtgattcagcctaatatctcagagatccaggctacctggtatgagaaactgcacgagtgggaggatgcccttgtggcctatgacaagaaa

SEQ ID NO: 833887 - DNA, 98 bp, Homo sapiens
gacgtgcctttgaccttctgccatgattgtgaggcctccccagccacgtgaaactcgggtcacagaaagtcgagagagccaaatgacgattgaggaga

SEQ ID NO: 833888 - DNA, 98 bp, Homo sapiens
cacgaggccacccagtcccacttcaaacattcgtctcggaaaccccgcctcttacagtcacgaggaaagatatgatccgccaaatgatgattaaaata

SEQ ID NO: 833889 - DNA, 100 bp, Homo sapiens
gataaatggctctctcttgatttggagcagaatgaaaaatctactactcccgtctcaaagtccaatacccctactccacgaactgatgcgcccaccccag

SEQ ID NO: 833890 - DNA, 100 bp, Homo sapiens
gagacatgagatggtagctaaacatttagctctagaggacaaaatcccagtccttggcacaaactcaggaaatggaagccggagtctgttttttgtgggg

SEQ ID NO: 833891 - DNA, 99 bp, Homo sapiens
actaatcttgatattaaatcattcatcacaagtattgcaaacaaggagcttgaaatcgtcattggagatgaacacatttcttttacaacatcaaaaatt

SEQ ID NO: 833892 - DNA, 100 bp, Homo sapiens
tgagatccctggagctccatgaaaaggagaaaaagaatgccgtgtttcctggatctatggagctaaaagatggcggcaaggcagcccaggcaaatgtaag

SEQ ID NO: 833893 - DNA, 100 bp, Homo sapiens
atagacaacaagcagcctattatgcccagacaagtccccagggaatgccacagcatcctccagcacctcaggcacgcttaaaaaggcctcttaagagcct

SEQ ID NO: 833894 - DNA, 100 bp, Homo sapiens
gatgaacttgtgaaaaaattcaaagtcgaatatcatgctggtggctctacccagaattcaattaaagtggctcagaatatgacagatacctagcatctag

SEQ ID NO: 833895 - DNA, 98 bp, Homo sapiens
ccgtaatgagcgtcaaaattatccgaaaccgcctcactgggcagggcaagaatcctttcgttccatcacaaggtcgtattacagaggtgcagcaggag

SEQ ID NO: 833896 - DNA, 100 bp, Homo sapiens
cctatgatgacctgatcaggaaagttgtagaagtcttcaagccaggaaaatttgtgaccaccttgtttgttaatcagtagaaacggggtttcaccgtgtt

SEQ ID NO: 833897 - DNA, 98 bp, Homo sapiens
attttcaagttggagaagacccacctttgtttcctagtgagaaccgagtcagtgctcttacccagattagtgatgatgaaccaggttatgaccttgat

SEQ ID NO: 833898 - DNA, 100 bp, Homo sapiens
ttggagaagctgaggacacacagggcgcatattaaatttcctattgactacccctattcaccacctaccttcagattcttgaccaaaatgtggcacccca

SEQ ID NO: 833899 - DNA, 108 bp, Homo sapiens
gacaaggcaagcggatatatgaaagaaaagtggcaccactgttcaccttagcctccatcaccactgacatcatcgccccaccagctactggaagtcccttgcccctga

SEQ ID NO: 833900 - DNA, 100 bp, Homo sapiens
tctgtttctctgctgcaccgacctcgacgtcttgcctgtgtcccacttgttcgcggcctatagcagccagacccggtccgtttggaatgcctgggatggt

SEQ ID NO: 833901 - DNA, 98 bp, Homo sapiens
ctggatgtgatgtcgcagtctttagcccatcctgtctgctagtgccatctgaaatccttcctggaacttgattcacttgtcatggattagtgactggt

SEQ ID NO: 833902 - DNA, 100 bp, Homo sapiens
gaatgattcgactgcatcctgatggaacagttctctatggactccgagttactggaggtgaactgtttgaagacatagtggcaagagaatactacagtga

SEQ ID NO: 833903 - DNA, 98 bp, Homo sapiens
cacagtcttcaagagcccacggacaccacctcaacgattgagaggatccagaatccagatctctggaatagctaccaggcaaagaaaaaaactatgga

SEQ ID NO: 833904 - DNA, 100 bp, Homo sapiens
gcgtccctgtgacctggccgatgaggaagtactgagcctgttggaggaactggcccggaaacaggaggacgttgttgctctcgtaaccatgactctgccg

SEQ ID NO: 833905 - DNA, 98 bp, Homo sapiens
acattctgcaccagaagaaggagattgcccggcagatgaaggagtggttcaacgtctatgaacgtaacaggcacactagctgtactgtgtccgacctt

SEQ ID NO: 833906 - DNA, 100 bp, Homo sapiens
ctgtgtggatgtcggcgaagccgcgggcgaggtaagtaaggaggtctctgtaccatggctcgtacaaagcagactgcccgcaaatcgaccggtggtaaag

SEQ ID NO: 833907 - DNA, 99 bp, Homo sapiens
gcagcgccctgggagccctcacgagtcccgaaagtgaagtcactgcttttgctgtcttggatcaagaccagaaagaaattattgataccaatggagctg

SEQ ID NO: 833908 - DNA, 100 bp, Homo sapiens
agagcgagctgagtggttgtgtggtcgcgtctcggaaaccggtagcgcttgcagcatgtctccagagaatacagagggcaaagatggatccaaagtaact

SEQ ID NO: 833909 - DNA, 100 bp, Homo sapiens
aacatgattaagcagtttaaaggcacaggctgcatgtgattgtggatgaggtctacatgctgtccgtgtttgagaagtctgttgggtaccgcagtgtcct

SEQ ID NO: 833910 - DNA, 100 bp, Homo sapiens
tctctcccaaacttcatgtagataaaggatttgtgaacatcttaatgactagggttgttacaagttgagttgaaaacaagaaaaacttgcttttggcgcc

SEQ ID NO: 833911 - DNA, 98 bp, Homo sapiens
accttggccaggtccccgtccattgatagcattcagaaagatcccagagttcgcagtatgtgcagtgcgtggccgggtgtttgcagctgatgctccgg

SEQ ID NO: 833912 - DNA, 98 bp, Homo sapiens
cattcatcttcaaagaaatctgaagattctctacttactgactttggtttctgtgcccagatcacccctgagcagagcaaacgcagtaccatggtcgg

SEQ ID NO: 833913 - DNA, 100 bp, Homo sapiens
agggcaacgctgtgaccctgggagattactaccagggccggaggattaccatcaccggaagctgtgatccaaaatcccttcagcaatggtggcagtccgg

SEQ ID NO: 833914 - DNA, 98 bp, Homo sapiens
ccagtacgtcattcacaacaacaagtgcatccctgagtgtccctccgggtacacgatgaattccagcaaatacattccaccgttgatctgggggaaaa

SEQ ID NO: 833915 - DNA, 100 bp, Homo sapiens
cagccctgagagccagtttcaacaaccctgacagagcagtggagtatcttttaatggtcagccgtcagatccaggagcatgagcaggactctgcgctgcg

SEQ ID NO: 833916 - DNA, 100 bp, Homo sapiens
agggtatgcatttatcaccttctgtggaaaggaagctgcacaggaagccgtgaaactgaaaaccagtctatccaagaccaggcacctatgttggaaggtg

SEQ ID NO: 833917 - DNA, 99 bp, Homo sapiens
tctcgatgccaatctctgcttgaaaggagaagacttggattctcagtctctgctggatgaaccgaatcctaacagtccagccaatagccaggcagcaca

SEQ ID NO: 833918 - DNA, 100 bp, Homo sapiens
ttgccacggctgaaccctccttctcaatcttggaacagcacccccttctttaagatgtctctgcccacccacgcaacccagactatgaagagtccggtga

SEQ ID NO: 833919 - DNA, 98 bp, Homo sapiens
cccagccacccgccttctcatccagaggtttgtgccgttccctgctgtagggaacccgagcgtcatgttagggtgaagcagaggacctcagtgctgaa

SEQ ID NO: 833920 - DNA, 100 bp, Homo sapiens
gattccaagtaactcttatttggcatctccttcttgatgtcaaagtccccaggaggcatcgttaactatcgtaacgttacctgccgagcatgagatggga

SEQ ID NO: 833921 - DNA, 98 bp, Homo sapiens
cgccctgccggcgctggagaccatcaacctggaggagaacgagatcgtagtgccaggcttcccgtatccagcagccaccgccgcggccgcctaccgag

SEQ ID NO: 833922 - DNA, 98 bp, Homo sapiens
tatgcttggggtctcgattctgatggacagcttggcctggtaggatcagaggaatgcatcagagtacccagagccaggactgtctccagtttggtcct

SEQ ID NO: 833923 - DNA, 99 bp, Homo sapiens
agcttttctgagaatacttgctgaaaaggaagttttctggaatgggttgtatcagagtaagatggacggtagctttgattgtgattgtggtgagctgga

SEQ ID NO: 833924 - DNA, 98 bp, Homo sapiens
tggtacatggggaagcacctgctggaggcattcaaaggaaattgggatggcggttcttgttaagctcccctatgccgcccagcaggaaaccagtcacc

SEQ ID NO: 833925 - DNA, 100 bp, Homo sapiens
ataagatgaccctcatctcgcccatcatcctgaagaagtacgggatccccttcagccggtcaagccaagccagaccccgcagccgaaggacaagtgaagc

SEQ ID NO: 833926 - DNA, 100 bp, Homo sapiens
ggcgccaagaaggcctctgcctcagggcaggctcagaaggagaaggcagagcccccccaggctatgaatgccctgatgcggttgaaccagctgaagccag

SEQ ID NO: 833927 - DNA, 98 bp, Homo sapiens
tcatttcgagtgaccattccaacagatttgattgcctccagtggagatatcatcaaggggtattccctcagcggatactacacccatccatttcaagg

SEQ ID NO: 833928 - DNA, 100 bp, Homo sapiens
tctctgtccgggcgctgcaggagatgctggctaacaccgtggagaaatcagaaggggtggagccccctgagctgcccgctgatctgcagcactggatctc

SEQ ID NO: 833929 - DNA, 132 bp, Homo sapiens
aagaatttcctgcggttcctctaggaaaattcctttgtgcagatcaggcccgtggattgaaatggcaagttccaatcctgtgtatatggagatggaaaaaggagatctaccaacaaggttaaagttactaga

SEQ ID NO: 833930 - DNA, 98 bp, Homo sapiens
cgcggtctgcggaatgtcaactattcaacatggaggcggaggtcgataagctggaactgatggttcaagaacatgaagactcgggtgactcagaagtg

SEQ ID NO: 833931 - DNA, 98 bp, Homo sapiens
atgaagccaagaaaaattaaagaagatgatgctccaagaacaatagcttgccctcataaatcgagcaaaagatgtgataataccagcaaagccacctg

SEQ ID NO: 833932 - DNA, 98 bp, Homo sapiens
ggaggagtcattgccttatctctccaggtggttatctgcaaatacaactctgagaaatggctcagtgataaggaagctgaggcatagaaccattaagt

SEQ ID NO: 833933 - DNA, 100 bp, Homo sapiens
tttgccctgaaggtgcagcagaagcagaggcagaagcacttcaaccggcagatcccggcggcagcctcactcattcaggagttcttggtttcgactcaga

SEQ ID NO: 833934 - DNA, 100 bp, Homo sapiens
caactattatcctcctgtagagtttgtgaagaaatatgggaacctttttagcttggagcttggtgacatatctgcagttcttattactggcttgccctta

SEQ ID NO: 833935 - DNA, 98 bp, Homo sapiens
aggttttaaatcaagatttaacattccaacacataaaaattatttatccaacagctcctcccagatatcagtattacctgcaagtcaaaaaagatgtg

SEQ ID NO: 833936 - DNA, 100 bp, Homo sapiens
aaggagactaaccttgatgagacttcggagatcctttctattcaggataacacaagtcccttgccggaactcttgcaagaagaaaggactatgagttcaa

SEQ ID NO: 833937 - DNA, 100 bp, Homo sapiens
ctccagatgctagggttatggcttctcccgttggcaacggttacatcaagcctccggttccacctgcttctggcacgcacagggagaaagggccgccaac

SEQ ID NO: 833938 - DNA, 99 bp, Homo sapiens
gttgatgagagcattcgaagtgacctcagcagggcatccagatcctgaaggacacagccctgcagaaagtgaagcgtggccagagctgcctggagccct

SEQ ID NO: 833939 - DNA, 100 bp, Homo sapiens
aagcatttacaagattcttcatcttttagggaaagatagtgttcagttgctggtggattcaccaatgaacttgaagcatcctcatgacctagtcatatta

SEQ ID NO: 833940 - DNA, 98 bp, Homo sapiens
ggagcgcgaacgagcgacggcggaacccgtgggcctgtggactgcagcctcggcggtcagcaggaggaatcattatagattctaaaaatatattttcc

SEQ ID NO: 833941 - DNA, 100 bp, Homo sapiens
atacatggcttgcaaaaagtaaaccacgatcgttatgctgaagtaaagccaatcccagctgaaggaatcaagtcaaatccttccaagcggcatagagacc

SEQ ID NO: 833942 - DNA, 100 bp, Homo sapiens
agtctggccacctctgtattcagcatagctattcctgttgatggtgatgaagacagggggtataacgtgtattctttcactaatctgtgccttggctctt

SEQ ID NO: 833943 - DNA, 100 bp, Homo sapiens
gccttatcgtctgcaagtgttctccaagggaaggaggaggaaactgtggtgttcctttcttccagcaccgacagtaaatggttcacggccgacatcatgt

SEQ ID NO: 833944 - DNA, 99 bp, Homo sapiens
tgctatcagtctttctaggatccgggacacagattttaattatgacctttgtgactctatgattgtcaccagacctgcaatctatggagcagattcgga

SEQ ID NO: 833945 - DNA, 100 bp, Homo sapiens
gggtcaccaagacatacaaaaggaaaaacatagagcctactcacgcgcctttcatagagaaatcccgcagcggaggcaggtctaccttctgcttccctgg

SEQ ID NO: 833946 - DNA, 99 bp, Homo sapiens
cagacacggacctgagccgcgaggacacgggctgcaacctgcagcacatcagcgaccgggagaacatagacggaacatcatcttcagcgggctatttca

SEQ ID NO: 833947 - DNA, 98 bp, Homo sapiens
tgcgccaggcagccctgaaatcagctcgagacatgtgggctgattacatcctgcaaggatggaacattactgtggacctggtcattggccctaaaggg

SEQ ID NO: 833948 - DNA, 100 bp, Homo sapiens
ggcagctgcaatatttaattcagcctttggaagttttttggctgttgaagctcaaatccgaagttttggacagactccttctcaactactcatagagccc

SEQ ID NO: 833949 - DNA, 101 bp, Homo sapiens
aaggaaagtactgtccaaatgaattatgtcagcaacgtatccaaggtttggcaaacatcgaaaagatgacaagattgagaaaacgggtaaaataaaaatac

SEQ ID NO: 833950 - DNA, 99 bp, Homo sapiens
agcggtccagggaaggaagcaaagcaaatggagaatggcatgctggtgacggacagtgcagggaagcaactgcagagtcgagcaaaagatgtgataata

SEQ ID NO: 833951 - DNA, 100 bp, Homo sapiens
cggcgagtatacatgcaaagcttccaatgagtatggcagtgtcagctgtacagccacactaactgtgacaggactttccgtgacatttctgaagatctga

SEQ ID NO: 833952 - DNA, 100 bp, Homo sapiens
aagcactgtatcgacaggacccagagtcattacctttccggcagcctgtagatccccagctcctcggaattccagtggtttcctagaaacatgattgttt

SEQ ID NO: 833953 - DNA, 100 bp, Homo sapiens
tggccaagacatgcagcaccaaggaccagcaattcaatgcaatcgcttccatactaagggcctggcttgaccagtgtgcagaagacttccgagagccccc

SEQ ID NO: 833954 - DNA, 99 bp, Homo sapiens
gaagattcaccaaataagctatatactttggttacctatgtacctgttaccactttcaaaataaatggggagcaggagaaccgagtgcagaagggaaat

SEQ ID NO: 833955 - DNA, 100 bp, Homo sapiens
ctgttccaccttcagagcgtcacggcgtacgccctcatggggaaaatctccccggtgactttcagtctcacaccattttgctggtacagcctaccaagag

SEQ ID NO: 833956 - DNA, 100 bp, Homo sapiens
agtagccacggtgtggcagctgctctgaaccaggacctggacccggacccaaagtgccatgtctttaatatccaacttagaaataatgtttcattcaaga

SEQ ID NO: 833957 - DNA, 98 bp, Homo sapiens
ctgcctagaggctccagaagaagactggtctctcccaccacacagagggccagcttctgagcatcccggcagcctatggggatctggagatggtccgc

SEQ ID NO: 833958 - DNA, 98 bp, Homo sapiens
cagattctgccaattcgttttcaggagcatctccaggtccccttcccctgagcccatctacaatagcgaggggaagcggcttaacacccgagagttcc

SEQ ID NO: 833959 - DNA, 100 bp, Homo sapiens
atcagagtccaaaatggtgatcaggaagtcccttaatatggactttgaaaatcaagataaggagaaagacagtaatagttcttctgggtctttcaatggc

SEQ ID NO: 833960 - DNA, 98 bp, Homo sapiens
gctctgtgcggggtggagatgaagtttatctgctttgtgacaaggtgcagaaaggccctggccaacgtcaacattgggagcctcatctgcaatgtagg

SEQ ID NO: 833961 - DNA, 98 bp, Homo sapiens
ctttaagccggagcgaggccaccgaggagggcgggcctttggaaatgcaaagacagctcataataacaattcaagtcgttttgggaagtttattcaag

SEQ ID NO: 833962 - DNA, 98 bp, Homo sapiens
caccacaatcaaccttattgtggcattgcgccgtacattcgagagtttgagggcctgcttccgcgaggccaacatcccaacccacttcgggagaagaa

SEQ ID NO: 833963 - DNA, 100 bp, Homo sapiens
tggaaagatgatgcctagtaaattacagaagaacaaacagagactgcgaaacgatcctctcaatcaaaataagcatacaagacagtatctggagtcaatg

SEQ ID NO: 833964 - DNA, 98 bp, Homo sapiens
tctaaagtctttccaaaaggtcaaggttcacaagggaatggccaaatccagtgctattgaaacagcctgaagaatgcaatcttaatttgcctgtatgg

SEQ ID NO: 833965 - DNA, 98 bp, Homo sapiens
caacacggtcttgctgaaagccagggaagattctgcttctcagaagatgcactattatagatactctaacgccaaggtcagctgctggtacaagtacc

SEQ ID NO: 833966 - DNA, 98 bp, Homo sapiens
caaagttcctcacagtttaggtctcaaggcaagcctattgagttaacacctctgccgctgctaaaaggaaacttcatggtgttatggtcaacttgccg

SEQ ID NO: 833967 - DNA, 100 bp, Homo sapiens
gcaggagcggctgggcatcctcctgagactccggggtcagacgcccactccagccctgggcgctgcctatggcacagccaagagcggtaccggcattgcg

SEQ ID NO: 833968 - DNA, 100 bp, Homo sapiens
tggcgctgcccatcgtagccatcgagaacatcctcagctttatgtcctacgacgaaattagccagctccgcctgaaccagacgtcctgggtcctctccag

SEQ ID NO: 833969 - DNA, 99 bp, Homo sapiens
tctgcagggcctgggccgccgctgctacctgcagcgccgtgtggcacgacacaaaaatcaggaggtggaggccggaaaggtcgcaccaagagagaagct

SEQ ID NO: 833970 - DNA, 100 bp, Homo sapiens
tagagctgcggaacaggacgccctctgatatcttgtagaaaatttcagctgtagcccttggactagaagctgaaataacagaagctgtgtacgatgcatt

SEQ ID NO: 833971 - DNA, 98 bp, Homo sapiens
cagctttgtagttttgcgtgtgttgaaagtacaattctattgcacatcaatgatatcatcccagagaccaatttgaggcacacctgtaaacggataat

SEQ ID NO: 833972 - DNA, 100 bp, Homo sapiens
tgacatttttctcataatgaatcctctcaggacattgtgtagcctatgctgtgatgcagatccatccgccctagcaaaatatgttctggctttggtaaag

SEQ ID NO: 833973 - DNA, 98 bp, Homo sapiens
agacagtgagtgctaaaggcccccctgaaaaacggatgagacttcagatgtctaagcagggacgaacaatcatcttctccattcatcagcctcgatat

SEQ ID NO: 833974 - DNA, 98 bp, Homo sapiens
aggatccactgcaaggaacaacagggaacaacaccctggacatggctccagagatcaacttgccgggcccaatgagcctcattgataacactaaaggg

SEQ ID NO: 833975 - DNA, 100 bp, Homo sapiens
gagaaagctaggccatctgaataactttactaagcactattcctgatcagagaactccagttgcttcaacacacagtatcagtagtgcagccaccccaga

SEQ ID NO: 833976 - DNA, 100 bp, Homo sapiens
acggcccggcgcctgcactcgtttcctgcaggagagagatcctgcatattttgatgaaaattggctaaacagaatcaaaactgaagtaggagataattgg

SEQ ID NO: 833977 - DNA, 98 bp, Homo sapiens
ggtggtggacagggaaactgacgagttcttcaagaaatgcagagtgatcccatctcaggagcacctgaatggcgatcttcactctcctcctcggaccg

SEQ ID NO: 833978 - DNA, 100 bp, Homo sapiens
aaaacatcaaagaggtctagcaaagaaattgacattgaacgctgtgtgagagaatctatcaacctgttttgttggactcctaaaagtgctacttacagac

SEQ ID NO: 833979 - DNA, 100 bp, Homo sapiens
gctggattgaggagtagaaggctcaaacaacccaagacagccgctcaggaagcaatcttgcatgcgtctggaaatggcacaaccaaggactactgcatgc

SEQ ID NO: 833980 - DNA, 100 bp, Homo sapiens
gtggaggttggaggtggtgctgctggggaacgggagctggatgagattggatttgaggctcctcccctccagggacaggctgcagctccagcgagtggca

SEQ ID NO: 833981 - DNA, 100 bp, Homo sapiens
taaagctctagcagaggaaaataagaacacagtggatgtcgagaacggtgcttctatggcaggatatggctccctggcattgggcagtgttacagtgcac

SEQ ID NO: 833982 - DNA, 100 bp, Homo sapiens
cagcaacatgaatgatcttaaggagttgctggagaaatctttacatgtaaaataccatgaagattttgaaaaaacaaaggggagaggctttactcccgtc

SEQ ID NO: 833983 - DNA, 100 bp, Homo sapiens
aacctgctggccttcttggccctggcctcccactgccgggccatgctgacggaccccgaagacctccgtgtggatggccgtggctgtgaggactaccgat

SEQ ID NO: 833984 - DNA, 100 bp, Homo sapiens
gctatactccatccaaatatgcagtggaaggtttcaatgacagcttaaggatgatcaggatggtagtcaaggtctgggcaagagaaaaagggtaaaacta

SEQ ID NO: 833985 - DNA, 50 bp, Homo sapiens
tcagacgtggataaagataatcccgatgtgaagttcatttccaatccgcc

SEQ ID NO: 833986 - DNA, 125 bp, Homo sapiens
agtcaaatatgtctgccttctctcaagttttctctcacccatccatgggaagccctgctactgctggattagcgccagggcgatttgatgaaactgttatcgaagagagaagacaatgtgctgaa

SEQ ID NO: 833987 - DNA, 100 bp, Homo sapiens
cgctaaggaatgaaacccttccagctcgatctgctcttcgtctgcttcttcctcttcagtcaagcccagtggagcaaaatgagagcgcagtgagccgggc

SEQ ID NO: 833988 - DNA, 100 bp, Homo sapiens
aggtgaaaaatgctcagggatggagccctctggcggaagccatcagctatggagataggcagatgaatgctgcagttggagaagaaacttgaacgtgaac

SEQ ID NO: 833989 - DNA, 125 bp, Homo sapiens
tggtggcctgggcagcctgctggaccctgccaagaagtcgcccatcgcagcagctcgataacgaaggaggcccaacttcattcaataaggagcctgacggatttatcccagacggtagaacaaaa

SEQ ID NO: 833990 - DNA, 98 bp, Homo sapiens
cgagctccgggatgctgtactccttgtctttgcaaacaaacaggtatgaatgctgctgtcagggctgtggttcgagttggtatcttcaccggtgcccg

SEQ ID NO: 833991 - DNA, 100 bp, Homo sapiens
gaaaacgcttctgtgagacttgataataggtattgttgcagcatctggcagtgagactgaggatgaggacagcatggacattcccttggacctttcttca

SEQ ID NO: 833992 - DNA, 100 bp, Homo sapiens
ggcattttggggcagaatacagagatatggaatcagcctccacaaatgggaagtgttcctgtaatgacgcaaccaaccttaatatacagccagcctgtca

SEQ ID NO: 833993 - DNA, 100 bp, Homo sapiens
cctgtcctgcgcgagtggagctctgaagaagctctgagcggagttgtgttcttccccagttgttgaatgttgggtcacgaagatctcaacctggccaaag

SEQ ID NO: 833994 - DNA, 100 bp, Homo sapiens
tattctagcagatgaaattaaaaatcctgcaatggaaaagttagaacttgttagaaaatggagtctaaacacctataagatatcattgacaactgtaagc

SEQ ID NO: 833995 - DNA, 98 bp, Homo sapiens
aataaggctaaacttgcaatatggctccgacagttagttaatatgtgcatcaacccagatccagagaagcgaccagacgtcacctatgtttatgacgt

SEQ ID NO: 833996 - DNA, 100 bp, Homo sapiens
caggaggaagaattcccaagccaaagctttccaggcatgaatgctttacagttgcagaacctggcgacgctggctgctgctgcagctgcggcccagacct

SEQ ID NO: 833997 - DNA, 98 bp, Homo sapiens
acctcatttaaggagattagtgcgagggtcagtctgtggagtacgagacccaatctagtgcagaagccaaatttgtgaagcagctagaccaatgtgaa

SEQ ID NO: 833998 - DNA, 100 bp, Homo sapiens
ggaaaaacaaaattactaaacttcagaacctggatgcgctcaccaacctgacagtcctcagtatgcagatgttgatggctggaaggctgtccaacgaaat

SEQ ID NO: 833999 - DNA, 100 bp, Homo sapiens
gtctctgcaggatgttattgacagctatatcgagaagtttactgactttcttcggctctttgtgagtgttcacctaagaagaatcgagtcttactcccag

SEQ ID NO: 834000 - DNA, 100 bp, Homo sapiens
ccagtttattttcactgtgcagctgttacaccagcccagcttcgggcatttatcccagagatgctcaagtactctacaggtcggggaaaaccaggctggg

SEQ ID NO: 834001 - DNA, 99 bp, Homo sapiens
gacaacttcgcccgggacttcatgatgatttgtcattaattcggaagaacagaatggctctctttcaacaattgacatgtgtgcttcctatcctggata

SEQ ID NO: 834002 - DNA, 100 bp, Homo sapiens
agcagcacttccacagccaagtgcgggagtccacgagaatggatcttggagaatgtctgaaagtccatgacctggctttaagagcggattatgaaattgc

SEQ ID NO: 834003 - DNA, 100 bp, Homo sapiens
cgccgggacgccaagcacttcctgccgcgggcggcgcgccgcagctgcccaggccggaccgggccgggcgcccgcagatactccatcttctaaaccaaca

SEQ ID NO: 834004 - DNA, 99 bp, Homo sapiens
ccagatgtgggagacacgccaaagctcccaagcattactctactgactggcagagacaggagaggtagatgtccacgcccacagaccctggtgcgatgc

SEQ ID NO: 834005 - DNA, 100 bp, Homo sapiens
gtgacggaggagcaccggatcaatactggaacagcacaggcttcttggcctggttatataatgaaagctcaaattggtggaaaccctggtctacaggcca

SEQ ID NO: 834006 - DNA, 100 bp, Homo sapiens
ctttgttcccaatgacatgcaagttggacagacgggaaaaatagtagcaccacccatgactgaagagttgctgaaacaacaaaagctgaattcacatgag

SEQ ID NO: 834007 - DNA, 100 bp, Homo sapiens
gagcagccggtaacgttgctggaccgggacgcacgctcagctgaggaggacccccaaaggtccttggccttgtccaaaacatgagtgttttccagtgtcc

SEQ ID NO: 834008 - DNA, 100 bp, Homo sapiens
ttgttagtgaacgtggacaaagctgttgtctcagggagcacagaaatcaagagactgaaatctcatccttctatcatcatatggagtggcaataatgaaa

SEQ ID NO: 834009 - DNA, 99 bp, Homo sapiens
acagatacaagtgacactgctgaaaaataaagctccaggattagggaaagtcaatgaacttcggatcaagagacaaaactcctcagatagcatctcaag

SEQ ID NO: 834010 - DNA, 100 bp, Homo sapiens
tagttttatgtccattttcttcagtgtgcaaagatgtaatgcaacgttgtgatctggaggcacatctcaaaaacagcctattctgcaaacttggagttct

SEQ ID NO: 834011 - DNA, 100 bp, Homo sapiens
tgttctggggtgtggtgtctcacagcttcccagcgactctagaaacacaagagcaagatgtggacttagtccaggatatgggccctcacattttccaaac

SEQ ID NO: 834012 - DNA, 100 bp, Homo sapiens
ggatgcacaccgacctaaattaaatgaaggtgacttttttgaacgaaccattctgtgcaacagccttgtgtggagttgtgctgtgacgggtagacctgga

SEQ ID NO: 834013 - DNA, 98 bp, Homo sapiens
taccaacatgtctgtacctactgatggtgctgtaaccacctcacagattccagcttcggaacaagagaccctgttactatgcgagtcagaagaaaaca

SEQ ID NO: 834014 - DNA, 100 bp, Homo sapiens
atcgagacgccctgagttcagaaggctgaacatgaactaaatctggcaagaaaaatgagggaatggaaactatgggagccattagtggaagagcctcctg

SEQ ID NO: 834015 - DNA, 98 bp, Homo sapiens
aagggatatggaatcattttggaaactaaatcgttccccaggtttaccgacaagactgtgaaactttcgggatggtggtgaaaatgctgattgaaaaa

SEQ ID NO: 834016 - DNA, 99 bp, Homo sapiens
gcagtcgtaagaagaggtcccaatcccccactctttccgccctaatggaggtctccagtttcgttggttgaatctggcgatgtggaacccatggatatg

SEQ ID NO: 834017 - DNA, 98 bp, Homo sapiens
cggtggagcagatcctggaggatgtgcggggtgcgccggcagaggatccagtgttcaccatcctggccccggaagagacagggtctagctatgttgcc

SEQ ID NO: 834018 - DNA, 98 bp, Homo sapiens
cgcgcgtcgtgccctgcgctgcccagactagcgaacaatacaggctgaccccgcactacatctacccaccagccatcgtgcagcccagcgtggtgatc

SEQ ID NO: 834019 - DNA, 99 bp, Homo sapiens
ttagatgaagacacacccccaatagtgtcacaatttcccgcgctgctgggacatcgccttgggtcccctcaaacagattcccatgaatctcttcatcat

SEQ ID NO: 834020 - DNA, 100 bp, Homo sapiens
gtcgagctgtgtttagagtgcatcgaatgggccaagtcagagaaaagaactttcttacgccaagctttggaggggctgcttgctctcggtgactacatga

SEQ ID NO: 834021 - DNA, 98 bp, Homo sapiens
tgaacactcaagtgaagcaaaagccttccatgattacctcctggctaaatacaaaagcttgcaatgggacaaagtactgaggctggaggaggtgcagg

SEQ ID NO: 834022 - DNA, 101 bp, Homo sapiens
tttagagatggtgaagaagcaggtgcttatgatggacctaggactgctgcttccttcaaaatgtctactgttcacgaaatcctgtgcaagctcagcttgga

SEQ ID NO: 834023 - DNA, 100 bp, Homo sapiens
gctggccaaaacacatccgtataatcctctttgggcacagctgggaaagaccacagcaagattctttcattcgtctcctcctagcctgggggaccaggct

SEQ ID NO: 834024 - DNA, 100 bp, Homo sapiens
gtgagggaagcccaggagaccaggcagctgcgctcttgacagccaggtaccagggatatcccagagaaggaaggaaataccctttgccaccaccctcagg

SEQ ID NO: 834025 - DNA, 98 bp, Homo sapiens
tcttttggccctaggccccttcctgcccctgtcgtcagcaggtcactcctggaagcaaggcggctctagctaatttatgtattggagatgtaatcaca

SEQ ID NO: 834026 - DNA, 124 bp, Homo sapiens
gccgggagggggctgcgagccgggaagacgcggggaagaggaggcggaaaaggacgcaaagttctccggcgagcctgtggccgtgggttctacaagtcttcctctcaagatcttcagtgctctc

SEQ ID NO: 834027 - DNA, 100 bp, Homo sapiens
gagaatacagagagaaaattgagacggagctaagagatatctgcaatgatgtactgcttccaattgaagacttgtgcagtttaacatcccagtcactgcc

SEQ ID NO: 834028 - DNA, 98 bp, Homo sapiens
aaaaggccactgactcctacttcctctgtatagagcaactgttgaactcagctgcctgtagtcctacacacctccaagcaacgagttcaagatcagta

SEQ ID NO: 834029 - DNA, 100 bp, Homo sapiens
tggaaaacaatgcccagactcaatttagtgagccacataaagaagatccctaatagtcatttctcaacaattatatagtcaactgatgtaacaatggtac

SEQ ID NO: 834030 - DNA, 139 bp, Homo sapiens
agctggtcatcagcctggagaagctggagaatgacaagagcttccgcggtgtcattctgacctcgatggagcagctatcagatgaagaaattgatcatggtgctgaagaagacagtgacaaggaagatcaggacctgga

SEQ ID NO: 834031 - DNA, 100 bp, Homo sapiens
attggagatgatgatgaagacattgatgatgttctgtggacaatcacaatgggaatccaaggagggtctgtcctgttcgggctgctgctcgtcctggctg

SEQ ID NO: 834032 - DNA, 100 bp, Homo sapiens
ttttgtccctttgcctcatcccaggttgccttggaaaatgccaacgccgtgtctgaagctttgccagcgccgagtaccaggaggccctcagcaggatcac

SEQ ID NO: 834033 - DNA, 100 bp, Homo sapiens
ggccgtcaagatcctcaagaagaagaagttgcgaaggatccccaacggggaggccaacgtgaagaatttgtttcgacgccggaccgcgtaagagacgatg

SEQ ID NO: 834034 - DNA, 99 bp, Homo sapiens
gaggggctgagagacggcggcggccgaaagcggagagatgctgggcgtggcggccgggatgacccacaggtgcagcctgatcttcctcttctcccttgc

SEQ ID NO: 834035 - DNA, 100 bp, Homo sapiens
aatatctgcttaggattcactgcacatcgaattaagagagcagaaggatgggaggaaggtcctcctacaggtggggaccaaggcatactgaacacatttt

SEQ ID NO: 834036 - DNA, 100 bp, Homo sapiens
gggaacatgctgagaaactgatgaagctgcagaaccaacgaggtggccgaatcttccttcaggatatcaagatgcttgggatttgctttacattctaagt

SEQ ID NO: 834037 - DNA, 100 bp, Homo sapiens
gaaaatggaattatctctgaacatacctgtaaatcatggtccacaagaggctctcaaaattagagagatgtgtaattgtccaccactgtctaatccagac

SEQ ID NO: 834038 - DNA, 100 bp, Homo sapiens
ttaaagcagaaagcagcacagcaggcagcctcttccagtgggcagggtcagcaggcccaaacccccacagttgatgaggaatctggattaaaggattcag

SEQ ID NO: 834039 - DNA, 100 bp, Homo sapiens
cttaatgaaagagagtgctcaattcagagaagaaatcagaaggtggtggaggaagcaccaagggcaaagctgttggggtgactattggctgcattctagg

SEQ ID NO: 834040 - DNA, 121 bp, Homo sapiens
ctctcactgaatgggcagctgatggttggagttgatgtcagtggggccaggattcctcatgtccataacatgttggatgaggctctgcagctcacccccactctcagagtggtcagtctcc

SEQ ID NO: 834041 - DNA, 98 bp, Homo sapiens
cgtgggatccacacagctcagaacagttggatcttgctcagtctctgtcagaggaagatcccttgggcgagctggagcggcagctgctgcaggccaac

SEQ ID NO: 834042 - DNA, 100 bp, Homo sapiens
agaccgaaccggcgctcctgcccccggggtgacgcgcagctcccagccggccggaaggtggtggtcgtacgctgtgaaggcatcaacatttctggcaatt

SEQ ID NO: 834043 - DNA, 100 bp, Homo sapiens
acacagctgcttccattggccagtatgaagtggtgaaggagtgtgtgcagcgactgcttttcaggaagccttggacgctgcaggtgataaacttgtagta

SEQ ID NO: 834044 - DNA, 100 bp, Homo sapiens
tgttaagctgtgggatacaagaagattttaccaaatgttgcaagaactctggagttcttatggtagtaaaatgccggaaagaaaattctgcattgaaaga

SEQ ID NO: 834045 - DNA, 100 bp, Homo sapiens
cgcgtcctcagacgcagcgtctagtccctggccatagctccgccgctgcccgagtgatcagcagctggactgtgccttggacctaatgaggcgcctgcct

SEQ ID NO: 834046 - DNA, 100 bp, Homo sapiens
ggctaagactcagacccagggtctttcaggaggcagtggtggatgaaagacagtagagtccaatgtgctgattgctgctaacagtcagggtacaattaag

SEQ ID NO: 834047 - DNA, 100 bp, Homo sapiens
aaaatttctgttcctaagacagaacatggatatgaggtttttcagggaaatcaagactccttcacacctgtggtgaactctctagacccaccgttactga

SEQ ID NO: 834048 - DNA, 99 bp, Homo sapiens
ctcatggcccagcagggccagcaggggcagatggcaagtggagacagcaatctcaacttcagggaacagaaagaacagcttcaaaagatgaaagacttc

SEQ ID NO: 834049 - DNA, 100 bp, Homo sapiens
caacatctttcctcaccccaaggcaattaagttggaatatgcaaggttggttaagttggcccaagaagacaccccaccagaaaccgattatcgtttacat

SEQ ID NO: 834050 - DNA, 100 bp, Homo sapiens
tccctattggatgctgccctctgatgtttgtggaatgaactgcttttgggaagcggcttttaggaccgcctggggctaaaggaaatggacaatgcaggac

SEQ ID NO: 834051 - DNA, 107 bp, Homo sapiens
aggagacggcggcggcgcgaaccctgctgggcctccagtcaccctcgtcttgcattttcccgcgtgcgtgtgtctggagcccccaactcccttgacagtgtacgctg

SEQ ID NO: 834052 - DNA, 101 bp, Homo sapiens
agtatattttgaccaagcccagagattcaaccatcccacgtgcagatcaccactttataaagatgccaacaaggccagtgccaagttatattcaaagacca

SEQ ID NO: 834053 - DNA, 100 bp, Homo sapiens
agaagggaggctccaagacctcatcaacaattaagaaatgacctccaccttcaacccccgagaatgtaaactgtccaagcaagaagggcaaaactatggc

SEQ ID NO: 834054 - DNA, 100 bp, Homo sapiens
ctcgatccagcaccatggggaagcgggacaatcgggtgagcttgtcaggaagatcggaggtgccaagtagcagagaaagcatcccccagctctgacaggg

SEQ ID NO: 834055 - DNA, 100 bp, Homo sapiens
cttcgtgtggttcttttctggcatcgtaggaggtggcctgctgccgtgttgaaatccttgtctcctgtagacccagtggaacccataagtaattcagaac

SEQ ID NO: 834056 - DNA, 99 bp, Homo sapiens
aagtgagaagcccaactaaagccccacatttgcagctcattgaaggaaagctcttctgttcaatcattgccggactgctacactacttctttttagctg

SEQ ID NO: 834057 - DNA, 99 bp, Homo sapiens
ctgggcacaaccacacacgcacccccaggcgtgcatcgccgctactcggcattgagggaagagtctgccaaggaatgtctgcagaggttcgctgacagc

SEQ ID NO: 834058 - DNA, 100 bp, Homo sapiens
ctgaccccaaccgagttcgtgaaccaggagaagttgagtttgacattgagctgttgtcacaagcagtgtttcctctggatatggcagtggcagtggctat

SEQ ID NO: 834059 - DNA, 98 bp, Homo sapiens
tggggactgcctttaccaacaagactaaaagattacttggaagaatataaattccaggcaatgttcagtctttgtatggtggaaagtggagctgatga

SEQ ID NO: 834060 - DNA, 100 bp, Homo sapiens
ccttagcagtccgggaactgcttatcctccagggaggaccaccccagtgaattttgaagattgcaccggtcgacaaaggacagcctatttttccctcgac

SEQ ID NO: 834061 - DNA, 100 bp, Homo sapiens
agcaggcagcgacaagattgtcctgttggtgtgtaaccgagcctgcactgggcaacaagggaaaagctgcgtgaacattcacagccagcagcacgtactg

SEQ ID NO: 834062 - DNA, 98 bp, Homo sapiens
aatctggttctaccaaaaatagggctatgagagttacctcacctccctgaaagaaatggaggcaaacgaccattttaactttactggccttccccctg

SEQ ID NO: 834063 - DNA, 100 bp, Homo sapiens
agtgcttaatgctgtcttaactagtgtaggaaaacggctcaacccaccgctgccgaaatgaagtataagagctaagcttgtctgctggatccctgcagct

SEQ ID NO: 834064 - DNA, 99 bp, Homo sapiens
ttgattacccgttaagtcccccaaagatgagatttacctgtgagatgtttcatcccaacagctcaagcagagtcttcctcctggtgttccagaaggagt

SEQ ID NO: 834065 - DNA, 98 bp, Homo sapiens
tgcaaagcttccaatgagtatggcagtgtcagctgtacagccacactaactgtgacagacttagaaatggctgttgcgtattggaaattagtgttatc

SEQ ID NO: 834066 - DNA, 100 bp, Homo sapiens
ctaagctgtgtgtgccaggggaccagtgccatgggctgcatccctttatcgtgcaggctatggagttactagtagagaaagcaatcagcagtgcttctag

SEQ ID NO: 834067 - DNA, 101 bp, Homo sapiens
gagttcaagaagaacactccagagccgaaggagtaaaggtgctgcaatgatgttagctgtggccactgtggatttttcgcaagaacattaataaactaaaa

SEQ ID NO: 834068 - DNA, 100 bp, Homo sapiens
ggtggtttaaagaggagcagctaccacttcgagcgggctaccagaaaacctcagacaccatagccccctggttccatggcccgatgagagaaagggaaag

SEQ ID NO: 834069 - DNA, 98 bp, Homo sapiens
agacatcattaaattagaaaataaccaatttgttgctgtggaacttgcagaaatctgtgccaagagtgagcgttacattggcactgaaggaggaggca

SEQ ID NO: 834070 - DNA, 100 bp, Homo sapiens
aaaggtcaactaaaagcattgtttctagaacatgaggtattttgatcacaactatagcctccaagggagaattgcagaattggcctgacctcttaccaaa

SEQ ID NO: 834071 - DNA, 100 bp, Homo sapiens
gaaaatcagaaatttccaactgataatatttcatcatctaatcggagccacagtcacacaggtgtagggaaaggaccagatggagtctccttctgtcacc

SEQ ID NO: 834072 - DNA, 75 bp, Homo sapiens
agatatagaacatttcttttatcacaggagaccaaattttgaggaaggtggaccaacatcagtagggagaaagca

SEQ ID NO: 834073 - DNA, 100 bp, Homo sapiens
tggacagtctatggatctacattataccaataacgagtttgcccagtatgcggagatcgtccacttcaccctcccagatgggactcagaggagcgggcag

SEQ ID NO: 834074 - DNA, 98 bp, Homo sapiens
cgagtccggtctcaaaatggaggaatgtatcctgtcaggtataatgtcagtgaatggcaagaaagttcttcatatggatcgaaacccttactacggag

SEQ ID NO: 834075 - DNA, 100 bp, Homo sapiens
aacttctattactgaggggctccagcaggatgttgagaaagaactggagatgcagatcagcatgaggcaggagatggaattggctatgaagatgctggag

SEQ ID NO: 834076 - DNA, 100 bp, Homo sapiens
atgggaggtcatgcctgatctgtacttctacagagatcctgaagagattgaaaatattgaacttcccatggatacaaaaacaaatgaaagaagaggattt

SEQ ID NO: 834077 - DNA, 100 bp, Homo sapiens
ttcctggcctggaaaattagtaagagaagacgacgttcacaattcatgtcaacaaagccccgaggaagggaaggttctccttactatgacaatgtccgcc

SEQ ID NO: 834078 - DNA, 100 bp, Homo sapiens
ttttttttcaagaactgccgtcttctttgcctgcactaatgagccctggaaaccaacaggtataaccatatcacagccacatacttcctgctggctgaaa

SEQ ID NO: 834079 - DNA, 100 bp, Homo sapiens
gcctggaggattgtcactccaacctcttttcgctggaccagaggagcgagagcagcaagaaccacacccagcagcaatgtcagcggaagtggaaacctca

SEQ ID NO: 834080 - DNA, 100 bp, Homo sapiens
cgagagcgtgaccgagagcgcgaatatcgtcatcgttagaaggctttcatgagaaggacaagaagccatattgccgaaaggatttcttagccatgttctc

SEQ ID NO: 834081 - DNA, 100 bp, Homo sapiens
tggttggagagctcatctggaattttgccgatttcatgactaaccagttttgtctttgatgataaaacaagacttgtagaccgagtcagacttaattggc

SEQ ID NO: 834082 - DNA, 100 bp, Homo sapiens
atcgaccggcgacagcagccaggagtcatgagcgacagcggcgagcagaactacggcgagcggctcctgaattcagaccacagatccacagccacagtcc

SEQ ID NO: 834083 - DNA, 99 bp, Homo sapiens
tctgtcagtaagaaagcagctgatagcacatcacagggaatctcagtctttgaggagattttaatctcacatgcaaattcagtggcttagtcagcttcc

SEQ ID NO: 834084 - DNA, 98 bp, Homo sapiens
ggagcctggaggagctgctgctggacgccaaccagctccgcgagctgcccgagggttctggcttccagtcgtcgcggagggagaagtatggcaacgtg

SEQ ID NO: 834085 - DNA, 98 bp, Homo sapiens
gtgaagtggcaggaggaggaggaggggctccggctggtctgtggtgaggtgcagctctgtcatttccactctgctctgctgcacagaaggcagaagcc

SEQ ID NO: 834086 - DNA, 99 bp, Homo sapiens
attggagactgttaggcccagaagaacaattagggtgacgtgtgcattgagtaaacgttgcaagaaagctcaagtagcctatggagaggatgcaaggct

SEQ ID NO: 834087 - DNA, 100 bp, Homo sapiens
gaaagcagaggctcagagcttggagacagacgtgcctacaatagttcctggtatgtagaaggtatacaataaatattggcggagtgaaggaacaaatggg

SEQ ID NO: 834088 - DNA, 100 bp, Homo sapiens
cgcaggcaccttcctcagtcgcgccgtgcaggttatttggaaatagcggtgcttgcagcgcttgcggacagtcgattcctgcgagtgaactcgtcatgag

SEQ ID NO: 834089 - DNA, 98 bp, Homo sapiens
cttttcccgaaaattccccttctacaagaacaaggaccagagtgagcaggaaacaagtgatgctgacccataatgggagtgttgagtaacaagtgtgg

SEQ ID NO: 834090 - DNA, 100 bp, Homo sapiens
cataggcggaccatgataatttccccagagcgtcttgatccttttgcagatgcttgcaggagggttcctacttgttatctcatgcagcagaagattcttc

SEQ ID NO: 834091 - DNA, 100 bp, Homo sapiens
caacaatatcggcattctgtgctacgaaggtataagcagtttagccaaattttgaagaacattggagaaaatgaaggtggtattgataagttttccagag

SEQ ID NO: 834092 - DNA, 100 bp, Homo sapiens
gatcgtcttcctactgtcttgttttttccctgcaacaggaatgaatctgaagtctgctgcagtaaaacacagaaggctttaaaatgttttcttgcataaa

SEQ ID NO: 834093 - DNA, 100 bp, Homo sapiens
cctccacaaccgcaagaagcacctgaacgggctgcagcacctcaaggccaagaaggtctggtacgacatgttccgaggagcctgattccccacgtgtcac

SEQ ID NO: 834094 - DNA, 100 bp, Homo sapiens
catctttgccctgatgagctcctgtttagccactgcagctggagtcttttgtgcaattgtttctcaccctgctgattctgtggtatctgtgttgaataaa

SEQ ID NO: 834095 - DNA, 100 bp, Homo sapiens
tgaactcattgaacaggtgatgaaggaggagcacaagaattcctcagagagagaagactgtaataatggcgaaccccctaggaagataataccagagaag

SEQ ID NO: 834096 - DNA, 99 bp, Homo sapiens
taaagtctccagcagagtgccgggaagagcacagcaagacccctgaggagaggagcctccagaagatgatgcaaacatcattgagaagatcctggcatc

SEQ ID NO: 834097 - DNA, 98 bp, Homo sapiens
accatcagtgtttgggaatgattctgatgatgatgatgaggtgtcccaggcgctgatccgctccttcagctccaccgcccggaaccgctttcagaacc

SEQ ID NO: 834098 - DNA, 98 bp, Homo sapiens
gtggactttttgaatttcaagaacagtaaagttggaacacagcagagggtgtgtaataaaatacagtgtgtggctgtgacctggcacaagggggcttc

SEQ ID NO: 834099 - DNA, 100 bp, Homo sapiens
cagctctatacaaactaatggaaggatacagctatgcaaatatagaacactaaagtgttacatgacagatgtatgagaatggtacaagaaacttccagga

SEQ ID NO: 834100 - DNA, 98 bp, Homo sapiens
tgaacgagaaccaagtgcggacgctgtgcgagaagatatgggagaagggactactataaatgcaagtgcagatggcaacattggaactatagaggatg

SEQ ID NO: 834101 - DNA, 60 bp, Homo sapiens
atggcctactggggataacattcatgcagaacatcagggtatgcagaagttggctagtca

SEQ ID NO: 834102 - DNA, 98 bp, Homo sapiens
cctgttctgttcagtcctggtgcaggagcctcacagtctactcagagaaaaataaaagaaggcaaaatgagtcctccccatttccatgcaagccagaa

SEQ ID NO: 834103 - DNA, 100 bp, Homo sapiens
cattgtttggatctgttgctgatgatcagaaacttatgatgcctatattcacacacgtatgcgggcgaaaacgtctgacttcctcaaggtgctgaaccgc

SEQ ID NO: 834104 - DNA, 100 bp, Homo sapiens
cttgctaatggacagaccatgcctgtgttgccagggcctccagtacagatgccgtctgttatatcggctaagcctgctccttcaaaaacccaggccagac

SEQ ID NO: 834105 - DNA, 98 bp, Homo sapiens
gcgccgccgggacccccaggacgacgtgtacctggacatcaccggaagatgagaatgtgcctactgctcctgatcctccaagtcaacatttacgtggg

SEQ ID NO: 834106 - DNA, 99 bp, Homo sapiens
aatacctctcgacttgcagtaaattagctcgtggtggaatcctaacatcaactggattttataaatgtcttagagaacatacatatttaccttcctact

SEQ ID NO: 834107 - DNA, 100 bp, Homo sapiens
tggagctccttttcctccacctaccttcccgagttccaagggggcaaaaaagaagaacttattggaattgcatacaacagactgattcggatggatgcca

SEQ ID NO: 834108 - DNA, 100 bp, Homo sapiens
gtgagaagatgacagaggaagaagtagagatgctggtggcagggcatgaggacagcaatggttgtatcaactatgaaggatgacatctgaactggagagc

SEQ ID NO: 834109 - DNA, 98 bp, Homo sapiens
cggaatgcagtaccctcagcagcaggttctctgggagatgctaacaagggaggtcccctttaaaggtttggaaggattacaagtagcttggcttgtag

SEQ ID NO: 834110 - DNA, 98 bp, Homo sapiens
gagaaccagcacttctgggacgcacagagaccgtgaagattccaagttcaggagaactcgaccgatcaacctctccacttctcctacacctgcacagt

SEQ ID NO: 834111 - DNA, 98 bp, Homo sapiens
agacggcgggcatgacggctacaggatgggcgcgaacaatggcaaacagtacggcagtgagggaagacagagatgtcaatgaccccatgcccaaccga

SEQ ID NO: 834112 - DNA, 98 bp, Homo sapiens
cgacattctccacctcctgggaggccagccattcccaaatgccccaaggatgaagaacggagacgatgcccccctcggaagcctggagaacgggacag

SEQ ID NO: 834113 - DNA, 110 bp, Homo sapiens
ggagatacagatctcgaggaagttctcgtcctgacagatctccagctattgaagggagccggtgaaacctgaagaaggcagagatatggcaaacaggattggcgcttttg

SEQ ID NO: 834114 - DNA, 99 bp, Homo sapiens
gctcgttcggtggtttcttgtgaggacgcggcagcccgtggagtcggctgagggaaaagcgaggcaaggcaggcggagcacaatcattgtggagaagac

SEQ ID NO: 834115 - DNA, 100 bp, Homo sapiens
aatcaggacagagcagcatgattccaggtggctcaatggtgtatgcaacagcgttattgcaacaggctaacgaaaacagacaaaattcaactggaaaagc

SEQ ID NO: 834116 - DNA, 100 bp, Homo sapiens
accacatgcaaacatacaagcagtctcacctcagtgggctgagggccatgtcagttttctgccacctacaggatagaccatgaagctgaaggaacttgag

SEQ ID NO: 834117 - DNA, 98 bp, Homo sapiens
aaatatgaatagaagcaaggcagagcaactcctccgcagtgaagtctctgctggtggttctgaagccaaacctctgatcttcacatttgtccccactg

SEQ ID NO: 834118 - DNA, 100 bp, Homo sapiens
tacctacagtgaaatagcatggatttcatccattatgctggctgttatgtacgcaggaggtcaacgaagtgacggtggaacagctggtgcagcagtaccc

SEQ ID NO: 834119 - DNA, 100 bp, Homo sapiens
gtgagactttcacaataagagcagaggatggaacacttcagtgcattcaagtgatgatggccaaagagaagccaccgataactgtagttggagatgttgg

SEQ ID NO: 834120 - DNA, 100 bp, Homo sapiens
gtttctgcagtacatgacgagggggagtctcctccagtgactgctcaagaaactacccgaagaagagtgacaggaccaccctagattcacaggaagggga

SEQ ID NO: 834121 - DNA, 98 bp, Homo sapiens
gccaccccagacctgcagaattaggcatgaaagtcattgagagtcgagcccaaaaagatgaagaaaaaatggaaattcaggagatccaactgaaagag

SEQ ID NO: 834122 - DNA, 100 bp, Homo sapiens
ccgaggtcatcttgaattggatgcgctacacgcagacggaacactcgtgaaactgctcaggccatcaagggtatgcatatacgaaaagccacgaagtatc

SEQ ID NO: 834123 - DNA, 98 bp, Homo sapiens
tccagttgcacatttcctgcaaggactccaaagtggtgagaagaagaagatggagtgtgggagaatggactttcctatgaatgccgtactctgctttt

SEQ ID NO: 834124 - DNA, 100 bp, Homo sapiens
tttttctggaggaaggaaaagagtcctggaatatgaagagacatgagatggtggaagaatccccaggtccaaagtggtacccttctcgagttggtctgca

SEQ ID NO: 834125 - DNA, 100 bp, Homo sapiens
caaaatctcggcaaagaccaatatccacaacagtcgcttgaacagattggcacccgaattgccaaagttttggaaaagtccacggcaatacttcctcctg

SEQ ID NO: 834126 - DNA, 100 bp, Homo sapiens
tggagaactacaggaacctgctttctctcgatgaggataacatccctccagaagatgaagcagctgtgcccccatgggttgacactaacgatgaagaaac

SEQ ID NO: 834127 - DNA, 100 bp, Homo sapiens
gaagcctcatagacagaacgattgatgaagtagttgatggtgtctatcgaagatccctttgaccaggatgactggggagcttggcagaagttcacagcca

SEQ ID NO: 834128 - DNA, 98 bp, Homo sapiens
tgaggggaagagaggaaggaggggcgggctcctggcaaggcattcgctcctgagcggaatcctgcaaaggcacctgcggcagccagaacacaaagtcc

SEQ ID NO: 834129 - DNA, 98 bp, Homo sapiens
gcggagctgacggtggaggttcgcggctctaacggggctttctacaagcgtggagattggtgaaagcgtgagaggggaagatgtctacatcatccaga

SEQ ID NO: 834130 - DNA, 100 bp, Homo sapiens
caacttcaagtagtggaaggagtacagggaagtctataagctttgcaacagaattacagagtatgatgtgtaattattgaaacagatataattggttcag

SEQ ID NO: 834131 - DNA, 100 bp, Homo sapiens
ctttcgacgagtctgaggatgacgtggtggccgggggcggaggtgccagcgatcccgaggacaggtctggggtcataaagaaggaaactggattttggag

SEQ ID NO: 834132 - DNA, 98 bp, Homo sapiens
atatcttatccattcccggacacagtgcagaggagaagcagtctgtatggcagaaagcaatggatcatattgaggactttggcatggcagaggaattt

SEQ ID NO: 834133 - DNA, 115 bp, Homo sapiens
gaaggaccagcgggacgcctgcatcaaggaggccattctcttggttggtgaaaaccctgtgtccttggagaaagctggttcccgttttccagagggggagcccagagcttgaaag

SEQ ID NO: 834134 - DNA, 100 bp, Homo sapiens
tgtcctttcccccctaagctggcacataggagcaaaagttcactaaccctgcagtggaagataagccatcaccaaactcagaaaatgaacaaaattctgt

SEQ ID NO: 834135 - DNA, 100 bp, Homo sapiens
ggagatgtttcagtcggctgggattcggatgataaacaacagaggagaaaagcacggaacaattactgccagggtgtggaaacaggaagagaactagaac

SEQ ID NO: 834136 - DNA, 99 bp, Homo sapiens
tttaggaagaccctggaacgtgccagttgattctgaccatttctcatgaacagaaacacctaggaagggagaactggttctaaatggcttctaagaagt

SEQ ID NO: 834137 - DNA, 100 bp, Homo sapiens
tgtcgcagcgccgggccgccccgactccgagcggctgctgagatgagtgcagattattcagagctgggagagcttcccccacgatctcctttagaaccag

SEQ ID NO: 834138 - DNA, 99 bp, Homo sapiens
cgggacgtgcgcttccccacgtcgcttgggggccacggcgcggacgccatgggcactgtttgaagaagcaaacatggtagcatcaagcattccttgaaa

SEQ ID NO: 834139 - DNA, 100 bp, Homo sapiens
tacaatatggaaaatactcaagccaggtggaatttggataaatctagggaatgaaagctactggttgattttaaagtgcctgggcctcacaggtttggag

SEQ ID NO: 834140 - DNA, 100 bp, Homo sapiens
tgggaatttccaaggggattcaaacttcaacagaatgtggcaaccagtgtccgagctgcaggaggagggaatgaacgccatcaacctgcccctcagccca

SEQ ID NO: 834141 - DNA, 99 bp, Homo sapiens
caagctctatgcctctcttggagcaaatgatgaagacatccggaagaagtgggcctttggagtgacgctgtgggaactcatgactctgggccagactcc

SEQ ID NO: 834142 - DNA, 100 bp, Homo sapiens
ctgaagctccttacacatcccctgataaactaaaggccttagaaaatttacgtgtatacctgtgtgagaaaatcatagctgagagacattttgatcatct

SEQ ID NO: 834143 - DNA, 100 bp, Homo sapiens
ataaccgaagatgtcagcctcccctgtcccgaacgcagtgtgtggaaagggaccatggctaaacctcctggatcattagccagaagcagcagcctgtgcc

SEQ ID NO: 834144 - DNA, 100 bp, Homo sapiens
cacagcccttctgaggagctcccaaacgaggaagagttcatcgattggtggagcaaattctttgcctccataggggagagggaaaagtgcggctcctacc

SEQ ID NO: 834145 - DNA, 99 bp, Homo sapiens
tgcgcaatattgttcaacagcagttctgtggagaatatgcctatgtaactgtgaaaggatttgaagatgatcgaattgaggctttacttcataaaattg

SEQ ID NO: 834146 - DNA, 100 bp, Homo sapiens
cggctgcgcttccgacggggcggccgggggctcagagatccaagtgcgcgccctggcgggtccggaccaagtgtgatccaggccaagccaccaagtacct

SEQ ID NO: 834147 - DNA, 98 bp, Homo sapiens
ccggcggccttgagcgctgagcaagcaaaggagctggaagtcgagtgtgctactcaactcaggagatttggagacaaactgaacttccggcagaaact

SEQ ID NO: 834148 - DNA, 95 bp, Homo sapiens
gaggctggagattcaagatctgggtgccatcattttctggttctgttgatgaccctcttccaggtacaggtttgcagattccgccagcagcacag

SEQ ID NO: 834149 - DNA, 100 bp, Homo sapiens
aggattctatggagaaaactgctcaacactttctcttcagcaacgggtagcagaattggaaaaaattaatgcagaatttttacgtgcacaacagcagctt

SEQ ID NO: 834150 - DNA, 98 bp, Homo sapiens
ggaggaggagtgggaccgcgacctgctcctggacccagcctgggagaagcagcagaggaaggacttgtcttacaaggaccggcactggcatgaagcct

SEQ ID NO: 834151 - DNA, 100 bp, Homo sapiens
cagctatgactacgacctgcaggaacagcctaccgtatgtgaacgggagctgtgtgtgtttgcttttcaaaccctgggagtaatgaatgaagctgctgat

SEQ ID NO: 834152 - DNA, 100 bp, Homo sapiens
actggaaacaatggcatttacagaaagagtcaacagcagtggcaacagggttttggaaatttgcccatctgcatggcaaagaccgatctttctctgtctc

SEQ ID NO: 834153 - DNA, 100 bp, Homo sapiens
ggccgtccagtgttgaaatgggccatgagctcttcaaattggcccagatctttttcaacggatatgcaagaactgtacaggttgctttgatcgacacatc

SEQ ID NO: 834154 - DNA, 98 bp, Homo sapiens
gatggctgtggagagcccgtccgacagcgctgaggtttttgtcatccattggagggacactgtatgaggttggaaagcctgaaatgcaacaaaaaata

SEQ ID NO: 834155 - DNA, 99 bp, Homo sapiens
agaagaagagctgtcttgccacagacccggtatgtggagctgttcattgtcgtagacaaggaaagggttcaaaccttgtactactcagctgatcacaag

SEQ ID NO: 834156 - DNA, 100 bp, Homo sapiens
aaatacactactcatcaaggaagaaccagcaattctgtggtgttcttggtcacacatttatggagtttctgaagggcagtggagattactgccaggcaca

SEQ ID NO: 834157 - DNA, 100 bp, Homo sapiens
attcttcaagatttggttaagaaccttacaagcaatatgtggcgagttcgagaatccagattgcttcctccacagtttcctcaggaaaaaccagtgatca

SEQ ID NO: 834158 - DNA, 100 bp, Homo sapiens
aaggaagcaagcagttcagaagagccaaggaataaacatgcaatgaacccaaaaggattcacagcaggtatgagggaaggaaaacctccaaacacaagag

SEQ ID NO: 834159 - DNA, 98 bp, Homo sapiens
tgtatcctgtgaaagacctgtcttgagaaaaggccagtgttgtccctactgcatagggaaaggaaaacctcttcagcgcaaggtgaaaccacctaaga

SEQ ID NO: 834160 - DNA, 100 bp, Homo sapiens
tacgggaagcaggcctcgccacagagtgatagattcgtgtggcctttcaaatgattgtgaagtggtggaaatggatccaaaataataagtgacttctcta

SEQ ID NO: 834161 - DNA, 100 bp, Homo sapiens
gcttttggctgccctgagctggcagtacctgaccactctctcccagggcaccgaggaagagaaccaatggcagaggccacatgtgcaagcaagatgggag

SEQ ID NO: 834162 - DNA, 98 bp, Homo sapiens
gacgagaagcctgaaaagtcgcagcgagctggagccgccggagatgcgagccacccctctggctgctcctgcgggttccctgtccaggaagaagcggt

SEQ ID NO: 834163 - DNA, 100 bp, Homo sapiens
ctcgggagcggaaacagcggcagccagaggtgcttggtatttctacccctatgggctgcagacattccaccctgctttggtttcctggtgggcagcgaag

SEQ ID NO: 834164 - DNA, 98 bp, Homo sapiens
acagagccgggagttcaagaagaacactccagagagataattgacgaccttgccaacctagtggagaacacagatgaaaaacttcgcaatgaaaccag

SEQ ID NO: 834165 - DNA, 98 bp, Homo sapiens
attgacaatcaatgggccatcttggacggagtcagtggatcggtggggaaaatgctgcttaccctgggccctgggctgtagaaagaagacaccaaagg

SEQ ID NO: 834166 - DNA, 100 bp, Homo sapiens
gtacctgcctccttcagcccactagtagtgcgctggtaaatgctacggaatggttaagtgggcagaccaacatccacctcagcaaaaacttcttcctgac

SEQ ID NO: 834167 - DNA, 100 bp, Homo sapiens
acagtgagcgagatgctgcagatgccgttaaacaaatcctggaggcagttgctgctgagagcagtttcagtgaagaagaggaagaaaaacttcaagcggc

SEQ ID NO: 834168 - DNA, 127 bp, Homo sapiens
cctctgacaccagttctccgctggaaaaagggacaaaagattgcccaaaagaatcagaccatggcaaaagttataaccaccgtactgaagttccctgatgatcagactcagaaaattttggaaagag

SEQ ID NO: 834169 - DNA, 100 bp, Homo sapiens
tcctcatccactgctcgctgcctctccagagaaagctctgggcttgtactcctctccagctgtccccagacagctagtcgcctccagaagtacttcaccc

SEQ ID NO: 834170 - DNA, 99 bp, Homo sapiens
ccaaagacagcaaatggttgacacctttacacagagcagttgcatcttgtagtgagcaccaaggatgacattgatcttgatgccttggctgcagaaata

SEQ ID NO: 834171 - DNA, 50 bp, Homo sapiens
agtcagggatggctcttcctcagatatcagttttagagaatgtggcgtgg

SEQ ID NO: 834172 - DNA, 99 bp, Homo sapiens
aaaagaagcagttcctgatgttacaaatgaacaaggatctcccagcctgtctctcttgctgatcgagaggtgatatcccggcttcggaactgcatcatc

SEQ ID NO: 834173 - DNA, 100 bp, Homo sapiens
gaaattggaattttgatatctttctatttgatagactaacaaatgatgttggtcccattccaagatactcctgtggaagttgaacagaacacagagctac

SEQ ID NO: 834174 - DNA, 98 bp, Homo sapiens
tacctgtgaccagcgctgctggggggatctgggcatgagaccccttctcccaggaggggaggtgatgtgtccaatctagatcccaacttctcatttga

SEQ ID NO: 834175 - DNA, 123 bp, Homo sapiens
gcagaggcagcagcctgccccctgtctactggctgccttccatccaccgatacatgtaccctgagatgaaggtgaccattgtgaggtagatattttgttctaattttccagatgaggaagctg

SEQ ID NO: 834176 - DNA, 100 bp, Homo sapiens
gccatcgcagtgctgcacgaggagcgattcctcaagaacagagttggtaatgcttctcttagaatataatgctgatactactattgttaatgggagtgga

SEQ ID NO: 834177 - DNA, 100 bp, Homo sapiens
ttcgtcgggcctgtggaagaagcgccgcgcacggacttcggcagaggtcaaaatgcagatcttcgtgaaaacccttaccggcaagaccatcacccttgag

SEQ ID NO: 834178 - DNA, 100 bp, Homo sapiens
cccaaggccgggaagagcctcgaggtgtacgcgctgttcagcaccgtcaggactctgctgggccgctcagccatgcctgagggagcccaaggactgagcc

SEQ ID NO: 834179 - DNA, 100 bp, Homo sapiens
gggattcgggttgactagtggtggatccaactactcgctggccagacatacttgtgcagctaaatcaagtccagcagctaaaccaggatccacaccttct

SEQ ID NO: 834180 - DNA, 100 bp, Homo sapiens
atccgagaagagcagagcggagggagccccagacacggggtctgctgcgagttgccttagagcgcaagggccaggccctggaggaggatgaagacacaga

SEQ ID NO: 834181 - DNA, 100 bp, Homo sapiens
atggtgctccatttgaacataaggctgaagcagaggacctggatggaggaacattatcacggcaacataattgtggcacaccactgcctgtttcatctga

SEQ ID NO: 834182 - DNA, 100 bp, Homo sapiens
aagccagacaaacatgaggataacagaagaagttgggcaagcccggtttatacagaagcagatggaacattttcaaggaacaaaccctatctgttttatt

SEQ ID NO: 834183 - DNA, 100 bp, Homo sapiens
ctgcccaggagaacacccgggtgatagtggagatgatccatttcaaggacttgctgctgcacgaggtgattctgggggtccacttgtctgtaatggtgtg

SEQ ID NO: 834184 - DNA, 99 bp, Homo sapiens
acagttgtctgcaccctgttgtggctctataagcagtgggttgaccacacaggtgcagcctcacagaagaaggctttccgttcttcaggatttggacta

SEQ ID NO: 834185 - DNA, 100 bp, Homo sapiens
tgcgagacctgcaagatgacactgaacatgaagaactacaagggctacgagaagaagccctactgcaacgcggaactcaaccctatgtatgaaggatatc

SEQ ID NO: 834186 - DNA, 101 bp, Homo sapiens
agcagaagggaggctccaagacctcatcaacaattaagcctcttttagaagaagcaattcctaatctccacagcccgcctaccacaagcacctcagcccta

SEQ ID NO: 834187 - DNA, 99 bp, Homo sapiens
aggaagccgactgctgcctggtctgcaaagaagtcctttcaagtctctaggactggactcttcctaagcaagtccggaggagctgacaagcacaagtgt

SEQ ID NO: 834188 - DNA, 100 bp, Homo sapiens
aacgtggccgagaggcccgggcgagacttcgggaccgtgtcctgagcgctctccatgcgcccggcgcgagcatggcctgtatgagaagaaaaagacctca

SEQ ID NO: 834189 - DNA, 100 bp, Homo sapiens
ttttaagtataactcagcctgatgtcatttaccaaatccataaggtcctcagaatggttggaatgaccctccagctttgaacagagtacccaaaaagaag

SEQ ID NO: 834190 - DNA, 74 bp, Homo sapiens
gacgacagactcagatccaagtcaacagtgttgtctgcattcaaaagagcattctattaaagctaccttaattt

SEQ ID NO: 834191 - DNA, 99 bp, Homo sapiens
aaatgatcaactattgaccatatagccatgctgtgacctacaagcaaactaaatagccaacatttctgaacccctaagtctcctgtgccaagctgctcc

SEQ ID NO: 834192 - DNA, 100 bp, Homo sapiens
ggatgttggtggtcaagatagaattaggcctctctggaagcattacttccagaatacccagtttgaaggatgacctctaggaagaaagtgttgctgaagg

SEQ ID NO: 834193 - DNA, 100 bp, Homo sapiens
tctgcgatggactattccctggctgcagccctcactcttcatggtcactggagtccaagattgatctccttgatcggaaggaggatgtgaagaaaaaact

SEQ ID NO: 834194 - DNA, 100 bp, Homo sapiens
ctgtctcccagcagtcacgcaaacaacttatcagtagtgacttacagtaaggcatttattaatacagcaaaagaaatttatgaaaaaattcaagaaggag

SEQ ID NO: 834195 - DNA, 99 bp, Homo sapiens
ccaaccccccatcctcactacaaacacaggcctgcaggatataagtatccagtatatggtgtccagtggcatccagagaaagcaccttatgagtggaag

SEQ ID NO: 834196 - DNA, 100 bp, Homo sapiens
ctcagacggaatctgtgacctcgaatcgcacaggggagagaccattctaacacaggtaccgtccagacagtgcctctgagaaagggaacctaaaggcgtg

SEQ ID NO: 834197 - DNA, 100 bp, Homo sapiens
cttgcacttcctggaggtgaaactgggcaagaggccccagcccgtgaaaagtgagacaagttggatggcttgaggactggtactaaaaggaaacgtgact

SEQ ID NO: 834198 - DNA, 98 bp, Homo sapiens
tgtcctggtgtggcacgctctcctcctacccgcagcctggcatcctcgctacaacctcattgttgtgggccgatacccagatcctaatttcaaaagtt

SEQ ID NO: 834199 - DNA, 98 bp, Homo sapiens
cgctcagaaatacaagttctggaacatctgaatacaacagaccccaacagtactttgtttacaggtacatacattacacccctatttctacaaagctt

SEQ ID NO: 834200 - DNA, 100 bp, Homo sapiens
gactctgcaaggagaacattgaacacaacagcacaacatccaccttctgtggcacgccggagctgaggagaagaaagtggaagcaaagaaagaagaatcc

SEQ ID NO: 834201 - DNA, 100 bp, Homo sapiens
ctctcgcgcgggtgtcgctgggctgtcggcctggaccttgcagccgcaatgcctttaaatctacaagacagcagccttcccgaaatgtcactactaagaa

SEQ ID NO: 834202 - DNA, 98 bp, Homo sapiens
aacattgacctcacaaccgagcaaattgaagagacgttaaaatacttccttcgttactatcttggaaggagtgctggcaaaattatccagatatgacg

SEQ ID NO: 834203 - DNA, 100 bp, Homo sapiens
agttgatagaagcattgcaaaatgttgagcataaagacagtgtttgcaggatccagttgcaatgatattgtctgcacagagcaatgtgtaatgagtggac

SEQ ID NO: 834204 - DNA, 98 bp, Homo sapiens
tcaatttgaagctccttctccatcacacagacagcatcgcacagaattattttaaaaaaaagcagtgatccaagcaattgaattggaagcactctggg

SEQ ID NO: 834205 - DNA, 100 bp, Homo sapiens
gaattggatatcaagccagagaagtgcccgaggagagttaacaggtcaagagcaatctgaatccaaatgcaaaggagtttgttcctggggtgaagtacgg

SEQ ID NO: 834206 - DNA, 100 bp, Homo sapiens
gacaatggaagaaaatgaaagccagaaatgtgagccgtgccttccttactcagcagacagaagacagatgcagggttattaatgctgcactggctttagc

SEQ ID NO: 834207 - DNA, 100 bp, Homo sapiens
accccagaggccctcatcaacgcgggagacttccacggcctgcaggttcccattaaggatgtcgaggcggggaatggtgaggaagagtcgggcatgggtg

SEQ ID NO: 834208 - DNA, 98 bp, Homo sapiens
gcctaatcctcccaaagttcttagattacaggagacaaggacggcagcaaggtgacaacagtggtggcaactcctgggcagggtccagacaggccaca

SEQ ID NO: 834209 - DNA, 98 bp, Homo sapiens
ctccctgcccttcgacgggcacaacctcaagctcaggcggcgggaggagcggcagcggccaggcagcccagcttcgcgaaggctctcggtacgatgag

SEQ ID NO: 834210 - DNA, 128 bp, Homo sapiens
ctgagtcaaagaagatgcctcgaactaaacaaattcatcccagaaatctaagaggttttaaaatcaaagatgggaaaatcggagaaaattgcccttccccatggccagcttgttcatggtatacactt

SEQ ID NO: 834211 - DNA, 98 bp, Homo sapiens
gctcggggtggcccccgcttcagtcccagggcagggaagacatgtaaggaatttgcataagacagttatgcaaaatggagctggaggagctttatttg

SEQ ID NO: 834212 - DNA, 100 bp, Homo sapiens
catagccatcgacttcggggagcagcggagctggagtttgttcagatcatcatcatcgtggtggtgatgatggtgatggtggtggtgatcacgtgcctgc

SEQ ID NO: 834213 - DNA, 98 bp, Homo sapiens
tttctggctcccctaaagtgcatcctcctaatgggacccggttttacacttttcaatgattcgcctttgccagtctcatctcgtgtctgctttgttaa

SEQ ID NO: 834214 - DNA, 100 bp, Homo sapiens
cgccttgctcctcgccgcggcggggactgcaggaaagaggttggcctcagcagcaatgagggataattctttcaagaaaggaatgaagagagaagttaga

SEQ ID NO: 834215 - DNA, 100 bp, Homo sapiens
aactttacattagcagatatactattgtactatggacttcatcgctttataagtgaattactggaactgaaacggcagcagcaagagcaagaaagagcca

SEQ ID NO: 834216 - DNA, 98 bp, Homo sapiens
agcggaattccggcggctgccgtgactccagtgcaaatcaggatcctcatgaccagccaaagagaagaagaattaggaagcataaatcaaagaaaaaa

SEQ ID NO: 834217 - DNA, 98 bp, Homo sapiens
cgtcgtgatccagaagtccagagctgaggactgcctgtttgcagattttaccaaatgttgcaagaactctggagttcttatggtagtaaaatgccgga

SEQ ID NO: 834218 - DNA, 100 bp, Homo sapiens
tggaaaagcaagtatctggatcttttaccagctaaatttggagcactgctgatggttcttcagaactcaggaatcgtgttgcatgcattgtttctaccca

SEQ ID NO: 834219 - DNA, 100 bp, Homo sapiens
gaattctttagtttatcggattattgaaggaaagaaagctctgggtgtgcggcagtaccatgtggcctcagtcctgtgccaacgggccaaggtggcgatg

SEQ ID NO: 834220 - DNA, 100 bp, Homo sapiens
aaagcctctgggagcagaagggaggctccaagacctcatcaacaattaaggtgccagcgagatttcagattcctgtaaacctctaaagaaaaggagtcgc

SEQ ID NO: 834221 - DNA, 98 bp, Homo sapiens
cacccatgcctatgatattcttctcctggttaatcaagaattctctatttctgctccgtcatccatgccactaaagatgaggtctatcttaatctggt

SEQ ID NO: 834222 - DNA, 100 bp, Homo sapiens
cagtctctgtcagaggaagatcccttgtgcccatgacgcttccggagacaaccctggaaacactgaagcataaaatcaacccctcggcgggggaggcgtt

SEQ ID NO: 834223 - DNA, 98 bp, Homo sapiens
cacacatcaagttaaatttggtcaacaaaatccacgtcagcagggagaaggttttaaggtgaaaacgaagaaagaaatccggcatgtggaaaagaaga

SEQ ID NO: 834224 - DNA, 100 bp, Homo sapiens
cacctgaactacttcacattttccccaatatatgcatcgagagtaaacatgaggttacgatcctgggaggacttaatgaatttgtagtgaagttttatgg

SEQ ID NO: 834225 - DNA, 99 bp, Homo sapiens
ggtgatgcaagaagtttctaggaaaggccggacaccagggccctgtttgattatgatcggactcgggacagctgcctgccaagccaggggctcagcttc

SEQ ID NO: 834226 - DNA, 122 bp, Homo sapiens
ccacgctcgtgctcatctcctactgtcccacggccaccgaagagatcagctgtttcatgtattagccttgcacatgcggctttatagcattgactctgagtataatccctggagaaagctca

SEQ ID NO: 834227 - DNA, 132 bp, Homo sapiens
agagccttcatttttattttgacatttctgctgtatgcaagttttcacttatctcgaaagcctatcagcatagttaagggaagtctgttagaactgctgtgctgatcaacgggacgctccgtctttgaagaa

SEQ ID NO: 834228 - DNA, 98 bp, Homo sapiens
gcggggacacaggagtcttcctacagtacacacacgcccgcctccacagggcatcttctctgcattcagtttcatccaagtcattccgggatttctta

SEQ ID NO: 834229 - DNA, 100 bp, Homo sapiens
gttctgcaagatggagccaggaggagagcccacaggtgctaaagagagcagtaccctgatggagtcccttgcaggaactgccttctgttgaagaactcac

SEQ ID NO: 834230 - DNA, 100 bp, Homo sapiens
agctccttggggtttccggctgcagggcggtaaggatttcaacatgcctctgacaatctctagttatgaagtgtaacagaacagactttaccacctgaaa

SEQ ID NO: 834231 - DNA, 100 bp, Homo sapiens
gcttagcggcagcccgtatcacatcctagactttttacttcgaggagaagagtctcacgagttgtcctggaagacgactgggtttggattcagaagagga

SEQ ID NO: 834232 - DNA, 98 bp, Homo sapiens
cggggaaccctgcggcggctgtggtcactgcccaggaggcgccggggaactgcagggcgctcgaggccaggcagaagctcctcctggggtagagacag

SEQ ID NO: 834233 - DNA, 100 bp, Homo sapiens
agaccgcctatgcaacttcttatggacagcctcccactgaatgagtccctggaacgccagatgcgtgaaatggaagagaactttgccgttgaagctgcta

SEQ ID NO: 834234 - DNA, 100 bp, Homo sapiens
cgggctcggcgcaggcccgcggggagcgcagcccggcggagctcatgatggagcagtccaagaagtcctccctcatggtggcccgcagtattctcaacaa

SEQ ID NO: 834235 - DNA, 98 bp, Homo sapiens
aaaaggagaaaatgaatgccaaatgggacacgatggagaaggatgaaactgtgagtgactgctccccacacatagccaacatcgggcgcctggtagag

SEQ ID NO: 834236 - DNA, 119 bp, Homo sapiens
ctagaccataaaaataaaaaacatatccgagggtgtcctgttacttccaagtcatcaccagaaaggtctgtttatgatggtgaagaacatggacgtttcatggagaagcttgaaactcg

SEQ ID NO: 834237 - DNA, 100 bp, Homo sapiens
cagcccaccgacaaaatggatttggatctactggacctgaatcccagaattattgctgcaattaagaaaggccgccatggcatcagatgaaggcaaactt

SEQ ID NO: 834238 - DNA, 100 bp, Homo sapiens
agaggtttgggactgccccggcaactccagggtgtctggtccacgacctatcctaggcgccatggcattgtgtccagatctggcaccctgacttatgaag

SEQ ID NO: 834239 - DNA, 98 bp, Homo sapiens
aaaggcggaagcaggaagaattgttacgcaaacaggcttagagaagaaaacgcaggttctgcagcctgaggagaagaagactgtggcataccacgaag

SEQ ID NO: 834240 - DNA, 98 bp, Homo sapiens
aggtagtccccagagctgtcttgctgcaaaagtctacacatctcctgccgacagaagtggcttgaaaacagagtaaaattagggaacctttcggaatt

SEQ ID NO: 834241 - DNA, 100 bp, Homo sapiens
ttcagaaagtttattatgcactgctgttctagagcagggatcagcaaacttgctgtaaagagccagtttttgctgggcaggaaagaagaggaggcagtgc

SEQ ID NO: 834242 - DNA, 100 bp, Homo sapiens
tggcagctggctatcccccattctttgcagaccaaccaattcagatttatgaaaagattgtttctggaaagataattctgaaataatcagcagaaacgga

SEQ ID NO: 834243 - DNA, 100 bp, Homo sapiens
cagcaggacccgaggccaggagccaggggcccagaaggaccttatggattttctgaacccaaacggtagtgactgtactctagtcctgttttacaccccg

SEQ ID NO: 834244 - DNA, 99 bp, Homo sapiens
agcccccgaaaacgctacgtgagctgggccctgggccagaggcagaaaacggacggaagaaaaggtctggccgaacacgacctcgagatgatatcctca

SEQ ID NO: 834245 - DNA, 100 bp, Homo sapiens
aaaacatgattacagggacatctcagtttgcctatctggggcgcctggctcacgaggttggctggaagtaccaggcagtgacagccaccctggaggagaa

SEQ ID NO: 834246 - DNA, 100 bp, Homo sapiens
cagaggagcacgaggatcgtgggagctaagaaggcacctttcacagccagcaggcattggaatatggcaccaaactcgttggaggaaccactccagggaa

SEQ ID NO: 834247 - DNA, 98 bp, Homo sapiens
agcctttggtcataatcgctgaagatgttgatggagaagctctaagtacactcgtcttgaataggtttccaatacttatctacaggaatcgccatgac

SEQ ID NO: 834248 - DNA, 98 bp, Homo sapiens
atatgttgaagtggcctatcccaggacaggtggcactctttcaggagaccaagacacattccaccccagtggggggtcccataccactcatggatctg

SEQ ID NO: 834249 - DNA, 98 bp, Homo sapiens
atgactggaggggcgccctgggggttcagattgcaaggtggcaaggagcagaagcagcccttacaagttgcaaagaatgacgtggccgcacttctgaa

SEQ ID NO: 834250 - DNA, 100 bp, Homo sapiens
tcatgacagaagggagtttgctaaatttgaaaaggagaaaatgaatgccaaatgggacacggtgggaaagcagtgccactctccgcttcacagatgcccc

SEQ ID NO: 834251 - DNA, 99 bp, Homo sapiens
atcttcaaaatttcaggtcttaaatctgcggacaaggcaaaatctcagcaagttcggacctctagtacaataaggcgaacctcctctttggatacaata

SEQ ID NO: 834252 - DNA, 98 bp, Homo sapiens
ttgagagtgctgagtccttaaaatcacttcttcagcttcatgaacatcatactaaaggaatagccaggccagaagaaggaaggcctgtggtgagtggg

SEQ ID NO: 834253 - DNA, 116 bp, Homo sapiens
tgcgaccccagtcatgggccagacctcggtgtccacgctgtccccgcagcccggcagcgagttcacatgagactctgaatatagtggaggagaagaagcgggcagaggttgggaaa

SEQ ID NO: 834254 - DNA, 100 bp, Homo sapiens
ccggaaaactacacggatcgagccagtgagtctgacacgtgggtgaagcacaggaagtttactggatttcttaaaagatggagaaggaagagctctgaaa

SEQ ID NO: 834255 - DNA, 100 bp, Homo sapiens
gtggaggctgtggcaatggaacaggcttgagaaacagatactgtggatggtagggaagaaaagtctgcttctgattcttctggaaaacagtctactcagg

SEQ ID NO: 834256 - DNA, 98 bp, Homo sapiens
cttgtacagagatgtgatgttggagaactatagcaatctggttttcttggcctaatcacacggatgctacagagagatcccaagagaagggcttcttt

SEQ ID NO: 834257 - DNA, 100 bp, Homo sapiens
caacatgtctgtacctactgatggtgctgtaaccacctcacagattccagcttcggaacaagagaccctgcattgatatgaaccatggacaagtatattc

SEQ ID NO: 834258 - DNA, 100 bp, Homo sapiens
attagtgggggaagacaaatatggaaacaaatactatgaagacaacaagcaattttttgagaagatggcgaattagaagatggtgaaatagacgatgcag

SEQ ID NO: 834259 - DNA, 98 bp, Homo sapiens
gcacaactcgacctcctatgactctgcagttagtacccgcaagatggagtacaagggcagcagctggcatgagacctgcttcatctgccaccgctgcc

SEQ ID NO: 834260 - DNA, 100 bp, Homo sapiens
cgatctgcacttcgcattttggcattgacatttaattttagggtcctttatatagaagggagagtagtgcccaccagaagtatgtccgacaagcctggca

SEQ ID NO: 834261 - DNA, 100 bp, Homo sapiens
attgagagaaccatgatggtcaattgccatgcacacttctgggagaatgaggaaaatggggagcaggaggctgacaatgaggtagacgaagaagaggaag

SEQ ID NO: 834262 - DNA, 100 bp, Homo sapiens
gctatgggggaggagattggtgcagagatggcattacgaacctttggccacttgcaggaagaaccggacccggcgaacctggaagtggaccatgatttct

SEQ ID NO: 834263 - DNA, 100 bp, Homo sapiens
aagaacgactacaaaatattgaggcccacttgcggttacagacagatcaagatcagcttcactcagaagatctaggtctggttctataaaaggatcgagg

SEQ ID NO: 834264 - DNA, 100 bp, Homo sapiens
tagaatctgccgtcttttgaagcaccctaatattgtcatgatttcattggagaatttacaacaagctatagggaactttctagagggcagtcacaattca

SEQ ID NO: 834265 - DNA, 100 bp, Homo sapiens
ttattctgttgtatagaatgaagtgttgcttgattctagaatcttcttccctgtggaacagtagagacctagtctgccttctttcacaagataatccttc

SEQ ID NO: 834266 - DNA, 99 bp, Homo sapiens
actctactctgtgatgccaagacagatgggagtttccttgtacaccactttctctccttctatctcaaaggactcagaattcatgattgaagaaatgca

SEQ ID NO: 834267 - DNA, 100 bp, Homo sapiens
cacggcgcagacgcgggcgagctgcggctcggacgccagcggacacgcgggcgagtttcacctgtgattccctggatggttaccattcttttgaatgcgg

SEQ ID NO: 834268 - DNA, 100 bp, Homo sapiens
caaaaagctgatgaagttgtttgggtacgtgcaagagttcatacaagcagagctaaaggatgagtctcatgatcactcatttggaccaatgcctatatca

SEQ ID NO: 834269 - DNA, 98 bp, Homo sapiens
agatgacgggctttctgctgccgcccgcaagcagagttttgacagtgtttcctgccttgctgactcttcttccctctcggacatcacctttgatggca

SEQ ID NO: 834270 - DNA, 99 bp, Homo sapiens
gagccagtcggcgcctgaggcaggttatcaggacaccccatgggagagacttcgatgactctttagaaaaatgtgaagagtatttgagcccaaggtcgt

SEQ ID NO: 834271 - DNA, 98 bp, Homo sapiens
atttgtcagcagttagagagatatatgggccacatgcagtttctctcaggtgttttattccaaacgtctatgctgctttgttcactgcagctcttgtt

SEQ ID NO: 834272 - DNA, 98 bp, Homo sapiens
cggagtcggcggtggcgctccttggagccggctcccgctcctaccctgcaaacagacctcagctccgcggaagttgcgagacggggtttcaccatgtt

SEQ ID NO: 834273 - DNA, 100 bp, Homo sapiens
cggaagatttaaaaagcagccggggcctccgtattgaatgaaagacccagtgcaaagacatcaccatgaacactagcaacttaattcagtgcacaaatga

SEQ ID NO: 834274 - DNA, 98 bp, Homo sapiens
ccctccgaagaggtggccctgcctgcgctcctcctggctgcagagtaccccaccagcgcgtacaagtatgagttctgcccgttccacaacgtgaccca

SEQ ID NO: 834275 - DNA, 98 bp, Homo sapiens
gacagtatgcaaggccacgacccacgagatcatggggcccaagaaaaagcacctggacttgccggtggtggtgtgcacattgagccccggtatagaca

SEQ ID NO: 834276 - DNA, 100 bp, Homo sapiens
aggggtttcttgcaaaacgcttctccggctgcaccctgaccgatgggaccctgctgcagatctgggacacggccggccaggagcggttccgcaccatcac

SEQ ID NO: 834277 - DNA, 100 bp, Homo sapiens
agggtgatatccatggaccgggattatcactttgagtgctaccactgtgagggttctgagcaaggttcaaccagtcaagaacaggccttatctgctcagc

SEQ ID NO: 834278 - DNA, 100 bp, Homo sapiens
tggaatatgccaaggaaaaactggagagcttcatcaaaaatagtgatagctttgataaataattctgaaataatcagcagaaacggaatggaatgccaag

SEQ ID NO: 834279 - DNA, 100 bp, Homo sapiens
aagttgccctcaagaagataactatccaaatagtctatgtataaaagtaaatgggaagctatttcctttgcctagcctgtgtggtgcccctatctccttg

SEQ ID NO: 834280 - DNA, 98 bp, Homo sapiens
gaacatcccaaagacattcggattctgctctctttgctgaactcggttatttcacagacactgatgagctgcaattggaagcagcaaatgagacgtat

SEQ ID NO: 834281 - DNA, 98 bp, Homo sapiens
tgccgccccccactccgcctccgggagaggctggacgtaaagaaagaagtgatgcactcaattctgcaatagataaaatgaccaagaagaccagggac

SEQ ID NO: 834282 - DNA, 99 bp, Homo sapiens
tcagtgagacacaatttatcattgaataagtgttttaagaaagtggacaaagagaggagtcaggtggacagcagcaaggaatcagctgaagcagcttgt

SEQ ID NO: 834283 - DNA, 100 bp, Homo sapiens
ctgaaagtccctgaagatccaacccagtgctttctgctttttgccaaccaggtctgggagggacgttggagggtcatcccatatgatgtgctccctgact

SEQ ID NO: 834284 - DNA, 98 bp, Homo sapiens
gaggaagcgcgggcggacgacagaggatgccgaaccactccaagttctaaagttcctgttgcttcagacaatggatgagcaatcacaaggaatgcaag

SEQ ID NO: 834285 - DNA, 98 bp, Homo sapiens
ctgatcacaggtgcaaacatctcaagccagttcagatgttgctgtttcctcaagttgcaggcagccttaagtgccttgaaacaattttctgaacaagg

SEQ ID NO: 834286 - DNA, 98 bp, Homo sapiens
aatacccctttgaattaattatggctactttgggtcacttggaaaaagcagtggttcttgaacttaccttgaagcatgtgaaagcactaacaaaccta

SEQ ID NO: 834287 - DNA, 98 bp, Homo sapiens
cagaattgaatcacttgaaaagaggctcgaggtggtcttcaagctgacagagaagctgacggaacagaaggagtggatgaagatataattgtgaccca

SEQ ID NO: 834288 - DNA, 98 bp, Homo sapiens
agcctcggaaagtgctcctgcggctgtatggagcgattttgcagatggttatggataaatatggagagttctacggccgagacagaatcagtgaatta

SEQ ID NO: 834289 - DNA, 100 bp, Homo sapiens
gggatagatgtgcagagtccaggaggccactcaaacagtgatgatgtcgacgggaatgactactctgagcaggtggtccgtactgagaagaacagtttga

SEQ ID NO: 834290 - DNA, 100 bp, Homo sapiens
gttgggttgataatctaaatggatgtagccgactcattattgcggcaccatcatgggagcagcattgctggaggactggtgaagggggctttgtctgttg

SEQ ID NO: 834291 - DNA, 98 bp, Homo sapiens
agccagtgtgaagacctccgaaggaccataggaaatgggtcctgatgaatatgaagagatggaagaagaggaggaggaggaagaggaggaagacgagg

SEQ ID NO: 834292 - DNA, 100 bp, Homo sapiens
cgctaggccgtccccgaccttgcctgaacaaggttttgcacactagggaccaagaagccctcggggacactgctgagaaaagactgccgaagggaagacc

SEQ ID NO: 834293 - DNA, 115 bp, Homo sapiens
tggcaagaaatcagcaacagtccttgttaaagtctatgattacaggaatgaagaactgttgcctaattggaaagtgccagcattccagacttcaaaaataaaaaatctgaagagg

SEQ ID NO: 834294 - DNA, 100 bp, Homo sapiens
gtcactccaacctcttttcgctggtcaactttgtagtgtgccaactctttgccttgctagcagccatttggtttcgaacttatctacattcaagcaaaac

SEQ ID NO: 834295 - DNA, 99 bp, Homo sapiens
agactgccagcttcattatgctgccgacagcttccagcaaaaggaggacgtttgcagccagatatttcaaactaaaattccagatggcaaactcaatga

SEQ ID NO: 834296 - DNA, 100 bp, Homo sapiens
caccctctccctgtacagactcctcctgaggaggggccctcctcctctgactgcctccaacgtaaaaataattggaggcatatgctggagttatcagtgc

SEQ ID NO: 834297 - DNA, 100 bp, Homo sapiens
tgaccattacacgcaaagatattcaaactctaaaccatctgaattggctcaatgatgagggcaatgaggacataagaatgtgattctaatttgatacaaa

SEQ ID NO: 834298 - DNA, 100 bp, Homo sapiens
cccataatcacagaagaaatgccactgttggagctggagctctcaaacactgctgtcctgcaccagatgcggcgggaccaggtgacagacacgtgccgag

SEQ ID NO: 834299 - DNA, 98 bp, Homo sapiens
tactgcatgtgaagctcaccgagacggcgatccgggcgctcgagacttaccagagccacaagggttacacatcattttggaatgactgtatatcatct

SEQ ID NO: 834300 - DNA, 100 bp, Homo sapiens
cgcgctacttctagagtcttccactcgggttaaaccgagcaaggcttggtctcattaccagactatgtcagagagtcacaatgaccttgcacaataacag

SEQ ID NO: 834301 - DNA, 100 bp, Homo sapiens
gtctcaggatgttctgagattgcatcaggatattaatgattataaccggagattctcagggcaacccagatctatctctcaaaggccttggttctgacag

SEQ ID NO: 834302 - DNA, 100 bp, Homo sapiens
aaaccactgaaaggggtagatcctaacttaatcaacaacctggaaacattctttgaattggattatcccaaagagtcagaaataccatcagaggaggggt

SEQ ID NO: 834303 - DNA, 131 bp, Homo sapiens
atgactatcctcatagagtggccaagtttccagaaaacagaaatcgaaacagatacagagatgtaagcccatgttggtttgttggaccttgaactcaatcggctgacgaaagcgctatttttggctttagt

SEQ ID NO: 834304 - DNA, 100 bp, Homo sapiens
ctccgtgtccgacccctggaagctgatgctgctggacgccactttccggggtgcacagcaagtgcttcctgtgcttcccagaattccatcatctgactgc

SEQ ID NO: 834305 - DNA, 100 bp, Homo sapiens
ttccatcttcctacaattaccagcaacacagtgtgtcgggtttacatgaggatccacaaagtccacctcctctccctgctgaaaaacctattggaaacac

SEQ ID NO: 834306 - DNA, 100 bp, Homo sapiens
ggagaacccgaagcacctcccggcgccgggacgcttcttctaggctaagaatattgtacacaaagattcttgatgttcttgaggaaatccctaaaaatgc

SEQ ID NO: 834307 - DNA, 98 bp, Homo sapiens
aaacacaccgtatttcatctgtagcattcaagacttcaaactggatcagttcgacagcttagacaagcatacacaatggggaattgacttcttggaaa

SEQ ID NO: 834308 - DNA, 98 bp, Homo sapiens
gcgccctcctgctcgccctggccggtgctctgctcgcgccctgcgaggcccgaggttcgccatcggtggtgtgaactcattgttaagcacaagttcac

SEQ ID NO: 834309 - DNA, 99 bp, Homo sapiens
ccggtctccgcggaaatgttgtccaaagttcttccagtcctcctaggcatcttattgatcctccagtcgagtgttctagaacagatcagacattttgta

SEQ ID NO: 834310 - DNA, 99 bp, Homo sapiens
tgggatttggatgtgggatccggttccttggtgtcatccagccttagcaaaccagaggtgtcagctgtgatgcatgtttaaaaggaaattttcgaggtc

SEQ ID NO: 834311 - DNA, 98 bp, Homo sapiens
tcacagatgcagtctttgatgaatggctgaggagatacaatgctgtgcgacttcatgatagcatatcagaagagggctttcactacttggtgtttgat

SEQ ID NO: 834312 - DNA, 100 bp, Homo sapiens
tacagctacaccatggaaggtgacggcgcccctgggcccaacagcactgtcctggtgcacaagaagaaggtcggtcctgaccgccagcctgtcgtacatg

SEQ ID NO: 834313 - DNA, 98 bp, Homo sapiens
tggtggacagcaaaggctttgatgaatacatgaaggagctaggcattgatctggagaacattgtgtactacaaggacgacacccactactttgtgatg

SEQ ID NO: 834314 - DNA, 99 bp, Homo sapiens
aagctgaagatgctgccaaaagcataaccaatggcagtgatgatggagctcagccctccacctccacagaatttggaggttttggttcagttagtggaa

SEQ ID NO: 834315 - DNA, 100 bp, Homo sapiens
gggaaagggtttcccgttaaccccaatactttaaaagaggatgatgaagtggttctgcagtgcaccgcaaccatccacaaagaacaacagaagctatgct

SEQ ID NO: 834316 - DNA, 98 bp, Homo sapiens
cagacatcaacttttggatccaagctggagtgcctgctgactttggcctggcaaagcaaaaacaagaaaacagtaaactcacctctgtggttggaaca

SEQ ID NO: 834317 - DNA, 100 bp, Homo sapiens
atttcactggggaagagaaaaccagcgtggttctgagcacacggttaatttcaaagcttttcccatggaggtgccttggaacactatgttaattgcctgg

SEQ ID NO: 834318 - DNA, 100 bp, Homo sapiens
tcagtactacttagatcacttaacaggagctgatgctacacacatggatggtgatcagattgttgtggaaatacaagaagcagtttttgtttctaatatt

SEQ ID NO: 834319 - DNA, 99 bp, Homo sapiens
tttggacagtccaatgtcaacattgcccagcaagtggaaataacatcaagatttgtaatgaatcagctagcagaaaataaccctttcctaatggatgac

SEQ ID NO: 834320 - DNA, 100 bp, Homo sapiens
cttatccgcttcttcaactccttcaatgaggccaccatggttctggtctcctggatcatgtggaggataagatcaatgccctcattaaagcagccggtgt

SEQ ID NO: 834321 - DNA, 100 bp, Homo sapiens
aagagatcatagccgagtatgaaagtcaagtcaaagatctattaatgagatgaagcggttggaagaaatgtcaaatatgtttcagagctctggagtccag

SEQ ID NO: 834322 - DNA, 100 bp, Homo sapiens
aaaggcctgacatatctgagggagaagcacaagatcatgcacagagtccacaggtcctggctaccctgggaagagacaagaagtaaatgaagaaagagga

SEQ ID NO: 834323 - DNA, 99 bp, Homo sapiens
tcacctgtgcgggatggaacaaaagggagttctgggaaatcgttcattcatttacagatgaacagaaaagactcttcttgcagtttacaacgggcacag

SEQ ID NO: 834324 - DNA, 99 bp, Homo sapiens
gaagctatttttgtgtttgtccacgtggatatgtaacctcaacagatggctctcgatgcatcgacttctccattgtggttggggtgctgttcccaatgg

SEQ ID NO: 834325 - DNA, 98 bp, Homo sapiens
tgcgcgtttgggatatttctggccagctgcgggccgtccagcggctgtgccacttctacagcgccgtcatgcccagcgaggcccagtgtgtcatctac

SEQ ID NO: 834326 - DNA, 98 bp, Homo sapiens
gaccgtgagaaatatgaacagtttgcggaccaccgcacagtctcaagtgtagtgaagtcaggaaagactcactggttctccagtggaagccgccagtc

SEQ ID NO: 834327 - DNA, 98 bp, Homo sapiens
agaaaggaactcccaagcgactgcaggcagaagctgagacggctaaggttctgtcatatgttgaagaatccatacaccattaagaaacagcctctgca

SEQ ID NO: 834328 - DNA, 100 bp, Homo sapiens
aggtggcctcccgcgtgctggccatgaaggaacagaagtgtgtcccggccagtggagaactctccccggagctccaggagtgggcaccttactcgcctgg

SEQ ID NO: 834329 - DNA, 99 bp, Homo sapiens
gcctacatagagtcgcagggagcccaccgggcgggcctggccaaggtattgttgcagcatctggcagtgagactgaggatgaggacagcatggacattc

SEQ ID NO: 834330 - DNA, 98 bp, Homo sapiens
ttgtgcttcatgggaccggcagtgatgagaagctgaagcagtgcctggtggccgaccttgtccacacagtccatctcgacccctttgaatccagtgat

SEQ ID NO: 834331 - DNA, 100 bp, Homo sapiens
caagaggtgcaaaaatcttagctctctcaatctctgtctgaactggatcataaatgacagtccagttacaacacagggatcacaacaaacacaaccgcca

SEQ ID NO: 834332 - DNA, 100 bp, Homo sapiens
ccgaatccaacaaatcctcaactacatcaaaggcagaggaagcggctgctgagattactaggaagctggagaaacaggagaagaaacgcttaaagaagga

SEQ ID NO: 834333 - DNA, 100 bp, Homo sapiens
cccggagcaccgcccgcgtcccggcccccggcaccatggacgcgccgcgcgcctcggcggccaagcccccgaccgggctctccagcagaactatctccta

SEQ ID NO: 834334 - DNA, 99 bp, Homo sapiens
tggaccctctgggtgggtcagatactgccaagggctacaacctcctgaaacccatgggcaaagtcgtcacctatgacaagcaaagtggatcagcaaagg

SEQ ID NO: 834335 - DNA, 100 bp, Homo sapiens
tgtggtggcggcggcggagactgcgggcccgtagctgggctctgcgagcctcccagtgcaacgtcagcttaaagaagcagaggagccgcagcatccttag

SEQ ID NO: 834336 - DNA, 99 bp, Homo sapiens
acctttgagcatacaccgagagagtgaggagccagacgacaagcacacactatggcgctgaaacggattaataaggaggagaaaatgtgtaattgtaag

SEQ ID NO: 834337 - DNA, 100 bp, Homo sapiens
catcgtccttgacacggatatcacctttgccactgacattgcagagctgtgggctgtgttccacaagttcaaagcttccttcaaaatgtctactgttcac

SEQ ID NO: 834338 - DNA, 100 bp, Homo sapiens
tttactgtggactgtaagcatgagtgaattctggttgtgtttcaactgctgtattgcagaacagcctcagcctttcctgacctggccatcccggggtgcc

SEQ ID NO: 834339 - DNA, 100 bp, Homo sapiens
agcatttctagtggcgtttcttacgaagagtttcaagtatcgttaactgaagacaatatgcaaaattctcacatggatgaatacagaaattctagtaatg

SEQ ID NO: 834340 - DNA, 100 bp, Homo sapiens
tcttgcaaggtctgatggattctgtggaggtcctgtatcacctctttgaggagtttgccaactacgaacacgtgggcatcgtggacatcttcctcggctt

SEQ ID NO: 834341 - DNA, 122 bp, Homo sapiens
tcggcgcgggagcagcacttccacagccaagtgcgggagtccacggttcagcagctggacatggagaaccaacgctcatcacctctgtcgttccccagtgttccacaagaagaaaccttacg

SEQ ID NO: 834342 - DNA, 100 bp, Homo sapiens
ctatatcagataagcttgacattacagccaagatggtgctgtcccagagacaacgagatgaactatccctcatccacctacatcaggcaactggagagca

SEQ ID NO: 834343 - DNA, 98 bp, Homo sapiens
aagcagctggacagcacaattggaatccaccctgtctgtgcagagcacttttcaggattagaagaggctgtgtatagaaacatacaagcttgcaagga

SEQ ID NO: 834344 - DNA, 100 bp, Homo sapiens
ggaatcttgaaaatctgtgacattgcaagggaaaaagtaaataaagctgctgtttttgaagagctcgagctgtaaaagccaaaggtccggtgatgatccc

SEQ ID NO: 834345 - DNA, 100 bp, Homo sapiens
aaagagccctggaatatgaagatatgtgagatggtggatgaatccccaggtggagtacatcttcacagacaagaccggcaccctcacggaaaacaacatg

SEQ ID NO: 834346 - DNA, 100 bp, Homo sapiens
ttgtcaaagccatgggcaacctgcagatcgactttgccgacccctccagagcgaatgcctcggctggggtggagcgcctcttgctggggaacaaatgtga

SEQ ID NO: 834347 - DNA, 100 bp, Homo sapiens
tcggtgggcctctgagatatgccgtttacggattatggattggatatgtctacttctggatgcaaattttactgttgttgtaatgatgccagaagcaaag

SEQ ID NO: 834348 - DNA, 100 bp, Homo sapiens
caggatacatgccatattcccatccttcaagttacacaacacatccacagatgcaacaagtaacgcatccccaattaatagaattgtacaaatcagtggc

SEQ ID NO: 834349 - DNA, 98 bp, Homo sapiens
ggggattctcgacctgctaacagaactggaccttttcgattcttcagaggaggcccctccagccactcagaacttcatcattccaaaaaaggagatcc

SEQ ID NO: 834350 - DNA, 99 bp, Homo sapiens
ttaaagcgatgccattagttgaagaaacttctttactggaagattcgtcagtgacttttcctgtggtaataatagatgggaatttcttagccataggct

SEQ ID NO: 834351 - DNA, 100 bp, Homo sapiens
tttcaaggcattgctaggccctcgagatgtatcctccactcctcgctggccaccatcctgctgcccaacagaagaagctcttctgtctccgatttcctga

SEQ ID NO: 834352 - DNA, 98 bp, Homo sapiens
aacgtgaggatcaagaagccggactacaaggtcgcctacgtgcagctggtcagccatgtcatctgagcctcccccaccaccacagccccccacccatc

SEQ ID NO: 834353 - DNA, 100 bp, Homo sapiens
ctggggcagctgaactgagcgtatgtgccacgccgcccaggagacccctctgctgcaccacttcatggacagcctctccctggggcgctcggagcagccg

SEQ ID NO: 834354 - DNA, 100 bp, Homo sapiens
tggatttagtgtccagtgcgaaaaccaaagtggtggtcaccatggagcattctgcaaagcgggtcacagaaagtcgagagagccaaatgacgattgagga

SEQ ID NO: 834355 - DNA, 101 bp, Homo sapiens
cagcttcatgcggccccactcggagcccctggccttcccagggcaggcgagaagcgcgcaggacccggaagtacctggaactgtacattgtggcagaccac

SEQ ID NO: 834356 - DNA, 100 bp, Homo sapiens
acgcccacaaggaccagcataacctctacaatgggtgcaccgtgaaacttgaggagaggctggagttctggatggagaaatacgataaggacacagaaat

SEQ ID NO: 834357 - DNA, 98 bp, Homo sapiens
cgaaaagttactttcaatggactgaaccagatgattgtcataggtgtggatgtggaagcagccaagcgggcagaagaggaattgctccttcatgacac

SEQ ID NO: 834358 - DNA, 100 bp, Homo sapiens
agagaacatccaaggttccattaaatacatcatgcttaaccctagttcacgaatcaaggttcaatttcagaagcttcagcaactgcgccttacacagtac

SEQ ID NO: 834359 - DNA, 100 bp, Homo sapiens
aggatcgtgcaggatacagcaccacccctcaattattactgggttcctatactgattaccccggaagctttcgagaagctgggattccctgcagcaaagg

SEQ ID NO: 834360 - DNA, 100 bp, Homo sapiens
acaagtgtgtgcatctggctgttagaagaattcatgctcatccggaactctcttgatagagcccaagcagccaagaataaaggcaataaatattttaaag

SEQ ID NO: 834361 - DNA, 100 bp, Homo sapiens
accacaggactgcagctccccagcacgctgtcggaaaaggtaacagaagatggaactcgaaatcccaatgaaaaacctacccagcaaagaagcatagctt

SEQ ID NO: 834362 - DNA, 100 bp, Homo sapiens
cccccaatgcggccgcgagaagcagcgggggggcaggcgatcgaaggcagccttaagtgccttgaaacaattttctgaacaaggactggatccaatcgat

SEQ ID NO: 834363 - DNA, 99 bp, Homo sapiens
gagcatcctggaactgggatctctcctggcaaagactggacaagctgcagcgccagccagcctttgacacctttgatgggtccctgtttgctgtttttc

SEQ ID NO: 834364 - DNA, 99 bp, Homo sapiens
ttctgtatgcctttcacatctatcgccacaattaccgcaaggtgagaaagatcagtctaaagaaaaggagaagaaagtgaaaaaaacaattccttcctg

SEQ ID NO: 834365 - DNA, 98 bp, Homo sapiens
atgtaatgcagtttaagaagtgcaccatagcgggagttgcttatggtgtgtgattaataaagtttcacaaacagaagaaatagacacagatgttgttg

SEQ ID NO: 834366 - DNA, 100 bp, Homo sapiens
acaagactcaccatcatacccagccagagatcctcagcaggagcctatggaagagatagaaaatttgaagaaacaacatgatttattaaaaagaatgtta

SEQ ID NO: 834367 - DNA, 100 bp, Homo sapiens
gggtgcgactacagctcaaagtgaaaagagatttgaatgcccggaatgttctaaaaggtttatgcggagtgatcatctctccaaacatgtcaaaacgcac

SEQ ID NO: 834368 - DNA, 75 bp, Homo sapiens
ttctgtgcctggaaaatatctgttaacagactgcttttacacctacctgcactgggtgttcaacagccatcactc

SEQ ID NO: 834369 - DNA, 100 bp, Homo sapiens
gacggctgaccatctctttgacgctgcctacttcgggcagaaggactctgtgtgtgggaaatgtttcaacgtgcgcaagcgttgcggcggcgggcagagg

SEQ ID NO: 834370 - DNA, 98 bp, Homo sapiens
gtccgggtgcggataagggacccgacactgatggtacagctctgccggggggggaaaaagtggtaccattttgggcgttcttgagcttcagaatgcaa

SEQ ID NO: 834371 - DNA, 100 bp, Homo sapiens
tggagcaaagacaggagccctggaatgtgaagagacatgagaccatagccaaacccccaggaactgcaagcacatgttgaccagataactgaaatggcag

SEQ ID NO: 834372 - DNA, 100 bp, Homo sapiens
gggagcagcagtctttctgatatctaccaggctgtattcatcaccaaagaaaaaacttacaccaatgcagaaatcggttagtccattagtttggtgcagg

SEQ ID NO: 834373 - DNA, 98 bp, Homo sapiens
atcttaaccttcaaccatctggggaaaaggcaaaaatcccatctaccgcaactctcagttcgagagtaaaggtgagaagccttataagtgctcatggg

SEQ ID NO: 834374 - DNA, 100 bp, Homo sapiens
tcccgagaatcactccagctctcctggaagcaggaaacccagcgtttgctggcagaaccagttcctggcatcaaagccgaaccagatgagagcaacgccc

SEQ ID NO: 834375 - DNA, 98 bp, Homo sapiens
gagcagtaccctgatggagtcccttgcaggtgacttaagagattaaaattaatttggttgctgttggttctgaacaaataatgagttcttttatttga

SEQ ID NO: 834376 - DNA, 100 bp, Homo sapiens
gctggttcgtgctgggcaatggtttgctctcttactacagatttacactgactgggccaaccactacctagcaaaatcaggccacaagcggctgatcaag

SEQ ID NO: 834377 - DNA, 100 bp, Homo sapiens
gctggaggttttcaaggccctcacagacaatgggagacacatcacctacttggaggaagagctgggtgctggagaatctggtaaaagcaccattgtgaag

SEQ ID NO: 834378 - DNA, 100 bp, Homo sapiens
ggcgctgggagccgcaccacctaacgctggccgacaacagcctggcgtccgccacggcctttccacagaagaaaacctgtctgcctccatcaccaaacaa

SEQ ID NO: 834379 - DNA, 100 bp, Homo sapiens
actccagagctcccagaaccttcagtgaaagtaaaagaaccttcagtacaagaggctacttctactagcagaaccttctaagtctcagacacgtaaaccc

SEQ ID NO: 834380 - DNA, 100 bp, Homo sapiens
ccgcagagcggggaggaggcggtggccctgctggaggagctctggctccaccgggggacggctacgtgcaggcggacgcccggggccccccggaccacga

SEQ ID NO: 834381 - DNA, 100 bp, Homo sapiens
tcatgaacaagagcaagctcttcaagaactcggcaacaagcttagcgaacactctgacctggtcacagccagagacacttggaaatcctccatctccccg

SEQ ID NO: 834382 - DNA, 100 bp, Homo sapiens
ccgcgtcatgcggctcctcggctggtggcaagtattgctgtgggtgctgggacttcccgtccgcggcgtggagggtgcacttacagagtgctacgatgaa

SEQ ID NO: 834383 - DNA, 98 bp, Homo sapiens
tgcacctgttaacatctttaaggcaggagctgatgaagagagagcagagacagctcgtctggtgtctggatcgtatctattccagagtaaagtcatga

SEQ ID NO: 834384 - DNA, 100 bp, Homo sapiens
aacaaccaaaggaaaagttggtgattctctgctagatgttgtggttgaaaataatctagatattgatggctttggatagtaatgatgacactgaagatgt

SEQ ID NO: 834385 - DNA, 99 bp, Homo sapiens
gtggtcgccagctttctccgaaaggtgtggcaggtgtttccagtgccatggaccacaccttctcaacaacatcaaaagatggggaaggatcgtgttaca

SEQ ID NO: 834386 - DNA, 100 bp, Homo sapiens
aagaatttttgcaacgcgccaaatctaaactggattcatcaaacgtgaggaagcctttggaaaccgggcaccgttgttccagctcctcttccctccctgt

SEQ ID NO: 834387 - DNA, 100 bp, Homo sapiens
aaggagtcggaagaggtctcacgaggctgtcatcaccgccatgcccaagaataaagagtccgaaattgaagttcagaggaagaattgccttccaccgcat

SEQ ID NO: 834388 - DNA, 100 bp, Homo sapiens
aattatccaaataaattgcaagcattctatccaaatgagcaacgatgcctcagggaacacttggaactggttgtacttcatccccctcatcatcatcggc

SEQ ID NO: 834389 - DNA, 100 bp, Homo sapiens
attcttccaggagtgacaaggcggtgcattctggacctggcacatcagtggttctcccaggagaaagccatgttcagttcgagcgccaagatcgtgaagc

SEQ ID NO: 834390 - DNA, 100 bp, Homo sapiens
ccagctggggccctgaggctcaaggagagacgtcgggcagagcgggccgagcagcagcgcatccggaatgagcgggagaaggagcggcagaaccgcctgg

SEQ ID NO: 834391 - DNA, 98 bp, Homo sapiens
tcggcctcagcccccgcaaggatggcctttcctaccagatgccttcaattaagttgcagagttctgatggagagatatttgaagttgatgtggaaatt

SEQ ID NO: 834392 - DNA, 100 bp, Homo sapiens
ggaagagctgaggaccctggaaaatgagctggatgagctggaccctgatttgaaatggatgcagtcagaactgaatgttgaagaagtggtaaatgacagg

SEQ ID NO: 834393 - DNA, 100 bp, Homo sapiens
ggccaccaagattgccaggatggccgggacgaggccaattgccgatctgggattggcacaagactctgctaccagcacaaagagcccaatccttcttggc

SEQ ID NO: 834394 - DNA, 100 bp, Homo sapiens
tgcaactgctggattgctgcaaggctgagggacgagaacgaggtccgagtggacagatgaattaaacacgtacagagtggaagcagcttggaaattgtca

SEQ ID NO: 834395 - DNA, 100 bp, Homo sapiens
tgatttcacagtccgagacgtcaaactcctagtggcttatatcaaaggtgggtggatccttaggaaagcctggaagatttacaataaatgctatctggac

SEQ ID NO: 834396 - DNA, 100 bp, Homo sapiens
ctcctatgttaccgccacctaaaaacaaagaggattttgagaagagtttactcgaactagaagtagatttggataatttggaattagaagatattgacac

SEQ ID NO: 834397 - DNA, 51 bp, Homo sapiens
cttgtccagttactctaacaagtctggagataggaaccaaggctttagcct

SEQ ID NO: 834398 - DNA, 115 bp, Homo sapiens
aatcttgacagtgaatgtgtctcattacattgaataacagctacaggatgttcgagagctggacccttcccgaaggccccgcgtccctggagtggagaactctgacagccctgcc

SEQ ID NO: 834399 - DNA, 100 bp, Homo sapiens
aaatcacaataagtctttagctgcaggtgtgtgggtggcccaccctcaggaccctcaccacccatcagagaagcctgtcattcactgccataaatgtggg

SEQ ID NO: 834400 - DNA, 100 bp, Homo sapiens
atgcaacgccccccttcacacacagtaagacaagttggatggcttgaggactggtactaaaaggaaacgtgactgggaggccattgccagcagaatggag

SEQ ID NO: 834401 - DNA, 99 bp, Homo sapiens
gtcctctgaggccccttgaccagtgtcttgggacaaggtgcgcattcctggtgtgctgcagcgattgggagtgacatactttgtggttgctgtgttgga

SEQ ID NO: 834402 - DNA, 100 bp, Homo sapiens
agtcatgtacagctgaaggtagttgctggaaaccatgacattggcttccattatgaagcagtatagctgtgactatggatctggcagattctttatcctt

SEQ ID NO: 834403 - DNA, 100 bp, Homo sapiens
atggatggttccttgcaaagggcacgtatagcattggtaaagaacgatcgtccagtggagcaattctgtggtgttcttggtcacacatttatggagtttc

SEQ ID NO: 834404 - DNA, 98 bp, Homo sapiens
gggaccagcagctgtcgccgccgctctcagcctgtggacatctctacagcaatgagtgaacgggcacttgctcagaaaagactcagtgagaatgcatt

SEQ ID NO: 834405 - DNA, 98 bp, Homo sapiens
agacatgaagaaagtggagaatatttggagaaaagcatttcaggcagaggaaagtgccagggcagaggccccgaggacttgtcttacaaggaccggca

SEQ ID NO: 834406 - DNA, 100 bp, Homo sapiens
aagttatagagactctgcaagtccttgagtgctaccgtctggaagaaactattcagcgggtcacagaaagtcgagagagccaaatgacgattgaggagag

SEQ ID NO: 834407 - DNA, 98 bp, Homo sapiens
gctgacttggacttcagaggaaggcagctattctcaggatatgacaggggtaacacccttccagatgatttttgagacaactcgagagatgatcgctc

SEQ ID NO: 834408 - DNA, 98 bp, Homo sapiens
tcctgctgtgaaccagcagaatttttgaacagcatgccaatgaagatgtggaaagaatgttactaggaaacaagtgtgatatggacgacaaaagagtt

SEQ ID NO: 834409 - DNA, 74 bp, Homo sapiens
ttctgccgctattgtagcgaactgcggtcgctggaatgtgtgtctcacgaggcatgttttccacaaatcctgcg

SEQ ID NO: 834410 - DNA, 145 bp, Homo sapiens
atcgaagaagcacctagaagaataagagatgtgattaatgtattccaccacctccgccagttaagaggaaaaagtggtgatttacaagtcaagttaaaatgtccccagaagtggccttgaaccgaatatctccaatgctctcccc

SEQ ID NO: 834411 - DNA, 100 bp, Homo sapiens
tccccagtggacattcttcctgacagagcgggatgccaccagcttgtccaaagggaagttccaggagctcctggtgggcatcgttgtggagaatgacgct

SEQ ID NO: 834412 - DNA, 100 bp, Homo sapiens
agcacaggacctggaaaaattacataaaacgttgtgtgacgtgatcctcatggtccaggaaagaaagatacctgctcatcgtgttgttcttgctgcagcc

SEQ ID NO: 834413 - DNA, 100 bp, Homo sapiens
gatgatgatgaaattcagtttgatgacattggagatgatgatgaagatattgatgaccccgacattgtcacctcctctttgaggggttagaagaagctga

SEQ ID NO: 834414 - DNA, 100 bp, Homo sapiens
tcaaggacatcaggacaccgggagtgggagagattggactgggagactcagcagcctttgtttagtaccagtcactcttttactttccaattgttctaag

SEQ ID NO: 834415 - DNA, 100 bp, Homo sapiens
ccgcgtccgccgattcctcctccttggtcgccgcgtccttggctggcgtgttgacatcatggacatatgtgagtccatcctggagaggaagcggcatgac

SEQ ID NO: 834416 - DNA, 100 bp, Homo sapiens
ctaacatcacctgcttcatccttgtttaatgactttggtgccctcaacatctctcagagacgaaagaataccaagctgctattttacacttgaagaggga

SEQ ID NO: 834417 - DNA, 99 bp, Homo sapiens
cgagacccaccggaccccgaacccaggcctactcccaggatgcctacctgaaagggaacgagccgtattctggagaggcccgcagcatcccagagccac

SEQ ID NO: 834418 - DNA, 100 bp, Homo sapiens
tggaggagccaactagcatggaagtgcaggaatgcaactcccatgtaaatcgagggaagattgtgctttgtttgtttcggaactttatcaagaattgttc

SEQ ID NO: 834419 - DNA, 100 bp, Homo sapiens
ggaaacccacaggcacacccaaatcagccatgcagaagctggggacagaagtatttgaagaggtctataattacctcaagagagcaaggcatcagaatgc

SEQ ID NO: 834420 - DNA, 100 bp, Homo sapiens
cctctatctcgcttttcccctggccttctgtatcttcatggtgcggctcatcttcgagagaaacttcgtgaatactttcattcaatttaagaagcccatt

SEQ ID NO: 834421 - DNA, 112 bp, Homo sapiens
ccgggggctcagccccctgtgattccacaggcacaacctgtgagacctccaagttccacttccaaacatgagttccaggccgagacaaagaagcttttggacattgttgccc

SEQ ID NO: 834422 - DNA, 98 bp, Homo sapiens
gagagatgcttaaaaatcaccagttactttaatgagttaatgttcgtgaagaaattgaagagttttttccaagaatgtggaagataaatcaagataaa

SEQ ID NO: 834423 - DNA, 98 bp, Homo sapiens
atgttcaggatgctgaacagcagttttgaggatgaccccttcttctcacaattgtggcaattaataaagacccagaagctccaattttccaagtggca

SEQ ID NO: 834424 - DNA, 100 bp, Homo sapiens
taacttttgatgatcatgatacagttgataaaattgttgtcacccttctagacttcagaccacagacaacctgctccccatgtctcctgaggagtttgac

SEQ ID NO: 834425 - DNA, 100 bp, Homo sapiens
agaaaaggccagtgttgtccctactgcatagctgtgagaaaaagccctgagctgtctccctaaatggctgtgtctcctgcagtggcttggtaccatcaag

SEQ ID NO: 834426 - DNA, 100 bp, Homo sapiens
gtgcttgattttgtgcaggatccgtgctttgcccaaggagatggtctcattaagatttcctcctctgatgctcctcttcagcctttggtatcctctcctt

SEQ ID NO: 834427 - DNA, 99 bp, Homo sapiens
ccagtgagaagcagtataccatttatatagcaacagccagtggccagttcactggcagccactgatcacaatgtggataatacaacagaaatattcagg

SEQ ID NO: 834428 - DNA, 100 bp, Homo sapiens
cgcttgatgagaaggacccacggcgtctgttcgaagccgaatatgtgggagtccatgtcctgcagtgtggcctgatgtaatcaaactaccatatttcaac

SEQ ID NO: 834429 - DNA, 51 bp, Homo sapiens
aaaaatttcaggattggtactacaaggacccagatgatgtggtaccagttg

SEQ ID NO: 834430 - DNA, 100 bp, Homo sapiens
cggcctgtccggcactgctgaaggaaaccactggactttgggaaaaccatgtggcagagtcgggaccacaaacatggtaactgcaaatccaaggaaaagt

SEQ ID NO: 834431 - DNA, 98 bp, Homo sapiens
aaagagtcaacagcagtggcaacagaaccagagcttgtagaaaccactttaatcatatccaggagtttgcaagaaacaggtgcttaacactaattcac

SEQ ID NO: 834432 - DNA, 100 bp, Homo sapiens
ttttgtgaagcggcagctgaggagactccggcgctcgccatggccgacgaaaagcccaaggttttgaacgaagaatgtgatcagaactggtacaaggcag

SEQ ID NO: 834433 - DNA, 98 bp, Homo sapiens
agctttcaaagtccagtcaaaatatcaggcaatcttgctgccaatgatctctccccgtcccgaatagccagactacagaagatccttcacagctatgt

SEQ ID NO: 834434 - DNA, 98 bp, Homo sapiens
ctacggctggggccgtcccagttcgcaatgagaaaggttgctaatgcaataaaggcttcattgcctcatggtcccatgaaatctaataaggaaggtac

SEQ ID NO: 834435 - DNA, 98 bp, Homo sapiens
acttcggggtcacatatgtggggacaaagcagctgagtcccacagagttcagtgcattcagaacaagcccctgtattttgctgatcggctgtatgact

SEQ ID NO: 834436 - DNA, 98 bp, Homo sapiens
atccatttcgtggttcacccgctgccgggcaccgaggaccagctcaatgacagaaatcgagctatagcagattatcttcgttcaaatggctatgaaga

SEQ ID NO: 834437 - DNA, 100 bp, Homo sapiens
tggaatcagccattttaccaagaaagttgggtttcttttactggcaaatagtacttcaagagcacagtcttatgtaagtctggctcttgctgattgaatt

SEQ ID NO: 834438 - DNA, 100 bp, Homo sapiens
atttagaatttctacttattctgagattgattgtaccaaacatcgctgtgtagatgaaagtgaaggacgtctttgggctgaaagcaaagggttcctgtac

SEQ ID NO: 834439 - DNA, 100 bp, Homo sapiens
ctgctgacgcttgatgagaaggacccacggcgtctgttcgaaggagaatccatatgctacactgaccatgactttggcacagaccaacttctgcaagaaa

SEQ ID NO: 834440 - DNA, 100 bp, Homo sapiens
acatatgaatttgacaaatgggctccttctgtggtgaagatttcttacaagcatttatgaatgcagccttttgtgcaaatgtaatcgacaattgtgtcaa

SEQ ID NO: 834441 - DNA, 99 bp, Homo sapiens
gctgctttcagtagccccattaattaaacaaccaccatgtcgagcaaaaaggcaaagaccaagaccaccaagaagcgccctcagcgtgcaacatccaat

SEQ ID NO: 834442 - DNA, 100 bp, Homo sapiens
ctgcctgacccgaagtaccgacccgagttatgcccaccctccaactttgcgacggaaatgtgtcatcgaaagccaggttctccaaatgtcaactgtcaag

SEQ ID NO: 834443 - DNA, 100 bp, Homo sapiens
catcatatcacagtatcagttaaggagcttgatttgtttttggcatactacgtgcaggagcaaggacatggatttgattgacatactttggaggcaagat

SEQ ID NO: 834444 - DNA, 99 bp, Homo sapiens
aagaaacagcttcatgaactccaagccaaaatcacagctttgagtgagaaacaggggcagtgatcggtgatggacagtctgctgtggccagtaacattg

SEQ ID NO: 834445 - DNA, 100 bp, Homo sapiens
cctctgcccccccttccccacgcaaccccagatccatttacactttacaggagcgcttgtgagtgccttggctgatgacaccttacacttatggaattta

SEQ ID NO: 834446 - DNA, 98 bp, Homo sapiens
cagattatttcagcagatctattcagatggttctgatgaagtgaaacgtgccatgaacaaatcctttggctcaaaatctccttcgccaagaccaaaca

SEQ ID NO: 834447 - DNA, 109 bp, Homo sapiens
gtctttggatttagcgtttcagaattgcaattccaaaatgtgtaagacgggatattctcttctgtgctgtcaagggtgaccctggcagcaaccccaacaaacgccagag

SEQ ID NO: 834448 - DNA, 100 bp, Homo sapiens
ataagattcctttactacagcagccaaaacgagaagaagaagaagtgttagaccaggatctgaaaaccatgagtgaacgcctcaagaataggtactacgt

SEQ ID NO: 834449 - DNA, 98 bp, Homo sapiens
cctggatcaccgacagcacagacagaatccctgctaccaatcactgtgtccactactatgatcttcgtaacactaaacagccaatcatggtattcaaa

SEQ ID NO: 834450 - DNA, 99 bp, Homo sapiens
tttcatcaaggatatgatctgtttagtgaacttggaccctacatgaaggatcttggtgcacaggagtttgacctggatgtggttgctgtggtgaacgac

SEQ ID NO: 834451 - DNA, 98 bp, Homo sapiens
aaatattctagaaggggaaaagctacttcaagatgacagtcatgtccctttccagggacctcaaggacgactttcacagtgacacggtactctccatc

SEQ ID NO: 834452 - DNA, 98 bp, Homo sapiens
gccctccatcttgcagcccagaagctgaagaaaaggtgactggtctcatgagccctgaagaatgaactcagaggaggttgtttacatgaggttctccc

SEQ ID NO: 834453 - DNA, 100 bp, Homo sapiens
gatccaggacatacaagtgaaaattggggggagagacttatatcttcttacaggacatactcaggtttttctgaggtgggggagatagatgcagatgaag

SEQ ID NO: 834454 - DNA, 100 bp, Homo sapiens
ctgacacacagtggagacaaacctttcaaggaaattcagttcatgaagataagaagtttcttgacaaatacatgccccagttcatgaaacatcttcatta

SEQ ID NO: 834455 - DNA, 100 bp, Homo sapiens
cgcccccgccggttcgcgtctctctgctgcggcgcggggaccgctgtgctctcgagtactgggatttaatgaatttgtctgaaaaacatgataagatacc

SEQ ID NO: 834456 - DNA, 100 bp, Homo sapiens
cggcgaaggctggtccgaaaacgcaagaaagatttaacacagactgcttcaagcaccgcaagggtttaatagactacaacttccactgtttccgaaaagc

SEQ ID NO: 834457 - DNA, 100 bp, Homo sapiens
cctcggcctgttgttgtgaatcgccagacctttgtaacacccggaagtctgaagtgtcttgggacaaggtgcgcattcctggtgtgctgcagcgattggg

SEQ ID NO: 834458 - DNA, 100 bp, Homo sapiens
agccctgaatcagggttccttgaaaagggaggaacggcgacatcctgacctagagcccatcctaagctcaatgtcaattgctgcaagcttagtgagtgaa

SEQ ID NO: 834459 - DNA, 98 bp, Homo sapiens
agaatttagaggagaaactgacgtatcgtcagtgaagcaggagcatcaatctacagtgtcagccctgaagctaacaaagagatgccagggctggaccc

SEQ ID NO: 834460 - DNA, 100 bp, Homo sapiens
gggcaccaaggcggtcaccaagtacaccagctcgaaatgtccagaaggcttcttgggggaatattgtcaacatcgagacccctgtgagaagaaccgctgc

SEQ ID NO: 834461 - DNA, 100 bp, Homo sapiens
acccaggaaaagactcaggacggacaagcacagtcttcggaaggttctgatctacaatggccaactggacatcatcgtggcagctgccctgacagagcgc

SEQ ID NO: 834462 - DNA, 98 bp, Homo sapiens
caagatttaacattccaacacataaaaattatttatccaacagctcctcccagctgcttttctaacccaaactgtatgtcttgatgacactacagtaa

SEQ ID NO: 834463 - DNA, 98 bp, Homo sapiens
agagatccaagtgcgcgccctggcgggtccggaccaagggtgttcctcccacctcggatgaggagaagaagccaattccaggagcgaagaaacttcca

SEQ ID NO: 834464 - DNA, 98 bp, Homo sapiens
tgatacggagctactggtttatgcaatgactttggtgaacaagatgatgaggagtctgatgaggaagctgtgaagaaaaccaacaaatgtgtactagt

SEQ ID NO: 834465 - DNA, 98 bp, Homo sapiens
atagtcatgtcctcctaccaagacttctactgcaagaaggagcgtcgcttcacctcgggaataacttagcttgcacatgaatgcagtcatgcaaaccg

SEQ ID NO: 834466 - DNA, 99 bp, Homo sapiens
tcagaatcctccaaaaccagtcatgaccactagacccacagctgttaaagcaacagcctctctctagtgacctgggtagtttgcacggtttggctggaa

SEQ ID NO: 834467 - DNA, 100 bp, Homo sapiens
tcgatcctcaggatctgcaggtccaaacattcaccgtggagaagctactggagcctctcataatccagtgttgcattgatgaatcatagctgttgcccca

SEQ ID NO: 834468 - DNA, 100 bp, Homo sapiens
gctacctaaaaacaggcagattttactatattccgctactttccctcttagtgtacagaagttcatgcatgcagccagtaaagatcccagagaagttcga

SEQ ID NO: 834469 - DNA, 98 bp, Homo sapiens
cccagcagtcacgcaaacaacttatcagtagtgacttacagtaaggaacgagtggaatatctctttctcataatttttacggtggaagcgtttttaaa

SEQ ID NO: 834470 - DNA, 98 bp, Homo sapiens
cggtgttcccctggtttaactagcctgtttgaggaaacctcggactttgctgaacccaccacctgcctcaccaacaaccagcactcctgaaccggata

SEQ ID NO: 834471 - DNA, 98 bp, Homo sapiens
agcaccagctcatcctatccaagcttctgagggaggaggacaacaagtactgcgccgactgcgaggccaaaggcattgtttccaagtcgtacgagtgc

SEQ ID NO: 834472 - DNA, 99 bp, Homo sapiens
ggaaggctcggctcttgtgtttgaggacatcttcagattgattgcgttctactgtgtcagtaggctgtcttttgaagaagatcagaatggggaagagtt

SEQ ID NO: 834473 - DNA, 100 bp, Homo sapiens
ctgtcgccaacaggcaacatcagcagcgcccccaaggacttcgccgtctatgatgaaaactttcggaagagaaagttgcctgtggtaagttcagttgtta

SEQ ID NO: 834474 - DNA, 50 bp, Homo sapiens
atcagcgaggcctggcggctagtggagagtgatcagcagctggactgtgc

SEQ ID NO: 834475 - DNA, 100 bp, Homo sapiens
ccacagttcagtgtattcgttctgtgcctgaactcaaagatgcccttaaaaggctcctggatttggatttggaattgcaatatctggtggacgagataat

SEQ ID NO: 834476 - DNA, 100 bp, Homo sapiens
tgatgggatgccggcagtcagagtcaaaacagagcttttggaatctgaacaaggggcagaacagattatatttgatcatttttctgatcctaaatttgtt

SEQ ID NO: 834477 - DNA, 100 bp, Homo sapiens
ctgaatcaaagaatgtggacgatattttgaaaccaccgggccgggagagcagacctgagagagaaccaaagaggttgttgtaaatgtggatgatgatgga

SEQ ID NO: 834478 - DNA, 98 bp, Homo sapiens
ccagagccaaggccaagctctccaagttcagcatccccaagcagggggagtttcctccagcttatggaggcatatctgaggtgaatcaacctgccgaa

SEQ ID NO: 834479 - DNA, 100 bp, Homo sapiens
gtcctctggtcttccctgaccccgcggccggacgacccaagcccgctgagcaggatgagggtattgttgcagcatctggcagtgagactgaggatgagga

SEQ ID NO: 834480 - DNA, 109 bp, Homo sapiens
cgcctatcccggcatccttgaccagaagtttgaggtctccagtgttgccgactgcttggactctgcaggtcctgcagacattcgctttgtctgggagaagaatgggcga

SEQ ID NO: 834481 - DNA, 100 bp, Homo sapiens
gcttttgatttattaaatttaaatagattagtaactggcatagacaactatgggcaggaaggagccatggctctggacgggataaggatgccagatggct

SEQ ID NO: 834482 - DNA, 107 bp, Homo sapiens
aatatttccttggcaaatataattagacaactaagtagcctaagagtattgtgaggattgagatgactggagtgtgtgtggcctggagagttgctcaataaatatat

SEQ ID NO: 834483 - DNA, 100 bp, Homo sapiens
cggaagaggaggctgcggcgggagacactggctctgagaccccgactgcccgacggctctacactgccagcgggcctcctgagggctacgtcccctgttg

SEQ ID NO: 834484 - DNA, 100 bp, Homo sapiens
gtctcaatttggcctttaccatcgcccatgagctgggccacaagtactccaaagattcaggtttactcacgtcatccagcagagaatggaaagtcaaatt

SEQ ID NO: 834485 - DNA, 100 bp, Homo sapiens
ttagaagatgacatgggagtgatcgtgttaaatttgaacctagtggtaaaacagggtgatttcaagagacacataatcagacagctaaatggagtctgag

SEQ ID NO: 834486 - DNA, 100 bp, Homo sapiens
tctggctggcgttgctgcgctccgtggccggggagcaagcgccagaaccagccacgcagcaagcctctctggatgtggagaagccggttggtgttgctgc

SEQ ID NO: 834487 - DNA, 100 bp, Homo sapiens
ggacatcagcctctacaaagaagtgactgactccagatctggaaatgtttattacagaggtcagctgggaagagctaccactttaagtgtaactcctgaa

SEQ ID NO: 834488 - DNA, 99 bp, Homo sapiens
catggatgaacttcaggatgttcagctcacagagatcaaaccacttctaaatgataaggatgaatttttagatgtgatctactggttccgacagatcat

SEQ ID NO: 834489 - DNA, 100 bp, Homo sapiens
tggccaactctgcctgcaagaagactgagcaccatcactatgtggttcgatacaagaggctgttttcctagcgtggcttgctgcctttggtaagaacatg

SEQ ID NO: 834490 - DNA, 98 bp, Homo sapiens
cgaagatccggactctgggtgttttgctaccgtgaccgtttaggatctctctttcctcatcatggtacatttgaagtaataaagaatacagatctcga

SEQ ID NO: 834491 - DNA, 100 bp, Homo sapiens
accgaacagatttgcttgttgggtcgaacttgtggctattcatttattctcaccaggctatatgttctcctttcagccaagacctttcaccagtgcaggg

SEQ ID NO: 834492 - DNA, 99 bp, Homo sapiens
gttgccatccacagtgatgttgatgctagttctgtattgttgcagcatctggcagtgagactgaggatgaggacagcatggacattcccttggaccttt

SEQ ID NO: 834493 - DNA, 100 bp, Homo sapiens
cccgcctagtccacggagctcaatggcggcagtcgcgctgagggactcggctcaggtgactctcctattccatctgtttcttcgggatcatcttcacctc

SEQ ID NO: 834494 - DNA, 100 bp, Homo sapiens
ttcctgttgatggtgatgaagacaggaccccagccatgataggctgctcgttcgtggtcaacaggaagttcttcggtgaaattggtcttctggatcctgg

SEQ ID NO: 834495 - DNA, 98 bp, Homo sapiens
aagaggagctgaagaaagaatttattgagaaagaagctaagttggagaatacttatctctggcgcacatcactatatttggctgcctctgccagtgct

SEQ ID NO: 834496 - DNA, 100 bp, Homo sapiens
gagccaggagcgacgtcaccgccatggcaggcatcaaagttcctgagggaagacctcaattaccatgacccaacagtgaaacacagcaccttccatggtg

SEQ ID NO: 834497 - DNA, 100 bp, Homo sapiens
agttgaaggggacatgtatgaatctgcaaacaatcgactcattgctatggacagtgctatcaccctgtggcagttccttcttcagctcctgcagaagcct

SEQ ID NO: 834498 - DNA, 99 bp, Homo sapiens
acgtaaacaccatcgcatccaccacgtctcaccccacgagacctacttctgcatcaccacaggcatctatcgagctgtgcctattcgagtcaatccaag

SEQ ID NO: 834499 - DNA, 98 bp, Homo sapiens
ggccctggacacagcaatatctctgggctttcacagtttgaatcagaaactgcaactggaacaggagaagcttagttctgattataacaagctgaaaa

SEQ ID NO: 834500 - DNA, 100 bp, Homo sapiens
gcccggatggcccgtggccctgacacggagaacatggatggccggctcctgccagagttcaacatggcggagcctcccttgatcttcgaatgcaaccacg

SEQ ID NO: 834501 - DNA, 98 bp, Homo sapiens
gagagacgcaagccgctcaacatcgatcaccttggtgaagacaaactgagggagaaggccaaggagctgtggcagagcatctataacttggaggcaga

SEQ ID NO: 834502 - DNA, 100 bp, Homo sapiens
ggggcacacaggaggcaccttggataagctggagtctattcctggattcaatgtcatccagagcccagagcaggactcagaattcatgattgaagaaatg

SEQ ID NO: 834503 - DNA, 98 bp, Homo sapiens
aaaaatgtgcatactcacagagttagagagagggatggtgtttcctgttttccagcacccaacataacttgtaaggattccagtggcaatgaaacaca

SEQ ID NO: 834504 - DNA, 98 bp, Homo sapiens
aaattgcgctggaccgtcgccttgctcctcgccgcggcggggactgcaggtgcacagcgacttcaccgcggcagccaccaggggcgccatggccgtca

SEQ ID NO: 834505 - DNA, 50 bp, Homo sapiens
gcgccgtcgcgccactcctccgatctattcttattctgagaaggaactta

SEQ ID NO: 834506 - DNA, 100 bp, Homo sapiens
atttggtcatggaagaacaactgacttgtccaaggtttaccgacaagactgtgaaactttcgggatggtggtgaaaatgctgattgaaaaagatccttca

SEQ ID NO: 834507 - DNA, 98 bp, Homo sapiens
cggcgggagcggcggcaagaaaaatgccagccagaagaggcgttcgctgcgcgtgcacattccgaaatggaggcaaacgaccattttaactttactgg

SEQ ID NO: 834508 - DNA, 100 bp, Homo sapiens
ataaactgcctcttgaaaaacgaactctaatcctcactcatttcccaaagagcctccctattaaggaccttgccgtagacagcgcctctcccgtctacca

SEQ ID NO: 834509 - DNA, 100 bp, Homo sapiens
agcggcagccccgactctcagcactgcgggcgatgatgagatctcatttgaccctgatgacatcatcaccaacatcgagatgattgacgacggctggtgg

SEQ ID NO: 834510 - DNA, 100 bp, Homo sapiens
ttaaggacgggaagaacctcatcgctgcgacgaaaagttatcaatactctggctgaccatcatcatcgtgggactgactttggtggaagtccttggttac

SEQ ID NO: 834511 - DNA, 100 bp, Homo sapiens
aagaactgttgaaactagcaacatctataagtgaaaccttggaagagaagttcaggcccatgaagttcatcagaaaattctggcaactgatgttagttcc

SEQ ID NO: 834512 - DNA, 99 bp, Homo sapiens
taagaatgagaatgaatctgaaaaaagagaactggtattcaaagaggatggtcaggcctggagaacagctccctccagagatgactgtggcaagatctt

SEQ ID NO: 834513 - DNA, 98 bp, Homo sapiens
ttgaagacgctaaatggagcagagatggctcccatcaggattttccacaaggccacaataagccagctaaggagtgaacttgccaaaggcccccagga

SEQ ID NO: 834514 - DNA, 100 bp, Homo sapiens
aaccggaaaatagctgaactggaaaagaacattgttggtgaaaagaccaaggatctctctaggagctgacactcgaaccttcacgacccattcggatttt

SEQ ID NO: 834515 - DNA, 51 bp, Homo sapiens
cttctgttttccattccacatgagtcagacgaatctagaacatgatgtcta

SEQ ID NO: 834516 - DNA, 99 bp, Homo sapiens
gaaaacctccttatgctgatatacatccaatgagggaggcaggtggaagtcatcataaagtttctgtttcacccgtcgtccatgttcgaggactctgtg

SEQ ID NO: 834517 - DNA, 100 bp, Homo sapiens
gggccgggaacccgccggggagaggcacccgagacccacggagaccgccctatatatgcaaacagatttgcagtaccaacctatgcagccaagcaacctc

SEQ ID NO: 834518 - DNA, 123 bp, Homo sapiens
gcgtacacggtgtgcaaggggagtcgtggcgtcgtctgcgaccgctgccttctcgggcacgtgtggttctcaaatataggcattctgatgggaacttgtgtgttaaagtaacagatgatttag

SEQ ID NO: 834519 - DNA, 99 bp, Homo sapiens
ctgaaccctacatggaagcgtttctcagtccccgttcagcatttctgtggtgggaaccccagcacacccatccagccattgagcaggagaagcggagtg

SEQ ID NO: 834520 - DNA, 100 bp, Homo sapiens
aaagagccagaggcctttgactggtccccagtggtgacctatgtgtgtgatcttgaagggaacaggttgacagatttgcaatggaattagaacaaagccg

SEQ ID NO: 834521 - DNA, 100 bp, Homo sapiens
ggctgagctagcagtgagcaccttttggcccaatgaatatcaggatattggtgctggaaaaggcaaatactatgctgtcaattttccaatgagagatggt

SEQ ID NO: 834522 - DNA, 99 bp, Homo sapiens
tctggaccctggagtacaccccgcagcacagccgcgacttcaagggagagtcccgtattctcagagtaaaagttgtttctggaattgatctcgccaaaa

SEQ ID NO: 834523 - DNA, 100 bp, Homo sapiens
gcaaatctggctatcttctccatccagcctgcctagggtagttaaaagacgagtgaatgctctcaaaaacctgcaagttaaatgtgcacagatagaagcc

SEQ ID NO: 834524 - DNA, 99 bp, Homo sapiens
tgattttaaagttatgggactacaacagcagccacaggaaccttgaaactgtaagagtaaatgggtccagtaattggaatgactccagataagagagct

SEQ ID NO: 834525 - DNA, 100 bp, Homo sapiens
agctcgaagaaggcgagcagggtgcgggagagccccttgcagaagacgccgtacgaggattttgagtctgcatggctaattctgaatgacaatggcaatg

SEQ ID NO: 834526 - DNA, 100 bp, Homo sapiens
gaatcaaaagaatatttagaatgcaggatggagaggtgttcaagcagccctggccagggatcatgcgcacagtctatgggaaccacgaacgctttgagac

SEQ ID NO: 834527 - DNA, 100 bp, Homo sapiens
agccaccacgcgcccatgagccccgggagcagcggcggcggggggcagccgctcgcccggacccctcagagtttatgtggccgaggcagacaagtggaat

SEQ ID NO: 834528 - DNA, 100 bp, Homo sapiens
tactttcatgttggatagtgctgctatgataacagtacatactccaaggagaggattaatagactttaacagcaatgctcaggatgtaagctgttttcag

SEQ ID NO: 834529 - DNA, 100 bp, Homo sapiens
tggggagatgaacccaacctagtgggtgtaatacatcatgaactgcaggaaactagaaaaactgcttttggaattatctctacagtgaagaaacctcggc

SEQ ID NO: 834530 - DNA, 100 bp, Homo sapiens
agcccagccagtaccaagaccagtcaaggatgctatctaaatgggccttttaattcaaatctactgactatcccgaagcaaaggtcatcttctgtatcac

SEQ ID NO: 834531 - DNA, 98 bp, Homo sapiens
tcttccccagctctgcagccacatactatccgtttgttcaggaaccaccagtgacagagaaaatgtttataggaggccttagctgggacactacaaag

SEQ ID NO: 834532 - DNA, 98 bp, Homo sapiens
agaagctttttgagagagatgaggatttgcccaccctttaaacaggttgactatagtcaatggggccaatggagccaagtgtatggaaacccacaaca

SEQ ID NO: 834533 - DNA, 100 bp, Homo sapiens
ccatgtcttccattgatctagtcagtgcctctgatgatgttcacagattcagctcccagggatcagagaaggctgaagaaggtggagaaactgaggcaca

SEQ ID NO: 834534 - DNA, 100 bp, Homo sapiens
caagagtcataggattagatgatccaagtcaccaagaaattactgtctcaagtgatacggctttgaacttggcctactccagcatttacggcagctaccg

SEQ ID NO: 834535 - DNA, 99 bp, Homo sapiens
gaaaatggcggtgtctacagtgttctcgacttcgtcgctgcaatggctgccatccggaagaaactggtgattgttggtgatggagcctgtggaaagaca

SEQ ID NO: 834536 - DNA, 100 bp, Homo sapiens
gaagaagttcgtgccccaattcctcaaaagcaggaaatactggtggaaccagaaccattatttggtggccctagcagcaacaagcctcgtgtgatccggg

SEQ ID NO: 834537 - DNA, 98 bp, Homo sapiens
cggggctctcacgctttctgctcaagtcctgtcctcttctgaccaaagaggtacagctctgccggggggggaaaaagtggtaccattttgggcgttct

SEQ ID NO: 834538 - DNA, 100 bp, Homo sapiens
cgcaagtctttcttgttataaggtcacctttggctcttcagagatgcagggacacacgatgggcttctggttaaccaaactgaattatttgtgccatctc

SEQ ID NO: 834539 - DNA, 100 bp, Homo sapiens
acatcttcccagagtatgaatttctctatgatgagcactaacactgtgggacttggtttgcctatgtcaagatcacaggcagcactaacaccagaataac

SEQ ID NO: 834540 - DNA, 100 bp, Homo sapiens
ccagaagttatcaagacttttttgaagccatccgcagaaggggagacacattttatgttgtgtcatttcgaaggtattctaccttgtaaatactgttatt

SEQ ID NO: 834541 - DNA, 98 bp, Homo sapiens
atgttggagaactatagcaacttggtatcactagttcccatggagaatgttgcaacaattgctgattgtgccagtgtgattgaaggagtcagtcggag

SEQ ID NO: 834542 - DNA, 101 bp, Homo sapiens
tcttcctcctccgccgttgacaggctgtctacagtaccaactgcccagtgtgggaggaagcgttccggttcttcctacaagaccctcaaagccaggagctc

SEQ ID NO: 834543 - DNA, 98 bp, Homo sapiens
taaatgctgtcttttcccaaaagacaggctcttcacctgaagtctctggctgatgaacttgctcttgtggatgttttggaagataagcttaaaggaga

SEQ ID NO: 834544 - DNA, 100 bp, Homo sapiens
tgcatatgatcaactttggacttcttttgagattgccagatgtatttccactacacaaaattttccacctctgggataccttactacttgggaattcctc

SEQ ID NO: 834545 - DNA, 98 bp, Homo sapiens
ggaggcagaagcatgctaagaacaacagtcaggccaagccttctgcctgtgatgcatgattttgaagtcagaggagatgtggtcaatggaagaaacca

SEQ ID NO: 834546 - DNA, 100 bp, Homo sapiens
attgaaaaccatcagaacatgattaagcagtttaaaggctctagaccaagatagaacagcccttcagaaagtgaagaagtctgtaaaagcaatatataat

SEQ ID NO: 834547 - DNA, 100 bp, Homo sapiens
atggagaatcagccccataagaaatacgaactcacggaaaagtagcagctctgaatccttaagtgacaaaggctctgaattgaagaaaagctttgatgct

SEQ ID NO: 834548 - DNA, 98 bp, Homo sapiens
gaaggtgatgcccaagatggaccaggacctggcctgggccgtcagctactacatccggttcttcatcacctacatccctttctacggcatcctgggag

SEQ ID NO: 834549 - DNA, 100 bp, Homo sapiens
gattcgccgaggcaccgaggcactcagaggagaagttccacctggtgccaagcatcaacaccatgagtggcagtcaggagctgcagtggatggtacagcc

SEQ ID NO: 834550 - DNA, 100 bp, Homo sapiens
gagctgtgaggaggagaatgcagtataacaagaggattgcctgatccagccaagatgcagagcacttctaatcatctgtggcttttatctgatattttag

SEQ ID NO: 834551 - DNA, 100 bp, Homo sapiens
gagcacattacctgcatggatacctccatcagagttagctgcagccaacctgagtgttgatacaacctacaggtggatgaaaatactaggaaaagtttat

SEQ ID NO: 834552 - DNA, 99 bp, Homo sapiens
gaaagcatctgtgtggtatggcaacagaatactctgaaacatatttcccagtggcccaaactctttattaggaaaatggacgaattgaatagcaaatgg

SEQ ID NO: 834553 - DNA, 100 bp, Homo sapiens
catgaacagaaacacctaggaagggagaactggaatactcccccagttgcaagaggcgcaggaccgtggaagacttcaacaaattctgcacctttgtctt

SEQ ID NO: 834554 - DNA, 98 bp, Homo sapiens
agggacagatccagggacacaactgggataaccggtattcctgatttaaggaacagtgacaccccaccccagtcccgtggagggggtctgggcccacc

SEQ ID NO: 834555 - DNA, 100 bp, Homo sapiens
ggccaggctgatggagagctgaacattactcttccagaagaggcccgatgagagaaagggaaagttaaggatgctggagcagaacaatggatttctcttt

SEQ ID NO: 834556 - DNA, 100 bp, Homo sapiens
caacccggccatcgaggccctgctgcacgacctcagctcccagaggatcaccagcgtgggtgtgaccatgaagctcatggatgaggtcgccgggatcgtg

SEQ ID NO: 834557 - DNA, 100 bp, Homo sapiens
gggcctcttccagagccaactgctgtgccagggcccaagcctagcatctaagcctgttccctgttcaggactcctcctatttatggagcaggcacccaac

SEQ ID NO: 834558 - DNA, 100 bp, Homo sapiens
atctcccaagtagccagtggtgacatcaacacaagtatccaagctctgacacagaggcagagctggcagattcgagtggtctctaccatgagggctcccc

SEQ ID NO: 834559 - DNA, 142 bp, Homo sapiens
ttcaatacctacaaaatcttccccaaaataaaaaaattgcaagagagagactattttcgttattacaaggtggtccagtgcttgctggggatggagaaggaacatgaagtagaagtcaatggcaccgacacattgtggggag

SEQ ID NO: 834560 - DNA, 100 bp, Homo sapiens
tctggagaaggacattatttcggacacatctggtgacttccgcaagctgatggttgccctggcaaaggacattcatcttcaaagaaatctgaagattctc

SEQ ID NO: 834561 - DNA, 50 bp, Homo sapiens
ctggttaatagaccctgagacacaaaagacggagtctcgctctgttgcca

SEQ ID NO: 834562 - DNA, 100 bp, Homo sapiens
ttggcgctcggggtgactcttctcaaatgccttctcatccccacatactctctttaagaactgtgacctgatgtggaagcagagcatatggacatcgacc

SEQ ID NO: 834563 - DNA, 99 bp, Homo sapiens
gaagtaaagatgcagaggaaagaaaagaatacattcctgattacctgccacccattgtgtcttctcaagaaggttactctggccaggacttcgactggg

SEQ ID NO: 834564 - DNA, 100 bp, Homo sapiens
ccagtcaaagcttgacagaaacacgagctttcggcttccatcccttcgcagtacagatgacaggaatgtgaattggacccttgctgcgaaggaagtacct

SEQ ID NO: 834565 - DNA, 100 bp, Homo sapiens
aagaactagtttcccaaacagatgttaagacattcttggaagccttaccgctgtgtgtccttctccatctacacggcctggggcgagcactgtgagcacc

SEQ ID NO: 834566 - DNA, 100 bp, Homo sapiens
tcgtggtagcagacagcaacaaccagtgtattcagcactttcatttggacccgtggatacccattgaacagatgcttgaaacctgcaagtaatcttcaga

SEQ ID NO: 834567 - DNA, 98 bp, Homo sapiens
ccctgatcatcaagccagacaacttctggcagaaacagaggactaattttggcagttctaaatttgaatttgagttatcaggaactgttgccgttatt

SEQ ID NO: 834568 - DNA, 100 bp, Homo sapiens
gaagctatacagacttccagatacatggcccatgaacatggacatgagcatggacatcataaaatggaacttccagattatagacaatggaagatagaag

SEQ ID NO: 834569 - DNA, 100 bp, Homo sapiens
gccaacacctgcgaggagtgtgggaagcccatcggctgtgactgcaagtcaatgcaaaatcatgctgccgtgttccgtgtgggaagcgtgttgcaagaag

SEQ ID NO: 834570 - DNA, 100 bp, Homo sapiens
tggtcacttttcagctgcggggacttgaattcagaggatttaagtgccctgtatgctcaaaatttgtatcctcagatgaaatggatttgcatcttgtaat

SEQ ID NO: 834571 - DNA, 100 bp, Homo sapiens
agatggtgccgggggtcgctggctctgctgctgccgccggcgaaggaggaggcgttgccgggtccagcaagactatgaatctctgttccaaatgctttgc

SEQ ID NO: 834572 - DNA, 100 bp, Homo sapiens
caggagtcaatggcaaggctaaagaaattaatgacaataatggatagtatgaatgatcaagtgtgtgacttccttggagagaagattgcatctgttttgg

SEQ ID NO: 834573 - DNA, 100 bp, Homo sapiens
agaccctgaggaaggccatgaaagggctcgtacgaggatgtcgtccaggaaagattgtgcagatgactgaagcagaagttcgaggcttatgtatcaagtc

SEQ ID NO: 834574 - DNA, 100 bp, Homo sapiens
tggccgggcccaggtcccttcctccgtttcccaagccggctgtgcaccccaggagagatggtgaagttcctcactgcaatcatcttcaattgctctgccc

SEQ ID NO: 834575 - DNA, 100 bp, Homo sapiens
attgaggcaaaggctaatgtgtgctgtgttaaattcagcccctcttccagataccatttggctttcggctgtgcagagctgacaatttactggttcatca

SEQ ID NO: 834576 - DNA, 99 bp, Homo sapiens
ccgaggtgccgggtgacaaggccgccgaggaacaggggggtcctggtgttcctggaacaggctctcatccagtatgcccttcgcaccttgggaagtcgg

SEQ ID NO: 834577 - DNA, 99 bp, Homo sapiens
caagatgtccaaccgagtggtctgccgagaagccagtcacgccgggagctggtacacagcctcagatatgttccatttaaggctctgaagatggggaga

SEQ ID NO: 834578 - DNA, 100 bp, Homo sapiens
cgcctcactatggcagcagcacggcacagcacgctcgacttcatgctcggcgccaaagggctggttgatatgtgaagagccaacctgtcgcaatcgaact

SEQ ID NO: 834579 - DNA, 113 bp, Homo sapiens
gatggcagcctctttcactccatacattgcaatgagcagcattggtgactacaaagttcatctctaacaagtatttagtgaaacgacagagcagagactatgatgtggaatgg

SEQ ID NO: 834580 - DNA, 100 bp, Homo sapiens
cacctgaggcacccgaagaagagaccatccatatttccaggtcatgtccatcctgttgcatggggatgctgcatttgctggccagggcattgtgtacgag

SEQ ID NO: 834581 - DNA, 100 bp, Homo sapiens
ggaacacgtagaaagtgcaagcaaagatgatgctgtgtatctggacaatgagaaagaaagagaagagtatgtcctgaatgacatcggggtaattttttat

SEQ ID NO: 834582 - DNA, 100 bp, Homo sapiens
ggacattgagtcaaaaatccctctaaatatggaggagcctcccgtggaggaaccggacacttcacggccatggtatggaagaacaccaagaagatgggcg

SEQ ID NO: 834583 - DNA, 98 bp, Homo sapiens
agcgaagcccacaaccccgccgggcacatgtgaaagatgtaccggctcacgctgcgcacaagtaaggaagccgtttctcagagattatgtgaattgct

SEQ ID NO: 834584 - DNA, 136 bp, Homo sapiens
atcctgaatcctgtttcctacccactattcagccattgggtcacaagcgatgaaaagagcaccttgaaggtgtttaaaattatccaactgccatagagctaaattcttttttggaaaattgaaccgaacttctact

SEQ ID NO: 834585 - DNA, 100 bp, Homo sapiens
gaattacaagaaattctatgaggcattctctaaaaatctcaaggttggtgatgacaaaactgtgaagcagtggaaaatggatgggccaggctatggagac

SEQ ID NO: 834586 - DNA, 100 bp, Homo sapiens
atcgattcaactatgtggtcatgcagttgcagagtaaccagagagcacagagaaatgctggtgaaactggccaaacagaacaccaacaaggccaaagact

SEQ ID NO: 834587 - DNA, 100 bp, Homo sapiens
tctaagtactttctcctactccataaagacttcaagcagctgctgcttttgtgatgtttcctgttcagacaatcacaactgttgactcctgtgttgtaca

SEQ ID NO: 834588 - DNA, 98 bp, Homo sapiens
aggttgggctgaactgcagtgggagaggagaagagatgctggcgtgaagggaaccctcggcctcaggaaagtcggacagtattcagtggctcagtcag

SEQ ID NO: 834589 - DNA, 100 bp, Homo sapiens
tccctggactctgcagagtgaagagaaaatagcaaacgatccagacggcagggagtgcatcaaaggtgtgaacacagaagcaaaacggacaagtcggttt

SEQ ID NO: 834590 - DNA, 99 bp, Homo sapiens
agacagaacctttgacttggtgttgaaagtgaaatgtcatgcctctgaaaatgaaggctgagtcatcactagagagtgggaagggcagcagcagcagag

SEQ ID NO: 834591 - DNA, 99 bp, Homo sapiens
gcagggctggcaccctgtgtcacaggagctgaccgcttcacggacgacattgcctgtatgatcgggtaccgaccttgcccctggatgaaatggtgctgg

SEQ ID NO: 834592 - DNA, 100 bp, Homo sapiens
tctgagccagctgaaaacactgattttggatgctctgaagaaagatgtaacctggatggagaggaccatgccgcagagcgaacggtggaggatgttttcc

SEQ ID NO: 834593 - DNA, 100 bp, Homo sapiens
aaattaactcaggcccagatctttgactacggtgaaatccccaactttccccgaagtacagatttcaggtatgctgctgaaagtgggaatcctctacatt

SEQ ID NO: 834594 - DNA, 100 bp, Homo sapiens
aggcgctggctctttggcggctcggaggagcggctgctgctgctgctgctgctgctggtggcccctttgcagcaagatcagcattggacacagctgcacg

SEQ ID NO: 834595 - DNA, 100 bp, Homo sapiens
caaactgactttgcagccacggagagagtattgggaaagggtcgttgtggtgcatagacccagagtatagacaaaatctaattcaggctttgaaaaagac

SEQ ID NO: 834596 - DNA, 98 bp, Homo sapiens
aaaatcgcgacgactaaatacccgtgtctgaagtcttcaggcgagctcaccacatgctacagcatgtgtttgatgatctcagaggctcagtatccttg

SEQ ID NO: 834597 - DNA, 99 bp, Homo sapiens
aagagtgtgcagcggattaaagctaaagacatagttcctggtgatattgtagaaattgctggcacaattctgctttcccaggaactgcatcactcagga

SEQ ID NO: 834598 - DNA, 100 bp, Homo sapiens
ggacactacgtgctgggcgacacgctgggcgtcggcaccttcggcaaagtgaagagaggagcaccgaacagccagttccctgagcagtggtgcccttacg

SEQ ID NO: 834599 - DNA, 100 bp, Homo sapiens
acagcctcctttgaccagatccatgactgttggtggaactggcatttgatccatatgaatcgtatgctcgagatattttgcgacctggttttcatgatcg

SEQ ID NO: 834600 - DNA, 100 bp, Homo sapiens
aatggagaaggtgaaccctatgacccagatgtgctctactatattttcctgtgtattcaaaaggccgaaatagaactatttgtgaacagacttgattcag

SEQ ID NO: 834601 - DNA, 99 bp, Homo sapiens
gcagatttgaaaattcacccttgtagagtcattcctgcctttgagcggactcccttttaaggtacatcaggaacgtctctatcaagaatacaatttcag

SEQ ID NO: 834602 - DNA, 98 bp, Homo sapiens
cagattggatgcctgctgcgcttggagccgaacctgcaagcccagatgacatagacactaggtttttacagcaattctctgatgaccttgatatggta

SEQ ID NO: 834603 - DNA, 98 bp, Homo sapiens
aggactatcgggagaaagtggagtccgagctgagatccatctgcaccacggtgctggcttcaacggaccacaccaaaatgccatctcaaatggaacac

SEQ ID NO: 834604 - DNA, 100 bp, Homo sapiens
ggcgtgtcaggtggttgcggagctgggaccagttactctccacaagaaaattcacacaaccacagtgctcttcatagttcaaattcacattcttctaatc

SEQ ID NO: 834605 - DNA, 99 bp, Homo sapiens
tgagtctctctgtgttgttgctggtgaaaagttccatgccattgcagtgtcaactaggcctcagttacttttcagtttgcccaaattgagcccatctca

SEQ ID NO: 834606 - DNA, 100 bp, Homo sapiens
caaaagctgagtggaaaactttatctggttgatttagctggtagtgaaaaggatcaggtcatccagctgatgaacgcgatcttcagcaagaagaactttg

SEQ ID NO: 834607 - DNA, 98 bp, Homo sapiens
ggcaccgccatccccatttctatggtcctcctcacctatggccgctggcagatgctgtcttcgcaggtgccatgcctacaatggcaagcgtcaagctg

SEQ ID NO: 834608 - DNA, 98 bp, Homo sapiens
gggcctgcaggtctctgtcgagcagcggacgccggtctctgttccgcaggatgattataagcgccatggctatggctagtgttaaattgcttgccggt

SEQ ID NO: 834609 - DNA, 100 bp, Homo sapiens
tctgcctggttctgggaaaacaacattgtctcggaagccagttgagggaagttctccatgaatgtacgtcacaatgatgatgaccgaccaaatccctctg

SEQ ID NO: 834610 - DNA, 100 bp, Homo sapiens
tgctgccgccggcgaaggaggaggcgttgccggatgttcgtgctgccagagagcagatcagtattggaggactggcgtaccccccgctccctctacatga

SEQ ID NO: 834611 - DNA, 100 bp, Homo sapiens
gaggcggagaaggggcttcctgagcgtcccagtacactgacagaggtgcaagcggtcttctctgtcttctttatggccagtaaaattctccagaagagat

SEQ ID NO: 834612 - DNA, 99 bp, Homo sapiens
tgtcccttccgagggtcagtttcccgagtacccaccagagggcgccactaaactgggtttgacgccagtgaacaaaagaactatgtcacctcctaagga

SEQ ID NO: 834613 - DNA, 100 bp, Homo sapiens
gacgatactctgaccgttttagtagtcgcagacctcgaaatgatagacgcacatcaaagctgcccaatgatctgcttgatttgcagcagccaacttttca

SEQ ID NO: 834614 - DNA, 98 bp, Homo sapiens
atctactactcctcctccggcagaacctgtttctctgccacaagaaccaccaaaggttgatgaaaaaaccgtaggagaacctggttggctttatggta

SEQ ID NO: 834615 - DNA, 100 bp, Homo sapiens
tcagtggcctgtcgttggaagagtacaagctgatcctgtccacagctcccgcctcaggccgagatgaggagcccttcagaatagctgctgtctctgggag

SEQ ID NO: 834616 - DNA, 100 bp, Homo sapiens
gaaaaagctgcagcaaagagacaagtcctaaatgccgactcagtggaacaatcttttgttggattgaaacagctaatcgaaaggcagcaacaggtggaag

SEQ ID NO: 834617 - DNA, 98 bp, Homo sapiens
ccaggacaatagtgcattattctccaaatctagttttttcaggaattgagcaggtagcatctaaaggaactggtttaaatcctaatgccaaagtatgg

SEQ ID NO: 834618 - DNA, 99 bp, Homo sapiens
aagttaagaagctctttcgaatcaagttgtccccaacagtgggccttggacaagattcgctatgagagcctgacagacccttcgaagttggacagtggt

SEQ ID NO: 834619 - DNA, 99 bp, Homo sapiens
agaacttatcagagattgagaatgtccatggatttgtttctcattctcatatttcaccaataaaggctttccttaaagtttcccatgtctcaatggact

SEQ ID NO: 834620 - DNA, 98 bp, Homo sapiens
ccactcggcgtcgcgcggcgtgccctgcttgtcacaggccagaagcggactcctagaagaggggagcagcaaggatggaatgacagccgtgggccgga

SEQ ID NO: 834621 - DNA, 100 bp, Homo sapiens
aggagacttggaacgcacagaggaacgagctgagctggcagagtcgatgccgcagctgagcctgtcctggctgggcctcgggcccgtggcagcatccccg

SEQ ID NO: 834622 - DNA, 100 bp, Homo sapiens
gagctagcagtgagcaccttttggcccaatgaatatcagatcctttcccggagttcagttatgggtgtgagaggtttgcaaggatttgtgggaagtacct

SEQ ID NO: 834623 - DNA, 100 bp, Homo sapiens
ccatggggagcctcagcggtctgcgcctggcagcaggagtcggatggtcagggctgccctttctgtcgttgtgaaataaaaggaactgagcccataatcg

SEQ ID NO: 834624 - DNA, 98 bp, Homo sapiens
ctgcaggcgttggttcccctctttgacctgatgtaggtgcaaaaaactacagacatctctgtgctgtttattacaacaagaatcctgggtttgagatc

SEQ ID NO: 834625 - DNA, 98 bp, Homo sapiens
ttggtgcatgaaagtcttctaaccattccaaaatctctttcagtgtctttgcctcagagattttcttcattttcccaccagctcagtcatgcatatca

SEQ ID NO: 834626 - DNA, 100 bp, Homo sapiens
ctcttcagcggcatctcggaccgcatgctacaggacacggtgctggccgccggttgcaagcagatactggtgcctgtaataaaaggcctgacatatctga

SEQ ID NO: 834627 - DNA, 100 bp, Homo sapiens
catgaatgcaaagatagctgattttggcatggattccgtgaaggaacaacacctaaacccaagagggcagctgttgcagcatccagttcatcttaagaat

SEQ ID NO: 834628 - DNA, 100 bp, Homo sapiens
ccccccgaagtcatcccagaacccgaggtcagcacacagccacccccggaagaaccagcagaaaaagtcctacctggagcgaagcgttaaggaagctgag

SEQ ID NO: 834629 - DNA, 100 bp, Homo sapiens
gggttcatcctacatttttgtgcaagaggttgtggaaaggaggagaacccctgctgaaattcgagaggagtttgagcggctgcagagagagagagaagag

SEQ ID NO: 834630 - DNA, 98 bp, Homo sapiens
cctggaccctgcccagcagaatttgtatagagatgtgatgttggagaactacagaaacctggtctccctagatcgaaagctgctttgcgtcgcagttg

SEQ ID NO: 834631 - DNA, 100 bp, Homo sapiens
tgcttttggctgccctgagctggcagtacctgaccactctctcccagtagatatgtttgacgacttctcagaaggcagagagtgtgtcaactgtggggct

SEQ ID NO: 834632 - DNA, 100 bp, Homo sapiens
cagcagaccttcaagatagacattgaccccgaggagacggttacaggaggttccagtggcatcgggaagtgcattgctatcgagtgctataaacaaggag

SEQ ID NO: 834633 - DNA, 98 bp, Homo sapiens
cagctgtacagccacactaactgtgacaggaaagagacggctttggaggcctggcagcagccagaggaagaggtcgtggccgtggcgactggagcgtg

SEQ ID NO: 834634 - DNA, 98 bp, Homo sapiens
gccaatatggaattgccaggttcttcactgaatatactatactggcaattgctggagaagattttgcaattgttgcttctgatactcgattgagtgaa

SEQ ID NO: 834635 - DNA, 98 bp, Homo sapiens
gaggagatgaacgtctgtgacaacctgggagaccacctggtggggaacgtgtacgtcaaggggcttcaagaagcgtgcacctcgggcactcaaagaga

SEQ ID NO: 834636 - DNA, 100 bp, Homo sapiens
gaagaggcggcagacagcgggatggtggagccagggcaagatttactgcttgctgctttgagtgagagtggaattagtccgaatgacctctttgatattg

SEQ ID NO: 834637 - DNA, 99 bp, Homo sapiens
aagaatgccaattcctcctcccccgccacccccacctggtcctcctccacctcccacatttcatcaggttggttttcagaagatcctgacactgacata

SEQ ID NO: 834638 - DNA, 98 bp, Homo sapiens
tagctgcacagacataccatggctgctgctcttcatcctcttctgcattgggatggacttgtcttacaaggaccggcactggcatgaagcctgtttcc

SEQ ID NO: 834639 - DNA, 98 bp, Homo sapiens
gaccacactgcctttgacaacgcttccaagcattgctattacaactgtaagccaggagtgcagacactcgcctatggggacatgaaccacgagtggat

SEQ ID NO: 834640 - DNA, 99 bp, Homo sapiens
acaaagtcagcccaggcagacctccaggttgctgcttttgctcagaggacatccatgaccctaatggtctttttgttcaagataaagtgattttttgcc

SEQ ID NO: 834641 - DNA, 100 bp, Homo sapiens
tcctcatatgaatatggatggagactacataaatatatttccaaagagaaaagctgcatatgattcaaatgatcctccaggtcctattgacaatactaag

SEQ ID NO: 834642 - DNA, 100 bp, Homo sapiens
ccaggacggagacctcaccctgtaccagtccaataccatcctgcgtcacctgggccgcacccttgggcgagtgaacgtgaaaaatgaagaaattgatgaa

SEQ ID NO: 834643 - DNA, 99 bp, Homo sapiens
tcaacatttataaaacagtgtggtggtatccttacaatcatcctgcttcttgtacatcactgactgttggagcagaactactgagaaaaaccaggcatt

SEQ ID NO: 834644 - DNA, 99 bp, Homo sapiens
aaagtcttgccttcttcttaggtttgcattgtggaagatatcaataagcgcagagagccgctccccagcctggaggctgtgtatctcatcactccatcc

SEQ ID NO: 834645 - DNA, 100 bp, Homo sapiens
tgggtttctgcgtccatgtgaagcatcctcataagtaacaaatgtggcaattattttggatctatcacctgtcatcataactggcttctgcttgtcatcc

SEQ ID NO: 834646 - DNA, 100 bp, Homo sapiens
attctggatttgacagctcagttgcctctcagatcacagaagctttagtcagcggaccaaagccacctattgaaagccaccctgaaaatcaggaactcca

SEQ ID NO: 834647 - DNA, 100 bp, Homo sapiens
ccacggccactccagtgccaacagccaattctacaggttcaaaccttgtactactcagctgatcacaagctgcttgatgggaacctactagatggacagg

SEQ ID NO: 834648 - DNA, 150 bp, Homo sapiens
ctaaaataaacctgacctcctgtgggttcccaaacactaacttgtttccctgggaatttggaggtgggttcgaaaaagtcgtccttggtggaaggaaccatgaactggcatctccccctcttcctcttggcctctgtgacgctgccttcc

SEQ ID NO: 834649 - DNA, 100 bp, Homo sapiens
ttcaccacacgcacgcaggcccccctccaagcccttgcctccagcccctgctccagatgagtatcttgtgtcccccattactggggagaagatccccgcc

SEQ ID NO: 834650 - DNA, 100 bp, Homo sapiens
cctgaacctccctgaggccagcttactgagggctgttttgctgcagcttctgaagtgttaaagcacttgaaggaacgatttccgcctaatagtcagcacg

SEQ ID NO: 834651 - DNA, 98 bp, Homo sapiens
aggtcccaactggaagctgaagttatggctgcagcttcgattgccaatattgtaaaaagttctcttggtccagttggcttggataaaatgttggtgga

SEQ ID NO: 834652 - DNA, 100 bp, Homo sapiens
gtgcctagtgtctgtgccgcctaccaggcagagcctgaggaagctgaagcagaggtttcccagtgaagccatgtccctggagggagatgaatgggaactg

SEQ ID NO: 834653 - DNA, 98 bp, Homo sapiens
atatatcaactgtggccttaatgagcatgttgacagcatcgatgctagacagacagttggtgacatcgtgaaagtcacaaggatgaatataaatggcc

SEQ ID NO: 834654 - DNA, 98 bp, Homo sapiens
cggccctcaccgccctcaccacccctatccagacggctgcccttcaagtaccacaggagagcctgtcctgcctccagtccacctgtggccttgtccag

SEQ ID NO: 834655 - DNA, 108 bp, Homo sapiens
ctgaagaaagctggaagaattcctgaacaaattttaggaaaagttagcattgctaaatatgagattacggagcagcgcaagattgatcagaaagctgtggactcacaa

SEQ ID NO: 834656 - DNA, 98 bp, Homo sapiens
cgctccttaccgaatcttgtaccagactccagactccctggtctactggaccatcgcctgtgtcctacacacctccaagcaacgagttcaagatcagt

SEQ ID NO: 834657 - DNA, 100 bp, Homo sapiens
caactataactacaggattaactctggttggattggatgctgctggcaagacaaccattctgtataaactgaagttaggggagatagtcaccaccattcc

SEQ ID NO: 834658 - DNA, 100 bp, Homo sapiens
acagcctcgtcaaccagcagagcttccaggacatcaagcccatgcgggaccagatcatccgcgtgaagcgaaggagctggcaaacagccctgactgtccc

SEQ ID NO: 834659 - DNA, 100 bp, Homo sapiens
ctggattgtccggaattcatggggtgaaccatgggttgtaaaggcatatgatcgtgtggagcaagaatgggttgccattaaaataataaagaacaagaag

SEQ ID NO: 834660 - DNA, 98 bp, Homo sapiens
aagtcagctcattttctttgtgcttttccagtttgcaagttttccacatatggtgctttctcttcatcagaagaacactgagctgaaggttgaagtgg

SEQ ID NO: 834661 - DNA, 98 bp, Homo sapiens
ttagcgcaaaagttctgaatggcatccgtcctaccggaaacctaggaaaaggcaagtgtcgtggacttcgtactgctaggaagctccgtagtcaccga

SEQ ID NO: 834662 - DNA, 98 bp, Homo sapiens
tagccaacagagcagcagctacgggcagcagaccctggtacctgacagtgtaaagaaggagctcctacaaagaataagaacattccttgctcagcatg

SEQ ID NO: 834663 - DNA, 98 bp, Homo sapiens
ttctattggtggttgacacaacaggaaaacctaacttcatctctcgctaccgaattcaggtcggcaagaatgaacctcttacagggatcttcagacca

SEQ ID NO: 834664 - DNA, 99 bp, Homo sapiens
taaaaggaagcctaagacagaagattttcttacctttctctgccttcgagatgacttcaaacctgcttctattgacacttcttctgaaggataccttga

SEQ ID NO: 834665 - DNA, 98 bp, Homo sapiens
gaactcgaaatgaagcggaaagcagatatgcgcgtcagcatactttggcggaatccagactccaaaatgatgcaaatcaacctgactggatttttgaa

SEQ ID NO: 834666 - DNA, 100 bp, Homo sapiens
gaatccttcaactgctttctaccaagcgttccatttgaacacgttaaaggaatcaaagagcctctgggataggtgtactggtccgttagcaaattctctt

SEQ ID NO: 834667 - DNA, 98 bp, Homo sapiens
gaacatgacgcaggtgcaggtgtctcttctcgccctggcggggaaggaagcggggagaggtggtgagagatgacccctgttgaggatttcattggtgt

SEQ ID NO: 834668 - DNA, 100 bp, Homo sapiens
ttttgctctccctcgagaagctccagatggcgtcttccgtgggcaacgtggccgacagcacagttggttgaatctggcgatgtggaacccatggatatgg

SEQ ID NO: 834669 - DNA, 100 bp, Homo sapiens
tttagaacgatgtgaacatcgaatcatggaatcccttgcatggctctcacttcagtatcagacacagcacagcagccatctgaagagcaaagcaagtctc

SEQ ID NO: 834670 - DNA, 99 bp, Homo sapiens
tttagttctcctcaagtaagcatatgcttctgagacattcttttacttcaggatcaggagaaggtctggggaaaataatccagagatttccacagaagg

SEQ ID NO: 834671 - DNA, 100 bp, Homo sapiens
agaagtggcaagaaaagatggatgaaatttggctgaaagatgaaagggagaaaactggttgtcctggatgtttgaaaagttggtcgttgtcatggtgtgt

SEQ ID NO: 834672 - DNA, 99 bp, Homo sapiens
tcggggtgtgtgggaccatgtccagccctctccagtgtatccacagccccgacctttgatgagaactcagctgtccagatgatgaggagtctgatgagg

SEQ ID NO: 834673 - DNA, 100 bp, Homo sapiens
gcaagtgcaattttacgaaacggccctggccaacgtcaacattgggagcctcatctgcaatgtaggggccggtggacctgctccagcagctggtgctgca

SEQ ID NO: 834674 - DNA, 100 bp, Homo sapiens
gatgtactcaggagagctcaagtttgagaagcggaccatgtcggcccagattgagggtggtgtccatggcctgcactcgattctttggcactactctgtc

SEQ ID NO: 834675 - DNA, 100 bp, Homo sapiens
tggtaaaattatacctgctatagcaacaaccactgctacagtttctggcttgcgacagttgcctgctgtcagtaagctggtacagaaggttgacgaaaat

SEQ ID NO: 834676 - DNA, 98 bp, Homo sapiens
ttcaaactgttcgcaagggcagcagctggcgactttctccagtgactgggaaatccaggaagacagtagggacaaggagcatccaagatacctgatcc

SEQ ID NO: 834677 - DNA, 100 bp, Homo sapiens
actctcgctcacgcagcaggagcaggggacgaagattacatctcgtttagcagatgtgttcaaccaaaggtgtgaggtgaaccgaagggcatctgtgagt

SEQ ID NO: 834678 - DNA, 98 bp, Homo sapiens
atacgactgccataaacaaaagctattacaatgtgggccatgctatgatagtggaagcttatccaaaataatagatccagaagaagtgacctgaagtt

SEQ ID NO: 834679 - DNA, 100 bp, Homo sapiens
ctcaacaacaagtttgcctccttcatagacaagatctttgtagaatttgatggctgtaactggaagcaacactcctgggtaaaagttcatgctgaggaag

SEQ ID NO: 834680 - DNA, 100 bp, Homo sapiens
ctaaggagccctgccgaggagctgaaggccttcagagtccttggggtgattgacaagctctctattggaggcatcatcattctgaaggataccagtgaag

SEQ ID NO: 834681 - DNA, 100 bp, Homo sapiens
catattgtgcgtcaatcagacaggacatcaaattaagatcattgactttgggctggccagaagacttacagattccagtctgctgttagatgattattca

SEQ ID NO: 834682 - DNA, 50 bp, Homo sapiens
cgcggactggcacgcagactgcttcagatccggggctcccgggctcgagc

SEQ ID NO: 834683 - DNA, 100 bp, Homo sapiens
gttgaatgagaaccctacttgcctaaatgaggaatgtctttcctaccatctaaaatacgaaggtttctggctggggttctccaaaaaatgtggaatcctt

SEQ ID NO: 834684 - DNA, 100 bp, Homo sapiens
aaggcccagggacagctcgactcacagccagaggaccaacgcgagcggcttctgcagggtgtgcaggaggaaagttcacatccttggctccttccaaaat

SEQ ID NO: 834685 - DNA, 100 bp, Homo sapiens
tcatttgctgagtgtgcatatggtgactgttgtaaagactgtcggtgggagaactgaagtccaatcagttcagtatggcaaagaaaaggcaaataaagac

SEQ ID NO: 834686 - DNA, 100 bp, Homo sapiens
gcttcaaccccaggggaccagaggaactcagccctgattgcgggagaagatgtcaaccggacactagaaggtggaaggaaacctcttcattatgcagcag

SEQ ID NO: 834687 - DNA, 99 bp, Homo sapiens
gcacgtggaggtgaatggcagcaaggtgggcccggacggcacaccctacgttaccgtgctcaagctgctcagcaaaggggcatttggctacctgctccc

SEQ ID NO: 834688 - DNA, 124 bp, Homo sapiens
acagaattaaccagagaaggtgaaacgatcatcgagctaaaatatcgtgttggaagaggatcacctagcccgggtagaagaggcaatcacccgtatgcttgtgtgtgccctgaaaactgcagag

SEQ ID NO: 834689 - DNA, 98 bp, Homo sapiens
gtcggatagacaataccacaacaacacattttgcagaggcaccacaaggccacataaggagggtgaggtccctggagtggattatattttcatcactg

SEQ ID NO: 834690 - DNA, 50 bp, Homo sapiens
gccatgaggaaagaattctccgaggatgcagatgggaaagcgatggcaat

SEQ ID NO: 834691 - DNA, 100 bp, Homo sapiens
tctggttgaggatgtacagagagctcctggacaacaggttgcagtccatgagctgggaaaggaggcagtgctcttgggagaaacagcagaggcctcaagt

SEQ ID NO: 834692 - DNA, 100 bp, Homo sapiens
gagcgagagctggagaagctgggattggagattccacccaaacttgctggtcactgggaggtgaaaagccatacaagtgtacctgggaaggctgcgactg

SEQ ID NO: 834693 - DNA, 98 bp, Homo sapiens
gggctttaccagcaactaccccagtgccggggagggttctgctgcttcgaaagctggtaaggcctgagactgtgccctgtccacggtgcctcctgcat

SEQ ID NO: 834694 - DNA, 100 bp, Homo sapiens
acagtttgcagaacctacagaaacgttgtttggtcccgattccggaaaaggtgccaagagcttagttgaactcctttgtggattctttaaacgctctagg

SEQ ID NO: 834695 - DNA, 100 bp, Homo sapiens
gagcgtccaccggcggctccgcaagaagtaccgagaagctctagaggacaaaatcccagtccttggcacaaactcaggaaatggaagccggagtctgttt

SEQ ID NO: 834696 - DNA, 100 bp, Homo sapiens
cgtaagtcctctgtcaccaacatcatctgaggctgaatttgataagaccactgtgccaatgggtcatgtttggttagaaggtgacaatctacagaattct

SEQ ID NO: 834697 - DNA, 100 bp, Homo sapiens
cccatgacactgtcattggcggccgctcaggaactgtgggagctggctgagcagaaaggaaatgctgtaaacacacggatattgaagtgcatgatcccag

SEQ ID NO: 834698 - DNA, 100 bp, Homo sapiens
tgtactgattgcagcccatggcaacagcctccggggcattgtcaagcatctggaggatattgatgatgttaagaagttcaaaccgggttacctggaagct

SEQ ID NO: 834699 - DNA, 104 bp, Homo sapiens
tgtgatgcaagcggacgtttgtgtaaactgctgggagattaacaggctgctaaggaagcaaaaaaggctaagcaagcatctaaaaagactgcaatggctgctgc

SEQ ID NO: 834700 - DNA, 100 bp, Homo sapiens
tgtgactggattcacgggtagagattggcttcgggctgagctagcagtgagcaccttttggcccaatgaatatcaggatttggagttccatggagtgatg

SEQ ID NO: 834701 - DNA, 99 bp, Homo sapiens
gcgagcagcggcgggggcccgagggatcaatgtccgagttaccaccatggatgcagagctggagtttgcaatccagccaaatacaactggaaaacagct

SEQ ID NO: 834702 - DNA, 100 bp, Homo sapiens
gaatctgccgtcttttgaagcaccctaatattgatatgacaatggatgatgttcgggaatacgagaaaaacatgcatgaacaaaccaacataaaagtttg

SEQ ID NO: 834703 - DNA, 100 bp, Homo sapiens
tctaagccggatcatatttacatggatgccatgggatttggaatgggcaattgctgtctccagattaacaagtggtggaataacctaagtgatggccagc

SEQ ID NO: 834704 - DNA, 98 bp, Homo sapiens
ggcacccacggagcctccggggctgtacatatccagccatactcatggaccccagtgatttccccagtccatttgacccattgaccctgccagagaag

SEQ ID NO: 834705 - DNA, 100 bp, Homo sapiens
caggaacgaaatccggaaggtgacgggcaaggctttcgccaaggtcttcaacacaacccctgatgacttggacctacatgtgatctatgatgtttctcac

SEQ ID NO: 834706 - DNA, 100 bp, Homo sapiens
tgaccatgtatttgtggcttaaactcttggcatttggctttgcctttctggacacagaagtatttgtgacagtacttggaggaagagtaccgcaaaggag

SEQ ID NO: 834707 - DNA, 98 bp, Homo sapiens
gaagagagcactgcagccagtgaaaccactgagcgtgagtgcatctccatccacgttggccaggctggtgtccagattggcaatgcctgctgggagct

SEQ ID NO: 834708 - DNA, 100 bp, Homo sapiens
acaagtcctgcgcttggggatcctctgtacgcccgttcactgctggaagacccaggagaaggcggaggctcaggtgcccacatgatcagcacagccaggg

SEQ ID NO: 834709 - DNA, 100 bp, Homo sapiens
aacctgtacattcgaggcctcccaccaggcaccactgaccaggacctaatcaagctgtgccaacctaatgatgtagacatggaaacagatcactactcca

SEQ ID NO: 834710 - DNA, 100 bp, Homo sapiens
tacgagagcaagctctataagattcttcaaggtggggttggcatcccccacatacggaaccttttgaggatggctttgcaaatggggaagaaagtactcc

SEQ ID NO: 834711 - DNA, 100 bp, Homo sapiens
cagatggcagccagtcagtggtggaggttggagcaaaacgtcccactcactggaggcacctgaggacgacgggggctggtcaagtgcagaggagcagatt

SEQ ID NO: 834712 - DNA, 98 bp, Homo sapiens
gcagtttcagggcatatacagcttataattcctggagaatctgcttgttttgcgcccatgcatgatgactatgacttaagacaagaacagttgaacaa

SEQ ID NO: 834713 - DNA, 100 bp, Homo sapiens
aaggctgtgtccatcagcacagagccccccacctacctcagcagcaagatggaacttattgatgataacaccgtagtcagggcacgaggtttaccatggc

SEQ ID NO: 834714 - DNA, 100 bp, Homo sapiens
ctgctggtatatccttctttctggttccgtgttcatcaaggaatccatgtttcttccaagaagcagaatcagcatgattcttcagaggctcttcaggttc

SEQ ID NO: 834715 - DNA, 98 bp, Homo sapiens
atccagcccaacaccaccgggaagcagctatttgaccaggtggagaagggctatgaggagtggttgctgaatgagatccggaggctggagcgactgga

SEQ ID NO: 834716 - DNA, 99 bp, Homo sapiens
aacatacgggcaagtttataagatctaagctggaaccagaaccaaatacaaagacaagagaatccacatcttctgagaaagtttcacagagtccttcaa

SEQ ID NO: 834717 - DNA, 100 bp, Homo sapiens
ggcgttccaccagcaaccatgagtggttccatgatgggaagtgacatgcattgcagtgtcgagatggctatgaaccctgtgtaaatgaaggaatgtgtgt

SEQ ID NO: 834718 - DNA, 130 bp, Homo sapiens
gaagctcatgagcagcctgcccaacttctgcgggatcttcaaccacctcgagcggctgctggacgaaggcaagagggcacattgggagattcagcttgcaagagtcctgaatctgatctagaagacttct

SEQ ID NO: 834719 - DNA, 98 bp, Homo sapiens
gacccagccaaagtttttgaacacaacatgtgatacactctgtgcagttttagagagagacacactcagtattcgagaaagtcgactttttggagctg

SEQ ID NO: 834720 - DNA, 99 bp, Homo sapiens
cctgaggctgttcaaactgaagaaggaaaatgctctgaagtactcaaagacactgacagagcacctgaagggctttttggtggtgctggagttggcaag

SEQ ID NO: 834721 - DNA, 98 bp, Homo sapiens
aaaaactcagtgagacacaatttatcattgaataagtgttttaagaaagtggacaaagagaggagtcagggagtcgtcgcatggtggatgtcatggac

SEQ ID NO: 834722 - DNA, 100 bp, Homo sapiens
acagctcctcagacattaatattttatataatgatgcagtagaatcctgcattcaggattcagagactgtttttgatattcagaatgacagaaatagtat

SEQ ID NO: 834723 - DNA, 100 bp, Homo sapiens
agatgaatatgaccctatggaagcagaagaagctgaggatgaagaagatggtaaaataccatgaagattttgaaaaaacaaaggggagaggctttactcc

SEQ ID NO: 834724 - DNA, 100 bp, Homo sapiens
agctgaaagaagccttagcagcaaaagactttgttaacctcaggatctagtttgaagcactaagaagaataagacatcagtttgaaaagaggctctatca

SEQ ID NO: 834725 - DNA, 100 bp, Homo sapiens
gccagtaagaacgaggaggatgaaggatacctactggagcaggatttcccaggcatgaggattggtccggagcccaccacagactccttcatcgccgtga

SEQ ID NO: 834726 - DNA, 100 bp, Homo sapiens
agggaattcagcctcagtgatgtccatgagagtgcttgtgatttcacgtatttttgctgaactcgtaaaagagacacttggatggtggattaaccagaac

SEQ ID NO: 834727 - DNA, 100 bp, Homo sapiens
cgaggccaggagccaggggcccagaaggtaccacgtctggacgaaaggccacgcacccacaaacttcgccaagtggcggaccgccaccacgccttaccgg

SEQ ID NO: 834728 - DNA, 100 bp, Homo sapiens
tcaatgaaggaaaccgcactctcacactggccttgatttggcagctaatgagaagtcaggtcaattcagtgaagatatgatacccacagtgggcttcaac

SEQ ID NO: 834729 - DNA, 98 bp, Homo sapiens
aaacgtcctagtcaggaagaggacacacagagtattggtcctaaagtccagagacagagcactaattagctatatgttctcctttcagccaagacctt

SEQ ID NO: 834730 - DNA, 98 bp, Homo sapiens
tgcgtcctcatcgggcttatgttcgagattggatttgaggctcctcccctccagggacaggctgcagctccagcgagtggcagtggagctgattctga

SEQ ID NO: 834731 - DNA, 100 bp, Homo sapiens
aagaaatccagtcccgaccagagactccatcctctgccaatggcccttcccgggagggctctaggctgccgcctgctagggaaggccaccctgtgtaccc

SEQ ID NO: 834732 - DNA, 100 bp, Homo sapiens
caccaccaccaaatgaaattaatcctcctccacatacaatggtgttaagtgtgatgcttccataatacatttggatgctgtcagctaagttcacttctga

SEQ ID NO: 834733 - DNA, 100 bp, Homo sapiens
cgctgagcctggcgcagatcggttatggatgatgaatcagatgaaaaagaagcaaactcaccttaaaataatctggattttctttgggcataacagtcag

SEQ ID NO: 834734 - DNA, 98 bp, Homo sapiens
aagcacctcctgctccagtaattgaggattatattcgttatgcccatggtctgatatctgactacatccctaaagaattaagtgatgacttatctaaa

SEQ ID NO: 834735 - DNA, 127 bp, Homo sapiens
gccaaggaaaaactggagagcttcatcaaaaatagtgatagctttgataagttacacggtgtgggcacacaacctcattgccattgctcgtcttcggggctctgatctgaaagtgcttgaagtcacc

SEQ ID NO: 834736 - DNA, 100 bp, Homo sapiens
gaaaatctcaaagctcttttcaggtagaaacctgtgggttcttgttgtggggcggtttccaaaggaacacagaattgggattccagagttcaaatacgtg

SEQ ID NO: 834737 - DNA, 100 bp, Homo sapiens
gcgggccatctaccagtgcttcgtgtggagcggcacggctgaggcccgcaagcgcaaggaggaacagcacagcatgctgggctctggatttaaagctgag

SEQ ID NO: 834738 - DNA, 100 bp, Homo sapiens
aaggcagctcgctctgggagcctagaatgcatcagtgcccttgtggcgaatggggctcacgtcgaatatgggaaaatagtctccacaaaggcaattttgg

SEQ ID NO: 834739 - DNA, 98 bp, Homo sapiens
tgaaaaagtgtgacttggcagctggatcaggggggtttgggtattgctatcagcgaagaagatacactcagtggagtcatcataaagagcttaacaga

SEQ ID NO: 834740 - DNA, 99 bp, Homo sapiens
gcagtggcgcctaaagtctgagagagggaagtcgcctctgtgctcgtgagtgcatggggtataaggagagacagcgtctggagaccatcctcagtctct

SEQ ID NO: 834741 - DNA, 100 bp, Homo sapiens
ggggcggtcaagagaagaccccgctgggatgggctcagattattgctactctgtattcagatcttcatgtgtctcttctaagctgaataaagctgttttg

SEQ ID NO: 834742 - DNA, 98 bp, Homo sapiens
gaaaaactaggggaaaggaaaccatgcaacagtcaaccttctgagctttcttcagagacctcagttcattcggctcctaaagaagtagcagtgtccaa

SEQ ID NO: 834743 - DNA, 99 bp, Homo sapiens
ttaagaaccaactggttgaggttcaatgcagacaagacggatgtgatgctgatgaacacaatgacgtacagaagaaaacctttaccaaatggataaatg

SEQ ID NO: 834744 - DNA, 99 bp, Homo sapiens
ttgagggtctccagggttctttggggcccgaggtatggcctcacaagtcttggtctacccaccatatgtttatcaaactcagtcaagtgccttttgtag

SEQ ID NO: 834745 - DNA, 100 bp, Homo sapiens
taggagaggaggattgcagaagagtgctgcaggtggagaaattttcagcctgtgtttacctgagttggctgaaatggtttctgaaaatgatgttatcaga

SEQ ID NO: 834746 - DNA, 98 bp, Homo sapiens
cctggaggaggaggaagaggatgcctggacagatgtcaattctggtgacacaaagacatctgtatgtgctgtcaggaatgctgaaatacttttaaagc

SEQ ID NO: 834747 - DNA, 152 bp, Homo sapiens
ccgaagtcttttgcttagtgtcaatgcccgaggactcttggagtttgagcatcagagggcccctagggtctcagctgtccgaggttctgtgggccatggtgatgcgcataggcctgggcctgggccgggaggtgggcgtggcggctgtggtg

SEQ ID NO: 834748 - DNA, 100 bp, Homo sapiens
ttgtctctgatgagctgagaaacaaagccacccagccaatgaaggacttgccggagcagccttacttgcagcctccactcagcatcttggtgattgagcg

SEQ ID NO: 834749 - DNA, 100 bp, Homo sapiens
ccccattctggatggcacccgaggtcatcaaacagtcggcctatgactcgaaggtgtcagctgtgatgcatgtttaaaaggaaattttcgaggtcgcaga

SEQ ID NO: 834750 - DNA, 98 bp, Homo sapiens
tttccgcttcttgaatttctctctgtaaaggaggatgctgacagacagcaccaagaagtaattgcaatttatcggacacaccttcttagtgctgcaca

SEQ ID NO: 834751 - DNA, 100 bp, Homo sapiens
tccagccgagatgctaagagcaaggccaagaggaaggcccgatgagagaaagggaaagttaaggatgctggagcagaacaatggatttctctttctcttt

SEQ ID NO: 834752 - DNA, 100 bp, Homo sapiens
agaatggctggtctcctactcccagatgcatccgtgtcaatattcccagacacccgatgccatttgctgcaaaaaacatgttttatgatgaacgctggaa

SEQ ID NO: 834753 - DNA, 100 bp, Homo sapiens
cgggaccgccgccgccgccgccaccatgcaggtcaatggccagcaaggaggggggtccgagccggcggcggcggcggcagtggtggcagcgggagacaaa

SEQ ID NO: 834754 - DNA, 132 bp, Homo sapiens
tggagttatccaaagaagacctcatccaactactcagtataatggaaggggagttgcagatgtgtgttaaaagagctagaaacattgggaaaggacttatatggggcaaaactgattgcacaaaaatgccaa

SEQ ID NO: 834755 - DNA, 102 bp, Homo sapiens
ggcggagaggttttccaaggaggaggtgtcagacctgacccaggcagccaacaagaacaacgacgccctgcgccaggccaagcaggagatgatggaataccg

SEQ ID NO: 834756 - DNA, 100 bp, Homo sapiens
ctcatttccaccaacggcagcttcattcgtctgattgatgcattcaaaggagtggtgatgcacacatttggggaaaatcaggaaaatgtttccaacctgg

SEQ ID NO: 834757 - DNA, 99 bp, Homo sapiens
tgatgaagaggatgatgatgaagatggtagtcgctcttctaaaacttttaaaccaaagaagaacattccagagggttctcaccagtatgagctcttaaa

SEQ ID NO: 834758 - DNA, 99 bp, Homo sapiens
ccagactcctttacatgatagtcttcctatcacgggcactagtgtggctctcctgttccagcaattggtatgctattgcggcagcacctcccgagatgt

SEQ ID NO: 834759 - DNA, 99 bp, Homo sapiens
ttcagctgagtcagaaggcatgaggcgggctcactgacgccataagggagaagatgaagaaaaattacatgtccaatccaagttacaattatgaaattg

SEQ ID NO: 834760 - DNA, 99 bp, Homo sapiens
cttatctttatctgtggcatgcaactggtgctggagaatctggtaaaagcaccattgtgaagcagatgaggatcctgcatgttaatgggtttaatggag

SEQ ID NO: 834761 - DNA, 100 bp, Homo sapiens
gcgagcctccttcgccgcgccccacttgctcgtgcactttacacacatgagggctgcgctggcctcggcacaccagtgccacccgctgccccggacgctg

SEQ ID NO: 834762 - DNA, 99 bp, Homo sapiens
gaagccagggtgcacttccgagtggcgaggttcatcatggaggttgcaatgaggtgtcgctgcagcagcatgcacttcttggtagcagaatggaatgaa

SEQ ID NO: 834763 - DNA, 100 bp, Homo sapiens
atcaacactaccaaaaataatccagtgatgtcattgcaagatcagctgtatgcaggagctattcttgaagtttgtggatgaaaattgggaaggttccctc

SEQ ID NO: 834764 - DNA, 100 bp, Homo sapiens
agaaattgttcagttcttctcagttaacaagcacaagccctggctggagcccacctaccacggcatagtcacagagaacgacaacaccgtgctcctcgac

SEQ ID NO: 834765 - DNA, 100 bp, Homo sapiens
tttctccctttacacccgctgtgaagttcagtgtttttctattcatgattggacatgtcctagacatcacttagagctgggctcaaaatgcagagaactc

SEQ ID NO: 834766 - DNA, 99 bp, Homo sapiens
cagcctttagatctagaaggagtcaagaggaagatggaccaagggaattacacatctgtgattttgaagatgtaactgagtttctggaagaggtcattg

SEQ ID NO: 834767 - DNA, 100 bp, Homo sapiens
ggagccaaggcccgtgggcgtgggcggaaacccagcgccaaggccaagggtgcagaggtgagaactcagaagagaaatacagctggctatctactaccag

SEQ ID NO: 834768 - DNA, 98 bp, Homo sapiens
aacactgaatcaacatgggcaatgagaacagcacctcggacaaccaggaatagccaggccagaagaaggaaggcctgtggtgagtgggacaggaaatg

SEQ ID NO: 834769 - DNA, 100 bp, Homo sapiens
ccgagaatcactccagctctcctggaagcagaatcttgtggaagaagaatgaagttgctgattatgaagctacaacattttccatcttctataacaacac

SEQ ID NO: 834770 - DNA, 98 bp, Homo sapiens
ccccagttggttgcagttccagaaattcttatgccggtctagatccaagcaaccaggtactgcatttggaaatgggaaaacctcggattatctgctac

SEQ ID NO: 834771 - DNA, 100 bp, Homo sapiens
ctccaagtttaaaagaactacgtgttttatccaacaggatctagtgaaaagccatttgatgtatgcggtcagagaagaagtggaggtcctcaaagagcaa

SEQ ID NO: 834772 - DNA, 100 bp, Homo sapiens
ttctgggctatttgattattgaagaagattttaatattgcactaggagtttttgctttagctggactaacagatttggagactgacaaactggaagatga

SEQ ID NO: 834773 - DNA, 99 bp, Homo sapiens
acctaccagtgggtgcccttccatggggtgaaggtggtgtttttaaggctcatcttactttcccaaaagattatcccctccgacctcctaaaatgaaat

SEQ ID NO: 834774 - DNA, 100 bp, Homo sapiens
ggcgagccaagttccgcagcctggcatggcttctggggacctttacgagaaagtgagtgagaaggttggaggagctgaaggaaccaagctagatgatgac

SEQ ID NO: 834775 - DNA, 100 bp, Homo sapiens
cgcgcgtgcgcggacatggcctcaaacggtgctcttacagcctgttccaagtgtggcttaatccgtctccaccaccagatctttctccgtggattcctct

SEQ ID NO: 834776 - DNA, 100 bp, Homo sapiens
atcaaagtcagccgtgtggggtctgcaatgcatttaaatcaaacggtattgagatggattgggttatgaaacataatggtccaaatgacgctagtgatgg

SEQ ID NO: 834777 - DNA, 100 bp, Homo sapiens
aagaatataaaattgatgagaaaaactttgtggtggttatggtgaccaaaaacatccatgatagcagtcttctgtaaatcgaacttttcaagaattctct

SEQ ID NO: 834778 - DNA, 100 bp, Homo sapiens
cctggatggtcacctcagtagataccaggtgtgatccctcacatccacaaatctctgattggaaagaagggacagcagaaaactgcttagagggatgctt

SEQ ID NO: 834779 - DNA, 99 bp, Homo sapiens
atcactagggaagcacagatgtggaaagtgaatgtgcggaaaatgccttcaaatcagtactatactggcaattgctggagaagattttgcaattgttgc

SEQ ID NO: 834780 - DNA, 101 bp, Homo sapiens
cggggacttgacagccgctgccgccgcaggtaaatcgatttagtaaggtggaagacagagcaatttttgtcactgaccgtcacctgtataaaatggatccc

SEQ ID NO: 834781 - DNA, 100 bp, Homo sapiens
aaaggtgtacttgcaagaaacctcaggacttgagtaacagcaacatgcacatggattaattgatgtatgttgagtttatggagctgccttttggtggctt

SEQ ID NO: 834782 - DNA, 100 bp, Homo sapiens
ggacttctccaagctctgtctgggttctgctgtcaatggtgttgtccagttgggggccgtcccgctcctaaggcaggaagatggtggccgcaaagaagac

SEQ ID NO: 834783 - DNA, 100 bp, Homo sapiens
gatcttgaaaaaaaaaggagagaagctgaagcattgcttcaaagcatggggctaactccagaatcccccattgttaagtatgagagagaagctagtaaat

SEQ ID NO: 834784 - DNA, 100 bp, Homo sapiens
tgaccattctagccgaggagaacctgcccttcgccaaggagatcgtctctctcatcgaggcccaaaccgccaaggcaggtaaagtgaggaaacatgcaac

SEQ ID NO: 834785 - DNA, 100 bp, Homo sapiens
aaagttgtcaggttgaaaatggaagagtaattgcctgctttgattccctaaagagtccaggcagaatataattctataaagggaactccttcagaggctg

SEQ ID NO: 834786 - DNA, 50 bp, Homo sapiens
ttggagagtcataacatatcactgactgataccacttgaaagatgtcatt

SEQ ID NO: 834787 - DNA, 100 bp, Homo sapiens
agagagaagaacattctcgaatacctagaatgggggaggagattggacaggctggactccccattgcttttctaaaaatcttggaaactttgtccttcat

SEQ ID NO: 834788 - DNA, 98 bp, Homo sapiens
cagattcaacaggctgccaataaaggagcaagatggctagggtatcgtcgtcctccccgcagtcaggctgcccatcacccaccattccagcaggtaaa

SEQ ID NO: 834789 - DNA, 99 bp, Homo sapiens
tcggcgcccagcaatcacagaagccgacaaggcgttcaagcgaaaacatgaccgctgagcccatgaggaagatgaagtcctcagtacattctgaagaag

SEQ ID NO: 834790 - DNA, 100 bp, Homo sapiens
tcatgtgaactgcacgataaaggaactcaggcgcctcttcttagttgatgatttagttgattctctgaaggctttatttcaggctggagaacttaaatgg

SEQ ID NO: 834791 - DNA, 98 bp, Homo sapiens
catgatattcctctgaaggtgaactctaaagagctaaaagatggcggcaaggcagcccaggcaaatgtaagaataggcgatgtggttctcagcattga

SEQ ID NO: 834792 - DNA, 100 bp, Homo sapiens
ccgcgtctccgcgttcccagcccgggtccccgcgttcacagccccagcgcaggtcccaggtgtgtgatggcggctgcaatctgtcttgtgggtattaatg

SEQ ID NO: 834793 - DNA, 100 bp, Homo sapiens
gggaaatacagcaatgacctctacgaactccaggtgacttcatggtcatgacgattttcttcaatgtgagcaggcggtttggctatgttgcctttcaaaa

SEQ ID NO: 834794 - DNA, 105 bp, Homo sapiens
attgccaaattctttggaaaagatattagcacaacactcaatgcagatgaagcagtagccagaggatgtgcattacagggctgaaagacacacagaagtcttcat

SEQ ID NO: 834795 - DNA, 100 bp, Homo sapiens
atattgtttcctttgttcacgagaacattgagacatttctttcgggtcttactgaagtaacacaaagcttaaaaatggaaaatgaagagtttaagaagag

SEQ ID NO: 834796 - DNA, 98 bp, Homo sapiens
aaagctcagctctcaaacggactatctcctgagacgtcacacagctgggaactgatccgcaatacagcaaagaaggatgccctgcagtggtctcgcca

SEQ ID NO: 834797 - DNA, 100 bp, Homo sapiens
aggccaccctggcagagcagcgggatgagttggaaggcttccaggatgacgccggaattcactcgtgaagtaacagacacacagatgccacttgttgctc

SEQ ID NO: 834798 - DNA, 115 bp, Homo sapiens
caaaaatcccatctaccgcaactctcagttcgagagtaaagcgttacatccttactattcaaagtgccatccacagacctgctgatgggcagcatgagcatcacctgggagcttg

SEQ ID NO: 834799 - DNA, 100 bp, Homo sapiens
gggcatagacatcaatacctgcaatcaggagagacagcgtctggagaccatcctcagtctctgtgctgaatacacaaagcctgacagtcgcttatctact

SEQ ID NO: 834800 - DNA, 100 bp, Homo sapiens
tggcaattgacctcacctcaagcacacccaatggacagcatgcctcaccaagtcacatgacaagcataggttgtgacagttggaagtgtcatgtacaaca

SEQ ID NO: 834801 - DNA, 100 bp, Homo sapiens
cgagagcctaactttgcaaccattggtctgcaggacatcactttagatgatggtaacagcatcagagaagacaaagggagcaacttcccctggacagaag

SEQ ID NO: 834802 - DNA, 100 bp, Homo sapiens
gactggtgaatgtaatgtactattgaaatgcaaggagtccaggcatgataaagaaaagatagaaaagaaagagaaacgggacagttcaggaggaaaggaa

SEQ ID NO: 834803 - DNA, 100 bp, Homo sapiens
catagaaagaaagccttgtaaccatcaggtagatacagcaccaacgggctcaaaatttgggcggggaactggactcactcagccttctcaacgcacgtct

SEQ ID NO: 834804 - DNA, 98 bp, Homo sapiens
cctgagcccagcccccagaaaggattgtgacatatcgttggacccagaattgagggcatgtctttaacttcagaatggtttgcaaagtatttgcaatc

SEQ ID NO: 834805 - DNA, 98 bp, Homo sapiens
agcagtcacgacctccagcacaggaaactttgagggaaattttgagtcactggaccttgcggaatttgctaagaagcagccatggtggcgtaagctgt

SEQ ID NO: 834806 - DNA, 100 bp, Homo sapiens
actcctacttcctctgtatagagcaactgttgaactcagctgcctgtaggttacaacctgccatattcattcatccagtgatgatgaaattgactttaaa

SEQ ID NO: 834807 - DNA, 100 bp, Homo sapiens
aagaactgctgaaaaagtccatcagtgttcagaagcaaggtctcgctgtgttaccctggctggagtgcagtggctacttacaggcatgatcatagcatac

SEQ ID NO: 834808 - DNA, 100 bp, Homo sapiens
cagaacctgaaactaagaggattaagtgcagtaccggtttgactgtatcttcaagttaagagaattgctgtattccccaaaatatcttggtcatttgaaa

SEQ ID NO: 834809 - DNA, 100 bp, Homo sapiens
ctctgtgccactttgcatcccacgccggaggaggcattaacgagaccgggtaaggaagatgatccctatgatcttgaagatgtttctgcacagaaatgag

SEQ ID NO: 834810 - DNA, 100 bp, Homo sapiens
aatggttttgcataaacatggagaaaagctctacactggactaagagaagttgttaccgaacatctcataaataagattgaaggctttgacccaaaaaga

SEQ ID NO: 834811 - DNA, 119 bp, Homo sapiens
gtgaatacatggataaaaataatgtgaggcgacaagcaacaacaatcatagctggaacacgatgaacctattctgaagcacttgaaagatattaaagtgaagttctcagatgctggcca

SEQ ID NO: 834812 - DNA, 99 bp, Homo sapiens
tcgaaccatggaccaggccctcaagtccctgatggcctcagaggaggagcctggtccgacccccagtggcactaacgtgggatcctcagggcgctctcc

SEQ ID NO: 834813 - DNA, 98 bp, Homo sapiens
tggaggggtggtgaccatcgaaaggagcaagagcaagatcaccgtgacatccgaggtgcctttctccaaaaggccggatcacctcaacagtcacgtca

SEQ ID NO: 834814 - DNA, 100 bp, Homo sapiens
atttgtcttctaggctgcttggttcgtgcctccgagaaagacttcccaagtaagaagcggaagaggagccgctggaaccaagacacaatggaacagaaga

SEQ ID NO: 834815 - DNA, 100 bp, Homo sapiens
ctgctcctggcgctcttctgcgtggccgtcagcgtggtgtggggcgtcttccgcaacgaggaccaccattttgcagactctgatcacagtgaaacgttcc

SEQ ID NO: 834816 - DNA, 99 bp, Homo sapiens
ctggatctcatttgccacatcgtagaaaccaattggaggaaacataatcttcattcctgggttctccacttatggagtctcgctctgtcgcccaggctg

SEQ ID NO: 834817 - DNA, 100 bp, Homo sapiens
ggaaacctgacaagcccaaactgtgaagaagatggaagccaaagttcatcagagtccaaaatggtgatcaggaagccatggctgttatcttctcaaattt

SEQ ID NO: 834818 - DNA, 100 bp, Homo sapiens
tccgatggcaagaggttcctgggctctggagggtctctggacaccagctcttccatcaccagccagcctgaggccttcttctccaagctgcaggagtttc

SEQ ID NO: 834819 - DNA, 129 bp, Homo sapiens
ccagcagttaccagcgccgctggcttcgaagtcagacaacaagtttggaaaatggcatcatcccaagaagctctcttcaatctaattcccgtgggcctgcgtgtagtggccatccaaggagtgaaggct

SEQ ID NO: 834820 - DNA, 100 bp, Homo sapiens
gatacccacagtacggctggcagggtggacctcaggagcctcctaaaaccacagaccccaagactgcttctgagacagaaacagatatctgtgctgaatg

SEQ ID NO: 834821 - DNA, 98 bp, Homo sapiens
tttcatgatgagtcacttcaggatgaccgagaagaaatagaaaataattcttaccatatgcacccagcagccggctcagttcggggaagctgcaggag

SEQ ID NO: 834822 - DNA, 131 bp, Homo sapiens
atcattaggacaagtagtggcaccagccgggagaagaccgcatgtgccattaataaggtcctcgaggccacacgggttaatcgaagaaagagcgcactggctttgcgctgggaagcagggatctatgccaa

SEQ ID NO: 834823 - DNA, 100 bp, Homo sapiens
aagtaccgtatgcgaaacgtgcacccgaaacctaagctcgtcagctctgcttttgttgccgaaccaggaggttttccttcttcacttggtcttatacctg

SEQ ID NO: 834824 - DNA, 100 bp, Homo sapiens
gcggatggtggtgatggaagcaggtggaattatgccctgttggttccaatgctgggattggctgcttttcgagccaaggaggtcctgctgctggcccggt

SEQ ID NO: 834825 - DNA, 100 bp, Homo sapiens
ggcagccggcatcctccctgggcgagagaacactgagctgaaggttgaagtggagagcttgaaacgagaactccaggacaagaaacagcatctggataaa

SEQ ID NO: 834826 - DNA, 98 bp, Homo sapiens
tagaatttctcaccaaacatcttagggcagataatgcctttatgttacttactcagaatgttgctgaggcacagtgcatcgccaaccaagttcagctc

SEQ ID NO: 834827 - DNA, 100 bp, Homo sapiens
aatcgctggcaaaggaggaaaaaccaaattcaccatagagaatgtgacacggacaaggatagttttggctgatgtctttcctaataggatggttctagga

SEQ ID NO: 834828 - DNA, 100 bp, Homo sapiens
gacaagcagccggggcaggtgattggagccaccactcccagtacagtttcaccagtgatcattaaagaatgggcagcttacaaaggaaagtctcctcaaa

SEQ ID NO: 834829 - DNA, 98 bp, Homo sapiens
atgatggaaatagcttgtgctgctgctgctgctgctgctgcatgtctaccaggagaggagggaactgcggagcgggatgcagtgaccagcctttgctt

SEQ ID NO: 834830 - DNA, 98 bp, Homo sapiens
acaccagcctccaggcccagtgccaggagaacccccatcaaaggaagacagtgtggagcagataagggagaggagcggaagaccttctggtgtgggct

SEQ ID NO: 834831 - DNA, 100 bp, Homo sapiens
ctgctggacgacctcggcgaggtgcccaccatcgagtccctgatagactgcaaaattcaaaatggggctcaaggtattcgtttcatctacaccagagaag

SEQ ID NO: 834832 - DNA, 99 bp, Homo sapiens
cactgctgcaggcagccctgctctgcgtcaacgccatcgcagtgctgcacgaggagcgattcctcaagaacagaaatttgtacatagattctaggcaaa

SEQ ID NO: 834833 - DNA, 99 bp, Homo sapiens
agcaatgctccacagcacattgataacaatccatattcctcatttggagcaactctggtgagggatgatgagaagaatttatggagtatgccccatgat

SEQ ID NO: 834834 - DNA, 100 bp, Homo sapiens
agggtcctttatatagaagggagagtaggccctgtctctgcccctggtggtcatcgtccatggcaaccaagacaacaatgccaaagccactatcctgtgg

SEQ ID NO: 834835 - DNA, 98 bp, Homo sapiens
tgggtactctttcctcgtggaatttgaagattctacagataaatcaggtacaccaggggttggaaaaaccacactaggcaaagaacttgcgtcaaaat

SEQ ID NO: 834836 - DNA, 100 bp, Homo sapiens
cgcgtgctgggaggagactggagcccggttaggaagaatggagttggcgactcgctaccaggaatataaatagtttctggaaaggacactgacaacttca

SEQ ID NO: 834837 - DNA, 100 bp, Homo sapiens
ctgggatgtgaagtagatgataaagatgatgatatccttctcaaccttgtgggatgtgaaaactctgttactgaagataacgaaggaggcccaacttcat

SEQ ID NO: 834838 - DNA, 98 bp, Homo sapiens
agacaacagcagcaacttctgcaacagcagcacaaaattaatctcctgcagcaacagatccaggaacaccatgctgagcctttgccttgagaatgcgg

SEQ ID NO: 834839 - DNA, 100 bp, Homo sapiens
aagtcgtccccctctccgccccccaggaggggcgagagggagccgcagctgatgtcagcaaagggttaccttccagttcaacatttaccttggaagaggg

SEQ ID NO: 834840 - DNA, 100 bp, Homo sapiens
ccagtgggcccgacagcgcaacaggccttttctaacaaagaagctgcatttaagagccttagggatgaagtgcccttttttggaggaggctcactgagcc

SEQ ID NO: 834841 - DNA, 99 bp, Homo sapiens
tcagatcccaaacaactggcagaatttgctaggatgaagcctgctgggagcgtgaatgacatggccctggatgccttcgacttggaccggatgaagcag

SEQ ID NO: 834842 - DNA, 100 bp, Homo sapiens
atcatggaaaagcagttgctcgaagaactcgagcgacagagacaagctgagcttgccgcacaaaaagctagagagagaaccatggagtctggcagtaccg

SEQ ID NO: 834843 - DNA, 98 bp, Homo sapiens
ttctgaaagctgaacagagaattctggcactgcactgggtaggaaaaaggtaagaccatgaattatggcatttcttaaatgaagcgttcaagaagtga

SEQ ID NO: 834844 - DNA, 100 bp, Homo sapiens
agagggagcagagcaagaaaaaaaggaagacgatgacttcagatggtgatggaatttcctgataatgtgttaaatctcgatggacatcagaataatggtg

SEQ ID NO: 834845 - DNA, 98 bp, Homo sapiens
agccactttgcattgactggaaacaatggcatttacagaaagagtcaacagcagtggcaacagtaaaatgtttattggaggcttgagctgggatacaa

SEQ ID NO: 834846 - DNA, 100 bp, Homo sapiens
tccaaccagagcttgtgtagcgtcagatccttgagtgataaaggagtagagcgtgagtgcatctccatccacgttggccaggctggtgtccagattggca

SEQ ID NO: 834847 - DNA, 101 bp, Homo sapiens
cggctcggcggtgagatcgtcagcgctgactccatgcaggactacaaagctgatgaagacccagcattattccagtcagtcaagaccaagagaggcccttt

SEQ ID NO: 834848 - DNA, 100 bp, Homo sapiens
ggggccacttagaggtggtgaaacttctgcaaagccatggagcagacaccaatgtgagggataagacctagggcttcgggtccagcagaagggcacctca

SEQ ID NO: 834849 - DNA, 98 bp, Homo sapiens
tgggacagcattaccgacaagcaaggaataacttagcttgcacatgaatgcagtcatgcaaaccgttaggaaaaccagagcctatatggagttccctc

SEQ ID NO: 834850 - DNA, 100 bp, Homo sapiens
gaagaagtagaagcatcgaaagcgttggagaggtgttaccggaacggcggcgacaagggtgttcccgaactagagtggagaggaggttcagatgagcccc

SEQ ID NO: 834851 - DNA, 100 bp, Homo sapiens
tccacggccagcgaggcagcgtcctatgagttcaccactctgacgtgtattcctggggtcattgaacagtgggagacatttagtgaacgctcttcaagct

SEQ ID NO: 834852 - DNA, 99 bp, Homo sapiens
tcttacattgctgcatcaagaaacccaagctgctgagatgtcatttgtcagagtgaaccgctgtggtccccgagttggtgtaagaaagacaccgaaagt

SEQ ID NO: 834853 - DNA, 100 bp, Homo sapiens
cttctttctgcaggctctctcaggtcccctgagaagtgagtcactgcttcaaccacctgtgagaaattagaaaaagccaggaatgagttacaaacagtgt

SEQ ID NO: 834854 - DNA, 100 bp, Homo sapiens
atggacgagttctcccggggaaatgtaccgtccagcgagttgcagatctacacttgcaattctgtggtgttcttggtcacacatttatggagtttctgaa

SEQ ID NO: 834855 - DNA, 98 bp, Homo sapiens
tgagactccctgtcccggaccgcagatatggaatgtgcagatgtcccactattaactccaagcagcaaagaaatgatgtctcaagcattaaaagctac

SEQ ID NO: 834856 - DNA, 98 bp, Homo sapiens
ttggcaaaccagatatatgacttggttgctccttgagggcaggacagttcttatggctttatccgttgcgtaagcacagagaggtctgcgaggtcaaa

SEQ ID NO: 834857 - DNA, 100 bp, Homo sapiens
cgcagcaccgcagccttgggcctcgcgccggctatggccgtgccctggggctgagccctcagtgcacgatctgattttctggagagatgtgaagaagact

SEQ ID NO: 834858 - DNA, 99 bp, Homo sapiens
tcctgcacaccattggcaaaactgtggagtatctgcactcacagggggtgacaatctccaatagacttgtgtcttcaccttgctgcattgtgaccagca

SEQ ID NO: 834859 - DNA, 100 bp, Homo sapiens
ctagagaccttggctggtcagagggctgtgaagacgcacggtgccaggaccaagtatctggtggacccaagtggagagattgtggaactggcgaaaggtg

SEQ ID NO: 834860 - DNA, 100 bp, Homo sapiens
caccaagaagctgtgcattgttggtgggattctgctcgtgttccaaatcatcgcctttctggtgggaggcttgattgatgatggacctagccaaagtgag

SEQ ID NO: 834861 - DNA, 98 bp, Homo sapiens
gaaaacctggagtgatgtggctgaataccgcatgatctgaagactgcactggtggctgcgaacttcctccgttgccaaaataacaagaccaactacaa

SEQ ID NO: 834862 - DNA, 98 bp, Homo sapiens
tgctggacagatgtgcctgtctgtcgcaggctgaggagcgccaggactcacaccacccggcaagaactgctcactacggctccctgccccagaagtca

SEQ ID NO: 834863 - DNA, 100 bp, Homo sapiens
ataaagtcacctactgtaccagagtttcagtgtgaagcctcagtttaggtcatctggtggttcagaacactcaacagagggctctgtatccttgggggat

SEQ ID NO: 834864 - DNA, 100 bp, Homo sapiens
atcattaagagagtgattgctcttgaaggagatattgtcagtaacggcacagccaacaagatgaacggagctttggatcactcagaccaaccagacccag

SEQ ID NO: 834865 - DNA, 98 bp, Homo sapiens
gagcaacagtgtagtggcgtattccacatagcaaacagatgcgaattggactgcactctggatcagtttttgctggcgtcgttggagttaaaatgccc

SEQ ID NO: 834866 - DNA, 100 bp, Homo sapiens
agtggatatccaaccctgaagatatttagagatggtgaagaagcaggtgcttatgatggacctaggactgctgcacagctaactttggagacctaccaag

SEQ ID NO: 834867 - DNA, 100 bp, Homo sapiens
gttcagcttcaggacagctgggtgctaaacagcaacgtgccactggagacccgcttgcacgagccaccgttcgtgatcccaagacaggagtcctcactgt

SEQ ID NO: 834868 - DNA, 100 bp, Homo sapiens
gtaggccccgcccggccaggcccagccgggccctggacaggtagacatagctgacattgagaatgaagagaaccgctactgtctattcatggaactcctg

SEQ ID NO: 834869 - DNA, 100 bp, Homo sapiens
ccatgactccagcatttctgaagtggctttcaacttcattgtcaatgatagtcggaaaaagccgatttggaatgttctgatgtggacttctcttttcttg

SEQ ID NO: 834870 - DNA, 98 bp, Homo sapiens
tatgttcatggtgatataaaagcagcaaatctacttttgggttacaaaaatccagaccagctgcagcaaaaaattattcctgatcaggaccaactgat

SEQ ID NO: 834871 - DNA, 100 bp, Homo sapiens
ctggaccctgctcagaggactctatacagggacgtgatgctggagaattataggaacctggtctccctgggtagatgacattaatgctgataagaatatc

SEQ ID NO: 834872 - DNA, 100 bp, Homo sapiens
actctgtccgggtcagcattgctgtgaaacaggtggttggaggcaaagtaaagaagcccggtaaacgtggtcggaagccagccaaaattgacttgaaagc

SEQ ID NO: 834873 - DNA, 98 bp, Homo sapiens
ccagtcactggtcccaagaagacctatatcacagatcctgtttcagccccctgtgcgccaccattgcagccaaaggaatatattattcgagtgcaaag

SEQ ID NO: 834874 - DNA, 100 bp, Homo sapiens
agaggatgatgtttttggtgaagttagtgtgactctggatccagatacagctcatcacgaactaattctctctgaggatcggagacaagtgactcgtgga

SEQ ID NO: 834875 - DNA, 99 bp, Homo sapiens
gtataatgaatttgctgaagtatttctgaaggcatttgctgttggtgtccagcaaggcactccacagaaggatgttattatcaagtcagatgcaccgga

SEQ ID NO: 834876 - DNA, 100 bp, Homo sapiens
gaagacctacttctccgacgtaaagaaagaagattggcccatgcacaagctggaatgttctcccatggttgtttttggggaaaactggaatccctcggag

SEQ ID NO: 834877 - DNA, 98 bp, Homo sapiens
ctagactggaagctttactagaagctgcagcgatgaagaacgatacagatacagggaatatgcagaaagaggttatgagcgtcacagagcaagtcgag

SEQ ID NO: 834878 - DNA, 100 bp, Homo sapiens
cgtatctaacagccaatagaaaagcagaaagccgcctcttggtttgcgtcctgcactgaaaggaaatgacggattttgatgtaattggctgtactcagga

SEQ ID NO: 834879 - DNA, 98 bp, Homo sapiens
tgactggtgaatgtaatgtactattgaaatgcaaggatgtaatccctgttcattactacttaatacctccaccaacaaagactaagaatggcagcaaa

SEQ ID NO: 834880 - DNA, 100 bp, Homo sapiens
ggagattgcagctgacaaactgctgagcctgccaatgcaacagccacggaagattaagcaggaccctgatgctcccataagacagaaaatgccccttgat

SEQ ID NO: 834881 - DNA, 100 bp, Homo sapiens
gagttcttacaacatggcagacattgacaaacttaattcagtgcacaaatgagatgaatgtgaacatcccacagttggcagacagtttatttgaaagaac

SEQ ID NO: 834882 - DNA, 100 bp, Homo sapiens
ggatgtgatgccagaggtcaacaaggttctggacaagatgaagtctttctgccagatcccaaaaggataatcacttacaatgaagccatggatagtccag

SEQ ID NO: 834883 - DNA, 98 bp, Homo sapiens
gtagttgcaggaaaacagctcagagtttccactgattcttcattatggtcttcccaacacctttggtgactatgatgaaacgccttctatgatggcca

SEQ ID NO: 834884 - DNA, 135 bp, Homo sapiens
cctgtcaggagttcattgcaaatctgcaaggggtaaatgagggtgttgatttctccaaggatctgctgaaattccgcctggtggtgaagacagccctgaagctgctgctcgtctttgtagagtactcggagtcca

SEQ ID NO: 834885 - DNA, 60 bp, Homo sapiens
caaggctactgaagcactgaagatttgttcccgacaaggagttttctggttcagaccgta

SEQ ID NO: 834886 - DNA, 100 bp, Homo sapiens
taaaaaggtgatgggtatctttaagagcagcttattccaagctttgctagctgtcggcagcatccagcccctccagtcacagtcctcacagagcttcagg

SEQ ID NO: 834887 - DNA, 98 bp, Homo sapiens
gtacccgaaaaactgattgactgggctggcgttaactgtgcggaggcagtacatgacttcaggctcctatgtgcagaagtcctcaacccccaggctgc

SEQ ID NO: 834888 - DNA, 99 bp, Homo sapiens
gaggctggagtgggcgcggaggcgaccgccatggcgttcctcaaactccgtgaccagcatcaacaacagcaacttgtgattggcggtgaccggatattc

SEQ ID NO: 834889 - DNA, 100 bp, Homo sapiens
tccctgggggttgcagctttgtataaggtcacatatcctggagcaggaaaacttccacacatcattggaggatcagatctaatagctcatcatgctcgaa

SEQ ID NO: 834890 - DNA, 100 bp, Homo sapiens
atgggtcaggtcacagagaagctgcagctgacttacatggaggagacgtgtcgtcactatgtggcccatgtgaagcttgtactcccagagtacctcatcc

SEQ ID NO: 834891 - DNA, 100 bp, Homo sapiens
gaaagttcctcaagatggagactttgactttggtttggaaatcccttgtctccaggttgctgggattgacttcttgctcaattgaaacactcattcaatg

SEQ ID NO: 834892 - DNA, 98 bp, Homo sapiens
actccaatatggcaattgacctcacctcaagcacacccaatggacagcatgcctcaccaagtcacatgacaagcaaactcctgggacccttggacaga

SEQ ID NO: 834893 - DNA, 100 bp, Homo sapiens
cccgcatctatagtttccagatggctctaacctcagtggtaatttcatctgtgccaaagcctccagaggacaagccagaagatgtacatacaagtcatcc

SEQ ID NO: 834894 - DNA, 98 bp, Homo sapiens
ctggtgtctggaccagctagagaccctacagaccaggcactccgtcagtgagatggcctccaacaaggccatcaagccctgtcgtcctatgaccaaca

SEQ ID NO: 834895 - DNA, 99 bp, Homo sapiens
tccgtgggacatggagtgttccttccgctagtgatcctttgcaccctgcttggagacggacttgcttccgaatgccgggacattctgcttcctgtcatc

SEQ ID NO: 834896 - DNA, 98 bp, Homo sapiens
acagcaaaagtcagaaaagtggcaacagcaccacctgctccagcatataaagatgtttctattgatatgccagacctacttgatatcaaccatctccg

SEQ ID NO: 834897 - DNA, 98 bp, Homo sapiens
ccgtagggaggacaccgtgacttcccggacgctgggaaatgtgtgtggaccagttgacaaagatccaaactgaattacaagagacagtgaaagattta

SEQ ID NO: 834898 - DNA, 100 bp, Homo sapiens
atcgcaaccttggtggtggcccagctgctcctggtgcagtggaagcagaggcacccacgctcctacaatgaggactttcgactgcattttagaaatattt

SEQ ID NO: 834899 - DNA, 100 bp, Homo sapiens
tatcctaggattacctgaaggtgaaacagattgagccagaaggaagacaatgctgaatgtgtctgtgaaaactacaagctggccgtaaactgctttgtga

SEQ ID NO: 834900 - DNA, 98 bp, Homo sapiens
gctatgatcgaattggtggaaaggttgaagttcaagagctcagaccctaaagacctggtgtcaaagatgcttcatgtagaccctcatcagagactgac

SEQ ID NO: 834901 - DNA, 100 bp, Homo sapiens
aaggagatacattaaatgcaatagcccttcagtactgttgtacggttttggcacaaataccagtgggaatagtatttttggaagtaaaccagcacctggg

SEQ ID NO: 834902 - DNA, 100 bp, Homo sapiens
caaactcgaagaacagctgtggaaagaagttgcaaaacactgggcgcattggagtgactgtctggcatcaccaagatgacactccacgccacccgggggg

SEQ ID NO: 834903 - DNA, 100 bp, Homo sapiens
cggccactccagtgccaacagccaattctacagatgctaatactggagaccgtggacagaccaataatgctgcttctgcatcagcttccaactccacctg

SEQ ID NO: 834904 - DNA, 100 bp, Homo sapiens
tggaaaatcaaacaaaaccaccagatccaaggcctgatgctcctcctgaatacaattctcattttttaccagcatcttctgagactcacaggagaatatg

SEQ ID NO: 834905 - DNA, 99 bp, Homo sapiens
ttgaactggaccctcatgtcagggactgtgttcagacctacatccgtgagtggctaatcgtgaaccggaagtatgaaataatgtactcttgctggagaa

SEQ ID NO: 834906 - DNA, 98 bp, Homo sapiens
cccactgcgcccaaaccgaagtcatggctacttctacaagtccgaacagccagtccagcaaaatgaacagcattgtctaccagaagcagttccagtca

SEQ ID NO: 834907 - DNA, 100 bp, Homo sapiens
caaatcctccaggggggatgttctgtcgctacgaccggctagaaatctgggatggattccctgatgcggacggaatagacctcagcagcggcgtggtgag

SEQ ID NO: 834908 - DNA, 99 bp, Homo sapiens
tggttttaaaaaatacatatctggttttgcccctcaggatcaatggtgttaaggtatacactgaaaatgtagacaaaaggcaaattattttggaccttc

SEQ ID NO: 834909 - DNA, 128 bp, Homo sapiens
cattgcaagcactattggcagctgcagagccagatgatccacaggatgctgtagtagcaaatcaggactcctcacaaatcccaggccgacacaacagcagagaaaacagcagacaatgtctcttctag

SEQ ID NO: 834910 - DNA, 98 bp, Homo sapiens
caaaaagaaacctagcaacaaaaagaaagctgcgttaatgtttgcaaatgcagaggaagaatttttctatgaggggcccatgaagaggttgactacac

SEQ ID NO: 834911 - DNA, 98 bp, Homo sapiens
cgcggttcctcctcctgtcgctgcccgtgtgattactgagactcaggaagatgatccctatgatcttgaagatgtttctgcacagaaatgagggaaat

SEQ ID NO: 834912 - DNA, 51 bp, Homo sapiens
cccgaatccagaggctgaatgagctagagaacattcctgatgtagatgaag

SEQ ID NO: 834913 - DNA, 98 bp, Homo sapiens
tgaataattccacacctctagtggacccctcagtatatggatacggagtacaaaaacggcccttggatgatggagagctcgagcgtttgatggcattg

SEQ ID NO: 834914 - DNA, 100 bp, Homo sapiens
ccaaaggcagggcaaggaaactggccacaagtttttagaacttcagccataaaaatgggcagaattttccttgatcatatcggtggtacccgtctgtttt

SEQ ID NO: 834915 - DNA, 100 bp, Homo sapiens
atgatcgtaaagaagttgccaaatttgaagcagaacgatcaaaagccaagtggcaaacggagatcatgaatcagacagataaaaatcaacaagaaatccc

SEQ ID NO: 834916 - DNA, 138 bp, Homo sapiens
atacatgcaaagcttccaatgagtatggcagtgtcagctgtacagccacactaactgtgacagctgagaaagtggaactccagagacactcctgaaattgtcctaagtcaaaggagccaaacggtgtacgagctccct

SEQ ID NO: 834917 - DNA, 98 bp, Homo sapiens
tgcctctgacaatctctagtgctgaaaatacctcctgattgcactactgaattaaatcatcatgcatatttatttctccaaagcacctttgacaagca

SEQ ID NO: 834918 - DNA, 98 bp, Homo sapiens
tcaaggccgaagccgagcagaggatctaaatacaagagtggcctattgggtgggtattctgctccctccttctctccttggcagggctccttccaggg

SEQ ID NO: 834919 - DNA, 99 bp, Homo sapiens
tggaatcgtatcctcctgtgttttttcagactccttggaaattaaggaatgcaattctgccaccatgatggaaggagcttctaagtaggacatccttag

SEQ ID NO: 834920 - DNA, 100 bp, Homo sapiens
ttgagtatcagcaggtggcctttcagccctccatacttactgcaaacccgctggttcagaaccaacacctaagtcacgcattgcagaccttcctcctgcc

SEQ ID NO: 834921 - DNA, 100 bp, Homo sapiens
gcaaggttaccacagtgaagaaattcttcagtgcatcttccagggtcggatcaaagaaggatggcggcagctatgccatccacgactcccaggcccccag

SEQ ID NO: 834922 - DNA, 100 bp, Homo sapiens
gagattggctgcctcatccgcttctatgcaggtattgttgcagcatctggcagtgagactgaggatgaggacagcatggacattcccttggacctttctt

SEQ ID NO: 834923 - DNA, 100 bp, Homo sapiens
tgttacatgcttgattttggcttggctcgacaatttaccaattcctgtggtgacgtcagaccatttgaaggatgacctctaggaagaaagtgttgctgaa

SEQ ID NO: 834924 - DNA, 100 bp, Homo sapiens
gggaaatggcaagggagcattccaggagagaaagggaaaaaatgcatttttcaaagacctaacttcaattcagttattacctagtggggaaatggatcca

SEQ ID NO: 834925 - DNA, 99 bp, Homo sapiens
caactggttcaagaaccgccggcagcgcgacaggaacccctccgagacccagtccaaaagatcctgctcacactaaaatatgaaccacaaacacacaga

SEQ ID NO: 834926 - DNA, 100 bp, Homo sapiens
gatcttcctgccacccattacttcagcaggtggaccagttacaggccacgtggtgcttgcgcagtgccgagtgctgatggccagtgtgggggccgcgtgc

SEQ ID NO: 834927 - DNA, 74 bp, Homo sapiens
ctgcgccccaggtgttgtgtgtgggggtgcagatggcccactgcgtgaccttggttcagctgtccatttcctgt

SEQ ID NO: 834928 - DNA, 115 bp, Homo sapiens
caggtccacaggatgctcaggagtatgggaactaccagccagggtccctgtgtggctactgctccttctgcaatgagattttggatcagctggagtcactcaaattagaaaatcg

SEQ ID NO: 834929 - DNA, 100 bp, Homo sapiens
atgaacagtgttatacaagccttgtttatggccacagagaaacacttcaagttgaagaagatgatcgacctgagttaccatggtggaaatgcaagaagtg

SEQ ID NO: 834930 - DNA, 100 bp, Homo sapiens
catttggccttggtggtctcaactgtggaaaccaattttctcccaaactggttggcttgactggcacgagagaagaggtcgatcaagtggccagagcata

SEQ ID NO: 834931 - DNA, 60 bp, Homo sapiens
cgctgccgaggagaacccagcggggtgagaaggactggcagaaatacgagactgctcggc

SEQ ID NO: 834932 - DNA, 99 bp, Homo sapiens
gcatccttcacccatctgaagggaggaaatagtggcaggtgacagtctgcatgtgcagttttcagatgttgctatgaggacagattcatcaaaaatgac

SEQ ID NO: 834933 - DNA, 98 bp, Homo sapiens
tgaagttccctcacattagccagtgtgaagacctccgaaggaccataggtaccgctagagcgacatgatggtggaatctgcctcggagacaatcaggt

SEQ ID NO: 834934 - DNA, 100 bp, Homo sapiens
gataaagtgagtcagctgtacatgatggatggagtggaaccctggcttccccttgagcatcgatgccaaatgccacaaggatttaccccgtgatatccag

SEQ ID NO: 834935 - DNA, 98 bp, Homo sapiens
tcttttttcacatccagcccatgcggactgagcagccaaagcttgacagagccacttccggctcctgcgtcgctccggaagcctgcgagttccggaag

SEQ ID NO: 834936 - DNA, 98 bp, Homo sapiens
cctcagccaattcctctctccttcttgaattccaggtttgaaggaggagtttcctgcctggtatgagaagcttgttctggaaatggttcaccataaca

SEQ ID NO: 834937 - DNA, 99 bp, Homo sapiens
ctagaattggaaaaccttacagaaaattgcctaagaattatgacccaaaagttaccccagatccagaaagatggctgccaatgcgagaacgttcttact

SEQ ID NO: 834938 - DNA, 98 bp, Homo sapiens
caagttccaggaaattttggaagaaactccaacactgggtattgtacccctccaatatgtgtttgttatgacctttacacttgatgatggaacaggag

SEQ ID NO: 834939 - DNA, 99 bp, Homo sapiens
agttattacagaggagcccatggcatcatagttgtgtatgatgtgacagatcagactcagcccgcctgcacccaggtgaaatatacagccttgttgctc

SEQ ID NO: 834940 - DNA, 98 bp, Homo sapiens
attgatggggtaccaggaaaatggagagaagccaatgtcaaggctgtcagtgaggaggcatacaagaagctgaaacctatcaacactcttcaaaatgc

SEQ ID NO: 834941 - DNA, 100 bp, Homo sapiens
ttactgcaacatggagctgatgtccatgctaaagataaaggatttcggcctaagtaaagagtctattgaccatgaaaagaaggcatattctttttgtgga

SEQ ID NO: 834942 - DNA, 98 bp, Homo sapiens
tccctgttgctggagatcctgggcctcctgtgcaaaagcatggatcgtttagaaagaggcaacaagaaaagactgtgaactttataaaagacacttgc

SEQ ID NO: 834943 - DNA, 100 bp, Homo sapiens
cttcctggccgtcagtccggcagcctcacctcaccatttctagcttgttgaaacccaaaactaatcccacccatgtgatgggcctgtaccctgacctgct

SEQ ID NO: 834944 - DNA, 100 bp, Homo sapiens
agattcagctaaacgtgggtttcttactaaggacgagctgatcaagtatatgactgaagaaggcatcaagcatgatggaaccatgtgtgatacctgccgc

SEQ ID NO: 834945 - DNA, 98 bp, Homo sapiens
cctgctgcgctgccgctgagaggaagagggagctgcccagcggcctcacgctgtaaccctctgctgcttttctgggagaagaggctacaaggacttag

SEQ ID NO: 834946 - DNA, 100 bp, Homo sapiens
agctacatatttgttattggggagaaaatcttcagagattagcctgaggcctgctcagtcgttcctaatgaataaaaatcaagtgccaaagcttcagccc

SEQ ID NO: 834947 - DNA, 51 bp, Homo sapiens
cgcctgctttgattcattgaaaacgtgcctcttgccttccgccatgattgt

SEQ ID NO: 834948 - DNA, 100 bp, Homo sapiens
accagagccggaggcgggaggacgggctgccgcaggaccaagaatcgccttcagccctgtctggtgcatccttggcagaaagtgaggaggaaaacacccc

SEQ ID NO: 834949 - DNA, 98 bp, Homo sapiens
aaagcctgcccagacggctcacctgtgcgggatggaacaaaaggtggaagcagggaaaggcctggagatgaggaagctggttctctcggggttcttgg

SEQ ID NO: 834950 - DNA, 100 bp, Homo sapiens
tggtggtctggggcaacgcggaaggagaagctgtgcctgaggatgaacagatcagtgccaaggaccagaagaacctggagccttgtgataacacccccat

SEQ ID NO: 834951 - DNA, 100 bp, Homo sapiens
cttccatctatctctggaaactttcctcctccaccacctcttgatgaagaggctttcaaagtacagacattgtatgcaaacctgttccattctttcttcg

SEQ ID NO: 834952 - DNA, 98 bp, Homo sapiens
cctataaatctcgcccaaacaggaaagcttcgcggaacagctggtgctgtacctgaaggtggccgagctactgtcctccggcctgcaaagtgccatcg

SEQ ID NO: 834953 - DNA, 100 bp, Homo sapiens
agggaggagaagacaagctaaaaatgattcgggaatatcggcaaatggtatgatgaaatgagtattctcttcacagttttggttactgaaactactttgg

SEQ ID NO: 834954 - DNA, 100 bp, Homo sapiens
tgtggaggatgaggaagggactggaagccccaagataacatagatcatcagtagaaaacttcttgaagttgttcaagaaaaatttgaaagtagcaaaata

SEQ ID NO: 834955 - DNA, 98 bp, Homo sapiens
ctgagagcgacgagcagccggtcagcatgagcgagctctaccctctgcagatctcccccgtgtcttcctatgcagtaccttctccaggcaaattccgt

SEQ ID NO: 834956 - DNA, 122 bp, Homo sapiens
agccagaagaggactgggaccgggacctgctcctggacccggcctgggagaagcagcagagaaagattccagactccatcatttctcgtggtgttcaggtgctcccacgagacacagcctcc

SEQ ID NO: 834957 - DNA, 99 bp, Homo sapiens
tcattgagccgggagctgctcatcaagtgcctgcagctctacgccccagggctgtcgccagacactatcatggagtgtgcaatgggggaccgcggcatg

SEQ ID NO: 834958 - DNA, 98 bp, Homo sapiens
ttattacaaacagttgccaatttggacactctagtagctgtaatagaatgccagcaaccagaagcagacttatacagcttgcctttctcacttggcaa

SEQ ID NO: 834959 - DNA, 99 bp, Homo sapiens
tcgcgctgttcctcaccatccctttcgccttcttcctgcccgagctggttattcagcttctcaaggctggaaaagcgaaggaagtttcctacaatgcac

SEQ ID NO: 834960 - DNA, 100 bp, Homo sapiens
tggttaacttgggagaaagtttcatctgtggatggagtattggatcccaaaatcttggctgctcttgaagctgttggaaaatcagaaaatgatctggaag

SEQ ID NO: 834961 - DNA, 99 bp, Homo sapiens
gagtggccttgggtgatttacaggcctctgtctattcctgcatggcccagaggacagatgcaggactggagtccagagttgccaccagatgggatattc

SEQ ID NO: 834962 - DNA, 98 bp, Homo sapiens
agatgatgtatagccctcagaattctgattatcttttagctctcagcactgaatttgcattgagactccttgcattccgccagatacacaaagttcta

SEQ ID NO: 834963 - DNA, 100 bp, Homo sapiens
gaagtcttgaatgactggaaactgattggaaactctttgggaaagccactcgaaaaggttgactttggcagaatatcatgaacaggaagaaattttcaaa

SEQ ID NO: 834964 - DNA, 100 bp, Homo sapiens
agggcgcttttatgcacaaagattaaaaaacacaccggagtagacaggagcactgaccacacggaactcgacaacaggacttatccagagggggctgcag

SEQ ID NO: 834965 - DNA, 99 bp, Homo sapiens
caccagagcgactttcattagaaggagagcgacagcccaagtcaccaggagtcaaattgactttatcagctttaatcgatgggaagaacttcagtgcag

SEQ ID NO: 834966 - DNA, 98 bp, Homo sapiens
ggcagagcacgagcggatcctgcgagagatcgagagcactgacacggcctgcatcgggcccacgctcaggtgcaaattgagcatgacccagaattaga

SEQ ID NO: 834967 - DNA, 107 bp, Homo sapiens
cggcgaaggaggcagaggcacttatgcttgtcagaatccttgttgcctgatgactatgtggttccccttgactggaagacactaaagatgatctacttgcaatggaa

SEQ ID NO: 834968 - DNA, 100 bp, Homo sapiens
agatactagagctggccacactgcaggacattgggaaggacttgaaaatactggaaatctgtccggatccaaattattttgcaagccagatgagtaacca

SEQ ID NO: 834969 - DNA, 98 bp, Homo sapiens
gggagacttgtgtgctctctctgcttgaagaactgaacaagattgatgtacagctatatattttgtcctttctttcacctcatgatctgtgtcagttg

SEQ ID NO: 834970 - DNA, 100 bp, Homo sapiens
ttgaatgggtgcatgttagtgctcaagagcctcattatctaccacccgagatgccccaagttgtccgaacagacagcctgaaggggcggcggggccggct

SEQ ID NO: 834971 - DNA, 100 bp, Homo sapiens
agggagccgagtttatctggagtgtagagtcactggaaaccccactcctcgagtcaggaagatgagaatgtgcctactgctcctgatcctccaagtcaac

SEQ ID NO: 834972 - DNA, 98 bp, Homo sapiens
caaggtcgccttcttgctctgagaacattattatcacagattctggatgaaattgaagaacataacatcaaaatctatcacttacctgatgcagaatc

SEQ ID NO: 834973 - DNA, 98 bp, Homo sapiens
tccagtgttgaaatgggccatgagctcttcaaattggcccagatctttttcaacgggaacaagctgaaagctggatacctaatgtcagtggagtcttc

SEQ ID NO: 834974 - DNA, 100 bp, Homo sapiens
ttgaacaagagattgagatggaaatgaaagtcttcgtcccaagtgttgtgggccatctcatcagccatttctgtggccttctttgctctgtctgggatcg

SEQ ID NO: 834975 - DNA, 98 bp, Homo sapiens
acgagctttaatgacatcaaagtgctctggtctggggtctctctgtgaaacacaatcctcagaaagtgggtaaagaccatacgttggaggatgaggat

SEQ ID NO: 834976 - DNA, 99 bp, Homo sapiens
agtactccttcatggccaccgtcaccaaggcgcccaagaaggtcaacgtattgaaacttactgttgaagacttggagaaagagagggatttctacttcg

SEQ ID NO: 834977 - DNA, 100 bp, Homo sapiens
gtctgcgcttgaggacttggaggtcctgtctaggacccagatgatgtggtaccagttggccaaagaagagcctggtgttggtgcatgtgctttggactag

SEQ ID NO: 834978 - DNA, 99 bp, Homo sapiens
ggaggtcgataagctggaactgatggtttacccaaggtccagcctagcccctaggcaccatgtcggacagtgatctaggtgaggacgaaggcctcctct

SEQ ID NO: 834979 - DNA, 100 bp, Homo sapiens
ttaatatacagcttctgtatttatcaggtgaacctatgggtcgtggaacaaaagttatcctacacctgaaagaagaccaaactgagtacttggaggaacg

SEQ ID NO: 834980 - DNA, 98 bp, Homo sapiens
accatctttcgggctgccgagggtgttcttgacgattaatcaacagggcagactttgacgacactgcgacatactcagcagtggccaccaatgcccac

SEQ ID NO: 834981 - DNA, 100 bp, Homo sapiens
gttcacttgcttgacctacaaggaatctgagggtgccctcaatgagcacatgaccagcttagcttctgtcctaaaggcaaatgtttgcagactacggctg

SEQ ID NO: 834982 - DNA, 100 bp, Homo sapiens
gtttgaacaactgcaagcttcaaggcctgacacaagacgtttggccaaatttgagtttcatcatggtgactatgaaaaacagtttctgcatgtactgagc

SEQ ID NO: 834983 - DNA, 100 bp, Homo sapiens
acttcgaccagcttcatcctcagacagagttgtctgctggttctcagcttgaagaagattctgcagtccttattgatcctttttcttggcgttaccattt

SEQ ID NO: 834984 - DNA, 100 bp, Homo sapiens
gtatttgtggtggaaaaaatatttgacatcattacagcttagtgaaagcagcagcagtagcaacatctccaccatgttggtgacacacgattacacggca

SEQ ID NO: 834985 - DNA, 100 bp, Homo sapiens
atgatgagacagaggcagagccattattgttccgtgctgttcctgagtgtcaactatctgggggggacattcccaggtatctagaagagcagaagacaga

SEQ ID NO: 834986 - DNA, 100 bp, Homo sapiens
gctttggaagagtatgcctgggtcccgccgggtctgaagcctgaacaggctgagggtaaaaagctgggattggtaggctgggtccagaacactgaccggg

SEQ ID NO: 834987 - DNA, 100 bp, Homo sapiens
gatactcatctatttttcaatgacttagaggtcctttcccataacctgtgcacggtgctgaaggttcctcatgacccagttgcccttgaagagcacttca

SEQ ID NO: 834988 - DNA, 98 bp, Homo sapiens
ttacatgaagttactactgcctgatgatgagaagttccatgggggctgggccctcattgactgtgaccctagaatggagatttacagacagtcatctg

SEQ ID NO: 834989 - DNA, 98 bp, Homo sapiens
ccaggagaggggaacagacaacacatgaggtgacagagctgaatgaacctctctccaatgaagatcgaaatctcctctctgtggcctacaagaatgtg

SEQ ID NO: 834990 - DNA, 100 bp, Homo sapiens
ctccttgcctgctgatgacctttgcacagaaaatgccatcatgctgaaacgattcaataggcatgagtacagtaccagaagttatcgttgcacggcactg

SEQ ID NO: 834991 - DNA, 100 bp, Homo sapiens
caaaatccagatgctggatgacacccaggaggcatttgaagttccaaaagaagacatagctcatccagcaagccgcctttggccgttcctcccacttcag

SEQ ID NO: 834992 - DNA, 100 bp, Homo sapiens
gtcaaagcgattaatttacagatgtttcacaaagctcaggaggaggcgtctccctattccttacttgatatctgcttgaatttcttgactactcaccttg

SEQ ID NO: 834993 - DNA, 98 bp, Homo sapiens
agcccaaccactggggagcccatggcactgcggaagatgcaaagtattgttcctgggtgtgtctgtgagagtattgccaaaggagagcagtgaactgg

SEQ ID NO: 834994 - DNA, 100 bp, Homo sapiens
gcctttctgctcctcgcggcccagatgagcagcaccagcagtaagagggctccgaccacggcaacccagaggctgaagcaggactaccttcgcattaaga

SEQ ID NO: 834995 - DNA, 100 bp, Homo sapiens
gttcccaatgattttaattggtaataaagcagatctggatcatcaaagacaggaagaagaccgaaaactgttagttggattcttagaagatgtaatgacg

SEQ ID NO: 834996 - DNA, 98 bp, Homo sapiens
gatcctgttccaggctattctgttccagcagcagaacacagataacgaaggaggcccaacttcattcaataaggagcctgacggatttatcccagacg

SEQ ID NO: 834997 - DNA, 100 bp, Homo sapiens
agaaaaagtggtgccgcttgcagacattatcacgcccaaccagtttgaggccgaaaccttttgcccagagtagcagccaaacttgaggttgccccgattt

SEQ ID NO: 834998 - DNA, 98 bp, Homo sapiens
ttcattggccacctacagaaacaaaatgtcaacaaattgatgggtcttcatcctccaggtccacctttagcaagacctattctcccccgagaacgagg

SEQ ID NO: 834999 - DNA, 147 bp, Homo sapiens
ttttgcaggaatgggtggactggctcttattgctgaaagactacccatgctatatccagaagtaattcaacagtactatactggcaattgctggagaagattttgcaattgttgcttctgatactcgattgagtgaagggttttcaa

SEQ ID NO: 835000 - DNA, 100 bp, Homo sapiens
ccagaacccggccctcaccgccctcaccacccctatccagacggctgcccttcaagtaccacagggagagcaacaagccccggccctcagagctcagccg

SEQ ID NO: 835001 - DNA, 100 bp, Homo sapiens
ccacaccctcacccaggtcctgtatccctgcaagactgcgttggaaagactgaagaggaccctttaccaattccagtttcaagaagcactttgtcaagca

SEQ ID NO: 835002 - DNA, 100 bp, Homo sapiens
tgtgggtctggcttgccaacaatatagtttggtgtttcggaagccaagatatggctcgtggacagcagaaaattcagtctcagcagaaaaatgccaaaaa

SEQ ID NO: 835003 - DNA, 100 bp, Homo sapiens
cccatggacagacatgtcttcccatggagcctgcctagggtagttaaaagacgagtgaatgctctcaaaaacctgcaagttaaatgtgcacagatagaag

SEQ ID NO: 835004 - DNA, 98 bp, Homo sapiens
ggaaatggctatgtaccgaaaacatgcaaaagtttcttcgtcttatctttgggaccctagttcaaaggtgactttcggatggtggttggagaagataa

SEQ ID NO: 835005 - DNA, 100 bp, Homo sapiens
aggtggtaatcctgacgaaattgaaattacctccgagggaaacaagaaaacatcaaagaggtctagcaaaggtattagaaaactactcggatgctccaat

SEQ ID NO: 835006 - DNA, 100 bp, Homo sapiens
gggagcctcttggggacctgggagccccctccgagttacacctccagagccaaaagtaggagcaggctgcctaatgaaggagccaggcttgcacacagac

SEQ ID NO: 835007 - DNA, 100 bp, Homo sapiens
gcgcggcagacggccacggctcggaacgtcaaggtcgtgggaaataaaaggcagttctacacagactgcagcaacggttgcatctgcatatcctaagagg

SEQ ID NO: 835008 - DNA, 101 bp, Homo sapiens
cgaagatccccaaggaggacggcgagagcacggacagactcatggggaagggccaggtccagaggaaggcttgctgtaccgggcacgctactttggcgaca

SEQ ID NO: 835009 - DNA, 100 bp, Homo sapiens
agggctgaaggaagctgccttgtacccacatctcccgccagcaattctgtggtgttcttggtcacacatttatggagtttctgaagggcagtggagatta

SEQ ID NO: 835010 - DNA, 98 bp, Homo sapiens
agaagcccacaattactcagcgctgccattttatttcagtattcccggcgtttccacaagactctaaggcgcttggtgccagactccgatgtgcgctt

SEQ ID NO: 835011 - DNA, 101 bp, Homo sapiens
gaggacaccgtgacttcccggacgctgggaaatgatggagtccactttctcatccaggctggagtgcagcagcgcaatctctgtgtgatcattgcaacctt

SEQ ID NO: 835012 - DNA, 99 bp, Homo sapiens
atgtactgtgcttggctggaaaaccccaaaagtgtacataagattgtagaaggcatgaaacaaaaaatgtggagtattgaaaatattgccttcggttct

SEQ ID NO: 835013 - DNA, 100 bp, Homo sapiens
aagatcctggtgtcgccatgggccgccgccccgcccgttgcaagagtgagccatggagctacgtgtggggaacaagtaccgcctgggacggaagatcggg

SEQ ID NO: 835014 - DNA, 99 bp, Homo sapiens
tacaatgggaataaaactccaagaagccaggtgttcaaggtgctaactgccaaagaaaggaaaactcaaattgatgatagaaacaaattgactgaacat

SEQ ID NO: 835015 - DNA, 100 bp, Homo sapiens
gaggtgccttccaccatgattgttactctctggtgacccacatcccggctggtgcccgagacatccagattgtagagaggaagaagtccgctgacgtgct

SEQ ID NO: 835016 - DNA, 99 bp, Homo sapiens
tcagacagatcgccggggaggcagcgcgggatcccagcctcaggcgtgcgcggacggtgtgcggtaccaatattagcatgtggcaatgatgattgcaga

SEQ ID NO: 835017 - DNA, 100 bp, Homo sapiens
gattgagtccaagttcaaccaagccattggcagcaggatgggtgtggaagcagtgatggcacttttggaggggaccccagataccccagcctgtgtagtg

SEQ ID NO: 835018 - DNA, 100 bp, Homo sapiens
cggggctgccctcgaccagctcctcgcgctctccgccgcctggaccaaccacgtcttcctgggctgcaggggaacgcccttttgcttgtgactggcaggg

SEQ ID NO: 835019 - DNA, 100 bp, Homo sapiens
acatgcaaagcttccaatgagtatggcagtgtcagctgtacagccacactaactgtgacaggagcagacattctgccttcaagttggaagttgaacagca

SEQ ID NO: 835020 - DNA, 99 bp, Homo sapiens
gcacggccatctgtgtgtctgggcagtgcaagtaaatacaatcaagtggcatcttaaatttttgctggaagtggagtcatgagactaaagatatctctt

SEQ ID NO: 835021 - DNA, 100 bp, Homo sapiens
gaagagttgtcccagctcggcccgcgggggagccccgggagccgcacgagccaaggattgtcaccagtgaagaggtcattattcgagacagccctgttct

SEQ ID NO: 835022 - DNA, 100 bp, Homo sapiens
gaacctgctgtatctactcaagagtggaagttttcacaggaatttctctgggatttcctgaaccatcaggagggtccccgcataagagatcatttaagcc

SEQ ID NO: 835023 - DNA, 99 bp, Homo sapiens
gcattctcttcaatcatgagagtcccagaagaggttctcaacaggaggtgtgtagaagcggcggtgatgacaggcctggctctgaactgccacataaac

SEQ ID NO: 835024 - DNA, 98 bp, Homo sapiens
accagcgagcagatgcggacgcttttttccttcctaggagaaatcgaggagctgcggctctaccccccggaggctccgctgatcctctaaatagtgct

SEQ ID NO: 835025 - DNA, 100 bp, Homo sapiens
aaggctagcaatgtgtgccagaagactcgggaggaccagggaagcagtgaaaatgatgagagatgtcttctccaagatcttcagccacgaggccctggag

SEQ ID NO: 835026 - DNA, 100 bp, Homo sapiens
agaggccaattcgtcgcggcggcggtggagatcgcaggtcgctcaggacctggcctttcattatcaaaagtcccaagcaatataaaaacctttctttcat

SEQ ID NO: 835027 - DNA, 98 bp, Homo sapiens
cacaggccggagagagccgtaggcaggaccccgggacaccctggaagccaggaaatggaaaagaatacttgagatccatttgtaaggaaagaaaagga

SEQ ID NO: 835028 - DNA, 100 bp, Homo sapiens
ccagtgaacgccgcctccttcgggaaactgatccgttctgtgtttatggggctgagaacgcggcggctgggcaccagacatggagcagagtaaccctgcc

SEQ ID NO: 835029 - DNA, 100 bp, Homo sapiens
agcacaggcagctcgcggtcatgggcggctcagcctccagccagctggacgagggcaagtgcgcttacatccgaggagaagttgccccagtgcaaggcac

SEQ ID NO: 835030 - DNA, 100 bp, Homo sapiens
tctgagcccccgaactctgcaaagcctccagaggacataccacctccaggatcaggatgcagagctacaaggctttggccgaccaagtgtgtaccatgct

SEQ ID NO: 835031 - DNA, 100 bp, Homo sapiens
agagtgttcaaaattcaattacacagtgctatgtgagctcattaatgcactgtaccccgaggggcaggccccagtaaagaagatccaggcctccaccatg

SEQ ID NO: 835032 - DNA, 100 bp, Homo sapiens
tggcaatgttactatagaaaatattcatcaacctagagctgccaagaagcattcttcatctaaagataaggttccagaagcggcgactagataaagtccg

SEQ ID NO: 835033 - DNA, 98 bp, Homo sapiens
caggaagagggactggaaccatctcagaagccatgcccctcaggctggaacttgccctgtctcctcgcagatgaggcaaaagatgtgattgaagagca

SEQ ID NO: 835034 - DNA, 50 bp, Homo sapiens
actgtgtctggcagatgacaagacaggtttccctagaaagagaacgacaa

SEQ ID NO: 835035 - DNA, 99 bp, Homo sapiens
cgggttaacaacaccttttgccaaggtgagacatggaatccattaaaattgcattatcagttaagaaatgtacgggaacgattagctaaaaacctggtg

SEQ ID NO: 835036 - DNA, 98 bp, Homo sapiens
aggttttgcctttggtgttcaacaacttcatccagcccttatacaaagacctttcggattacggtctttggtcaaacaattagagagaggggaagctt

SEQ ID NO: 835037 - DNA, 100 bp, Homo sapiens
atctactgaagaagcatgatattgagctttacatgcacttgaacagactagaaattgcaccacagatatatgggttggcttcctcagccgccgcctcaag

SEQ ID NO: 835038 - DNA, 99 bp, Homo sapiens
ttacttggatacaaccaggaactactgttctcaactgctcccatgacttcctgtcagggctggagaaaattgaacaacttcaaaatcatgaaaatgaag

SEQ ID NO: 835039 - DNA, 100 bp, Homo sapiens
ggcaacgccctgctgcccggcaactgcacccgctgtctgtcagtgccgccgaaagaactacgggcagctggacatctttccagcccgggatacctaccat

SEQ ID NO: 835040 - DNA, 99 bp, Homo sapiens
gcagcagcagccgcggagcagtagccgccgtgggagggagccatgaagcattacgaggtgtggatgaggtcaccattgtcaacattttgaccaaccgca

SEQ ID NO: 835041 - DNA, 100 bp, Homo sapiens
tggttaacctttggagagagagaggagaccaggatgaaggagccagtcgaaggttctgtacagagtaatgagatgtgtgacggctgcaaaccaggtgttt

SEQ ID NO: 835042 - DNA, 98 bp, Homo sapiens
atgctctctgggctttgttgaggcggcagtatgaccgggtttctttgatgcgacctcaggaaggagatgaggaggttccagccttggcaagaggagtg

SEQ ID NO: 835043 - DNA, 100 bp, Homo sapiens
tatttcagttaacatcgtgacctccagttccatccatgttgctgcaaatgcatcaacaacagcaacttgtgattggcggtgaccggatattcagttgcac

SEQ ID NO: 835044 - DNA, 99 bp, Homo sapiens
gaagttcaggaaacatccaagaaaaatgtccttaaagcaattgagcaggctgatctactgcaggagtgcactggtgattgctgcggtgtttgaccgaga

SEQ ID NO: 835045 - DNA, 99 bp, Homo sapiens
ccggttggggtgtgagaggttttctcgctctagggcacctttgatgattacttggagttattcctgcagtttggttatgtgagccttttctcctgtgtt

SEQ ID NO: 835046 - DNA, 98 bp, Homo sapiens
ctggctgtctcttacacggtagcaccctttgtgatgttggcagttgaaccgaccatcagcttatacaagtctgccatcatggatgttctcgcagaagc

SEQ ID NO: 835047 - DNA, 100 bp, Homo sapiens
agaattcagaaggagctggcggacatcactttagaccctccacctaattgcagggttacacatcattttggaatgactgtatatcatctggattacgtgg

SEQ ID NO: 835048 - DNA, 100 bp, Homo sapiens
gtgtttggagggaaatgggaatgtacacgataattaaagagtaaagttgtgctcaacggtctacaaggaagtcttcacgaggagcagtgagaactcagcg

SEQ ID NO: 835049 - DNA, 100 bp, Homo sapiens
cagacctgatcacctgtctagagcaaggaaaagagccctggaatatgaagagacatgcgatggtagatcaacccccaggctacagcatgctggccatagg

SEQ ID NO: 835050 - DNA, 98 bp, Homo sapiens
tatccgggaggtcaacgaggtcatccaggacttgtcttacaaggaccggcactggcatgaagcctgtttccactgctcgcagtgcagaaactcactgg

SEQ ID NO: 835051 - DNA, 131 bp, Homo sapiens
ggagttcgaaaacgaacttcccacgtttgctatgttgccctttggagacaaaacaagaatctttggaagaactaccagaaacgagtgggaaaacaacccggagattcttctttaatttaagttctatcccc

SEQ ID NO: 835052 - DNA, 100 bp, Homo sapiens
aaatggtgctggatgaaattagaaaggtctgccatcatggatgttctcgcagaagcaaatggcacctttgccttaaaccttttgaaaacgctgggtaaag

SEQ ID NO: 835053 - DNA, 100 bp, Homo sapiens
agaagatacacagcagttgtcttaaacaggatgggtttgtggagttcttccatgtagaggacctagaaggtggcatcaggaatgtgctgctggcttttgc

SEQ ID NO: 835054 - DNA, 100 bp, Homo sapiens
ctttactgcccggccttgggaaacaagaggcgaatctttagataacctggactccccccgatccaattcttggagacagcctccttggctcaatcagccc

SEQ ID NO: 835055 - DNA, 100 bp, Homo sapiens
tcctgagtagctgggattacagacaaaagtcaactactgctgaggcatgggcttaataaatgttgactaaaatatccaactcaacaaccaatcctgtata

SEQ ID NO: 835056 - DNA, 98 bp, Homo sapiens
tcgcgcccgccgacccgcgccctgctccctctcagcacctgggcggacgatatgggtaagtgtcaccttaccaaaggcaaacaggctctagagattcg

SEQ ID NO: 835057 - DNA, 100 bp, Homo sapiens
tactgtgacttcagagacactgccaagcagccttagccctagtgtagaggtgttgctgccatcactacctttcccttcctcccctttcctcatggcaaga

SEQ ID NO: 835058 - DNA, 118 bp, Homo sapiens
gcggcgccgagtcgaacggggagccgagctggagctgccgcggcgcagccagattggcggcagtaagcacacaatgaatgatcacctgcatgtcggcagccacgctcacggacagatc

SEQ ID NO: 835059 - DNA, 100 bp, Homo sapiens
cgcaacagccccttcgtcccaagagccaaaaacctgtatatcatctccgtgaaggggatcaagggacggctgaacagacttcccgctgctggtgtgggtg

SEQ ID NO: 835060 - DNA, 100 bp, Homo sapiens
tagaagaaaaggtgtacttgcaagaaacctcaggacttgagtaacagcaacatgcgtgagtgcatctccatccacgttggccaggctggtgtccagattg

SEQ ID NO: 835061 - DNA, 100 bp, Homo sapiens
taaatgcagattccagaaaaattacagcacatctcagtgaatttgcaagtgatcgtcagtatttaaacagatcacatcatgcgtgagtacaagctagtgg

SEQ ID NO: 835062 - DNA, 99 bp, Homo sapiens
acggcggccgcagtggcgtcctggagccctcctcaggggagaagcctttcaactgcagctgggatggctgtgataaaaagtttgctcgttcggatgagc

SEQ ID NO: 835063 - DNA, 100 bp, Homo sapiens
gagaaagaaataagattgcagctgcaaagtgccgaaacaagaagaaggagaagacggagtgcctgcagaaagatgtacagttacccagcacgtgtacctc

SEQ ID NO: 835064 - DNA, 99 bp, Homo sapiens
ttgctaaagaggtagcaagaaagaaaattagagtgaatgtagttgcaccagagcacaggaagcttggaaacatgactgtgacggtgaagaagactgtcc

SEQ ID NO: 835065 - DNA, 98 bp, Homo sapiens
gggaagctgcccatcgccatgagggccctcaccaactaccaacggctctgcgaggcctttgacgcccaggtggagtctccccaggacagtgctatcac

SEQ ID NO: 835066 - DNA, 100 bp, Homo sapiens
ataaacttcagtcacttacagatgacctgcgactcttgcctgcactgactgttcttgatgtagatgacattaatgctgataagaatatctcttctgcaca

SEQ ID NO: 835067 - DNA, 100 bp, Homo sapiens
gggacattctgtcttcatggacatttttgaacttgtgggaggaaataatgctggccatacagttgttgtggattctgtggaatatgattttcatctctta

SEQ ID NO: 835068 - DNA, 100 bp, Homo sapiens
cagtcccccatatcacgtgcgaccccccagaagagcggcggctggaccacttctctgtcgacggctatgacagttctggcatggctaatgtaaaagcagc

SEQ ID NO: 835069 - DNA, 100 bp, Homo sapiens
gcagcccttacaagttgcaaagctcttgaatgtcgtctctcaactagccaaacggaatctgcgactgctggtcctaggccggaagcacatgctaagacgg

SEQ ID NO: 835070 - DNA, 100 bp, Homo sapiens
gtcatcttcaaattggagcaaggagaagagccgtgggtaggagatggagaaattccaagttcagattctccaggagatcctgctgggccgtggcttcacc

SEQ ID NO: 835071 - DNA, 98 bp, Homo sapiens
gaaaatccagcagtatgacaaggcactggatgatgcaatcaaagctcgacttctcaatcccaagtggccaaagatcccagtttctgacctgtagcata

SEQ ID NO: 835072 - DNA, 100 bp, Homo sapiens
cgcctggcaccctgcagggcaccaagctacctgtggagccgaggaaaagggatccatatggctttggagacagtcgagattcaaggcgtgatcgatcccc

SEQ ID NO: 835073 - DNA, 100 bp, Homo sapiens
catttatgaaagcccaaatcacctgtacttggtcatgcagctttattcaagcggagaaatgttgctacagcagaagaagaaacagaagaagaagttatgt

SEQ ID NO: 835074 - DNA, 100 bp, Homo sapiens
tgcggaaagcggcggactatgtccgaagcaaggatttccgggactacctcatgagcacgaaagcaagagattatcaaagtcactgaacaactgatcgaag

SEQ ID NO: 835075 - DNA, 98 bp, Homo sapiens
tcaggggaatataatcctgaggtgtttgacaaaacataccaattcttgaatgacatccgagcgaaagagaaagaggcatgttatttgaaagcaattga

SEQ ID NO: 835076 - DNA, 100 bp, Homo sapiens
gcctgcttctcatgaagcagaaaggagtgatgaatcagcccatggcttacgctgcacttccatcccacggtcaggtttttcgttggaatatacgttgcac

SEQ ID NO: 835077 - DNA, 100 bp, Homo sapiens
ggggatgaagcagcaaattctgccctgacggaggacatccgcttggagccagatctatacgaagcctgcaagagtgacatcaaaaacttctgttccgctg

SEQ ID NO: 835078 - DNA, 98 bp, Homo sapiens
cagaatatgacaaccccaccagaacctcaggcagcaaccctgggaagtgcccttgatgagctggagggagtaactattcccagtcagaggcgctatgt

SEQ ID NO: 835079 - DNA, 99 bp, Homo sapiens
ctgcaagagcagctccagcagctcccagctttaatcgcagacttagaatccatgacagcaaatctgagcaacggacagccaagacgtagatccatccaa

SEQ ID NO: 835080 - DNA, 100 bp, Homo sapiens
ggtccccaacgcatcatgccagggagccaagcgtcctgcccggcccagaaaaagtcctacctggagcgaagcgttaaggaagctgaggacaacatccggg

SEQ ID NO: 835081 - DNA, 100 bp, Homo sapiens
ttccactatggaattctcactacggatttttctggtataaccccgttttcacacgaatggccccttcacatatttgaagactaccgtcgtgtccgtgctg

SEQ ID NO: 835082 - DNA, 98 bp, Homo sapiens
ggaatccatgtttctggacgcggatttttggcctcatactctgttatagataaacaaggaatttagataatgggctgtgtgcaatgtaaggataaaga

SEQ ID NO: 835083 - DNA, 100 bp, Homo sapiens
cagcccccgggcacgacctctcggacacggtgcaggcagcagaaagatgaaggtcttagaatcattgattggaatgatccagaaattcccttatgatgac

SEQ ID NO: 835084 - DNA, 148 bp, Homo sapiens
tactgtgcagctcctgaaaggagagacacttgtgaacattcaagtgaagcaaaagcctttcatgattatgtcatcatcagatttgaaatatttaaagtggatacaaaactatttcagcaatgcagacaattaagtgtgttgttgtggg

SEQ ID NO: 835085 - DNA, 99 bp, Homo sapiens
gtctgctgcgttcacggcaggattcggttagagatatgaatcaggttcttgatgcctatgaaaataagaagccattttatctgtacacgggccggggcc

SEQ ID NO: 835086 - DNA, 100 bp, Homo sapiens
actacagcaggtcagagaacagatggaggaggagcagaaagcaatgagttaattttcctgagagaccaagacctggtctcctcggttcaattggagaagg

SEQ ID NO: 835087 - DNA, 100 bp, Homo sapiens
tcacctgtcttccgttgattgaattccttcaatctttgtaaaattctctgtggaggcagaagcaacaaattacccacctgcatgagaggataagggataa

SEQ ID NO: 835088 - DNA, 100 bp, Homo sapiens
gcaactccgccgggcgctgcaggccggccagctggagaaccaggcagccccggatgacacccaagctattcctgcaccaactgacctgaagttcactcag

SEQ ID NO: 835089 - DNA, 98 bp, Homo sapiens
ggcagtttgttcacgaccctcaacttggctactccctgccttgtgtggtttaacctggtatgtgccaactcctggatgttggacctattccagtcatc

SEQ ID NO: 835090 - DNA, 146 bp, Homo sapiens
acaaacgaagagcaaactcatccgttctcagactactaatgaacctcaacttgtaatatctttacatatgcttcacagacctttgcaggaaacatgaatgctgacagcgtggtgcaccacaagctattgcactcagtgagagcccg

SEQ ID NO: 835091 - DNA, 100 bp, Homo sapiens
tggaacaacggaagctacagaagccttctttgcaatgacgcgattgtttcaatctaatgatgtacaagaaaattccccaggacacagagctggtttggag

SEQ ID NO: 835092 - DNA, 99 bp, Homo sapiens
agacgacaagcacacactatggcgctgaaacggattaataaggtgaaagaactcttttcttctttgggagtcgaatgtaatgtcttggaacttgatcaa

SEQ ID NO: 835093 - DNA, 98 bp, Homo sapiens
atgataattcatgacagaagggagtttgctaaatttgaaaaggagaaaatgaatgccaaatgggacacggtcagagatgtcatcatcgctgcaagcgt

SEQ ID NO: 835094 - DNA, 99 bp, Homo sapiens
aaaggtcccggaccccccggatctgacggggcgggacctggcgccaccttgcaggaggagcatattatttaatatctagaagtctagggccagaatttg

SEQ ID NO: 835095 - DNA, 98 bp, Homo sapiens
gaaatggggctctgtcactttaagtacagctggagccgtgctggagaatctggtaaaagcaccattgtgaagcagatgaggatcctgcatgttaatgg

SEQ ID NO: 835096 - DNA, 98 bp, Homo sapiens
aagatgggcgacccggatctcctggaagtgttggcggaggaaggtctcatcagaaaattgaagactccgaagaaagcagtgatgaaattcttgtgcgt

SEQ ID NO: 835097 - DNA, 100 bp, Homo sapiens
cgtctatcattggatgaagtggctccggagatgtttctgccattattacctgcccgaggagcagttccccaagggctttgccttcgactgtgatgacgtg

SEQ ID NO: 835098 - DNA, 98 bp, Homo sapiens
gcctcctatgatatgcggctgaggcatggtcttgggtaccctatttattgggggctcccttgtggccggacagcagctgacagggggagacctcatgt

SEQ ID NO: 835099 - DNA, 98 bp, Homo sapiens
cagaagaacttgtacagagatgtgatgttggagaactatagcaatctggttttcttggaagcccttcagcggccagtagcatctgactttgagcctca

SEQ ID NO: 835100 - DNA, 98 bp, Homo sapiens
gagctgaacgtggacagcctcatcacccggctgctggagggttgacgccgctgtcaccccagaggagcgccacctgtccaagatgcagcagaacggct

SEQ ID NO: 835101 - DNA, 98 bp, Homo sapiens
aattgtaccagacgttaacagactatgatattcgattttacatgtatgagattctgaaggccctgtctcagcgggaccctcctcacaacaacttcttc

SEQ ID NO: 835102 - DNA, 100 bp, Homo sapiens
gaggagccaagaagtagcagaagggagccgagtttatctggagtgtagagtcactggaaaccccactcctcgagtcagacaaaactgtgtggagttttat

SEQ ID NO: 835103 - DNA, 100 bp, Homo sapiens
aacatgcaatgaacccaaaaggataattcctgagaacttcagtgttttcagtttgatccgggaaatgcggacacagaggccttcattagttcaaacgcag

SEQ ID NO: 835104 - DNA, 100 bp, Homo sapiens
gaaagcaaggccaaagacagggagaaggtatacccgaaatcttgtggatcaaggaaatggaaaatttaatctgatgattctctgttggggtgaaggacat

SEQ ID NO: 835105 - DNA, 100 bp, Homo sapiens
ggaagatgcacaggagctcctagatggcatcaaggagagcatggagcagaatgcagctgccccagagcacatcagctatgtgccccagctctcaaacgac

SEQ ID NO: 835106 - DNA, 99 bp, Homo sapiens
gggaacggtgatcggggaagcatggggatccgggagaagcacccacaaaactagcatcctcctggaggagctcggtgcaccaattccagctggacatca

SEQ ID NO: 835107 - DNA, 100 bp, Homo sapiens
tcctttggtcgggctgaccctgggtgagcggcccggagccaagactcgaggcctggagctgctgaagactgctattgggaaagctggctacactgataag

SEQ ID NO: 835108 - DNA, 98 bp, Homo sapiens
tccaggacaagcttttgtccccaaaccagagattgcggaagcatgagaagattctgtaactgagaggcattcttcaagctgctggaaaatattacaga

SEQ ID NO: 835109 - DNA, 98 bp, Homo sapiens
ggcatcacggtgtttggagtgtgcttggtttatgacctcttttccctttccaacaagcaagacaagtctgaggagctggtttcacctgaggacctgct

SEQ ID NO: 835110 - DNA, 99 bp, Homo sapiens
ttactcgcagctgcccggagaagatcacatcctggagcacctgcccgcccggctcaatgaggattacctcctgggccacttggatgatgaagggaaatc

SEQ ID NO: 835111 - DNA, 98 bp, Homo sapiens
tgtagacaggagctgttcctattcgggcatcttggctcctccttgaatgccatggacaatattaccaggcagaaccaattctacgatacccaagtcat

SEQ ID NO: 835112 - DNA, 98 bp, Homo sapiens
ggagccaggccagcggaagatcgtcatgcataagtctcttgcatggcaccaagaatgttaccaattcaagcagtttaagattgccaagacaaaatagt

SEQ ID NO: 835113 - DNA, 100 bp, Homo sapiens
taccattgttggatactggtgacatcatcattgacggaggaaattctgaatatagggacaccacagtggaacggcacatgtgtgatggggacattgttat

SEQ ID NO: 835114 - DNA, 100 bp, Homo sapiens
cgcgcccgcctgcagctggagctgagcaaagtgcgtgaggagtttaaggagctgaaagcgcggataatttccagcagtgttataagcgaggagggacatc

SEQ ID NO: 835115 - DNA, 100 bp, Homo sapiens
ccaagatgactacaggatattagcaggggaaatgctgtctgtagctgagcacttcctggagcagcagatgcacccaacagtggtgatcagtgcttaccgc

SEQ ID NO: 835116 - DNA, 100 bp, Homo sapiens
gttctgaatcctgagacgacagtggtggccatcttcccatctcccatgatgtatgctggaccaactgaggatggctggctgtggtgaaattgatcattca

SEQ ID NO: 835117 - DNA, 122 bp, Homo sapiens
gacaaacttctgaagcacatgattattgagcataagattgtcatagctgatgtcaagttggttgctgatttccaaagccctttctaaggcacaaaatgatgtgatggaaatgaagatgcagt

SEQ ID NO: 835118 - DNA, 100 bp, Homo sapiens
aggaggggaagggacgtgggggcggccacggcagaccttcactgcctggtgtaactcccacctaaggaaagccggcacccagattgagaacatcgaggaa

SEQ ID NO: 835119 - DNA, 98 bp, Homo sapiens
cgttctccctccagaacatacacttacatctctagataacagtctgcactttcacccgtttcaggatttccagatgtgacttgcactcagaagatcag

SEQ ID NO: 835120 - DNA, 100 bp, Homo sapiens
gaggatatgtagcgaggaggaacgcgctaaggcaaagcacctggtatttctgggaaaagccagcttctgtttgcactggtcttcacaactcgttacctgg

SEQ ID NO: 835121 - DNA, 100 bp, Homo sapiens
ttcagtccccgccgagccgccaccgcaggtcgaggacggtcggactcccgcggcgggaggagcctgttcccctgagaagctccaccatgaggcgaggtgg

SEQ ID NO: 835122 - DNA, 100 bp, Homo sapiens
ccatacaatgaagtagacattggtggaaacatttaatgaccagctgaactcagaagaaaaaaagaagagaaagcagcgaaggaataggacaaccttcaat

SEQ ID NO: 835123 - DNA, 99 bp, Homo sapiens
tctaatccaagcaataacccaagcaaaacttcagatgcaaaactagaaaaactgcttttggaattatctctacagtgaagaaacctcggccatcagaag

SEQ ID NO: 835124 - DNA, 99 bp, Homo sapiens
tcatgtctatatatttccccattcactggtattatcgggggacccacggggtcattgtggtttacgacgtcaccagtgccgagtcctttgtcaacgtca

SEQ ID NO: 835125 - DNA, 100 bp, Homo sapiens
cccagagctacccttcttggagcccacagggatgaggtttatataactttccaagacaaggaagttgtgcaaagcctcacagctactaagaggctgggct

SEQ ID NO: 835126 - DNA, 100 bp, Homo sapiens
tggccttcgcgtctgcccggccaagaggcaaaggggaggttacgcagcaaaccatccagaaggcttgccgctgttccgtaacccagtgattccagtcttg

SEQ ID NO: 835127 - DNA, 98 bp, Homo sapiens
cggcagcgggtcttgggtcctccgagagcagcagcgttttcggctttgtgagaaaccttaccatcaaacacgatggccagcaacgttaccaacaagac

SEQ ID NO: 835128 - DNA, 100 bp, Homo sapiens
tggcggatgccctgcagtacctgcagaaggtctctggagacatcttcagcagggctcaatcaagacatcacagatgtgtgtttttcccctgagaaagacc

SEQ ID NO: 835129 - DNA, 100 bp, Homo sapiens
gtatggagtcctttcctatcatgctcccagccaacctctgataaaccctcccagcggccatcagagagcacaaattgtagccctacccggaaaaggtctt

SEQ ID NO: 835130 - DNA, 98 bp, Homo sapiens
cgcaggagaaaatcgagacctcaagtaatcattcccaagagaccagcataaacactttggggactgagaggataagccatatcattagtgaccctcgg

SEQ ID NO: 835131 - DNA, 100 bp, Homo sapiens
ctaaggaaatgctgaagcttttgatttgggtcacagctaagtatcaaggcctcaagtctggcacatttttctggccaggatcagatgtggaaattaacgg

SEQ ID NO: 835132 - DNA, 100 bp, Homo sapiens
gacagcttttgatttattaaatttaaatagattagtaactggcatagacaactatgggcagtctgaattggagaagcctagaggcaggaaaaaaacgccc

SEQ ID NO: 835133 - DNA, 98 bp, Homo sapiens
aggccctcaccagatgcagccctagactttggacttctcagcctttgtacctgttacggcctccgctgccacagggccatcatcaccatctgccggct

SEQ ID NO: 835134 - DNA, 99 bp, Homo sapiens
gccagcagccgtccggagccagccaacgagcgtatatcctttcgggctctgatgacttcaacctgtacatgtggagaattcctgcagatccagaagcag

SEQ ID NO: 835135 - DNA, 100 bp, Homo sapiens
agactttcccctcggattcctctctaggactgaaccaagacttacccgaagttgccgcggggccttccgatccccttgctggacccaaaggagacaacat

SEQ ID NO: 835136 - DNA, 100 bp, Homo sapiens
attgagggcacctacattgacaagaaatgccccttcactggtaatgtgtccattcgagggcggatcctctctgattatctttctcaaggaatagatcttt

SEQ ID NO: 835137 - DNA, 120 bp, Homo sapiens
gccctaattactacaattttgcaccttcttaatcatccaaagactcgacagtatgtgcgagctgatgtagaattagaggatggggatagtgtgatggtccttccaaccatccctgaagaa

SEQ ID NO: 835138 - DNA, 100 bp, Homo sapiens
aaaatgagtcagccatagtcagtgcaatccagatattgctgactttacttgagacacgacgaccaaccacgctccctgaaatttggcaggcagactggag

SEQ ID NO: 835139 - DNA, 98 bp, Homo sapiens
tgcagcacagtcgggggtgtaggttatggggatgagctcacagtgcctgcactttaccccagtagccctgaagtgtgggccccgtaccctctgtaccc

SEQ ID NO: 835140 - DNA, 99 bp, Homo sapiens
atctcccacagcccctgcatgccccagtgacaagccagcaccagtccagaagcctccatccagtgaatcaaggccagaggtgtgaacaaggtgtcagct

SEQ ID NO: 835141 - DNA, 98 bp, Homo sapiens
aacacattaacaccgaagttctacgtggccctaacaggcacttcctcactaatatcagggcttattttgctgcagaaccttggcctgaaaatgctaca

SEQ ID NO: 835142 - DNA, 100 bp, Homo sapiens
tttgattgtgtattatggataccaaggaagagaagaaggaacggaaacaaagttattttgctcgcttgattgcacattgatccaaccctcctaacaacta

SEQ ID NO: 835143 - DNA, 100 bp, Homo sapiens
aaacagatatcccaacatccttcccagttccatcaggcttgttcatccccagcatggccattggagcgatcgcaggaaggattgtggggattgcggtgga

SEQ ID NO: 835144 - DNA, 98 bp, Homo sapiens
tggggatgaggcctggtcttgtggaactgaacttagctcgacggggctgaccgctctggcccagggtgaggagctctacggtgactttgaagacttgg

SEQ ID NO: 835145 - DNA, 98 bp, Homo sapiens
gggacgtgggaagtgcaggccctgccggtccaagtccccacgaagggagatcatgcacgccctgaagatgacctggcacgtgcactgctttacctgtg

SEQ ID NO: 835146 - DNA, 100 bp, Homo sapiens
cgagaaaaacctcagcgacctgatcgacctgtctgcatcttacaaccttctgtcttcagtacaaaccaacagtgatagcatgtgtatgcattcatttggc

SEQ ID NO: 835147 - DNA, 99 bp, Homo sapiens
tcctccaccacctcttgatgaagaggctttcaaagtacagtataaggatgcatttatgaaagcaaatcctggctacaaatggtgtcctaccacaaacaa

SEQ ID NO: 835148 - DNA, 100 bp, Homo sapiens
caagtcatttagcgctatggaagatgaccagaggactagacctgaagtttcaaaggcagcaggtatattgtgatgggccacatctaccataagagacggc

SEQ ID NO: 835149 - DNA, 98 bp, Homo sapiens
ggaatcctattttttattatgttgcacggaggtttaccgacaagactgtgaaactttcgggatggtggtgaaaatgctgattgaaaaagatccttcat

SEQ ID NO: 835150 - DNA, 100 bp, Homo sapiens
ttactggaagaaggagttaagcagcttgacacctatgccccctttcctgctgatttcatgccaatattgggaaccaacctaaatccagaattcatttcag

SEQ ID NO: 835151 - DNA, 98 bp, Homo sapiens
cttcaaactgaccaagcattgaaaaggaattttctacttctggtcatgcttacactgatacagggaaagcatcaggcaacctagaaaccaaatataag

SEQ ID NO: 835152 - DNA, 100 bp, Homo sapiens
agcaagagcaagatcaccgtgacatccgaggtgcctttctccaaaaggctctgccaaggctgagaatgacaaacatctaagtgtagggcctggccagggg

SEQ ID NO: 835153 - DNA, 100 bp, Homo sapiens
attgttacttcaacttctgctggttgctccttgagggcaggacagttcttatggctttatccgttgcgtaagcacagagaggtctgcgaggtcaaaacta

SEQ ID NO: 835154 - DNA, 100 bp, Homo sapiens
gccctgtggccacctctgctgctgtgtggtgcgaggctgtgagcaggtcaccagtgatagtgaactggaatccatgactgacaagatgctggtgagaggg

SEQ ID NO: 835155 - DNA, 100 bp, Homo sapiens
gcagcacgtattagtaataaagggaaattttctacagataccaaaggaaaaccaacttctcggacacaggtgtccaatatcagatggaaatgatgcggag

SEQ ID NO: 835156 - DNA, 125 bp, Homo sapiens
actttgctgctgcatcaacacatggagcattgtgtttagagcttctagttggcaatggggccgatgtcaatatgaagtgatttagaatctagaagagaagtaaaaaaagaagaaggtgaagcttt

SEQ ID NO: 835157 - DNA, 100 bp, Homo sapiens
agtgggggttatggtgggaggagccgatactgagcttcttcctatttgccatgggtcctttcccataacctgtgcacggtgctgaaggttcctcatgacc

SEQ ID NO: 835158 - DNA, 98 bp, Homo sapiens
gcgcttccttataggatctctgcccacagtcagcagcacaacagaggcggaattctgcttggtcagaatcgtgatggcattgtgttcagcactgatga

SEQ ID NO: 835159 - DNA, 99 bp, Homo sapiens
gaatcatggttggctctttctacatccctgggggctatttcagctcagaggtggtttgtgctccccctactgcctatatcgacttcgcccggcagaagc

SEQ ID NO: 835160 - DNA, 100 bp, Homo sapiens
catgtgcttgctgcctattctatttataacacgctgcagaagaaagatcagcaactggagcctaaaaaaagtaccagccctaaaaaagctgcggagccca

SEQ ID NO: 835161 - DNA, 98 bp, Homo sapiens
cctcatctccaggacagtgggaagagtggctggaggaattcagtttcttggggagaatgaagacctttcgaatccgtcaaaacctatacagaatcaaa

SEQ ID NO: 835162 - DNA, 98 bp, Homo sapiens
atgcttcagctcatcttaggctgtgctgtgaactgtgaacagaagcaaggatttggaatgccctgacagataattatgggaatgtgatgcctgtagac

SEQ ID NO: 835163 - DNA, 100 bp, Homo sapiens
tgcgaacaaagctcgggatgaggtgattaagcagctccgcaagctccagggcttccttctgaactctccccagctattgaggaagaagagtcaaagagtg

SEQ ID NO: 835164 - DNA, 100 bp, Homo sapiens
gatcaaagctaactgaaggagtatccagttgctggtttctaacagctgaagtgcttcaccgatatagacacattttgggattgtggcagccagatatcgg

SEQ ID NO: 835165 - DNA, 98 bp, Homo sapiens
tattagaaaacctattgactatacaattctagatgatattggacatggagtaaagagtgcctaccgcatgtttacaaacaacacgtgtttgaagcaca

SEQ ID NO: 835166 - DNA, 100 bp, Homo sapiens
aagcgaagaaaaggatcccagaaagtttcagaatcgggaccagtattcacatctgctaagtgatcattttctgccataccaaggtcataattccttccgt

SEQ ID NO: 835167 - DNA, 98 bp, Homo sapiens
cagccagcccagcacatccagtcagaaaccagtggatctgccaactactcccagatggaagtttactgttctgattttcatgctgaaagagcagcgag

SEQ ID NO: 835168 - DNA, 100 bp, Homo sapiens
gttccaagaagactcaatatgaagaacatatttatcgttgtgaagatgaacgctttgagctaaacccacagttcagccctccccttctacaacttccaag

SEQ ID NO: 835169 - DNA, 100 bp, Homo sapiens
catgcagtggtatgaatgatcctgattttggctattctcaaggaaacccttgtattcttgtgaaaatgaacagaaacccagtgacttgattgtaaaaatt

SEQ ID NO: 835170 - DNA, 98 bp, Homo sapiens
tgacattacacagtgttaacaatgcatccacagaggatagagggaggaatcagcagcttggaaattcaagcacgtgatctggcgggatgggcgtttgc

SEQ ID NO: 835171 - DNA, 98 bp, Homo sapiens
gtagaggatagccagttggtggagctcacaaaacaggaaatcatcaccaagcttcagccaaacaggcaggactcgtgaaattgtgatgccttctagga

SEQ ID NO: 835172 - DNA, 126 bp, Homo sapiens
gtaatcttggctgtgttttcaatgcacaaggggaaatttggcttgcaattcatcactttgaaaagggcttaaagaagacatgtgtgaccatggaccaggaacgcccacgctctgacctcagcataa

SEQ ID NO: 835173 - DNA, 100 bp, Homo sapiens
gttgcagcgatgctcaaggatcggtcccacgttcgggcttgcttctgacatgtctgatgagcgcattcctgctgttgctcctggctattacaaggtgtcg

SEQ ID NO: 835174 - DNA, 100 bp, Homo sapiens
cggccgcctggctccccatactagtcgccgaaatgagccgtcagactgctacagcattacctaccggtacctcgaagtgtccaccatcccagagggtgcc

SEQ ID NO: 835175 - DNA, 98 bp, Homo sapiens
agccccggccacctcggcctcttcctgttgcaccaggttcttcgaaaactgaagcagatgttgaacaacaagaccccaactgtaaacttgaagacaag

SEQ ID NO: 835176 - DNA, 100 bp, Homo sapiens
ctcccagggcggacagcagcctcgggtgcaatcctggagccccccagtgaggcatgcagcagattggaataaatatgatgaccgattgatgaaagcagca

SEQ ID NO: 835177 - DNA, 100 bp, Homo sapiens
acggctcctgccaggctgggatagcgggcttcttcaccgagactttgctaccaggacttgctggcccctctggggagatggttaaatccacaacaagtct

SEQ ID NO: 835178 - DNA, 98 bp, Homo sapiens
ggaagagagggccttctcccgcttctctcctcctcctctccacgctggggggatcctggaacactgagctgaaggttgaagtggagagcttgaaacga

SEQ ID NO: 835179 - DNA, 98 bp, Homo sapiens
tgagacatgtctgagactcctgctcagtgtagcattaagcttttcgctgtggcctgcagtttttaggcaacattgcctcacggaatgaagattcccag

SEQ ID NO: 835180 - DNA, 98 bp, Homo sapiens
tgcgcaccgacatcgatgcgacctgcacgccccgccgcgcaaacatacatatgatagttgagaaagacacatattctgatcatgaagaaataaacaca

SEQ ID NO: 835181 - DNA, 100 bp, Homo sapiens
accgcggcccctgagttgcaaacaaatgtcagatcccaggcaatgaatcgctccctggctaatgtgattcttggaggctatggcaccacttcaacagctg

SEQ ID NO: 835182 - DNA, 100 bp, Homo sapiens
ggaacgactgcggcgcgctgctggacgaagagctctcctccttcttcctcaactatctcgctgacacgcaggcatcctattttcattggtggtgatgctg

SEQ ID NO: 835183 - DNA, 99 bp, Homo sapiens
ctacacacaatgagctggaaaagaatcggtccctccttgtggtccatttctgggcaccatgggctccacagtgtgcacagatgaacgaagttatggcag

SEQ ID NO: 835184 - DNA, 119 bp, Homo sapiens
tcgggagcagaagcggcggcgacacgacgcgcagcagctgcagcagctcaagcacctggagtccttgtgcaggtatttggactgtattctggagaagaatttcacgagacttttgactg

SEQ ID NO: 835185 - DNA, 124 bp, Homo sapiens
aatgctggtcaccccagctcctcagcagcatgaagaagaggacctggatgatgatgtcatcctgacagaagatcggaaactccatggtacagctcagcaactgctccaggacagcaagacaaaa

SEQ ID NO: 835186 - DNA, 100 bp, Homo sapiens
gaagtcattccagagatctgagagactccataccagtttttcaggcagaaaatccttttgattttatggaaaacatttctttagaaggaaaaacaaattt

SEQ ID NO: 835187 - DNA, 100 bp, Homo sapiens
catctcctcgctgggcatgatcgaggccacagcccaggtcacagtgaaagacctcctgccccccgaggtctgcagtctcctgaacccagcagccatctac

SEQ ID NO: 835188 - DNA, 100 bp, Homo sapiens
atcaatttattttataccactgaaccgtgcacttcaaaatggttaagatgtctttctctaatacacagaattctaggaaggaggctgttcttttagccaa

SEQ ID NO: 835189 - DNA, 98 bp, Homo sapiens
gctgagatgatggcatctttactaaaagaccttgcagaaataggaattgctgtgggaaataatgatgtaaaggcagttcaattaacctccagaagatg

SEQ ID NO: 835190 - DNA, 98 bp, Homo sapiens
cccaacctcaccaagaagatgaagaagattgtggatgccgtgatcaagtacaaggacagacatgtcatgctgcccaaggacatagccaagctggtccc

SEQ ID NO: 835191 - DNA, 100 bp, Homo sapiens
ttgacgaggctgcggtgtctgctgctattctccgagcttcgcaatgcaactttttaaatattgacccgataaccatggcctacagtctgaactcttctgc

SEQ ID NO: 835192 - DNA, 99 bp, Homo sapiens
tccttgagaagtcctcacagaagtcccggcgagaggtgcgtgctctggaggaggccaacgccgacctggaagtgaagatccgtgactggtaccagaggc

SEQ ID NO: 835193 - DNA, 100 bp, Homo sapiens
aaaatctgcaatatggcattgagtctttctctaacaaaacgaaaggtgagccccatgcacggttctatgcagctcagatagtgctaacattcgagtacct

SEQ ID NO: 835194 - DNA, 99 bp, Homo sapiens
cggtggcatctgcggccatggcggcgactactgccaaccccgggcagccgatgaagtgcaaccttcacatgaatgggaatgttatcacctcagaccagc

SEQ ID NO: 835195 - DNA, 100 bp, Homo sapiens
aaagacagtgacgacaaaacaccagatgatgaccctgagcaaggaaaatctgagggcttaccttacaaatttgaagtacagcagatgttagaagaacctc

SEQ ID NO: 835196 - DNA, 101 bp, Homo sapiens
atttcagtcactggtttgcagagtccaggtcgcagaaccctagctgtaatcactaaacttgatctcatggatgcgggtactgatgccatggatgtattgat

SEQ ID NO: 835197 - DNA, 100 bp, Homo sapiens
ctgccagccatgccacctggatgggaaaatcgacgtaattaacacattccagacgggagcctcttttaagggagtcctaaggcgacagaacatgggtcaa

SEQ ID NO: 835198 - DNA, 100 bp, Homo sapiens
atgttgtttaccgtaagctgtagtaaaatgagctcgattgttgacaggtgctccaatattacctcaaggattacagcctgaacaacagctacagttgtgg

SEQ ID NO: 835199 - DNA, 100 bp, Homo sapiens
tgttttacatccaagaactacaggctttacttttgtggtagaccgtctaagagaagagagtgataatgaactctcaagtggaacaggtgatgtgtctaag

SEQ ID NO: 835200 - DNA, 100 bp, Homo sapiens
cctcgtcggataccctcccgagtgcctggatctcagcaatggggataccattctggaagacttgcccatccaatctgatgaagattatggaagagattcg

SEQ ID NO: 835201 - DNA, 100 bp, Homo sapiens
cagcggtagcaggtggcgcagaagggagaggggagcgaccctggggaccgactctggggaccctcgccgaagaggtattctagaatggattctgggaaag

SEQ ID NO: 835202 - DNA, 100 bp, Homo sapiens
ccaccccatgtgacaacggaccctgcacgggcaaggtggagtggtttgccgggagctggagtcaggatgctgacagacagcaccaagaagtaattgcaat

SEQ ID NO: 835203 - DNA, 100 bp, Homo sapiens
tgacgcctaagctatcactggacatatcaaggacttcactaaattagcaggaaacaatgtgatgagaaccattcatggggtgggagagatgatgacccag

SEQ ID NO: 835204 - DNA, 99 bp, Homo sapiens
cttgctgtgtcccccaaatggaccaactatggcctccgcatctttggctacctgcacccctttactgatgctgaggagtacctgtcatttgcctttgag

SEQ ID NO: 835205 - DNA, 99 bp, Homo sapiens
acaaagggaggaactgtttgtagccctcgtccagacgccccaaacaaacagctcgtggtcccaagaagcatctgaagcgggtggcagctccaaagcatt

SEQ ID NO: 835206 - DNA, 112 bp, Homo sapiens
taattccccgtttccttcaagagttttcatggattctaatggaatcaggcagttttgtgtccatgtgaacaactatagacgatcagctgaacactctcttgaaggagttcca

SEQ ID NO: 835207 - DNA, 100 bp, Homo sapiens
tccgcctgcctgcgcacctgcggaagaatcccactgatgcataccttgatgccatgatgaatgaggccccagggcccatcaatttcaccatgttcctgac

SEQ ID NO: 835208 - DNA, 100 bp, Homo sapiens
caactacaagcagcagagagaggtaaaatatacccaggaccataaacagatgaaaggtagaccaagtctgattttagatacacctgctatgagacatgtt

SEQ ID NO: 835209 - DNA, 98 bp, Homo sapiens
agaaggtctttcaaaccagctccgtgtacagacagagaatcatagtgaaagattcgttttcattgcagagtggtatgatccaaatgcttcacttcttc

SEQ ID NO: 835210 - DNA, 100 bp, Homo sapiens
cccattattcgattctttggcagttggtgaaaattactgatggctctccttccaaagttgcagtattttacagagctagcccaaggcacaagatgaaaat

SEQ ID NO: 835211 - DNA, 99 bp, Homo sapiens
ccagaatgaattctatggacaggcacatccagcagaccaatgaccgactgcagtgcatcaagcagcatggcctgtatgagaagaaaaagacctcaagaa

SEQ ID NO: 835212 - DNA, 113 bp, Homo sapiens
tttgacccagttcctgtcaagcaagaggccatggaccctgtctcagtgtgaacacctacctcttcatgatgcaagcccaaggcattctgatccgggacaacgtgagaacaatc

SEQ ID NO: 835213 - DNA, 100 bp, Homo sapiens
ccatcttctgcttagtatgtgtattcagacaggttccacttccaaacatgagttccaggccgagacaaagaagcttttggacattgttgcccggtccctg

SEQ ID NO: 835214 - DNA, 100 bp, Homo sapiens
ggagatgtgattaagactgagggagccactctaagggagatgtcctttgcttctcagatgtaaatgcactttaagtttgttattcaacagtgaaaatgag

SEQ ID NO: 835215 - DNA, 99 bp, Homo sapiens
ctggctccccatactagtcgccgttttcggctttgtgagaaaccttaccatcaaacacgatggccagcaacgttaccaacaagacagatcctcgctcca

SEQ ID NO: 835216 - DNA, 107 bp, Homo sapiens
ctccgcagcaagatggcggacgagaaggacagggaagtcgtggcattcctggtggctttccatcagaacaagcagctcatcggtgacagggggctgcttccctgcag

SEQ ID NO: 835217 - DNA, 98 bp, Homo sapiens
cgaagggagttggtaaacgctgacacactaaagggcaccactgaggatgacgtgttgacaggtcaggtggaggagcagtgtgtgccagcagcagaggc

SEQ ID NO: 835218 - DNA, 100 bp, Homo sapiens
aaagtcagcatgatccacagactgcgattcacaaccgacgtacagctagagggtctcgctgttggagttggatttggggctatagaaaagacggcatctg

SEQ ID NO: 835219 - DNA, 100 bp, Homo sapiens
aggcggattaattagcccaagaaacattatattcatattactgatctctcattacccaactatctgatggcatcttcggttggactgcttcctacccagc

SEQ ID NO: 835220 - DNA, 100 bp, Homo sapiens
aactcagaatgcattgccattttcacataggtgctctgtggatgtgtatagttttaaacccccactgcaagttggagcaaaaggccagttggctaaaaca

SEQ ID NO: 835221 - DNA, 98 bp, Homo sapiens
cccaaaagagagaatttatctagaggaaaacccagagaaaagtgaaacaattcaggacactagaagatggcgaattagaagatggtgaaatagacgat

SEQ ID NO: 835222 - DNA, 99 bp, Homo sapiens
tcaatgaaattcttagtgatccagaggttcttgcagccatgcaggagtggttaatgtgttgctaacaactccactctgggtggtaaacaccagactgaa

SEQ ID NO: 835223 - DNA, 99 bp, Homo sapiens
gggccgtgctgcttatggcggcgctggagagggggcgctgagctgttgggaagctccaccatgaggcgaggtggatggaggaagcgagctgaaaatgat

SEQ ID NO: 835224 - DNA, 100 bp, Homo sapiens
gggggtaaaagagatcaccgacaagatcaccacggacgagatgatcaaacgcctgaagaatgacagcccatatcaaggcggtgtattctttttgacaatt

SEQ ID NO: 835225 - DNA, 100 bp, Homo sapiens
aatatgacggtggctataccagggactctgttctgattagttggttgaatctggcgatgtggaacccatggatatggagggctgactatatacaccatgt

SEQ ID NO: 835226 - DNA, 100 bp, Homo sapiens
cacaggaagctttagctagaagataaactcaagccatggagggattactgcattacatcaaccctgcacacgccatttctctcctaagtgccctgaatga

SEQ ID NO: 835227 - DNA, 98 bp, Homo sapiens
gaagatgttcagcgtagagtcgctggagcgggcggagctgtgcgagagcctcctcacttggctttggcagcatgtaagcagctgtttgccaagaaccc

SEQ ID NO: 835228 - DNA, 98 bp, Homo sapiens
cttcccacaccagcagcagtgtgtccagctctccctctcagatggatcatcatttggaaagaatggggaactgttaagaggagacaagaagaagacca

SEQ ID NO: 835229 - DNA, 98 bp, Homo sapiens
cgggccttctggagatgcttccgaactgtgggcaaaaatggcggacatggatttgattgacatactttggaggcaagatatagatcttggagtaagtc

SEQ ID NO: 835230 - DNA, 100 bp, Homo sapiens
gactttaacagaactcaacaaatgctgtggcctttgtgtctgcccatgtaataggtgctgggtaggccaggtttcagcatcgcagacaagaagcgcagga

SEQ ID NO: 835231 - DNA, 100 bp, Homo sapiens
cgagagcaagctctataagattcttcaaggtggggttggcatcccccacatacgtactatactggcaattgctggagaagattttgcaattgttgcttct

SEQ ID NO: 835232 - DNA, 100 bp, Homo sapiens
tattgtggctggagacatgagcaagaaaagcctctgggagcagaagggaggctccaagacctcatcaacaattaaggctttgaaatttctgaaaaccaga

SEQ ID NO: 835233 - DNA, 132 bp, Homo sapiens
gacttgcaacaagacattgcagatggagtactcctagcagaaatcatccagattattggcagttatacttaagcatgaacattgacgacaaactggaaggattgtttcttaaatgtggcggcatagacgaaa

SEQ ID NO: 835234 - DNA, 100 bp, Homo sapiens
gtagtagaatgcttgaggcctggaatttaaacctgagccactatctgaaggcggttcaggaccatcatcctccatagccatagcgggcaccaaccaccct

SEQ ID NO: 835235 - DNA, 100 bp, Homo sapiens
tatgaatctctgcccgcaacacatatcaggattgacttctaaggactcttggtacatgaggaagaaacccggaaggggaagaggaaagcaaaggcgtcag

SEQ ID NO: 835236 - DNA, 100 bp, Homo sapiens
ttcctggcaatgatagatacatcagtgtgggaagccaagcagatacaagttaaaaaagctccttgaacaagaaaaggcttatcaagcccgcaaagaaaag

SEQ ID NO: 835237 - DNA, 101 bp, Homo sapiens
cggatatttacttacagctggactgtgctcggttcgcgaaagccattgctgacgaccagggcttccgagtggacctgccaatcaagtcggcccgctaccgt

SEQ ID NO: 835238 - DNA, 98 bp, Homo sapiens
cacctgagcggcggagacggctgtagcacaaggtggctcctgcacgtgcgccggctcctgcaagtgcaaagagtgcaaatgcacctcctgcaagaaga

SEQ ID NO: 835239 - DNA, 98 bp, Homo sapiens
tcagaaggaggagagtgctgcttcaggaggagcagcctatacaaagagaatccacactggtgatagaccatacaaatgtgcacacccaggctgtgaga

SEQ ID NO: 835240 - DNA, 99 bp, Homo sapiens
ccaatcatgagcactgctttaatagggatcagttccatgacaagaccccttatacgattatgtttggtccagataaatgtggagaggactataaactgc

SEQ ID NO: 835241 - DNA, 100 bp, Homo sapiens
gacatcgacctgtaccagagattccagggtcaacaaaaggagtttctgggagaaacatgattcccgtgacagaattccggcagttctctgagcagcagcc

SEQ ID NO: 835242 - DNA, 100 bp, Homo sapiens
cgactggctgcttggggagattgagtccaagttcaaccaagccattttgtctgtgctgtgaatgccctcgcccaccatgtgctcaacaaggacctcaagg

SEQ ID NO: 835243 - DNA, 100 bp, Homo sapiens
ctcatcaatggccatttgaattcacttcagagcaatccactactgccagaccagaagggtgatggattggagttcaagagacacttcctgaagattaaag

SEQ ID NO: 835244 - DNA, 100 bp, Homo sapiens
gcccttgaaatgaagctggacttggagcctcaagtactacagccttccagcagccttcccagacccacagatcacacccagggaaaactaataaagccac

SEQ ID NO: 835245 - DNA, 99 bp, Homo sapiens
cccattccagagtagtaagaactcctacatcaaactctccttcaaagaacatggccagattgagagaatgaagacctttcgaatccgtcaaaacctata

SEQ ID NO: 835246 - DNA, 98 bp, Homo sapiens
acaagacctatagctacctgaataaactaccagtgaaaagcgaatatccctctgaaatggtgtttgcaagtgtcgtgtgtgtgagtgcaaccccaact

SEQ ID NO: 835247 - DNA, 98 bp, Homo sapiens
aaccgcacagagccgcgggccctttgcagctgcgattttcgccctacgttttcaacggagggtaagaatgattgatgttggctgatattggagtgctc

SEQ ID NO: 835248 - DNA, 99 bp, Homo sapiens
gcttgtataacctgaaaacgctcctgtttttctcatctgtgcagtgggctttcaacagacctcacatctttcttcttatgaaattataactccttggag

SEQ ID NO: 835249 - DNA, 100 bp, Homo sapiens
gactcatcttgaagcccagaataagattaagggttgtacaggctctttgaatatgactctgcaaagcaagatttgttgaagaatgaacaaaatcaagaag

SEQ ID NO: 835250 - DNA, 99 bp, Homo sapiens
tcagtgttccagaagatacagtttcaagctgcacaggcctgggcacatgggagtccccaaaattacattgccaaggtggcatttacaccctacgccccg

SEQ ID NO: 835251 - DNA, 100 bp, Homo sapiens
ctggcccgaaaggagagcctttcttctcaccactaaatccaatacgagttcatattgatattggagctgatggcagagccacaggagaagcagatgtaga

SEQ ID NO: 835252 - DNA, 100 bp, Homo sapiens
agttgaagtacacctcccccgattcaaacttgaaactaagctgcactccattttgcaatggcctcccttgctgcagcaaatgcagagttttgcttcaacc

SEQ ID NO: 835253 - DNA, 100 bp, Homo sapiens
ggaaaatgcccaggaggaagcaggagcagcccaagcgccttccctcacgaatgggtaccacagaccatgtcatcgtcctggcgtccacgaaccgagctga

SEQ ID NO: 835254 - DNA, 100 bp, Homo sapiens
gtatttctttggcatcactgcagctagtaatttgccttctggattccacgagactcaaacaacttgctgggaccatcccaaaatgacagagctctaccag

SEQ ID NO: 835255 - DNA, 100 bp, Homo sapiens
ggggcgcacgtcggctcccacgcttagccagctcccggaatggcacaactagagaggagcgccatctctggcttcagctctaagtccaggcgaaactcat

SEQ ID NO: 835256 - DNA, 98 bp, Homo sapiens
accgggatcgtgaccgagaccgtgaccgagagcgtgaccgagagcgcgaatatcgtcatcgttagaaggtcgttcttccctctttccaatagatgatg

SEQ ID NO: 835257 - DNA, 100 bp, Homo sapiens
aagattccactcgtggtatgagagtggataatataatcaactcctctgcctgtataccaacagatgttttaaagattgtgtattctgtgggtgctcagac

SEQ ID NO: 835258 - DNA, 100 bp, Homo sapiens
aaaaatggacttgactatgcactcagatgtgattgatctcactggagatgataaagatgatcttcagagagcaattgccttgagtttggccgaatcaaac

SEQ ID NO: 835259 - DNA, 100 bp, Homo sapiens
acagttgtcattcacttcttagacaaagaattgacaggcttgaaccagaataaaagctacttggccgtaaggctaaaagaccaagatctgagagattcaa

SEQ ID NO: 835260 - DNA, 98 bp, Homo sapiens
cttttcatatcttttaccagttgttatctggagcaggagaacacctaaagtgtcaactttcattctatgatgcaaattctaaacagttgctatattcc

SEQ ID NO: 835261 - DNA, 98 bp, Homo sapiens
cgttcgggaaatgctgaccacgcaggcggagaggttttccaaggaggaggtttttaccagctatattgatctcctgtacccaacggaagatagaaatg

SEQ ID NO: 835262 - DNA, 100 bp, Homo sapiens
tagctttaattgaaggagctggtatcttgttgacaagatttgcctctgcacagtttcccaatgcaaggcgcacagaacatcagctgaagcaatttaccga

SEQ ID NO: 835263 - DNA, 100 bp, Homo sapiens
cggatccgagtggtggggagaggtgccttcgggctcaaggatgtccaatcaatggatgagctgaaagatgtctacaaccattttcttctttattatggcc

SEQ ID NO: 835264 - DNA, 98 bp, Homo sapiens
caaaaactgggaagatgtaccaggagaccaggtcaagcccgaccaatacactgaggccctggcccagagggacaagcacagtaaccttggtgcacgac

SEQ ID NO: 835265 - DNA, 129 bp, Homo sapiens
cagtgagatcaggtggcctgcttccagatcctcctagaagtagttacttggaaagtccaagaggcccaaggttcgatacaagaggctgttttcctagcgtggcttgctgcctttggtaagaacatgtcg

SEQ ID NO: 835266 - DNA, 100 bp, Homo sapiens
gcggcgcgctgctggacgaagagctctcctccttcttcctcaactatctcgctgacacgcaggtcacatttagggcaggcaaaacataagggatatagcc

SEQ ID NO: 835267 - DNA, 99 bp, Homo sapiens
tttcctgaggcctccccagacatgtggaactagtttcggttccaccaagttgcccaggctggtcttgaactcctgggcttaagtgatcttcctgtcttg

SEQ ID NO: 835268 - DNA, 100 bp, Homo sapiens
aggtgatacatcctggtcttcaagaagactacatgaggaaataattgacttttataacttcatgtccccttgtcctgaagaagcagctatgagaagagag

SEQ ID NO: 835269 - DNA, 100 bp, Homo sapiens
agcttctccacatacttttcaatttgatcaagaggccagatgatgagcaaagcgtcatcacgtagacataaccaagaaacttcacccaaatcaagctggc

SEQ ID NO: 835270 - DNA, 98 bp, Homo sapiens
gagcagcaactcacccagcacacaaaatggatctcttacgggttgccacaccatttggaggttttgaaaaagcatcaagaatggttaaatttaaagtt

SEQ ID NO: 835271 - DNA, 98 bp, Homo sapiens
gtcggactggagctctgggctgcggcgcacgccttgcccgcccagacccaacatgagtgaagtttcctgcaagaaacgggacgactatttggaatggc

SEQ ID NO: 835272 - DNA, 100 bp, Homo sapiens
agtcaaacctgtgagttcaacatgatagagcagagtggaccaccccatgaacctcgggtgttgaaagcagcaggggcctagaagacattaaaccgatacc

SEQ ID NO: 835273 - DNA, 100 bp, Homo sapiens
tgggtgcttccagcaggaatgagtgctaaaatgctgggaggtgtctttaaaattgactggatttgcaggtgactattatatggttaaaaagattttggag

SEQ ID NO: 835274 - DNA, 100 bp, Homo sapiens
aaaaacatatccgagggtgtcctgttacttccaagtcatcaccagaaaggaatcactagatttgatctacttggcgactttggaaggtttaattggctgg

SEQ ID NO: 835275 - DNA, 99 bp, Homo sapiens
tcttgggttttttgtggcttccttcgttattggagccaggcctacaccccagggagccatttgtgcaggccaagctgcggcccgaggacggcctgtacc

SEQ ID NO: 835276 - DNA, 100 bp, Homo sapiens
gggacgttcagggcttggtctcagcattgtgggaggaaaagacacacccttgccagagactgctgctactttgaaacgtacgatagaggccctgatggac

SEQ ID NO: 835277 - DNA, 99 bp, Homo sapiens
cttttactattagcccatcaagaaatgaagaacgagattcagacacagatgaaatcgtggacactttgggtgaaggagcctttggcaaagttgtagagt

SEQ ID NO: 835278 - DNA, 98 bp, Homo sapiens
ggcgctggcggagacgccggctgctcctcccctccccgccgatggcaccaaaagcgaaggaagctcctgctcatcctaaagccgaagccaaagcgaag

SEQ ID NO: 835279 - DNA, 100 bp, Homo sapiens
tcagctggtcctagacatgcgtggcgtcggggctgtggcacggtcgggtccgggaggatctgaagaggcaaaatgcagtattacaagctgcacaagatga

SEQ ID NO: 835280 - DNA, 100 bp, Homo sapiens
aaagggaactgaaattactattgcctttgattttgactatggaaattggttggacaccactgcatgaagcttgcaatgttggatattacgatgttgctaa

SEQ ID NO: 835281 - DNA, 98 bp, Homo sapiens
agggacacaactgccacaagccggacacgtgtggaatggatccaacagcaagtggtaaaaaagcggacaaagagggattatgacttcagtcgtgccca

SEQ ID NO: 835282 - DNA, 100 bp, Homo sapiens
gctgaaaataaatagggaagatggagacaccctctgggggtcctctctgagtcaaatccagtgttttctggatatgccgcagaaggatccgtgccagaag

SEQ ID NO: 835283 - DNA, 100 bp, Homo sapiens
ttggccgatgcctggccattctcaaagggatttttggtagcagtgcagtacctcaggtgattgtagagaaggctccaaaagccagggtgcctgatctgga

SEQ ID NO: 835284 - DNA, 100 bp, Homo sapiens
gagagtttgtggaagatggcgcctgttgtgacaggctcactgaaaactgaagctaatttggaagttttgaagtcaattcctagtgaaaaattaatgattg

SEQ ID NO: 835285 - DNA, 100 bp, Homo sapiens
ctggaattgagcaagggagtgatgccggttatctctgtgaatctcaggaattgccccccactgcctggatgagggcactgtgcggagtatggtcactgag

SEQ ID NO: 835286 - DNA, 100 bp, Homo sapiens
ccctctccgtccatggccccagatgacacttcaggtgacccaggcctctctccggtctcacattggagttgtgccccaagacactgtcctctttaatgac

SEQ ID NO: 835287 - DNA, 99 bp, Homo sapiens
actgatgaagtgttagacatcgagatcaatgaacctttagatgaatttacaggtgctgataagactgtgaaaggcccagatggactgaccgcctttgaa

SEQ ID NO: 835288 - DNA, 98 bp, Homo sapiens
cactctccaatcctcacctcactgctgtgctccagaacaaggataattgccccaaccttcccaactcagggcaggaagactatgacaaggatggaatt

SEQ ID NO: 835289 - DNA, 100 bp, Homo sapiens
tcatcctcaccactgactggatttggtactggagtgatgagtttggttcttggcaggaatatggaagacaggatggccatttggaaacacgatgtgcaag

SEQ ID NO: 835290 - DNA, 100 bp, Homo sapiens
caagcagctcaatgagaaaatctccctgctccgcagcgacatcaccaagctggaggtggacgccatcgtcaacgccggagatgaccaggatagtgaaaag

SEQ ID NO: 835291 - DNA, 100 bp, Homo sapiens
gaggtcatcaaacagtcggcctatgactcgaaggttgataaggaaaccaacacggaagatctctttctggaagaagcagccagcctcgtgaaggagcggc

SEQ ID NO: 835292 - DNA, 98 bp, Homo sapiens
ggaaaatggctcttcagatgaggacctggccatgggcacagatgctgagggagagaagatcaaggaccctatgcgagccatcgtccccattctgctgg

SEQ ID NO: 835293 - DNA, 99 bp, Homo sapiens
tgatggcccgcagcttcggtgacaagggaagaagcgatgctgtccacatactttgaaaccatcaatgacctgctgtcttccttcgggccagttcgtgac

SEQ ID NO: 835294 - DNA, 100 bp, Homo sapiens
ggttctggacaagatgaagtctttctgccagtcggtggtggggagcggcagctggcagagagtcaacgcccagacggctgtgagatccccgagatatgcc

SEQ ID NO: 835295 - DNA, 98 bp, Homo sapiens
taaagatccaagtgctgttcacacagtgagatgcattctgccaaaacctattgatgtacaagtcattacacaccacatgcagcgatatgcagtttggt

SEQ ID NO: 835296 - DNA, 98 bp, Homo sapiens
ttctctggctggttcacttctccctggctcagacagatcaggagtggaaacatctgaatatgctcaaggaggagaagtcaatgaaaggattctatttt

SEQ ID NO: 835297 - DNA, 98 bp, Homo sapiens
aggaaccccaaaggagtcgattcttaaaaactctgcttctgttgtggagcaagaagttcccatagaacctcctagtgcaaccaccaccactacgattg

SEQ ID NO: 835298 - DNA, 100 bp, Homo sapiens
cttggtgctcaggtgccagatgcaaagaagcctaaagaaactgttccaactcttgctccaaaaactctttcagtagcagcagcttttaatgaagatgaag

SEQ ID NO: 835299 - DNA, 115 bp, Homo sapiens
cagaacctcgatgagatcttgcagcagcacaagctgaagatgaacgtgcgcatcgaccccagtagcctgtccttcaacatgtggaaggagatccctatccccttctatctctccg

SEQ ID NO: 835300 - DNA, 99 bp, Homo sapiens
acagtgggacctagacaaagggagagggtgaccgacatcccaactaggagcagtatagcatcaagttctagaggaattgggagccattgcaaatctgag

SEQ ID NO: 835301 - DNA, 100 bp, Homo sapiens
cggcagtcggatagacaataccacaacaacacattttgcagaggaatcattaaccaatggcaacaggaatccaaggataaagtgatttccctcctgttaa

SEQ ID NO: 835302 - DNA, 100 bp, Homo sapiens
ccgtgacaggccaagtgcaggggccagaagacaaagtcaattccatagggagaaccgaagattacaggaggccagcatgaggttggaacaagagaatgat

SEQ ID NO: 835303 - DNA, 100 bp, Homo sapiens
agaaccgtcccaaaatatggcaaagaaacctattctgagtgcatcgtgagtgttgctggtggggccactcgggctgccctgaccgtgcaccaggctcgga

SEQ ID NO: 835304 - DNA, 99 bp, Homo sapiens
ggatgatgccatcaacatcctgcagaatgaaatgtgaaatggccaccagtggtgacagacaaagagactcagaagttaatttcaaggaactgagaacag

SEQ ID NO: 835305 - DNA, 98 bp, Homo sapiens
cacagactggggtggcccagaacaactgctacatctggatggagaagaggcaccgaggcccaggttcccagtctaagtgggtgactttccaagataga

SEQ ID NO: 835306 - DNA, 99 bp, Homo sapiens
cagtatgaagtggtgaaggagtgtgtgcagcggagaagagatcaactttgggaaacttatcacaaagccttcagaaggaacaactttaagggtagaaga

SEQ ID NO: 835307 - DNA, 98 bp, Homo sapiens
ggactgcactacaccgtgcacattctctgttctaagtgccttaagagaggatcgcccaatccacatgcttttccagttttcggctttgtgagaaacct

SEQ ID NO: 835308 - DNA, 103 bp, Homo sapiens
ttcctgaagatgtttacagtgcagtcttatcgaaggatgtgcatgaaggacagcctcttctcaatgacagtaaggattgtatcctggagccgctttccctgcc

SEQ ID NO: 835309 - DNA, 137 bp, Homo sapiens
cgaattctggtgaaaaaggaagaattgacccttgaaggaatcaaacagttttatattaatgttgagagagaggtggaacagaggctgaagttgttcaagttggcgtctgagaagcatcagcatatgtatcgcctcgc

SEQ ID NO: 835310 - DNA, 100 bp, Homo sapiens
atcttggctcccacaagagagttggctgtgcagatccagaagtgcaccaattccagctggacatcactgtgaaaatgggacgggataaagtccgagaaat

SEQ ID NO: 835311 - DNA, 99 bp, Homo sapiens
aggattccaagtaactcttatttggtggtggaagatggatatgaattttttgctaaacgacagttggtaaccttattttcagccccaaattactgtggc

SEQ ID NO: 835312 - DNA, 99 bp, Homo sapiens
gaacactggacacaggactggggaagactggatttcagcttaggagaaggtggtaaagactatcggcctccgggaagtgtggtactttggcctccacta

SEQ ID NO: 835313 - DNA, 99 bp, Homo sapiens
acacaacgaactttatattttaccacttccttgaataggcagaagaggtaaaacggggccaaagggagacccaggaattccaggcttggatagatcagg

SEQ ID NO: 835314 - DNA, 98 bp, Homo sapiens
cacccaacgcgaagacggtaacccgtgtgactttgactggggtctctcattcatcacttttatctgctatgtggcgtcctcagcatctgccttcctca

SEQ ID NO: 835315 - DNA, 100 bp, Homo sapiens
cttggaagcaccagatcaagatcatgacttacagattccagtctgctgttagatgattattcatccaagttgagccccaaaccaaagagagccaagcaca

SEQ ID NO: 835316 - DNA, 100 bp, Homo sapiens
ggcctttggaaacttcttggaggttttcaggaaacttgcagcaaagccattcgggttggagtaattgcaggactctggactgtcttcacactaggtggtg

SEQ ID NO: 835317 - DNA, 98 bp, Homo sapiens
agagagtcagcctctggttcagactgcagtaaccatttttgaaatcatgaatcctgtttatagtcctggatcttctggggttccctatgcaaatgcca

SEQ ID NO: 835318 - DNA, 100 bp, Homo sapiens
catcacctgcttcatccttgtttaatgactttggtgccctcaacatctctcagagacgaaaggcactagatgaaccagccaagactgaaagtgtctccaa

SEQ ID NO: 835319 - DNA, 100 bp, Homo sapiens
gagagggggttatttctccagcagccatgaaggaaccataaatccatggctaaccttgacaaatacactgaaacattcaagatgggtagcaacagtacca

SEQ ID NO: 835320 - DNA, 100 bp, Homo sapiens
acacagaatcagagcaagcagatacatgaattcatgaaagctgagcaaattaaagatgagtctttaaagataacacaaaaagttcccagccaagatggac

SEQ ID NO: 835321 - DNA, 100 bp, Homo sapiens
tcaggcctctggtgccaaatacattgtcttaacttccaaacatcatgaaggtataattgaaatcctcaaaggaatgcaagaattgggagtacatcctgat

SEQ ID NO: 835322 - DNA, 101 bp, Homo sapiens
atgcagtcagtctgttgatgaaactattttcaggcgacctccaagaagggtatcagtcgactggataaacagatgagaaagttcacagatataaggaaaaa

SEQ ID NO: 835323 - DNA, 99 bp, Homo sapiens
gtgaatgtgacgaaggacgaaaaggaatatatgaaatctattcgatatggctgtatcagaacttaattaaacacagctctctgtttgtcaagcagttgg

SEQ ID NO: 835324 - DNA, 124 bp, Homo sapiens
tccgagtgcgccctgatgctggcgcagggcacggtgggcgcctacctgagcctgagcccttgtgaagccggcaatgacaagtctgtatggtcgccatgccgagaaaaccactgacatgccaaaa

SEQ ID NO: 835325 - DNA, 98 bp, Homo sapiens
aagacttgtcctctgctacccatgatgaggcggtgcaggtcctcaagaagacaggcaaggaggtggtgctggagggtgacgcatccaaagaagacatt

SEQ ID NO: 835326 - DNA, 99 bp, Homo sapiens
gaaagggaggcaagaaggaagcagatgccctccaaatccttggttatggaatatttggctcatcccagtacactcggcttggctgttggagttgcttgt

SEQ ID NO: 835327 - DNA, 98 bp, Homo sapiens
aggggacggcagtgctgaggcggaacaggccgggcaccaaggcgcagagggagaaccgaagattacaggaggccagcatgaggttggaacaagagaat

SEQ ID NO: 835328 - DNA, 98 bp, Homo sapiens
atggaagaggaagcagatgatggttctaagatgggatctgatttagtcagtcaattcatgatgttgctatcaaaagttgagaaattgtcagaagaaat

SEQ ID NO: 835329 - DNA, 99 bp, Homo sapiens
tttgatcttcttgcatcaagttcagctcttccttggaacatcacagtacattttaaggacaaacttactgcagcttgaaggagccaaccatggatttga

SEQ ID NO: 835330 - DNA, 100 bp, Homo sapiens
ggttaaggaacaggaggaaaccattcagagctgtttgagctcttctctggcttcttgaaatactttcctggggcacacaggcaagtttacaaaaacctac

SEQ ID NO: 835331 - DNA, 100 bp, Homo sapiens
gccacatcccaactacacttggcctttcgacgacatcatcgtcttcgcctatgcctgccaggctgctggtgaaaggtgtagcagtcactcggcctacacc

SEQ ID NO: 835332 - DNA, 100 bp, Homo sapiens
tcatggaaaagcagttgctcgaagaactcgagcgacagagacaagctgagcttgccgcacaaaaagctagagaggttctctttgttcccagacactggtg

SEQ ID NO: 835333 - DNA, 100 bp, Homo sapiens
cccagtcggtgctccggggaggtcacctgacgaggagacaggggcaagtgtccgagtggtgaatcagctacttacagagatggatggtctggaagcacgc

SEQ ID NO: 835334 - DNA, 98 bp, Homo sapiens
tgacgtcagatcaaagaaaacagatcttctccagattggcagaaagttgatataggtggacttttttacagcattccccgtcggagccctttctagag

SEQ ID NO: 835335 - DNA, 99 bp, Homo sapiens
gaggagcagcatggcatttcagtcactggtttgcagagtccagaaccaacgaaacgtatgctttccttccaagggttagctgagttggcacatcgagaa

SEQ ID NO: 835336 - DNA, 100 bp, Homo sapiens
ctggtgcagcaggaattgggatcgtgtcgctgcgataaagtcagacctaaagccaaaaggaaagaagaaccaagctctatttttcagagacaacgtgtgg

SEQ ID NO: 835337 - DNA, 100 bp, Homo sapiens
ccggatcatcaatgccttctttccagagggtgtctgtgcttgtggtcggtaacttttgctgctgttgttctgctgctgtctgccattccattcgccatct

SEQ ID NO: 835338 - DNA, 100 bp, Homo sapiens
ctgacagatgccagcgtagctgaatccagtaccaaaaacgtcaacaacagttttacggaagcctacgtgatggccagcgtggacaacccccacgtgtgcc

SEQ ID NO: 835339 - DNA, 100 bp, Homo sapiens
tagaaaataccaaaagagaaattttagcacaactccggacacttgttttccagtgtgatcttacccttaaagctgggtattccctcagcggatactacac

SEQ ID NO: 835340 - DNA, 100 bp, Homo sapiens
agggtgtttgtgaaccgaagtttagcaatggaaaagataaagtgttttggttttgatatggattatacccttgctggggaaagtggaagttgaagctggg

SEQ ID NO: 835341 - DNA, 98 bp, Homo sapiens
atgactcatcttgaagcccagaataagattaagggttgtacaggctctttgaatatgactctgcaaaggttaatgactccagagagtaagatcagatt

SEQ ID NO: 835342 - DNA, 98 bp, Homo sapiens
cagcattcttgaatacttctaatgacagggagcccactacctcataagattgaatacctgcttaagaagcttacagaagctatgggaggaggttggca

SEQ ID NO: 835343 - DNA, 98 bp, Homo sapiens
atttgccaaagaaaaagtggatcttgtattgatgcactggagggataggatgggcattgctcaaaaagaggatatgggccctcacattttccaaacct

SEQ ID NO: 835344 - DNA, 100 bp, Homo sapiens
gctgtggaaagaagttgcaaaacactgggtggagtttgtccatatgctcaatgctaccatgtgcgccactacccgtaccatctgcgccatcctggagaac

SEQ ID NO: 835345 - DNA, 99 bp, Homo sapiens
aaggttctggacaagatgaagtctttctgccaggactgcgggctgcagctgagcggggaggagggacgccgttgctatcccctggcgggccacctactg

SEQ ID NO: 835346 - DNA, 99 bp, Homo sapiens
gagacccaaggaacagtgccaagttagatgccgattacccacttcgagtcctttattgtggagtcacaccgaggagaagactcagtgggaacatccaaa

SEQ ID NO: 835347 - DNA, 100 bp, Homo sapiens
ccagctaccatgccagagccagtttattttcactgtgcagctgttacaccagttttgggatttgagattgacgcggtgaactctgtccagttttcaaacc

SEQ ID NO: 835348 - DNA, 98 bp, Homo sapiens
ggaccgcttgaagcctgaatgcagtactgaagaactgctttcaattctaagtggtccttgtgctgcagaatcagaaccagctcttttgatagggagca

SEQ ID NO: 835349 - DNA, 98 bp, Homo sapiens
attgggtcagatgaacatcaagatatagatgtagcaatacttactgcactgctaaaagtgatgcagtttggcaaagggaagtcgtgttgctaccggtt

SEQ ID NO: 835350 - DNA, 100 bp, Homo sapiens
aactacctgccacccatccaacaactcccctcggacctcagtatgggctggaacctgacacttggcatgacagtggtgctatacttggtagatcagaaac

SEQ ID NO: 835351 - DNA, 99 bp, Homo sapiens
gtgcgtcaggtcccggggctgcataatgggacgaaagcctttctctttcaagatggtggagccagggcaagatttactgcttgctgctttgagtgagag

SEQ ID NO: 835352 - DNA, 100 bp, Homo sapiens
gcgtttgctgtcaggagctagtttaccagcctgtgacaactgagtgcttccacaatgtctgtaaagacgccaggaaagcatgtgcagatgcaactctctc

SEQ ID NO: 835353 - DNA, 100 bp, Homo sapiens
tccaatggctgagccgttttgccccaaaacgagagagctagctgtgttccgccatgtcagaatggagggatgtgtctccggccacaactctgtgtgtgta

SEQ ID NO: 835354 - DNA, 98 bp, Homo sapiens
gcgactccggagacagcccaaatatcctcggaagagcgctcccaggagaaacaatctccaaaaaaagttggtgatgacattgccaaggcaacgggtga

SEQ ID NO: 835355 - DNA, 98 bp, Homo sapiens
accaagcgttactttcctaccaagttgatattcactgatggactccaaagaatcattaactcctggtagagaagaaaaccccagcagtgtgcttgctc

SEQ ID NO: 835356 - DNA, 100 bp, Homo sapiens
atcccatcgttggctccttagaacctggaatttatgcaggatattttgattggaaggactgcctgcctccaacaggcgaaggaggtgtggtcaaacgccg

SEQ ID NO: 835357 - DNA, 100 bp, Homo sapiens
cacagtcgactcttctcatcccccaaagatcattctgcctgggaaagaaatgaaagtctttccaatgcaggtggaacaatccaaagttttaatcaaagaa

SEQ ID NO: 835358 - DNA, 153 bp, Homo sapiens
atgcttctggagcaaaacttgattaccgtcgatatgcagaaacactctttgacattctggtggctggtggaatgctggagagacacgggctcaaggaacccaagagagtggaagaactgcaaaacaagattgtaaattgtctcaaagaccacg

SEQ ID NO: 835359 - DNA, 98 bp, Homo sapiens
actattccatgattgttatgttcactgctcttcagcctcagcggcagtgttctgtgtgcagaattctgcttggtcagaatcgtgatggcattgtgttc

SEQ ID NO: 835360 - DNA, 100 bp, Homo sapiens
gactttaatcactgaccatcccaatatacaggtattctctactgccgctgatggtcaaacgcaagtggaaattaaagtgtgtcagggtgaaagagagatg

SEQ ID NO: 835361 - DNA, 100 bp, Homo sapiens
gaatgctgtgtatgataccttacttaatactgagccctctggcacaaatggaagaagaaagaagggagcaagtagctaaaattaagaagatggagatgga

SEQ ID NO: 835362 - DNA, 100 bp, Homo sapiens
gggcacagcatgagatccaaaggcagggcaaggaaactggccacaaactggcataaggtcccagctggtgatatgaagaggtggctacaactgtaataac

SEQ ID NO: 835363 - DNA, 98 bp, Homo sapiens
aggtgaaggaccggatcctggagaacatctcgctgtcggtgaagaaggttttctgtctcaactggtctctgacaagcctctgactgaatgtatccgtg

SEQ ID NO: 835364 - DNA, 99 bp, Homo sapiens
gcacggagggacttctgcagagagagtgcgcagaaggattccgggagcacagttccgccgatgccctgtgggacatcgagaccggccagcagacgacca

SEQ ID NO: 835365 - DNA, 98 bp, Homo sapiens
tccgacaaagcggctctccagcaagaaggtggcaagggatcacaggatggtatcctatcattttaccagaagacgggggcctacctcatggcctggag

SEQ ID NO: 835366 - DNA, 98 bp, Homo sapiens
atgaggtcggccagggtggggaagtggagtccgcagcccccgaatcggcagccctgactgccgccgcaggaagagggaagctggaggtctgtgagctg

SEQ ID NO: 835367 - DNA, 100 bp, Homo sapiens
catgttttatcaatgcagctaagatttgctatgggatcatttatggaatgggagctaaatctttgggagagcagatgggcattaaagaaaatgatgctgc

SEQ ID NO: 835368 - DNA, 98 bp, Homo sapiens
acgtgttggaccttccggagcttctcagaagacagagggttttcttttgaggaatagcacatttcaaacctacaagaaagaagtgtgcctcccccgtc

SEQ ID NO: 835369 - DNA, 99 bp, Homo sapiens
tcaggattaacactgcagagtaatgggactgctgagatgtcctctattcttgaagagcgtattcttggagctgatacctctgttgatcttgaagaaact

SEQ ID NO: 835370 - DNA, 100 bp, Homo sapiens
cttgtacagagatgtgatgttggagaactatagcaatctggttttcttggttcaaaagaatgctgaaccgggagctgacacacctctcagagatgagccg

SEQ ID NO: 835371 - DNA, 98 bp, Homo sapiens
tcctgcaaacttacgtggcatttctgaagtcatcagaggagtttgtgaagaaatatgggaacctttttagcttggagcttggtgacatatctgcagtt

SEQ ID NO: 835372 - DNA, 100 bp, Homo sapiens
aaaggagcagccctggtgtcacctatcagtaaaaggatctatcttgggatcccatggctttctttactgggctctggggccccttcacctgtgtaagcag

SEQ ID NO: 835373 - DNA, 100 bp, Homo sapiens
gacgagatccagttcctgcgaactgtttacacagtaaacaatgtgaatgtgatcaccaaaatacgcacagaacatctgaccgaggaggaaaaaaagagat

SEQ ID NO: 835374 - DNA, 100 bp, Homo sapiens
ctggatgctgtcatgaaagctcggaaggacattgttgctagactgcagactcagatgtttcatgaatcacgtatcctgcatttgtgggctgccttgttcc

SEQ ID NO: 835375 - DNA, 100 bp, Homo sapiens
gcccaccctacatttagcgcatcatgtgatccggactatgtcttcagcagtggtgcagttatatgcagcagatcggaactgtatgtggtcaaagaagtgc

SEQ ID NO: 835376 - DNA, 60 bp, Homo sapiens
taatactacctgcttttggatagaatgtaaaggccataaaattttgagtagaaaaatcca

SEQ ID NO: 835377 - DNA, 100 bp, Homo sapiens
gtccgtggctacctgtcatttcaatcacagcagcaaaaccttcatggtgatccatggctggacggtaataaggttagagagtcaagtatcacgttacaaa

SEQ ID NO: 835378 - DNA, 98 bp, Homo sapiens
cgacgaccggatcctgaggaggcagctgcggtggcagctgctgagttctcggtgaagttacagaatgtctgaaggggacagtgtgggagaatccgtcc

SEQ ID NO: 835379 - DNA, 100 bp, Homo sapiens
ttcaggagcaaccgaagacataaaatctttaacatttgacgcaaatggctttacccctcttcatattgcctgcaagaagaatcgaattaaagtaatggaa

SEQ ID NO: 835380 - DNA, 100 bp, Homo sapiens
ttatagcctcaaactcccaggctcaagcaatcctaccatgtcagccttcccagtagctggaactacaggaagcaaggcagcgaagacaacctccagggca

SEQ ID NO: 835381 - DNA, 100 bp, Homo sapiens
tctctctgaaatcactgagcaggagaaagattttctatggagtcacagacagttaatcaactggcccatgcccttcacatggacaaagatttgaaagctg

SEQ ID NO: 835382 - DNA, 98 bp, Homo sapiens
gagacttccacccatcacaaagtttgcagcagaatcaaaggcatgggaggttgatacctgccggggccattacaacaatgtatcttgtgccgtcttcc

SEQ ID NO: 835383 - DNA, 98 bp, Homo sapiens
tggagcccctggaggcccgcaaggccttcaggcatctggcctattccaagattgcagccttcttcgctgagtctctgcccagtgtgggagggcagatc

SEQ ID NO: 835384 - DNA, 98 bp, Homo sapiens
atactaaagcaggctaccaaggacagagtcagtgatttccataaattgaagcaaaactgttctgtgtggtatgggggagttacatatagagattattc

SEQ ID NO: 835385 - DNA, 100 bp, Homo sapiens
aacaaagtagaaactttgaggacattgtagccgaaagatatggggaaacaagagctacagtggatctattcaaagcttaacttctgtaggttccaaggag

SEQ ID NO: 835386 - DNA, 100 bp, Homo sapiens
aaatgatgggtgcccttgtggccagtaggcaatcacctgaaggatctgacttccagaagagcttggggcttccttggtcgcacccaccacctgcctgccc

SEQ ID NO: 835387 - DNA, 119 bp, Homo sapiens
caggcatcctagatccttgtatctacagagtatccgtgaggaagggactatgttcggagtgaactggagtttgcctatgagggaccaatgtatttagaacctctctctatgaatcggtt

SEQ ID NO: 835388 - DNA, 100 bp, Homo sapiens
cactcaaagaagactggatcgcttacatctccagagaaatcctgagggagccaaaaacctgtatatcatctccgtgaaggggatcaagggacggctgaac

SEQ ID NO: 835389 - DNA, 100 bp, Homo sapiens
gtaatattgagcctagtgttcgcagctgcttccaacaggtacgcagattttctgaggcattcttttgttttgagcatccaagagaagctgccattgcata

SEQ ID NO: 835390 - DNA, 99 bp, Homo sapiens
gtgtttgtgggcagcgccatgcgctctgagtccactgctgcagcagaacacaaagggtgatgcccggtatctgatctccaactctaaagaccagaccat

SEQ ID NO: 835391 - DNA, 98 bp, Homo sapiens
ggctgtcggcctggaccttgcagccgcaatgcatacttccacaggctgcactcgaggagatccacaaattctcaggaacctacacctgcatgaacact

SEQ ID NO: 835392 - DNA, 100 bp, Homo sapiens
gatcaacgagggcatctgcaaccgcaacatcgaccagaccatgctctccatcctgctcttcttccacagaagcctggaatggtcccccctccgccgggag

SEQ ID NO: 835393 - DNA, 99 bp, Homo sapiens
tttggtgccctcaacatctctcagagacgaaaggtgaacccgtgagcaactgtggtacctccacctgtcccacaacctacaactcagcagtaccaaggg

SEQ ID NO: 835394 - DNA, 98 bp, Homo sapiens
agtggacaaaatgggaaccaaacttggagagctagttactggaggtgaactgtttgaagacatagtggcaagagaatactacagtgaagctgatgcca

SEQ ID NO: 835395 - DNA, 98 bp, Homo sapiens
ggataagctgaaggaaagagctcaaagatttggtttgaatgtctcttcaatctccagaaaggcatttgagctggcaacgggagattatttgtttgaac

SEQ ID NO: 835396 - DNA, 98 bp, Homo sapiens
gacaagtgtacaccaaatgtgaaggtgatgaggttgaagatctctatgagcttttgaaacttgttaagaggctgacccgcggctgattgagtccctct

SEQ ID NO: 835397 - DNA, 98 bp, Homo sapiens
ctggggctgtgctccatggcgagctgggttttaaaatcaaagatgggaaaatcggagaaaattgcccttccccatggccagcttgttcatggtataca

SEQ ID NO: 835398 - DNA, 98 bp, Homo sapiens
gcagtgaccgtgtgtcagaacaatcttgaatcatgaagctactaaccagagccggctctttctcgattgttcagattccattctgtggggaaattgac

SEQ ID NO: 835399 - DNA, 98 bp, Homo sapiens
tcagcggccggaggacatgcgggagagagaatgagccagagggacacgctggtgcatctgtttgccggagggtctcttgcagctgaatggggtaaata

SEQ ID NO: 835400 - DNA, 98 bp, Homo sapiens
gctggctctgctgctgccgccggcgaaggaggaggcgttgccggctgttgcagctaattgcaaaatcccagttaacttcattgagtggcgtggcacag

SEQ ID NO: 835401 - DNA, 100 bp, Homo sapiens
taattatcacaattactgatgggagcaagttgactaccaccagtggagtccaggatgagctgtcggaaaaggtaacagaagatggaactcgaaatcccaa

SEQ ID NO: 835402 - DNA, 98 bp, Homo sapiens
cctattcagtccagcaggattcggacagcaagcatgtggatgtacatctagttcaactaaagctccataatgggagaagtaaagaacaaagacttaag

SEQ ID NO: 835403 - DNA, 98 bp, Homo sapiens
ccaggaccaaaagaggaagatagtcttgggacccttgcatggtgtttcaaagggtggtgaagaactaaggtcctatctgactcctgtacgggatgagg

SEQ ID NO: 835404 - DNA, 100 bp, Homo sapiens
agctgttttgaagatttggcagaagagtccttcaataatgttaaacagtggctgcaggaaatagatcgttatgccagtgaaaatgtcaacaaattgttgg

SEQ ID NO: 835405 - DNA, 100 bp, Homo sapiens
tcaggtttttctggatggaaatgaggttatcaaggctgcctataatcaagtaaaaacaatagctcaaggaaacctttccaacacagatgtccaagctgcc

SEQ ID NO: 835406 - DNA, 99 bp, Homo sapiens
aaggacgaggtgcaggaaatgtgtgaaacagctgttgaatatgctccagattatcaaagcttttggactacatatctgaagagatggattaagaatgct

SEQ ID NO: 835407 - DNA, 100 bp, Homo sapiens
cttgatcttgaacttctcagcctccagaacgggatccatatggctttggagacagtcgagattcaaggcgtgatcgatccccaattcgaggaagtccaag

SEQ ID NO: 835408 - DNA, 100 bp, Homo sapiens
taaaggaggccatccttccgccttcttctgcaggagtcaggtcctggacccaagccagaagcctctgcaaagcttccttccagacctgcagataactatg

SEQ ID NO: 835409 - DNA, 149 bp, Homo sapiens
acaatgtcctgtgggctggaaagtctggactggctccccgtgtggatcaggagaagtgggcccagcgttcattcagagatgaggaaggaacagagcatttacgaaaacgaaatacgaagttgccttttatgtttaccactggagaagct

SEQ ID NO: 835410 - DNA, 100 bp, Homo sapiens
tctggagtgaagttttcactgtggagaagccaggtgggaagaagattgagaggatccagaatccagatctctggaatagctaccaggcaaagaaaaaaac

SEQ ID NO: 835411 - DNA, 98 bp, Homo sapiens
ggggctccgtcatctgtctggagtatttttcagtgctgtacaagcgtcttgaattactctggtagcttttccagaaagacccatgacttcaccacatt

SEQ ID NO: 835412 - DNA, 100 bp, Homo sapiens
gcctgaacaggagcgcaattacaacttacaaatgtcgcttgagaccctgaatactatactggcaattgctggagaagattttgcaattgttgcttctgat

SEQ ID NO: 835413 - DNA, 100 bp, Homo sapiens
gcagcttattttcaagaacttactatgtatagaggtgttttcacagtcctgtgtttggtatggagagtgtggaattgcatatggggacaagaggtacaat

SEQ ID NO: 835414 - DNA, 100 bp, Homo sapiens
cctcaataaagagcatatcatctttggcaacatccaagagatctacgatttccataacaagaccactttctgtttgataagccagtgtcccctttattaa

SEQ ID NO: 835415 - DNA, 98 bp, Homo sapiens
tcagcctctccgtatgcaggagctggtttccctcccacctttgccattcctcaagctgcagagctcccagctcctccagcagccgacaggaggcccgt

SEQ ID NO: 835416 - DNA, 98 bp, Homo sapiens
ggaaactctcttctggagaagataacactttagtacagtcgccaactgatgtctacaggtcgggaaagaggttaaagaagacacgcaagtatgatatc

SEQ ID NO: 835417 - DNA, 105 bp, Homo sapiens
gccagagcctcagcaggagcctgttctcatcaccatggcaacagaaagtgaaattcgttattctacatggaagaaagctgtgatgaagtcaatgggttgggttac

SEQ ID NO: 835418 - DNA, 98 bp, Homo sapiens
agatctagtatagtcaatgaattaaagacaagaaggtttccaatcagaacatacatatgatagttgagaaagacacatattctgatcatgaagaaata

SEQ ID NO: 835419 - DNA, 100 bp, Homo sapiens
tgataaagggctctgaaagctagaagaaaaggtgtacttgcaagaaacctcaggacttgagtaacagcaacatggcatgtggagaccccaaggcaaaacc

SEQ ID NO: 835420 - DNA, 100 bp, Homo sapiens
gaaattagagaagcattccgtgtgtttgataagaataactgaagtgaagtgatggactccgatttggagagtagtaagacgtgaaaggaatacacttgtg

SEQ ID NO: 835421 - DNA, 100 bp, Homo sapiens
gtaatgcagccacctgttgcctatccagaagaaaatacactactcatcaaggaagaaccagtttccccctttctagggtgaggatggttctacacagcca

SEQ ID NO: 835422 - DNA, 100 bp, Homo sapiens
gcttatccttacattggcatgggatagagttgacattgccaaaaatcatgtatttgtttatggacagcagtggctgttttcagtgtggacagcagatgaa

SEQ ID NO: 835423 - DNA, 100 bp, Homo sapiens
gccaagtatgagggcacctggaacaatggcctgcaagacggctatggcaccgagacctatgctgatggagatggctacgaattcctggagatcctgaaac

SEQ ID NO: 835424 - DNA, 100 bp, Homo sapiens
gtgaagcaggaagaaattcaggaaacctttatcaaaaatatattcacaaagaaacggtgtctaaatgaggacacagaatttccaggtgttgtggtgcgac

SEQ ID NO: 835425 - DNA, 100 bp, Homo sapiens
ggacttaatggagagttatgttgatagaactggagatgttcaaacagcaagttactgtatgttacaggtctgagaaagaaccccagtttaagtttatcta

SEQ ID NO: 835426 - DNA, 119 bp, Homo sapiens
cgagtacagctgcaccgtgcggctgctggacgacagcgagtacacctgcaccatccaggaatagccaggccagaagaaggaaggcctgtggtgagtgggacaggaaatgacatcaccac

SEQ ID NO: 835427 - DNA, 98 bp, Homo sapiens
gtcttggaaatactaagttgggacacattcagctaacgtattttagcaggtggagtgaggttgaagattcctgtgacagcgatgccatagagagaatg

SEQ ID NO: 835428 - DNA, 100 bp, Homo sapiens
tttactgcagcacattaatctcatgaagacatcagacagctatgggttcaaagaggaatatgagttctttattggtgaaaacatgaatccagatggcatg

SEQ ID NO: 835429 - DNA, 100 bp, Homo sapiens
aataaaagtgaagatggtgatacaccagatatgaaatgtgacgatatgctaacaggtagatacaacaagaattgaatactccattcctttaagagaaaac

SEQ ID NO: 835430 - DNA, 99 bp, Homo sapiens
ttggtcagaatggagctcatgccactggtcaccctccccaaagttgcatccaagaattgatgcccggagagctgatgaaaaccttggaatgcttcttgt

SEQ ID NO: 835431 - DNA, 100 bp, Homo sapiens
ggaggattcgatggcaattttttgtggaacagaattggagcaggaaccttagtcatttctgctttatattttgagctatcagcatttgggaccaattcag

SEQ ID NO: 835432 - DNA, 100 bp, Homo sapiens
gaggttggatttatgcaaacttgggccaaaggacagttagaagacagtaggacaaccctccatatgataagggagccttcagaatcgaaatcaactttcc

SEQ ID NO: 835433 - DNA, 100 bp, Homo sapiens
atgtgtctggtgaacctgaagcttcaccgagtgcagatacaactatactgtttgtaaaaggagaaggcctgaattattggaacaactttggaaagccaga

SEQ ID NO: 835434 - DNA, 122 bp, Homo sapiens
ggagattggtttcatagtaaggattctttctttaaggtgatatggagcaactgctttcacaggggcaccaggaaaatcatcagcgtgttagcattttctttgactatgcaagatgtagcaag

SEQ ID NO: 835435 - DNA, 51 bp, Homo sapiens
cgacaaaggtgtcatcattaaccctgattacatcaaccccagagccgtgca

SEQ ID NO: 835436 - DNA, 100 bp, Homo sapiens
agctcatcaatgctgaggagcagacgagtggccaggcttctggggctgactcaactgtgagtgatagttgcttcaggaatcttgcagaagaccgcagtgg

SEQ ID NO: 835437 - DNA, 100 bp, Homo sapiens
ttccgcacaggcctgctgaactgggtgctttatatagggtttgaaaagcagagatgatgtcccaaaactagtgactgagttcctggcaaagaaatttgac

SEQ ID NO: 835438 - DNA, 100 bp, Homo sapiens
ccgactcggtgattgaggacaagaccatcgagctcatgctaaaagatggcggcaaggcagcccaggcaaatgtaagaataggcgatgtggttctcagcat

SEQ ID NO: 835439 - DNA, 100 bp, Homo sapiens
ttcagtatctggagcatcctcagaaaatgtattggaatggtagtgggcagcagtcagtgacaggtgtaacctctgtggatgacagcaacagttactggag

SEQ ID NO: 835440 - DNA, 100 bp, Homo sapiens
ccaggctggccccgagcggaactggagaaagctgaggggttttggccaaattgggcgagggcacaaaataaccacttaccccttctcaccgaggaagagc

SEQ ID NO: 835441 - DNA, 98 bp, Homo sapiens
aattcagaaggaacttgcagaaatcacattggaccctcctcccaactgtagaccttagctggatctccaaaatacaagtgaatcacccggcagttctg

SEQ ID NO: 835442 - DNA, 100 bp, Homo sapiens
caacaggcaatacctgtctggacagggcaccagcctgaaagtgaaagttgcagttgccaatacctatgcctgtaaggggctagacaggattgaggagaga

SEQ ID NO: 835443 - DNA, 100 bp, Homo sapiens
aaacactcgccctctaccaggtgggcatttgatgtagaactactgtacatagcacagttctttaaaattccaatagcagaaattgctgtcaactggacag

SEQ ID NO: 835444 - DNA, 100 bp, Homo sapiens
aacaagttgtacagagcctcaatcagacctacaaaatggactacaactcctttcaagcagttactatcacaatggccaatgtacatggtggactatgccg

SEQ ID NO: 835445 - DNA, 100 bp, Homo sapiens
gctatatgggaacaacatacagtgacgcttcacaggcaaatggttatgagccttagagtttctgaactccaagtactgttgggctacgccgggagaaaca

SEQ ID NO: 835446 - DNA, 121 bp, Homo sapiens
agaaaccaacagacaatgccaatttacgtgtcattatggaactacttatgaggtacatcaggaacgtctctatcaagaatacaatttcagcaaggctgagggccatctgaaacagatggag

SEQ ID NO: 835447 - DNA, 100 bp, Homo sapiens
tgtccttcaggtagctgagactacaggcgtgcaccatcacacccagatcaatgtccgagttaccaccatggatgcagagctggagtttgcaatccagcca

SEQ ID NO: 835448 - DNA, 98 bp, Homo sapiens
agaatggaaaagaaccattgaagcttgagagaaaagcccccaaaagcagctattcaggttttgctgttactgctcagtgtagtcacaccttgaataag

SEQ ID NO: 835449 - DNA, 100 bp, Homo sapiens
aaaaaggaaaaacatcttgatctggagaaaaactggatgttggtagaaaaagcaagagtttgttatatagcatagccggatcgagctgggagatgtgaca

SEQ ID NO: 835450 - DNA, 100 bp, Homo sapiens
gcacgctggggagtttgttgggaacacagatatgtagaactcttcttgaattctacagcaggagcaagcggtggtgcttatggtagccaaatgatgggag

SEQ ID NO: 835451 - DNA, 99 bp, Homo sapiens
tcggctaatagcccggagacaagcacttgtattatttggctacagtcctggtgatggtgggcaagtttggagtcacggctgccttttccatggtctacg

SEQ ID NO: 835452 - DNA, 99 bp, Homo sapiens
ttggctcctgtgcatcacaagtctttgctattacatacttggcaagtgcaagacaaaatcgatgcaaacaatgtggcttacacaactgggaagctaagc

SEQ ID NO: 835453 - DNA, 100 bp, Homo sapiens
cttcgggcctctggaatttagcgctcgcccagctagccgcagggcgatgccagtccctccactccagaggagaacgaaaccacgacaaccagcgccttca

SEQ ID NO: 835454 - DNA, 99 bp, Homo sapiens
ttctttactacctcatgaacagaaggggtggcctatgtatgcacagctactgattgatttattcaaatatttagcgcctttccttagaaatgtggaact

SEQ ID NO: 835455 - DNA, 100 bp, Homo sapiens
agagcaacatctttcctcaccccaaggtgaaaggtgtagcagtcactcggcctacacccacagcatcgaccttgtgaacccagcgacctgactgccttgg

SEQ ID NO: 835456 - DNA, 100 bp, Homo sapiens
gttaacccaggagaagcatttacaataagaagagaagatggacagtttcagtgcattacagccctcttggaacagagatcatgatgacacggcatctact

SEQ ID NO: 835457 - DNA, 100 bp, Homo sapiens
gaaacctcaagatataatcttcacttccgggggcactgaggtggggtggaagacaacccgtgagtattacaccttcatgtgggttactttgcccattgac

SEQ ID NO: 835458 - DNA, 98 bp, Homo sapiens
gaagagcccaaaacctattacgaactcaaaagtcaaccgctgaagagcaggagctacagggagctggccgactgcacctggcacatggcggagaagct

SEQ ID NO: 835459 - DNA, 99 bp, Homo sapiens
ttactgttaatgtagtagcagtgattgttgcttttacgggcgcctgcattactcaagtttctaagcatgaattgaggaacagaagaagcagagcagatg

SEQ ID NO: 835460 - DNA, 98 bp, Homo sapiens
cctgcgcagctccggccgcctggctccccatactagtcgccggcttgttgattggtgctggctgtgccctctaccccttgggctgggacagtgaggaa

SEQ ID NO: 835461 - DNA, 98 bp, Homo sapiens
gttgctgacccagaggagagttctccaaacatgatcgtttactgcaaatttaaactcatatcccaggcatatgaagtgctttcagatccaaagaaaag

SEQ ID NO: 835462 - DNA, 100 bp, Homo sapiens
gttcccgaagcaaaagtccattcagaaaagacaagagccctgtgaggtgatattgaggcatggagtgacacatacgacacattcaagcttgctgacacct

SEQ ID NO: 835463 - DNA, 98 bp, Homo sapiens
ctggacaaaggagagaatgggactctcaggatattaccttccaaatgatgatggagaattttatcagttctgttacgttacccataagggtgaaattc

SEQ ID NO: 835464 - DNA, 99 bp, Homo sapiens
cgggaccataagggcttaactcatatatttaacccccctccaaaaactatgaaacccacgtagtcgaacaccgtgatgcttctcctgcagggcgtgtga

SEQ ID NO: 835465 - DNA, 100 bp, Homo sapiens
ttcaggagaactggtcgccatcaagaaagtattgcaggacaagagatttaagcctacacaatggaaaagccaaacaaaagaaaataaagttggaacttct

SEQ ID NO: 835466 - DNA, 100 bp, Homo sapiens
ggaaggtggggggcggcggcactgccggcggggaccgctgggaaggcgaggacgaggacgaggacgtcaagccgacgctggcgtcgctggaaccgattca

SEQ ID NO: 835467 - DNA, 98 bp, Homo sapiens
tggcactggtgctacagcaactgtgtcaccaaaggaaatcttgaacctgaccagtgagctgctgcagactaaccaggagatgcttcagaaggtcgaag

SEQ ID NO: 835468 - DNA, 99 bp, Homo sapiens
aacttatcagtagtgacttacagtaagacaacgactgaaagacctttcattcagaagctgtttcgtcctgtggctgcagatggacagttgcacacacta

SEQ ID NO: 835469 - DNA, 100 bp, Homo sapiens
gacaaccaaaactgctctgctcttccgaaaattgcagtcagggaacctgggacccggcaagccagcagaagggaaaatgttggggcttttcaggaagcat

SEQ ID NO: 835470 - DNA, 98 bp, Homo sapiens
tataatgaggatgatgcaaaggcagcaagagatgcacaggagggacacttagtcggtctggatgaaccagcttcgggagctgggcaagaagctctgct

SEQ ID NO: 835471 - DNA, 99 bp, Homo sapiens
aaatactggtggaaccagaaccattatttggtggtggcagtcacagaccagacaagaaagctgaagcgtcatccagacaagactgaaccataccttcag

SEQ ID NO: 835472 - DNA, 100 bp, Homo sapiens
aatggatgctgagctggaatttgccattcagcccaatacaactggcaaacaactttttgaccagattcaagaaatccatggtgaaaggtttggattccta

SEQ ID NO: 835473 - DNA, 124 bp, Homo sapiens
ccaaccgagggtgatgagacccaccaagcccaagaaaacctctgcggtcaactacatgagggggacacagcgattgccacgcgccattggaatgtccctggccaaggagctcatattctctgcg

SEQ ID NO: 835474 - DNA, 110 bp, Homo sapiens
aactgccccgccaccgtcatcaacgggcagtttgtcgaacgatgttggactcatagtcactgccagaaaggtgcccagaccacttgctatgaaaaaagagggaattcaaa

SEQ ID NO: 835475 - DNA, 100 bp, Homo sapiens
tcccgtgtagctgggattacaggatgatgatgctgaagctatccttgctgcagacttcgaaattggtcactttttacgtgagcgtataatcccaagatca

SEQ ID NO: 835476 - DNA, 99 bp, Homo sapiens
aagttttcacttatcatctattccaccgtgttctgggatccaaactactggatacaggtgcatcgcttggaacatggagatggaggaatactagacctt

SEQ ID NO: 835477 - DNA, 100 bp, Homo sapiens
ggaattgctaaagcttgtggaaaagctggatgtgctctccttgattttatggccggaagatggtgaatatcttgatggcgaacactaagtttgatgcatt

SEQ ID NO: 835478 - DNA, 100 bp, Homo sapiens
ccgggcggcgcgctgcccgaggggagcaaggacaggaaagaccacagcaagattctttcattcgtctcctcctagcctgggggaccaggctcgaactgac

SEQ ID NO: 835479 - DNA, 98 bp, Homo sapiens
gtgaaacttgtccgtgccaaatttcctgaacacaccattatgataagccaatggacacgtcagtgttatctgaagaaggaggagagccttttcagaag

SEQ ID NO: 835480 - DNA, 100 bp, Homo sapiens
tccaaccacgtcccgctctccccagcatttccacagacctggggcacaagttgaccagtctgtcttcgaggagctcatcaagggtcatctcccagagctg

SEQ ID NO: 835481 - DNA, 100 bp, Homo sapiens
cagaactatgcgaaacaattgaggttttagatggagcaggattagatattgatttccatcttgcctctccagaaggcaaaaccttagtttttgaacaaag

SEQ ID NO: 835482 - DNA, 100 bp, Homo sapiens
ggagcaggatctgaaagctgaaattgagaagctttgtgagaagggcagaaggtccactggctattctgaggtgatagttgtcgttggaggatgtgagcga

SEQ ID NO: 835483 - DNA, 98 bp, Homo sapiens
atgaagcacccgttaaaaatagttctacgaggagtgaccaatgatcaggttgacccttcactgagatctgtatctgtggacctgaatgttgatccctc

SEQ ID NO: 835484 - DNA, 98 bp, Homo sapiens
gaaacacggaaactgagtatgggatctgatgatgctgcctacacacaagatcaatgtccgagttaccaccatggatgcagagctggagtttgcaatcc

SEQ ID NO: 835485 - DNA, 100 bp, Homo sapiens
gaagtgtggctgccatccaccccagcctggagatccccaatccacagaccagcatggctgccactgctgctgtgagtcccagtgactacctgcagcctgc

SEQ ID NO: 835486 - DNA, 100 bp, Homo sapiens
gtgcttcagaagtttcatactttcagctactgctgacctttgaccctatccttgttgagaaggttgctattttgttataccatatcatgcaagataaccc

SEQ ID NO: 835487 - DNA, 100 bp, Homo sapiens
ataaagccaagagagaccttggagtaattcgtcgacaggctatctacaaaatggtaggcactgtgatcatgatgaaaatgaatgaggatggcctgacgcc

SEQ ID NO: 835488 - DNA, 100 bp, Homo sapiens
tggaaaaaacctgagaacttcctgatctctctcgctgtgagacatgtctgagactcctgctcagtgtagcattaaggagcttgaaattgtaattggagat

SEQ ID NO: 835489 - DNA, 100 bp, Homo sapiens
gagaatgtatgaagaacagtcacaggacaggtgtaccttgaaagacttttaacatacgcagagatagatatctgtccggccaactggaagcggattgttt

SEQ ID NO: 835490 - DNA, 100 bp, Homo sapiens
tgaaccgggcggtgtcctccaacgttggctgtatcatccgttgcagtcgtcttgaagaaccaaggaggaaaattgcaccagcaaaaaaaaattgagtcat

SEQ ID NO: 835491 - DNA, 99 bp, Homo sapiens
tttgatcccagtggatagagccattgaagacaccagacctgctggatgagaagcccaaggtcaaccccaaactctacatgtgtgtgtgtgaaggtctct

SEQ ID NO: 835492 - DNA, 100 bp, Homo sapiens
ggcacggccatctgtgtgtctgggcagtgcaagccaaacaggcaggactcgtgaaattgtgatgccttctaggaactacaccccatacacaagagtcctg

SEQ ID NO: 835493 - DNA, 100 bp, Homo sapiens
caagcttacgtctctgctcttcagtacaatcctattagtgatgatgaaccaggttatgaccttgatttattttgcatacctaatcattatgctgaggatt

SEQ ID NO: 835494 - DNA, 99 bp, Homo sapiens
tgactccaggagttcagttggaagcaggaggtgctgctcctctgaagattcaagcttatttcaatgagactgcagacctgccatgccaatttgcaaact

SEQ ID NO: 835495 - DNA, 100 bp, Homo sapiens
tattagctttagtgaaatgggctaataatgctggcaaagtggaaaaatgtgcgattatttttatcagacgtactacaatgacgttagtcttccaaataaa

SEQ ID NO: 835496 - DNA, 100 bp, Homo sapiens
accgggacggacaagaccctggtgaaggaggtcgtacaggtggaacaatccaaagttttaatcaaagaaggtggtattcagttgctgcttacaatagttg

SEQ ID NO: 835497 - DNA, 99 bp, Homo sapiens
ggatttcgacagtaacccgtttgccgacccggatctcaacaatcccttcaaggtcatgcttcaccccttcctccatctgctgcacctaccactgattct

SEQ ID NO: 835498 - DNA, 99 bp, Homo sapiens
aaacaaatgaagttcaaggatttctctttgggaaactaaaatatgagatcctgactccaaactccattcccaagggtttcatggacgggaagcaggcgt

SEQ ID NO: 835499 - DNA, 100 bp, Homo sapiens
atcaacccaaggtgatgcttttgctacgacctcattttctgctggaactggttacctaaccaaactcctgcaaaaccacaccacctatgcctgtgatggg

SEQ ID NO: 835500 - DNA, 100 bp, Homo sapiens
atcggttaatggatctgggccctgcacatataccatctctggctccagggaatgtgagggccatgaaatgacaagcattggactgctacttggtgtttct

SEQ ID NO: 835501 - DNA, 100 bp, Homo sapiens
gccgtcttttgcctctttctctcaggctttcctacaactcatgcccagcagcagcaagcagctccttgctctgctatggcttaccatcatgacagcagac

SEQ ID NO: 835502 - DNA, 100 bp, Homo sapiens
cacgcgccagctgcggaagcacatctgcattatcgtgctgaatttgggtgaggaggaaggagaagcagctcgccgcctgcagctcagcccatgggagagc

SEQ ID NO: 835503 - DNA, 100 bp, Homo sapiens
ctggatttataccggttcagcaagtatgttctcagaagctatacactcattatctgatacttgtaatcagggtaaaatacgaagccccccaagcaacaga

SEQ ID NO: 835504 - DNA, 100 bp, Homo sapiens
tacatatgtcgagggaatgcagaaagagttaaggaaggcagtgtcacatttgaagacgagcactgaggatgaggaaccaactgaagaatatgaaaatgtt

SEQ ID NO: 835505 - DNA, 98 bp, Homo sapiens
tgagcgcccggagcggtccgcgagccaccgaggcccagctgcagcacgtcactggaggcactgaagagcctgctgtccaccacggggcactggcatga

SEQ ID NO: 835506 - DNA, 100 bp, Homo sapiens
tttggaggaaggagcctggttatcccatgctggaattcatcattttgccagcaccagagcgggggagatcttcgagctgaaggcagagctcaacagtgac

SEQ ID NO: 835507 - DNA, 100 bp, Homo sapiens
gctattatgacaaaactaaatccttctttgataatatttcttgtgatgacaatagaattctgcttggtcagaatcgtgatggcattgtgttcagcactga

SEQ ID NO: 835508 - DNA, 99 bp, Homo sapiens
gggcacccagtctcctttcttcctgctgctgctcctcacagtgcttacagaatacacgggtaaaacttctacaggcacggtatatgttagagtacccga

SEQ ID NO: 835509 - DNA, 116 bp, Homo sapiens
gagggcttcgtgccctgtgcacgtttgccacctagtgaccaaactgagagtttccagatgtcttggaatgcactgtatctcatgcagtagaaaagataaatcctgatgaaagagaa

SEQ ID NO: 835510 - DNA, 100 bp, Homo sapiens
aaccacagttgtaactagccagactctgttacggcatggtgcaaatccagatctgagagatgaagatgggaaaactccattagataaagctcgagaaagg

SEQ ID NO: 835511 - DNA, 99 bp, Homo sapiens
ttggaccttccggagcttctcagaagacagagggttttcttttgaggccaggagacataattactcttttagaggattccaatgaagactggtggaaag

SEQ ID NO: 835512 - DNA, 100 bp, Homo sapiens
gcggggttcgggcgatgctgcaggatgattcaagagagccggtttctcatagaaatggcggacacagtccaggaaaagattgtacagtgtcagaaagcag

SEQ ID NO: 835513 - DNA, 100 bp, Homo sapiens
gtttttcatcctttgatcccgcggtcccttcctgtaccttgtcctcaggccactgcagaacaaattagacttgcacagatgatttcggaccataatgatg

SEQ ID NO: 835514 - DNA, 100 bp, Homo sapiens
catcattgtccaggcctgcagaggtggtgcatgtgagggaaccctggcttgttcaacctgtcacctcatctttgaagatcacatatatgagaagttagat

SEQ ID NO: 835515 - DNA, 100 bp, Homo sapiens
tattaaaactctgtgactttggaagggtttggacagaggagccaaaggccaaatttccactttcagcagttttatttcagctgttagcccgaagaaagaa

SEQ ID NO: 835516 - DNA, 98 bp, Homo sapiens
ctgattcagagacccagaaaatggtgcttaccaactacatgttccctcaacagccaaggactgaggatggatcttagtgcaacattgctctgcaaact

SEQ ID NO: 835517 - DNA, 98 bp, Homo sapiens
gctgccagatccgctgatctagtgcttctcgaaaaaaaccttcaggcggcccatggtttggatttaggtggcgagtagaaaaagaagtaatttcagga

SEQ ID NO: 835518 - DNA, 100 bp, Homo sapiens
ctttgccttttatccctcctcttcattggtttaatgtatcgctaccaacggtggaagtccaagctctactccattgaagctggcagggcggagatgctgg

SEQ ID NO: 835519 - DNA, 100 bp, Homo sapiens
gccgccgccagggtctgcagggcctgggccgccgctgctacctgcagcgccgtgtggcacgacacaaaaatcaggtcttggtcttgatgccaagtttggg

SEQ ID NO: 835520 - DNA, 98 bp, Homo sapiens
tttcgacaaagacgcaatcaggagaagccaagcacgctgacgaggttctgtgagagcattttaccgtggtttctgggcagtcctgatgctcctggggg

SEQ ID NO: 835521 - DNA, 100 bp, Homo sapiens
attccagtattgcctctccaagatctgccgagatgtacagaaaacactaggactaactcagcatgttcaggtgagaaagatcagtctaaagaaaaggaga

SEQ ID NO: 835522 - DNA, 100 bp, Homo sapiens
gggcgtcttgcagccctatgagcatctcatctgcggcaagaacgccaatggcagagattgtcaagaggctgaatgctatctgtgcacaagtcattccttt

SEQ ID NO: 835523 - DNA, 142 bp, Homo sapiens
gccgccggggacatgtctaaccccggaggccggaggaacgggcccgtcaagctgcgcctgacaggtgttaaaccgcctgacttttgcgtctactctttctcacctgcgtcgtttaaattctcctattggtagagacggcaag

SEQ ID NO: 835524 - DNA, 100 bp, Homo sapiens
aagctgaacagctttccaaagagcaaaaaggccccacatcaagaccatcttccaaggcattgctgcaaaagtgggaactggagaaccctgctgtgactgg

SEQ ID NO: 835525 - DNA, 100 bp, Homo sapiens
aagatggagttatcagaccgtacaggttgagggatgggactggaaatcaaatgttacagaatctttagaacacgatgttcttgatgataatacagagcag

SEQ ID NO: 835526 - DNA, 100 bp, Homo sapiens
tgcagcttcaccaactctgacatgcagccctgccaaggtaaccctgctggggtcagttatcttcacattccagcacacccagcatctggcaatatcaaag

SEQ ID NO: 835527 - DNA, 98 bp, Homo sapiens
gaaaaagcaccattgtgaagcagatgaagaccgcctctttttcgtcatggaatatgtaaatggtggagacctcatgtttcagattcagcgctcccgaa

SEQ ID NO: 835528 - DNA, 113 bp, Homo sapiens
ttgctgctgcgacagggactgctatcttctccatccgaggacagttttctccttctgccttccaggcagcgtaaggttcatggagcctgcggttattgtttgcctgggtggaa

SEQ ID NO: 835529 - DNA, 98 bp, Homo sapiens
aaagtctttccaaaaggtcaaggttcacaagatcatatctgaagatattagtgagctacaaaagaatcaaactacatctgtagccaaaattgcacaat

SEQ ID NO: 835530 - DNA, 100 bp, Homo sapiens
gagcccatcgtgcgggtcttgcaaagtattaagggacatcagcgagagaggcagggatcttgagcagattttatctcagtacattacgttcgtcaagcct

SEQ ID NO: 835531 - DNA, 98 bp, Homo sapiens
gactacctgctgtacaccctcaacaaacaccagcgctttggaccaaacggaccctgtgagcatggggctgccagtgaaaggaggatgcctgggaatga

SEQ ID NO: 835532 - DNA, 100 bp, Homo sapiens
accacctcaagctttcaaccacattgccaagttatgcagccttaaacgacttgttctctatcgaacaaaagtagagaaatgcactcggtgatggaaagag

SEQ ID NO: 835533 - DNA, 100 bp, Homo sapiens
ggaagtcgtgcacgaacaccaaggttgaagccatccttgtcaatatatttggtggtatcgtcaactgtgccatcattgccaatgggatcaccaaagcctg

SEQ ID NO: 835534 - DNA, 99 bp, Homo sapiens
aacaagtacttctccaacattcactggtgcaactgcccaaagaaattcggagggcagcactgtgaaatagatgagagctattgttcacataactcaaca

SEQ ID NO: 835535 - DNA, 100 bp, Homo sapiens
gaacctgtttctgctcagattgaggaaacaatggaagagggaattgacataggggatagcttaactattccagatgaattcacggaagacgaaaaaaaat

SEQ ID NO: 835536 - DNA, 98 bp, Homo sapiens
tgggttggaagtcagagctgcacaaagggaaagggtccaggtgcaggtacagcagtctccgcaacaggtctcggctcagctctccccacaactcaccg

SEQ ID NO: 835537 - DNA, 128 bp, Homo sapiens
cgaggaattgacaatggccatgtcctacgtgaaggatgacatcttccgaatctacattaaaggttttaaaatcaaagatgggaaaatcggagaaaattgcccttccccatggccagcttgttcatggt

SEQ ID NO: 835538 - DNA, 98 bp, Homo sapiens
aggtcaaactggcaatatttgggagagcaggcgtgggcaagtcaggccaagatagccaggttaaccaaacgctttgaagcagccaaagaagatcttaa

SEQ ID NO: 835539 - DNA, 100 bp, Homo sapiens
tcaatacgaggcgcaaggtggactggctgactgagaagatgcatgccagagacttcacagtttctgctctgcaattctgtggtgttcttggtcacacatt

SEQ ID NO: 835540 - DNA, 100 bp, Homo sapiens
atatgaatgtgaaattcaagcttctcgccagcattgtgaggcccggattgcatttctacaaggcgaaagaaaaggtcaagagaacctgaagaaggactta

SEQ ID NO: 835541 - DNA, 100 bp, Homo sapiens
gggaaaaagtaaataaagctgctgtttttgaagagggtcgccatgtagaagtttttgagctcctcaaacctccatctggaggccttgggtttagtgttgt

SEQ ID NO: 835542 - DNA, 100 bp, Homo sapiens
tttcaggagagcagtccactgaaggttctttccctttaagatatgtgcaggatcaagttgcggcaccttttcagcacacgttggtcgtcattgcctccga

SEQ ID NO: 835543 - DNA, 100 bp, Homo sapiens
agcaagcctatatcacatgtttatgttctatgctccctaatgaagatgctattaaggagtggaatgcagtagccctctgggcctgggatattgtggttga

SEQ ID NO: 835544 - DNA, 100 bp, Homo sapiens
gcttgacctacaaggaatctgagggtgccctcaatgagcacatgaccagcttagcttctgtcctaaaggtggcacaagaatggctcaactctccaaatag

SEQ ID NO: 835545 - DNA, 100 bp, Homo sapiens
tgatgctgatgaattccatcaaagtggctcatccccaaagcgcttaatagaccgattcgaagacagtctcttacacctcctcctcagaacactattacat

SEQ ID NO: 835546 - DNA, 60 bp, Homo sapiens
aagtgctcctgggactccaggataccagcctggcagtgttgcccaggaggaggcagtgga

SEQ ID NO: 835547 - DNA, 100 bp, Homo sapiens
actttctaccagaagcttgaagggtttggttaagccgtcaggttctgaacagctggtagatgggctggcttactgaaggacatgattcagactgtcccgg

SEQ ID NO: 835548 - DNA, 100 bp, Homo sapiens
gaagcgccacccggaggctctagcctgacaaatgcttgctgacctgggccagagctcttcccttacgcaaattcctaagcggctgtacaaggccctctcc

SEQ ID NO: 835549 - DNA, 99 bp, Homo sapiens
tgcaacaggaagacccaatggatagatacaagagccatccagaaatgggcttggtgacgacccctgtcagtcctgctcctacaaccccagtcacaccac

SEQ ID NO: 835550 - DNA, 100 bp, Homo sapiens
agggttggatttttcaaaagagtaaaccaggagccaccagaaatggaactattgaaatttttcaggccagaaaacattacagtttcctcaaggccatcag

SEQ ID NO: 835551 - DNA, 100 bp, Homo sapiens
ccgacaaaatggatttggatctactggacctgaatcccagaattattgctgcaattaagaaagccaaggccacctttgatgccatttctaagacctacag

SEQ ID NO: 835552 - DNA, 99 bp, Homo sapiens
aacactgggtcagaagctatatccagctgctggcagagttcctgtcaagggatcaagtcttccaacagaatgagcactcaagactttactgacgaaaac

SEQ ID NO: 835553 - DNA, 100 bp, Homo sapiens
ggccgcagcagcagcggcagtcacaggcacatcagcaaagaggaaactttgagggaaattttgagtcactggaccttgcggaatttgctaagaagcagcc

SEQ ID NO: 835554 - DNA, 100 bp, Homo sapiens
gaaggctgaggtggcagcggcaggagagtccggccgcgacaggacggtgctgaatgtggagtaaatgcagatgttgagaaacatcttgaattgggcaaga

SEQ ID NO: 835555 - DNA, 100 bp, Homo sapiens
gagacatgagacagtagtcaaatactcagtggtccactgtaggtgtgccaagtgtttctgttatcctacaaagcgaagaataaggaggaggccccgaaac

SEQ ID NO: 835556 - DNA, 100 bp, Homo sapiens
ctccaggggaacaatgaggcctacgcagagctcatcgtccttggccgggctgggatcagatgggaagtggaacctcgtcatgaccagaaactgtttccct

SEQ ID NO: 835557 - DNA, 98 bp, Homo sapiens
tgcttcccaataaggaaacagtctgtccagggttttggtggctggcgaagctgagggcgtgtcagcaggcctttcgatccctgggaccaaccgcatcc

SEQ ID NO: 835558 - DNA, 98 bp, Homo sapiens
gctggagaccgcgggacctggcgctgcagcgaggagttccgattctgaagaggcatttgagaccccggagtcaacgacccctgtcaaagctccgccag

SEQ ID NO: 835559 - DNA, 100 bp, Homo sapiens
tggagacagagctgagggagcaagaggtgtcggaggtctcatctttgaactactgccggagcttctgccagttgaaatggatgcagtcagaactgaatgt

SEQ ID NO: 835560 - DNA, 99 bp, Homo sapiens
gtattccccttcctgctagtcctggtggatctgcagtacgaagatattctctaagccgctttcatcatgggagaaatagagcagaggccgaccccagga

SEQ ID NO: 835561 - DNA, 98 bp, Homo sapiens
tcaaaggaattgtttgaaaccaaacatgttatccagtaatggagcctctaagaacaagttgaaatcatcgcagaaggataaagttcgtcagtttatga

SEQ ID NO: 835562 - DNA, 98 bp, Homo sapiens
ccgtctacaatctttgtctggagctggaagatgctggtgagcgacctgctggaattctgcttctacaccttccgagagtcccatgcgctgaaggtaga

SEQ ID NO: 835563 - DNA, 100 bp, Homo sapiens
atgccttggctgtttgcttgagctttttctatcccgtgctcttcgtgctcttcatgttctttggaaaagaagatagtggtgagctggcaaagccaaagat

SEQ ID NO: 835564 - DNA, 100 bp, Homo sapiens
ggcctttgctgcgggcgccggcgctggcggccgtgccgggagtgcctggatcaaagtggaacagctgaagccatatcatgctcataaagaggaaatgata

SEQ ID NO: 835565 - DNA, 100 bp, Homo sapiens
ctgcagaaaattttctagttttggggagacaattacaaacatgttttatcaatgcagctaagattgttgttataatgagaggattacctggcagtggaaa

SEQ ID NO: 835566 - DNA, 100 bp, Homo sapiens
atctgtatgaacaccagcacctcgtacatttccaaacaggcattatcctgcactgaaaactctggaacatctagagcatacctacctgcctcaagtaagc

SEQ ID NO: 835567 - DNA, 98 bp, Homo sapiens
attatagagctaattacaactttcggggcatgtacaatcagaggtatcatgatattagctggtttgacatcaagtcatttgtgagtcatcagatcttc

SEQ ID NO: 835568 - DNA, 100 bp, Homo sapiens
aaacaaagggaattaaaccgggcatgccaagcatcttcaaccataatgctgtagatccagatgtatctgccaggacggtctttatagatgttgaggaggt

SEQ ID NO: 835569 - DNA, 100 bp, Homo sapiens
gcccccgcctgcctccgccggctacagcgggaagagcgttccagggtctccctccactgctgtagtaacccgggtccggggcctcggtggtgctcctgat

SEQ ID NO: 835570 - DNA, 98 bp, Homo sapiens
cggagggggtctctcagtaatgctggggaccctgagatcgtcaagtctcccagcgaccccaagcaataccgttcttctggatctgcctcagtcctgac

SEQ ID NO: 835571 - DNA, 100 bp, Homo sapiens
aagtatgcagagtcactgagtgaagccatggagaagtcagcccatcaaagaaagagcctggcccctgaacctgtgcaggagcagacgcctccgcctagac

SEQ ID NO: 835572 - DNA, 99 bp, Homo sapiens
cctggagctgggccaggccgtggagcgctccattagcttccgcagtgagagccgccctgacatcctcgccccccgaccctggtccagaaatgccgcccc

SEQ ID NO: 835573 - DNA, 100 bp, Homo sapiens
caccctattggaacaagggaaagagccctggatggttgtgagggatgagaaaagaagatggactctagctgcctgcctctcaaacatcacatggtgacca

SEQ ID NO: 835574 - DNA, 98 bp, Homo sapiens
atcaactcctacgaggacaaaagcaacgacttcgtatggactggggttcagactttccgcagagaccatgatcgtttctgggtcctagctgctcaccc

SEQ ID NO: 835575 - DNA, 98 bp, Homo sapiens
cctatctatggagaaaatcattcaagtggccaagacctctgctgcacaggaaccatggacactgaatctaaaaaggaccctgaaggttgtgacaaaag

SEQ ID NO: 835576 - DNA, 98 bp, Homo sapiens
aatatttctggattcctgtatgggtgtcgttcagatgttctcagtgcagctgagtcttggtgagcagacatgggaatccgaaggcagcagtataaaga

SEQ ID NO: 835577 - DNA, 98 bp, Homo sapiens
aaattttttggaacagaagatcacatacttccacaggctgcactcgaggagatccacaaattctcaggaacctacacctgcatgaacactttcaaagg

SEQ ID NO: 835578 - DNA, 98 bp, Homo sapiens
ctgccatctgagacccggtagtaccgcccatgctgcagcgggaaagagaacagagagtcctggggacaggcctagccgcccgtgactctcacactgtc

SEQ ID NO: 835579 - DNA, 100 bp, Homo sapiens
cgacgatctactatgtgatgtcagggcctgcgtgctttggacatcagacagtgcaggagaagaatgtgatgcggcagaaggggctgaaaactaaatccat

SEQ ID NO: 835580 - DNA, 98 bp, Homo sapiens
ccctcggaggcggcgggcggaggcggcggatgaaggatttgggggcagagcacttggcaggtcatgaaggggtccaacttctcgggttgttgaacgtc

SEQ ID NO: 835581 - DNA, 98 bp, Homo sapiens
ggattgatctccttaggacctataacagtcttcactcctatgctgatttttctggtgccactgaagttattttggaagcagaattaagcagaggagat

SEQ ID NO: 835582 - DNA, 99 bp, Homo sapiens
tcagtttcccgagtacccaccagagggcgccactaaactggatcaaacagatgatggaggcagcaacacgacaaatcgaggagaggaaaaaacagctga

SEQ ID NO: 835583 - DNA, 100 bp, Homo sapiens
atgtggatgatgccaaagttttattaggccaaaaggtgtgttttgctgacttcaagcatccctgctacaaaatggcctacttccatgaactgtccagccg

SEQ ID NO: 835584 - DNA, 101 bp, Homo sapiens
tttaccacgacccagatcccagcggaaaggagcgcgcctctttttggcttggggagctgcagcgttcggactctgtctactagtgacgatgtcgaagacag

SEQ ID NO: 835585 - DNA, 100 bp, Homo sapiens
caattcagctttttgtgctgccagcaagaaatgatcagtagcaccagtgtttatgcaatgtttttggaacagtgccagtggttgcttctgcacagacaca

SEQ ID NO: 835586 - DNA, 100 bp, Homo sapiens
gtcacttgtggctgcagaccctgcgggagatgctggagaagctgactctgcttatgataatgtcaacaaagttcgagtagctatcaagaaaatcagcccc

SEQ ID NO: 835587 - DNA, 100 bp, Homo sapiens
ctcctgagtagctggaattacagaccaagatcactccatggatgaaatgacagctgtggtgaaaattgaaaaaggagttggtggcaataatgggggcaat

SEQ ID NO: 835588 - DNA, 100 bp, Homo sapiens
tggcccaggaatttataccagctgtagcaaaagtgggaagccaagcctttcctcccggcaactgcgatgtctgtggactgtcttgggcagcatgcagtgc

SEQ ID NO: 835589 - DNA, 100 bp, Homo sapiens
tggtgttggagccccaatctcaggaccgggaattccaggccggttcaccaaggaggcagggacccttgcctactatgagaaactggcgatggaatatgag

SEQ ID NO: 835590 - DNA, 98 bp, Homo sapiens
tgtatctgtttttctcagaagagaattccacaagaatgattgaagatagtgggaaaagaggaaataccatggcagaaagaagacagctgtttgcagag

SEQ ID NO: 835591 - DNA, 100 bp, Homo sapiens
tggagcgaggaaaggtgtgctgtgcctgaggccaggttcatgggcgggggtggtgagagctgcagcctcatcgcggaaggactcagcacagccttgcagc

SEQ ID NO: 835592 - DNA, 98 bp, Homo sapiens
aggacagaaaagacagtgttctgctttcatggagttcacagaagagtcgaggaggccccttcacagatgtagtcactacaaatcttaaattgcgaaat

SEQ ID NO: 835593 - DNA, 98 bp, Homo sapiens
caggactttgggtctgggtgagccttctcgtggcggcggggaccgtccagcccagcgattctcagtcagtatctggagtccatctttcaccatcttct

SEQ ID NO: 835594 - DNA, 99 bp, Homo sapiens
atggagccatgggtggtctgggctcagggtatggaaccggccttctttcagccaacagacattcactcatgcaaagagctcctgggaaggtgctgctgg

SEQ ID NO: 835595 - DNA, 100 bp, Homo sapiens
ggtgccatctggggactgcctttaccaacaagactaaaagattacttggaagaatataaattccagaacatccagtcatggataaaaatgagctggttca

SEQ ID NO: 835596 - DNA, 99 bp, Homo sapiens
ttcaggctccacagatagttctggtgatggggttacatttccatttaaaccaggttcatgcaaatattgaaaactcttggaatgaggaagaagtttgga

SEQ ID NO: 835597 - DNA, 100 bp, Homo sapiens
agtcaaacgcagaaggactgcctcactgagcaaccaagaggtccaaattccaagcctgtagtgtccttcattgctggtttaactgctcctcctgggagaa

SEQ ID NO: 835598 - DNA, 100 bp, Homo sapiens
gggaatcggtcgcctggaggaccagtatttcccatggagggttatgaagacagtatggagtttccagaccatagtagacatttgctacagtgtctgagcg

SEQ ID NO: 835599 - DNA, 98 bp, Homo sapiens
agagtgtgcagcggattaaagctaaagacatagttcctggtgatattgtagaaattgctgaaacatctgccaaagaaggtctgctgctttggtgtcag

SEQ ID NO: 835600 - DNA, 108 bp, Homo sapiens
aggccagatgcagatctgaagacctattttactgataagaaaacacatctttacacactaagagcagtttttgcaagaaaggatcaaagtgaacggaaaagctgggaa

SEQ ID NO: 835601 - DNA, 133 bp, Homo sapiens
agatgcactgttaaaaaaccaaagacgggcgcaaagattgcttgaagaaatccatgccatgaagacattttcttgggcatctgtgaccagtaagaatcttccacccagtggagctgttccagttactgggata

SEQ ID NO: 835602 - DNA, 100 bp, Homo sapiens
ccatctcaggagcagaagaacttggctgccattcaaatgtgactacccctgaatctacaaagaatcttgtggagtcatctatggtgaatggaggtttgac

SEQ ID NO: 835603 - DNA, 100 bp, Homo sapiens
ggatttctcagatgacaatgcccgtgctgtcataacaataggaattccttttccaaatgtgaaagatctacagggtgggtatatggctgccaaggtccag

SEQ ID NO: 835604 - DNA, 99 bp, Homo sapiens
tgaagctgtttatagtagactgaatccacatagagaaagtgatggggtattgaagcccctgggtgataatttgatggaggaaaacataaggcagtctgt

SEQ ID NO: 835605 - DNA, 100 bp, Homo sapiens
gcaaacaacttatcagtagtgacttacagtaagcatcccttcgtcagcagcatcaccagtaacaaggctctgcgggagctggtggctgaggccaaggccg

SEQ ID NO: 835606 - DNA, 122 bp, Homo sapiens
cttataaccagattactgacactgaaggcatctctcatcctcgtcttgaaaccctgaatctcaaaggtttcattgaaaacagatcctgcaaaagttccaggtgcccacactggaaacttgga

SEQ ID NO: 835607 - DNA, 100 bp, Homo sapiens
ttgagaggaagctcaacgactccattgccgaggagctgaacaagaagttggccaacaagatcctggctgcagctctgaccgaatgtcaccggaaatccag

SEQ ID NO: 835608 - DNA, 98 bp, Homo sapiens
cgccaccccctccgcccagcagcagtatggcttccagtacccccttgccatggcagcaaagtttattgttggccaaaaccaggctttgattgaaccag

SEQ ID NO: 835609 - DNA, 100 bp, Homo sapiens
tcgagcaaaagtgccaattgtgaagttcagggataaagtcagtcctggctggtgccttgttagaagaagcggagcaattgctagaccgaggcattcaccc

SEQ ID NO: 835610 - DNA, 137 bp, Homo sapiens
gaacctgtgcctcgagaggtattaggcagtgctacaagggatcaagatcagctccaggcctgggaaagtgaaggtgtcctggggaagtgtcgctacgtttactatgggaaaaactcagagggcaacaggtttatccg

SEQ ID NO: 835611 - DNA, 100 bp, Homo sapiens
tgctagaagtgccaaaggcgaagttgccaaagcagccaaggtgaagcagaaagaagttgattcaagtcagttgagacgccagttgtgtggaggaagtcag

SEQ ID NO: 835612 - DNA, 98 bp, Homo sapiens
caaacccagggtatcttccttgatcagcctttacagtaaaaatgacccatctatggctgcttaattgcctccggagccagcgtggtggccatagacaa

SEQ ID NO: 835613 - DNA, 99 bp, Homo sapiens
tttgacatgttaagatatgttgaaactctagtgttcttccagagagcaaagccctgaggactggatttccctgtgcctacttcatgatcatgaattcca

SEQ ID NO: 835614 - DNA, 99 bp, Homo sapiens
attctccttagcaactgcgggactgcggcggcgccggcctccggggagaaacggactctggactgtcttcacactaggtggtgtgggcagcaaagcggc

SEQ ID NO: 835615 - DNA, 98 bp, Homo sapiens
ttatatcctaaacttttcaagcctgaaggaaaggcagaactgcctgattacaggagctttaacagttgcatccttaatgtccagtcaaggagtggtga

SEQ ID NO: 835616 - DNA, 98 bp, Homo sapiens
agatggtcctccatgagaagcaagatttggaaggcttgatcggaaccctctgtgaccaggatcgcggaggccatgcatcaccaggactgcctgctgtt

SEQ ID NO: 835617 - DNA, 99 bp, Homo sapiens
gtgtctgctggaactgttggagccgcagtgcagcctaattttgacttcaggaggagacatcacagctttcccagatcgggaggaaaaatatggaatgtg

SEQ ID NO: 835618 - DNA, 100 bp, Homo sapiens
atttttctgaggaagtaaccaaacaagaagacctcatgagagagaataatccagaatggctactctgatctatgttgataaggaaaatggagaaccaggc

SEQ ID NO: 835619 - DNA, 100 bp, Homo sapiens
atctcatagacctaatgcatgataagaataatgaaatccgaaaggtctgtgataatacattagatattatagcggatgggaagcacaaaatgcaagagga

SEQ ID NO: 835620 - DNA, 99 bp, Homo sapiens
ctatcctgactggggaaaatcagcaagagctttctggaagaaaggaaatgttaggatcactttattctggctatcagctgtactctgaactgtagttgc

SEQ ID NO: 835621 - DNA, 98 bp, Homo sapiens
aacagaggcgctcatccacagagccacatctgttagagcctgtggggcccggatagtcagccgaccagaggaactgagagaagatgatgttggaacag

SEQ ID NO: 835622 - DNA, 98 bp, Homo sapiens
tttgatgtggatgatgccaaagttttattagataacgaaggaggcccaacttcattcaataaggagcctgacggatttatcccagacggtagaacaaa

SEQ ID NO: 835623 - DNA, 99 bp, Homo sapiens
cctgacgcaccgccgtgatgcccagggaagacagggcgacctggaagtccaactacttccttaagatcatcaaactgcttggaaactccctgctgaaac

SEQ ID NO: 835624 - DNA, 50 bp, Homo sapiens
ctcccctcgcccgcccgggccgccagatgacgtccggttgtttgccttcg

SEQ ID NO: 835625 - DNA, 100 bp, Homo sapiens
cagaccgtgctgatcttcgatgagctctcggattccttatgcagagtggccgacttggtctcctctgagcctccggcctccataagacccaaaacagatg

SEQ ID NO: 835626 - DNA, 98 bp, Homo sapiens
gaagtggcccagacagcagacgccaggctctggcaggctgccctgagcacgctcaaccccaaccccacggacagctgtcccctctacctgaactacgc

SEQ ID NO: 835627 - DNA, 98 bp, Homo sapiens
aagtcggcgacagcggccggggcgcaggcgcccgtgcggaatggcaggagcaagcattgtggaagcctgcaggcgagcgtgtgtgtgagatgaaggtg

SEQ ID NO: 835628 - DNA, 98 bp, Homo sapiens
agaacagtccgaaatggcggggactgttggtctcggccctgcggaagtagctgcttgtctcctactatacctgtctgacacaatatcaccagagcaag

SEQ ID NO: 835629 - DNA, 99 bp, Homo sapiens
gaaaattatgcatgcgttagggaagctctgagagaatggctgtggaagatcctgatgaatttgagcgaatatatgagcctctggatgtcaaaagtaaaa

SEQ ID NO: 835630 - DNA, 100 bp, Homo sapiens
gggagggagccagccgctgcagccaccaccgccaccatgtcctaccaaggcaagaagaacatcccgcggatcacggtttcgacacagccccaactgctgg

SEQ ID NO: 835631 - DNA, 100 bp, Homo sapiens
tcctatgcagtgggacccaggaggatgagagtccctgcaaggctggggtgaagaatggggcatgggtggctacgtaaagatggccaaagaccggagaaac

SEQ ID NO: 835632 - DNA, 98 bp, Homo sapiens
atcaagcaggttttaaatcaagatttaacattccaacacataaaaattatttatccaacagctcctcccaggctgagctgctgtacaagaagaaccca

SEQ ID NO: 835633 - DNA, 99 bp, Homo sapiens
caagaagagcctctggcccgggggctgctggaacatgtgcggggggacacaggaaaatcagttggagtggaaatgaacacccagaatgaactgatggag

SEQ ID NO: 835634 - DNA, 100 bp, Homo sapiens
agcgggagcttggtgtccggcgtcccgggggcgcagggaaggagggcgtccgagtcaacaaccgcttcgagctggtgactctcctattccatctgtttct

SEQ ID NO: 835635 - DNA, 98 bp, Homo sapiens
cgaagaagctgcagccgcacctggccaaggtgtactaatggtcacttgatgtgcgctggctgttttatccacctactagcagatgcccggctgaagga

SEQ ID NO: 835636 - DNA, 98 bp, Homo sapiens
tccgaaagggcagaatctatggggagccagcccctgggcaacaaagtggaaatggagattgtgagcatgttggaaaaaaacgcaacacttctcaaatt

SEQ ID NO: 835637 - DNA, 99 bp, Homo sapiens
aggaaacgttggatgactttagaaagtctttatctcttgcaaggttcagtagtggcagatcatgactacattggattgcctgaaattccgattggagca

SEQ ID NO: 835638 - DNA, 100 bp, Homo sapiens
ttaagtgaaatggtagaatatatcacccataatcggaatgtgatcacagagcctatttacccagaagtagtccatatgactggtcgaattgacaaatctt

SEQ ID NO: 835639 - DNA, 100 bp, Homo sapiens
ggagttcgaagagttggatactcagcgtcgctggcagccgctgtacttggctttgaacttggcctactccagcatttacggcagctaccggaacttcgtg

SEQ ID NO: 835640 - DNA, 100 bp, Homo sapiens
cccgctgacatgcttcggcctgacccccgggacaccctctatcgagttgaccaagctgcaccagttggcaatgcaacagtctcattttcccatgacgcat

SEQ ID NO: 835641 - DNA, 98 bp, Homo sapiens
gaacacatccatattggggagatgaagcaggagtacaagatcctcagcatgagagaattattactgtgtctactaatggaagtattcacagcccaagg

SEQ ID NO: 835642 - DNA, 100 bp, Homo sapiens
agaagctcctccgtcagttagatttgtaacaaaaattaatatgaacggaataaataattccagtgggatgatccgaccctgaccacgtgtgcggaccctg

SEQ ID NO: 835643 - DNA, 100 bp, Homo sapiens
taaagaatgctaggaaatctcctttggcacaagattctccttcccagaatggcctacctgatactcaagccaagttccatattatgtttttattctttgc

SEQ ID NO: 835644 - DNA, 98 bp, Homo sapiens
gaccccagcccctctccagctcgaaatcgatcggaaaatagaagatcttcgacagtgcctgaacaggtacaagaaaatgcaagacacggtggtactgg

SEQ ID NO: 835645 - DNA, 98 bp, Homo sapiens
cacttctgtggctgctaccccactcctgggccgtccctgaagcgggagatacagatgacccaccaagaattactcagaaccctgtgatcaatgggaat

SEQ ID NO: 835646 - DNA, 98 bp, Homo sapiens
atggagagtagcagccggggcccaggtcatcaccgagtggtcttctcacatcatccttcaggcagcaccaagagtcactggcagcagagagagagagg

SEQ ID NO: 835647 - DNA, 100 bp, Homo sapiens
ttcttgtgccgtgaacctcgttttgagattaagatgcaactccagtagtaccttctcgggcagcaactccaagatcagtaagaaataagtctcatgaagg

SEQ ID NO: 835648 - DNA, 99 bp, Homo sapiens
gacaagaacggctgcgtggtgaagcgctacggacccatggaggagcccctggggccagtgtcattcaaagatgtggctgtggatttcacccaggaggag

SEQ ID NO: 835649 - DNA, 100 bp, Homo sapiens
ggcgtcttgtagtgatgaccgtactgtgcgtatctggcgtcagtatctaccaggcaatgaacaagatttggcaaaagccttaatgaaggctgtgaaggag

SEQ ID NO: 835650 - DNA, 98 bp, Homo sapiens
actgttctagataaattctctgctgtgcctgatcccatcccgcagtggaacaacaatgcctgccttcacatctgactgcagccatgagcagcaatgag

SEQ ID NO: 835651 - DNA, 100 bp, Homo sapiens
actgcctgggctcaggagttctgaatgtcagcatctgcaagaatgttggcactacgagatgcacttttgaaaaagagaaaaagaatgaagtaacttcctg

SEQ ID NO: 835652 - DNA, 99 bp, Homo sapiens
aggaagcaattctggaagcgcagcaacagcaagctcccgggcaggattaatgcagtatcgaatggacaagtccgaggtgatagttacagtgaaggttgt

SEQ ID NO: 835653 - DNA, 100 bp, Homo sapiens
tcctgttccaccttcagagcgtcacggcgtacgccctcatggggaaaatctccccggtgactttcagataacccaacagcttgagggaatctgcttacag

SEQ ID NO: 835654 - DNA, 100 bp, Homo sapiens
cgagtatacatgcaaagcttccaatgagtatggcagtgtcagctgtacagccacactaactgtgacagggtaattttgggagtgtggagatgtgccggta

SEQ ID NO: 835655 - DNA, 99 bp, Homo sapiens
ggcgctgggcagcttcgtggaggagtacaacaacaaggtgaaaggtgtagcagtcactcggcctacacccacagcatcgaccttgtgaacccagcgacc

SEQ ID NO: 835656 - DNA, 100 bp, Homo sapiens
ggcctgggccctcccgcgactacagccactactacacgaccatccaggacctgcgggacaagtcgttccccatcaggaagtcctcgcagaagtgcaagtc

SEQ ID NO: 835657 - DNA, 98 bp, Homo sapiens
gctggtggcaaccgcctacgagacactcaagtggatgattcaacagccacacaaagcagcaacattttttggatgcattgggatagataaatttgggg

SEQ ID NO: 835658 - DNA, 98 bp, Homo sapiens
tcattgatgtgactgctgctgccgaaaatatcaggctgccaaatgcaggcactcagcaaacccgctggttcagaaccaacacctaagtcacgcattgc

SEQ ID NO: 835659 - DNA, 100 bp, Homo sapiens
gttcaagtttaccaaaagagaggcaccgctggaacactaatgaggcttgtgcagacataagagccagttcagtgttttggcagcaaatggagttcgttga

SEQ ID NO: 835660 - DNA, 100 bp, Homo sapiens
tgatgatgaagaggatgatgatgaagattgagccccatatgggggttggcaggcagcagagaggcccctttcaaggtgttcgggtaaagaactcagtgaa

SEQ ID NO: 835661 - DNA, 99 bp, Homo sapiens
tcttctagcaaatgcctgcaatggactagctctgctacagaacaccaagtttaacggatgaagagtcccggaaaaattgggaagaatttggaaatccag

SEQ ID NO: 835662 - DNA, 100 bp, Homo sapiens
tggctttcaggattatgaagtattaattcttccactgatatctcaaaaggtgatctggacaaaggaacaggtatctcagaagccatgcagtgacacccgc

SEQ ID NO: 835663 - DNA, 99 bp, Homo sapiens
agaaggttgggttcagaagaggggccaaatttgagtccctctttaggacgtatgacaaggacatcacctttcagtattttaagagcttcaaacgagtca

SEQ ID NO: 835664 - DNA, 100 bp, Homo sapiens
gctcatccaccaccgcaagcacgcgggacccatcgtctccgtgtggcaccgcgagctccgcaaagccatccagtccaatggatcagatgggcaagatgag

SEQ ID NO: 835665 - DNA, 98 bp, Homo sapiens
cttctccctgcccctgaagccagtcatctcccagcccatccatgacagcacacgtcatctactctgtgaaatttttcatttcatatgcaattcccgat

SEQ ID NO: 835666 - DNA, 100 bp, Homo sapiens
gatgatcgagaggatctggtgtaccaggcgaagctggccgagcaggctgagcgatacgacggattgtcagtggcttcgccccgaggagagctgactgccc

SEQ ID NO: 835667 - DNA, 100 bp, Homo sapiens
acaggaaaaaaatttgctggatattgatgcgccagtcactgcgttatacgcagagcaatgggcgcaggccgtttggcatctctgccctcatcgtgggttt

SEQ ID NO: 835668 - DNA, 98 bp, Homo sapiens
gcgcggaaccatggccgatgggggcgagggcgaagacgagatccagttcctgcgaactagattattttgcagaggatgatggggagatggtacccaga

SEQ ID NO: 835669 - DNA, 100 bp, Homo sapiens
ccaaattctcagcctgataaggtttggacccaattaaatcctttgaagctcctgcaaccatcaattctgcatctcttcatcctgagaaagaatttcttgt

SEQ ID NO: 835670 - DNA, 100 bp, Homo sapiens
gactccaaggacaactgcaagggggaagtagagagataacaaaagctgctcagagtctcaatgaacttggtacaacacagaccagttctctccctatgct

SEQ ID NO: 835671 - DNA, 98 bp, Homo sapiens
agggacacgctggtgcatctgtttgccggaggggaaacagtgcttcttagtcctacgtcagcagcagtttaatgtccaggctcttgtggcggtgggag

SEQ ID NO: 835672 - DNA, 98 bp, Homo sapiens
atgctgtttatgaaaggaactcctcaagaaccacgctgtgcccttaatgaaccaaccatagattacggctttcagaggttgcagaaagtgatcccaag

SEQ ID NO: 835673 - DNA, 100 bp, Homo sapiens
ggtgcccggccctgtgactgcagccatggccacaggcttagctgttaacgggaaagaaaagagtctcatcgtggaaggcaagagggaaaagaaaaaagta

SEQ ID NO: 835674 - DNA, 98 bp, Homo sapiens
ctcagaggcctgttctgaaagtttgtaaccatgagggtgcctcagaagaggagatcagacttagcaagatggtgatgaaattctgggccaactttgct

SEQ ID NO: 835675 - DNA, 100 bp, Homo sapiens
aaggaaacctctctgaaatctgacacctgctctcccggcaaggaaacttcgcaggctgatcgaggagactggcagagggaaagaaagttcaactatggtg

SEQ ID NO: 835676 - DNA, 100 bp, Homo sapiens
cctgattggaatcctgagatcctcccatcgagaagagcgtccagttgtaaatgccaatgtctcagtgccattgatgttcagagaggaagtggctgaattc

SEQ ID NO: 835677 - DNA, 99 bp, Homo sapiens
gaactcctgctgcaaaaatggaacaagttccagcacaagtgcactttcagaccatgctgaagtctaaattgaatgtcttaacactgaaaaaggaacctc

SEQ ID NO: 835678 - DNA, 98 bp, Homo sapiens
gaaaggtggcttaaaggaactgtttggaaagggccctcaaaatgccttcttcctcgtaaaattctggaaccttctgaggaaaggaggccatacagaaa

SEQ ID NO: 835679 - DNA, 98 bp, Homo sapiens
cattatccagggaccgaagtgactgtctaggagagcatttgtatgttatggtgaatgccaaatttgaaggtattgcacatctattacaaatttcctgg

SEQ ID NO: 835680 - DNA, 100 bp, Homo sapiens
atccaagggggccagttcctgccgtctgctcttctgcctcttgatctccgccaccgtcttcaggccaggcctatatgaacccaatagcaatggcgagatc

SEQ ID NO: 835681 - DNA, 100 bp, Homo sapiens
tggcgcctgcccttccttggcaacttcttccttgtggacttcgagcagtcgcacctggaggttcagctgcttctagaattcctctccagagctactctca

SEQ ID NO: 835682 - DNA, 100 bp, Homo sapiens
atccaggaacacatcgatctgggtatcaaatatgacccaagcattggtatctacggcctggacttctatgtggtaacacaagtggcaagacagccgggaa

SEQ ID NO: 835683 - DNA, 100 bp, Homo sapiens
catgagtagggaggagaaacagaagcttggttgacgagccaggataaaacccccgctgtgatccagagagccatgctgaagcacaatctggactcagacc

SEQ ID NO: 835684 - DNA, 105 bp, Homo sapiens
ctgtactgtactgaagcccacacttatggctgctgttccgttgagacatttgggaaatgatgaagtgcacattgtttggtcagagcatactagagactacaggag

SEQ ID NO: 835685 - DNA, 98 bp, Homo sapiens
cactacagtatcgtgggacagaagctgccttggagggggtacctttctgggtttatgcagtttattgactggctgtgaaagttttgaagaggctcttg

SEQ ID NO: 835686 - DNA, 100 bp, Homo sapiens
cattctattcatgttgctttttgatggccatggcataaggaactctatcccaggaatacagctttgcattagaccccagaggacagttgctccgagggca

SEQ ID NO: 835687 - DNA, 99 bp, Homo sapiens
tcgcatcgcgcactttttggatcggcatctagtctttccgcttcttgaatttctctctgtaaaggaggtgtttgatcagagtgcgctttcaactgaagc

SEQ ID NO: 835688 - DNA, 109 bp, Homo sapiens
acagttcatgacaatgactttgagccctaccttactggacagtcaaatcaggtcatcatcctgaaccacccggggcagattagcgccggctactccccggtcatcgact

SEQ ID NO: 835689 - DNA, 100 bp, Homo sapiens
tctttaagcaagaggagtctctgaagggttacacatcattttggaatgactgtatatcatctggattacgtggctgtatgttaattgaattagcattgag

SEQ ID NO: 835690 - DNA, 100 bp, Homo sapiens
gctacgaaacagaaatttcatgttgcaccctatatacaagaagagatgtccttccactaggaaaatttacagttaacttgagtggttgcccacggaatag

SEQ ID NO: 835691 - DNA, 98 bp, Homo sapiens
atttgatcagatcctagactcggtgctggtgggccctgtgccagcagggagacacatgtttgtctttcaggatggcactggatctttaaaacgcagtg

SEQ ID NO: 835692 - DNA, 100 bp, Homo sapiens
caggctcgcctcgactccaaatggttgaaaacagatatacaggcttttgacctttatgaacaaagatatgctgctgtgaagatacatcagcttaataaaa

SEQ ID NO: 835693 - DNA, 98 bp, Homo sapiens
tgcgactgctgatgtagtaattttgtatgattctgattggaatccccaagtagatcttcaggctatggcttctattgtggctgaggcctacgattttg

SEQ ID NO: 835694 - DNA, 100 bp, Homo sapiens
gcagcgcaaccacgagacggccttccaagcacttggttaatgaatggttaagtgagaagaatgagaagacaggaaaaccttcagatggcctttcagaaag

SEQ ID NO: 835695 - DNA, 98 bp, Homo sapiens
gtgtaccagcagggcgttggctatgtgcccatcacagaaggaacccagccagccggcggaatgcaagcagcagtaggaagcggaggcgggtgcctggc

SEQ ID NO: 835696 - DNA, 98 bp, Homo sapiens
aggattatacagaaatttgaattggtgtgaccccatatggttatgcatcccggtttgagatccactttgatgacaaatttgatgtgtcttttgggaga

SEQ ID NO: 835697 - DNA, 100 bp, Homo sapiens
caagatcttggcaaagcttctccctcagtatttagaccaggtaaaagtttcatttgatctgaatagtattaaaataaaatacctggatgaggaagatgaa

SEQ ID NO: 835698 - DNA, 99 bp, Homo sapiens
aaggccttgactacggaggggttgccagatacgtcggtaacctttccagagatgtgacagaagctctaattctgcaactctttagccagattggacctt

SEQ ID NO: 835699 - DNA, 100 bp, Homo sapiens
tgatgatagtgaagagcatgatgatggaggatacagaatcacagatgatggcgctgattgtttgcctgggttctctctggtggtcgaatcctagcattga

SEQ ID NO: 835700 - DNA, 98 bp, Homo sapiens
gaccctccggccgggcccccagaggcgggagcgcggttggtgacaaagttcctgctgatataaggttaacttccatcaaatctaccacactaagagtt

SEQ ID NO: 835701 - DNA, 99 bp, Homo sapiens
gagaaactcctcctcataccttctgcaaagttgacaaaaacttaaattgtggaatggatgctgaaaacgccattcaacagatgggtggccagtggcttg

SEQ ID NO: 835702 - DNA, 99 bp, Homo sapiens
acgtcggttgagcggcggcgaacatgcgcttttgacacattggaggtatggtttaggaatgatttattacaagcaagaaaaattcagccttgcagaaat

SEQ ID NO: 835703 - DNA, 140 bp, Homo sapiens
tgaatatcgaggccaaggacaggatcccagtttcctacaagcgaacaggattctttggaaagttttgcactgattgcaaaaataaagtcctccgagcatacaatatccttattggtgaacttgactgcagcaaagaaaag

SEQ ID NO: 835704 - DNA, 99 bp, Homo sapiens
atatgcaggaaattttgtggaaagcacaatcattgtggagaagacagttcaagacctcctgaacctgatgcatgacttgagtgcatattcagatcaatt

SEQ ID NO: 835705 - DNA, 98 bp, Homo sapiens
taagagcgaaccagcctgggagtgggaggatgcgcaggggttttctgcacttctacactcagtgaattctccagtgctctggagtacttgaaattact

SEQ ID NO: 835706 - DNA, 100 bp, Homo sapiens
cgagaatggcttgtgaaatcatgcctctgcaaagagtcaagtaaagaacagtttgccagtacaaacattgctgaagagctagtaaaactcttcaagaaac

SEQ ID NO: 835707 - DNA, 98 bp, Homo sapiens
aaaaactatggacctcagataactgtaaagaggatatcaaccagaatggctttgactacttactaacatacagtgacaatccccaaacggtgtttcct

SEQ ID NO: 835708 - DNA, 99 bp, Homo sapiens
gacgcccagcccgcggagcgcggaggccaggagctgcgcaaggaggcggagacattcacggcatggtgtaactcccacctccggaaggcggggacacag

SEQ ID NO: 835709 - DNA, 50 bp, Homo sapiens
tgtcatctgattgagaaactagcattagtgccagcagtagttcccaaggg

SEQ ID NO: 835710 - DNA, 123 bp, Homo sapiens
ctggaaaagcttggcataaacgctccatcaaaggcggtctccaaggatccggtcctcttcctgatggatgggaacaagccatgactcaggatggagaaatttactatataaaccataagaaca

SEQ ID NO: 835711 - DNA, 100 bp, Homo sapiens
cagaattggacgaaagtttcaaggagtttgggaaaaaccgcgaagtcatggggctctgtcgggaagggctccacgtgttccccacgtttgtggcgtacga

SEQ ID NO: 835712 - DNA, 100 bp, Homo sapiens
ttcagctttaaagagaattgaaggttgcagagaacacatcttagaagatgaaaaacctgaatctatcagtgacactactgacttggctctaccacctgaa

SEQ ID NO: 835713 - DNA, 98 bp, Homo sapiens
tggtacggacagggggaagtgcccagcctgagactccctactctggacctggcctgctcattgactcggatgaccattctgccccccttggagaaact

SEQ ID NO: 835714 - DNA, 100 bp, Homo sapiens
ccgccacctacccagtgaccatgatagataacgaaggaggcccaacttcattcaataaggagcctgacggatttatcccagacggtagaacaaaaggaag

SEQ ID NO: 835715 - DNA, 98 bp, Homo sapiens
accggctgctgaagatgaagatggctgggctgaacgccatccagacattcccctcttcccgcggcctcgccatggcgacccacggacagacttgcgcg

SEQ ID NO: 835716 - DNA, 98 bp, Homo sapiens
ttacaagcggacacgggaatatatccgaagcctgaagatggttccaagtattccctatctaggtgctgttccagaattcaaagaagagaaactgcagc

SEQ ID NO: 835717 - DNA, 98 bp, Homo sapiens
cggggaacgactgcggcgcgctgctggacgaagagctctcctccttcttcctcaactatctcgctgacacgcaggctttcatagattctattcacaaa

SEQ ID NO: 835718 - DNA, 50 bp, Homo sapiens
gtgctgggcaccggcctgacggattggccatttgatgatggagctccacc

SEQ ID NO: 835719 - DNA, 101 bp, Homo sapiens
cccggcaccacccatcttgagtatctgaatgacagcccatatcaaggcggtgtattctttttgacaattcattttcctacagactaccccttcaaaccacc

SEQ ID NO: 835720 - DNA, 98 bp, Homo sapiens
tcagttccacaccagtgcctcagaggtccatggcagtatcccagccaaatctcgaaccccaaggagtggaccaagaaggtcatcaggaacatcgcctg

SEQ ID NO: 835721 - DNA, 100 bp, Homo sapiens
tcagatgctgaagcgagtccctgagctcccgaagcatcaagtgtacctgatttgtgaacctatcttgcttcagttggtttcctcctaaatattaggcaga

SEQ ID NO: 835722 - DNA, 100 bp, Homo sapiens
ccatcgatgaggagctggtctatgaaaagtttgggccccatggtatccctgtgacagtatttcccaaaagggaatataaggataaaccagaagccatgcc

SEQ ID NO: 835723 - DNA, 98 bp, Homo sapiens
gccagtgcaatacatgatgtagatcatcctggtgtgtccaatcaatttctgatcaatacaactgtcccagttaaatcagagttggcagttgaaatttt

SEQ ID NO: 835724 - DNA, 100 bp, Homo sapiens
aaaaggatgtcatgttcctggcctgaaagaagacatagctcatccagcaagccgcctttggccgttcctcccacttcagtattttccttcttcccttctc

SEQ ID NO: 835725 - DNA, 100 bp, Homo sapiens
tggtgccctcaacatctctcagagacgaaaggagaccaaggctgaaataattgctagagagaataagaaaaggttatttgccagggaagaacaaaaggaa

SEQ ID NO: 835726 - DNA, 98 bp, Homo sapiens
atgaaccaatgacaacatttgttgtctgtaatgaatgtggaaatcgatggaagctgtgagcattgcattccttattggtcttgctgtcatcattgtga

SEQ ID NO: 835727 - DNA, 99 bp, Homo sapiens
agaaagtggagtccgagctgagatccatctgcaccacggtgctggtggacaagatcgaggaacttgatcaagaaaacgaagcagcgttggaaaatggaa

SEQ ID NO: 835728 - DNA, 98 bp, Homo sapiens
ttgcgttttgcagacaacactttctcaggaaggttgtgcaggaccagcgttccctgtgcaggcgccactgcgtttcctgcagattccgaccggcactg

SEQ ID NO: 835729 - DNA, 100 bp, Homo sapiens
agcacctcgggatcccattccttcacagggaccctagccagattgactggggcgactttggggtagaggcagtgtctgaggggactgactctggcatctc

SEQ ID NO: 835730 - DNA, 100 bp, Homo sapiens
aatcatccagatcttctgataaaagtacttgggattttaaagaaaaatgccttacccctcgtgaattcaactcttacggagctcgaagaggtaatgatgc

SEQ ID NO: 835731 - DNA, 99 bp, Homo sapiens
gctctttgtagcgtggtgcttctgttgctcacaggtcatcatcagatttgaaatatttaaagtggatacaaaactatttcagcaatgcagacaattaag

SEQ ID NO: 835732 - DNA, 98 bp, Homo sapiens
gaagtgacttgcttttttgaccatgttactcatagagtccgactataccacatacagggtggggaggagcacgtgtttgagaattcgccggtcctgga

SEQ ID NO: 835733 - DNA, 100 bp, Homo sapiens
agaccaccccagctacgaacagattcagactcagattgatggacaacttttcttaattaagcaccttttgatacttcgtgaacaaattgctccatttcac

SEQ ID NO: 835734 - DNA, 100 bp, Homo sapiens
caagacagcaggctctgtgcggggtggagatgaagtttatctgctttgtgacaaggtgcagaaagccgccaggcccccagcactgagctcagtaccagtg

SEQ ID NO: 835735 - DNA, 98 bp, Homo sapiens
gccaggacaaattgggaagagtatatgcagtaatatgtgacctaaaaggacaaggatcctcaccggtggccatgcagaaagctcagcaggtatctcag

SEQ ID NO: 835736 - DNA, 100 bp, Homo sapiens
gtacgtggcatgcctagaagaacttcgtgaagctctggagatctcccccttcttcaagacccacgagctacttccatatttgcactaaaggagattcagc

SEQ ID NO: 835737 - DNA, 98 bp, Homo sapiens
ccgcaccatcaccagcactctcacattcactcccacctccacctccaccagcaggaccccctccaccaagaaggtgcctaccagtaacacagagggag

SEQ ID NO: 835738 - DNA, 98 bp, Homo sapiens
gaagctgtgttgtcctggagtgactgccggcattgccgccaccaccacctcctgaattctgccctgctttcagcaaagtgattaaccttctcaactgt

SEQ ID NO: 835739 - DNA, 100 bp, Homo sapiens
ggaatgtaaatttgcacatccttcgaaaagctgccaagttgaaaatggacgagtaatcgcctgctttgattcattgaaacttcttccagaccagctggtc

SEQ ID NO: 835740 - DNA, 98 bp, Homo sapiens
gagggcgaagacgagatccagttcctgcgaactggactttctccctcgagggtcgggcattgtaacaagacgacctcttgtgctgcagcttgttactt

SEQ ID NO: 835741 - DNA, 108 bp, Homo sapiens
ccccgggcctccccgctgctgaccgcctgtcctactcaggccgccctggaagccgacagcgccgtgccgtccctgcagtgacaccgaggtgctcctagccgtctgcac

SEQ ID NO: 835742 - DNA, 98 bp, Homo sapiens
ggccacactttccaagccaagcgtttcaacagggtctatgttaacaatgaatgggcaaccagtgttggggaaggagggagctttggagaacttgcttt

SEQ ID NO: 835743 - DNA, 99 bp, Homo sapiens
taataactcggtgtcaaagccaagacataaactcaaccccttctcttccaaaaggcatgaagaatcgagaggaaagatcccagcattttttcgacacat

SEQ ID NO: 835744 - DNA, 98 bp, Homo sapiens
agcatggtagaatcaattaaacactgcattgtgttgctgcagattgccaaaatcctgtctcagaaagaagagtgggagagcaggactcagcaccaacc

SEQ ID NO: 835745 - DNA, 100 bp, Homo sapiens
ctcacctcttgggatgaagatgcctgggccagcaagcttaagtgagagctttttcatggtgaaaggcgcagccctcttcttacaacagggaagcagccct

SEQ ID NO: 835746 - DNA, 100 bp, Homo sapiens
caccctcgtgtctgccaccatcttcgacttgagcgaagttttatgcaaggtttcggtggaacggcatgtctcgattggagaaggtgtatctgaagaacag

SEQ ID NO: 835747 - DNA, 98 bp, Homo sapiens
gaatgactgtgtgctggatgtcattttgtcccgctggctggaagcctggcagtgacacgattaagcccaacgtggatgacagcaaggaatatttctcc

SEQ ID NO: 835748 - DNA, 99 bp, Homo sapiens
gatggttctctgcctacctccctgaaacacatcatcagcaatgcagaatactatggcccatcactcttcctcctaggatgcccaggctgaggaagagat

SEQ ID NO: 835749 - DNA, 98 bp, Homo sapiens
ttcatcacaagatcttggaaacattatataccttggggaaagctgatgatgtaatccctgttcattactacttaatacctccaccaacaaagactaag

SEQ ID NO: 835750 - DNA, 100 bp, Homo sapiens
atgggggtgttcacaaagcccatcggaggagctgctgagctggtgtcacagactggctatgctatccccagctttttgcagctgggatgttatctggcgt

SEQ ID NO: 835751 - DNA, 100 bp, Homo sapiens
tgtgtataagagagaaaatgaagacaaggttaataaagctgccaagtcccaagatgcctcgaacactaagtttacatgaaataactgaccttttagagac

SEQ ID NO: 835752 - DNA, 100 bp, Homo sapiens
ccggaggcagcgggggaccggcagatcatatactcctatgaaaggaggaatctccaatgtatggtttgacagatttaaaataaccaatgactgcccagaa

SEQ ID NO: 835753 - DNA, 98 bp, Homo sapiens
cggcgtggaaagttacagctcttgaggtctcgtcaaagtgggagatcgctgtggaaaccaggtttggtgcacctcgatttggaggaagtagggcaggg

SEQ ID NO: 835754 - DNA, 100 bp, Homo sapiens
ctatcttctcttcaccagctcttcagatcaatatggttcctatatgatagtggactcttcagatcacgaccctggagaaaaagccagacttcagctgcct

SEQ ID NO: 835755 - DNA, 98 bp, Homo sapiens
gcggcgcccggatgggcagctgagcgatggttggctgtcccaggctgtcacctttctagaccggcttctgatctggctcgggatccacaaggactaga

SEQ ID NO: 835756 - DNA, 100 bp, Homo sapiens
gcggcggcggcgccgggcccgggggtggtgacagcaggtctgaggttgctggtaaaattcctcctagtgtccaagtggaggcagcttgtcttctgtccca

SEQ ID NO: 835757 - DNA, 100 bp, Homo sapiens
agtttaaagatatggactccagttatgcaaaaagagacagacaccaaaccagtgcagatgatgaacatggaggccacgttctgtatgggaaacattgaca

SEQ ID NO: 835758 - DNA, 100 bp, Homo sapiens
ctaagacgccaggacccactggaagcctagaaatgtgttttccaagcagtgaagcacttgccgtgttgaactgaatgcactactggagaatgttctgggt

SEQ ID NO: 835759 - DNA, 100 bp, Homo sapiens
gaaattcaaaccctagtgaataaagccaagagagaccttggagtaattcgtcgacagactaagcctggagtaattcgcccagtacctgtaaaatccagaa

SEQ ID NO: 835760 - DNA, 99 bp, Homo sapiens
gaataatggcccggttggcccgggacgagtggaatggagcgcctgccaacggtaccgctgtccggcatgtacaataaatctggaggaaaagtgagactc

SEQ ID NO: 835761 - DNA, 99 bp, Homo sapiens
agcagtacagacagctcaggctgcccagatggtggctcccggagtccagctcctgcccctcctaaagctgaagccaaagcgaaggctttaaaggccaag

SEQ ID NO: 835762 - DNA, 98 bp, Homo sapiens
ttatcctggtcatcttctatttccaaagtatgttgcacccaggagctgactaaggctttggaacagaaaccagatgatgcacagtattattgtcaaag

SEQ ID NO: 835763 - DNA, 126 bp, Homo sapiens
aggacttcgagctgattcagcgcatcggcagcggcacctacggcgacgtctacaaggcaatttgaatcaacccatagaagtgacagcgctgtattcatttgaaggacagcagcctggggatttgaa

SEQ ID NO: 835764 - DNA, 98 bp, Homo sapiens
gccccttctccccaaatcatcaacaatagaagaagaagaaaacatgtcaggacacaaatgacacctagctgttgggcagaagagggtgcagaaaagag

SEQ ID NO: 835765 - DNA, 99 bp, Homo sapiens
cagccgtgggcagcggtggagcatgagtctggctgtctcttgcatggcaccaagaatgttaccaattcaagcagtttaagattgccaagacaaaatagt

SEQ ID NO: 835766 - DNA, 98 bp, Homo sapiens
aagccgcctcccgccgccccggcccggcgcgcaggatggaaatttctccttttctctggagtcagtgaagaagctcaaagacctccaggagccccagg

SEQ ID NO: 835767 - DNA, 98 bp, Homo sapiens
ggaaagtacaggattgagagcaactatggcgtacacacactggagatcaacagagtcaagggtccagagaaggaggagaagttgagacaggcggtcaa

SEQ ID NO: 835768 - DNA, 98 bp, Homo sapiens
aattcagctacagaagctgcaaaaccagctaaacctgatgagaaaggagagatgcaggaagatgagaatgtgcctactgctcctgatcctccaagtca

SEQ ID NO: 835769 - DNA, 100 bp, Homo sapiens
cacagccttttctactagactcttgcctgtcagaggagctgttgaatgtttatttgaaatgggctttgaagagaaccgaacaatattttgggagtccaag

SEQ ID NO: 835770 - DNA, 100 bp, Homo sapiens
gcaaaggtgatgaagaagtaatttcaacactccactatttttccaaagtggtggatgagaataactgaagtgaagtgatggactccgatttggagagtag

SEQ ID NO: 835771 - DNA, 99 bp, Homo sapiens
aggagcccggccccggagccaccggtttttcgttggaatatacgttgcacatttatggcgattctgagtgtgagggcagacttctgccaggctcagcac

SEQ ID NO: 835772 - DNA, 100 bp, Homo sapiens
tgaagttgaagtacaaccagcatatcaatagattaccagaagcccagttggctaaaagagatgctaagagaatgcctgcaaaagaagtcaccattaatgt

SEQ ID NO: 835773 - DNA, 98 bp, Homo sapiens
gaaaacctaaccatgaagacttgaacttaatacagcaagaaagaccatcaagtttaccagttctagtaaataccgcttgctgtgttttgatgttggtg

SEQ ID NO: 835774 - DNA, 99 bp, Homo sapiens
tgaagcatccctttaatagaaactcaagtccagttatcttttgactgccacatatggaccccaaaagatctcaaaaggaaagtgtcctcattacaggag

SEQ ID NO: 835775 - DNA, 100 bp, Homo sapiens
cagaaaatcgtcttatagttgagaatttatcctcaagagtcagctggcaggtagttggcaaaaaaggagaaagccactaaggtacaaaagacactggaca

SEQ ID NO: 835776 - DNA, 98 bp, Homo sapiens
ctgaccgactccaccatcacccaatctgttgattctccattgggaaaggcatttacaggatgtgaagttaccccagatgtaaacatttcaggccaaaa

SEQ ID NO: 835777 - DNA, 100 bp, Homo sapiens
ttaaaatagctggctgtaattttccaggtctccaattgagaaacatggcactgtttttcctgcactctacccacctattgctggacttctgttgtacaag

SEQ ID NO: 835778 - DNA, 100 bp, Homo sapiens
ggagtttctcgccctcgtcgcgcctgccgcgcggagagataaggcctccccatggccacccatggaccagtcggcattcacttcctcccttctgcggccc

SEQ ID NO: 835779 - DNA, 140 bp, Homo sapiens
ttcgttccccgccaaccgcaaccattgacgccatgtcgggttattcgagtgaccgagaccgcggccgggaccgaggcatcctgaggttagcattacacttctcccagtggagcccatgacttctgatcaggacgctaagg

SEQ ID NO: 835780 - DNA, 100 bp, Homo sapiens
aagattcttcaatagtagataatgagcttgtatctgaacatgcctttgaaattccagacaatgttagacctggacaccttattaaagaactttctaaagt

SEQ ID NO: 835781 - DNA, 99 bp, Homo sapiens
tgggcggcggagcgctcacaatgtggcaggagacagaaaaggttactcactataaacaatatccacccaacacaagcaaagtttattcctactttgaat

SEQ ID NO: 835782 - DNA, 100 bp, Homo sapiens
tggcattgacatttaattttagggtcctttatatagaagggagagtagggcaagcgacttggtaatgaaggtggatgctcttctgtcagcgcaaccaaaa

SEQ ID NO: 835783 - DNA, 100 bp, Homo sapiens
ctcactcttcctggacgagtcccgctccacgcagtacatgaaggagtaccaggacgccttcctcttcaacgaactcatgacaaagcataaatcatggaca

SEQ ID NO: 835784 - DNA, 51 bp, Homo sapiens
ctctccaggcttgcaagcgattaccaggctggtggatgaccgctgtgtggt

SEQ ID NO: 835785 - DNA, 99 bp, Homo sapiens
taaattaacaatggcgaaatgcaggcgaaatgtggaaaatttcctagaagcttgcagaaaaattggtgtacctcagtttcaggaagagtctttggtgga

SEQ ID NO: 835786 - DNA, 100 bp, Homo sapiens
tcagaaaacagctctggaaaatgacagccttcatttctctgaacatactgccttatgggacagatcaagaaatttggtgagcggcctccacctaaacgac

SEQ ID NO: 835787 - DNA, 100 bp, Homo sapiens
cccagcagaatttgtatagagatgtgatgttggagaactacagaaacctggtctccctagataaaagcttcgatgatgaagaatcagtggatggaaatag

SEQ ID NO: 835788 - DNA, 99 bp, Homo sapiens
caaagactggcaaaagcacaaggattctcgctgtgacagagacaacaccgagtatgagaagagcccgagcggcagtacatgcacattggcaccatggtg

SEQ ID NO: 835789 - DNA, 100 bp, Homo sapiens
agcagcagcttcagtagcgcagaggcggcggtggcgagaggtgcggcgaaggaggcagaggcacttatgcttgtcagggcggactactggaagtcacagc

SEQ ID NO: 835790 - DNA, 100 bp, Homo sapiens
atggtattgatattttgaccacagctgactattttgccgtcggtaacagatccaactgtttcctggttataagccgcggcgagtcctttgcacatgttgg

SEQ ID NO: 835791 - DNA, 104 bp, Homo sapiens
tttaattttagggtcctttatatagaagggagattacatggacacagaacagtatgaagaagcagtacgagactatgaaaaagtataccagacagagaaaacaa

SEQ ID NO: 835792 - DNA, 100 bp, Homo sapiens
cgagagcgagtgcctgagcaacatccgcgagttcctgcgcggctgcggggcttccctgcggctggaggagtctccccaggacagtgctatcacccgggat

SEQ ID NO: 835793 - DNA, 98 bp, Homo sapiens
tcctcgagaggcaggcaggggatcccggactttgtgaagaaatatgggaacctttttagcttggagcttggtgacatatctgcagttcttattactgg

SEQ ID NO: 835794 - DNA, 100 bp, Homo sapiens
cttcatggaatgtcttcaaagaatattaaaaaatctggagggactccaacttcaatggttgaaatcacaaagattagacacctttttagataggtgttct

SEQ ID NO: 835795 - DNA, 50 bp, Homo sapiens
gcggcccgcgcgcagccggccgtgatcagggccaaagcggtcagtgagaa

SEQ ID NO: 835796 - DNA, 100 bp, Homo sapiens
catccttacacgtttctccttggaagactgcttttggcttctggatgccctcctccagtacacatcgtatggggtgacaccgcctagcctcagtcactct

SEQ ID NO: 835797 - DNA, 98 bp, Homo sapiens
catacgcttccagctacgactggtcaaaggggctatacaaagcggaccagcggtttgggccaggtgtcgagacctaccccgatggcagccaggacgtg

SEQ ID NO: 835798 - DNA, 100 bp, Homo sapiens
ggatcgtgcagaagatcttccaggttaaaaagatcaagtggcatgagcagccttttggggaaaattggtgccaagaagcagaaaatgagcacccttgaga

SEQ ID NO: 835799 - DNA, 99 bp, Homo sapiens
tttgtgattccctaccgctgcttaggtacaaagtagatttcatagaagagaaggcatctcagaaccctgagagaatagtcaagctacacaggtaagtaa

SEQ ID NO: 835800 - DNA, 100 bp, Homo sapiens
ttgctggatatccaagcctctcagcttcggagaatggagtcttccatcaatcatatctcacagaaatgaagctgttgtcatttctggaaggaaactggcc

SEQ ID NO: 835801 - DNA, 98 bp, Homo sapiens
gcgacagtggcggcggcgccatggcagggcttgcagaacaactctgctcatggtgattacatgcaaaataacgagagcagcttaatagagcaagctcc

SEQ ID NO: 835802 - DNA, 100 bp, Homo sapiens
atatactcctacctcccggcatttaaagtgacaagtaaatttttgtgaaacattgcagatgttagatggatttgggagaattttccaaactaagtggacg

SEQ ID NO: 835803 - DNA, 99 bp, Homo sapiens
agaggtggaggcgctttgaaagtcaaaccggcacgatgtccaggcaccagaaccagaacaccatccaggagctgctgcagaactgctccgactgcttga

SEQ ID NO: 835804 - DNA, 98 bp, Homo sapiens
ctgaaacaaggtgatctggggaaccaaagactctgggactcttggtgccaacagagttactctgatcaggggggtttgggtattgctatcagcgaaga

SEQ ID NO: 835805 - DNA, 99 bp, Homo sapiens
ccgagtggcggtccgacagagtcctccgtgtcctcccccgcatgacccccttggcagataaaacgtcactgtgcagagccttttacagaatattggact

SEQ ID NO: 835806 - DNA, 101 bp, Homo sapiens
cggtgaaaaggggcccagaggtcttcctggcttaaagggacacaatggattgcaaggtctgcctggtatcgctggtccccaaggcttccaaggtccccctg

SEQ ID NO: 835807 - DNA, 120 bp, Homo sapiens
agcaaatgcattgagcttgggtcaggacaattccatttggggaccagagatggacggtcactcagcctatggaggtcctgaatgttcccagaactacacaacacctagtggagtgataaa

SEQ ID NO: 835808 - DNA, 100 bp, Homo sapiens
aatatgaaagggattctaactaccacttgctcagctgtaccagtgcaggtcctcactttaatcctctatccagaaaacacggtgggccaaaggatgaaga

SEQ ID NO: 835809 - DNA, 100 bp, Homo sapiens
tctcgtcctaatctcaatcttactgtactggaaacgtcaccggaatcaggaccgaggtgaccaagaatatggcccaggtgaccaaagccctggacaaggc

SEQ ID NO: 835810 - DNA, 100 bp, Homo sapiens
tgaattttctaaaactcattgattcacacgccatcccttgaggtgctgatagtctgcagcacaggtttagctgggattatgctgctcaactaccagcagg

SEQ ID NO: 835811 - DNA, 99 bp, Homo sapiens
ctggtttctgcagacctggaagaggtagctcagaaatgtggcttgtcttacaaggtctttgactttaaattgagtgatgaggagatggcaaccatactc

SEQ ID NO: 835812 - DNA, 98 bp, Homo sapiens
gaagagaaaatggaggaagcagaaaccagaaactttaaatcttgagaaaagaagattgtctatcatgaaggaggttattgttgtgggtaatccagcca

SEQ ID NO: 835813 - DNA, 100 bp, Homo sapiens
tgggaaaatcatggaagttgattactcagtctctaaaaagctaagcatggccgaaacagaagccctgtcgaagcttcgggaagacttcaggatgcagaat

SEQ ID NO: 835814 - DNA, 100 bp, Homo sapiens
tttggtgatgaatgtagccaccacgcctacctgcatgaccagttctggagctactggaatagaattatagcgttcagccggcctgtgaaatatgaagatg

SEQ ID NO: 835815 - DNA, 98 bp, Homo sapiens
cgttgtttgcgtgcaatgttcaccagtcagtgtttgaaggagaagagagcaagatcactggggtgatcctgctggctgttggagtctggggcaaactt

SEQ ID NO: 835816 - DNA, 99 bp, Homo sapiens
tctgatccagcagatgaagagggaggcctgagaggctgctgttctaactcgctcccaggtctggtgtcggcgcgcctgttatcggtgagatcgatgggg

SEQ ID NO: 835817 - DNA, 100 bp, Homo sapiens
cttcgatgcaaatcaaccagagggaagaaaatgcaaactgaaacctgggaaacagtgcaggttcttgattattacagacctctttctgaaaagcccggaa

SEQ ID NO: 835818 - DNA, 144 bp, Homo sapiens
acgttcttcgtttctccgctagttgtgcgcttggccgcgagacactctggcagttataggaacacaaagggaccacgggatcattcgaactctggatttacccatctatgtcacacgggtgaagggcaacaatgtatactgcct

SEQ ID NO: 835819 - DNA, 98 bp, Homo sapiens
ccagagagacccaacgttgacctggcaatattttggcagtgcaactggattcttcaggatctatccagcagcagcagctccaggcgcagcacctctcc

SEQ ID NO: 835820 - DNA, 100 bp, Homo sapiens
atgtcgggacaccccggaagctgggaaatgattgccgtatccctcaaatcgaagatgctgagattcataacaagacatatagacatggagagaagctaat

SEQ ID NO: 835821 - DNA, 100 bp, Homo sapiens
ctagtccctcttacttgaagcatgtctttcagagcccggcaccacccatcttgagtatctgatctgcagactatcaccagggattcgcaagcagctttga

SEQ ID NO: 835822 - DNA, 51 bp, Homo sapiens
cttggggcaaaatgtggacaagggcgtccctgagggcctccatcctcgctc

SEQ ID NO: 835823 - DNA, 100 bp, Homo sapiens
gggaaccgggcacctgcacccgcctctgggaggttaccttttcgacaaaatgattcatctagtcattgccagaagagtgggtctcctatttcctcagaag

SEQ ID NO: 835824 - DNA, 51 bp, Homo sapiens
tcgggacaccccggaagctgggaaatgaacccagtgacttgattgtaaaaa

SEQ ID NO: 835825 - DNA, 101 bp, Homo sapiens
acgaggcctgggcctccttgccagctgttggctctgactgtaccaccatccactacaactacatgtgtaacagttcctgcatgggcggcatgaaccggagg

SEQ ID NO: 835826 - DNA, 100 bp, Homo sapiens
cttacgtagtttattcgatcaacatgattggcccgccagccccgggtgttacacataatattgcattacttcgagaggtgataatcaactcacgctttgt

SEQ ID NO: 835827 - DNA, 100 bp, Homo sapiens
ctcgacaaagatggggttgtcctctttaagaagggccatgctatgatagtggaagcttatccaaaataatagatccagaagaagtgacctgaagtttctg

SEQ ID NO: 835828 - DNA, 101 bp, Homo sapiens
caacaagaagatagaccgtctgcaaggcaccaccatcagaattaaagctatagagagtcccaacaaagaagatgatacccagtggctgacctactgggtag

SEQ ID NO: 835829 - DNA, 99 bp, Homo sapiens
gctaataatgctggcaaagtggaaaaatgtgcgtgctcagagcatgaaaattttctgctgtctttggaactttgtctacaaacagttagaagatgcagc

SEQ ID NO: 835830 - DNA, 100 bp, Homo sapiens
gtagccaagccaacagagcctgatgagcatgcctcaagtactacagccttccagcagccttcccagacccacagatcacacccagggaaaactaataaag

SEQ ID NO: 835831 - DNA, 98 bp, Homo sapiens
tattaacgacagagaagtctctgacagcgaggtatcagagtaacactgcttctgctgttcttgaaacaattaccaacattcaacccaaagagagtgga

SEQ ID NO: 835832 - DNA, 98 bp, Homo sapiens
gattttgcgaataatcgagaatttatcacaatggttgtatacaagactgatgggaaaaaagtttattacccagctctcgtgctcattcccccatgatc

SEQ ID NO: 835833 - DNA, 99 bp, Homo sapiens
ctaatggtggagccaaaatgctattgccctgtcttcatcaacatttaatcagccttcatggtgaaacacctcttggagtatacccaggcaacagagtct

SEQ ID NO: 835834 - DNA, 100 bp, Homo sapiens
agcctctccctgggccagaactcagcgtcccggcctgcggggaagttctgctgggttctatgatgggactgtttagttgcaggagaacaagctcaggaca

SEQ ID NO: 835835 - DNA, 99 bp, Homo sapiens
aaaaataaaaagaaattgctgcagattttactttatgtgagaaaatctacaatttcttcgagacactcatataaagactggctggacagattcgaaggt

SEQ ID NO: 835836 - DNA, 100 bp, Homo sapiens
ttagcttacgaagcacaaaggaggggcccgagaccccacccagattgggggcaccaacttcgtggcacctccaacagcagcagtaccagccaatcttgga

SEQ ID NO: 835837 - DNA, 98 bp, Homo sapiens
aaatggggtgaggaagattttgaagacaatcgtcacttatacaggttgtctgcagagtgagattatggcgaagcattttattctttttacaaacctgc

SEQ ID NO: 835838 - DNA, 98 bp, Homo sapiens
gcagggcaagctgtgcgacgtgaccctcaagcacctggctgcagtggaagaaagaaagatcaagtccctggtagctctcttggttgagacacaaatga

SEQ ID NO: 835839 - DNA, 60 bp, Homo sapiens
gatcgactgtttgagcccggaagcgcagaagctggttttgacacaagggcgcatatcttc

SEQ ID NO: 835840 - DNA, 131 bp, Homo sapiens
gaacgccttcgccagcattctgagcatgttgggctggacaacgacttgagggaggtaaaataccatgaagattttgaaaaaacaaaggggagaggctttactcccgtcgtggacgatcctgtgacagagag

SEQ ID NO: 835841 - DNA, 100 bp, Homo sapiens
atcacttacaaagatgtggctatgaatattcactttctgttttctttccagaaagtggtttggcaaaagaaaagcgattgaacaggagaagcaagcaggc

SEQ ID NO: 835842 - DNA, 100 bp, Homo sapiens
caagtggagacacgtttagcttaaaaacagctcattctcctaatgttttccttcagcaaggacaaaggaatcatcatgttggttggctggttactgggaa

SEQ ID NO: 835843 - DNA, 99 bp, Homo sapiens
ttattcacaagaaagggtaaactgtttttgatcttgagccagatgattgtgcatccatttacatctttaatgtagatccacctccatctactttaacca

SEQ ID NO: 835844 - DNA, 100 bp, Homo sapiens
ggggggctccaggcagcccgtatcggggcctttatttctcgtcggcggcgccctgcaccgcgcctcgcaaaattgaccgactcatcagtcacggggccga

SEQ ID NO: 835845 - DNA, 100 bp, Homo sapiens
aagtggaaccggatatttaagtacaatggtgggcttaattttagaagaagctcattcacacagaagacccatttaatgatgaacatcaggagaggcaaga

SEQ ID NO: 835846 - DNA, 100 bp, Homo sapiens
gaaccccggaagagtatccagaaagtgcaaaggttatgatggagggtggtcgcagcaaagggtttggttttgtatgtttctcctccccagaagaagccac

SEQ ID NO: 835847 - DNA, 98 bp, Homo sapiens
agtgaaaattgagccaaagcacattggagttggaatgtatcagttaaaactagtcctcgaaaacctcgtgggagacctagaagtggctctgaccgaaa

SEQ ID NO: 835848 - DNA, 100 bp, Homo sapiens
ccatggacagcgtgcggtctgggccttttgggcagcttttccggcctgacaacttcatctttgtgagaaggcaaccaaagtgcaggacatcaaaaacaac

SEQ ID NO: 835849 - DNA, 100 bp, Homo sapiens
ctttagtgtatcatgtagttggagtagatgtcggatttgaaaatccaatgtttgcttgtctggaaatggattatgagagagatcgatgtcttattgtgat

SEQ ID NO: 835850 - DNA, 100 bp, Homo sapiens
gaatgtctccatcaatacagttacctatgagtgggctcctcctgtccagaatcaagcattgcacccagaggcctccattcaggctgttttttcagatgcc

SEQ ID NO: 835851 - DNA, 100 bp, Homo sapiens
cgagaatgtgtccgtggcgctcgagttcctggaccgtgagagcatcaagctcgtgtccatcggttgcgtaggaggctctgtctggtatcttgaaagaaga

SEQ ID NO: 835852 - DNA, 100 bp, Homo sapiens
catggtccagaattttgtaaacatatgcatcgcatcaacagcctgactggagccaatataacggactttgaagaaggctgttacctgctttgtaaaagtg

SEQ ID NO: 835853 - DNA, 100 bp, Homo sapiens
ttattaaaccagagtagattaattatcagtatatgtgaaatcatgtccactgatcaagtgatgtcttggcattgcccattttcaagcaggaagattccag

SEQ ID NO: 835854 - DNA, 99 bp, Homo sapiens
ccagacaagcatcctgaaaaccccaaagctgggtttggacagaggagccaaaggccaaatttccactttcagcagttttatttcagctgttagcccgaa

SEQ ID NO: 835855 - DNA, 100 bp, Homo sapiens
tactaccccgcagttcccggacatgatcctctccgcctctcgaggtatgatctcgtgaaaccttgagagaaactgaatgacgaatgaaactattgttcct

SEQ ID NO: 835856 - DNA, 100 bp, Homo sapiens
aacaggaacttacggaaaaagatgctacaattgcttctatccagaagcttggaagctgtattacagatccaggtaatcgagagacctcaggaaataccat

SEQ ID NO: 835857 - DNA, 100 bp, Homo sapiens
gatttacagaagttaagtcgcagaatggagaattcatgacccacaaacttaaacatactgagaatactttcagctttgcagttcctgaccccttaatgcc

SEQ ID NO: 835858 - DNA, 99 bp, Homo sapiens
attaccatggcgaggagtctctgtccgggggcctggctaaggaaaccctattacctccagtaatctatgccagcaattatgacaatgttagcagaccat

SEQ ID NO: 835859 - DNA, 100 bp, Homo sapiens
cgaaggccaaaggttaatgcaggaaagagagaacatgacctttgacctgccatcagatgccacagtggtgctcaaccgcagctcctgtggaaaagagaac

SEQ ID NO: 835860 - DNA, 123 bp, Homo sapiens
cgagggggacctgctgaaggaccagagagggagccctgcctacatcagtcccgacgtgctcagcggccgcattgacaggaagattgagttccccctgcctgatgaaaagacgaagaagcgcat

SEQ ID NO: 835861 - DNA, 100 bp, Homo sapiens
gaagtgcttgatatcacagaggaaactctgcattctcgcttcctggagccatccttcccctgcggagtatgtcgaggtgctccaggagctacagcggctg

SEQ ID NO: 835862 - DNA, 100 bp, Homo sapiens
cagcaacagcaagaagaagagcccagctagcaccttcgccctctccagccagagcctcattttacagatgaggaaactgaggctggctgcgtgctcagag

SEQ ID NO: 835863 - DNA, 99 bp, Homo sapiens
tgccactgcccggggatggggatgtttggtcagctggctgtgtactggcagagctcctcttgggccagcccatcttccctggggacagtggggtggacc

SEQ ID NO: 835864 - DNA, 98 bp, Homo sapiens
gaagtgccaggtggagcggcaggaaggccactcacagggcttcaacaagctagctgaggttttgcgtgtgaagctgtgtggaaatgtgaaatactacc

SEQ ID NO: 835865 - DNA, 100 bp, Homo sapiens
ggcggggggatggagcccgcgaccgcgccccggcccgacatggcgccggagctgaccccggaggaggagcagatttggcagcaatattttgcagcaaaag

SEQ ID NO: 835866 - DNA, 100 bp, Homo sapiens
ctcagaagcatgtgtcttccccagctctgcagccacatactatccgtttgttcaggaaccaccagtgacagagcaatttgaatcaacccatagaagtgac

SEQ ID NO: 835867 - DNA, 100 bp, Homo sapiens
gaggaaggagaagagaaacttgtcactttatcctccaagccacaagcactggccacaccaaacaaggaggagcacgggaaaagaaagaagaaaggcaagg

SEQ ID NO: 835868 - DNA, 98 bp, Homo sapiens
gacagtggcggcggcgccatggcagggcttgcaggccaagcagatagaacttcagttcactattggcgaagccattaccagtgctgcaataggaacta

SEQ ID NO: 835869 - DNA, 98 bp, Homo sapiens
tgacagtaacagtacttgggatcccccagttccaaagtgtcttaaagctttgggccagattatgttgtatgtggatggaatgaatggagtaataaacc

SEQ ID NO: 835870 - DNA, 99 bp, Homo sapiens
aaatctgagattcttgatgaaacagatttatacattgctgatagtccaactccaccgccaccacctccaccagatgacattcccatgtttgatgactct

SEQ ID NO: 835871 - DNA, 100 bp, Homo sapiens
ggagaattctggtcactcagtgacacacacaactcgggcctccccagcgacattccatgccattgcagtgtcaactaggcctcagttacttttcagtttg

SEQ ID NO: 835872 - DNA, 100 bp, Homo sapiens
gactgcccctgacccaggcgcgcccgctgctcggtggcaggagggccggcggagcgccatggcctgcatcctgaagctccctgtgctgtcaggaatctac

SEQ ID NO: 835873 - DNA, 99 bp, Homo sapiens
ccaaggagcagatggataggtcctcagcccaggtggtggccgaaatgttattttaacgaggcaaatgaagaggattcttccagttctctagtgaaggat

SEQ ID NO: 835874 - DNA, 99 bp, Homo sapiens
aactacttcttggagcaaggcattataccaaagctattgatgatgaggagtctgatgaggaagctgtgaagaaaaccaacaaatgtgtactagtctggg

SEQ ID NO: 835875 - DNA, 99 bp, Homo sapiens
tcctcctcctcctctccttcccaggatactgcagagaccccctgccctctgacgccaactgggtacatggaaaactcagtctcctacagcgcaattgaa

SEQ ID NO: 835876 - DNA, 100 bp, Homo sapiens
cggagcacggggtggtgtgtgggggaagccgcccccggcagcaggtgatttgatgaaggctgctgcaggagagttcgcagatgatccctgctcttctgtg

SEQ ID NO: 835877 - DNA, 100 bp, Homo sapiens
aaccagttggtggtgacaagaacggcggtacccgggtggttaaacttcgcaaaatggagttcatgatcaagtgttgcccacaccaaatgcttcatccaga

SEQ ID NO: 835878 - DNA, 100 bp, Homo sapiens
cgctgtcgccgctgctaccgcgtctgctggacgcgggagacgccagcgagctggtgattggagccctgcggaggtactaaccaggcctgaccctacttag

SEQ ID NO: 835879 - DNA, 98 bp, Homo sapiens
aacgactaccaccgcagcgacgagcaggagatctattgggaaactgattataaccactcgggcaccatcgatgcccacgagatgaggacagccctcag

SEQ ID NO: 835880 - DNA, 98 bp, Homo sapiens
ctaagctcccaacaattagtcagttggtgatggagttttgtggtgctggctctgtcaccgacctgatcaagaacacaaaaggtaacacgttgaaagag

SEQ ID NO: 835881 - DNA, 99 bp, Homo sapiens
atcaagcaggaggacttatagcttttgctcagtacattgccgaagattactttatggccaaagcgatagctgaccgcatccaggatattgcagtcctct

SEQ ID NO: 835882 - DNA, 98 bp, Homo sapiens
gcctactaaaggaacctctgaagactgtcaaccctgtgcctgtccactcaatatcccatccaataacatgacgacagagatgatggtgtggattattg

SEQ ID NO: 835883 - DNA, 100 bp, Homo sapiens
tatgcatatactatggaaagcacagacagaaaccaaactttttccaaggagttggtggctaaaggagttaagagttctgatgtttctccacctttgggac

SEQ ID NO: 835884 - DNA, 100 bp, Homo sapiens
tccagtataagtatttggctcttaatatgcattatgtaggagaaagtggatgaggaggggctgaagaagctgatgggcagcctggatgagaacagtgacc

SEQ ID NO: 835885 - DNA, 99 bp, Homo sapiens
aaataccagtccccagtgagggtgtacaaatacccctttgaattaattatggctgaattgactttaaaattaggaccatagagctcgatggcaagagaa

SEQ ID NO: 835886 - DNA, 100 bp, Homo sapiens
gagaagattagcaaaggtgctaatccagtggaaatcaggagaggtacttcctcctccagctggttatgttcctattcgaactccagctcgaaagctgaca

SEQ ID NO: 835887 - DNA, 113 bp, Homo sapiens
tagaatcagaacagttgacaggtgtgcctttagatgactctgcaatcacaccaatgtgtgaagtgacaggcggtaagaatgattgatgttggctgatattggagtgctcattc

SEQ ID NO: 835888 - DNA, 100 bp, Homo sapiens
ctctgcacagcatccctgtgacagccctgggcgctgcctatggcacagccaagagcggtaccggcattgcggccatgtctgtcatgcggccggagcagat

SEQ ID NO: 835889 - DNA, 100 bp, Homo sapiens
gttggcccctgagccagagctccagcagccttgttagggcgtggcctgaggcttggataagtgggtggcccaccctcaggaccctcaccacccatcagag

SEQ ID NO: 835890 - DNA, 100 bp, Homo sapiens
ccattattagggtttggcgctatagctattgctgtattgtgctcaggatttgcaggcatgccagatttcctggagaagctgcacatggccactctgaaag

SEQ ID NO: 835891 - DNA, 100 bp, Homo sapiens
aatccttttggcttagagatcactaatccatcttcagcttcaattacaagtaccccttgttacgtggattcagaaggaattgttcgaatgcttaacagag

SEQ ID NO: 835892 - DNA, 99 bp, Homo sapiens
tgaagtcagtaggaattccagtattgtgtctaaattctgtggatgatgttttctcacccagtcatgttgcaggaagaggcagaggaagaggaagaggaa

SEQ ID NO: 835893 - DNA, 99 bp, Homo sapiens
tgttgaaagatctaaaggagctgtcagatggagaaataaaagtggccattagtactgtgagcatgaaccttgagcggggatctgatgagcttctttctt

SEQ ID NO: 835894 - DNA, 100 bp, Homo sapiens
ttggttaaagtcattgaggactttccagcaaaggtactattttgaagcgctggaagaagaactggtttgatctgtggtcggatggtcacctgatctatta

SEQ ID NO: 835895 - DNA, 99 bp, Homo sapiens
cgtgagccaccgtgcctggctgaagttccctgtattgaacactgatatacaaggaatgaatagaagtcaagaaaaacagacctggtgggaaaaagcctt

SEQ ID NO: 835896 - DNA, 104 bp, Homo sapiens
aacttcggctggaaggaggcggaagccgacaagctgtccatttggtacgacgttggagggatcataggaactctaactccttgccactcaagaaatgtcctccc

SEQ ID NO: 835897 - DNA, 100 bp, Homo sapiens
tggctcttgctatctcaaactgttgtcactcactccccctttggttttaccagatgctgacccgctggtcacaggggcccccggtgcacccatggacttg

SEQ ID NO: 835898 - DNA, 100 bp, Homo sapiens
tacatgacgtgcttaatgaaaggtacttccaatgaggtagcccagtttctctccaaggaaaatcaagtcattgtccgcatgcgggggctccctttcacgg

SEQ ID NO: 835899 - DNA, 100 bp, Homo sapiens
atttagtcaggactgaacacaagctgcctggatagttcctatgcggaaaacgccatgcggtacataaatgggacgcgtctggatgaccgaatcattcgca

SEQ ID NO: 835900 - DNA, 75 bp, Homo sapiens
ccaagggtgcacagcccctggctacgatgttccaggtcatccagccagagcgtgcgctgtacatccaggccaaca

SEQ ID NO: 835901 - DNA, 98 bp, Homo sapiens
gcgaagaagctgcagccgcacctggccaagggaatcggatataacatcatccgggtacccatggccagctgtgacttctccatccgcacctacaccta

SEQ ID NO: 835902 - DNA, 98 bp, Homo sapiens
tgagttttttcaaaactactttgaaattcagtacccacttaagaaattgggctatgcctttctgctgttccaagaggaaagctcagtacaagctttga

SEQ ID NO: 835903 - DNA, 100 bp, Homo sapiens
gggaaaactacattaacagaacgagtcctttactacactggcagaattgcaaagatgcatgagggtattcaagtaacggccactactccatcaatgagag

SEQ ID NO: 835904 - DNA, 100 bp, Homo sapiens
atgaaatttgctgaacaagagaaaaaaaggaaaatgctttggcagggcaagaaagaagggcgccagcagagacttcagaaggaacgcctcatgaatgact

SEQ ID NO: 835905 - DNA, 100 bp, Homo sapiens
gcagaggaaaattcaggcaacgcctcgcgttgaaccccagctcaaagggattgtgacaaggttattcagccagcagggatacttcctgcagatgcaccca

SEQ ID NO: 835906 - DNA, 101 bp, Homo sapiens
aagtttctgcggaggtacttcattctggacacccaggctaactgcctcctctggtatatggacaacccccagggtcctcactgagcagcgagtcgtccccc

SEQ ID NO: 835907 - DNA, 98 bp, Homo sapiens
ggtcggcggtgggaaggcgatggcggatttagataaactcaacatcgacagcattatccaacggctgctggaagactcatcatattcagagcccccag

SEQ ID NO: 835908 - DNA, 99 bp, Homo sapiens
tcaacgccaggattcagaaagcccagggcatgcctgaaggagtggggggactgcaccgttttcccccaacatcatccctgaggcaacgtcctgagccgc

SEQ ID NO: 835909 - DNA, 100 bp, Homo sapiens
gtgccaggacaacacctgcagtgtactggaaaggtttccaccgtgcacattatgaagaaaagaaatggaggtgggagtttaaataactattcctcctcca

SEQ ID NO: 835910 - DNA, 100 bp, Homo sapiens
agggacgtcggtttgctatcgggactcggcgaggacgttgcgctacaagtcagacctgatcggcatgaagggcataggatggctggcgctgagatcccca

SEQ ID NO: 835911 - DNA, 100 bp, Homo sapiens
gggtggagaaagacggagtaaatagctctgtggggactgtcactactgccacagagaacattacgtggtagaggtcaagcttccagccagaatgtttgag

SEQ ID NO: 835912 - DNA, 50 bp, Homo sapiens
gaccttattcaccatgacttatcagctttaccaacagggacgcttatgtc

SEQ ID NO: 835913 - DNA, 100 bp, Homo sapiens
ctatgaagttgctatgcaacttttacagacatagggcctgattacattccaacagaggaagaaaggagagtcttcgcagaatgcaatgatgaaagcttct

SEQ ID NO: 835914 - DNA, 99 bp, Homo sapiens
gatggtgccacaggaggctgtgcgggccccgctccgcttcgaatgggacctggcgtattgtagtaccaatgacaaaagatgatgcactaaaggagatta

SEQ ID NO: 835915 - DNA, 100 bp, Homo sapiens
tacagaagcagtacgagaactggcagccaaggaatgccgggacattctgcttcctgtcatcaccaaagagctgaaggagctgctggagcagaaggatgac

SEQ ID NO: 835916 - DNA, 98 bp, Homo sapiens
tctcagacaagttccatcccacctttgagtcagacttaattcagtgcacaaatgagatgaatgtgaacatcccacagttggcagacagtttatttgaa

SEQ ID NO: 835917 - DNA, 100 bp, Homo sapiens
gcacagctgcaacggaagcaaaaggaacctacagagacctgagagttcgtgacaataaaaaattaagagtaaatgctgttattgctcccaagagttcata

SEQ ID NO: 835918 - DNA, 100 bp, Homo sapiens
aagagaaagcagtttttggacaacagttccttcacctcagcatttttcatggatttcaaataagtggttgaattgaccaaagcaatggtgatggagaagc

SEQ ID NO: 835919 - DNA, 100 bp, Homo sapiens
gaggaaagaagacatctgaacccaacaccaccctaaaccacaggtactccaaagattcaggtttactcacgtcatccagcagagaatggaaagtcaaatt

SEQ ID NO: 835920 - DNA, 100 bp, Homo sapiens
gcttcgtggctccacgacttactctctacccttggcaggtagctacagcaagctgggtagcaggcagatccaaaggatatcatgaagtttccagggcctt

SEQ ID NO: 835921 - DNA, 100 bp, Homo sapiens
cgcctgaaggagttgttgtctcggcagcgcccgcggagacgtgaagaggtatgaccccaaaacaaaccagtggagcagtgatgtggcccctacaagcacc

SEQ ID NO: 835922 - DNA, 100 bp, Homo sapiens
gatggccggctcagtcagtgctatgtttggggtcaccaccagctattggaccttactatgaaaaccatggataccaaccggaaaacccctatcccgcaca

SEQ ID NO: 835923 - DNA, 99 bp, Homo sapiens
gacagttcgctacacagcaatgcatcgaggcatgcatatcattctgtttcaactccccctgtttaccctcctaaaaatgttgccgacctgaaactacat

SEQ ID NO: 835924 - DNA, 98 bp, Homo sapiens
aaatgtctcatcaaaaatgtgcaaatatgaagtaaatggggcaaaatcttaataagaagtgaatgtaggtgcgcgcaggcgctgctggagcacggggc

SEQ ID NO: 835925 - DNA, 100 bp, Homo sapiens
ttctggagtggaagaccacgtgaaaaactttagctattgcagatcccaaccccctgctagactaataagtggagaggaacatttttcaagcaagaagtgc

SEQ ID NO: 835926 - DNA, 98 bp, Homo sapiens
aggtgcgcagcagaaagcatttaaccagcatggctacttcatattttggaaagcagtttttaagacaagctaaagaattacctccaaagccattgtca

SEQ ID NO: 835927 - DNA, 98 bp, Homo sapiens
cggccgggagggcggccgcagcaggctgaagccgacgtagcttctctgaacagacgcatccagctggttgaggaagagttggatcgtgcccaggagcg

SEQ ID NO: 835928 - DNA, 100 bp, Homo sapiens
tgtttgatgccaatcatcctcgaagaaagtctttatctcttgcaaggttcagtagtggcagatcatgactacattggattgcctgaaattccgattggag

SEQ ID NO: 835929 - DNA, 51 bp, Homo sapiens
tcccaatttccagatgccttgttcaacagatttagcatgtagactgctggg

SEQ ID NO: 835930 - DNA, 99 bp, Homo sapiens
ttgtcagtacccgagtttccggaaggaacgtggctgaagagcggtctgggtcttgtgcaccaggaaggcagccagctgacgtggacatacattgccccc

SEQ ID NO: 835931 - DNA, 98 bp, Homo sapiens
ggctcagcccacaactcttgtcctaccacctcagtgttcctccaagaaaagctggttatattgaagacctggttttgatgctgcctcagaacatttgg

SEQ ID NO: 835932 - DNA, 98 bp, Homo sapiens
cggcgttagtattggccgtgtacccgaaaaactgattgactgggctggcgttaactgtgcggaggcaggactccagaccccatcctcccaactccacc

SEQ ID NO: 835933 - DNA, 100 bp, Homo sapiens
actttgagttgaagacagctgagctcccacccttaaaaaatggaggtgaccattgtgaggtagatattttgttctaattttccagatgaggaagctgaga

SEQ ID NO: 835934 - DNA, 98 bp, Homo sapiens
ggccgaaagcggagagatgctgggcgtggcggccgggatgacccacagggcaaagtgcacctggagctgcggctgagcgaggtcatcacagacactgg

SEQ ID NO: 835935 - DNA, 98 bp, Homo sapiens
ggtgacagcaagaccctcatggtggtacaggcagcaaagctggccaagatgaagattccccccagtgagatgttcttgtcagaaaccgacaaatactc

SEQ ID NO: 835936 - DNA, 100 bp, Homo sapiens
tgcaacgtagtgttgccaatccagcatttttgaagttggctatacagtgcgctttgatgatgtcacctcagaagacaccaggatcaagtttctgacagat

SEQ ID NO: 835937 - DNA, 100 bp, Homo sapiens
cccgcccagaggccaattcgtcgcggcggcggtggagatcgcaggtcgctcagccaagaaggatcaagaaggtggagaagaaaagaaatctgtgcaaaag

SEQ ID NO: 835938 - DNA, 100 bp, Homo sapiens
ccaccacctcgcagccggggaggcaactggagcgaaaccagcgacagcacctgttcttcccggagcctatcagcaaagccattcccaaggctatggctac

SEQ ID NO: 835939 - DNA, 100 bp, Homo sapiens
aatggctggggaaggtgctcaattcccatacatgcactagaggttacaggaggttccagtggcatcgggaagtgcattgctatcgagtgctataaacaag

SEQ ID NO: 835940 - DNA, 100 bp, Homo sapiens
ctggtcatcaatgttactcaggtagagtgttccaagagctgccagggtggctttcgggtccgggaagtgcggtgtctgtctgatgacatgactctaagta

SEQ ID NO: 835941 - DNA, 98 bp, Homo sapiens
gcggcgcgaagcgctggtggcgggcccgggctgcggcgtgtgcgcgcccgccagctgctccggagatacgactccagcgggaggaagaagaggccttt

SEQ ID NO: 835942 - DNA, 100 bp, Homo sapiens
gtagccactagccacataggctgttgattgcttgaaatgtgactagtctgaattgagaaatactggcagctgcaatgactctccgcacggtattattgtc

SEQ ID NO: 835943 - DNA, 100 bp, Homo sapiens
cagccacctacaggcctccaggaatggctaaaaatgtttcaggacactgcccatctctaagataagaacctggaaaggggactctgttggccattggaaa

SEQ ID NO: 835944 - DNA, 100 bp, Homo sapiens
tctttcaagagaatcagaggcatcgtaactcctaccaagttaagatcccagaagacccacttgtggctgaagagtactacgctgatgcatttgattccta

SEQ ID NO: 835945 - DNA, 100 bp, Homo sapiens
accccggcccgaccccgacccggcccggtcaggccccatactcagagtgcctggtgaagaatgtgatgggatcactagcatgtctgcggagagcggccct

SEQ ID NO: 835946 - DNA, 133 bp, Homo sapiens
caaaatcctgtccacagtgaaggccaccatgctgggccggaccaacatcagtgatgaggagtctgagcagagaaaatattctctttggaatgggaaatcctctgcttgacatctctgctgtagtggacaaaga

SEQ ID NO: 835947 - DNA, 100 bp, Homo sapiens
ctgaaaaaccgaactcctgttacagactggtattctgaataagcatcttcaggatctcatggagggcttgacagccaaggtattccgtacatacaatgcc

SEQ ID NO: 835948 - DNA, 100 bp, Homo sapiens
aaaaacaaatcagagagccagtagacttacagaaaaagaagaagcggaaacaacgttctcccgcaaaaatgaatattgaagctcttcgggagaatcttta

SEQ ID NO: 835949 - DNA, 98 bp, Homo sapiens
ctccagcccctcgcctcgttcccttcccagcatcccagggccgaggaggttgtggctcactggattgctgaaagccgcattgccattgagaagatccg

SEQ ID NO: 835950 - DNA, 100 bp, Homo sapiens
catatcttcacttggcaaactcaacaaggaagccagttgagggaagttctccatgaatgtacgtcacaatgatgatgaccgaccaaatccctctggaact

SEQ ID NO: 835951 - DNA, 98 bp, Homo sapiens
gaccgggctgggcgcgcccggccgcgacgcccgggacccagattgcgggttcagattctggaacttttcaaagcctgactctcttcttgaaacagtgg

SEQ ID NO: 835952 - DNA, 98 bp, Homo sapiens
gggacggccgcctagagtggttcagccacaaggagatgtccagctcgccgctgtccaagaaacgtcgcgtgtccgggcctgatccaaagccgggttct

SEQ ID NO: 835953 - DNA, 100 bp, Homo sapiens
gcctcattatcccgctccgtgaggtaatctgtaagtcagatgctccaacaggggatgttcttcttgatgaagctctgaagcatgttaaggaaactcagcc

SEQ ID NO: 835954 - DNA, 100 bp, Homo sapiens
ggggtccgccgtcctagccgctgctgtcttcgtgggaggcgccgtgagttcgccgctggtggctccggcccaccttgggacaccttgactccaagcccag

SEQ ID NO: 835955 - DNA, 98 bp, Homo sapiens
aaacaatagctcaaggaaacctttccaacacagatgtccaagctgccaacttgtggagagactccagagcaaatacgagcaccaagtggcataatcac

SEQ ID NO: 835956 - DNA, 100 bp, Homo sapiens
tttgttctcaattatttgaagatacttacaagaatcccctactttgaaactagtgctgccaatgggacaaacataagccaagcaattgagatgcttctgg

SEQ ID NO: 835957 - DNA, 100 bp, Homo sapiens
ccgcaggaggagaaatgatcgaagggagaaacaaaggcagcgctgccctcgggggagcattggccctggcggaacgcagcagccgcgaaggatccagcca

SEQ ID NO: 835958 - DNA, 98 bp, Homo sapiens
ataagtcatctctaacctctcccagcctttttttcataagagagaccatattaaacttacatgaaccaaagaggttgttgtaaatgtggatgatgatg

SEQ ID NO: 835959 - DNA, 100 bp, Homo sapiens
gcttcacacgttcggatgagctacagaggcacaaacgtacacacacagggctccctgtgccactacttgacccagtacaccagtgactggggaagttccc

SEQ ID NO: 835960 - DNA, 100 bp, Homo sapiens
tttaggaatgacaccagggtttggagataaaacatttgttgttcaggcacagaaaactgaatctgtagataacgagggagaatgaattgtcatgaaaaat

SEQ ID NO: 835961 - DNA, 100 bp, Homo sapiens
gggtgaagcctcaggactggatctcggcggcccgagtgctggtagacggagaagagcacgtcggtttccttaatgctcctgatatggaagatatattgac

SEQ ID NO: 835962 - DNA, 100 bp, Homo sapiens
aggttcatagagctgggagcagagattaaaagagttcggcgaggaactccagaatacaaggaagagttacaggccaacctggacctgatccaaacctaca

SEQ ID NO: 835963 - DNA, 100 bp, Homo sapiens
actctggagggattctggcatcagggaggctttcagccggagaagcgagtttcagctgatccagacatttaatgtggatgcaccatgccagaccgtggaa

SEQ ID NO: 835964 - DNA, 100 bp, Homo sapiens
tctacctctccatttgtatgatacaccaggatccacatataacctccagacttatcagatgtagacttcctagatgattcttcaacggagagtttgcttc

SEQ ID NO: 835965 - DNA, 100 bp, Homo sapiens
atgatctgtcctgaatgtggcttggttgtaggtttttcgttggaatatacgttgcacatttatggcgattctgagtgtgagggcagacttctgccaggct

SEQ ID NO: 835966 - DNA, 134 bp, Homo sapiens
gacatggccagaagctgtgccaaatccttctgtgaaaacttcctcaaagctggcggtttgaggcatctaataggattcaggaatcaaagaatcagtgtactcaggtggtacaggaaagagagagccttctggtg

SEQ ID NO: 835967 - DNA, 98 bp, Homo sapiens
aaacattcaagaatgagagcgagaacacctgtcaagcctcgaagcggaggatccctgtgtcccagccgggcatggccgacccccaccagcttttcgat

SEQ ID NO: 835968 - DNA, 100 bp, Homo sapiens
cacagacaccgcctacaggagtatgatgcaagccaagaagtatgatgcgtttttggcctcagagtctctgatcaagcagattccacgaatcctcggccca

SEQ ID NO: 835969 - DNA, 100 bp, Homo sapiens
aggaagtctgaattccagtatctgggatggatctgaagttctgaggcgaatccgaggaccactgcttgctcagcctttgaagtaaattttatggatgatg

SEQ ID NO: 835970 - DNA, 101 bp, Homo sapiens
ggtgaacgtggtgaggtcggtcctgctggccccaatggatttgctggtcctgctggtgctgctggcttccctggtgctcgtggtcttcctggtcctcctgg

SEQ ID NO: 835971 - DNA, 98 bp, Homo sapiens
aaatacagtgacagcacaggtcacagtaaggccaaaaatgtgcatactcacagagttagagagagggatggtggtctagtgacggagcccgcgcgcgg

SEQ ID NO: 835972 - DNA, 100 bp, Homo sapiens
ttttgcagctgattacctcagcagatgaaatacatgaaggagacctagtggaagtggttctttcagcttacggttattccagaagtttgacacattccgg

SEQ ID NO: 835973 - DNA, 100 bp, Homo sapiens
gcagctccaaactgcaagtgtatattgttcttgggcccaagggatgcagacagtgatgaaaacgacaaaggtgaaaagaagaacaagggtacgtttgatg

SEQ ID NO: 835974 - DNA, 100 bp, Homo sapiens
agaacggtagacttgtttacctggtggagaatcctgggggttatgtggcgtatagtaaggctgcaacagttactgcctatcatggtcaccatcaagcact

SEQ ID NO: 835975 - DNA, 100 bp, Homo sapiens
cttttttgagaaaggaaggaatatatcctgactgattggtctatatttacgtgcctaacagtagctctgggattttatcgcctgtggatctaataaagtg

SEQ ID NO: 835976 - DNA, 100 bp, Homo sapiens
agtgaagctgcagaccttcgcggtagattggggtcaactggactacttagttgtagacatgccaccaggaactggagatgtgcagttatcagtctcacag

SEQ ID NO: 835977 - DNA, 100 bp, Homo sapiens
aactgcttttacttttattgggttgtgcagttcaggaaggtgctcgggtcttcggggcactgggtcccatcggtccctcctcacctgggctcaccctcgg

SEQ ID NO: 835978 - DNA, 98 bp, Homo sapiens
gctattgtatatatgcctgcctcatcttaccaatctctttgtcggatgggttccaggtcatataaaagtgggtctggagtaaacaacagaagaactga

SEQ ID NO: 835979 - DNA, 100 bp, Homo sapiens
cttctccttcacagtaaagtggctgattgagaggatccagaatccagatctctggaatagctaccaggcaaagaaaaaaactatggatgccaagaatggc

SEQ ID NO: 835980 - DNA, 100 bp, Homo sapiens
gatcagttgaaggcacactgtaaagatatcttaatgcaattcagacaatgtgtccacacattcttcgctatttgactacagcagtcataacaaacaagga

SEQ ID NO: 835981 - DNA, 100 bp, Homo sapiens
caccgtgtgtcagtgtgaaaaaggaagcttccaggataaaaactcccctgagatgtgccggacgtgtagaacagggtattacatttatgcactgtctgct

SEQ ID NO: 835982 - DNA, 99 bp, Homo sapiens
aacagaaaaagaggatacctctgcgatcccgggtcatctccagatgctagggttatgggtccttcacagggtggtccaggtcctcagtatcctaactac

SEQ ID NO: 835983 - DNA, 146 bp, Homo sapiens
cgcggcccccggctcactccggcactccgggccgctcggcccccatgcctgcccgaccgcgctgccggagccccaggctggccctgcataactcccgtttcctgagtctctgctctgagctggatggtcgagtccggcccctcgtg

SEQ ID NO: 835984 - DNA, 100 bp, Homo sapiens
ccactacagttcatcaacatcaactacgtccctctgaagggcttccgttacaagatgaggtctgtgtatgctcacttccccatcaacgttgttatccagg

SEQ ID NO: 835985 - DNA, 98 bp, Homo sapiens
aagctttatctgtgatagaattgctgcttaaaaaacttgaaggcactactgcagtcttcagttaagcaacaagtagaagctattgaaaaacagtacat

SEQ ID NO: 835986 - DNA, 100 bp, Homo sapiens
gaatctgagccacagtgtgatcccagctttaaaggagatgcaggagaaaatacggcattgctagcttgcatcctccagtctactgaaaattggccaggag

SEQ ID NO: 835987 - DNA, 99 bp, Homo sapiens
gcttgctgcttcctcctcctcggcctcaccgtacaaatcaagacctaccagctcctacattccatctttcagtatccaaatccagctgtttcctaccca

SEQ ID NO: 835988 - DNA, 100 bp, Homo sapiens
gtccaggtcaggggatgccatggggatgaacatgatttcaaagcttcttggacacttaatgattgttggcaagaaatgtgctgctgatctgggcctgaat

SEQ ID NO: 835989 - DNA, 100 bp, Homo sapiens
atcacaatgaatgtctaattatcacagttgcctagacctggagcagtgttctcttaaggtactggagcctgaaggaagccccagcctgtgtctgctgaag

SEQ ID NO: 835990 - DNA, 100 bp, Homo sapiens
atccgcaagaacaagtaccgccccgacctgcgcatgtttccccctttctagggtgaggatggttctacacagccacccggagttccttagttgaaaggtg

SEQ ID NO: 835991 - DNA, 100 bp, Homo sapiens
gagaaggagttagaggcagcgaaagggtttaaccctcatcctagccgcttcatggacttggatgaactgcagaatcaggaacgatgccaacgggactgca

SEQ ID NO: 835992 - DNA, 98 bp, Homo sapiens
gaagacatgacacttacaagatggacagggatgataattgggcctccaagaatgcttcaggactgccccaaggcccgcagggaggtggagctgcactg

SEQ ID NO: 835993 - DNA, 100 bp, Homo sapiens
tgtggccctcgtgctgatgctactgaggagccagcgtctagggcagcagccgcttcctagaagaccagtacaagccagctgccatgttgtgagcacatac

SEQ ID NO: 835994 - DNA, 100 bp, Homo sapiens
gcccggaggaacattccaaaggaaaaatttcagctcagagtcaagatctccactgaagttggcatcacaaatgttgatctttccaccgtggataaggatc

SEQ ID NO: 835995 - DNA, 50 bp, Homo sapiens
aagcgactgagtccgcgatggagaaagtatgctgaggccttggattacca

SEQ ID NO: 835996 - DNA, 100 bp, Homo sapiens
acagtttgatgcttcccattgtgacagtgacaagggtggcttcctggagattcacgaacaagaataggattcatgacctttgatagcactattcatttct

SEQ ID NO: 835997 - DNA, 98 bp, Homo sapiens
tgacggtggaggttcgcggctctaacggggctttctacaaggcgatatgagtctcatccagtctgtgctgatctgcaggccaaaattcttcagtgtta

SEQ ID NO: 835998 - DNA, 106 bp, Homo sapiens
acaagactacggagcataggaggaaaattcatcatctgaggcggggtttcaccatgttgcccagactggtcttgaactcctgagcttaagcaatccacctgcctcg

SEQ ID NO: 835999 - DNA, 98 bp, Homo sapiens
gtgcaaagctgcagaaaccacagtggtagagagctcttcctgccatgatgcagtgggtccgcacgcagaagccaggagagagtggcatcaatattgtc

SEQ ID NO: 836000 - DNA, 60 bp, Homo sapiens
agacatttcttcggcattctgcaacaggcatcaagcatgatggaaccatgtgtgatacct

SEQ ID NO: 836001 - DNA, 100 bp, Homo sapiens
ttgcctaccagttcacagacacgggcgacatggagtccaatgggaaatacatcaccaaatctggaacccgtgtggaccaccagacaggccccattgtgtg

SEQ ID NO: 836002 - DNA, 116 bp, Homo sapiens
aacacttctccgagccagcgagccagcgagccgccgacccgccgagcaaaatggtgccagatgtgacatccagatgacccagtctccatcctccctgtctgcatctgtaggagaca

SEQ ID NO: 836003 - DNA, 98 bp, Homo sapiens
ctttgtcagtgcacaaaatggcgccctacagcctactggtgactcggctgcaggccttggatggtatactgtaaattcagcatatggagataccatta

SEQ ID NO: 836004 - DNA, 100 bp, Homo sapiens
ggaaggttaatgttcttcagaagaaggtgcatgaatacctcagaagtaaactctgttcactgtatgaaaatgactgcatatttgacaaatttgaatgttg

SEQ ID NO: 836005 - DNA, 100 bp, Homo sapiens
ctcaaaagaagatgacagcccgcagagagttaacttctgtttacatggaactcagacatctgcaaatcatggccgagacgcatccagagctttcgtgacc

SEQ ID NO: 836006 - DNA, 100 bp, Homo sapiens
atcatgaagagctcccccgaggtgtccagcatcaaccaggaggcgttggtgctcacggccaaggccacggcaggggtgtggggaagaacgaggaactgcg

SEQ ID NO: 836007 - DNA, 98 bp, Homo sapiens
cctgcaaccttcctggcaggaggcaagagcaccagatgcagagtttgcggggtggtacagaagcgatagcacgattggatcagttagaagctgattat

SEQ ID NO: 836008 - DNA, 100 bp, Homo sapiens
tggctttcctgatggtgtggttcaacacacccaccagagacggaagggcagctgcaatgactctccgcacggtattattgtcattgcaagcactattggc

SEQ ID NO: 836009 - DNA, 99 bp, Homo sapiens
aaccaggaactactgttctcaactgctcccatgacttcctgtcagatgttggggatcagccaggtgaggtaggttattcaggctctcctgctgaagctc

SEQ ID NO: 836010 - DNA, 99 bp, Homo sapiens
gaggtgttgcagaacctcggccccaaggacaaggctggagtgcactagcaagatcacagtttacttcagtctcaacctcctgggttcaagtgatcctcc

SEQ ID NO: 836011 - DNA, 102 bp, Homo sapiens
aaacctaatagaagaataaggagggagtctacgcccatttggaagccctttcctaatcaagacagtgactcggtggtactaagtggcacagactcagaactg

SEQ ID NO: 836012 - DNA, 98 bp, Homo sapiens
aagcccacatatcaggaccgagtggccccgccaggtctatgtgctctctctatcaaccattccaattcttacctggcctatcctggaagcctgacttc

SEQ ID NO: 836013 - DNA, 100 bp, Homo sapiens
aacttcgctgtggtgaagctggggcggcaccggatcaccaagacggaggaaaaggggaagatagtgatgtactcagtataaatgcagatgcttatgacag

SEQ ID NO: 836014 - DNA, 98 bp, Homo sapiens
aacgccacagaaacatccggcccagacatgactatcaaggacaaagcccagccattccacctcccttaccgacagaacaagcttccagacccactccg

SEQ ID NO: 836015 - DNA, 100 bp, Homo sapiens
ctgaagcaaaagatcagcgaggagcagcagcagctccagcaggcgctggctcctgctcaggaatagccaggccagaagaaggaaggcctgtggtgagtgg

SEQ ID NO: 836016 - DNA, 100 bp, Homo sapiens
agagaagaaattgaaaagcaggcacttgagaagtctaagagaagctctaagacgtttaaggaaatgctgcaggacagattcaaatgtaccagctgtccag

SEQ ID NO: 836017 - DNA, 100 bp, Homo sapiens
gggacggattggttgttttttcctgtatgaagcggttggcaccactgaagtgaccgaatgagggggattcccgaagtcttccgttttctgagaatgtgag

SEQ ID NO: 836018 - DNA, 99 bp, Homo sapiens
agacgttgaactctcagtggtcctacctggggatattatcaaatctactactgttcatggcaggcagtatttggcagtcgtattcagagataaacccct

SEQ ID NO: 836019 - DNA, 100 bp, Homo sapiens
tgaaagaccgaccattcttccctgggctggtgaagtacatgaactcagggccggttgtggccatgataatcacatttttgcctggggcaatggtggtaat

SEQ ID NO: 836020 - DNA, 99 bp, Homo sapiens
caccgctcaagcgtgatgaaacagttcctggaaactgccattaacctccagctttttaagcaggcttgcattgatgacaatgttgatatggtgaagttt

SEQ ID NO: 836021 - DNA, 99 bp, Homo sapiens
gagacccaaagctgcagctgggaagtggcagacgctccaccctgggcccaagacaagagctgctgctgggcagctgcaatgactctccgcacggtatta

SEQ ID NO: 836022 - DNA, 100 bp, Homo sapiens
ctcggagcaggcagagcagccgagccagaaatcctctaaacagtcccggaaatctccaggagatgaagatgacaaagactgcaaagaagaggaaaacaaa

SEQ ID NO: 836023 - DNA, 99 bp, Homo sapiens
aggaagatgtctctcagaaacaaaggatgtgaagtgatagctgtgaatacccgctccacgagtcaaacctttatttataaatgcgacgcagttctctgt

SEQ ID NO: 836024 - DNA, 100 bp, Homo sapiens
tccacccttcctccggagaagctgccctatttagtagagttaagcccagtcccggctgagacaacaggacatcggcctgaagacccacctggaccagctg

SEQ ID NO: 836025 - DNA, 100 bp, Homo sapiens
ttcggctctcatgttcctccatgataaaggaatcatctatagacaagttggatggcttgaggactggtactaaaaggaaacgtgactgggaggccattgc

SEQ ID NO: 836026 - DNA, 98 bp, Homo sapiens
gtgatcaaggctatgttgcctctgtgttaggccaatgtcctggagatgtggctgagctacctgcagccgtggcggtacgcgcctgacaagcaggctcc

SEQ ID NO: 836027 - DNA, 100 bp, Homo sapiens
ttgggatctctcctgctacagttgttaaggtgtcacgtcttgaaattttaaatgtcctcagtgactctctacctctggcagatgatgttgaccttcagca

SEQ ID NO: 836028 - DNA, 100 bp, Homo sapiens
ctgttaccgcgtcctgagacactcgcagcaggattaccggaaaaatcagggagctgaaaattgcttggaaggccttatatttgtaatcacaggcgtgctg

SEQ ID NO: 836029 - DNA, 100 bp, Homo sapiens
ccttgggtttacctgctgttaagaaagatccttcttcgaaagttttgccagtgattgcagatcggcctcccccagttattcgacaaggtcctgtgaatca

SEQ ID NO: 836030 - DNA, 150 bp, Homo sapiens
cggtaaaccgtttacttcaagagctgagggcaaagcagcctgacctagctcctggactgaccactattggagcctgtgcatgagctggaacgagcctgccgggtagcagaacaggcagccaatgatctgcgagcacaggtgacagaactg

SEQ ID NO: 836031 - DNA, 98 bp, Homo sapiens
aggtccacctgttgttgtgggtttttgggtgaccagcgggacgaccctgggacagtctccactggggcagatccagctgaccatccggcacagctcgc

SEQ ID NO: 836032 - DNA, 100 bp, Homo sapiens
gattatctacaacactgatgagtgttcaaagcttctttcagacaccagtgttattcagttctacccaagcaaatttgtccttatcaccgacatacttgat

SEQ ID NO: 836033 - DNA, 100 bp, Homo sapiens
gagcaccgcagcatgagagccaacgtggagctggaccacgccaccctggtgcgcttcagccctgactgcagtgataatatgcagcatgcatactgggaac

SEQ ID NO: 836034 - DNA, 100 bp, Homo sapiens
accaactccctgaggatccagtacagcctcctggtgtctcctttctattcggagcggctgaaggaggctcatgtcagactgtacccatccagccgctgca

SEQ ID NO: 836035 - DNA, 98 bp, Homo sapiens
agccggctaaggtttgcgctgccatccgcaaaggctttctcgcttgtcaccttgccatgtggaagaaactgggtgctggagaatctggtaaaagcacc

SEQ ID NO: 836036 - DNA, 100 bp, Homo sapiens
cggtgggggagatgggcatctaccagatgtacttgtgcttcctgctggccgtgctgctgcagtttgtgaagaaatatgggaacctttttagcttggagct

SEQ ID NO: 836037 - DNA, 100 bp, Homo sapiens
tctgctggacagcggctccgtggagaacgtgctgcaagtcggaactcattatacaatgacaaatggaggcagcattaacagttctacacatttactggat

SEQ ID NO: 836038 - DNA, 100 bp, Homo sapiens
tcctcattgaagctatgcagtatttctttggcatcactgcagctagtaatttgccttctggattgtggtcttcgagggatagcacgaggtggtctgacag

SEQ ID NO: 836039 - DNA, 99 bp, Homo sapiens
aagaaaagcctctgggagcagaagggaggctccaagacctcatcaacaattaagaccaggtggatgcaacccttattcctattacaaatttcagctgtg

SEQ ID NO: 836040 - DNA, 100 bp, Homo sapiens
cgcagaagcttattaaagttaagagtgctgcagcagctcccagtccagtgctaggaaacattcccccaggagatggcatgccagtaggtcctgtaccacc

SEQ ID NO: 836041 - DNA, 100 bp, Homo sapiens
gcaagaagagggcctgggagaagagtctgacgagcaaggggaaggtagccaaggatggagtgaaatacagggaatgtggctttaccaaggatttgatact

SEQ ID NO: 836042 - DNA, 100 bp, Homo sapiens
gacggcgaaagaggagagagagggacccaggagcgcggcccccgggggagagagaggggagccctgcagtggagacagagctctgaggaacatgaataca

SEQ ID NO: 836043 - DNA, 99 bp, Homo sapiens
tggatctcagcttcttccccaggaacatcaacagtgcaagcatctcttggcagtttacctgagtcaggttatgaggacctgtcagcagctaagtgtctc

SEQ ID NO: 836044 - DNA, 98 bp, Homo sapiens
aaagtggtacctacactcccagagggtctacctgtacttcttgaaaaacgtatcgaagaccttcgtgtagcctatgaaaggaggttccctacatgtcc

SEQ ID NO: 836045 - DNA, 50 bp, Homo sapiens
gcagtctccactggaaaaaaagatcttgatctggtggctggacccagagc

SEQ ID NO: 836046 - DNA, 100 bp, Homo sapiens
tagagaaagagaaaggatttctaagcaggaactccccaggttacaggaggttccagtggcatcgggaagtgcattgctatcgagtgctataaacaaggag

SEQ ID NO: 836047 - DNA, 100 bp, Homo sapiens
tgtgcacaagtcattcctttcctgtcccaagagagaagagcaagttagtaccttgtaccaaaacatcaaccttgtggagccaagattaattcagccatat

SEQ ID NO: 836048 - DNA, 100 bp, Homo sapiens
cagtggacatagaggacaacgcagatatagaacatttcttttatcacagtggtttgttctggatgcagaaaccagagatctagtttctatccacacagac

SEQ ID NO: 836049 - DNA, 100 bp, Homo sapiens
ggcaggcggagcagggccttggaccccgcggcgcccctcggcctcggagcaacgagcgcagcgccggtgaccagaagtcagcagcttcccagaagccccg

SEQ ID NO: 836050 - DNA, 99 bp, Homo sapiens
ttaagagtctcaaagtctacctgggagtgaagaagaaactcaggccacccacctgtgcctggctctctggctatgaaaatcctgtggtgtctcgaatta

SEQ ID NO: 836051 - DNA, 100 bp, Homo sapiens
taataactcggtgtcaaagccaagacataaactcaaccccttctcttccaaaaggcctcttcatgtgcttgtgtgcaacgcagcaacttttgctctaccc

SEQ ID NO: 836052 - DNA, 99 bp, Homo sapiens
gctgtctgcccattgatagaggccagattgtcttggaagttccaaagttgcaacgatttctatgaagactggcccatttgcagagcactccaaccagct

SEQ ID NO: 836053 - DNA, 98 bp, Homo sapiens
cactcacagccaggaagacaaaggaatttagatcaccacctcaagaacagccacagcgtcctgtgtttactcatgaaaatattcaaggtgggggggaa

SEQ ID NO: 836054 - DNA, 101 bp, Homo sapiens
cgccaccccggcatcccaagccgcctcccgccgccccggcccggcgcgcaggcaatgccaccgtagataagttggaggacttcatcaacaacattaacagt

SEQ ID NO: 836055 - DNA, 156 bp, Homo sapiens
caagattcatttctcccctgttcaagaccaccgaacagcatgccttcgtctccgcattgcttaactggagcaactgagatccggtccgacaaagacaatgacatccccatccggtacagcatcacgggagtgggcgccgaccagccccccatggag

SEQ ID NO: 836056 - DNA, 99 bp, Homo sapiens
ccgctacgagctggctttaatcctgaaagccatgcagcggatgtcctggagcttctcatcggagagttgccctggagagaaggaaaactagtagaactc

SEQ ID NO: 836057 - DNA, 100 bp, Homo sapiens
agcacctcctcgaagtcatcccagtcaaacagtgacgaatctcagcttctgacaccaggaaagatgagtcagcgccaaggaaaagaagcttatccaacgc

SEQ ID NO: 836058 - DNA, 99 bp, Homo sapiens
tgtgctgtttttgattggcgcctttctcattattataggctccctcctgctgtcaggctacatcagcaaaggggtacactgatgctgaagtactatgag

SEQ ID NO: 836059 - DNA, 100 bp, Homo sapiens
gtgagatccataagcacgtgcatttcagcagcagcttcacctccatcgcctcggaggccgccagatcccacccttggacccccatgaaaatggaaacaat

SEQ ID NO: 836060 - DNA, 99 bp, Homo sapiens
gtgacctgaaggctgtcaagtatgtggagtgttctgcacttacacaggtgtctgcttttggggcagagttttcatcggaggcatgcagagagttaggct

SEQ ID NO: 836061 - DNA, 98 bp, Homo sapiens
ccgcggagatctctctcatctcgctcggctgcgggaaatcgggctgaagcgactgagtccgcgatggagtttaatgagtggtgttaagaataatgttg

SEQ ID NO: 836062 - DNA, 98 bp, Homo sapiens
gaggaagtctatgaacccaaccctttcagtaaatacttggaagataacagcgacctcttttctgaacagtcgacagaggtacgttcttggagacacag

SEQ ID NO: 836063 - DNA, 99 bp, Homo sapiens
cttcaccaaggagactgctatttcatgcttgaattggtggatccaaatatttttatccagcccatcacagaagaacgtgcttctaggactttgtatcgc

SEQ ID NO: 836064 - DNA, 100 bp, Homo sapiens
tggtagtgatgcctcttgcacaaatcaagcagccaatgacattggggaccatcaccaaacgaaccgggcaaaagtcaacaactctagcttaattggagta

SEQ ID NO: 836065 - DNA, 98 bp, Homo sapiens
tcgacttcggcggggcccaggtgagaaaggcccacctgtgtcctggttgagggtctccagggttctttggggcccgagtttggaaattttagcattca

SEQ ID NO: 836066 - DNA, 100 bp, Homo sapiens
caaaaacatcaaaacggcgatccaaaaattcagtggaagcttcttccagaccagctggtcttgcttctggagcatctcttggagcagaagactctgagcc

SEQ ID NO: 836067 - DNA, 100 bp, Homo sapiens
tcaatgtctagtggaggtgttccgttattacggaactgactcttttttggagtaaactgcaaagaagaattgacccttctttagatacttttttggagcg

SEQ ID NO: 836068 - DNA, 99 bp, Homo sapiens
cgaattcctgtgccgaagaggcctgcagtgggagagcaggacacaaggaggatgtgtatgagaacctgcacactaagaacaagagggaggagaaagtga

SEQ ID NO: 836069 - DNA, 140 bp, Homo sapiens
ctgacccacctcttctctcttctcttgctgcctggacttctcttctgagcagaagcagctgttgaagcgtttgctgccaattgatggggcaaatgatctcttttttcagccacctccactgactcctacctccaaagttt

SEQ ID NO: 836070 - DNA, 100 bp, Homo sapiens
gtgatgaccagtttcccgagcaggcagagctgtcagcccaattttctcaagtgcattgaattccatgctcagcaaatgggacctccccgtcttcaccctc

SEQ ID NO: 836071 - DNA, 100 bp, Homo sapiens
tcagagaagtgaagcaacttgcccagctatgagagacagagccaggatttgaaaccagctgttaaaaaacccgctccagcacccccgaaaccgggcaacc

SEQ ID NO: 836072 - DNA, 99 bp, Homo sapiens
agaactacaggggctctggccatcttcgtgattcatgatgttgctatcaaaagttgagaaattgtcagaagaaatcatggagataatgcaaaatttaag

SEQ ID NO: 836073 - DNA, 100 bp, Homo sapiens
gcttcaagaggttcggaagtgccaaggtcatccggtccctccacgggcggctgcagggtggaggaggaatgccagctcctgagcaggcctcattggtgga

SEQ ID NO: 836074 - DNA, 100 bp, Homo sapiens
gggctggcagtaccgttggttcgtgctggactacaatgcaggactgctctcctactacacggttggtgttcgaggaagagacattgttgttcttggtgtg

SEQ ID NO: 836075 - DNA, 99 bp, Homo sapiens
gaagctgaaaccacagacatgactgagtcctccatgaagagacatggatttgattgacatactttggaggcaagatatagatcttggagtaagtcgaga

SEQ ID NO: 836076 - DNA, 98 bp, Homo sapiens
gactagatctcccagcactttattcagttagtgccaaaacacctgaggaatcatgtgcacaggtcattaaacagctgatgaaaaaggaattcactcta

SEQ ID NO: 836077 - DNA, 98 bp, Homo sapiens
cgagggcgaagacgagatccagttcctgcgaactgacaactacacctttgcccaacctgggattcaaatgaaagtgaaaatgttagaagaactcgtga

SEQ ID NO: 836078 - DNA, 100 bp, Homo sapiens
atcgctgccacggtctgcgtagctccagaggtttaaccataggatagagaaaccaggagaccagcataaacactttggggactgagaggataagccatat

SEQ ID NO: 836079 - DNA, 99 bp, Homo sapiens
tagccactttgcattgactggaaacaatggcatttacagaaagagtcaacagcagtggcaacagggttctcatgtatcagccatcttctgtaagggtgc

SEQ ID NO: 836080 - DNA, 100 bp, Homo sapiens
aaatgctcatctgaaattcatcacctctctggagtcttcaaactgaccaagcattgaaaagcagaaacagtcctgctccagctgtaacagcagcatctgt

SEQ ID NO: 836081 - DNA, 98 bp, Homo sapiens
tctcacagagcacatataaatgttagagtggccatctgcagaaagcacttttcaggattagaagaggctgtgtatagaaacatacaagcttgcaagga

SEQ ID NO: 836082 - DNA, 98 bp, Homo sapiens
gcgccgctggagatcctttcctgcttttggtttccctggcaggggttgaactgtggagtgtgtggaggccatgtggaagtgttacatcaccttttgct

SEQ ID NO: 836083 - DNA, 100 bp, Homo sapiens
gtaaccgaagcggctcaggaaggcagctgtcactgagcccctggaacagagcgagagtatctctccctttcctggtgatgatgaagaggaagtttttgac

SEQ ID NO: 836084 - DNA, 98 bp, Homo sapiens
attgacaatcaatgggccatcttggacggatgcctggtgtgcaggagtatatacaacagcctattctcaatggtctgcgggataaggcttcatatgtc

SEQ ID NO: 836085 - DNA, 100 bp, Homo sapiens
tggctgttcaacacttgagatctttaaaagttgaggagctcaagcttgggaaaatggtgtgcattccttgtatcgtcattccagttctgctctggatcta

SEQ ID NO: 836086 - DNA, 99 bp, Homo sapiens
tctgatactctcagattttatgcatatactatggaaagcacagacagaaaccaaactttttccaaggaggttttggaaggtgacaatgaaatgtgaaga

SEQ ID NO: 836087 - DNA, 100 bp, Homo sapiens
aatgatgtagccacctcctaaccttcccttcttgaacccccagaccaacaaagccgtggccaagggggacttgcaccaggccagcaccagctcccggcgg

SEQ ID NO: 836088 - DNA, 98 bp, Homo sapiens
atttggagaaacttttacaagatgacactcatgaggaccatgatacttccactgagaatacagacgagtccaaccatgaccctcagtttgagccaata

SEQ ID NO: 836089 - DNA, 98 bp, Homo sapiens
tttctgaggccaagcccgaaggacctagagtcaaggatggatctggaagcacctggctgaggtgtggagaatgctgtcggtggagcttcccagcacga

SEQ ID NO: 836090 - DNA, 98 bp, Homo sapiens
atgttcaggataatggaggcctggactctgaggaatcctatccatatgaggcaacactggcaagctatgagagccagattgccaagctacggtccgag

SEQ ID NO: 836091 - DNA, 100 bp, Homo sapiens
tccccagaggactacacgctcaaggttgtggcagcactgcctgaaggtatgagaccagattctaatctttatggttttccatgggaattggtgatatgtg

SEQ ID NO: 836092 - DNA, 50 bp, Homo sapiens
atgaaagagattgaatccattgtcaaagcatgaatacaactttgtctgag

SEQ ID NO: 836093 - DNA, 100 bp, Homo sapiens
ttaacactcagtgggatcacatgtgccaacagacaaaactgtgtggagttttatcctatattcataattacattgtggatggctgggtggtatttcaacc

SEQ ID NO: 836094 - DNA, 99 bp, Homo sapiens
ttcgccacagttcctaccttatgagctcggttttcttatgcttataagagtggaacaggggatcctcttggtgtatgacatcaccaaccgctggtcctt

SEQ ID NO: 836095 - DNA, 50 bp, Homo sapiens
ttcgtcttggtaaacttggtgaagacctccgtgtggatggccgtggctgt

SEQ ID NO: 836096 - DNA, 98 bp, Homo sapiens
gtgaaaatgttagaagaactcgtgagccggattgatgtcaattggtgtcaacactggtttgaatattttcctaatcctcctatcaatattcttagcat

SEQ ID NO: 836097 - DNA, 98 bp, Homo sapiens
tgacataaaaatccacaccctgtcctacgatgtggaggaggaggaggagttccaggagctggaggttaatgactccagagagtaagatcagattcgtc

SEQ ID NO: 836098 - DNA, 99 bp, Homo sapiens
tcagtaagaaagcagctgatagcacatcacagttcaaacgatatgtcaataaacttcgaagcaagagtacagttttcaaaaagaagcatcagataatag

SEQ ID NO: 836099 - DNA, 100 bp, Homo sapiens
gcggatctcatatcttcacttggcaaactcaacaagcttcaggatgagttagagaaaggtgaacgggacaatgcagaactgcaggagtttgccaacgcca

SEQ ID NO: 836100 - DNA, 100 bp, Homo sapiens
cgttcgaagaatgacagcaagccctactgagcgtgctcccctctgagactggagtgagagggtcttctgcttagcagtgtctgcaaaaacgaatcttttc

SEQ ID NO: 836101 - DNA, 129 bp, Homo sapiens
agggctacagcaccgtgtcccacttcaacattgtgcactacgactgccatctggctgccgtcaggtgagaagccgcacaagtgccaggtgtgcggaaaggccttcagccagagctccaacctcatcacc

SEQ ID NO: 836102 - DNA, 100 bp, Homo sapiens
ggggagtctgcccgctacctccgccagggctaccaggagatgacgaaggtgcacactatcccatgggacggtacaggtttgcagattccgccagcagcac

SEQ ID NO: 836103 - DNA, 99 bp, Homo sapiens
aaagaagaagaagagaagaaagatgaaacttcgagctcctctggtggaagtttagctgatgctataagtgaaaactacagaatcatgagttactttaaa

SEQ ID NO: 836104 - DNA, 100 bp, Homo sapiens
ttcgctccggcccggtgaaactgaacttataatcgtcactggattcccgttcatgagctccgcctccttcctcggcagccagccctgcccagacaccagc

SEQ ID NO: 836105 - DNA, 108 bp, Homo sapiens
ggaaaaacacagtttgagagagttttcccaaaataccatgatgccgatagacaagattccattaatctcttcctgggagttttccatcccactgaagggaaacctcat

SEQ ID NO: 836106 - DNA, 104 bp, Homo sapiens
ccaaaggatctaagaatcaaaacttcgttggccagttctacttcttaatccggaagagaatccacctgagacctgaggacgccttattcttctttgtcaacaac

SEQ ID NO: 836107 - DNA, 50 bp, Homo sapiens
ggattttccacacatcagatctgattctaccagaaaggaatgaagaacag

SEQ ID NO: 836108 - DNA, 100 bp, Homo sapiens
cctacttctataaagtcatccagcatttatgacattaacagagaacaggactatgtcaagaattctgagggtatacttggtgaaaatgaattaagaccac

SEQ ID NO: 836109 - DNA, 99 bp, Homo sapiens
aatcactgctgactaagaattcattatattggcttagtacacagaaattctgcagatgtttgccagggtttggatacctgatccagaggaagtctggaa

SEQ ID NO: 836110 - DNA, 100 bp, Homo sapiens
ctggggaacctgctcaaagccctgggtcgcttggaagaagccaagcctgacaggagcaatggccaccagcaggtgaagggcatcgctgccccaggcctca

SEQ ID NO: 836111 - DNA, 100 bp, Homo sapiens
tatctttgcatatgtcaaggatcgatattttgtcgaagaaactgtggaagtcattaggaacaatggtgcaagtattaattttaaagacccacagtttgct

SEQ ID NO: 836112 - DNA, 99 bp, Homo sapiens
gcctccaccctggcaggaatcccaatttgcctccacttagtgagcggaagaatggtgctggagaatctggtaaaagcaccattgtgaagcagatgagga

SEQ ID NO: 836113 - DNA, 100 bp, Homo sapiens
atgagtgatgaagaacttcgagctatgatagaagaatttgacaaagatggtgatggagaaagaggattatactgactgtggtggtgtttctggattaaat

SEQ ID NO: 836114 - DNA, 127 bp, Homo sapiens
aacctgtacgccacctgggaggtggaccggagctcgtccagctgcgtgcctagcctagaagaagtccaaagtgccctttacaacaaagagatggaatgccttagaatgactgatgaagtcgaacgaa

SEQ ID NO: 836115 - DNA, 98 bp, Homo sapiens
gggctcgagtctacctggatgaaaactacaaatcccaggagcacttcacgggggccgaaggccagagaccaggatttggctacggaggcagagcgtcc

SEQ ID NO: 836116 - DNA, 100 bp, Homo sapiens
agatgatgatgatgatgatgtcaagagcacttctgaagactacttaatgatatcttgataccatacttgcagagctccttcagatacataaagaacacat

SEQ ID NO: 836117 - DNA, 100 bp, Homo sapiens
acgttgatctacaagtcagtgccctgtatgctctccaggtgcactgctataacagcaacttcccaaaagagtggtgatgtatgaagggaagaaaatcatg

SEQ ID NO: 836118 - DNA, 100 bp, Homo sapiens
aggcacccgaagaagagaccatccatatttccagcctccagggtcgtatagacctccccctcctatgggcaaaccaccaggttcaattgtaagaccctct

SEQ ID NO: 836119 - DNA, 98 bp, Homo sapiens
gcgcgggcacagggtgccgctgaccggaatagccaggccagaagaaggaaggcctgtggtgagtgggacaggaaatgacatcaccaccccaccgaaca

SEQ ID NO: 836120 - DNA, 118 bp, Homo sapiens
tttacctgcaaaaatgcggtccctgggatgccttcgcgtcttctcttccctcgggtgacttgagctgagatgagtgaactgagtgtggcacagaaaccagaaaaacttttggagcgct

SEQ ID NO: 836121 - DNA, 100 bp, Homo sapiens
tccgggccgcgaagtcgcagcgccagacccaaggcccccgagtgagcgcgggcgccgagttgcgctacaagtcagacctgatcggcatgaagggcatagg

SEQ ID NO: 836122 - DNA, 99 bp, Homo sapiens
ttagcccccagtttccagcttcaggtgtgaaccagacccccgtggtagacaatagctgaaacctttggacttcaagaaaattatatcaaaattgtcata

SEQ ID NO: 836123 - DNA, 100 bp, Homo sapiens
ttgtaatgaattcagtggaaccatcacacaaaagcacacaaagacctcctcctccacaggggagacagagtccagttacaacacagggatcacaacaaac

SEQ ID NO: 836124 - DNA, 100 bp, Homo sapiens
gaaaattggcaaagctgtggaagactccaagccctactgggaggcacggagggtggcgaggcaggttgctccttgagggcaggacagttcttatggcttt

SEQ ID NO: 836125 - DNA, 98 bp, Homo sapiens
gagactttcttcatgtgttcctgtagctctgatgagtgcaatgacaacatcatcttctcagaagagaatgatgaggagcaggaggcactgccatctct

SEQ ID NO: 836126 - DNA, 100 bp, Homo sapiens
aaaaattagtcctttctaaactttatgaagaaggttccaacaaaagactttttaatgttgatcggcatgttggaatgctggccaactcagccaatccgca

SEQ ID NO: 836127 - DNA, 100 bp, Homo sapiens
cccctgggaggcagcgccgccatccacctctatgtcaaagcggagtttaagagagctgtgaaagtagcaacaggacaagaactctcaaacaatattttgg

SEQ ID NO: 836128 - DNA, 98 bp, Homo sapiens
ttacttgaccattcagatggttcgatttttttataaagagaaggaatctgtgaatgccaaagttcttaaggttaatccctatatcctgaagaagaaca

SEQ ID NO: 836129 - DNA, 100 bp, Homo sapiens
cccagtgtaccgcagcccaaaccatggaactgtggagctccaaggatcgcagacggcgttgtatcgcacaggttcagcttaaagaaagtggttattgtac

SEQ ID NO: 836130 - DNA, 99 bp, Homo sapiens
cccatcttccaagcgcgggggcaactgttggcccagctccgaaacctggacaacgcggtcctcatcgataatgctcggaatatttttcaatgtccattc

SEQ ID NO: 836131 - DNA, 100 bp, Homo sapiens
ctgtgctcaattttctggctccctcgactggttgatcagcagattggaaagactggaagcttcttcagagaaagccacagatggctccctgcagagcgag

SEQ ID NO: 836132 - DNA, 100 bp, Homo sapiens
cctgaagagcccagagttccaccaactaaaggccatttccagcagtttaaaaggtttcctttcagctatgagactggctcatagaggctgtaatgttgat

SEQ ID NO: 836133 - DNA, 99 bp, Homo sapiens
cacatgaagctctgcgtctcttccaagataggtattgatgaagatgaccctactgctgatgataccagtgctgctgtaactgaagaaatgccacccctt

SEQ ID NO: 836134 - DNA, 100 bp, Homo sapiens
gcaccctaccacgtcccaggcgaagggaccgagcccccagaccaacaaggaactgggaaatgccagtcctcgattcatccgttgtacaacatactgtttt

SEQ ID NO: 836135 - DNA, 98 bp, Homo sapiens
gacttgctagttaggattttattactggcagcatgtatatcttttcaaaaaggcattgggatgaacgagccgctggtggactgtgagggctacccccg

SEQ ID NO: 836136 - DNA, 98 bp, Homo sapiens
cgacatggccctgagtgaatacccagaaaatttcatgtctctaattaacagaagatggcaaagcccagccacagcagctatgtccttcagcagctaaa

SEQ ID NO: 836137 - DNA, 98 bp, Homo sapiens
atacaggaaagctatggagatgtctatggaatttgcaccaaattgaaaacatctcccaatgaaggtcttcctccttcccttacggaattacatcttga

SEQ ID NO: 836138 - DNA, 100 bp, Homo sapiens
ctgcaagatggcactcaacatgaacaactacaaaggctatgaaaagaagccctattgtaatgcggttatatcctgtgttgtgacctcatggtttaagtgg

SEQ ID NO: 836139 - DNA, 100 bp, Homo sapiens
acatagcaactctggctgatcaaagaagagcagcccatggttcactggttgaggacccagttcccatctttggatatagaggtcgatggtggagtaggtc

SEQ ID NO: 836140 - DNA, 98 bp, Homo sapiens
ttctcaccgtcctgaagtcaaactcaaaatggcacctgttcctcttgatgattctaacaggttctgatggtcctttggctaccagcaaaccagtccct

SEQ ID NO: 836141 - DNA, 98 bp, Homo sapiens
ccattcttatcatttctaagcaggttcatgccagcccagaacagagaatcagggattatcagcatagaaagaaagccttgtaaccatcaggtagatac

SEQ ID NO: 836142 - DNA, 98 bp, Homo sapiens
tggaccctcagcttttaggaatccctatctccagatcacactaagtttgtgggaagcttcaaaaccaaacaagacttcatagatttgattgaagtaat

SEQ ID NO: 836143 - DNA, 98 bp, Homo sapiens
tacagtgagaagtgatgaggaaatgaaggcaatgctgtcatatagacacttgtcgcccgaggagttccaggaagtgtttgggatgagcatcgaggagt

SEQ ID NO: 836144 - DNA, 98 bp, Homo sapiens
tattcttagatccggattcaccattgttcagaatggctttactcctttatacatggctgcccaagagaatcacattgatgttgtaaaatatttgctgg

SEQ ID NO: 836145 - DNA, 100 bp, Homo sapiens
agtttctctttgagatgattggactgctctatccagcatcattgagcaaaaccgctgagttcttgagcaaactgaacacagaatcgccagacagaagtgc

SEQ ID NO: 836146 - DNA, 100 bp, Homo sapiens
ggacacccagcggtctgacatcgcgacgctgctcaaaacctcgctccggaaaggggacacctgtcaggatggctaaaggtgaccccaagaaaccaaaggg

SEQ ID NO: 836147 - DNA, 100 bp, Homo sapiens
gatctatgagtggaaaggtgaccaagcccaaagaggagaaagatgcttctaaggggagtcatttaatacttcatgattagaacaaatatgtgaaagttcc

SEQ ID NO: 836148 - DNA, 100 bp, Homo sapiens
gtcggtgttccacgtgaagctcaccgacagtgccctgagggccttcgagagctaccgcgccagacagcatccgcagtgtcatgcagaagtacctggagga

SEQ ID NO: 836149 - DNA, 100 bp, Homo sapiens
catagccatttattaccatgcttcaagagccattccttttggaacaatgtatctccagatgaaatggccactgcttgatgtccaggcagggagcctccag

SEQ ID NO: 836150 - DNA, 100 bp, Homo sapiens
ggcttatcgaacagagccgggagttcaagaagaacactccagaggtactatcttggtcgtcggatgtttattgttatttctgagccagacatgatcaagc

SEQ ID NO: 836151 - DNA, 98 bp, Homo sapiens
atgaactccaagccaaaatcacagctttgagtgagaaacagaatgattgaagatagtgggaaaagaggaaataccatggcagaaagaagacagctgtt

SEQ ID NO: 836152 - DNA, 98 bp, Homo sapiens
acttccgaagatgccggactccggaacagcaagaactgcaccgaaccaggtcacaaggcacttaaagcattgttgaggtcattggtaggtcttcagga

SEQ ID NO: 836153 - DNA, 100 bp, Homo sapiens
gggctacgagcgtctcctgaagatgcaaaaccagcgtggcggccgcgctctcttccaggacatcaagtttgcctatctggggcgcctggctcacgaggtt

SEQ ID NO: 836154 - DNA, 99 bp, Homo sapiens
ttcaacaagagcaagtgtcagaactgcttcaagccccgcgagtcgcatctgctcaacgacgaggacctgacgcaggtccggaccctatttgtcagtggc

SEQ ID NO: 836155 - DNA, 98 bp, Homo sapiens
gcagtagaagtgggacccaaatctacaatgcacatgggaactaaagaggaatttgttaaagtcagaaagaaggatctggaacggctgacaactgaagt

SEQ ID NO: 836156 - DNA, 98 bp, Homo sapiens
ccatccaaggagtgaaggctagcctctatgtggccatgaatggtgaaggctatctctacagttcaatggcgtttaatgattgcttcagtttgaactac

SEQ ID NO: 836157 - DNA, 98 bp, Homo sapiens
tttgctgctctgtctgccggttcttgaggtgaatgtcggaatccattatctttcgggaaagctctctggggcaggattcctcacctattcctacctct

SEQ ID NO: 836158 - DNA, 98 bp, Homo sapiens
gctgagggctcagctgtgaagaggatgcggcttgatacctgggtatacataatcaatgtgacctggtctgactccacctcccagactatctaccggag

SEQ ID NO: 836159 - DNA, 99 bp, Homo sapiens
cctgctggtgttcgcccacgaccatgttgagccccatatgggggttggcaggcagcagagaggcccctttcaaggtgttcgggtaaagaactcagtgaa

SEQ ID NO: 836160 - DNA, 100 bp, Homo sapiens
agctgaatgagcccctgcttgcgcctgtggaatcaaatgacagcgaggacactcccagcaagctcttcggtgtgatgaatgcagactctgctaccatttt

SEQ ID NO: 836161 - DNA, 100 bp, Homo sapiens
tgacattctctcaaaaggagctcagcctaaacaggtttctaagcatgaattgaggaacagaagaagcagagcagatgatcggagcagcatttgtttctcc

SEQ ID NO: 836162 - DNA, 99 bp, Homo sapiens
aaacacaggctggtgatgtgtctgcttacattccaacaaatgtcatttccatcactgacggacaggagccagatgaccaggatgccccagatgagcatg

SEQ ID NO: 836163 - DNA, 100 bp, Homo sapiens
cggcgacggagcaccggcggcggcagggcgagagctactgatgcaaatgtgaagaatgaaagtctttcatctgtgcagcagcttggcattaaaatgactg

SEQ ID NO: 836164 - DNA, 99 bp, Homo sapiens
ggagcttgagatacgccgctctgaatcttgccgccctgcactgccgcttcggtcactaggtgaagactgtctccttctgttgaagtctttgcctcctgc

SEQ ID NO: 836165 - DNA, 99 bp, Homo sapiens
gcgctgcaacaagaccctgcccgtggccttcaaggtccaagggcagccattaatggtgcaggtcagtggaggccagctaatcacatcaactggccaacc

SEQ ID NO: 836166 - DNA, 100 bp, Homo sapiens
cgtaaccagaccaagctgtggggttggtcatcattttatccaagcttgactgtggtacagcatggcattccatgttgtgaagttcatattggcgatgtat

SEQ ID NO: 836167 - DNA, 101 bp, Homo sapiens
gtgtgcagaagctctagcccagaggacatacaggcaaaaactgtattaccatgccacaaaagctatgacgcactttacagatgaatgtgttaaaaagtatg

SEQ ID NO: 836168 - DNA, 98 bp, Homo sapiens
aaacatgattgaacgatctgtggtggaagcagcagtccaggaatgcagtcagtctgttgatgaaactataactgataaatttcaaacggaagagagtg

SEQ ID NO: 836169 - DNA, 100 bp, Homo sapiens
atgaagttgattgactatggtctctccggctaccagggatcactgagattctgatgaacagaccttctgcccgcaatgccttggggaatgtcttcgtcag

SEQ ID NO: 836170 - DNA, 98 bp, Homo sapiens
actgcaggggttctcagagaggaaattcaggaaactttgacttcggagtatttccagatttgcaagatctccagtctggctcagctgccagtggtggg

SEQ ID NO: 836171 - DNA, 100 bp, Homo sapiens
aaacagacccatctttggatcttcattcattaagcagtgcagaaacacaggaaagttgcagacgttggcagtgctgttgcggcagctcaaggcagagggc

SEQ ID NO: 836172 - DNA, 100 bp, Homo sapiens
tctcagaagccatgcccctcaggctggaacttgccctgtctcctcgcagatgagacgttacatccaagaggaaataatccaggcaaggaagcacaagctg

SEQ ID NO: 836173 - DNA, 125 bp, Homo sapiens
cagataaggtcacgcaaaaacagttccaactgaaagaaatcgtgcttgaggttggacgtgataagtatgagcctgcagctgtttcagaacaaggtgataaaaagggcaaaaagggcaaaaaagac

SEQ ID NO: 836174 - DNA, 100 bp, Homo sapiens
tggttaaatgaggagaaaattatccagaggcttgtggaaatagttcatccatcgcaagaagaagataatggagatttacagacagtcatctgggtggagg

SEQ ID NO: 836175 - DNA, 98 bp, Homo sapiens
gtgattaccatggcgaggagtctctgtccgggggcctggctaaggaaaccctattacctccaggaaatttgcgagaatccccgatttatcattgatgg

SEQ ID NO: 836176 - DNA, 112 bp, Homo sapiens
aagatcaaagtgccagcagattcagtgtcatgtgaggacgtgcttcctgcttcatagataagaggttcagattcagaacaagaaagtggacatctctaaggtctcctccaag

SEQ ID NO: 836177 - DNA, 100 bp, Homo sapiens
gcgccggtgtcctggcctcttcctcagctcagcgacatgtcctcacctacatggaggatgcagtgtgccagctgctagaaaacagggaagatattagcca

SEQ ID NO: 836178 - DNA, 100 bp, Homo sapiens
cctgcacaggatcatcgaggtcgtcgacgccatcatgaccacggcccagaggtcagaatggcggcagtggagcatcgtcattcttcaggattgccctact

SEQ ID NO: 836179 - DNA, 100 bp, Homo sapiens
gatgatcttccccagcagcagtggcaaccccgggggcagcagcaactgccggacgccctatcgcaagcaggtttcccaacagtgatgtcacaagattgac

SEQ ID NO: 836180 - DNA, 99 bp, Homo sapiens
aagaccccagttatggatgggaggatggaggtttgcttctgaataacccttcggcattagctatgcatgagtgtaaatgtctttggccagatgtgccgt

SEQ ID NO: 836181 - DNA, 141 bp, Homo sapiens
cataataaagaaaatgaagatgatgtagagattatgtcaacggactcctcaagcagtagtatattgtgtatggatgcaaagatcaattttgactctaattcagcctatcgccaaaagaaaatctttgatctacaggactgg

SEQ ID NO: 836182 - DNA, 100 bp, Homo sapiens
tcagtccgaccgggctagctttggcgaggggacggagccggatcaggagccgccgccgccatatcagcaatggtacaacagctccatgaacgtgatctgc

SEQ ID NO: 836183 - DNA, 100 bp, Homo sapiens
cgggcactgggcgactctgtgcctcgctgaggggacctcaggatggaaaccagcagcctgcaccgcccgagaaggtcggctgggtccggaaattctgcgg

SEQ ID NO: 836184 - DNA, 100 bp, Homo sapiens
aaaattcagcagcagaaattccagtgactagtaatggagaagttgatgactctcgtgaacatagctttaataggcagcagcgtgcagggtcaaagacagc

SEQ ID NO: 836185 - DNA, 98 bp, Homo sapiens
gaacaatcggagttgcagccaaaaatcaggtgcagattcactttataggaacagcttcagcttcagtgatgaaaaactgaattctccaacagactcta

SEQ ID NO: 836186 - DNA, 51 bp, Homo sapiens
ggggatggttccatcatggcgtcaatgcagatgaaaggttgtatcaaagtt

SEQ ID NO: 836187 - DNA, 100 bp, Homo sapiens
gacccaacatggggcagaagcttgaaatcctcattaaagatactctcgggccgcgatgggcctcttggaacattggtgtgttcatctgcattcgatgtgc

SEQ ID NO: 836188 - DNA, 100 bp, Homo sapiens
atgaactggaggctgagtacgacagcctcaaacaggagctggagcagctcaaagagcatgactatatgaaggaagaggaaggttttcctgaagatgaggc

SEQ ID NO: 836189 - DNA, 100 bp, Homo sapiens
caaagcagttaggttacaaacttttaccggctttcaacactaccagtggccttccttatccaagaaaactacatctgaccagagtgatattgaaggtagg

SEQ ID NO: 836190 - DNA, 100 bp, Homo sapiens
agcaagcacacagtggtggcctataaagatgccatttatgtatttggtggagacaatgggcgggcaaaactgttccgatttgcctctgagaacgatctcc

SEQ ID NO: 836191 - DNA, 100 bp, Homo sapiens
taagggatccagcagtccaaagcctcttacagcctggggagtgcgagagaaacccagccgaagcatttaaaagttctttaggtgctgggaatgtagccga

SEQ ID NO: 836192 - DNA, 98 bp, Homo sapiens
agcaaccagcatttagagctgtttatgaagcactgagaaatgccagagaagatgtgatccacatgctgaagacagagaaaaccaagcctgaggttctg

SEQ ID NO: 836193 - DNA, 98 bp, Homo sapiens
ggcgcacctctgcgggcccggcggcgtggaccacctcccggtgaagatcctgcagccaggtaatcattaccaaatgaggaggaaaggacgatgtcatc

SEQ ID NO: 836194 - DNA, 100 bp, Homo sapiens
agaagatcgagagcctaactttgcaaccattggtctgcaggacatcactttagatgatgttcaaggagcagggacaagttacaggaatgttctccaagca

SEQ ID NO: 836195 - DNA, 100 bp, Homo sapiens
tgaaagtgagagtgtaagtgaaaaaggaaatgcaacctcaccacaagtacaaagaccatctttcatggactactttgataagcaagacttcaagaataag

SEQ ID NO: 836196 - DNA, 99 bp, Homo sapiens
tgacttcacttttgagtgcaactgccttccagatgaaccagaaactcgagatgcatggtgggcagaaatcagacaagaaataaaatcacatgctaaagc

SEQ ID NO: 836197 - DNA, 98 bp, Homo sapiens
tccacggactctccgttattttaggaggtcccgcagcccccggaagccaatagactccctcagggactctcggtccctcagctactcgcctgtggagc

SEQ ID NO: 836198 - DNA, 99 bp, Homo sapiens
aaaattaaaacgactcctgaagggttcgtcacaaggcatcgcagaaggtttatgctatgaagcttcttagtaagtttgaaatgataaaaagatcagatt

SEQ ID NO: 836199 - DNA, 111 bp, Homo sapiens
agcaaccagagcagtgacagtagcaaccgccggaatggtgggcaccatgtccttgaagcttcaggcaagcaatgtaaccaacaagaatgaccccaagtccatcaactctcg

SEQ ID NO: 836200 - DNA, 100 bp, Homo sapiens
tccttcgcatggggtccgaccgcaacacgtgcgctggataaacgcttgttaactggggcatttgatgtagaactactgtacatagcacagttctttaaaa

SEQ ID NO: 836201 - DNA, 99 bp, Homo sapiens
gctgcgggcccgggccatggccgccgccgatgccgagatcatggaagggaagtggttgctgtgtatgttactggtgcttggaactgctattgttgaggc

SEQ ID NO: 836202 - DNA, 100 bp, Homo sapiens
cgtcgagagcgagcgggcccgggaacggcgcgggtggtagaggaggagccgcgggctcggcttgttttcctgctcagaacaaagtgacttccctgaacac

SEQ ID NO: 836203 - DNA, 117 bp, Homo sapiens
gaaaactgaaaagccatcgactccagtccagacaagagaggaacatttggacaccttctttgaccctcccctgccggctgagaaggcagaagcaatcaggaagataggctttgggac

SEQ ID NO: 836204 - DNA, 100 bp, Homo sapiens
caacgatcgagtccagggagtgatcagccagctggaagacacctgcaaaactatcgagactcctacaactcttccaagagcagctggtcgagaaaccaaa

SEQ ID NO: 836205 - DNA, 75 bp, Homo sapiens
tagctagaggggagatagcaagattctggagtctggaaagccttcacttggtactgtaagattgatgttaaaggc

SEQ ID NO: 836206 - DNA, 98 bp, Homo sapiens
atgacgattcagagactgaaaaacctgaggctgatgacccaaaggagatggcgtctaccagaaggggatggacttcattttggagaagctcaaccatg

SEQ ID NO: 836207 - DNA, 100 bp, Homo sapiens
gaaaaagaaggccctgagtcaaagaagatgcctcgaactaaacaaattcatcccagaaatctaagagaagctgaaacctatcaacactcttcaaaatgca

SEQ ID NO: 836208 - DNA, 98 bp, Homo sapiens
agaaagtcgtcttccacttgcacgaaagctttcctaggccaaaaagagcatctacaaatctgaaggacaaaacatggttcaagcatctgggcacaggc

SEQ ID NO: 836209 - DNA, 115 bp, Homo sapiens
tgaagaccatgttgcaggcccacagctgcctacagaaccgtcccaaaatatggcaaagaaacctattctgagcctgatgtgtgagaagcggatattggcggcagtgaccagtgcg

SEQ ID NO: 836210 - DNA, 100 bp, Homo sapiens
tcaaaatcaaaaagcctctgtagtttgaacttcaatggaaaacatgaaaaggtgaacagtcagcccagtactatactggcaattgctggagaagattttg

SEQ ID NO: 836211 - DNA, 100 bp, Homo sapiens
ccctccagcctggtgtcaccaccgtcatcgacaatttctacatctgcccgaccaacaagaggaagatgcctgaggaaacccagacccaagaccaaccgat

SEQ ID NO: 836212 - DNA, 100 bp, Homo sapiens
cacaaggaagaccttgcaaattgctataaatcatctctgaagctcgtgaaagaaaataacatccgatcagttgaacccaaattagcttttgaagatgtgg

SEQ ID NO: 836213 - DNA, 100 bp, Homo sapiens
ctgctcctgaacttggtctctgagccatggcttcccatagacactcagaatgctcaggcccactgggaattgaaggtggaattatatcaaaccagcaaat

SEQ ID NO: 836214 - DNA, 100 bp, Homo sapiens
acctcacgggagctgtttcgagtaccggccaaatccttgtagctgtcttcttgccccggtcagtgccagccgtactattcacaacactgctgctaccgag

SEQ ID NO: 836215 - DNA, 100 bp, Homo sapiens
tcgcaactcggcagcctccacccaccggcccaccctacatttagcgcatcatgtgatccgggctaaccggcctcctgcaaagctcaacctgctaacctgc

SEQ ID NO: 836216 - DNA, 100 bp, Homo sapiens
aacaatgagatcgtggacaagatcatgggcaaaggacagatccagctgcccaacatgttcggcgaccttcggtccacgtttattgccttgatgattgggt

SEQ ID NO: 836217 - DNA, 99 bp, Homo sapiens
aagcctctcagcttcggagaatggagtcttccatcaatcatatctcacaggacctcagcagccatgtcgaagccccatagtgaagccgggactgccttc

SEQ ID NO: 836218 - DNA, 100 bp, Homo sapiens
ggggttcggcggcgggcgagtgactgcggccacgcctgaaaggcgactctcctaattgttcaggagacaacttttgatttgggaggagatattcatagtg

SEQ ID NO: 836219 - DNA, 129 bp, Homo sapiens
tggcagccagcagtgcccagaagaccccctcccgcctggaaaactactacatggtgagatcaagttagaaatgccaatcatcagtgtggagggagaggtgtctgacctggcagctgacccggaaaccgt

SEQ ID NO: 836220 - DNA, 100 bp, Homo sapiens
aacgccgaggaacccggctgaggcggcagttttcggctttgtgagaaaccttaccatcaaacacgatggccagcaacgttaccaacaagacagatcctcg

SEQ ID NO: 836221 - DNA, 100 bp, Homo sapiens
gatcagaggaccttgtacagggatgtgatgttggagaactacagccacctgatatcactggaaagcgtggatacccatcaacgaagttttgatattggaa

SEQ ID NO: 836222 - DNA, 99 bp, Homo sapiens
ccaggatgacagagctgaggcagagggtggcccatgagccggttgcgccacccgaggacaaggtggatccataaagaacccagccaacccgcagaggga

SEQ ID NO: 836223 - DNA, 100 bp, Homo sapiens
tgggaacctaccatggtatgacactgaaatctgtaacgagtaatcaagtcagaggattatatgacttttatctgcctagagaagaactatggatctacaa

SEQ ID NO: 836224 - DNA, 100 bp, Homo sapiens
tcattggtgtctgtgggctctttgctgggcagaagatggcagtgaacgtatactcaacgtcagtgaccagtgataacctaagtcgacatgacatgctggc

SEQ ID NO: 836225 - DNA, 100 bp, Homo sapiens
acactgcaaagcatttttatggacaacgaccacaggaatctggaattttattaaacatggctgctcccggcagatcggcttctcctttgtacgacccaag

SEQ ID NO: 836226 - DNA, 100 bp, Homo sapiens
atgaaacttatggctacaaagagggcaaaccgtgcattattataaagctcaaccgagttctaggcttcaaacctaaggttgtgggctgcacactgcagaa

SEQ ID NO: 836227 - DNA, 98 bp, Homo sapiens
tagtagaacgtgctgagatgaaactcagactggattcaatagtcattcaacaaggtgaccaagaatatggcccaggtgaccaaagccctggacaaggc

SEQ ID NO: 836228 - DNA, 98 bp, Homo sapiens
caagtacgcaggccacgtgggctcagatggacctccagttgtagctcattatgatatgtctgacaccaactctgacccagaagtggtaaatgtggaca

SEQ ID NO: 836229 - DNA, 100 bp, Homo sapiens
ccgagccgcactcgccgatcctccaggcatgccccgctacgagctggctttaatcctgaaagccatgcagcgggtgttattcaagtattgggaaagttca

SEQ ID NO: 836230 - DNA, 104 bp, Homo sapiens
gcaattcaggatgagagtgcgatggggaatccaacagaattctggtgaagagcgattatatgttagagatagctgatcaagtggaccaggaaattgctttgaag

SEQ ID NO: 836231 - DNA, 129 bp, Homo sapiens
caagtttctacaaagaataaaacatcccaacagtatagaatacaaaggctgttatttacgtgaacacacagcatgggaatagccaggccagaagaaggaaggcctgtggtgagtgggacaggaaatgac

SEQ ID NO: 836232 - DNA, 100 bp, Homo sapiens
gatctgtcatctcggagcaaaacagatcttgactgcatttttgggaaaagacagagtaagaagactcccgaggaagctgtagagaaatatgaagaagtgc

SEQ ID NO: 836233 - DNA, 100 bp, Homo sapiens
cagaacgccatcaaccagctaaaatgtgccagaggaacttcaagaaccattttacacagatcagtatgaccaggaacacatcaaaccacctgttgttaat

SEQ ID NO: 836234 - DNA, 100 bp, Homo sapiens
atggagaggatggcagcgcagcctagttggcagaaggagaagacagcctgaagaagatgcagctgatggagcttgcgattctgaatggcacctacagaga

SEQ ID NO: 836235 - DNA, 100 bp, Homo sapiens
cgcctggcttcctacctggagaaggtgcgcgccctggaggaggccaacgctgacctggaggtggagattcccaacatccagaagcagaggaagcagcttg

SEQ ID NO: 836236 - DNA, 100 bp, Homo sapiens
tgtgtctaaattctgtggatgatgttttctcacccagtcatgattgtctttggctatagagtttttttttttaaagattactaaacatacaggaagtgat

SEQ ID NO: 836237 - DNA, 98 bp, Homo sapiens
ttcttgcaaaccttgctttggattttatgtgctacagtctgcggaacggagcagtatttcaatgtggagatggcccactgcgtgaccttggttcagct

SEQ ID NO: 836238 - DNA, 100 bp, Homo sapiens
gcacagagcaggagcaggatgcagaggagaacggtgacttgcttttggagggcttcaacaactacaccttcctctccaatggctttgtgcccatcccagc

SEQ ID NO: 836239 - DNA, 100 bp, Homo sapiens
ccctcccctggcagtgtgacggctgggcgacttgcgaggatgagagcgacgaagccaactgtccaggtgtgcaatgagaattctctgttcaaaagcgagg

SEQ ID NO: 836240 - DNA, 100 bp, Homo sapiens
ggagtatgtggttagtgtctatgctcagaatccaagcggagagagtcagcctctggttcagactgcagtaaccagatttggtgctatggagaaatttttg

SEQ ID NO: 836241 - DNA, 100 bp, Homo sapiens
agcaagcctaactcaagccattggcacacaggttcacatcgagttcacagagggcgaagacaagatcaccctggagggccctacagaggatgtcaatgtg

SEQ ID NO: 836242 - DNA, 100 bp, Homo sapiens
ccggacagtcatcgctgaccaaaccgagtgtgtcagcagccaggactttctctctgggtccccttccaaaacgcagccaccgccgtcaccaatctctaca

SEQ ID NO: 836243 - DNA, 100 bp, Homo sapiens
attcctgtgttagtgaatggcatgaagtactcagacatagatattatcctacttaagatcatctggaccatataattccagaccacaacttcctttttcc

SEQ ID NO: 836244 - DNA, 98 bp, Homo sapiens
cctggatgaagtgcacaccataccagacttcacagagaatgcagttgtcttgacttcaggtctgtctgttctgttggcaagtaaatgcagtactgttc

SEQ ID NO: 836245 - DNA, 100 bp, Homo sapiens
tggcagaggagctggctttgagaggatgaggcgtggtgcttatggtggaggaaactatggtccaggaggcagtggaggaagtgggggttatggtgggagg

SEQ ID NO: 836246 - DNA, 99 bp, Homo sapiens
tgccattgaattctccaacaatggaggccagtggctggtctcaggttttgatgtggccaagacaggtgatgctcgaattggatttgttggttttccatc

SEQ ID NO: 836247 - DNA, 99 bp, Homo sapiens
gtcaacacagatagcttggaaacaccaacttactcgggaacatgccctgtgtgccgccgtcatttcccacctgcggttattgaagcatctgcagctcct

SEQ ID NO: 836248 - DNA, 100 bp, Homo sapiens
ctcacggcggaggacgacgcgctcaaccagatcgcgcgggagccatcagagggttctcgcttcagcacaagatccggagttttgaagaagcgcgaggtct

SEQ ID NO: 836249 - DNA, 100 bp, Homo sapiens
tgggtgtacagctgtgcattctctcctgactcttctatgctgtgttcagtcggagccagtaaagcagattagggacacttgtggaggccgggctcacccc

SEQ ID NO: 836250 - DNA, 98 bp, Homo sapiens
tttgcctttctggacacagaagtatttgtgacaggaggagttggatttgtcttctagttctcagatgtctcccctttccttatatggtgaaaactcta

SEQ ID NO: 836251 - DNA, 100 bp, Homo sapiens
tatatcaaacggcaagatgtccagtaatgtcccggcggatatggaatttatcaaagagctgctttctcggataagaggcatgaggaaactgagccctccg

SEQ ID NO: 836252 - DNA, 98 bp, Homo sapiens
gaaatctgttgcttcttgcatgggattgtggtttgctgattcatccagaggaaacctgtgggttacagcctatttcttctgactacattgaagccatt

SEQ ID NO: 836253 - DNA, 100 bp, Homo sapiens
aaggcgaccacctcgtgaacgaagattcgaaaagccacttgaagaaaagggtgaaggaggcgaattttcagttgatagagcaaatttttcagaacataaa

SEQ ID NO: 836254 - DNA, 100 bp, Homo sapiens
gacatattcgatgccatcgtgatggcggatgagaggacgattactgagagccaatcagattagtttcaactgggacaggcttgctagctggatcaacctt

SEQ ID NO: 836255 - DNA, 100 bp, Homo sapiens
caaggctgactctttggactgctccagatttcttgtggaggccccccatgactgggatttagaggaggagcgattggttacatgggaacaagtgcctttg

SEQ ID NO: 836256 - DNA, 100 bp, Homo sapiens
gaaccctgggaggggaattccagcaccgcagcaaccactccagaaactttccctccttcagctgagctgcccctcctggacctgatgaagctgtacgaag

SEQ ID NO: 836257 - DNA, 98 bp, Homo sapiens
acttgagaaacccaaacctgtaaaaccagtgacgttttccacaggcatcaaaatgtccctctgtcgtgaaatcaagcaacgacgtcgaggagttgcct

SEQ ID NO: 836258 - DNA, 100 bp, Homo sapiens
ctaaagtgaatgactccaacgaattaggtggtctgactaccagtggctctgcagaggtattaatctctggagaagacacatccacagttagcactttctt

SEQ ID NO: 836259 - DNA, 98 bp, Homo sapiens
caatgaatccttcagcttcaaagttccccaagaagaactggaaaatgccagcctagtgtttacagaatattgtatggaattcctgttatggatgacaa

SEQ ID NO: 836260 - DNA, 100 bp, Homo sapiens
gcacacagtctactatcaccgacaggaagtgggaaaactcttgcctttgccatcccaatgattcatgcggtgttgcagtggcagaagaggaatgctgccc

SEQ ID NO: 836261 - DNA, 98 bp, Homo sapiens
ccggcaccacgtcccctctgacactgagagacagcctggaagactcaaaccttcctccaaaagtttggcattctgagatgacggtgtcagtgacaggc

SEQ ID NO: 836262 - DNA, 113 bp, Homo sapiens
ctcgagttggagaaacactgaaaaatttagctgtgcttaggtcattttgagtgccccccttataattcatctacaatcaggagtatatatcatgtgagaaatattgaagtcta

SEQ ID NO: 836263 - DNA, 100 bp, Homo sapiens
tgcgctaccggaatgtcatccagcgagtgattagtttgtgcctgcagatgggaacgcagcctgcgtgaaggtgctccgggacattgagcctggggacgag

SEQ ID NO: 836264 - DNA, 100 bp, Homo sapiens
atacagcctccaagagtgcctctgctgtgtactggagtgagtttgaagaagttcagcatcaccctcattgttctgtcatctgaggtgggcatctctgagc

SEQ ID NO: 836265 - DNA, 100 bp, Homo sapiens
tgttgaagttgttaaatttttgctggaagcctgcaaagtaaaccctttccccaaggacaggtcattaaatttgacggtggagaggaagtacttatttcag

SEQ ID NO: 836266 - DNA, 98 bp, Homo sapiens
gagaatgtaactccgttgaagcaggtcaacatatttcactggcacctattcacaagcttgaagaagctctgtatgaataccagccactgcagatagag

SEQ ID NO: 836267 - DNA, 100 bp, Homo sapiens
gagaggatcatggcggatggccccaggtgtaagcgcagaaagcaggcgaacccgcggcgcaataacggtccatggctaatgaaacacagaaggttggtgc

SEQ ID NO: 836268 - DNA, 98 bp, Homo sapiens
gtcattcacaaccccctgaaagcggaggtggggaagacagggctccagctaccacaggacgggctctgggtatagccgttccagtcagggacagccgt

SEQ ID NO: 836269 - DNA, 100 bp, Homo sapiens
cccgggagtaggagactcagaatcgaatctcttctccctccccttcttgaaccaccgggaggaactgggccattctaacacccgttgctaccatgctggc

SEQ ID NO: 836270 - DNA, 100 bp, Homo sapiens
aagaggcagcctcagcacctgcagttgaagaccaggtacctgaagctgatttctggtgttcagcaaattcagttttcatgatctgaagaaatgatggaat

SEQ ID NO: 836271 - DNA, 100 bp, Homo sapiens
cacctcctagtctggaaaaacgactaccggcagctcgagaaggagctgcagggccaggtgtaccttgaaagacttttaacatacgcagagatagatatct

SEQ ID NO: 836272 - DNA, 100 bp, Homo sapiens
tctacaaaggcattagtcctatcttgtaaggcactactgcagtcttcagttaagcaacaagtagaagctattgaaaaacagtacatttctgcaattgaga

SEQ ID NO: 836273 - DNA, 99 bp, Homo sapiens
tactttgtttgcaagaagttcaagaagatcattatggagcagagatcaggccaagtttggaatcactgggtcctggacccaagccagaagcctctgcaa

SEQ ID NO: 836274 - DNA, 98 bp, Homo sapiens
cttattggcaatgccaatgcagccaaaccagatttagataaagtcatcagtttgaaagaagctaatgtgaagttctgcaggctggaaatccaagatga

SEQ ID NO: 836275 - DNA, 130 bp, Homo sapiens
agacccagcagctcccctcccactgtggctcccgcatctgcctccctgccccagcccatcctctctaaccaagatgctggagcacccacctacatgtatgagtttcagtaccgtccaagcttctcatcag

SEQ ID NO: 836276 - DNA, 100 bp, Homo sapiens
acaggaacacgaggaaactccactctgaacaggaattaagaataactcaaagtgaatttgatcgtcaagcagagattaccagacttctgctagagggaat

SEQ ID NO: 836277 - DNA, 98 bp, Homo sapiens
attcttggctgcctcgttgagtcttctctgcatcccagccatcacctggatttacctgttttctgggagcttcgaagaactctcagaaattgagccca

SEQ ID NO: 836278 - DNA, 98 bp, Homo sapiens
gcaagtgcgtggaggaggcctacagcctcctcaacgaatacggcgacgacatgtatgggccagaaaaggcaatggatcacttggagtcctttattgct

SEQ ID NO: 836279 - DNA, 100 bp, Homo sapiens
gatgaatttgatgaagaaagtgaggaagggaaagcagcaatttcacaactcagggtatttggcaccaatgtgatggtgacagtggccaagtccttcgagg

SEQ ID NO: 836280 - DNA, 100 bp, Homo sapiens
cgtgatggaaattgtcaagaggtgcaaaaatcttagctctctcaatctctgtctgaactggatcataaatgacagtctttcccagggaactccgatgaag

SEQ ID NO: 836281 - DNA, 99 bp, Homo sapiens
aggaggaccagctggatcgacccccgggacaggtgaaaaattagacgatttcaagaattggagctgaatctgatgttaagtaatggcaacaggtgactt

SEQ ID NO: 836282 - DNA, 98 bp, Homo sapiens
ttcagggtataaatgatctcgtcactcctttctttgtggtcttcatttgtgaatacatagaaccccagctcaaagggattgtgacaaggttattcagc

SEQ ID NO: 836283 - DNA, 100 bp, Homo sapiens
tttcctgcttttggtttccctggcaggggttgaactgtggagtgtgtgggtcctcagaatggttggaatgaccctccagctttgaacagagtacccaaaa

SEQ ID NO: 836284 - DNA, 100 bp, Homo sapiens
cttgaaaaagacagtgacgacaaaacaccagatgatgaccctgagcaaggaaaatctgaggcaatcccacagagtattgatgaggaaactgaagtttgga

SEQ ID NO: 836285 - DNA, 98 bp, Homo sapiens
ctggtgcatctgtttgccggagggatgtaaatgaagaccctggagaagatgtggccctcctctctgttagttttgaggacactgaagccacccaggtg

SEQ ID NO: 836286 - DNA, 98 bp, Homo sapiens
gcggcggaggcgacggtggcggctctcggagccggcgcgaatccggcccccgcagcgggacccggtccaatatcagatggaaatgatgcggagccttc

SEQ ID NO: 836287 - DNA, 100 bp, Homo sapiens
tgtccttcgaggccagcgtggccctgctggaggcctcgctgaggaacgacgccgaggaaggaggtgaagtgaaatctgcaagagtcctgctcgctcaagg

SEQ ID NO: 836288 - DNA, 100 bp, Homo sapiens
ctctcaggcatcacctcctccctgactgggaactcgcttggccgcaatgacgtattgggccacatgcacccagaatgtgacttcatcacccagctgagag

SEQ ID NO: 836289 - DNA, 98 bp, Homo sapiens
aacatccgcgagttcctgcgcggctgcggggcttccctgcggctggagcgtccagcctgcatgccgtgcggactgcacccaccagcaaggtgatcaag

SEQ ID NO: 836290 - DNA, 50 bp, Homo sapiens
ctggggatggcgcatcacacaccaaaggctatgcccactggaagggccaa

SEQ ID NO: 836291 - DNA, 99 bp, Homo sapiens
ttactttttcgcagtactcgaacgttgttattttcggtgtgcctcagatgaccacggtgtgaacacatgaacagaagacgaaaatttcttctagcctca

SEQ ID NO: 836292 - DNA, 100 bp, Homo sapiens
acagggagctgcagaggtacgccgaggaggttgggatcttcttcactgcctctggcatggatgagacagcaccagttgcccttgaagcagaaaacagagg

SEQ ID NO: 836293 - DNA, 100 bp, Homo sapiens
tccatccctcaatcacatcttcatccagctagctcggaacctgcccatggacacattcactgtggcaagtatgctattgcggcagcacctcccgagatgt

SEQ ID NO: 836294 - DNA, 100 bp, Homo sapiens
tgatttgttatgcagtcgtagataaccagaaaacatcggatttacattttaaggtctgttgcggttctcccacttttccataagcagaacaagaaccaaa

SEQ ID NO: 836295 - DNA, 100 bp, Homo sapiens
accgggatcgtgaccgagaccgtgaccgagagcgtgaccgagagcgcgaatatcgtcatcgttagaagatcacaaaatttgtccaggatagacatagagc

SEQ ID NO: 836296 - DNA, 100 bp, Homo sapiens
ttgacctttccactgaggatgacgggacagtggccttcgcgctaacgaagtcgtcattgaattttgagaagcattctgaaaactttgcatggacagagaa

SEQ ID NO: 836297 - DNA, 100 bp, Homo sapiens
ctgccatatatgtcacagtacactgaaaaggagccagcagtttaatagaaaatggtcagcttgaaattgtgacaggtggctgggttatgcctgatgaagc

SEQ ID NO: 836298 - DNA, 99 bp, Homo sapiens
agactgctcagtgagatgctgcttcattacagccaggaggactcttcggacggggacagagagctgatgaagatgtatcggcaagcagtgtaaacggag

SEQ ID NO: 836299 - DNA, 100 bp, Homo sapiens
gcagctgtggaggtggaatcagtagcagcagcagcagccgcggtggcagtgcaaaaggctggcagtacagtgatgatgatgatgattttgatgatgagga

SEQ ID NO: 836300 - DNA, 98 bp, Homo sapiens
gcgtcctcaggagctgtggggtcccctgctagaagtgggggactcggcgggacagtgaccaacaccttcaggacgaacaatatccagatccagagccg

SEQ ID NO: 836301 - DNA, 100 bp, Homo sapiens
gacatgaatgtgaggagggtggaaagcatttcggctcagctggaggaggccagctctacaggcggcagaatccagagaccacatttgaagtatatgttga

SEQ ID NO: 836302 - DNA, 98 bp, Homo sapiens
gattgcaaggtggcaaggagcagaagcagcccttacaagttgcaaagattacgctcgatttgaggccaaaatccatgacctacgagagcagatgatga

SEQ ID NO: 836303 - DNA, 100 bp, Homo sapiens
ccgtgaagggtgaacagtgcgctaacaaagcccttccattcaccagacattgtttccaacagcagattttgaagcagtgggaagaatattctgtcttggc

SEQ ID NO: 836304 - DNA, 100 bp, Homo sapiens
ctcaaaggagacccagactcctcttgccacgcatcagtctgaagatggaccacacatccccgacctacatgcttgctaacttaacccacttgcattctga

SEQ ID NO: 836305 - DNA, 100 bp, Homo sapiens
cactgatgaggatcagcccatgtttggaccattttcagaaaaatgtgatattactacagcccctgggccaccagatcagtgcaagccccctcaagtgaca

SEQ ID NO: 836306 - DNA, 99 bp, Homo sapiens
ctcagcggctcccaggtgcgggagagagtttccgttactatggcaatgacggcagggactacaacaacctttcctatgagcaaccatacccgggaaaga

SEQ ID NO: 836307 - DNA, 100 bp, Homo sapiens
gcacttccctgaggacactgtggagcagaaggcagaaagcgtgggcagaattatgcctcacacggagttggagaccgtgctcctcagtctgcggttcccg

SEQ ID NO: 836308 - DNA, 98 bp, Homo sapiens
gctggaggagctgaaagctgagaatgataatgagtgtgtatatggcaactaccctgaaatacctttggaagaaatgccagatgcagatggagtagcca

SEQ ID NO: 836309 - DNA, 101 bp, Homo sapiens
caacctctcccccggctccatcgacctcaaggacatcaacttccggccgcagatgtcccaggaggcaacgcacgggccacaggcatgttcctgcagtatac

SEQ ID NO: 836310 - DNA, 100 bp, Homo sapiens
caagatttgctgggtatgaataatgactttcctccaagagcacattgcctggtaagatggtgccgacgccaccgccgagcccatgatcctggaacagtac

SEQ ID NO: 836311 - DNA, 100 bp, Homo sapiens
caaatattaaactgaaacctggagtcataccttctatctttgattctccatatcacctacaggtagctacagcaagctgggtagcaggcagatccaaagg

SEQ ID NO: 836312 - DNA, 100 bp, Homo sapiens
ctggatttacctgttttctgggagcttcgaagtaacagatcaactcctagcaatcatgatcggatacagcgtctgaggcaagaatttcagcaagcaaagc

SEQ ID NO: 836313 - DNA, 100 bp, Homo sapiens
aagtcttctcatttaaaagctcacctgaggactcacactgaagacttgcactatctgccagatgctgcttcctaaccagtgcagttatgcatcacaccag

SEQ ID NO: 836314 - DNA, 100 bp, Homo sapiens
tcgacttcttccactacaaaatctccagcgtccagtgcctcagaaatttattgtccagcaccaccacaaattgacaatggaataattcaaggggaacgtg

SEQ ID NO: 836315 - DNA, 147 bp, Homo sapiens
ggagaaccaaaggccacatacatgacaaaaagactgaaccgttcaggttacttgcatggagttggtgcttaaatgcggcttacagggagaacacagttggcctccaccgtttctgccccacagaaaacgtagcaaagatcaaccgag

SEQ ID NO: 836316 - DNA, 100 bp, Homo sapiens
agagacaggccaggtcaggctcaccaagcagaacctgcacttgttgccaagtcttccatcttactagatgtgaaaccttgggatgatgagacagatatgg

SEQ ID NO: 836317 - DNA, 50 bp, Homo sapiens
cagcgattggacagaatttgtgaaggcccagtgacgagcaccatccggaa

SEQ ID NO: 836318 - DNA, 100 bp, Homo sapiens
cctttaatattgtattctcctaaatgagacgtctcgcatttgagcaggtaacactcggtgtggtcttcgctagcatctcatcaggccttggggaggtcac

SEQ ID NO: 836319 - DNA, 100 bp, Homo sapiens
tttatggcatatgaattgctgaagttgaagtacaaccagcatatcaatagattaccagaagcccagttgtcttactactttgaccgcgatgatgtggctt

SEQ ID NO: 836320 - DNA, 100 bp, Homo sapiens
ctgtgcttggtgcccatggtatagaggctgttggaagctgcttgggagaagtgggtcctatagatttctctaccatagctatacaacatagtaaagatgc

SEQ ID NO: 836321 - DNA, 98 bp, Homo sapiens
gcgggcgagcggggctttggacgccggtggagacgcaggcgaggaccaagaatcgccttcagccctgtctggtgcatccttggcagaaagtgaggagg

SEQ ID NO: 836322 - DNA, 100 bp, Homo sapiens
agtccctagtccaaagcgaagagttgtctgtgtgatgatagtattggcatttataatactgaactatggacctatgagtagccggatcgagctgggagat

SEQ ID NO: 836323 - DNA, 98 bp, Homo sapiens
cagaatggaccaggtcacatgtgctgcttaaaattcagggctaagcattttgggtgattttaaactaggcgaggccttcttgggcagctttgtggcca

SEQ ID NO: 836324 - DNA, 100 bp, Homo sapiens
gcggaccatgcccccttgcagcagttctttgtagtgatggagcactgcctcaaacatgggctgaaaggccaaacaccagagcaccctagaaggtttaact

SEQ ID NO: 836325 - DNA, 98 bp, Homo sapiens
acttggaaggactttgtcaataactatctttcaaaaggagtactctctattggaggcatcatcattctgaaggataccagtgaagacattgaggagct

SEQ ID NO: 836326 - DNA, 100 bp, Homo sapiens
gcagcctctctgcacatgcagccctctcctcgagcacgtcacacacaatcccggcctgtgattaatattcagaaaaccatcacagtaactcctaacagaa

SEQ ID NO: 836327 - DNA, 98 bp, Homo sapiens
tctgccttcaagctggatttcctcccggacatgatggtcgagggccgcctgctcgttcctgacagaatgtccttacatcatgccgagccttccttgta

SEQ ID NO: 836328 - DNA, 98 bp, Homo sapiens
gtaaagaaaacctgccaagtattcagggccctggaaatacaaggataaatggaggatggtgctcatcttgaaacttgaaactaaattgggaaggtgct

SEQ ID NO: 836329 - DNA, 98 bp, Homo sapiens
aagctgttctggccattgatgatgatatcattatgctgacctctgacgagctgcaatttggttatgaggttttgaacgaagaatgtgatcagaactgg

SEQ ID NO: 836330 - DNA, 100 bp, Homo sapiens
aaacaccaaaaggaatccgcagtgacgggtcagtcttacgagaatatggtaactgagatcatgtcaatgggctatgaacgagagcaagtaattgcagccc

SEQ ID NO: 836331 - DNA, 100 bp, Homo sapiens
gaccacctggccttgcgggcccggaactacgagtacctgatccgcctcttccaggagtgggaggaacaacaacctgaccttcctgcggccgtactaccag

SEQ ID NO: 836332 - DNA, 100 bp, Homo sapiens
aggacggagctgaacctgcaccagatggcagatagcagctcctttggcatgggcgtgtggtccaagctgaaccttagccggccgatcgaggagcagggcc

SEQ ID NO: 836333 - DNA, 98 bp, Homo sapiens
gccgagggcaggacgaacttcaccagtgtttgagcaacacacctccacttactgagtatttcctcaatgataagtatcaagaagaactgaattttgac

SEQ ID NO: 836334 - DNA, 98 bp, Homo sapiens
tgacgggagcaatgctgacctcggtttcctggacccattccgactcaggatcaactcactatcctgaaggtccattctcccaagaagaggggacagaa

SEQ ID NO: 836335 - DNA, 99 bp, Homo sapiens
aaaatacaaatcacacgcataatggatgaaaggaaccgacaggttgctaggaagaggctcaatgtttgtgttttcaccagatcagtttcagagactgct

SEQ ID NO: 836336 - DNA, 100 bp, Homo sapiens
ccactgatcctgtgaaggctgcccaatttgaggtatgcatccatgtggaaaggatgtctgacactttatactggaaggggtggtgaacttcaaaaaattg

SEQ ID NO: 836337 - DNA, 98 bp, Homo sapiens
cattcctgattacctgccacccattgtgtcttctcaagaagacatccacagttatttcaggaaattcttctagtgccagcgtttcctcgtcagtaact

SEQ ID NO: 836338 - DNA, 100 bp, Homo sapiens
tgggacgtcattcagatgacaccacaggagattgccgtgaacctccggcccgatcacaatgaggacctagggcatctgtctgctgacgccccctggcctg

SEQ ID NO: 836339 - DNA, 100 bp, Homo sapiens
aaccagaagctcagggagaagttgaaggaggaggagaacacagtggagtctttcaggatccgactggcttgggacaatagctgcaggagatatatccggg

SEQ ID NO: 836340 - DNA, 100 bp, Homo sapiens
ccgggcgcactccatcaacctgaaggagatcaacctgaggccgcagatgtcccagattgttgtgtccactgtatcctggcttgcttgttctgcgaattcc

SEQ ID NO: 836341 - DNA, 99 bp, Homo sapiens
cactgtcttggtacctgcggtagtagcctggctttgctctgacggcgatctcgcggcccgagagccttttatagaggggtgtttgatgcttccctcaaa

SEQ ID NO: 836342 - DNA, 123 bp, Homo sapiens
ccgacaaggaggtgaagcggccccagcactcccagctgcgcagggcctgccaggtggcgctcgaaactggcaagatgtttacctggggccgagcagactatggtcagctagggaggaagttgg

SEQ ID NO: 836343 - DNA, 98 bp, Homo sapiens
gttctacacgagcgaggagacagcaaagatgagccactgccgcagcgctgtccactacaggaacttacaggactgcccacagatcctgccctccacgc

SEQ ID NO: 836344 - DNA, 100 bp, Homo sapiens
atggagttgagctgcagcgaagcacctctttactgagttcttcatgcctgggctggttgatacacacatccatgcctctcagtattcctttgctggaagt

SEQ ID NO: 836345 - DNA, 100 bp, Homo sapiens
atggagtgtcccgggagacggcgggcatgacggctacaggatgggcgcgaacaatggcaaacagtacggcagtgagggctcccaggccagtgccagtact

SEQ ID NO: 836346 - DNA, 100 bp, Homo sapiens
tcctactcagaagaacttgtacagagatgtgatgttggagaactatagcaatctggttttcttgggagcagacgcctccgcctagacctgaagcctaccc

SEQ ID NO: 836347 - DNA, 100 bp, Homo sapiens
aagaaggatgatgatgatgaggagataggaggtccaaaagaagaacttattccagagaaactggccaagagcagcccgacggccatggaggctgaagaga

SEQ ID NO: 836348 - DNA, 100 bp, Homo sapiens
ggaatccaatcctctgcttccaggacaagtcctgcgcttggggatcctctgtacgcccgttcactgggttttggccaaattgggcgagggcacaaaataa

SEQ ID NO: 836349 - DNA, 143 bp, Homo sapiens
cgctggagcacaaaagagtctccgcggtggaggtctgcgttgctcttgcttttcctcgctggggtgtacgcgtctgcttctacgctttgcctgggagaggccctggtggcctcgttcctggcgcccggagtccctgctgcggc

SEQ ID NO: 836350 - DNA, 100 bp, Homo sapiens
aatttcgatcagactacatcaagagcatagcccctatcactgactttgaatattcccaggccccttcacagatgtagtcactacaaatcttaaattgcga

SEQ ID NO: 836351 - DNA, 100 bp, Homo sapiens
gcttttttcattgttccactggacgctcatcagagggaagatctttttcctcaattgcttatagtagctgttgaacaagaagaaattcccagacttcagg

SEQ ID NO: 836352 - DNA, 100 bp, Homo sapiens
tggccaggccgtgttccgtgtctctggattcaagtcccaggagtcctgaccagagagcaggccctggagagtgaatttgtttcctgccagcttcaccaat

SEQ ID NO: 836353 - DNA, 99 bp, Homo sapiens
cgtggtgaaggtccggggcttgccctggtcttgctcggccgatgaagtgcagaggtttttttctggaaagaccacagcaagattctttcattcgtctcc

SEQ ID NO: 836354 - DNA, 141 bp, Homo sapiens
aggcagagtggaaaaaagagaggatttgcttttgtaacttttgatgatcatgatacagttgataaaattgttggaaatggtgttcacactggccctgaatcaagggaacaccagttttcacatgctggcagaagcaatggc

SEQ ID NO: 836355 - DNA, 98 bp, Homo sapiens
ctagggttctaagtgatgtccaggaaggaggaggaataatatttatggagcatatattatggaacacaagtctgatcactgcgcatgagcagttcaag

SEQ ID NO: 836356 - DNA, 100 bp, Homo sapiens
gcattgaggcaaaggctaatgtgtgctgtgttaaattcagcccctcttccagataccatttggctttcggctgtgcaggagttggaattgtacaaagagg

SEQ ID NO: 836357 - DNA, 100 bp, Homo sapiens
cagctcaagcgccgctttgccattggctcccaggtgtctgagcacagcatcatcaaggacttcaccaagcagatatcccatattatccgagagattcgcc

SEQ ID NO: 836358 - DNA, 100 bp, Homo sapiens
cttcagatcctggtctggaaaaattggctaggtgtaaaaaggcagccggacatgcaggtgactggcgtggaggacgacagccgtgccctgaacatcacca

SEQ ID NO: 836359 - DNA, 101 bp, Homo sapiens
aaagaaggcagtcacgtttttcgatgatgtcacagtctacctgtttgaccaggcttggaagcgtttgtgtctgctgccaagaagctaccacgagaagatgt

SEQ ID NO: 836360 - DNA, 98 bp, Homo sapiens
cagaactgttccttcagccaaagaaacaagccgtggaataggtgtatcaagtaatggtgcaaagcctgaagatgagctttctgatgttagccaaggcg

SEQ ID NO: 836361 - DNA, 99 bp, Homo sapiens
gcaggcagcggcagagagggaatggtgcaggcaggcgctgagaaggacgcgcagtccatctctctcaggtgtcctccacacatctgtagtcctcctcac

SEQ ID NO: 836362 - DNA, 98 bp, Homo sapiens
attgtggcagagtgtaatgctgtccgccaggccctgcaggacctgctttcggagtacatgggcaatttatttcgagaagtacgaataatgaagatact

SEQ ID NO: 836363 - DNA, 100 bp, Homo sapiens
tatttaattggataatagaagattgaaggtatgactatgaatatgatgaaaatggtgacagagtcgttttaggaaaaggcacttatgggatagtctacgc

SEQ ID NO: 836364 - DNA, 100 bp, Homo sapiens
tgcctccaaggctatgtttgaatctcagagtgaagatgagttgacaccttttgacatgagcatccagggttattggggctgtgccatcggcaaagccagg

SEQ ID NO: 836365 - DNA, 100 bp, Homo sapiens
gtctgtgaggttgtgaatttaacaaatttacattgtatcctgacttcatgggagactgtagggtgtaagaaaaagaattttgcaaaagaaaattcagaaa

SEQ ID NO: 836366 - DNA, 100 bp, Homo sapiens
tgaaatgattgaatctggtgttatcaacttaaaagatgccacctctaaggatgagcaattcttaggttttggctcagatgaagaagtcagagtgcgaagt

SEQ ID NO: 836367 - DNA, 100 bp, Homo sapiens
agggctgctttatggcgaatgtggctgataagtctagattcaccaatgtcaaacagtttattgcaccagccatgaaccagagaatcagtcagagtgctcc

SEQ ID NO: 836368 - DNA, 99 bp, Homo sapiens
ttgtaatgaatttgcccaatgttttgatgattggcagagacccactgtctggaagtcctgacggccacgctggatctggaggacgtccggagctacagg

SEQ ID NO: 836369 - DNA, 98 bp, Homo sapiens
tagctttgaagtgaaaaacagtgttggcaaaagtaactgcactgtatccgtccatgtttctgaacaggacgcaggccttgatgccctttcctctatca

SEQ ID NO: 836370 - DNA, 100 bp, Homo sapiens
gaaaagcggagcaagttcattggatcaaacatgtcacaagagtcggacaaattatctcaactttggtctcctgggaccactcgttgctgacagtcagaaa

SEQ ID NO: 836371 - DNA, 100 bp, Homo sapiens
atgtggacttgccctgcaccgccccctgggatccgcaggttccctacacggtctcctgggtcaagagctccctctttgcccactagcagggcattagctg

SEQ ID NO: 836372 - DNA, 98 bp, Homo sapiens
actgctggaaggagcacgaggaagcaatggcgttcaggaagtggcttatattcactcaaaccagaatgtaattggatcgagcaaagctgaaaatcaca

SEQ ID NO: 836373 - DNA, 132 bp, Homo sapiens
ccactgtggagttggaagggcaggatgaaaaccaagaaggagattttgaagatgcagatacccaggatgcaatgcagtatgcttctgaatctaaagatactgaattggctgaagaactcctgcagtggtttt

SEQ ID NO: 836374 - DNA, 100 bp, Homo sapiens
aaaagggtatttcttttctctcttcagcccccaacccagtggaggtggtgctagaaaagccaaatggctttagtcagagtcccacagccctgtacagcag

SEQ ID NO: 836375 - DNA, 98 bp, Homo sapiens
gtggagacaaatcatcaggaatccattatggtgtcattacatgtgaaggctgcaaggtcatgttggcagcttcctattggtctcttctggccccagca

SEQ ID NO: 836376 - DNA, 100 bp, Homo sapiens
aacctggaagtaaagatgcagaggaaagaaaagaatacattcctgattacctgccacccattgtgtcttctcaagaaggaggatttgttggtattgagga

SEQ ID NO: 836377 - DNA, 98 bp, Homo sapiens
ggaaattgaagccattcatgcaatcttgagatcagaggaagaaaaaatgctgggcatcttggtgcagcacaaagtccggagtggcgtctcgggcatcg

SEQ ID NO: 836378 - DNA, 100 bp, Homo sapiens
ctgtctctccagataccatggaaaacatccaggtcggatccgcacaagacggcaaagctctgggagtgccaccaacgtcgcctctacacctgataaccgg

SEQ ID NO: 836379 - DNA, 120 bp, Homo sapiens
gcaccagtcgtgcatgttcttggtgaagtcggccagcctgagcaagcggaggacctacgccggcctggttgtcgccgtgatcctgaaggcgctgacctacgacgagaagcggggtgcctg

SEQ ID NO: 836380 - DNA, 100 bp, Homo sapiens
ggagcgtctccgtgacacggaccttggacagagaagtaatcgctgtttatcaagtgaatgaaaactttgccattgatttgatagcagagcagcccgtgag

SEQ ID NO: 836381 - DNA, 98 bp, Homo sapiens
ggatgctgtactccttgtctttgcaaacaaacaggggctttgttatgcacctaaagccatattggaagctccagaagaaagagcaccccccggaagtc

SEQ ID NO: 836382 - DNA, 98 bp, Homo sapiens
gaatgagaccatctggtacgtgcgcttcctgtgggagtgacccgccgcccccgacccaggtcacagtgctgtcgatatcaccaaggtggctagaagac

SEQ ID NO: 836383 - DNA, 100 bp, Homo sapiens
agaaggatgctagagagttcctggataaacagcttacaaaacactacacagcaaaataatgatctgctagactgctaacccgagcatccagcttccacaa

SEQ ID NO: 836384 - DNA, 99 bp, Homo sapiens
ttcggaatgggcattgtcgccaattttcaggtgatccttgccgaactcccggaggattttaaagctgctttatatgagtataacctggcagtaatgaag

SEQ ID NO: 836385 - DNA, 100 bp, Homo sapiens
gaaccaaggaggagtgcatgaaagccagtgatgctgatcgaccctgtcgcaagctgcacttcaggtgagaattctatttggtgcacgtgctattgtgtcc

SEQ ID NO: 836386 - DNA, 98 bp, Homo sapiens
ggagatcgctcagctggccgtgtcctggcagtggaatcccccaaagaaggtaaagggagcaagccttccccactgtctgtgaagaacaccaagaggag

SEQ ID NO: 836387 - DNA, 100 bp, Homo sapiens
tgactttgctccagcctggcttaatttccctactccaccatcatcaacaaagtactatactggcaattgctggagaagattttgcaattgttgcttctga

SEQ ID NO: 836388 - DNA, 100 bp, Homo sapiens
tatgggtcgaccattccaaaaaaatcgatacttctcaccactgcatgaatggacatttgaaagtgccatagccaaacacttgcaagcatggagacctcat

SEQ ID NO: 836389 - DNA, 98 bp, Homo sapiens
agaccatcgccaatgagtacagcgacaggtgtaccccgaggctgatccgatagagtaatacctaattatatcaccatgagatggcaaaacggaatgtc

SEQ ID NO: 836390 - DNA, 100 bp, Homo sapiens
cctggtgattgtgggtcctgaagtcacgagaagagaatgccttctagatgcaaaatcacctccaaaccagaccacttttcttgacttgcctgttttggcc

SEQ ID NO: 836391 - DNA, 108 bp, Homo sapiens
ggaccatttataaccgcgacttcaagatcagccacgaggccccctggtggctgccacactgatgagttccagtgccggctggatggactatgcatccccctgcggtgg

SEQ ID NO: 836392 - DNA, 99 bp, Homo sapiens
ccagccccctctgagcagccagaggccccggactttgttgtgtcatgacatgatgggcgggtacctggatgacagggtcttactctgtcgcccaggctg

SEQ ID NO: 836393 - DNA, 100 bp, Homo sapiens
cttggcattacttctatagaaatggctgaaggaaaacctccttatgctgatatacatccaatgagggatgttttcactccagaatgcaaattcaaggaat

SEQ ID NO: 836394 - DNA, 99 bp, Homo sapiens
ggagactggagtcgaaggccgtgaggtatttttctaagaatgtgaaagatgttgcagaagtgttccagaagtggctgaagatagaaggaaaaaagtgcc

SEQ ID NO: 836395 - DNA, 99 bp, Homo sapiens
tgcagcagcagcactcggagatgctggccaagctccatgaggagatcgagcatctgaagcgggaaaacaaggcaggcttatggctatgggccatacggt

SEQ ID NO: 836396 - DNA, 98 bp, Homo sapiens
acagaacagcacgtaccagaggtggaagtccaagtcaaacgcagaaggactgcctcactgagcaaccaagagtaaaatatacccaggaccataaacag

SEQ ID NO: 836397 - DNA, 98 bp, Homo sapiens
ctgaagatgtttacagtgcagtcttatcgaaggatgtgcatgaaggacagcctcttctcaatgcccatcacctcttcatgaccactgcctgccaggag

SEQ ID NO: 836398 - DNA, 100 bp, Homo sapiens
gtgtcttccccggccggtccctcgcctcccggccgagctgacggccggcatttgtaaatccactcatccctgaaagcccagaggaagaggagctctttag

SEQ ID NO: 836399 - DNA, 99 bp, Homo sapiens
taaaaatgtgcctaaacaaagctctcagcttgatgaggcagcctggcatcctcgctacaacctcattgttgtgggccgatacccagatcctaatttcaa

SEQ ID NO: 836400 - DNA, 98 bp, Homo sapiens
aaaacttcatcatctcaagttgacctgccacttcacccaaggagggagagacagcgtctggagaccatcctcagtctctgtgctgaatacacaaagcc

SEQ ID NO: 836401 - DNA, 98 bp, Homo sapiens
gcaggaaggaagccattgatgcctgggctccttacttacctcagtacatagaccacgtcatatcacggtctcttgcaacgtgtgagctgcctcttgcc

SEQ ID NO: 836402 - DNA, 100 bp, Homo sapiens
tgggatttggcacctatgcgcctgcagagtttgtggggacattcatggacaattctttgatttgatgaagctctttgaagtcgggggatctcctgccaac

SEQ ID NO: 836403 - DNA, 99 bp, Homo sapiens
aaccgtatcgccagcaagtacggattcatcaacataggacaggcatgtaatgaatttactacacatgtgatgaaccttctccgagaacagagtagaaca

SEQ ID NO: 836404 - DNA, 100 bp, Homo sapiens
gatgggagcaagttgactaccaccagtggagtccaggatgagctaaaagatggcggcaaggcagcccaggcaaatgtaagaataggcgatgtggttctca

SEQ ID NO: 836405 - DNA, 100 bp, Homo sapiens
gtaaacatgacttccaagctggccgtggctctcttggcagccttcctgatttctgcagctctgtgtgaagtaccttccactggaagaatctcaaacagcg

SEQ ID NO: 836406 - DNA, 98 bp, Homo sapiens
ctatggattccctagtgaagaatggcatcccctttacggtttatgataatgtgagagtggaaccaacggattcaagcccaccaagaaaacacattgtg

SEQ ID NO: 836407 - DNA, 100 bp, Homo sapiens
gggatatcgggtggcggctcgggacggaggacgcgctagtaggaatgttacggcatccggagtcatccctcagatttctctgatcatgggcccatgtgct

SEQ ID NO: 836408 - DNA, 98 bp, Homo sapiens
ggacctccctggatgccctgaagatcagcatccgccagctcaagtggaaggaggaatagccaggccagaagaaggaaggcctgtggtgagtgggacag

SEQ ID NO: 836409 - DNA, 99 bp, Homo sapiens
ttgaacaaactcgaagaacagctgtggaaagaagttgcaaaacactgggacggtttaatacagcagtgtggtgagacaatgaaggaaacagttaatgtg

SEQ ID NO: 836410 - DNA, 100 bp, Homo sapiens
gaagacagtgagctgttcgagctggattattgcctcaaagatccaggtccagagagcatcgcagacatcgatctcgctccatgtcacgtgaacgcaagag

SEQ ID NO: 836411 - DNA, 98 bp, Homo sapiens
ttttgggtatcactggagtctgatggaaagagataggcgcatctctggagttgatcgttactatgtgtcaaaggggagaagggtgaccgcggagatcg

SEQ ID NO: 836412 - DNA, 100 bp, Homo sapiens
gtgaatggagtggtcagaacttcaccacacttgaagctggtgtggtgtcagcacagcggcaggtcaccgttcaggaaggacccttgtaccgcacggaggg

SEQ ID NO: 836413 - DNA, 98 bp, Homo sapiens
tgggaatgagtgggcatcactcaccgagtatcccagatcgtcagtatttaaacagatcacatcatgcgtgagtacaagctagtggtccttggttcagg

SEQ ID NO: 836414 - DNA, 99 bp, Homo sapiens
taagttctacaatgtctggcagattgaggaacaaagataagggagaacaagcagaaactggtcagaggtggtataagttgaaatccaaaccaggaaaga

SEQ ID NO: 836415 - DNA, 98 bp, Homo sapiens
ctttccaaagtggatgcctccggggaggtgtccctggccagtgtccttccacctgtccacaagcatggggaacatcttcgccaacctcttcaagggcc

SEQ ID NO: 836416 - DNA, 99 bp, Homo sapiens
tctcggcagcatacggcgaagcagagggtccttgacattgaaaccagaggagtcctgtctgggggtcccatcattattcgggatacccgccgccagcgg

SEQ ID NO: 836417 - DNA, 100 bp, Homo sapiens
cggcggcatgatccgacacgccggggcgcccgcgcgcggggaccccacgggtaactctcgaagtgataaaagctgtttctttgtgaaatatgggcccgaa

SEQ ID NO: 836418 - DNA, 100 bp, Homo sapiens
aacttttgatcgaactggcagacggatatttacttctgtgatcaaaacagggcgactgctaatcagtcacgaggctcccttgacaggcggctttgcatcg

SEQ ID NO: 836419 - DNA, 107 bp, Homo sapiens
caatcaggagataaagggcaagaagatctcacaagctattttcttgaagcacttctaaaatacatagtcattcagtgctgtaattacaacaattaaccatgatgaag

SEQ ID NO: 836420 - DNA, 100 bp, Homo sapiens
tacattattagtgcatcctctgatggcactgtaaaggtatcaatgctgtagatggatggaagaggcttcccacaggaaggtgccaccagtcagttgtgcc

SEQ ID NO: 836421 - DNA, 127 bp, Homo sapiens
tttcattgaaggaatcattgctcgtgggaacgcttattcaacggcaaaagggagcatgattgagcggatattagtgtcgtgcaacaaccagcaggatctgcaggaatgggtggagcacctacagaag

SEQ ID NO: 836422 - DNA, 99 bp, Homo sapiens
tgggcgtctcctacatcgacgaccacgtgcggaggaaggactcctcgctctatatagggaacgggtatggcaatccccgaaactcaccaggtctgctgg

SEQ ID NO: 836423 - DNA, 100 bp, Homo sapiens
aaagaaagaaacaagttcttggcaagagaggcatcctccttgaagtatttggctgaggagttttcaatcccagattcttgggatggccagcatattccag

SEQ ID NO: 836424 - DNA, 99 bp, Homo sapiens
ggattggcgctgaggtggcccgtggggcagatacagtttatgtaacttgatggaagaaaatggaattactccaaaaagacaagtgctcaagcagcaaaa

SEQ ID NO: 836425 - DNA, 99 bp, Homo sapiens
ttctctcccctccactttctcccggatgaagatgacgccaacagactcggggagaaggtgatcctgcgggagcaggtgaaggaactcttcaacgagaaa

SEQ ID NO: 836426 - DNA, 100 bp, Homo sapiens
cctgggccgcgccgaggtggacctgcgggatctgcaccgcgaccagggccgcaggaagacgcagtcagttcaccgggacctggaggcccagattgcgatc

SEQ ID NO: 836427 - DNA, 100 bp, Homo sapiens
gcaatgaatgatatcagacccagtgccatgagggaaatagcaattgatgtcccaaatacctgcctagagctggaacgttacctccagagcgagccctgct

SEQ ID NO: 836428 - DNA, 100 bp, Homo sapiens
tgaccccagctacctccccaataggtgcatcagagtttggttatctgggacaatgacaggctcacctgtatccagaagggagaaaagaagaacagaggct

SEQ ID NO: 836429 - DNA, 99 bp, Homo sapiens
gcatcgggaacggggtccccagcacgcccctcatcctggagcgcaccaaagacgatggatgacgtagctttgccaaagacttagaagctaagcagaaaa

SEQ ID NO: 836430 - DNA, 100 bp, Homo sapiens
cctgctcggcgtctggtatctggcaggtgacagcagggacatgtctcgggagatgcaggatgtagacctcgctgaggtgaagcctttggtggagaaaggg

SEQ ID NO: 836431 - DNA, 100 bp, Homo sapiens
caccccagaacagcagcagcagcagtggaggaaagctgtgcatactggcctttgtcttctttctcagtgcaagttgagccccatatgggggttggcaggc

SEQ ID NO: 836432 - DNA, 99 bp, Homo sapiens
gaaaaaacttccagaacatctgggagaatatttaatggaaaatcgcttggttaaaacctgacacttttaacagcgctggagagcgaggtggcttcaata

SEQ ID NO: 836433 - DNA, 100 bp, Homo sapiens
agggcctgagtggatgctcaccccgagactcaggatgctacgaaagcagtgagaacctggaaaacgatattgatgatgttaagaagttcaaaccgggtta

SEQ ID NO: 836434 - DNA, 100 bp, Homo sapiens
gcaaaacagagtcggagtgaaaagaaggcacggaagaaacaatcccagtatcatcctctacagactggcaagcagcttttggctttggttcttctaaaca

SEQ ID NO: 836435 - DNA, 100 bp, Homo sapiens
ggaacactttcatcagttttactaattcaactagagggcagccttgtggatggccccgaagcaagcctgatggaacaggatagaaccaaccatgttgagg

SEQ ID NO: 836436 - DNA, 100 bp, Homo sapiens
gttgaaggggaccaggaggttggacacagaccattgcaatggaaatgatgaagatcgactttctagaagaaaaagcattgtggacaccgtatccattcag

SEQ ID NO: 836437 - DNA, 99 bp, Homo sapiens
ggggaccgcagtgtgctctacaaggcatctccttggaaacaatgccatctttgaatgtgagagataaacctagtttcagcatgtctgcagcagagacca

SEQ ID NO: 836438 - DNA, 100 bp, Homo sapiens
aatacgatgaaatcacagctacatatttgttattggggagaaaatcttcagagctgctgaaatagaaaggttcagtgccatgttccaggaaaagaagcag

SEQ ID NO: 836439 - DNA, 100 bp, Homo sapiens
tggagggagaatttcaagaactgcagcaaaaagaagctctttatgatctatggcaaatggacggaatgtttgtggggcatagatcctgtttcgtatgaat

SEQ ID NO: 836440 - DNA, 99 bp, Homo sapiens
tcacaagtccatgctgctgccgttaatggagataagggtgctctacagaggctcatcgtaggaggatgttgacaaggcagtgaaggccgcaagacaggc

SEQ ID NO: 836441 - DNA, 100 bp, Homo sapiens
gttccacatcctcacgaagcaggtccagaagcccttcctcagaccgtgagaaagatcagtctaaagaaaaggagaagaaagtgaaaaaaacaattccttc

SEQ ID NO: 836442 - DNA, 100 bp, Homo sapiens
ggccaggaagtcggagtttgagccccggaggcagagcggctgccatggggaaggagttcgagacacgactgaaggagaagaagccaggagatctgtctga

SEQ ID NO: 836443 - DNA, 100 bp, Homo sapiens
gacaggcagagtggaaaaaagagaggatttgcttttgtaacttttgatgatcatgatacagttgataaaattgttgcatttggaaacaggcaaatcacag

SEQ ID NO: 836444 - DNA, 133 bp, Homo sapiens
gagcgcggagaggaggctggaagaggaagatgcctagcacagaccttctgatgttggtatgatctcgtgaaatcttgagagaaactgaatgacgaatgaaactattgttcctgtttcacacagaagaaaactg

SEQ ID NO: 836445 - DNA, 100 bp, Homo sapiens
gcggcggcgcgagcagcggcgaggatgtgtgctgtgtttggtggaatttattgtcttcgccattcagtacagtgccttgtagtggacaaagaatccagaa

SEQ ID NO: 836446 - DNA, 100 bp, Homo sapiens
ggaggctctgctgtggtcctcacccccaaggtgtcctgcttcaatgagttagaggtctgtatccatcctgatggcgtcatcccagtgctgactttcctca

SEQ ID NO: 836447 - DNA, 100 bp, Homo sapiens
gtttgaggaactactacgaacaatggggaaagcttacagactgtgtggtggctggttatagcggttggtctggtccgagcatacctggctaagggtagct

SEQ ID NO: 836448 - DNA, 100 bp, Homo sapiens
agacaccagccccccaccatggtgtctgacttccagcaactgctggcctgtgccagggtgcaagctgagcactggagtggagttttcctgtggagaggag

SEQ ID NO: 836449 - DNA, 100 bp, Homo sapiens
aaagaaacattcaccttgaagcataaaattgatgaacagatgttcccttgtcgattcattaaaatagattggactccttcttgtcctgagccagtgtata

SEQ ID NO: 836450 - DNA, 100 bp, Homo sapiens
acgctgggcttctacgagagcgaccggcggcgggagaggcgccggggccgcacaggtccaaagtggtacccttctcgagttggtctgcagctagaatgtg

SEQ ID NO: 836451 - DNA, 100 bp, Homo sapiens
ccatcgcggtgctcatagacgaactccgcaatgaggacgttcaggcccgggtggaacgcatggagcagttccagaaggagaaggaggaactggacagggg

SEQ ID NO: 836452 - DNA, 98 bp, Homo sapiens
aagttgtatgtgtagattacattagtttggataaaaagaaagcactgtggtttcctgcattgaacatgcaaggaggcactaaactccatggtcagctg

SEQ ID NO: 836453 - DNA, 100 bp, Homo sapiens
aactgggcagtgaattttgtgaattggaagtttttgctaaagtactgagagctttggataaaagcttccagaggcccttattagtccttgttgacagaaa

SEQ ID NO: 836454 - DNA, 98 bp, Homo sapiens
gtttttggagccgtgagggatacagcagtttggtcaatattgtcttaacatgcttcaaataaatcagggtgtgggccgaagatatgctcatgtggtgt

SEQ ID NO: 836455 - DNA, 100 bp, Homo sapiens
gggtgctgaatggcaatggcacaaagttctctcgatcagggcatacatctttcttcgacaaaggtcccagccttttgtggactacccttataatcagtgt

SEQ ID NO: 836456 - DNA, 100 bp, Homo sapiens
gagatcgccaggctcggaggaaccggcagctctccacgcccctgcccgaagcctgacccgactgcctctctcagtgagtagagacgggggttcaccatgt

SEQ ID NO: 836457 - DNA, 100 bp, Homo sapiens
actgctccagatttcttgtggaggccccccatgactgggatttagaggaggaatgtatcctgtcaggtataatgtcagtgaatggcaagaaagttcttca

SEQ ID NO: 836458 - DNA, 100 bp, Homo sapiens
ggacaatcgaattcttgttattacatccaaagcaggctttcttgatcatggatggtgaagatataccagatttttcaagtttaaaggaggaaactgctta

SEQ ID NO: 836459 - DNA, 98 bp, Homo sapiens
aaatcatgaagtaatccacccccaaccactctcttctgagggctcccagacatatataatgaccccagagggtataagtgaagaacagagatctcagg

SEQ ID NO: 836460 - DNA, 100 bp, Homo sapiens
ctcacctgaggactcacactggtcgatttggtcagacaacgccaccacttgttgattttctcaaggacattttgagaagatatccagaaggaggacagat

SEQ ID NO: 836461 - DNA, 100 bp, Homo sapiens
gccaacagagcagcagctacgggcagcagaaggactacacagaaagtctgctccagctccacgatgctgagattgtgcggttaaaaaactactatgaagt

SEQ ID NO: 836462 - DNA, 100 bp, Homo sapiens
caattgactcagttcatcagctacattatgtacacaggtggttccatcaaggtcctaatccctacaatggagcacaggactggatttactctggcagcta

SEQ ID NO: 836463 - DNA, 129 bp, Homo sapiens
ccgaataactgagaatggtttagaaattgaacatatacctattactttacctattatagcttcattgagaagaaagcttgtggctcttgcagttattgatgagaaaaatacatcagttgaacataccag

SEQ ID NO: 836464 - DNA, 98 bp, Homo sapiens
aattggaaataacgggagggaggacctggtccagcttcccttcctcaaataaggaaattgacacctggcgtgagttcaaagaggccttttcattgttt

SEQ ID NO: 836465 - DNA, 103 bp, Homo sapiens
gttcaaggcaagaccgaattcagaaggatatcgacgtcgtgatccagaagtccagagctgaggactgcctgtttgcaggatacatgatcccttaattcaggct

SEQ ID NO: 836466 - DNA, 100 bp, Homo sapiens
agcttgatccgaaagcttccacagtgaggactgctccgtgggttaaacccctaaagggagaccatctatccagggcaataggaagaatcgctggcaaagg

SEQ ID NO: 836467 - DNA, 98 bp, Homo sapiens
cgcagtcagatccacagcatccgggacctccagcgactcctggagatagactccggcagcacgctgaggaaacgcaagatgtacgaggagttcctcag

SEQ ID NO: 836468 - DNA, 99 bp, Homo sapiens
ttcacatggcagtagttctgggcaccccagcaaaccatattatgctccagggccagaggcattgatgtgcagcaggtttctttagtcatcaactatgac

SEQ ID NO: 836469 - DNA, 100 bp, Homo sapiens
agctcgggcaaggatggtggaggcgagaacactgaggagatggatttgcagccgctgcaagtgtgtggaagggccgtgttcgtgttggcaaagaaggtcg

SEQ ID NO: 836470 - DNA, 100 bp, Homo sapiens
agccgagatgctaagagcaaggccaagaggaaggtttttcttcccccagtccctcagctgctgctgctgctcaggaggtcagatctgccactgatggtaa

SEQ ID NO: 836471 - DNA, 99 bp, Homo sapiens
tccggaactgctgtgcccaggcagcttgcctggaaatcagaaatctatgacaagttcaagcagagtacacacagcatatatatgttcttcaacacatca

SEQ ID NO: 836472 - DNA, 100 bp, Homo sapiens
acaacatcaaattgtatgtacgcagagttttcatcatggataactgtgaggagctaatccctgaatatctgaaccccaccaacaactgaacgctttggtc

SEQ ID NO: 836473 - DNA, 101 bp, Homo sapiens
atttgccttatgttatgggctatttgtgtagcagaagacatatctgaagagatggattaagaatgctttggattaaggattgtggagcacatttcaatcat

SEQ ID NO: 836474 - DNA, 99 bp, Homo sapiens
tgcagggacatcactgaattcaaatgactatggttatgggggacaaaaaagacctttagaagatggagcaattctgtggtgttcttggtcacacattta

SEQ ID NO: 836475 - DNA, 123 bp, Homo sapiens
tggatacggtggcctcactgccctccatattgctacaatagctggccacctagagatacttggagatgaagttcaacttttttcacttgatgaagaatttgattatgacaatgtgatgctaac

SEQ ID NO: 836476 - DNA, 148 bp, Homo sapiens
gacaaaccaccaataggccaggactgtcctgtggacagacggggtgagcctcttcttgtgtctggagattctgaattgggaggctgctgtgtatggataagatacctgctacagccagcttgacaccatgagaaggacaagagaattg

SEQ ID NO: 836477 - DNA, 100 bp, Homo sapiens
gactggaacacctgcggcttgctcagtacaccatagagcggtatttcaccttagtcaccagatcgcagcaggagacagggccgagaagcaatggaatggg

SEQ ID NO: 836478 - DNA, 98 bp, Homo sapiens
tctacatgtaaaaggccactgactcctacttcctctgtatagagcaactgttgaactcagctgcctgtagttacatgggaataggactctcggctcaa

SEQ ID NO: 836479 - DNA, 99 bp, Homo sapiens
tcgattctattttcaaatagagctgcagcaaggatgaaacaggtcatacttacctggttgcttgcgcatctagtaatgttggatcatattctggatgtt

SEQ ID NO: 836480 - DNA, 99 bp, Homo sapiens
gaacatgaagaccagcacagcctagatttgggttgcacgttttcaaaaaatacctaatggtgaaaatgagacaatgattcctgtattgacatcaaaaaa

SEQ ID NO: 836481 - DNA, 100 bp, Homo sapiens
ggaattaggcaaatatggacaggccaaacatggtgatccatgtgtgtgatgaagcaaaaaacttgaaagaagattttacttgcccgcgagatcttttgat

SEQ ID NO: 836482 - DNA, 98 bp, Homo sapiens
aagcaggcgccacagtttacatcactggccgccatctggacacccttcgcgttgttgctcaggagataatgctctaccacaagaaaatggcctctcac

SEQ ID NO: 836483 - DNA, 98 bp, Homo sapiens
gaagtgtgcatcccaaccttccttctgacaagtcccagtccaaagtgcttcgggagaaatggctgctgcagggcatacccgctggaactgccgaagag

SEQ ID NO: 836484 - DNA, 98 bp, Homo sapiens
aggcaccttcctcagtcgcgccgtgcagatccggcactccacccagagcctctttgagtacatgaagggcattcagagcgacccgcaggccctgggca

SEQ ID NO: 836485 - DNA, 100 bp, Homo sapiens
agaaaagcgagcctcttctgataactcaggatttacttgaaatgaaaggagattccaacctacttcaggcactgggacgttcgggcgggtgcacctggtg

SEQ ID NO: 836486 - DNA, 98 bp, Homo sapiens
aaagagaggtgttctgaacaagttcaaggaatcagagaagatcattgctgagttgaatgaaacttgggaagagaagcttcgtaaaacagaggccatca

SEQ ID NO: 836487 - DNA, 98 bp, Homo sapiens
gctgagcacctgtagtcaatcacacgcagccaactgggtacatggaaaactcagtctcctacagcgcaattgaagacgttcagctgctgtcctgggag

SEQ ID NO: 836488 - DNA, 99 bp, Homo sapiens
gccatttagcattgatgggaagatggtagctgtaaacctggccactggaaaacgaaggaagcttgctggactttctgaaaagtgatgagggcagcaagc

SEQ ID NO: 836489 - DNA, 109 bp, Homo sapiens
gaaagatatgaattgctcaatgtcttggagtttaccagatctgtctcgtaactgtgtaatcaaggaactagcaccacaacaggaaggtaacccaggagaagtattccac

SEQ ID NO: 836490 - DNA, 100 bp, Homo sapiens
tctctctttcgggatgaagttttccacattcacaaagctgcagaagacttatttgtaaacatacgaggatacaggctagttccaaaggtttattttcctg

SEQ ID NO: 836491 - DNA, 100 bp, Homo sapiens
tttttgctcatttactgacatccaaggaggacccaaaggagcagaagcttctgttaaggattctcagaagaatggactctgacaccaccataccaatgga

SEQ ID NO: 836492 - DNA, 100 bp, Homo sapiens
gtctccatcgtcatcagaaactgaaggcaactttgtctatcgcacaggtctgagtgtacggtttgcagatatgcctggaaaatcaaggaagaaaaagaag

SEQ ID NO: 836493 - DNA, 100 bp, Homo sapiens
ccttctgggggtcctgggggccctcactgagatgtgtgggggaaggatttgaaagaacagcatgatcagaaagtatgtgagagggagatgcagcgaatca

SEQ ID NO: 836494 - DNA, 100 bp, Homo sapiens
aggatacagaccatctgggccagtctggagcccggcactgtggtcataacagagcaggcagtggatacctgcttcaaggcagagtttgagcagattgtcc

SEQ ID NO: 836495 - DNA, 100 bp, Homo sapiens
gatttcatccattatgctggctgttatgtacgcaggagcagtcagtggaagagcatctgcaatgtcaaacactcctacccacagtattgctgcatccatt

SEQ ID NO: 836496 - DNA, 98 bp, Homo sapiens
ggctctcattgacatcactgtgcggcacatcgcagacctgtcaccaggagacaagggacgcatggaatacctcgtgaaatggaagggatggtcgcaga

SEQ ID NO: 836497 - DNA, 98 bp, Homo sapiens
cagcgccaagcaggagctgaaggacttcagttcttcaccaaaggacatggatgaaaatgaaagcaaccagtctctgatgacaagcagccaatatccta

SEQ ID NO: 836498 - DNA, 119 bp, Homo sapiens
ggcggagcagcaagaacagagatggcggggagagacggccaagcagcaccagcgtgcctttgggtgataagggtcaactgcttggaccagcatgttcggaagtcccccgagagcgttgc

SEQ ID NO: 836499 - DNA, 100 bp, Homo sapiens
tggaaagttccctagagcttttacagaaggatgtggtacagctccatgctcctcgatatcagtctatgagaaggaatccacattcatctcaatggaagga

SEQ ID NO: 836500 - DNA, 98 bp, Homo sapiens
gaagtgtatatggggcccaagctactggtgccagaacacagagacagcagcccagtgcaatattgatgactcttccgcgtctatttctctggcccagc

SEQ ID NO: 836501 - DNA, 100 bp, Homo sapiens
catggcgacgcggggccatgtgcaggaccctaacgacaggcgcctccggcccatttacgcaattctgtggtgttcttggtcacacatttatggagtttct

SEQ ID NO: 836502 - DNA, 100 bp, Homo sapiens
aggacaggacgaagccggagtgtaggcggcagaggattcgctcccagagcagctgcggccaggaatactcccccagttgcaagaggcgcaggaccgtgga

SEQ ID NO: 836503 - DNA, 98 bp, Homo sapiens
aatatccagattttaagcagcatgttcagataaatctgaatggaagagtgagaccaactgaagaagaagctgagcaattactgcagttgatgacgagc

SEQ ID NO: 836504 - DNA, 98 bp, Homo sapiens
ctaggactctatgacacggccggacagctgaactagatgcagagcacgcccagaaggtcctggaaatggagcacacccagcaaatgaagctgaaggag

SEQ ID NO: 836505 - DNA, 99 bp, Homo sapiens
cagaacctcaagcttttcaggcatcctcatataattaaactagtcactcaagggaaaggattaatgccagatggtaccagcagatttacttgcaaagga

SEQ ID NO: 836506 - DNA, 98 bp, Homo sapiens
catgcggaaaacctttaccacaggcatggcggctgtcaaaaagaagtcactgtgcatccagatgaagctacaggtggctctttaccatcagaccctgg

SEQ ID NO: 836507 - DNA, 121 bp, Homo sapiens
ccgtgtgacagtaactgaacattggtctaaagtctttccaaaaggtcaaggttcacaaggaggaggaagccaagaatctggtgagcgaagccatcgcagctggcatcttcaacgacctggg

SEQ ID NO: 836508 - DNA, 101 bp, Homo sapiens
gcagaccctggccggctgctggggccggggaggagagccagattttgctaaacatgttgactttctagaagccataagtagtgctttgagggcccttttgc

SEQ ID NO: 836509 - DNA, 100 bp, Homo sapiens
gtcactacatttgctccaaaccgccttaagatttggtggcaatctgaaaatggtgaccaagaatatggcccaggtgaccaaagccctggacaaggccctg

SEQ ID NO: 836510 - DNA, 100 bp, Homo sapiens
cagaaagcctctccagtggatgatgaacagctgtcagtctgtctttctgacactattttgcactgcctaccaaccctggcgaacagttctacatgttttg

SEQ ID NO: 836511 - DNA, 100 bp, Homo sapiens
agcctaatggatgtcaccgaggaggtgtgggacaagagtcataaacattctaagtgcatacggccatttcttccttatttcaatgtgtcacaacaatttg

SEQ ID NO: 836512 - DNA, 98 bp, Homo sapiens
tcaccgttataactttcccaatctcaatatggatgtgcataaagatcaggaagcaccatacctcctgcgaaacctcagtgatcacacagtggccatca

SEQ ID NO: 836513 - DNA, 110 bp, Homo sapiens
tttccttcccggcgctttcctgggttgcttctggcggccctggtgttgctgctgtcctccttctccgaggaatggcttcttgtgggaaccaaacaaggacatcttcttct

SEQ ID NO: 836514 - DNA, 100 bp, Homo sapiens
agcaattgagcagttcagttactggtcttaccaatattgaggaagaaaactgtcagaggatgacgatgtcgataccaagaagcagaagaccgacgaggat

SEQ ID NO: 836515 - DNA, 98 bp, Homo sapiens
cctgactgggcccgggccctggggcttccgtctgcaggggggcaaggacttcaacatgcccctcactatctcccgggacaaccctccatatgataagg

SEQ ID NO: 836516 - DNA, 100 bp, Homo sapiens
cctctgctgaggcagagctccagtgaacagtgcagtggttctcaccattcaggaagcccttcagctcactgttcaaaaagtagtgggtctctggattcat

SEQ ID NO: 836517 - DNA, 100 bp, Homo sapiens
acaaatatgaagaagaaattaaacttctgtctgacaaactgaaagaggctgagacccgagcagagtttgccgagaggtctgtggcaaagttggagaaaac

SEQ ID NO: 836518 - DNA, 114 bp, Homo sapiens
ttgtggtttggcaagccatccagccgactacaaacccacgtttcgattattggagccggaattggtggcacttcagcagcctattacctgcggcagaaatttgggaaagatgtg

SEQ ID NO: 836519 - DNA, 100 bp, Homo sapiens
aggaaatgagtctcaaccagacagccaggaagacccccgagaagtacttaaaaaaacattggaattctgcttatctaggccctcgggaccaaggatcacg

SEQ ID NO: 836520 - DNA, 100 bp, Homo sapiens
aggcagagctgcacccgctgccccagctcaaagcccaggagttaaagtcactgtttgaaaaaaaatctctcaaagagaagcctccaatttctgggaagca

SEQ ID NO: 836521 - DNA, 98 bp, Homo sapiens
ttggggacctcgaccagaaccagccagcgagagatggagctaccgtgtccaggatgaagctgcaggtctgggggacactgaccagcttgggctccacg

SEQ ID NO: 836522 - DNA, 99 bp, Homo sapiens
agatgcagaggatgctttgcagaaacttcataaatatatgcaggaagtgaagagatccttctgtaaaggtttttggaattatgtctgctgaataataaa

SEQ ID NO: 836523 - DNA, 100 bp, Homo sapiens
gcccaggtggaccccaagaagaccattcagatgggatctttccggatcaatccagatggcagccagtcagtggtggaggagcgaatccgtttagctcgac

SEQ ID NO: 836524 - DNA, 99 bp, Homo sapiens
tctgctctgcggggaggtgctgggcttcctgggcagctcgtcggtgttctgcaaagactgcaggaaggacccttgaacatctgtgaagaaatgactatt

SEQ ID NO: 836525 - DNA, 100 bp, Homo sapiens
accgaccaagaaagctcctcccccgtcctccgttagctaattaaaacatttttcagggacgtagccatccagagacctaatctgggagcctgcaagtgac

SEQ ID NO: 836526 - DNA, 100 bp, Homo sapiens
cagcagtattcagctgctggttcaggatctggatgctgcctgtgatcctgccctgactgccatgagcaaggcactgggatgtctactctataaactttgt

SEQ ID NO: 836527 - DNA, 98 bp, Homo sapiens
tgatacgaggcgaatgggtgacggccgggcaggagcaggcatgataacccaacattcaagaattctgcttggtcagaatcgtgatggcattgtgttca

SEQ ID NO: 836528 - DNA, 100 bp, Homo sapiens
cccaccacccgcccaggccagccccagcagcaacagcagcacagaactgaagagagatctggccaaagacataacctcagacacatctggagattttcgg

SEQ ID NO: 836529 - DNA, 99 bp, Homo sapiens
tgaaggctgattgtccacatcccattaggttttccaagctctgtgtcagctttaataatcagattctcaagtgggtgttttacgcatttggaatgtttc

SEQ ID NO: 836530 - DNA, 53 bp, Homo sapiens
ttacaacatggcagacattgacaaagcttacgatgtgaagaacttcatcttca

SEQ ID NO: 836531 - DNA, 100 bp, Homo sapiens
ttcgcgtcccctgcaccatgagctggggcaccgagctctggggtatttgaagtataccatacaactgttttgaaaatccagcgtggacaatggctactca

SEQ ID NO: 836532 - DNA, 100 bp, Homo sapiens
ccctcgtgtctgccaccatcttcgacttgagcgaagttttatgcaagtgtcttccaactccaacttctcagaagtcaccctggcgggtttagccagtaaa

SEQ ID NO: 836533 - DNA, 98 bp, Homo sapiens
gtccgccaggccctgcaggacctgctttcggagtacatgggcaattttgtgaagaaatatgggaacctttttagcttggagcttggtgacatatctgc

SEQ ID NO: 836534 - DNA, 99 bp, Homo sapiens
aaaaagaagagctacaacgtcagcatgatcaactggaggctcagaagctggaatatcatcagttgttcaggggatgaaggaagctcaggaaaggctgac

SEQ ID NO: 836535 - DNA, 100 bp, Homo sapiens
acatgaagctgttgaagaccctcctggatattcctgcaaacccaacaggtatgtgaaagcaagaacagagctaacatgggattatggctatgaagctggg

SEQ ID NO: 836536 - DNA, 100 bp, Homo sapiens
cgctgtaaggaaacaagatggtccttaaaaccgaagaggaggacggatgttggcaaaggatgaactgatgaccatacttgagaaatgtttcaaggttttt

SEQ ID NO: 836537 - DNA, 98 bp, Homo sapiens
gctgctgtcggcgctcttctacgggacctgctccttcctcatcgtgcttgtcaacaaggcgctgctgaccacctacggccaggtggaagagaccggag

SEQ ID NO: 836538 - DNA, 142 bp, Homo sapiens
cagcgttttatagactagcagatctctttgggtggtctcagcttatctacaatcatatcacagaagagcagcgaagaggcacaaaaagagaggagaaggatatcaaatttattgaacataatggaaccaagcctccttcagt

SEQ ID NO: 836539 - DNA, 100 bp, Homo sapiens
caatgttcttccactggcgacgtgcagcggaggagggcaaggactacccctttgccaggttcaataagccccatggcctttctgtggtgctcacgtcccc

SEQ ID NO: 836540 - DNA, 100 bp, Homo sapiens
aaaacggcaacgtgtaatcagaaggcacagattagaggaaggaagagataatatcgtctactgcattatttttggctgcaaaagtggaagaacaggctcg

SEQ ID NO: 836541 - DNA, 100 bp, Homo sapiens
ccgagcaacagtgtagtggcgtattccacatagcaaacaggggcatatgatattttcctgaatgcaaaagagcaaaacattgtgtttaatgctgaaacct

SEQ ID NO: 836542 - DNA, 99 bp, Homo sapiens
gcgggactgagctgttgagttagagccaacatgagtgagattgaagataaaactttccaagtccttggtaatctttacagcgagggagactgcacttac

SEQ ID NO: 836543 - DNA, 100 bp, Homo sapiens
agctggattctgagctgatggacataactaagtacaagttgtgcaaagtgaggaagattactgtgggagtgaagggaatccctcacctggtgactcatga

SEQ ID NO: 836544 - DNA, 100 bp, Homo sapiens
atgcaatggaaaagtggattatctaggatgtgaagccactgaaagcttgactcagggaaaagaaatgtgggaccatcacacacatgaaaatggctataat

SEQ ID NO: 836545 - DNA, 100 bp, Homo sapiens
atggcgagagggggcaccggaggtgacaacaataacaagactgtccttcggacaagttttaggtttccacttgagcggcacagtgacagaacctgcaata

SEQ ID NO: 836546 - DNA, 98 bp, Homo sapiens
caggctcatcctgtccatcgtgtgcctgatgatcacgcagctggctggcttcagtggaccaatagaagaagtcagagatgccatggaaaatgaaatga

SEQ ID NO: 836547 - DNA, 100 bp, Homo sapiens
gaaaaaaggggagacactgcgaaagcaaaccgaggaggaaaaatatattcagggggaagagatgtaatagatttcacattatggcagttactaaagaagc

SEQ ID NO: 836548 - DNA, 98 bp, Homo sapiens
gttgaagatgattggtcaaaaccacttccaccaagtgaacgcttggagcagaaggctttgtgatacctgatgaagggggcccacaggaggagcaagaa

SEQ ID NO: 836549 - DNA, 98 bp, Homo sapiens
aggccttggtggtatagatttcagtagctcctcagataaaaagaaacaggccgcccgcctgaagaaactacaagagcaagagaaacaacagaaagtgg

SEQ ID NO: 836550 - DNA, 124 bp, Homo sapiens
atagaaactgatgcagaagatggaatcaaggggtgtggaattaccttcactctgggaaaaggcactgaagttgccatgttcactgcccacttcccatgagatttctccagtgcccgccagacct

SEQ ID NO: 836551 - DNA, 100 bp, Homo sapiens
ggacggtcgtgatggataaatcgaaaggagagcccgtcattagcgtgaaaaccacaagcaggtccaaagagagatccagaacacatattacataatggag

SEQ ID NO: 836552 - DNA, 119 bp, Homo sapiens
cgctcgtgctcatctcctactgtcccacggccaccgaagaggttgttattgatgccttcagattgatcaatgctaatatgatggtcttaggacatgaaccaagacaaacaacttcgaat

SEQ ID NO: 836553 - DNA, 98 bp, Homo sapiens
gaaccctcagcctcaagccgctgctcttcgtaccgtgtgactgtgccgctgatgggggctgtgtccgacctgtgcgaggctctctccaggctgtctgg

SEQ ID NO: 836554 - DNA, 100 bp, Homo sapiens
ctacgtagccaacaggtttcctcagaatggcctttacacacctcagaaatttatagataacaggatcatttcatctaagaatccaaaggactgcatgaca

SEQ ID NO: 836555 - DNA, 98 bp, Homo sapiens
gttgaggcatctggacaccacacacatcatcagtctggaaagaccacagcaagattctttcattcgtctcctcctagcctgggggaccaggctcgaac

SEQ ID NO: 836556 - DNA, 100 bp, Homo sapiens
gaagagtgtatgtgatcatcgatctctcagggtcgtcgggtgaagtttccatagcaaggcgtgtacaagatccattagctgagctagtgaaaattgagcc

SEQ ID NO: 836557 - DNA, 100 bp, Homo sapiens
tgggttccatgtgatggtggagtaggaggcaggtctccgcggaatgcttctagtcacaacagacacccttggccatgactttcatgtcttccaaattctg

SEQ ID NO: 836558 - DNA, 98 bp, Homo sapiens
ttacatggaggagacgtgtcgtcactatgtggcccatgtgaaggaacttagtgatttggcccgtgaccctccagcacaatgttctgcaggtccagttg

SEQ ID NO: 836559 - DNA, 99 bp, Homo sapiens
ggtatctactcgcgcatcaggcatgaagaagaatatctatggcaatatcgaggacctggaaacagagcaaatgcagcgttacaatcaaagacttattga

SEQ ID NO: 836560 - DNA, 100 bp, Homo sapiens
agaaggttggctttcacaagtacagtctacaaaaagacctgctagagccattattgccccttatgcaatgccaaccaaaaccatagaagtgttgcagttg

SEQ ID NO: 836561 - DNA, 100 bp, Homo sapiens
cgtggtagcggtgttgctgttgaaacaggaacagtctcttcaagtgatggagcaatggaccacagaaattctgcattgaaaaagttgggaaagaaaattg

SEQ ID NO: 836562 - DNA, 100 bp, Homo sapiens
ccgagcagattctacaacacatggtggaatgtatccgggaggtcaacgaggtcatccagaaaacgttgtgtgacgtgatcctcatggtccaggaaagaaa

SEQ ID NO: 836563 - DNA, 99 bp, Homo sapiens
gcccggccactgcggatccctgaaaccaagtgcagcagtaccgcgtcgccatgactgccaaggactgctccatcatgattgcactgtctccctgtctgc

SEQ ID NO: 836564 - DNA, 98 bp, Homo sapiens
tttgagaccctgttcgccaacacctgcgaggagtgtgggaagcccatcggctgtgactgcaaggtgattttgcacccagagtttctatcctccaccag

SEQ ID NO: 836565 - DNA, 115 bp, Homo sapiens
ctggtgccggcgtttgggctacggttgttgttggcgactgtgcttcaagcgccttagattgtaagcaaaagaaatcaaggtcaagatctggaagcaagaagaaaatgctaacatt

SEQ ID NO: 836566 - DNA, 98 bp, Homo sapiens
cacattaaactcactgactacggcatgtgtaaggagaacctgaagtctggagtgtatcctctcaaggaagcaagtggatgccctggggctgacaggaa

SEQ ID NO: 836567 - DNA, 100 bp, Homo sapiens
caggtcttgtagcagcgcctcctcgaattcctagaggacctgtgcaacaacctcttgaggatcgaatcttcactcccgctgtctcagcagtctacagcac

SEQ ID NO: 836568 - DNA, 99 bp, Homo sapiens
gctctatgccccctattccacacattttcagctgcaggtgttaagtgtgatgcttccataatacatttggatgctgtcagctaagttcacttctgaact

SEQ ID NO: 836569 - DNA, 100 bp, Homo sapiens
aggaatgctctgaaggacttactgaaagatatgaatcagagttcattggccaaggagtgccccctttcacaggagctccgagttgccacccaggaaaaag

SEQ ID NO: 836570 - DNA, 98 bp, Homo sapiens
gttgacgttgcaaaggcgcttaatcggcctccaacgtgtacttaaacttcacccttgtttagcccctattaaggttgctttggatgtaggaagaggcc

SEQ ID NO: 836571 - DNA, 98 bp, Homo sapiens
attatcatcattgctctttgtactaagaacctggaacaccctattcagtggctgtacatcacctgcaggttgctccttgagggcaggacagttcttat

SEQ ID NO: 836572 - DNA, 138 bp, Homo sapiens
ctacagatgcacatgttgaatggagctcttctggcattgctgtttcctgtggtaaacactcggctggaagccattaatttgctagaaccaatgacaaacgaccccgtgaactacgtgaggcaaggggcactcatagct

SEQ ID NO: 836573 - DNA, 98 bp, Homo sapiens
agcattagcatcattgcccaaggcctccctttttgtcgaagacggcccattgcagatgcaaaggctcctgagaagcgggcctcaccatccaagccagc

SEQ ID NO: 836574 - DNA, 100 bp, Homo sapiens
agcgagtgcgcctcctgcccgcggaccgcggcagcccagagcagctgccactggtgacatgccaacttaccagatccgagctcctactgctgctttgcca

SEQ ID NO: 836575 - DNA, 114 bp, Homo sapiens
ctcctctctcaagagaagctgcaagagcaacatctttcctcaccccaagcacgaggtagaactaacattgaacttagagagaaattcatcctaccagagggagcatcccaggga

SEQ ID NO: 836576 - DNA, 100 bp, Homo sapiens
cgcgcggaggctcgcgagatccgcatgaaggagctggagcggcagcagaaggagtaattacaagtagtggctacagccccagatcagcacatcagtattc

SEQ ID NO: 836577 - DNA, 99 bp, Homo sapiens
acgaaatggattggagtgaaccggagaccccgaaaacggaagcgcagggagaaggaagaggtgtttgaaaagggggacttgatctcatcttcatgccag

SEQ ID NO: 836578 - DNA, 100 bp, Homo sapiens
aagaattaaagggggaaaaagtaattcgaccagaatggattgtggaaagtggaaatttaatggagccaccatttcagaaccaaaagaaatttggaacaaa

SEQ ID NO: 836579 - DNA, 98 bp, Homo sapiens
tgcagcgaaggatcctggttggcagttcttatggagcttcaggctgcccggggaggcgcagaagattgatcgcatgatggaggctttcgcttctcgct

SEQ ID NO: 836580 - DNA, 100 bp, Homo sapiens
taggccaggctgatggagagctgaacattactcttccagaagaggaaagtaatggaccagtgaaggtgtggggaagcattaaaggactgactgaaggcct

SEQ ID NO: 836581 - DNA, 98 bp, Homo sapiens
gatcaaagaagagcagcccatggtcacggtctagatcacattctcgatccagaggaaggcgatactctcgctcacgcagcaggagcaggggacgaagg

SEQ ID NO: 836582 - DNA, 100 bp, Homo sapiens
cattggaccacacaaagtcttactgcaatgaacaggacttcagagaagagtttgggagtgtggcaaacaagatcctattacacatgatggcttcctgctt

SEQ ID NO: 836583 - DNA, 100 bp, Homo sapiens
agaacttcttggtggatatggcaaggttgtccccggttttaaccagtgaagttcatagtgttcgtgcaggacggcatcttgctaccaaattgaatatttt

SEQ ID NO: 836584 - DNA, 99 bp, Homo sapiens
cggctggcgccgctgcgcgcatgggcctgttcctggcccgcagccgccacctacccagtgaccatgatagtatgttttagctgttgggagctctgtgtt

SEQ ID NO: 836585 - DNA, 100 bp, Homo sapiens
gatggccactgttgtgacaactatcacaggattgtctacttcagcaatagcaactaatggatttgtaagaggagccttgggacaataatgcagtctgtgc

SEQ ID NO: 836586 - DNA, 98 bp, Homo sapiens
ctcatttctccagatgccaacattgacctcacaaccgagcaaattgaagagacgttaaaatacttccagaaactccagaaaatcttgccaaacttctg

SEQ ID NO: 836587 - DNA, 100 bp, Homo sapiens
tcagcacatggtgggggccacaccatttgccgtggccaggctagaggtctcctctgagcctccggcctccataagacccaaaacagatgacacctcttcc

SEQ ID NO: 836588 - DNA, 100 bp, Homo sapiens
gcctgatgtttctcatcacacaggaagacggtcatgctacaggaagacctcggactttgcatccagcagatgcatcagatgccagctctgaaaaactctt

SEQ ID NO: 836589 - DNA, 98 bp, Homo sapiens
ggtccaaaaaaactccagctgtgaaagcaacataaatggtaagagcttctgttcgtgtgcagggaaagcagctcacagacgccgttaaaaccagcttc

SEQ ID NO: 836590 - DNA, 99 bp, Homo sapiens
gactttcccgcgcaagggggacaggctggactgaaagaggacacgggaagaacaaagacttagactcgacgtactccggccttttctgtgtggtcatca

SEQ ID NO: 836591 - DNA, 100 bp, Homo sapiens
gaaaagcccccaaaagcagctattcaggtgatgatgaacagtctacacagatggctgcaagttgggaagatgataaagttacagaagcatcttcaaacag

SEQ ID NO: 836592 - DNA, 100 bp, Homo sapiens
gaaggggacttgggcccagtttatggcttccagtggaggcattttggggcagaatacagagatatggaatcaggtctggagactcaacagcaagaatatg

SEQ ID NO: 836593 - DNA, 135 bp, Homo sapiens
agataatgatgaagaagatccttcaaaattaaaagaggagcagcatggcatttcagtcactggtttgcagagtccaggcctcaaaacttccaatgtcaataattatagtaggtgttggaccagcagaatttgatg

SEQ ID NO: 836594 - DNA, 136 bp, Homo sapiens
gcggacggaaagtttatgccgacggaaagtttatgccgacggactgtgtccggcgatgggcacgggacggcagaacacaccggggagggcaggccagcgaaactgtcctacacggaggcagagggcgaacgatctg

SEQ ID NO: 836595 - DNA, 98 bp, Homo sapiens
tgggaacacttattctgttgtatagaatgaagtgttgcttgattctagaatcgtaagtccatggcctacatgcgcggcatgtactttcgcatgaagga

SEQ ID NO: 836596 - DNA, 98 bp, Homo sapiens
aacatttatcgccttgttagtctccacatccacctccgtgaaagcaatggcaccagcatgatatcattgatcattcctcccaaagaccagatttcacg

SEQ ID NO: 836597 - DNA, 100 bp, Homo sapiens
gtcattgacaaatgctctccacccctagagttcttggatgactctgactctcatttagaaatccaaaaggcttgcagccctgagtgatcgagagactcgg

SEQ ID NO: 836598 - DNA, 98 bp, Homo sapiens
ggccgcctgggaccttgcggtgaggctgcgcggggccgaggccgcctccgagcgccagactatgtcttcagcagtggtgcagttatatgcagcagatc

SEQ ID NO: 836599 - DNA, 100 bp, Homo sapiens
acttggagtagggagaatattcaggctcaacagggccagtcagacatacttcttccctattcacttgacggaccagcttctgcccagcgccatgttctat

SEQ ID NO: 836600 - DNA, 135 bp, Homo sapiens
cgctgaagtactactactgggcagtgaatcctcaggatcgaagtggtatcaccccaaaaggattaggaactggcaactttaaagtctcagttaaactcacaatctgtggagatcaccaaactacagacagaaaag

SEQ ID NO: 836601 - DNA, 100 bp, Homo sapiens
aagagttaaatgccctcaagtcgacaggggatgggaccctaggaggagtttgcaaaccaaagctgatcagcaagtcaaacagcaggaaatctaagtctcc

SEQ ID NO: 836602 - DNA, 100 bp, Homo sapiens
gcatatgtggttttacacatgatgatggatacatgatctgttgtgacaaatgcagcatgaagaatcacgagaagtcaaagaagcatcgggaaatggtggc

SEQ ID NO: 836603 - DNA, 98 bp, Homo sapiens
acagaaggcgtctcatggcgttggaataccggctctcagcggctgtgcccaaattgctgtctgctctctgtccagaagaaccaccagtccattcgtca

SEQ ID NO: 836604 - DNA, 99 bp, Homo sapiens
tatcattctcttcactcgagagatgaggacactgaaattcagagaggggaagtgatttgcctcagcttgtactgttctacatgaaacattttctcaaca

SEQ ID NO: 836605 - DNA, 99 bp, Homo sapiens
gatgataattgggcctccaagaaactactttgagagctaccttgccgttgcctccaccgtgccctccatgctgtgcctggtggccaacttcctgcttgt

SEQ ID NO: 836606 - DNA, 98 bp, Homo sapiens
aaaaatcaacagctgagggaacagcagaaagtccttcatgaaaccattaaagttttagaagatcggtctccatcatcaccagttccagtagtgaaaaa

SEQ ID NO: 836607 - DNA, 100 bp, Homo sapiens
gccacgtggatgtgaagatttcctctaaaagaattcatcctctgaatcctttatcagaaccacttcccacagacttggtgttatggtaaactgaggaaca

SEQ ID NO: 836608 - DNA, 100 bp, Homo sapiens
gcgagaggaggccgtccagcagatggcggatgccctgcagtacctgcagaaggtctctggagacatcttcagcaggtggccagaatggatttgtggccag

SEQ ID NO: 836609 - DNA, 99 bp, Homo sapiens
ctggttctgcctaattggcctgatatgccaagccctgtgctctgaagacggccacaagagaaggttcatgccccctgatgaccctcttggcagacatgg

SEQ ID NO: 836610 - DNA, 100 bp, Homo sapiens
cattgatacctttcctgagtgtagtacggaagaaactaattctgaagcaagcccttatagttgtgctgcagtggtgtttcaatcacaattttagtgttcg

SEQ ID NO: 836611 - DNA, 100 bp, Homo sapiens
tgacagcaagccctactgagcgtgctcccctctgagactggagtgagagggtcttctgccggctcagttcggggaagctgcaggagttcggcgtgggtga

SEQ ID NO: 836612 - DNA, 100 bp, Homo sapiens
aagtgttatttcagacatatttgatggaacaatcattagttcagtgcagtgtctgacttgtgacagggcagaactggggctcccttgcatcttccagtta

SEQ ID NO: 836613 - DNA, 99 bp, Homo sapiens
ataacaccctgtaacagctgaagccaaagccttggctggacagtcagtacgaatctgtaaaggccccagggctgtgttttcccgcatcttgctactgtt

SEQ ID NO: 836614 - DNA, 100 bp, Homo sapiens
ttggccatggccgcttccagaccatggaggagaagaaagcattcatgatggatgaactgcaaggatcagtgaaacagctgcaggcctttatggatgaaag

SEQ ID NO: 836615 - DNA, 98 bp, Homo sapiens
tggcagaagaagcaacacgcaaacgagagctgaggctaatgaaaaacagcttccgaagaactgaccattgctggcatgacgtttacaacttttgatct

SEQ ID NO: 836616 - DNA, 100 bp, Homo sapiens
tttgcttgcctccctcaatcctcatagcttctctttggggtaaatcttacaaaccattgtggttttatgggaggactacaaaaaaacaaaagcactggat

SEQ ID NO: 836617 - DNA, 100 bp, Homo sapiens
ctcgaccgctcgcgtcgcatttggccgcctccctaccggtactttttgatcatatgggatgtctgaagaaatatgaaactgtgcaagacattctgaaaga

SEQ ID NO: 836618 - DNA, 99 bp, Homo sapiens
atgagtcctctgaaatgaacagcatagtcccaaaccagttgtcttcctgcaacatggcttgctggcagattctagtaactgggtcacaaaccttgccaa

SEQ ID NO: 836619 - DNA, 100 bp, Homo sapiens
ctcaacttgaaggtcatttaaccaacctcagctttacaaaccctgaatttataactgagcagttgcagtggtgcagaatggctgacctcagtcttgcaga

SEQ ID NO: 836620 - DNA, 98 bp, Homo sapiens
tcatggctctcaaagaaccagcggacctgagtcttcaatgaaaggatgagcagcagcaagagatggccgcttctgccgccttcatagaccggcattac

SEQ ID NO: 836621 - DNA, 100 bp, Homo sapiens
ccgtttctggctccgggctgagcttcctggagaagaggaagccaacatggcagcagccttcggaggcttcctctacttcttcacctacatcccctacttc

SEQ ID NO: 836622 - DNA, 100 bp, Homo sapiens
atctaaaatacgaaggtttctggctgggagagttcccaggagaaaaaagcaaaaggctgcgctaccatgatgaagccgaccagagtgccctgcagcggat

SEQ ID NO: 836623 - DNA, 99 bp, Homo sapiens
gacaacaagaaattttgagaagagcagcaagagctttacctatctataccacatcagcttcaaaaacaatgtctcaggctgtgcagacaaacggaactc

SEQ ID NO: 836624 - DNA, 100 bp, Homo sapiens
ctcaactcaactatttctacatctctcctggagctttggggccatttggatcacacgatgttttttcaagattttagaccctttctaagtagcagtccac

SEQ ID NO: 836625 - DNA, 99 bp, Homo sapiens
ggacgtaggaagaagggcaggacctgggcggaggccgccaagacgattgtcactgctgttccaagggcacacgcagagggatttggaattcctggagag

SEQ ID NO: 836626 - DNA, 98 bp, Homo sapiens
ttctactataaatcccggttttggctgcttaaactgctgaactcccccactggaaaggattctgaaagaaatgaagtcagccctcagaaatgaagttg

SEQ ID NO: 836627 - DNA, 100 bp, Homo sapiens
taagagatagcaatgcaaccgcagccaagatgtctttagatgtaatgattgaactctacagaaggaacatctggttcgttccaccagtcataaaccagat

SEQ ID NO: 836628 - DNA, 98 bp, Homo sapiens
aacatcgccaagcagcaacagctggcagcatcacccccggacagcaagaatgaagtccctgaggtgaagaaagaggagactttgctggatctggactt

SEQ ID NO: 836629 - DNA, 100 bp, Homo sapiens
atgagtgagcttgaccagttacggcaggaggccgagcaacttaagaaccagattcgaatgcagacagacatgctgaactatctggaagtccactgaaaag

SEQ ID NO: 836630 - DNA, 101 bp, Homo sapiens
ttggatttagcagaaacaatggttgcatctgcagatggtttagtttatgaaccatgcattccactcttcgttcaacttgttttggagagattaactcgagg

SEQ ID NO: 836631 - DNA, 100 bp, Homo sapiens
agtcttctcatttaaaagctcacctgaggactcacactgaactattttggtggaaaactctctgctcaagggaaaatgccttggattgaatataatcatg

SEQ ID NO: 836632 - DNA, 100 bp, Homo sapiens
ccacgctgtccccgcagcccggcagcgacactcatccaagaggaaggatggccagtatcttttctaagttgctaactggccgcaatgcttctctgctgtt

SEQ ID NO: 836633 - DNA, 98 bp, Homo sapiens
aaaggaatgggtctgggaccttaacagggagccatggctcttgattgcggggactaactcctccgaccttcagcagatcctgagcctactcgaatcca

SEQ ID NO: 836634 - DNA, 100 bp, Homo sapiens
tcctgtacagcctgcagaactatgagcagcaccagcagtaagagggctccgaccacggcaacccagaggctgaagcaggactaccttcgcattaagaaag

SEQ ID NO: 836635 - DNA, 100 bp, Homo sapiens
agaatgtaagacaggaaaataattaaatattcttaccgaggcaggggcagccttccaccacggggagcccagctgtcagccgcctcacaggaagatgctg

SEQ ID NO: 836636 - DNA, 100 bp, Homo sapiens
gtaccaggcgaagctggccgagcaggctgagcgatacgacgatcttgtagaaaatttcagctgtagcccttggactagaagctgaaataacagaagctgt

SEQ ID NO: 836637 - DNA, 98 bp, Homo sapiens
tgactgatcaggctgaggccgagaagcagtacgaagactcctgccgcgtataccaggcatccagccccgatgagaaactggcgatggaatatgagagg

SEQ ID NO: 836638 - DNA, 98 bp, Homo sapiens
tccaggccatcaagggtttccgcaatgcccctgttgaagaaaaaatgctgggcatcttggtgcagcacaaagtccggagtggcgtctcgggcatcgtg

SEQ ID NO: 836639 - DNA, 100 bp, Homo sapiens
tggcacagtgggattgtggagacggtgtatcaccatacccaaaaacatgcattggtatagcccaccagaaaggacagccacagcatgttccgaagagatg

SEQ ID NO: 836640 - DNA, 100 bp, Homo sapiens
gctacttaatcctactcagaagaacttgtacagagatgtgatgttggagaactatagcaatctggttttcttgggcatttccggagagttcttttgaagt

SEQ ID NO: 836641 - DNA, 100 bp, Homo sapiens
aataaatctaagacaccagcaggtgtcaggcccatattgtgtctggagttggttcctgctggtgggttcgtggtctcgctgacttcaagaatggagctgc

SEQ ID NO: 836642 - DNA, 100 bp, Homo sapiens
aggctcagaggtgcttgtaccgtgatgtgatgctagagaacctggctctcatatcctcgctgggaaaaggggaagatagtgatgtactcagtataaatgc

SEQ ID NO: 836643 - DNA, 98 bp, Homo sapiens
cataagcacagattcgggtaacagccttccagaaaggaatagtgagaagagcaattccctggataaggtttattacagaggtcagctgggaagagcta

SEQ ID NO: 836644 - DNA, 100 bp, Homo sapiens
ctcagcattgccaacaggctctacgggacaaagacgatggcatttcatcagcctactcaatttgaagacattgaggatgaagacctttatgatgatccac

SEQ ID NO: 836645 - DNA, 100 bp, Homo sapiens
aggcctgcaggatttggtttcagcatgtccttctctgaatgatgaatacttttactactgtgacaacattaacggtaattttaaccaatcagatgacaac

SEQ ID NO: 836646 - DNA, 98 bp, Homo sapiens
cgaatatcgtcatcgttagaagataaactcatcctgaaagtcgctgttgttctcctgctgagcaagaatggaggccccactggtgagtctggatgaag

SEQ ID NO: 836647 - DNA, 98 bp, Homo sapiens
gctatggcatctataagacttcagggattacataaacctgtgtaccatgcactgaatggaatcgccacttatatatgtttcagttttgcttttgaaca

SEQ ID NO: 836648 - DNA, 98 bp, Homo sapiens
accgcgcctgctgccgggttgcgctccgtgcacctcttgcggctctttccaacaactgatcctgtgggtactttgctccaagttccagaacagatctc

SEQ ID NO: 836649 - DNA, 100 bp, Homo sapiens
ctctttccaacgctgtaaaaaaggacagaggctgttccctatggcagccatgaaccagagaatcagtcagagtgctccagtgaaacagccaccacccctg

SEQ ID NO: 836650 - DNA, 100 bp, Homo sapiens
atgcatggatggagacagaagctgtgaactaccatgacgaaacagactggcgatggcgtgaacgatgctcctgctctgaagaaagccgagattggcattg

SEQ ID NO: 836651 - DNA, 100 bp, Homo sapiens
aggtccaaatctcagcaacccctgtgcttctccccaggtccagccaatgcattcagaagccaaaatgggcgttacctactgcagagaaagttcagcaagc

SEQ ID NO: 836652 - DNA, 100 bp, Homo sapiens
tttttctccattgattatgatagcagtgggcttttcacagtgggctttactgtgttgaggtacagcagggaagaactggaaactcagagaaagaaactgc

SEQ ID NO: 836653 - DNA, 98 bp, Homo sapiens
tcgagaccacgcccggggcccaggaaggcaagaagcagtataagatgatctgccatgtgttcgagtcggaggatgatctcaaagatttcatgagacaa

SEQ ID NO: 836654 - DNA, 100 bp, Homo sapiens
aaggaggcagaggcacttatgcttgtcagtgtaaacaggaacatcgataagtagtgtaaaaacttgcacaatgaaatccgaagccaaggatggagaggag

SEQ ID NO: 836655 - DNA, 100 bp, Homo sapiens
ctttcgtccttaaatattgccgatacttgacctacgcaagagacaatgtcatgtgattcagcctaatatctcagtgagaacccagaagaaaggcggggac

SEQ ID NO: 836656 - DNA, 98 bp, Homo sapiens
aactcactggagccctgatctaggctcaaaccatcctcccacctcagcctcccaagtagctgggactaaggtctgagaaacatcttacctattacaac

SEQ ID NO: 836657 - DNA, 98 bp, Homo sapiens
gaaatgcgtgcactgcgtccctctagagcaagttgtcctcgaagaaggtacaattgcttttaaaaattgggttaaaacaggcacagaagtttacagac

SEQ ID NO: 836658 - DNA, 98 bp, Homo sapiens
gtgatgccattccagcactggactcatggaggctgagcatttattcagttacatggacacagaacagtatgaagaagcagtacgagactatgaaaaag

SEQ ID NO: 836659 - DNA, 99 bp, Homo sapiens
tggaggggaggtgtttttcctgtcgtacgtgggacaggccacgctgtccgtccgcagtaccgacgcctgcagggtctcccttgatctgagaatggctac

SEQ ID NO: 836660 - DNA, 99 bp, Homo sapiens
tacaggcagagagagaaacaggggagcaaggtgcaagagtccacaaagggacctgatgaagcgaagatcaaggactacattgagtgtgccgaaaaatta

SEQ ID NO: 836661 - DNA, 98 bp, Homo sapiens
gaggtgggggtgtttgtccagcgactccggggcctgatgaatgacatcgagctgccaggaactcgtggcatcccgggagccgccacagctggacgctg

SEQ ID NO: 836662 - DNA, 103 bp, Homo sapiens
gcagcagtagcggcagccctgaggacggccaaggggcagtttaagaaacagtcagtggccaacggtgtggagatatctgtgcctgtacccagcgatgccgact

SEQ ID NO: 836663 - DNA, 99 bp, Homo sapiens
ctaggtatccgcactgctcagggctacaggccaaatttgagcaccttaagagacttcaccaagaagagagaatgaagcttgaagaaaagagaagacttt

SEQ ID NO: 836664 - DNA, 98 bp, Homo sapiens
ccacctgtaagaacagaaaatcgtcttatagttgagaatttatcctcaagagtcagctggcagcaatgaagcttggagatacatgggtggctttgcaa

SEQ ID NO: 836665 - DNA, 100 bp, Homo sapiens
ttgacatctctgctgtagtggacaaagatttccttgataagatcacctgctgttaccagctaccacccataacaagaccacaagaccaaaaatgtcaatt

SEQ ID NO: 836666 - DNA, 98 bp, Homo sapiens
aggttcttttgcaacagttcaatacgggcgatgagagagcccagaagcgccagcctatccgcggctctgatgaagggtgtcaaattgagaaccaggta

SEQ ID NO: 836667 - DNA, 98 bp, Homo sapiens
agccatcgcctggccccggctctctggaccttgtctcgctcgggagcggaaacagcggcagccagaggaccccctggaacagctgtccctccacctac

SEQ ID NO: 836668 - DNA, 100 bp, Homo sapiens
tggaaaaggagttcgagcagatcgacaagtccgggagctgggcggccatttaccagatgcctggaatgatgtcgtcagtaatgcctggaatgatgatgtc

SEQ ID NO: 836669 - DNA, 99 bp, Homo sapiens
aatgaaccttgacccacaccaagcaaagtggaagatgctttctacaaaggtgaactcaggctgaatgaggaaaaattatggaagaaaagcagaacggtg

SEQ ID NO: 836670 - DNA, 98 bp, Homo sapiens
cagaaggcacccaacctgaagatcctaaacctttctggaaatgaatgcacatgagactcctaagcagccggtggtacgttttaaaaggaataaacatc

SEQ ID NO: 836671 - DNA, 100 bp, Homo sapiens
ttggcttatgagtggaacatggctagcaggaatgcttactgttgcgtggttcgttattaacaggcaagaaataccgcccacgaatggatcaggaagtctc

SEQ ID NO: 836672 - DNA, 100 bp, Homo sapiens
tcgactcagtcagtctcttggtttggtctctaaaagtaaaggaatgaagaacaaattttggtattttgagtttggcacatctgaaactttctcagccacc

SEQ ID NO: 836673 - DNA, 100 bp, Homo sapiens
atgcatgccagagacttcacagtttctgctctgacaccggcggtgggggccggagcgcaggacagcactgggcaaggctccggggagaaagcgggttgtc

SEQ ID NO: 836674 - DNA, 51 bp, Homo sapiens
cgaggactccagcacaccgaggcttcctgcctgacacagctcacttcaaga

SEQ ID NO: 836675 - DNA, 100 bp, Homo sapiens
gtttcaacatctgaatcagatggtacagattgctgcagtggaaaatcagttccagattaccaggaacaggacatcttcctctggagaaaagagactggat

SEQ ID NO: 836676 - DNA, 100 bp, Homo sapiens
ccgcgcgcagggcctgcagcgggagctggacggcgagcgcgagcggcgcgagaaacaccacacactggaagcagacgctgttcatgatggacgacccagt

SEQ ID NO: 836677 - DNA, 151 bp, Homo sapiens
cagctttccctcccccttctttcgatcagagatcggcggagaccctcgaagtgcgcaaacttgacactcaccctgaccgtaccatcttcctcatgggaccagtgaaacagctgaagcgaatgtttgagcctactcgtttgattgcaactat

SEQ ID NO: 836678 - DNA, 75 bp, Homo sapiens
ctgggctgggaacccgcggtggagcgggacacgaacgtgggactttgaacatgtcggggatcgccctcagcagac

SEQ ID NO: 836679 - DNA, 98 bp, Homo sapiens
tcacaaagattgcctgcagtttattgatggagatcttataacaatttttgatagttctgacctttcctttgcaattcagtgcagtaggatactgaaac

SEQ ID NO: 836680 - DNA, 100 bp, Homo sapiens
agaaacagatgaatctaaggaggaagctaaagatgatggtgccaaagaatcaataactgctcctctggtgcaagtgtggtagctattgacaacaaaatcg

SEQ ID NO: 836681 - DNA, 99 bp, Homo sapiens
ggtgggcaacttacccgagaacgtgcgggaagagaagatcatcgagcatttcaaacggctattcagcttgaccctgaagaaactcgtcatgctaaaaga

SEQ ID NO: 836682 - DNA, 98 bp, Homo sapiens
gaaacaacacaaaaccctatctcaagaacttgttaacctccggggagagctaggttcttcattagaagctgtaaccacctgtgaactatgtaaagaga

SEQ ID NO: 836683 - DNA, 98 bp, Homo sapiens
caggtgcatttcacagcactctgggcgaaaattggatgtgaaaatgaagccagaccgagggagttctgggaaatcgttcattcatttacagatgaaca

SEQ ID NO: 836684 - DNA, 99 bp, Homo sapiens
cccaaccctgccagctgagcaaaggacagtcttacagcgtcaatgtcaccttcaccagcatcttaaaatccttgcacgtttgatgactgccaaattctt

SEQ ID NO: 836685 - DNA, 100 bp, Homo sapiens
aatcagaaatcaaagactttgaatgtgcctaaagagcatgaagacaatatatttacacctaaaccaacactctttggtatttgaagtataccatacaact

SEQ ID NO: 836686 - DNA, 98 bp, Homo sapiens
ggctccgctcggccggcgcggcgcagaagaaacccgcggcgaccacagccaaagcgggcgatgataatgaagataattcaaatgatgggacccagcca

SEQ ID NO: 836687 - DNA, 98 bp, Homo sapiens
gagcagcgaggcactcatcctgcacgccggcgagtgccagcgggcatcttgacccagccgaaaaagttgaagatgctcaccccaagttatggtgtgct

SEQ ID NO: 836688 - DNA, 145 bp, Homo sapiens
tactgggctccatcctgagctccatggagaagccacccagcctcggtgaccaggagactcggcgcaaggcccgagtgggcatccccaccatcagatggtgcggggcagagggggactacaacgtcatggtgatggagctgctggg

SEQ ID NO: 836689 - DNA, 98 bp, Homo sapiens
ttttgccaccaatcccttcgatcaggatgttggggctatctgatgggttagagtgcctttgagaagaaatcagtggatactggatttgctcctgtcaa

SEQ ID NO: 836690 - DNA, 133 bp, Homo sapiens
tccattgaggaaatgcgaaaggttgtatgtgatcagaagctgcgtcccaacatccccaactggtggcagagttatgagagacctgtcggccatggagcctaatgatagtaccagtaccgctgtggaggagcct

SEQ ID NO: 836691 - DNA, 98 bp, Homo sapiens
ccatcatggacctgacccaactgatacagccccaggagaggtccggacactgtttgtcagcggcctccctgtggacattaaacccagagaactctact

SEQ ID NO: 836692 - DNA, 100 bp, Homo sapiens
ggttcataagaagtgccataaactcgtcacaattgaatgtgggcggcattctttgccacagctgagtccagattggcaggtggactacgagtcatacaca

SEQ ID NO: 836693 - DNA, 98 bp, Homo sapiens
gctgccatggagcccagcagcaagggaccagttactctccacaagaaaattcacacaaccacagtgctcttcatagttcaaattcacattcttctaat

SEQ ID NO: 836694 - DNA, 100 bp, Homo sapiens
atgctaatttgggaaaaagctccaggattctgacagggatgttgcgaagattgaaaaggaagatcaggccaaccccaaagaagaagtgaccaaggaggag

SEQ ID NO: 836695 - DNA, 101 bp, Homo sapiens
caccatgtcagacgcagccgtagacaccagctccgaaatcaccaccaaggaaggtgctcgggtcttcggggcactgggtcccatcggtccctcctcacctg

SEQ ID NO: 836696 - DNA, 99 bp, Homo sapiens
tatggctcaacccaaacagctgaggccaaaaagagaggaggaagaagatttcataaggtgaacatgattaaagatgatgggacagttattcatttcaac

SEQ ID NO: 836697 - DNA, 100 bp, Homo sapiens
ggccttggcacagcatcaaaccaagttataccttctcaacaccaccaagcttaggtgctagtgcttggaaacaagagagatcttcctaatgccttggatg

SEQ ID NO: 836698 - DNA, 100 bp, Homo sapiens
ctaaagctggagtattttgagattggagaattaaggtcttagaaaaataccccaatacacccatgagtcataaagaaattcttcaagttatccagagaga

SEQ ID NO: 836699 - DNA, 100 bp, Homo sapiens
caggaattcaggcagccctcttctctccccgaaggcctgccagcacccctggagaagcgcgttaaggagctggctcagataaagactatttcctgattgt

SEQ ID NO: 836700 - DNA, 100 bp, Homo sapiens
cggtactgtgcactattctttcccaggaaccattggataaggataaagctttccagagtgttgaatcttccaccagaaaacttgatcacatcaatatctg

SEQ ID NO: 836701 - DNA, 100 bp, Homo sapiens
aaagaacaagttgatgcttcaaattgtcttggtaataatagacgtggatggaatacaactagccagagatattccaatgtcatccagccatccagtttct

SEQ ID NO: 836702 - DNA, 100 bp, Homo sapiens
ggcacctaacgtgctgtgcgtagctgctcctttggttgaatccccaggcccttgttggggcacaaggtggcagttaagggaagaaagtcggaggctggct

SEQ ID NO: 836703 - DNA, 100 bp, Homo sapiens
gaggagcattccaggatcttaaagaactagagagactcaattctgtggtgttcttggtcacacatttatggagtttctgaagggcagtggagattactgc

SEQ ID NO: 836704 - DNA, 98 bp, Homo sapiens
atcaaccagctgacgccggagcagctcctaacccaggccgaaagggaatatgtctttaaaaatttgcctttcaaagtataacggaggagcagttctat

SEQ ID NO: 836705 - DNA, 98 bp, Homo sapiens
ggggctcacttttcttcagctccttctcatctcgtccttgccaagaggtaattgaggagattgaggaaatgatgcagaactccccagaccctgaggaa

SEQ ID NO: 836706 - DNA, 100 bp, Homo sapiens
accgaggccacgtggacccggccaacgacacatttgacattgatccgatggtggttactgatggagtcttgcttagtcgcccaagctggagtagtgtggc

SEQ ID NO: 836707 - DNA, 100 bp, Homo sapiens
gcgcgaggccgcagagctaaatgggggcctctccagggagtgctctgttcacggctccatcgctgttaaatggctattcaagtggacaagttcaactttg

SEQ ID NO: 836708 - DNA, 100 bp, Homo sapiens
accatggcctcctccgaggtggcgcggcacctgactgggctggcttagatgaagatgaagatgcacatgtctgggaggataattgggatgatgacaatgt

SEQ ID NO: 836709 - DNA, 100 bp, Homo sapiens
tgctgttgaagaagggagccaacaaaaattgttttttctacctgttgacgtgtcaagcactaactcaaactgaaaccgtgtcagttcagtcttcggtatt

SEQ ID NO: 836710 - DNA, 99 bp, Homo sapiens
tcgccgccctcgccaccgctcccggccgccgcgctccggtacacacaggaacctagaaagattgtacaatgaatggtgattctcgtgctgcggtggtga

SEQ ID NO: 836711 - DNA, 99 bp, Homo sapiens
tgagactttcagaaacttattcacagttaccaaagctggtccaaaagcctgccaacccctgggaattctacattgggacccagttgatggaaagactaa

SEQ ID NO: 836712 - DNA, 104 bp, Homo sapiens
gcaagcagctaagctaacctctgaccccactgatattcctgtggtgtgtctagaatcagataatgggtcccctggttgctattatttgtgacatacttggagag

SEQ ID NO: 836713 - DNA, 109 bp, Homo sapiens
cgagagtgttgggaagaggagcgcgtccccggggaaatgagccctgtatgatgagattcgtcagtttcgcaaggcctgtggggaggctcatcttaaaactatattagcg

SEQ ID NO: 836714 - DNA, 100 bp, Homo sapiens
ggaaagcatctattgtgaaaaacctaaaggataccttagtcagattgttcgatatggtgagattccagctgaattaagggcggcggccactgaccaccgg

SEQ ID NO: 836715 - DNA, 98 bp, Homo sapiens
gcgttggaggccaccgtttccagggtcctatccttcccccaaagctggagcaactctggtcgtgtacaaggacttgctagtgctgtttggtggctgga

SEQ ID NO: 836716 - DNA, 98 bp, Homo sapiens
aagccatgccgtcgcctcagtccagctctgtcatcactcaggcaccttccaccaaccgccagatcgggattcaggagcagttccagaaaaatcccgac

SEQ ID NO: 836717 - DNA, 137 bp, Homo sapiens
tttgctaggcaaacaaagatttgaacattctgcagcattttttcttttagctggttgcctcagagatgcaattgaggcttttgatgaggccattgctgaacttgatacactgaatgaagactcatacaaagacagca

SEQ ID NO: 836718 - DNA, 100 bp, Homo sapiens
agaaactgattcagagacccagaaaatggtgcttaccaactacatgttccctcaacagccaaggactgaggatggataaggaatcaatttcagagaatcc

SEQ ID NO: 836719 - DNA, 100 bp, Homo sapiens
atgtcaaatttgtcagcaactcgtcagatttggattcctagacttgcccaagcacttctgtctgctgtagcagatgtgagactttactcattaatgaagc

SEQ ID NO: 836720 - DNA, 100 bp, Homo sapiens
aaatcacctatgtttacagcgacagttgacgaaggatcagagattggtgtattcgggcagactgcttcccgatcatctgcagctgaaagacattctcaga

SEQ ID NO: 836721 - DNA, 122 bp, Homo sapiens
cttccggccaacttccattgaacttcccagcactcgaaagggaccgaaatggagagcaaaggttcgatacaagaggctgttttcctagcgtggcttgctgcctttggtaagaacatgtcgtc

SEQ ID NO: 836722 - DNA, 100 bp, Homo sapiens
tgaccttcatacctgatgaattaaaaggtgctccatacttgcttgcagtgcctacgtggctctggctttgggtgataacctcatggctttgaatcatgca

SEQ ID NO: 836723 - DNA, 99 bp, Homo sapiens
ctacctgctgggtagcgttgctgcctttggctcctgggcttctcggatcccccctctctccagaatttctcacaccattttgctggtacagcctaccaa

SEQ ID NO: 836724 - DNA, 99 bp, Homo sapiens
gaaaacaagaggtgagtgaggcaactgaaaactgttcttggacctgcggtgctatagagcagaatgatcaagtctcggcctctggattatacctttgtt

SEQ ID NO: 836725 - DNA, 100 bp, Homo sapiens
ttcttgagacttatgggtgcaggaaagacgttggaacttgccaggaatccagcaatgatgcaggagatgatgaggaaccaggaccgagctttgagcaacc

SEQ ID NO: 836726 - DNA, 98 bp, Homo sapiens
gggcgtgcctgccttcatcacaggtaaagagatcaggacagcaagcaagacttcagtagcaaaccactacagtcagtacctggactcgcctctaccca

SEQ ID NO: 836727 - DNA, 99 bp, Homo sapiens
gaagcaatgtttgaacaaactcgaagaacagctgtggaaagaagttgcaaaacactgggtcctcgatgggcttcctggaatattggtgtgtttatttgc

SEQ ID NO: 836728 - DNA, 98 bp, Homo sapiens
cgcattgctcccgccgggctgtagctgagcgcggagcccgtggggaccggtgagtgtgaccgcaacaagggaaaacatggcttatactgtggaatgcc

SEQ ID NO: 836729 - DNA, 100 bp, Homo sapiens
taatggcagcatttgtctcgatattctaagatcacagtggtcgcctgctttaacaatttctaaagtatacaacatggacagctttgctgagtcggtcccg

SEQ ID NO: 836730 - DNA, 98 bp, Homo sapiens
attctttcgagtcagtgcaatcatcgtctatcttctctgctgggtagttgggtctctggatattcttggcagccctgcaagcctggtgagaagcatcg

SEQ ID NO: 836731 - DNA, 100 bp, Homo sapiens
ttggaatcctcctatacgaaattgtcacctatgggaaaattccctacccaggagggaatcctatggctgtggtcagcaaacaagtaaatatggaactggc

SEQ ID NO: 836732 - DNA, 100 bp, Homo sapiens
tccactcttcggcgaagctttacgttcatgtaaacagcatgacgtgaggccgtggatgcaggcattaagacgctgaccggaaaggagattgagattgaca

SEQ ID NO: 836733 - DNA, 100 bp, Homo sapiens
caatgcctttgttcacctgattgaaattggaaatggtcttgtcacctttcaacttcgaggactggaattccgagttttgctacttgagaagatagaacat

SEQ ID NO: 836734 - DNA, 98 bp, Homo sapiens
atgaactacgagctgttggcatccttggcactattcctgatcagagaactccagttgcttcaacacacagtatcagtagtgcagccaccccagatcga

SEQ ID NO: 836735 - DNA, 101 bp, Homo sapiens
cttcaccctggcatcccatctccgaactgtatgcagagccccatcagaccaggtgcgcgcaggcgctgctggagcacggggcctcggtgcagcgcgtgggc

SEQ ID NO: 836736 - DNA, 100 bp, Homo sapiens
tcctcaaagggaagatcagaccagactcatcgaggcctgaattgctccagcctatgtccctgggccagctgcagtcagcaagaggtgtggcatgtttggg

SEQ ID NO: 836737 - DNA, 98 bp, Homo sapiens
aatggaaagaagaattttcatcatcccaatctgactcatctcctgagatccatactagtagtagtgacgatgaggggttctgatcccactgcattctc

SEQ ID NO: 836738 - DNA, 98 bp, Homo sapiens
atcctggagacagtcactgctgtggctgcgggaaagcctctctcttgcccaaaccacgatgggaatacaagcttaccattgttcagaagcaaacagtt

SEQ ID NO: 836739 - DNA, 100 bp, Homo sapiens
catatagtaagactgctaagcagtgcctggaggagatatctgagggagacgtggtgggcggtccttcctgtgacacgacccttgagtgacagttctattt

SEQ ID NO: 836740 - DNA, 99 bp, Homo sapiens
ggtccggaagcacatcaacagagcggaagaaaaaatgctgggcatcttggtgcagcacaaagtccggagtggcgtctcgggcatcgtgggcatggaggt

SEQ ID NO: 836741 - DNA, 100 bp, Homo sapiens
aaatatccaaggccacaaacagttaacagattgtatctcggaatttttgaagcttgtgaaaaaacagttgaagaagcacctttcaggagaggagcatgag

SEQ ID NO: 836742 - DNA, 100 bp, Homo sapiens
cggcagtttcgtgagcgacctcagcagatttgtcccatcagatgaaaagaagaaacaaggttgtcaacgagaaaatgaaactctaatacaaagaagaaaa

SEQ ID NO: 836743 - DNA, 100 bp, Homo sapiens
tgggagccttggtcctgagcagccaacacaccagcccagacagctgcaagtcaccatggacgctgaaggtgacttgcttttggagggcttcaacaactac

SEQ ID NO: 836744 - DNA, 100 bp, Homo sapiens
ggtttctgaaaagcaggttgaagtcaaagaagggcttgttccggtttcagaggatcctgtagccataaagattgcagattgaagagggcagtaaagccgc

SEQ ID NO: 836745 - DNA, 98 bp, Homo sapiens
gaatatcttcccttacaagggttatatatggaattatggtaccctccctcaggaaagtccatcagcttgataatggaggagaacaatgactccacgga

SEQ ID NO: 836746 - DNA, 98 bp, Homo sapiens
tgttgctggttctgctgcttctgggccctacgcgcggcttgcgcgttatggaattccactgaaagacggagatgagaaaacagatgaagaagcagagg

SEQ ID NO: 836747 - DNA, 98 bp, Homo sapiens
gcagccaaggaaggaggcctgcaaattcatgacaggattattgagatgattttccctttccactggccatgcccgtatgttcctctctgcccactggc

SEQ ID NO: 836748 - DNA, 100 bp, Homo sapiens
tcacttttgagtgcaactgccttccaggtagacgttacatccaagaggaaataatccaggcaaggaagcacaagctgatcaagatgtgtagttctgtggc

SEQ ID NO: 836749 - DNA, 60 bp, Homo sapiens
atcgctctcggcctcggcctcggcctccgacacggcaaggggagagccagttgcgcagag

SEQ ID NO: 836750 - DNA, 98 bp, Homo sapiens
ggggaggaaccagttggtggcctgggcagcctgctggaccctgccaagaagtcgcccatcgcagcagctcggcatctctgccggccttgccacaaccg

SEQ ID NO: 836751 - DNA, 100 bp, Homo sapiens
tttggcagctccagttttcaactatgctgacagcatttatcttcagatactatggtatctcttgggtcacagattgatttacagaagaagaagcggcgag

SEQ ID NO: 836752 - DNA, 101 bp, Homo sapiens
ggtgctaaacagcaacgtgccactggagacccgggtgataaaagaaaatgtggctgaagttacccgaagttcagcttgcagtgtaattcagaagagttaag

SEQ ID NO: 836753 - DNA, 99 bp, Homo sapiens
gacaggccaagtgcaggggccagaagacaaagtcaattccattggtgaactatgacaatgtagtggacacaggttctgaaacagatgaggaagacaagc

SEQ ID NO: 836754 - DNA, 100 bp, Homo sapiens
acctccgcctcccaggctcaagtgatctgctcagcttcccgagtaactggggctacagtttggtgccctggttgtcagatgttggaaagcagtaggacgg

SEQ ID NO: 836755 - DNA, 100 bp, Homo sapiens
ggagagaaggaaagtcaatcgtaggaagaacacagtacaggtgtaattgaaaagtgatcctctcttcagagatgtcaaaaacaaacaaatccaagtctgg

SEQ ID NO: 836756 - DNA, 101 bp, Homo sapiens
ttcctaatggaaaatcacatacctttccaaattatatccagatcgagagacagaagattctgaaagggttcaatgaaatgagagtcatcttggacaatgag

SEQ ID NO: 836757 - DNA, 99 bp, Homo sapiens
ttaatccacttacgttcagggttatcattcatagaattaaacaaccaccatgtcgagcaaaaaggcaaagaccaagaccaccaagaagcgccctcagcg

SEQ ID NO: 836758 - DNA, 100 bp, Homo sapiens
caccaagttcacggccaacgccttggcactaggtgcacgatctgattttctggagagatgtgaagaagactgggtttgtctttggcaccacgctgatcat

SEQ ID NO: 836759 - DNA, 99 bp, Homo sapiens
gtgactccgttatctgcaggtattgggagatgcacagctaagatgccaggaccacctggaagcctagaaatgctgtcgcctggttgggcccggaaatgg

SEQ ID NO: 836760 - DNA, 123 bp, Homo sapiens
ctagtgaaattcgacaggactggaaacctacattccttagtaatgaagagtttacacaattaatgttagaggtgctccaatattacctcaaggattacagcctgaacaacagctacagttgtg

SEQ ID NO: 836761 - DNA, 100 bp, Homo sapiens
agggcagagataaagagaaaagagaaaaggagaaggataaagggaaggacaaggaattacataacatcaaacgtggatttgaaaacaatttgtagccaac

SEQ ID NO: 836762 - DNA, 100 bp, Homo sapiens
cgacggcttcgccatcgccagcttcagcaccctggaggccctggagggatgatggcgccacttcctcagtttcggcactcaagcgcctggaacggagtca

SEQ ID NO: 836763 - DNA, 135 bp, Homo sapiens
agtcctgagttacagaaacagattcgacaactggagagccacctgagccttggaagaaagcattcaaggaatgacagcattacctccagatatagaaagaccctataaagcagaacctttggtgtgtggcacgtc

SEQ ID NO: 836764 - DNA, 98 bp, Homo sapiens
tccgttgggtccggccgctctgcgggactctgaggaaaagctcgcaccaggaggagtatttgaagacttctgagcggaggagtcgcatgtcagagctg

SEQ ID NO: 836765 - DNA, 99 bp, Homo sapiens
ctggagcctgctcagaagaacctgtacagagaggtgatgctggagaactacaggaacgtggtctccctggatcatggagtgcatcggatcctttctata

SEQ ID NO: 836766 - DNA, 100 bp, Homo sapiens
aacctcagaggacaacgaagtgttcggagaatccagctttggcggttgcaattaaaacatgtaaaaactgtacttcggacagcgtgagagagaaatttct

SEQ ID NO: 836767 - DNA, 100 bp, Homo sapiens
ggaaggcaccaaggagaaatcaggacccacctctctgcctctgggcaaactgttttggaaaaagattacttctctaacaggatcaccagtttgctccaca

SEQ ID NO: 836768 - DNA, 98 bp, Homo sapiens
gatttccacagaaggactgggatgatacaccttttccacagggaattgagttggtcttgcagaaacagtccattgtgaccttcagcctgtgggccccg

SEQ ID NO: 836769 - DNA, 100 bp, Homo sapiens
ccagatgctaagaaagttgctcctcaaaatgactgagtggttctgattaaagcccagatttcagagctggcatttcctattacagcatctcagaagatag

SEQ ID NO: 836770 - DNA, 100 bp, Homo sapiens
gctcctgatgcctcagggcctgaagcaaaagtccaggaggaagagcatgaccttgttgacgatgacatcaccactggccatggtaggggaggagtgtgta

SEQ ID NO: 836771 - DNA, 100 bp, Homo sapiens
aaagggcagagcaaagactccagtaacactcaagcaaagaagagttgagcacaatcagattcctgacattcagacaactgacttgtaactgacttataac

SEQ ID NO: 836772 - DNA, 100 bp, Homo sapiens
gccgggcccgggcatggtggtctggggcaacgcggaagcgagtgctaacattcagggatgtggctgtagaattctccccagaagagtgggaatgcctgga

SEQ ID NO: 836773 - DNA, 100 bp, Homo sapiens
ccgcgtgctcccaacgtcgccccggtttgacgcacacggcaccaaactgttgacatgatgaaagaagcattagaaaaacttcagctcaatatagtagaga

SEQ ID NO: 836774 - DNA, 100 bp, Homo sapiens
atgtcagaaaataagggagttcctctgcatgggggtgatgaagacagaccctttccaggacagctaacccccgcatcggtgacgtgatccagaagctggc

SEQ ID NO: 836775 - DNA, 98 bp, Homo sapiens
ccggcggcattttgaggcggtcctcctagcggcctggacccagatgatgtggtaccagttggccaaagaagagcctggtgttggtgcatgtgctttgg

SEQ ID NO: 836776 - DNA, 100 bp, Homo sapiens
ctggagattgacgcagagtgggcggcggtggtgggagaaactctggaaaccttgacaatggcaacagtgtgtctcttcagcgcacaacctcagctggcag

SEQ ID NO: 836777 - DNA, 100 bp, Homo sapiens
tgacgaagatcttatctgccctatttgcagtggagtcttggaggagccagtacagcttcagcgcctgctcctggtcatcactaaccagatttacttggag

SEQ ID NO: 836778 - DNA, 100 bp, Homo sapiens
acagagcggcatagaggtggcgagcaggcggggaggaaagctgctcggagaggtgggagccagctgtcaccactgactaaagaagagaaaactgcggcag

SEQ ID NO: 836779 - DNA, 98 bp, Homo sapiens
ttcctgaagatgtttacagtgcagtcttatcgaaggatgtgcatgaaggacagcctcttctcaatgtggcttttcatggcctgccactgaaaatcaag

SEQ ID NO: 836780 - DNA, 100 bp, Homo sapiens
ccctgattaaacccttggaaaaattcagaaaagagcaacttggagctgtaaaggatgtaaatgaagaccctggagaagatgtggccctcctctctgttag

SEQ ID NO: 836781 - DNA, 98 bp, Homo sapiens
cgggagaggtaaacagaacaccaggacatcccagagtctgggaaatgaaagacttccgagtgcaggaactcccactggctcgtattaagaagattatg

SEQ ID NO: 836782 - DNA, 99 bp, Homo sapiens
cagaatccagagaccacatttgaagtatatgttgaagtggcctatcccaggacaggtggcactctttcaggtactaggttttgacaagcttgcatcatg

SEQ ID NO: 836783 - DNA, 110 bp, Homo sapiens
ctcagctgtataatcaaacctccaatccacctggctctccgggtgagaggatcacactgctccggcaggtagatgagaactggtacgaagggaggatcccggggacatcc

SEQ ID NO: 836784 - DNA, 100 bp, Homo sapiens
aaaccagaactcttgaattcagaaggtgactgtggccttcccccagatgtacctaatgcccagccagctttggaaggccgtacaagttttcccgaggata

SEQ ID NO: 836785 - DNA, 100 bp, Homo sapiens
accttgtggccctgggctttaccatctttgtggctgtgcttgccaggcctggctccaatgcctgggaaccactcacctccttctgtgccatgaggccacc

SEQ ID NO: 836786 - DNA, 100 bp, Homo sapiens
aaccaattgatattaaatgtagtgttctcaattctgaggagattcattatgtcattaaacagagccttagatcgtctgtcagtgaaggaattcgggcagt

SEQ ID NO: 836787 - DNA, 100 bp, Homo sapiens
agcatgggctcgcctgtcaacgcgcaggcagtcgatgatgtgaagaaaggttacatcaaagcagaagaaaagtcctatcaattacagaagctatacgaac

SEQ ID NO: 836788 - DNA, 100 bp, Homo sapiens
attttccagcccgtgtctgcaggtctctgctggtggttctgaagccaaacctctgatcttcacatttgtccccactgtcagaagactaccaacccatact

SEQ ID NO: 836789 - DNA, 100 bp, Homo sapiens
ggtttttatcaccacacgactgggtatatttcctctctgtcactcagcctctgaagaagcttcgggttcagactcaggcagtcagtcggaaagtgagcag

SEQ ID NO: 836790 - DNA, 100 bp, Homo sapiens
agccccgctaccggactacatgtcggaggagaagctgcaggagaaaggggtgagcccctccagactccgaataggagatcaagagtttgattcattgcct

SEQ ID NO: 836791 - DNA, 99 bp, Homo sapiens
atttcaaaggaattgtttgaaaccaaacatgttatccagtaatggagcctctaaggtggatattccatctattataaccaagaaactattaaaagcagc

SEQ ID NO: 836792 - DNA, 98 bp, Homo sapiens
gattcgtgaccctcagcgccggtgcatgtcgataaacatgagttctgctggcgctgatgggagaaaagcgatgagaagatgtgacggactcattgact

SEQ ID NO: 836793 - DNA, 98 bp, Homo sapiens
cggtccctgtgacctgtggagacacggccagatctgccctccagttatcaatactctggctgaccatcatcatcgtgggactgactttggtggaagtc

SEQ ID NO: 836794 - DNA, 100 bp, Homo sapiens
ggaaagccaaatggagctcagaaagctgtatggacctctgtgtggagccttgcaaaggaccatcgcatgaaacttatgcaacaacaacaggaagtggctg

SEQ ID NO: 836795 - DNA, 98 bp, Homo sapiens
ggattccagactcgtgggggaaaggctgagctagccaacatggaagaagatgccagatcagctggagtcgctacctttgttctccaagaagaatttga

SEQ ID NO: 836796 - DNA, 98 bp, Homo sapiens
gaactgcctgattacaggagctttaacagacgccctcctgcaaaacggcccaactacgttaagcttggcactctggcacctttctgctgtccctggga

SEQ ID NO: 836797 - DNA, 99 bp, Homo sapiens
gaaactgttgacttcaaagataaattggaagaaacgaaaggtcagatcaacaactcaattaaggatctcacagatgaaagcataacccctactgtagaa

SEQ ID NO: 836798 - DNA, 100 bp, Homo sapiens
aactggagggggacacctatgaccgggtcctctgggctctcgagcattgggcctgaaaagggctggggtccgccgggccctccatgaccccctggaaaaa

SEQ ID NO: 836799 - DNA, 100 bp, Homo sapiens
taaaagtggaaagatgacggatgaaaagaatgaacactgtccttcaaaacgatcctggctggtgccttgttagaagaagcggagcaattgctagaccgag

SEQ ID NO: 836800 - DNA, 100 bp, Homo sapiens
caagaagtcctctcctgggtccttcagtattaccaggtccctgaaaagctaccccccaaagtcctggagctgtgttgtgagtacagaggtggtcagagcc

SEQ ID NO: 836801 - DNA, 98 bp, Homo sapiens
cgagggcaagtactgcttcaccatgtaataataacataaatgcagctacagctgtggctctacagaccattcctcaagaattttgtatccaaggccca

SEQ ID NO: 836802 - DNA, 100 bp, Homo sapiens
ctgagtatgatgcggtggtgataggagcagggtgctccagctgatgaacctaacagattctcgtttggcccaggcgggtaatgagaagctagagttggcc

SEQ ID NO: 836803 - DNA, 100 bp, Homo sapiens
aggagagccgcgttctaggattcggcattgttctggaatcaccttcctcagatactcaccccacacagaccgcgtttctctccagtgtcgacctacacac

SEQ ID NO: 836804 - DNA, 98 bp, Homo sapiens
gctcatcccagaagaaaagaaaccaacacctgttccgaaaaaagtggaagcaccaccacccaaagacactcgcctatggggacatgaaccacgagtgg

SEQ ID NO: 836805 - DNA, 134 bp, Homo sapiens
agacacctttgaatcaaactgacaataccgtgacagtcatgctgaaacctgcccacagcagaggagcacctgtcagattgccttctctcagcacagcaattttatggacctggtacagttcttcgtgactttct

SEQ ID NO: 836806 - DNA, 100 bp, Homo sapiens
catcaagttgcaagagattccaaccttccagccccttttgaaagttccaggaagaagcttagcccaggaaaaacaaagaccagttggacccagagatgcc

SEQ ID NO: 836807 - DNA, 100 bp, Homo sapiens
tgccagtattatgatgctcaatgtcaagtcatctttggctcaaacagagtgcaagacgatgacttgcaaaatgtcgcagctggaacgcaacatagagacc

SEQ ID NO: 836808 - DNA, 98 bp, Homo sapiens
tgaagctgccgccgttgcctccgccgccaagagtgagcgagcggacccgcgatgggaagcaggagctggccaacagctcggatgcgaccctcccagac

SEQ ID NO: 836809 - DNA, 100 bp, Homo sapiens
ggctgtgctggagatgcggaagggccacgttgaacagacattagatcagcaacagttcttcacagaggaagaactaaaagaatatgaaaatattattgct

SEQ ID NO: 836810 - DNA, 98 bp, Homo sapiens
gcattctaaagtgaatgactccaacgaattaggtggtctgactaccagtggctctgcagaggttgaatataagaaaggctttgaagagagtaagaccc

SEQ ID NO: 836811 - DNA, 98 bp, Homo sapiens
cggccgccgcctccgcctcccaggatgagctgaagttgtggaaagtaaaaatgtagccctaccaaaaggaactattgtactggcttctccaggctgga

SEQ ID NO: 836812 - DNA, 100 bp, Homo sapiens
gagtatcaaggcaaaacggagaagcacgagtcccagaaagcagggaaaaggggtcgaggccggtcctgacctgttacaatgaagactgacttgctatgtg

SEQ ID NO: 836813 - DNA, 100 bp, Homo sapiens
gtgaagacattaaatctgaaggtgacactcagtccaattaaaactgatctgataagacctcagatcagacagagttatagctgaggtggtaccagtttaa

SEQ ID NO: 836814 - DNA, 100 bp, Homo sapiens
cttctataatgatgacatctttaactttaattatgcccaagccaaagctgcaacaggcaataccagtgagggcgaagagatcctgaacaactacctccag

SEQ ID NO: 836815 - DNA, 98 bp, Homo sapiens
ccacggccatcctcactcaggactccctgcagatgttcctgccccaggttatcaatactctggctgaccatcatcatcgtgggactgactttggtgga

SEQ ID NO: 836816 - DNA, 100 bp, Homo sapiens
atatctagcgtggtccggaatggaaaagtgggactggatgctacaaactgtttgaggataactgacttaaaatctggaaatgtgcaggataattgctgcc

SEQ ID NO: 836817 - DNA, 98 bp, Homo sapiens
gcttggcccttcatggaacctgtgaagagaacagaagctccaggatattatgaagttataaggttccccatgggagacctttgagaaggcaagtttga

SEQ ID NO: 836818 - DNA, 99 bp, Homo sapiens
ggtaccctcgctcctcgatcgaggacgacttcaactatggcagcagcgtggcctccgccaccgtgcacatccgaatggtgtgaaaaactcaaattactg

SEQ ID NO: 836819 - DNA, 100 bp, Homo sapiens
gagctgaggccggcttgcattccagtggcaatcggcgtgagttctgcttatatgagatgatatcatcaagttgaatcgaaaggaagggaagaagcagaat

SEQ ID NO: 836820 - DNA, 100 bp, Homo sapiens
aaatggctgaaggaaaacctccttatgctgatatacatccaatgaggctccatggctacatggaaaacaagcctctgggacttcagatcttcattgggac

SEQ ID NO: 836821 - DNA, 100 bp, Homo sapiens
cagggagtcgccgctggagaggggctcggcgcccggcggggactgcagatgccctccaaatccttggttatggaatatttggctcatcccagtacactcg

SEQ ID NO: 836822 - DNA, 100 bp, Homo sapiens
atgtgagctgtgtggatgaaatcctaaaagaatccttccatcagtggaactgctatttaacctggatcgcattactaccgttgaacacttactcaagtca

SEQ ID NO: 836823 - DNA, 100 bp, Homo sapiens
ttgggatcctttatcctggtcatcttctatttccaaaaggctgtggccaggccagctgggctcggggagcgccagcctgagaggagcgcgtgagcgtcgc

SEQ ID NO: 836824 - DNA, 56 bp, Homo sapiens
ctggaccacaaaccgctgccagaaaaaggttggcgatttgaaggagctgcagacac

SEQ ID NO: 836825 - DNA, 98 bp, Homo sapiens
tattttcaagtgcccccacatacacccgtgatctttggtgaagctggaggtcgcacactgttcaggctgcaccaagtgtactttgatgcacccacctg

SEQ ID NO: 836826 - DNA, 100 bp, Homo sapiens
gtgcgagaaattgctcaggactttaaaacagatctgcgcttccagagcgcagctatcggtgctttgcaggtcagccgtcagatccaggagcatgagcagg

SEQ ID NO: 836827 - DNA, 100 bp, Homo sapiens
tttggggaccagagatggacggtcactcagcctatggagggtctccaactgaattccttgaagagaaaatggcctaccaggaatacccaaatagccagaa

SEQ ID NO: 836828 - DNA, 112 bp, Homo sapiens
caagcccgacgtggccttcctcgtggccgcctccttcttcctcatcgtggcagctctggagattatgcatgatgtgataaagaaggtcaagaagaagggggaatggaaggtg

SEQ ID NO: 836829 - DNA, 124 bp, Homo sapiens
agcctcgctggcggatgctctacctctgcacatcgcacccaggtggttcagctcgcatagtgcacacgacggttctgccctttatattaatcgagatgaggacatcgcaccatcagtatcccag

SEQ ID NO: 836830 - DNA, 100 bp, Homo sapiens
ccagtacagatagaagaactaatagagaaacctggaggcatcattgtacgatggtgtaaggttcgtgctggccgtgggcagcgccgtctttgatgccatg

SEQ ID NO: 836831 - DNA, 99 bp, Homo sapiens
actcgaacacttgcaggataattacgcagttgcgattcttgcagcatcaaatggctatggcagcagcagcagcacaaacagctcagctacatcatcatc

SEQ ID NO: 836832 - DNA, 99 bp, Homo sapiens
aaagctgaggtccagatgaaagagaagtttctggtcactccccaggattatgcgcggttgcaaaggagtttggcttccaaaataatggcttctcggttt

SEQ ID NO: 836833 - DNA, 100 bp, Homo sapiens
gcttacctgatgagtcaggatgctccgggccgttgctccagggagaactgcaaatatcttcatccacccccacatttaaaaacgcagttggagataaatg

SEQ ID NO: 836834 - DNA, 100 bp, Homo sapiens
gctgagccgagccgagccgagctgggggcgcagagcgcgggaggcggcggcggcgcggagcccagatcacttatttgagacatagtcctcaagtggaatt

SEQ ID NO: 836835 - DNA, 100 bp, Homo sapiens
aaggctcagacatctgattgctgacctgttgcttctagaactgctggagttactgtttgacaagtttaatgctgtagccgctgcacactctgtggtcctg

SEQ ID NO: 836836 - DNA, 98 bp, Homo sapiens
ggagaaccagtaccggctgacctcgctgtacgccgagcacccaggcgactgcctcatcttcaagggcagctgcaatgactctccgcacggtattattg

SEQ ID NO: 836837 - DNA, 99 bp, Homo sapiens
acagactgtttgacttagaatcttcccttttttactccattcaagagcagcattcataaatttccagaaagacgcttctggggccagcttatggttccc

SEQ ID NO: 836838 - DNA, 100 bp, Homo sapiens
gggaaactaggtcgatggtcggcggcgcccggatgggcagctgaggattgattatgtcaagtggccaggcatggaaggagcaaagaaggttcactctgac

SEQ ID NO: 836839 - DNA, 100 bp, Homo sapiens
tagtcacagtgttgctgcaacatagagctgacattaactgtcaggtgaccatagccgatgactactcagatccctttgatgccaagaatgatctcaagag

SEQ ID NO: 836840 - DNA, 100 bp, Homo sapiens
gactccagaaaattcagcaaagaagaagcttttaagaaaactcttctacagaaattactctcaaagaaacctgaggatcgacctaacacatctgaaatac

SEQ ID NO: 836841 - DNA, 100 bp, Homo sapiens
ccgcgggcagggggcggcggaccgcggggcgctcatctggctctgctacgacgcgctggtgcacttcgcgctggatccattccaaggagcacttcaagga

SEQ ID NO: 836842 - DNA, 142 bp, Homo sapiens
cagcagttcctggattcccctgccaaggcactggccaaatctgaagaagattacctggtcatgatcattgtccgtgtgctacagttgaaactccagcagcgccggacccgggaagaactggtgagccaagggatcatgccgc

SEQ ID NO: 836843 - DNA, 99 bp, Homo sapiens
gagtgtgagcaagaatttcctgcggttcctctaggaaaattcctttgtgcagatcaggcccgtggattggagctgctaagccgcacatctcttgagacc

SEQ ID NO: 836844 - DNA, 100 bp, Homo sapiens
gtcgccttctcggagatcatgagcatgatctggaagcggctcaatgaccatggcaagaactggcgtcacgtttacaagggccagccaagtctcgggatgg

SEQ ID NO: 836845 - DNA, 99 bp, Homo sapiens
aaccaccatttattcagcactcagaatgctccaggcagtgtaatctcattccatcttcattcatgactccagacagttaatgctgcggacaacaaacaa

SEQ ID NO: 836846 - DNA, 98 bp, Homo sapiens
atggcaccggccctcgcacgctcaactcctgctcctcctcttcgcaatgagtaaacgacgcagtatgatctcgtgaaatcttgagagaaactgaatga

SEQ ID NO: 836847 - DNA, 99 bp, Homo sapiens
cacttctgggacgcacagagaccgtgaagattccaagttcaggagaactcgaccgaatctcactctgttgcccggtctggagtgcactggcacaatctt

SEQ ID NO: 836848 - DNA, 100 bp, Homo sapiens
gagagagctgtggcagtggttgtggatcccattcagagtgtaaaaggaaagatgctgtcacaatgggctctgtttttggccgaagtactgcactgaacat

SEQ ID NO: 836849 - DNA, 98 bp, Homo sapiens
tttttttatcgctgccttgatatacacttttcaaaatgctttggtgggaagaagtagaggactgttatgttttctggcaaaggccttcctgcatttat

SEQ ID NO: 836850 - DNA, 100 bp, Homo sapiens
tggaggagacgtgtcgtcactatgtggcccatgtgaaggtgattggcgaggacaacgtggcagtcccctcacacctttataaggtaatcctggcccgcag

SEQ ID NO: 836851 - DNA, 121 bp, Homo sapiens
agcaactcaactaatccagaaaattatcaacattctcacagacaagcatggagcctggggaaattctgcagtgaggattacttccttaggatagattgccagaagtggagttactgggtca

SEQ ID NO: 836852 - DNA, 98 bp, Homo sapiens
ataaatatcgtgtagaaacgtgctgtgtaattgctcgtcaagcagtaaaaacacccccccggaggttacccactgtgatggttcgctctcctatagat

SEQ ID NO: 836853 - DNA, 100 bp, Homo sapiens
atcttctaattttcattccttcaaaggttatgaagacagtatggagtttccagaccatagtagacatttgctacagtgtctgagcgagcagagacaccag

SEQ ID NO: 836854 - DNA, 100 bp, Homo sapiens
caatatataggcatctccgaagatttattttgtcagtgattgtcactgctgttccaagggcacacgcagagggatttggaattcctggagagttgccttt

SEQ ID NO: 836855 - DNA, 100 bp, Homo sapiens
gtgaaaggacctctccagcaatgattacttcagaattaccagtgttacaaatgctgtccagtttcaacgagtggttttggcaggacaggttctggttacc

SEQ ID NO: 836856 - DNA, 100 bp, Homo sapiens
ttccttctttctacaaaattggatctaagcgggccaactttgatgaagaaaatgccagaagatggctgtgccacccacgtatgccgatcttggcaaatct

SEQ ID NO: 836857 - DNA, 99 bp, Homo sapiens
tgggagatggaacatagcacgtttctctctggcctggtactggctacccttctctcgcaaggaagctgaatatggtgggcatgatcagatagatttgta

SEQ ID NO: 836858 - DNA, 98 bp, Homo sapiens
gatgaggtggcccaagagatggttgcacagagcattgaggatcaccatcaggaagtgattggtttctgcagagagaatggtttccatggcttggttgc

SEQ ID NO: 836859 - DNA, 100 bp, Homo sapiens
cgcgtcccaggaggagcaggacgaggagatttttggaagtaccagcacagtgacgcttcctgaaaccttgttgtttgtgtcaacgctggatggaagtttg

SEQ ID NO: 836860 - DNA, 100 bp, Homo sapiens
gcgccgggtataaggagcaaagggcaggagcgcttcacctctatgacacgattgtattatcgggatgcctctgcctgtgttattatgtttgacgttacca

SEQ ID NO: 836861 - DNA, 100 bp, Homo sapiens
ttccgctgaatattcaatctacatcgcttgcgagccttccccttcagcgaacaatgaaatacatgtggccattaggagaagaaagctatgctgcaggaaa

SEQ ID NO: 836862 - DNA, 99 bp, Homo sapiens
atacaggagacaccaaagaagagaaagacaaggatgaccaggaatgggaaagccccaggggcaagctctgtgtgattgattggaagacatcagagaaac

SEQ ID NO: 836863 - DNA, 100 bp, Homo sapiens
tacagaaccacagtttatcatcccttcctgtttctttacctccagaaagaagaatattggccccttgaattctggaagttcattgaagagtctgaaatta

SEQ ID NO: 836864 - DNA, 140 bp, Homo sapiens
cagaagccagatcagcaaatggaggaacctcggaggtgaccagaaagatctccatcggttgcccaaggctgtctttgatttgcgtcagtgtcatcgacagatgcagcagcaggcggctactgcacaagctgcagcagctg

SEQ ID NO: 836865 - DNA, 98 bp, Homo sapiens
aaaaacaaacgtcttgaagactgaaagcctgttattcaaagaggttagcagtagactgttggaagtaaggctggacgtaaagaaagaagtgatgcact

SEQ ID NO: 836866 - DNA, 100 bp, Homo sapiens
tgctggtgtggtcttcttgctgcactctcactccttcttgatgccaggaggataagatcaatgccctcattaaagcagccggtgtaaatgttgagccttt

SEQ ID NO: 836867 - DNA, 100 bp, Homo sapiens
ttttaaccaaggcagttggtggaaatgagttctaccaagatgtaaaggactggtggctcttcgggttctatttctgtatgcccttggtgtgcactgcgat

SEQ ID NO: 836868 - DNA, 98 bp, Homo sapiens
agcctctggcagggttgcagtttttcaacttgtatcttcattgccagggagaaataaacaggaatttgtttcctcggagtctgtcactccagaagata

SEQ ID NO: 836869 - DNA, 100 bp, Homo sapiens
ataattatcacaattactgatgggagcaagttgactaccaccagtggagtccaggatgagtacctccaaatggtctggttgtatactgtggaacaattgt

SEQ ID NO: 836870 - DNA, 100 bp, Homo sapiens
cacaggtcctaccgggccaagctgcctctgaggatatttctggctgtcgccaactccatggctttccaggtgaggagatatcttctaaaagtgaactgga

SEQ ID NO: 836871 - DNA, 100 bp, Homo sapiens
cgaggggatgctacagagaatcaatgctttcattgaaaaacaggtcatggaaaatggaagatttgcaaaatacaaatattttacccatgtcatgatcaat

SEQ ID NO: 836872 - DNA, 100 bp, Homo sapiens
tagcagcgggtgacatggaaggggcagtacaagcttacgtctctgctcttcagtacaatccttttcaccagtgatcattaaagaatgggcagcttacaaa

SEQ ID NO: 836873 - DNA, 100 bp, Homo sapiens
ttctgtgttcatggtggtgagattactcaacttctagttccacctgaaaactgtagtgagatcatgaatcagacagataaaaatcaacaagaaatcccat

SEQ ID NO: 836874 - DNA, 100 bp, Homo sapiens
ggtggcaaggtcaccatggatgggcgagtcaacgggggcctcaacctctccagagccattggatcatatccagagtcccaaacatttctgtacatctgct

SEQ ID NO: 836875 - DNA, 98 bp, Homo sapiens
cggctgcaggactgggcacagcatgagatccaaaggcagggcaaggaaactggccacaagaggtcagtcctctcagcagccatcaaactactgaatgc

SEQ ID NO: 836876 - DNA, 99 bp, Homo sapiens
cggacggcacaccctacgttaccgtgctcaagactggcacagcctccaggttggcgggctcatctgcgctggggttctgtgcgccatgggcatcatcat

SEQ ID NO: 836877 - DNA, 98 bp, Homo sapiens
tatccttagtcttttatgtggagctctgaatttaattcgaggctttcatgctatagaaagtctcctgcaggtcgatactgcaagcaacttgaactctg

SEQ ID NO: 836878 - DNA, 100 bp, Homo sapiens
aaacagcatgcagatgtggaagtcatactcacagaaaagaaaggctggggcttgagagctgccaaagaccttccttctaaagaatatcccgtggtcccca

SEQ ID NO: 836879 - DNA, 99 bp, Homo sapiens
gaattgaagcctataatatttgtcacctgaactacttcacattttccccaatatatggcttgtctggagcgggaaagactactgtgagcatggccttgg

SEQ ID NO: 836880 - DNA, 100 bp, Homo sapiens
agcacatcaggtccacccatctggccgggcagtaccttcttcaagagaaatggagcccttctccaagcgactgcatttgcctccagacttgtcagacaca

SEQ ID NO: 836881 - DNA, 100 bp, Homo sapiens
ctaatgggactgggccaagtgagctgaaactgatgtaaatgtggtcatgcttcaggaatcccaagtttgtgaaaagcgtgccagccaacaattctgttac

SEQ ID NO: 836882 - DNA, 100 bp, Homo sapiens
ggagaatatttaatggaaaatcgcttggttaaaacctgacacttttaacaggctgtggatgagatgaacggaaaggagctcaatggaaaacaaatttatg

SEQ ID NO: 836883 - DNA, 98 bp, Homo sapiens
tgttaaagtaacagatgatttagttagactcttgaagacaactctgaaaagtgggctgtgactcccgatgcaggggatggtgtggtcaagccctcgtc

SEQ ID NO: 836884 - DNA, 100 bp, Homo sapiens
atcaagactagtgtgagcaacaaaaaggagcgatatatagttatcagcaaagtagatgaagaagaacgcaaaagaagagagcagcagaaacatgccaaag

SEQ ID NO: 836885 - DNA, 100 bp, Homo sapiens
aagagttcaactttcccagaagttgttctaacgctgcctttgctttaaaacagtattacttgcggttttactgcaatcacagcaaccaaccccatttggc

SEQ ID NO: 836886 - DNA, 100 bp, Homo sapiens
gttcagctacagcttccttaatggtccttcttctgtcaacagattcagtccccagtcctccttctctgagcagacctctcatccgcagcatatatctgct

SEQ ID NO: 836887 - DNA, 100 bp, Homo sapiens
cgcggaaccatggccgatgggggcgagggcgaagacgagatccagttcctgcgaactgtgagaagccttataagtgctcatgggagggatgtgagtggcg

SEQ ID NO: 836888 - DNA, 98 bp, Homo sapiens
ctggaaccatctcagaagccatgcccctcaggctggaacttgccctgtctcctcgcagatgagtctctagtgatccctgaaaagttccagcatatttt

SEQ ID NO: 836889 - DNA, 121 bp, Homo sapiens
gtcaatctgaaagtcccagccagccaagtgacgctgacattaaggaccagccagaaaatggcttaccttacaaatttgaagtacagcagatgttagaagaacctcagtggggattagtatt

SEQ ID NO: 836890 - DNA, 51 bp, Homo sapiens
ttgaaacacaaatggtttttggtcacccttgcaattatggatatttaaaag

SEQ ID NO: 836891 - DNA, 100 bp, Homo sapiens
ggctaaatcaactggatatgatccagttaaactttttaccaaggcaggtggacacgaacaccaaaaatgtctttgggcaaccgaggttgagggcatccct

SEQ ID NO: 836892 - DNA, 99 bp, Homo sapiens
ggcggcttgtccctgtttcgccacagttcctaccttatgagctcggttttcttatgcttataagagtggaacaggagctcattttgcagctctcaagct

SEQ ID NO: 836893 - DNA, 98 bp, Homo sapiens
cgaacagagccgggagttcaagaagaacactccagaggctgaagccgacgtagcttctctgaacagacgcatccagctggttgaggaagagttggatc

SEQ ID NO: 836894 - DNA, 100 bp, Homo sapiens
aatcaggtgtagttctgctgaatcctattcctaagcctatttgatggctttgcagatggactaggagttgctgaagctatttcatatgtggatcctcagt

SEQ ID NO: 836895 - DNA, 100 bp, Homo sapiens
cagccccccaaaagactggtgggacgccggagacccttctctccccatcagatacaaatacttggaacagttggcagctgaggagcacgagaaggagctg

SEQ ID NO: 836896 - DNA, 100 bp, Homo sapiens
cgaattcagaaggatatcgacgtcgtgatccagaagtccagagctgaggactgcctgtttgcaggaagcctgatgttactttggattttatgcttccaag

SEQ ID NO: 836897 - DNA, 100 bp, Homo sapiens
gataactatgtttatgaacataccctgacttctttagctggagaaaaaccgactcttggtgcagtgctccagcagaatccctcagtgttggagccagcag

SEQ ID NO: 836898 - DNA, 100 bp, Homo sapiens
gattggctaaagaaattgactctccttattcctgagattcaagatggaaaaggtgatgtaaccattacaaatgatggtgctaccattctgaaacaaatgc

SEQ ID NO: 836899 - DNA, 98 bp, Homo sapiens
cctgtgaagagtgcctgaagaacgtctccgtaaccatgtgcgaccgaaaggccgtgatcaaaaatgcggacatgtcggaagagatgcaacaggactcg

SEQ ID NO: 836900 - DNA, 98 bp, Homo sapiens
ttccttcttggggaaactcggagggaccctggcccggaggaagaaagccaaggagggtgacgcatccaaagaagacattgacactgctatgaaattag

SEQ ID NO: 836901 - DNA, 100 bp, Homo sapiens
ttgaatgttgaagatgtccttaccagctttgacaatacaggaaatgtttgctgagcagcaagtctctgctgacatcagatgattatgagctgggagcagg

SEQ ID NO: 836902 - DNA, 99 bp, Homo sapiens
atcgggatttacgtggagatcaagcgcagcgatgcagtagccatcctaatggatatgggttggttcctgttttctatttggaactttaaaaaaaattaa

SEQ ID NO: 836903 - DNA, 98 bp, Homo sapiens
gcaagtgatgatggaatcttggccaaaatcgtgaattccttgtgtggatatcagatccggatggaatctcgagcttgtgaatctaccaggttactcta

SEQ ID NO: 836904 - DNA, 98 bp, Homo sapiens
ccgctacaacgcctacccctcagagcaggagaagctgagcctttctggacagaccaacctgtcagtgctgcaagttttgagcaaaattttggactgtg

SEQ ID NO: 836905 - DNA, 98 bp, Homo sapiens
agcaccctgatcttccacttcaccttcatcagaactgagattttgtttctgtaagcagtcctgagggcaattttaaaatatccaagttccaagaatta

SEQ ID NO: 836906 - DNA, 99 bp, Homo sapiens
agattcgggactccctctggctttcacaattgcccatgagctaggacacagaatttaattccttttcgaccttcaatccagttccaaggactccacggg

SEQ ID NO: 836907 - DNA, 130 bp, Homo sapiens
gttgcgtgccctacttcaaggataagggcgacagcaacagctctgccggctggaaggtgtttaagatagaagtgctaatgaatggaagaaaacattttgttgaaaagagatacagcgaatttcatgcttt

SEQ ID NO: 836908 - DNA, 100 bp, Homo sapiens
tgggatgttatctggcgtattcaccacaggaatcatgactcctggagaacggatcaagtgcttattacaggaacttgctactaccagcaccatgccctac

SEQ ID NO: 836909 - DNA, 99 bp, Homo sapiens
aggaattagaaggtgacgaggagggagaagacgaggatgatgcggaaattaaccccaagtcctattttgtaacggattatgatccaaccattgaagatt

SEQ ID NO: 836910 - DNA, 98 bp, Homo sapiens
ggaccggagactttggggcctaactagttaaaaagccttcatcagttactggaggtactacttgctctgttggacaaagacgtcccagaaaattgtaa

SEQ ID NO: 836911 - DNA, 100 bp, Homo sapiens
cgaagcgggctgtgtgccccttctccacccagaggaatatgatgaagaatgggctaagaaaattcagagtgaaaagtttcgctggcataactctcagtgg

SEQ ID NO: 836912 - DNA, 101 bp, Homo sapiens
ctccttgcccgtgaccgtcgctagaactcagttgtgcgttgcggccagtcgccactgctgaaatcatcgagttccccatcctaaagctaaatggccggacc

SEQ ID NO: 836913 - DNA, 100 bp, Homo sapiens
ctttctggacagaccaacctgtcagtgctgcaaaattctatgattgaagcctctaaatgaattgtgcaggagagggagtttgtaaacaactgactacaga

SEQ ID NO: 836914 - DNA, 100 bp, Homo sapiens
atgggagagaatgaagcaagtttacctaacacgtctttgcaagggctttttcaggagaagtcagcaaagcaatgccacctactcctgtcctcgtcagaag

SEQ ID NO: 836915 - DNA, 100 bp, Homo sapiens
gacgttgtcctgaatcgcagaagctgtatggcagctaccctgaggatcattgaagagaacatccctgaggggctaagccagctctaccataaccagagtc

SEQ ID NO: 836916 - DNA, 100 bp, Homo sapiens
agagttggctgtgcagatccagaagattatgtttgagaccttcaacaccccggccatgtacgtggccatccaggccgtgctgtccctctacgcctctggg

SEQ ID NO: 836917 - DNA, 101 bp, Homo sapiens
gcagggcaagctgtgcgacgtgaccctcaagttcttctcggtgtccaaatggggattattgttccaatagacggtttcagagaaaacagcatgcagatgtg

SEQ ID NO: 836918 - DNA, 98 bp, Homo sapiens
aagcaagtggctgttcttgtagttttctgcatagataagcttgttgattggtgctggctgtgccctctaccccttgggctgggacagtgaggaagtcc

SEQ ID NO: 836919 - DNA, 100 bp, Homo sapiens
ttggagttcgcctcagacgcggtggagccgccggagtctgagaaggagggccgtgtagccatcacccgagtggccaaccttctgctgtgtatgtatgcca

SEQ ID NO: 836920 - DNA, 99 bp, Homo sapiens
gacaactaaagctgcgggatacaaagtcagcccaggcagacctccagattcctataggcaatggaaactgatctcaattcccaggacagaaaggacctg

SEQ ID NO: 836921 - DNA, 98 bp, Homo sapiens
gccccactgccgccggggattccaggatactggtatcgggatgacacaggaagagctggtgtccaacctggggacgattgccagatcggggtcaaagg

SEQ ID NO: 836922 - DNA, 100 bp, Homo sapiens
atttggggacatgcaaatagaactggcaagatatatcaagaccagcgcccactacgaggaaaataaatctcgaaaagctacagctccacactaagaggaa

SEQ ID NO: 836923 - DNA, 100 bp, Homo sapiens
agcctctccctcttcctctgctcccgcggggtctgtgctgagaataatggcccggttggcccgggacgagtggaatggtgctggagaatctggtaaaagc

SEQ ID NO: 836924 - DNA, 99 bp, Homo sapiens
cccgctctgctgtgggcgctgctggcgctctggctgtgctgcgcggcccccgcgcatgagatccgtgctcagctcacagagcagatgaaatgcctggac

SEQ ID NO: 836925 - DNA, 98 bp, Homo sapiens
cttacaaaaatcctcaattctgatgaacatgcagtggtcatatcttctgccaagagaaggaagccaacatccttttggagccatgaatattgtccgaa

SEQ ID NO: 836926 - DNA, 98 bp, Homo sapiens
ccagctctgcctggagcactcgctggccgactgcgccgagctgcacgtcctcgaacgcgaggccaacagccccggtgaatcagctcccggccgacttt

SEQ ID NO: 836927 - DNA, 98 bp, Homo sapiens
aaacttgctgcggttgctcaaggaaattatgatgtgatgaccccaatggttgatatacttatgaaactttttcgaaatatggtgaatgtgaagatgcc

SEQ ID NO: 836928 - DNA, 98 bp, Homo sapiens
tttagcgatcgggagacagccgggcgctgcaagctcaacatgaactctgctcctacattcatgcattttcctccaaaaggcagacctaagagagctga

SEQ ID NO: 836929 - DNA, 99 bp, Homo sapiens
tcagtccgccgctcaccccgcggccgcaccttcccgccttctcagcattgttggaaactgttactacatttttactggaaatactattattcattttaa

SEQ ID NO: 836930 - DNA, 99 bp, Homo sapiens
cactctgtgctagtgatgtgagcaaatgcctcattcaggtcatttggatccaggattcctagcaagtgacaaaacatctggcaatgcgccactcaatga

SEQ ID NO: 836931 - DNA, 100 bp, Homo sapiens
gctggactcagctgggaaagcctgtggtctgtggacggtctgctgaatgcccataggaggaatgcccacgtgcccctttggaactatgcagtgctccgtg

SEQ ID NO: 836932 - DNA, 100 bp, Homo sapiens
acctcagcgacctgccatcctacacaactcatggcaccgtgcacgtggtcgtcaacaaccaggtcataaagaactcccccgtgaagacgtttgctagtcc

SEQ ID NO: 836933 - DNA, 137 bp, Homo sapiens
tataaagataagattcctttactacagcagccaaaacgagaagaagaagaagtgttagaccaggccagtcggatgatgattctgggtcagcttcaggctctggatctggttcgagttctggaagcagtagtgatgga

SEQ ID NO: 836934 - DNA, 98 bp, Homo sapiens
caggattcaaaaagtttaggactgctaaggtcctcgatgggcttcctggaatattggtgtgtttatttgcatcagatgtgctggaattcatagaaatc

SEQ ID NO: 836935 - DNA, 99 bp, Homo sapiens
ccggaccgggccgagccgggccgcccgggcgcagtctttaaccatggcgtccctcttcaagaagaaaaccgtggatgaaagatgaggtctatcttaatc

SEQ ID NO: 836936 - DNA, 100 bp, Homo sapiens
ataaaatccattgctgctaagtactccggttcccagcttctgcaaaagatatgctatgactgtctggtactttgatgctgaagaaagggcagaagccaaa

SEQ ID NO: 836937 - DNA, 98 bp, Homo sapiens
tatcttctggaaatgagtcttcaagctctgtaagacatatacagtactgtagtcttgaagagaaaattcagtctccaacagaagaaacagaaatcttt

SEQ ID NO: 836938 - DNA, 100 bp, Homo sapiens
agccttcgccttatcccagatgatctatccctcctgaaactctaccctccaggggatgaggaaggtgctcatctgccggaactaccgtggcgacgtggac

SEQ ID NO: 836939 - DNA, 99 bp, Homo sapiens
caagatctctcctggagggataagccagtaaactgtttcacgttagacctgtaacccaaggagatgtgtatagagctgaaactgaagaaattcctaaaa

SEQ ID NO: 836940 - DNA, 100 bp, Homo sapiens
ctcactgaatgggcagctgatggttggagttgatgtcagtggggccaggagaaaaggttctgcaggacgatgagttcacctgtgacctcttccgattcct

SEQ ID NO: 836941 - DNA, 98 bp, Homo sapiens
caacagcatctccaagcaatgttcattttactccgcccagaagacaacatcaggctgataatgttaattcaagactctcgaagagaagcttcagtgca

SEQ ID NO: 836942 - DNA, 98 bp, Homo sapiens
tgcgttcggtgtgccgtgggtccgcgctgcttccacccaacttcctgttagggaaatctgcttcgccactgaaggtactctgcaccccagaaggaata

SEQ ID NO: 836943 - DNA, 100 bp, Homo sapiens
atctactgggggacatcctgttgtgaagatgcaggacagctggagcacacattgatgaatcattgttccctgcagctaatatgaatgaacacttatcaag

SEQ ID NO: 836944 - DNA, 100 bp, Homo sapiens
atcgagcaaaactttgggcttgcaacttttgttaccaaaggaatcaggacttcctccgtcaggcagctggcaggacctgaaggatcacatgcgagaagct

SEQ ID NO: 836945 - DNA, 100 bp, Homo sapiens
aatttttcgcaagcaagcagtcttcctattagaaggaaagaccacagcaagattctttcattcgtctcctcctagcctgggggaccaggctcgaactgac

SEQ ID NO: 836946 - DNA, 117 bp, Homo sapiens
gccgactggatggcaactctgccggagagcatgcacagcatccccctcaccaatttagccattccaggaataggaggccttcaagattttgtgctgaaatctgcaacactgtgtagc

SEQ ID NO: 836947 - DNA, 98 bp, Homo sapiens
aactatgccaatttcctgaaggaccaaggtcggaacaaggaagcgatctaccactacagaacagctctcaaatggggaaattgaggcagagaagccaa

SEQ ID NO: 836948 - DNA, 98 bp, Homo sapiens
aaacgcagaaggactgcctcactgagcaaccaagaattttggtgaccaatttggatttccatgatgagcagaagcgccggaacctcaatggaacactt

SEQ ID NO: 836949 - DNA, 100 bp, Homo sapiens
tcaaaccaaagggccaatacctggatatggttctgattcaagaaatccatggtgaaaggtttggattcctatgaagaaaaggaggataaagtgatcaagg

SEQ ID NO: 836950 - DNA, 99 bp, Homo sapiens
cttagcaaagtaacgcaggaacagaaaaccaaacaccacatgttgtctcttagaagtgggagctgaacgatgtcatgtggcctgtgttttggaccgtgg

SEQ ID NO: 836951 - DNA, 99 bp, Homo sapiens
agcatcgcacaggatgccctgcacatccccaggctcctggagccagaaggtcatagatgagatagcagggaacttcagcagagcagttcatggtttgca

SEQ ID NO: 836952 - DNA, 99 bp, Homo sapiens
gatctctggtgagacatttttcttccttctgtcacatcacacccaatggtactactacaaacgggagatcctggaacgggtggatggccggcgactcgt

SEQ ID NO: 836953 - DNA, 100 bp, Homo sapiens
cagccctaacggtggtggagaacccaaaggccattgcaaaccaaccctgggctcagaaacttatgtttaacagtccaggttttgtagaatatgtggtgga

SEQ ID NO: 836954 - DNA, 99 bp, Homo sapiens
tccgtgcagcccaacttccagcaggacaagttacctggtgatgccgttcatgggcaccgacctgggcaagctcatgaaacatgagaagctaggcgagga

SEQ ID NO: 836955 - DNA, 100 bp, Homo sapiens
ggccgaagacactgcgactccggagacagcccaaatatcctcggaagagcgctcccaggagaaacaaattccaaatcctttatttgatctggctggaata

SEQ ID NO: 836956 - DNA, 100 bp, Homo sapiens
ctggtctacatcctgcgggtgcctttgaaaatcaacgacaacttgagcacagtgatgtcttggcattgcccattttcaagcaggaagattccagccttcc

SEQ ID NO: 836957 - DNA, 100 bp, Homo sapiens
gttctgtcaacaaaatggtccacaaaccaagtgggcaaataatggcagttaaagttctgtacagagtaatgagatgtgtgacggctgcaaaccaggtgtt

SEQ ID NO: 836958 - DNA, 100 bp, Homo sapiens
ggggccagatacagagaatgtccccatcatgtacatctgccatgggatgacgcctcagtggcaccctgtgctgcgcacactaaagaaccgcattgaagag

SEQ ID NO: 836959 - DNA, 98 bp, Homo sapiens
agatggtcaggtctggagctcgaccgggccaggtgacaatgctcgatcccaggttttgagagagaaaattattgaattggaaacagaaatagaaaagt

SEQ ID NO: 836960 - DNA, 139 bp, Homo sapiens
tgacacacatgaacttaggggcacttctgttttcctgagggctacaccgttttcttttgaaagagctgagatctgtatctgtggacctgaatgttgatccctcgcttcagattgacatacctgatgcgctcagtgagag

SEQ ID NO: 836961 - DNA, 98 bp, Homo sapiens
tgtcatccagccttagcaaaccagaggagaatgacatcttcctgggctgggaaaaaggagcttataagaaatggggaaagagtaagaaaaaatgttca

SEQ ID NO: 836962 - DNA, 98 bp, Homo sapiens
agtatactccagaagccgatccctacttcatccaagaccatctcagtggttcaatagcatccccagatgtcaaattaaatcttggtggagattttatc

SEQ ID NO: 836963 - DNA, 98 bp, Homo sapiens
ggccaggggctgggggcccacacgccatggagcccgactcccttctggaccaagacgactcctacgaactcgcacacaaagcagcatgagacagaagc

SEQ ID NO: 836964 - DNA, 99 bp, Homo sapiens
ggaagacctgcgtcctttttcgtttttcggatgatgccttcaatactacctttatttccaccatagagcagcccgacggccatggaggctgaagagacg

SEQ ID NO: 836965 - DNA, 109 bp, Homo sapiens
cagtatatgcctaatggttggcaagttcctgcatatggaatgtatggccaggcatggaaccagcaaggatttaaacagttgaatttctgaatgaaaagctggaaaaaag

SEQ ID NO: 836966 - DNA, 98 bp, Homo sapiens
tcctcagctccagctgcactgctcagacgagtatgaaaagacacagactgtactctcagaactgaagttgaagtttgaaatgactgagcaggaaaagc

SEQ ID NO: 836967 - DNA, 100 bp, Homo sapiens
cactggaaagtgaggaattttgaagtacaccgtggtgacattgtatcattggttaaggattgtatcctggagccgctttccctgccagaaagtccaggtg

SEQ ID NO: 836968 - DNA, 100 bp, Homo sapiens
gggaaccatccttggaaatcctgccgcggacttctctgcacagcatccctgtgacaggagcctccctattaaggaccttgccgtagacagcgcctctccc

SEQ ID NO: 836969 - DNA, 98 bp, Homo sapiens
gtccagatctacatctgcaaacaatggacggagattcttcactttacaggttctaagctggtctatgtccatcaccttcttggagaaggagcctttgc

SEQ ID NO: 836970 - DNA, 98 bp, Homo sapiens
cagaaatggagattcacttgcagaccaatgccgagaaaggcaccatcaccatccaggatctatctggttcaatagatgacctccccatggggacagaa

SEQ ID NO: 836971 - DNA, 98 bp, Homo sapiens
gaggagctctttgacttcttgcatgcgagggaccattgcttggttagtctgctgctaattggaattgctgcgtggggcattggcttcgggctgatttc

SEQ ID NO: 836972 - DNA, 100 bp, Homo sapiens
tatccttcatatgatccatcttagtgaagaattaggatacagtgattcgcctttgccagtctcatctcgtgtctgctttgttaagttccatgatccagac

SEQ ID NO: 836973 - DNA, 100 bp, Homo sapiens
tccaaccctgagcccaagaccttcacgtttgatcatgttgcagatgtggataccactcagcttcttaatgaagaggataactcagaatcatcggctatag

SEQ ID NO: 836974 - DNA, 98 bp, Homo sapiens
ggaggcaacggagctaccagccggttgtagcagataccaatataagcgccatagcagctcagcttgaaaacatgtctacaggctaccaccttggttcg

SEQ ID NO: 836975 - DNA, 98 bp, Homo sapiens
ccttgcaagtttacgacaaggaggttcagtggacccttggagccatcctctacaggacccgctttctaccattaaggagtcaaattgactttatcagc

SEQ ID NO: 836976 - DNA, 100 bp, Homo sapiens
ctggatttatttctcgattcgctgtcggaggagaatgagaccctggtggagtttgctattggttgtttttagaggtaatacacctagtttgtggctcagc

SEQ ID NO: 836977 - DNA, 100 bp, Homo sapiens
gagagcaagcagggaaagagagcgccaggtgcttagcaggagttatgatcgaagttccaggagcttagatcaagattcaccttcaaaaaagaagaagttt

SEQ ID NO: 836978 - DNA, 98 bp, Homo sapiens
gaagatgagctgtcctttcaggaaggagccattatttatgtcatcaagaagaatgacgatggtcacggtctagatcacattctcgatccagaggaagg

SEQ ID NO: 836979 - DNA, 100 bp, Homo sapiens
tttgaatcgctgagcgatatcacagaacacaagattaatcaatgtcaactgacaggttgtcttttggaaatgcaggtttaaggacaaattatctgcttaa

SEQ ID NO: 836980 - DNA, 98 bp, Homo sapiens
tcaacacaccctccagacccccgtccagtgaattctgggagtacatcaagacctggcggccacgctacttcctcctcaagaatgatggcaccttcatt

SEQ ID NO: 836981 - DNA, 100 bp, Homo sapiens
ctggaaactgattggaaactctttgggaaagccactcgaaaaggaatgaatctgaagtctgctgcagtaaaacacagaaggctttaaaatgttttcttgc

SEQ ID NO: 836982 - DNA, 98 bp, Homo sapiens
gctgcctcccacaagtagctccagcgccgtaagcgaggcctccttctcctacaagggaaaagcttcactctgaccatcactgtcttcacaaacccacc

SEQ ID NO: 836983 - DNA, 100 bp, Homo sapiens
agcggtggtttaagcaaggtcttcgctgtgctccggagagatctttctcatcattcattgagagcaggaccagatctcacagaatctgaaaagagctatg

SEQ ID NO: 836984 - DNA, 100 bp, Homo sapiens
gagaaggaagaagcagatcttcttttggagcagcagagactgatcctgagactccagcaggatgtcttatcaacagcagcagtgcaagcagccctgccag

SEQ ID NO: 836985 - DNA, 100 bp, Homo sapiens
aggagataaaggtggtagagttgtcatctttcaacaggagcaggagggttcaggataagtttgaggtgctgaattacacaagcattcctatctttctccc

SEQ ID NO: 836986 - DNA, 100 bp, Homo sapiens
atgagtggaaaggtgaccaagcccaaagaggagaaagatgcttctaaggtcttctcacaagactttcaggattaagcgattcctggccaagaaacaaaag

SEQ ID NO: 836987 - DNA, 100 bp, Homo sapiens
aagatgaatgcaaaaaattgcagtcacaatatgctagctcagagaccccttatccctctggacagaatgcaggtccaaccacgctggtataccctcaaac

SEQ ID NO: 836988 - DNA, 98 bp, Homo sapiens
acagggacgtgatgttggagaactacaggaacctgctttctctcgatgaggataacatccctccagaagatggaatcagtgtctgtccctgaagggtc

SEQ ID NO: 836989 - DNA, 99 bp, Homo sapiens
ccagtacctgcgcttcttcaccaagaccatctccaacagccgataacgaaggaggcccaacttcattcaataaggagcctgacggatttatcccagacg

SEQ ID NO: 836990 - DNA, 98 bp, Homo sapiens
gctttggggacgtcggagagcgggcattctggaaagcgtgggtatggtttgaagtggtgaacatggatttttctcggcttcacatgtacagtcctccc

SEQ ID NO: 836991 - DNA, 98 bp, Homo sapiens
ataaatcgtgtgagcgtcgccgacacctctgagataaaagggcccctttcgactagcctctgctgaaagccggatcgagctgggagatgtgacaccac

SEQ ID NO: 836992 - DNA, 100 bp, Homo sapiens
ctggatatggcaaccagggtgggggctacggaggtggttatgacaactatggaggaggacttaaccaccaccatgtcgagcaaaagaacaaagaccaaga

SEQ ID NO: 836993 - DNA, 98 bp, Homo sapiens
aagctgaggagtggtacaagtcgaaggtgaagaacctgacggaagagatggctgcgctggacgagtcagtggcccggctgaccaaggagaagaaggcg

SEQ ID NO: 836994 - DNA, 100 bp, Homo sapiens
gacagcaacagctcggcgggctggaagatttgataatgggctgcattaaaagtaaagaaaacaaaagtccagccattaaatacagacctgaaaatactcc

SEQ ID NO: 836995 - DNA, 100 bp, Homo sapiens
ccgaggaggcagccaagctcgtagcctgccactccgtgctgtttgtggagaaggtgctgcagagactttttcctcctgttccaagtggccaaggaaagag

SEQ ID NO: 836996 - DNA, 100 bp, Homo sapiens
aaatgacattcctgaaacagaagtagaagatgatgaaggatgtgccggtggtggtgtgcacattgagccccggtatagacagttcccccagctgaccaga

SEQ ID NO: 836997 - DNA, 107 bp, Homo sapiens
ctgagtcaaagaagatgcctcgaactaaacaaattcatcccagaaatctaagaggaaagcgtctctagcagctgatatccccagacttggatatagttcctcatccc

SEQ ID NO: 836998 - DNA, 75 bp, Homo sapiens
aaaggagctgcttcccaataaggaaacaatctcacattcttgaaggtggcattgaagagcactaagatcggaaga

SEQ ID NO: 836999 - DNA, 100 bp, Homo sapiens
accacgcgactcaatggacggagagcttggattagactctggccctagaaaattgcctaagaattatgacccaaaagttaccccagatccagaaagatgg

SEQ ID NO: 837000 - DNA, 98 bp, Homo sapiens
agcctcatgagtagctgggactacagatcgatctggaatagaaaacgtcaactctgtggaggctttgcaggaaactctcattcgtgcactaaggacct

SEQ ID NO: 837001 - DNA, 100 bp, Homo sapiens
gccaagcaggccctgattgcacctggagatgcagagcgtcaacaaagactggctcagctctgttatctctattcagacctgtataaacataccaattcca

SEQ ID NO: 837002 - DNA, 98 bp, Homo sapiens
acagccaccttccaccgctgcgccaaggttcctaaagagaaagatgaaatggtagagcaagagtttaaccggttgctagaagctacatcttaccttag

SEQ ID NO: 837003 - DNA, 99 bp, Homo sapiens
gaactcctctgatgtcctggtttatgttaccagcaatgacactacgcggaagatggagaaccgtgattaccgggatgcacaggagtttgctgctgatgt

SEQ ID NO: 837004 - DNA, 122 bp, Homo sapiens
acatgggttcatacacttgtgttgcagaaaatatggtgggcaaagctgaagcatctgctactctgactgttcaagtcataccctaatgatcccagcaagataatgtcctgtcttctaagatg

SEQ ID NO: 837005 - DNA, 100 bp, Homo sapiens
agagcttagagaaaaccagttaaaaatgttgcctaaattgagaggatccagaatccagatctctggaatagctaccaggcaaagaaaaaaactatggatg

SEQ ID NO: 837006 - DNA, 126 bp, Homo sapiens
tgagcgacagtctttttgtgcttcatgtacagcgtgcggacaataagcaaaaggggtgagcccctccagactccgaataggagatcaagagtttgattcattgcctgctttactggaattctacaa

SEQ ID NO: 837007 - DNA, 98 bp, Homo sapiens
gaagaaacggcgtttagagcaacagatcgtggatctgaaagtgacaagcattttagaaagatatatgtaatcgacagtgcagacagaaaaagatttga

SEQ ID NO: 837008 - DNA, 98 bp, Homo sapiens
aggattatagtggcgaggcagggtgttagccaagcggattgagccaggacacaacaccgcggagccctgcaggcgtgtcggagatgtatgcagtgtga

SEQ ID NO: 837009 - DNA, 98 bp, Homo sapiens
ggagaccccgaaaacggaagcgcagggagaaggaagaggtgtttgaaaagtgctatatgttccacatgtatgttggagttcgtgctggaggagggatc

SEQ ID NO: 837010 - DNA, 98 bp, Homo sapiens
tgcatgcagtcgcagacatttactgtgaaaactgcaaaaccactctgggctggaaatacctccgacagttagttaatatgtgcatcaacccagatcca

SEQ ID NO: 837011 - DNA, 100 bp, Homo sapiens
agcagagactgatctttgctggcaagcagctggaagatggacgtactttgtctgactacaatattcaaaagaatgttggctaccagggtatttagcctag

SEQ ID NO: 837012 - DNA, 98 bp, Homo sapiens
cttagagtcaagttcttcgtggagcctcatctcatcttacaggagcagactagggtaagacgtgaccttttgaggtgactataactgaagattgcttt

SEQ ID NO: 837013 - DNA, 100 bp, Homo sapiens
ctcaagagtgaaatccagaaggagattgtgaataagtggaatacagctctcattggccttatgacatactttcgggaggctgtggtgaacacccaagagc

SEQ ID NO: 837014 - DNA, 98 bp, Homo sapiens
acagtgtggcccgccatgttcttctccgcggcgctccgggcccgggcggctggcctcaccgcccactggcttagaccatgctcagcctccaagcagcc

SEQ ID NO: 837015 - DNA, 100 bp, Homo sapiens
attgaatgaactgtatccatccccatcatgatgtacagaaccaagtctcttcactagtgttgacttcaaaatcaaaactgtagagctaagaggaaagaaa

SEQ ID NO: 837016 - DNA, 98 bp, Homo sapiens
ttcaagcctatgtcgtgaggctttggcagaaattaagaaggaaatatctccatttaacaaatgtggcaattattttggatctatcacctgtcatcata

SEQ ID NO: 837017 - DNA, 100 bp, Homo sapiens
aaactgaaggacaacgagaagaaccggaagctctttgaccttctggatgtccttgagttcaaccagttccaagatgagatgggattctccaacatggaag

SEQ ID NO: 837018 - DNA, 100 bp, Homo sapiens
cctgatttcctgcttctccttttcatgagtgttcctgtggtctctgcacctcctttctctgctggagccagttctgcttctcggcaaggagcgatttgct

SEQ ID NO: 837019 - DNA, 100 bp, Homo sapiens
ccacttttgaaacatgtcaaagagccccagcttatttacgacaagttaaacagggtaaagatggtggaaaaggaaaaggatgccttagaaggagagaaaa

SEQ ID NO: 837020 - DNA, 100 bp, Homo sapiens
tccaaattataattacgatgatgaagatgaagatgaaaatgcaatggatgctgatggtggtgatgatgatgatcaaggctgacttatccttgtataatga

SEQ ID NO: 837021 - DNA, 100 bp, Homo sapiens
atacccgcagcatttccaacatgctccctgggaagctgaatgaagcggatcataacggagatctggcattagatctagccctctcacgacgactggagag

SEQ ID NO: 837022 - DNA, 101 bp, Homo sapiens
cgagactactggccgaaggggcgtctgcggctctccgccgtccccagccctgcctctccctgggctctggtaccagctgaagctctttgcccgcatgtgct

SEQ ID NO: 837023 - DNA, 140 bp, Homo sapiens
tgtcagcagtaaaggagaactttatcagtggaaatggagtgaatctgagccttacagaaatgcccagtcactcagcctctgaagaagcttcgggttcagactcaggcagtcagtcggaaagtgagcagggaagtgatcca

SEQ ID NO: 837024 - DNA, 100 bp, Homo sapiens
ctcctcatcctcctcatcttcttcatcctcctcctcctcagatttttggagcatatgcaactcatcctttcaagttcagtgaccactattatggcacagg

SEQ ID NO: 837025 - DNA, 98 bp, Homo sapiens
gaagacaaggggggatatgtgatcaaagcatcagaagattcccagaagttgtgcatgagttcctgtgaggagagttggcatcttggaaatcaaagacg

SEQ ID NO: 837026 - DNA, 100 bp, Homo sapiens
gcagcaacattgactacgaggaatggcggcggctgccgcaggacctgcagcatcccagaggataaaagaatcagagtgtctcaacccttgacaagaggac

SEQ ID NO: 837027 - DNA, 99 bp, Homo sapiens
gcggcgaccggggcctgggtccacgccgagggcaggacgaacttcaccagaatgctgcttctaaattacttgggcaaaattgggtccaaaacgcctttg

SEQ ID NO: 837028 - DNA, 99 bp, Homo sapiens
gtgtcggcgcctcattcgggtggagctgagccggagacagctatgacagagactccactttcaatgtgtttgtgggaaaaggacagctgatcacaggga

SEQ ID NO: 837029 - DNA, 98 bp, Homo sapiens
tgccccgaatgaggaccagggagggaaatatgtcatgtatcccatagctgtgagtggcgatcacgagaacaataagggttggggtctgctaggtcccc

SEQ ID NO: 837030 - DNA, 100 bp, Homo sapiens
gacgaggccatgctgcagaagcgtatccgttacgtggtggacctgtacctcaacacccccgacaagatgggtttttaatgaccacaacaagcaagcatgc

SEQ ID NO: 837031 - DNA, 100 bp, Homo sapiens
gtggagcagtataagaaggagctggagaagacttattctgccaagctgggcacattccggtctcatgatggggattattttattgaaccactacagtcta

SEQ ID NO: 837032 - DNA, 100 bp, Homo sapiens
aagtattttctaccaagctgggacttccaaagctgggaatcctattttttattatgttgcacggagaaactggcgatggaatatgagaggagccctctgg

SEQ ID NO: 837033 - DNA, 99 bp, Homo sapiens
ccagactcattgggactgctctagatcttcactatccaatacgtgtggacaagaagggccacgtccactacttgatcaagtggcgggacttaccttacg

SEQ ID NO: 837034 - DNA, 100 bp, Homo sapiens
taatcaactgggagaatgtaactgaaagatacatggcttgcaaaaagtaaaccacgatcgttatgctgacatcttcatgatacagttaagaggaatcttg

SEQ ID NO: 837035 - DNA, 100 bp, Homo sapiens
ggacgcttcacgtgtcccgtgtgcttagaggtgtacgagaagccggtacaggtgccctgcggacacgtgctgttttggagtcagcggaagatcaccaagg

SEQ ID NO: 837036 - DNA, 100 bp, Homo sapiens
aaagttcagttgagaaacaagggctcaatatggaggattacctgggctcaaaatgcagagaactcaaagatattcatttcggccagtgttacaagatctc

SEQ ID NO: 837037 - DNA, 100 bp, Homo sapiens
atagtctgggactttcaaatcttcagaagagccaaatccaggggaagtagcaggcttgcaatcttcagtattattccacagtaatggaacagcaagtaaa

SEQ ID NO: 837038 - DNA, 98 bp, Homo sapiens
tttggaggtgggttcgaaaaaacctgtcatttactccatcctttatagtgatgctacaggacgaagaggaatggataaaaacattggcgagcaactca

SEQ ID NO: 837039 - DNA, 99 bp, Homo sapiens
ccactccccaaacaggctggctcccgtctccaggccccaaggagccacacctggaccagaccccaggaaagggtgaaaatgggatggaggattgtgtca

SEQ ID NO: 837040 - DNA, 98 bp, Homo sapiens
tctaatttcacggacactgaaagcagagaccatggagcttcttggggagtaaccatggatgttggtatgacaaagtttgaaaccacaaccaaagttat

SEQ ID NO: 837041 - DNA, 99 bp, Homo sapiens
gaagagagattcctatagttcaccgagtcttgaagattcatgaaaagacctcagcagccatgtcgaagccccatagtgaagccgggactgccttcattc

SEQ ID NO: 837042 - DNA, 98 bp, Homo sapiens
ataggtggggaaattcaggaaacatccaagaaaattgctgtcaaagccattgaagactctgatatgttacaggagatggagtctcgctctgtcgccca

SEQ ID NO: 837043 - DNA, 99 bp, Homo sapiens
acagccacccttggtgatgagcctcggaaagtgctcctgcggctgtatggagcgattttgcagatggtccggtttatcactaaaatatggcatcctaat

SEQ ID NO: 837044 - DNA, 99 bp, Homo sapiens
ttcaagctgataggctgcgctaccggaatgtcatccagcgagtgattagacagatgcaccatcaggaatggaattacagtcatggtatcctgttataaa

SEQ ID NO: 837045 - DNA, 98 bp, Homo sapiens
agtttgatcgttatctgtcagccccagacaacctattgataccacagctgaactttcttctaagtgccacagtgaacttgcccgctacaccaaggaag

SEQ ID NO: 837046 - DNA, 100 bp, Homo sapiens
aaatctgataagaaagtacggaccataataatcaggagtgaagtcccagggatattctgtgctggcatgttatgttacccagagaactttccaaacaagt

SEQ ID NO: 837047 - DNA, 98 bp, Homo sapiens
agcagattcactgagttcaaagccttttatggagacacattagttacagcaaaactgttcattgtagaatcaaactcttcatcatcaactagaagtgc

SEQ ID NO: 837048 - DNA, 99 bp, Homo sapiens
ggcaaatccacgctggcgttgcagctaggccagcggctcggcggtgagatcgtcagcgctgactccatgcagtttatgctaaaggaatttgaagcacgc

SEQ ID NO: 837049 - DNA, 99 bp, Homo sapiens
gggccgctgcgtgttgtccacccaagatggagttcctcctggggaacccgttcagcacaccagtggggcagtgcctcgcaatcatcctcttccagtggt

SEQ ID NO: 837050 - DNA, 100 bp, Homo sapiens
aagaccccggagcccctttagccatgtggatacctacggagcacgagaaatacggcgtggttaatgaaggagttcccccttctgagtatgttcaatatcc

SEQ ID NO: 837051 - DNA, 100 bp, Homo sapiens
gccgagatgacttcagggtcttgaccgcggttaatgaaaagtagcctgaatggagataacttccgaacacagaagctgtcttttatcattagaacagtgg

SEQ ID NO: 837052 - DNA, 100 bp, Homo sapiens
ccatgtttaatgttatggttgatgccaaagctcaatcaacaaaactttgcagcatggaaatgggccaagaggccatggatcatctgcagtcattcattgc

SEQ ID NO: 837053 - DNA, 98 bp, Homo sapiens
gaagccatagttgtagctacaaatccatcaggacgtctcattagcgaactttttcagaaactgccttctaaagtggcccttaatctcacttgcaacgt

SEQ ID NO: 837054 - DNA, 98 bp, Homo sapiens
aaagaaagtaccggtgcctcctgccaaaaagccagaagctccacctcctaaagagttttcttgaagtacaactaaggacaggtcaccactaggcacta

SEQ ID NO: 837055 - DNA, 100 bp, Homo sapiens
atgtttgaatctcagagtgaagatgagttgacaccttttgacatgagcatccagaccctgcacttgatggaccagctggcaccacccagatcaataaact

SEQ ID NO: 837056 - DNA, 100 bp, Homo sapiens
tctggaattttattaaacatgatttttcaagaggtaaaaagtagtgatattgccaagaccttccgcaaagcaatcaacaggaaagaaggtatttgtgctc

SEQ ID NO: 837057 - DNA, 98 bp, Homo sapiens
cctacctggtgtccttgtggtctttctcaggatggcttccttctcaactgtgacaagtgcagttgatggagtttgcactgtagcaaattgcgttggaa

SEQ ID NO: 837058 - DNA, 100 bp, Homo sapiens
ggacctgctccagcagctggtgctgcaccagcaggaggtcctgccccctccactgctgctgctccagctgagtatgtcccagagaaggtgaagaaagcgg

SEQ ID NO: 837059 - DNA, 100 bp, Homo sapiens
ttgtgcagacaccaaatctcgagggaccaggagtctctgttaaagaacataccagtgcactgtgaagagttcatccccgagtttgagaagcaatacccag

SEQ ID NO: 837060 - DNA, 100 bp, Homo sapiens
cgatagtcaagttcccgggggccgtggacggaactctaatgatccaggacaaagaagttaccctggagtatgtatcaagcctggatttttggtactgcaa

SEQ ID NO: 837061 - DNA, 100 bp, Homo sapiens
ttgatgatgatatcattatgctgacctctgacgagctgcaatttggttatgagcccgagcagttcagtgatgaagtggaaccagcaacacctgaagaagg

SEQ ID NO: 837062 - DNA, 100 bp, Homo sapiens
tgcccagcgccagcgccagccgcaagagtcaggagaagccgcgggagatcatggacgcggcggaaagatgtgaagcctgataacatgctgctggataaat

SEQ ID NO: 837063 - DNA, 98 bp, Homo sapiens
aaatacaaatcacacgcataatggatgaaaggaaccgacaggtcgatgaacttctgcatatatatggttcaacagtagacggtgttccccgagacaat

SEQ ID NO: 837064 - DNA, 99 bp, Homo sapiens
ggtcttttgtaattgaccatcagaaacagggcctctacccccagagctgcagcctctgttggaaggggaagtaaaagggggccctgagccaacacctct

SEQ ID NO: 837065 - DNA, 98 bp, Homo sapiens
aagaccatggagacgctccatctggagtactttgaagaagccatgaactacttgctcagtcatcccgaggtgtgatccctcacatccacaaatctctg

SEQ ID NO: 837066 - DNA, 100 bp, Homo sapiens
aaactgattggaaactctttgggaaagccactcgaaaagcaagttgtcctcgaagaaggtacaattgcttttaaaaattgggttaaaacaggcacagaag

SEQ ID NO: 837067 - DNA, 100 bp, Homo sapiens
gcgagctgagtggttgtgtggtcgcgtctcggaaaccggtagcgcttgcagcatgggtctgcggaagagggagctgctgaaggagctgctaccagtcatc

SEQ ID NO: 837068 - DNA, 100 bp, Homo sapiens
ccagaggtcgtggaggtggccgtggaggcagaggtggcatgggatgaatggaccaggtagtttgtttgcttcagagaatttcctgggaatttcaagtcag

SEQ ID NO: 837069 - DNA, 100 bp, Homo sapiens
aagagagaaaaagaagaaatgaagaagaagagggaaatggatgaacttagatagctttccaatgattagacgaattgattctttctgtgactcatcagtt

SEQ ID NO: 837070 - DNA, 126 bp, Homo sapiens
ggggagccctttggctctgtggaagacgaccacatccccttcctccgcagagcaaacccgctggttcagaaccaacacctaagtcacgcattgcagaccttcctcctgccaaccctgatcacatcg

SEQ ID NO: 837071 - DNA, 100 bp, Homo sapiens
tgttaaggattccaagtaactcttatttggagagccttatagatgcaagtgaagacagccagctagaagctgccatcagagcctccttacaagaaacaca

SEQ ID NO: 837072 - DNA, 98 bp, Homo sapiens
tatcagaaagcagggctgtattctgacgtttacaaaactacagaattgcccccgaggaattagcacttgttcacaacttgaggaaaatgatgaaaaat

SEQ ID NO: 837073 - DNA, 100 bp, Homo sapiens
caattttttaactcagatcttgctgagaccaggagcatctgatttaacaggaagtttcagagttcctgagttggaggtagaagaagaaacccaagttcaa

SEQ ID NO: 837074 - DNA, 99 bp, Homo sapiens
ctctcagtagccatgctcatgatcggcgtgtttggatgtactttacaggtatggaattgtttgaagaggcattgcgtcgatgggaacaagctctgacct

SEQ ID NO: 837075 - DNA, 100 bp, Homo sapiens
gcaatatgatgaggatgatgatgaaatcaccccggatttgtggcaagaagcatgctggattgtaatcagattccaatgggtggaaaagaacgaatggcag

SEQ ID NO: 837076 - DNA, 98 bp, Homo sapiens
ggacttgatgaatataatccattctcggattctagaacagagaagtttcggtgtccgacatccctgtctgttgttaaagacagaaacctaactgagaa

SEQ ID NO: 837077 - DNA, 100 bp, Homo sapiens
agagccatcaaaatcacagtggatgggccccgagaacctcgaaatggtcagtaggacagaaggtaacattgatgactcgctcattggtggaaatgcctcc

SEQ ID NO: 837078 - DNA, 98 bp, Homo sapiens
tcttcaagagaaagaccagaagagaaggcaaaaatgaatgttgaagtagtaaaagtcatgccccagctctgccttccagggacactgctcttccccag

SEQ ID NO: 837079 - DNA, 98 bp, Homo sapiens
aaggcactcaaaagtggggggcaggaaaggacgatttcctgttcagtgtctccattttaagtgggattctttgcagcatcctggccgtgttgaagttc

SEQ ID NO: 837080 - DNA, 100 bp, Homo sapiens
cacagcaggacagccgaactggaatctggatgagcagctcaagcaggtgcacttactggacttccccaatattgtcatcaaaggatcggagctccaactc

SEQ ID NO: 837081 - DNA, 98 bp, Homo sapiens
aggagcagctcaaaaagaaatgtttcactctgctctgctactatgatcccaattcaggtaaatatgcagaggacatttttggagagctctttactcag

SEQ ID NO: 837082 - DNA, 99 bp, Homo sapiens
gactttttcaccagggaaatcagagacaatgatggggctcttccccagaactacaggggctctggccatcttcgtggttcgatacaagaggctgttttc

SEQ ID NO: 837083 - DNA, 98 bp, Homo sapiens
atgagagagatccatggtatagctgggaccagccgggcctgaggttgaactggggtgaaccgattgaccctcttgctggaatgacatctcttagtata

SEQ ID NO: 837084 - DNA, 98 bp, Homo sapiens
cacaatcacagcaacagactctcctgcagaccttcccaggaagccagagccacacacaccatcatggtcctggagtctccccaggacagtgctatcac

SEQ ID NO: 837085 - DNA, 100 bp, Homo sapiens
aaggggcttacgcagaaggacctggccacgccctgggcgctgcctatggcacagccaagagcggtaccggcattgcggccatgtctgtcatgcggccgga

SEQ ID NO: 837086 - DNA, 99 bp, Homo sapiens
tgatgtcgagtatgagctccggtgcctcctcaataagccagacacgatgaggcgagtggtacgacagagcaagtttcggcatgtatttgggcaagcggt

SEQ ID NO: 837087 - DNA, 100 bp, Homo sapiens
catccccattgtgcaactgccagtctaaaaattgatataggaggtgataacctttatgatggtattgaggacatgattggctatcggcccgggccctgga

SEQ ID NO: 837088 - DNA, 51 bp, Homo sapiens
ggacacttctctgtcgtcacagttagcctgatcctgcctgaagatggtgcc

SEQ ID NO: 837089 - DNA, 113 bp, Homo sapiens
ccagaggtcgtggaggtggccgtggaggcagaggtggcatgggaacccagtgacttgattgtaaaaatttacagagcggaatcatatgctggtctccaagagtttaaagcagc

SEQ ID NO: 837090 - DNA, 114 bp, Homo sapiens
cgttcctaccacgaggagttcaaccctccaaaagagcccatgaaagatgacttccagttcagacatcataagagatcttttagaagaagaggaagcctgggaagcatcacataa

SEQ ID NO: 837091 - DNA, 99 bp, Homo sapiens
ttgattgaggactgtgcagcagagtttggagatgatttacacaatgaagaaagtacatgcactttgggcttctgtatgcctgctgcttaatcttgcccc

SEQ ID NO: 837092 - DNA, 98 bp, Homo sapiens
atttgcctcagatggagttacaggtttggcaaatacgtgtagacctacatttattaaatcatgatggaaatattattgatgctgccagcattgctgca

SEQ ID NO: 837093 - DNA, 100 bp, Homo sapiens
acggacgctaagcggggtaggggaagaatgtccctcttccagtggaaagcccaaccatgcagacatcttgctcataaacttacagtatgtttcagaagtg

SEQ ID NO: 837094 - DNA, 98 bp, Homo sapiens
gaacttctgcccagctctccttggttcaaggaaaggacccttccgtggacatcactcaggaccttgtggatgaatctgaagaggagcgttttgatgat

SEQ ID NO: 837095 - DNA, 100 bp, Homo sapiens
tatgaaaagaaaagggcaaagctgcttgcacgttatataccgcttattcaagtgtactatgaggggctgcaggacaagctggcacagatccgcgatgccc

SEQ ID NO: 837096 - DNA, 99 bp, Homo sapiens
tcggattgcccatgcacttgttgcagaaacagccaagaagaagctcattcacacagaagacccatttaatgatgaacatcaggagaggcaagaggtgga

SEQ ID NO: 837097 - DNA, 100 bp, Homo sapiens
cgaattaatatgagaatacaagatctaacaggactagatgtttccacagcagaggaattacaggagcagtatagcatcaagttctagaggaattgggagc

SEQ ID NO: 837098 - DNA, 100 bp, Homo sapiens
aagctaaagacatagttcctggtgatattgtagaaattgctggagagcgacttgcagttgtggaggtacagtgtgaacggctgaggatgctctaccggga

SEQ ID NO: 837099 - DNA, 100 bp, Homo sapiens
atgtaactgaaagatacatggcttgcaaaaagtaaaccacgatcgttatgctgagtaaaatatacccaggaccataaacagatgaaaggtagaccaagtc

SEQ ID NO: 837100 - DNA, 100 bp, Homo sapiens
attcctgcccatttctggaccccagccactcctcaaacaggaaattgcaggtgctgcagtgtctgaaatttccgggcctttctcaacagaggatgtagcc

SEQ ID NO: 837101 - DNA, 98 bp, Homo sapiens
gtggttaccttagatgcaagtgatgatggaatcttggccaaaatcgtgacgattatagagcttgggaccttcataaaagtgaactttataagccagaa

SEQ ID NO: 837102 - DNA, 98 bp, Homo sapiens
cacatcctgagtcttcaccaaaatgggtgtcatcaaaaaccagccagccctccacctcggatcttttcctaattcagcagcgatttaaccaagagcct

SEQ ID NO: 837103 - DNA, 100 bp, Homo sapiens
ttcgaggacttcacggagctctggagaaacatgaagttcgggactatcttctggttgctgcttttgctcagaggacatccatgaccctaatggtcttttt

SEQ ID NO: 837104 - DNA, 100 bp, Homo sapiens
gagaaagaaaccaaaaacagcaagcgcagagccaaacagccaggcagctgagatctgtatctgtggacctgaatgttgatccctcgcttcagattgacat

SEQ ID NO: 837105 - DNA, 99 bp, Homo sapiens
gaaaggattctaataactcggtgtcaaagccaagacataaactcaaccccttctcttccaaaaggtccgaggaggcaaacaaagccttctctgcagctg

SEQ ID NO: 837106 - DNA, 100 bp, Homo sapiens
cattcttgtgccagaggagtgtgccatattccaatggctgagccgttttgccccaaaacgagagagtgggccccatgctgattgagtttaacatgcctgt

SEQ ID NO: 837107 - DNA, 98 bp, Homo sapiens
tgtgatcaacacctgcacggtacctgcacggcactactgcagtcttcagttaagcaacaagtagaagctattgaaaaacagtacatttctgcaattga

SEQ ID NO: 837108 - DNA, 100 bp, Homo sapiens
gcttcccctttccagagagccagaaagaagtcagccaagatgggaagtcgctccttgacaagctccagcggcccttgactcccggcagctccgattccct

SEQ ID NO: 837109 - DNA, 98 bp, Homo sapiens
ggccccggcgaggaggcgcggaaccatggccgatgggggcgagggcgaagacgagatccagttcctgcgaactaagatgctgtggacaattatcgaga

SEQ ID NO: 837110 - DNA, 100 bp, Homo sapiens
gcttgtgcaatgctactctgccatggatcccttcagcacactttccagcagcatcacctgcacagaccaggttggaaaagagactgttcaaaccactgag

SEQ ID NO: 837111 - DNA, 100 bp, Homo sapiens
ctggtcttctcgtcggattgcccatgcacttgttgcagaaacagccaagagatgctgcaatttgtcagtaatcaagtgggagagttccctgacttgtttt

SEQ ID NO: 837112 - DNA, 99 bp, Homo sapiens
acgcttttccccagcttttccgatttcttatctcagtcatcactatggtgcttctgacgttgatgactgtcacactggatcctcctcagaaactaccgg

SEQ ID NO: 837113 - DNA, 105 bp, Homo sapiens
ggatttttggcctcatactctgttatagataaacaaggagagattaaacagattctagaaaatgaacttcagatacctgtgtccaaaatgctgttaaaaggctgg

SEQ ID NO: 837114 - DNA, 51 bp, Homo sapiens
cggaatgtcatccagcgagtgattaggtagttacttttggtgacgctgtcc

SEQ ID NO: 837115 - DNA, 100 bp, Homo sapiens
ctaaatactactctgaggggcttagaaattaacaggatgcttgaacggatgctttagaattttctgcctgagctacggcaccaagctggttagtcggaag

SEQ ID NO: 837116 - DNA, 98 bp, Homo sapiens
ttggagtctgccgtgatggcatcaaccgctacgactgtgtctgccaacctggcttcacagggcacgtctttccagaattcaaagagagcgatgccatg

SEQ ID NO: 837117 - DNA, 98 bp, Homo sapiens
ggagtgcctccaaaggttgctgaggtaaattaaaagatcttgggaacttggttctccgaccttttgggctctccacggaaaatttccagatcaaacag

SEQ ID NO: 837118 - DNA, 100 bp, Homo sapiens
gagaaaggccggcctgcagcacccgccaccgtcgccggccgcccgcacgtccgtccgctgacatagcccagagatacaggataagcaaatacccaaccct

SEQ ID NO: 837119 - DNA, 98 bp, Homo sapiens
gtccccgggggcgccatggcgaccggagcgaacgccacgccgttgggcctccggtgtggctgtctctgatggtgtcatcaaggtgttcaacgacatga

SEQ ID NO: 837120 - DNA, 98 bp, Homo sapiens
gggcacaagattattccaagcaacagaatctctgtcagctgcagagaaggatgcacacactgtggcaggagcacttcaaactggtggtcctcttcagc

SEQ ID NO: 837121 - DNA, 98 bp, Homo sapiens
gcaaattcatgacaggattattgagccaagtgcaaggtggttatcaccttcaaccaaggactccggggtgggcgcgtggtggagctgaagaaaatagt

SEQ ID NO: 837122 - DNA, 100 bp, Homo sapiens
gccgccgccgccgccatcatgagggaaatcgtgcacttgcaggccgggcagtgcggcaaccaaatcggcgccaaggagactccatcctctgccaatggcc

SEQ ID NO: 837123 - DNA, 100 bp, Homo sapiens
attcagcagaaccctgcgctgctgcccgccctgctccagcagctgggccaggagaaccctcagcttttacagattagcctgaggcctgctcagtcgttcc

SEQ ID NO: 837124 - DNA, 98 bp, Homo sapiens
tcatcatgagcgatgttaccattgtgaaagaaggttgggttcagaagagggggtggatatgcagcctacagatatgcacagcctgctactgcaaccgc

SEQ ID NO: 837125 - DNA, 98 bp, Homo sapiens
ttccacttgcacgaaagctttcctaggccaaaaagagagaccgatcagaaaggatttcttaactggcactgctggcagagacggagaccgcggctggg

SEQ ID NO: 837126 - DNA, 100 bp, Homo sapiens
aaaaatgaagttcataaagttgaaatgtttttgggagaactgctggctgcaagttggttcgactatgcaatgagggcgcccggaagatggaaaggactga

SEQ ID NO: 837127 - DNA, 100 bp, Homo sapiens
gtttcctttacctgggacgtgaatgaagaggcgaaggccttattccactgctggggattgatgtgtgggagcacgcttactaccttcagtataaaaatgt

SEQ ID NO: 837128 - DNA, 98 bp, Homo sapiens
aatttttctctaactcagaaacatcagttactctgaagggcatcatgcatcttactgaaggtgtccttaagtttgctcgcttggtcaagtcctacgaa

SEQ ID NO: 837129 - DNA, 98 bp, Homo sapiens
ggagatgacttttcgcactgaaatgctgtcggaaaaggtaacagaagatggaactcgaaatcccaatgaaaaacctacccagcaaagaagcatagctt

SEQ ID NO: 837130 - DNA, 98 bp, Homo sapiens
ctcattctgcagctcatcttctcaaaaacagatgagtgccaaaccaaatatggaaatgctaatgcctggagatactgtaccaaagtttttgacatgct

SEQ ID NO: 837131 - DNA, 100 bp, Homo sapiens
caacttccacctcttctaactcagatgattgcagcaaaaatacttcccccacaacacaacctacagcctcaggggatctagtttgaagcactaagaagaa

SEQ ID NO: 837132 - DNA, 98 bp, Homo sapiens
atttctgcagtgaagattgctgtaaaaaatttcaggattggtactacaaggctctcaaaattagagagatgtgtaattgtccaccactgtctaatcca

SEQ ID NO: 837133 - DNA, 50 bp, Homo sapiens
cacaggaggggcaggaaattctttgaagacggaccagcaggctgaggcca

SEQ ID NO: 837134 - DNA, 98 bp, Homo sapiens
attgacggtcaaggtatttcatgccgaggttgaaatcacaaagattagacacctttttagataggtgttcttcagcaccactgacaacacggttctga

SEQ ID NO: 837135 - DNA, 98 bp, Homo sapiens
aaatgcctaaagaacatccacagaatagacctgaagacaaaaatccagaagtacaagcagtctgaattttccagttcatatgaagaggtgatctctca

SEQ ID NO: 837136 - DNA, 100 bp, Homo sapiens
cgagatccagttcctgcgaacttgatggtggcctgcgttttggagaaatggaacgagattgtcagattgcccatggagcagcccagtttttaagggaaag

SEQ ID NO: 837137 - DNA, 74 bp, Homo sapiens
tgtgcaacaatggcttcatgcaccacggccaagactaaggggctgcagagcggggtggacattggcgtcaagta

SEQ ID NO: 837138 - DNA, 100 bp, Homo sapiens
gcctttccagcatgcaggggctgctcagaacctgctaaggctgcctcagacctgactgcctggttcagcctcttcgctgacctcgacccactctcaaatc

SEQ ID NO: 837139 - DNA, 99 bp, Homo sapiens
tatcatatgacaaaggctttgccgcagttcatcttcctccctgtgtactttccatttgccttcctgggatatgaacgagactgccaaacaagaagatat

SEQ ID NO: 837140 - DNA, 99 bp, Homo sapiens
aggaatatggcgctcttaggcagccgagcggagctggaagcggacgaggatcttagaaatgaagttgaaaaattacgcaatgaagtgaatgaaagagag

SEQ ID NO: 837141 - DNA, 98 bp, Homo sapiens
atgctgctcagtggcatcgtggacccggccgtcatggggggcttctccaactatgaaaagtgagaaagatcagtctaaagaaaaggagaagaaagtga

SEQ ID NO: 837142 - DNA, 101 bp, Homo sapiens
atatggctggagcatctcttgataaaggtgactctgacatcattagaagcatgccagaacagactggtgaaaagtaaaccttttcacctacaaaatttcac

SEQ ID NO: 837143 - DNA, 99 bp, Homo sapiens
aagcaccagcagaagaagggcgagtacgtcaaccgctgtctgttcataaaatcttcacttctgggctcaggaggttatgatgtgattgctcaagcccaa

SEQ ID NO: 837144 - DNA, 100 bp, Homo sapiens
agtcaactgcgtggaagagaagaagacccttttgaggacttctttgggaatcgaaggggtccccgaggaagcagaagccgagggacggggtcgtttttct

SEQ ID NO: 837145 - DNA, 98 bp, Homo sapiens
ggcaccttccgggtggagttcagtgaaagggcaggttcactggttgaggacccagttcccatctttggatatagaggtcgatggtggagtaggtcctg

SEQ ID NO: 837146 - DNA, 98 bp, Homo sapiens
gagagaagaagcgcaggcacaggaagctggtgacggcgatgaacggaacagggcggatacctgaccaactcgtgatcctagacatgaagcatggagtg

SEQ ID NO: 837147 - DNA, 100 bp, Homo sapiens
gacgggggctggtgaggctcacgttggagggcttcgcgtctgcttcggagaccgtaagggtctgccatcatggatgttctcgcagaagcaaatggcacct

SEQ ID NO: 837148 - DNA, 99 bp, Homo sapiens
atcaagactaatcatcctgattcagcaagtgaggtgctactttgaatgataaggatgatgactctcttcctgcagaaactggccaaaaccatccatttt

SEQ ID NO: 837149 - DNA, 99 bp, Homo sapiens
cagaaaatcacagtggaatgtggtgaaaacagtagtcgtaatgctacaggttcaaaccttgtactactcagctgatcacaagctgcttgatgggaacct

SEQ ID NO: 837150 - DNA, 100 bp, Homo sapiens
cctggtcaaccgcgaccctaaacacctcaacgatgacgtggtcaaggttgttttggaaaccgaaataacaaataagtccgctttgaaactttatgaaaat

SEQ ID NO: 837151 - DNA, 100 bp, Homo sapiens
aagaatgaacattgtattgagaacaatatagatttgcaggagtaaagaaaattgtgttgtggataacatcaaagtgtgcagtaatgacactgggagtgga

SEQ ID NO: 837152 - DNA, 100 bp, Homo sapiens
ggaggtgatgctggagaactacagcagcctggtctcactggtgtttaggggaccagtctgctgcattggtgggacaaatgtgcttccagattggacaagc

SEQ ID NO: 837153 - DNA, 100 bp, Homo sapiens
tttcaagaaatgaaaatgaagggcgccctggaataggttcgccgaagagagagaatgattgaagatagtgggaaaagaggaaataccatggcagaaagaa

SEQ ID NO: 837154 - DNA, 100 bp, Homo sapiens
cgaagccttcctttatcgctttcagtggttttatgaagaaacagaaagcagtgatgatgttgaagtgctgactctcaagaaattcaaaggagacctggcc

SEQ ID NO: 837155 - DNA, 51 bp, Homo sapiens
atctccgccaccgtcttcaggccagcactcctgtaggaggcctgctgatgg

SEQ ID NO: 837156 - DNA, 99 bp, Homo sapiens
aagagcccagctagcaccttcgccctctccagccagactcacactatcttctcactgctgggagtggaccatgcttatgtcaccagtattggcagactc

SEQ ID NO: 837157 - DNA, 98 bp, Homo sapiens
catccactggggcagcgtctgaggaactgaaacccgaggcaggtaccccaagaagctagtgcagacttattcagtgtttccctaccaggacgagatga

SEQ ID NO: 837158 - DNA, 100 bp, Homo sapiens
atgaagccactgattagcaatttaaagatcctctccaagtgacgccaatgccccctttgcccagtggagcacagagcgtgtgtgtgcatggctggaggac

SEQ ID NO: 837159 - DNA, 99 bp, Homo sapiens
acttgggctgagtaccgcggcgggcgcgagcgaggcgccctagacatcttctccctcccttgcctcagatctactggaagagacccaaagaaaagatga

SEQ ID NO: 837160 - DNA, 100 bp, Homo sapiens
atgtaactgaaagatacatggcttgcaaaaagtaaaccacgatcgttatgctgagacatgtattcctctgagaaaccttggacagcagattttggtttaa

SEQ ID NO: 837161 - DNA, 100 bp, Homo sapiens
aggaagatgggagcctctgccttgtacagttcccatcactgaccttcctgatgcaaaatcgagagcccttgacaacattggcagagtttttgccagagtt

SEQ ID NO: 837162 - DNA, 104 bp, Homo sapiens
ctgtgcttggctggaaaaccccaaaagtgtacataagccaaactggcaagacgcagtcaagaacgggacaatcttggcatgttggtctggtcacccaatcaaaa

SEQ ID NO: 837163 - DNA, 100 bp, Homo sapiens
ttttctacaattgagtacgtgatacagtcctgacacagctctccctgaggagcagccacattccagctcccagtgcgcccctctccactgtctctccaag

SEQ ID NO: 837164 - DNA, 100 bp, Homo sapiens
cgcgggaggcctcggaggaggacctgctggtggtgcacacgaggcgctatcttaatgagctcaagaactttcacgatggccgtaaagcacagcagcacat

SEQ ID NO: 837165 - DNA, 98 bp, Homo sapiens
tgagacatttttcaatttctttcttgtcatccttgctggggactgaaaacgcttctgtgagacttgataatagatgtattgctgtccttgaatattag

SEQ ID NO: 837166 - DNA, 100 bp, Homo sapiens
ggaaaccaaaatagactgtgtccaagtggccacaaaagcacccgacagctacaaagtgcaagataagaaaaatgcctccagccgccctgcctctgcaatt

SEQ ID NO: 837167 - DNA, 95 bp, Homo sapiens
ctcagcctccagagtagctgggattacaggatgttcacttctccacaatgaatgagtgtcactatgacaagcacatggactttttttataatagg

SEQ ID NO: 837168 - DNA, 100 bp, Homo sapiens
agctgggactacaggcgtgtgccaccacgcccaggctttctgtctctggtcgtgatgagaacagtgtggagttaaccatggctgagggaccctacaagat

SEQ ID NO: 837169 - DNA, 100 bp, Homo sapiens
accgccatgggcctcactatctcctccctcttctcccgactatttggcaagaagcagatgcgcattttgatgggttctcctgaaaagaaagctgaacatt

SEQ ID NO: 837170 - DNA, 100 bp, Homo sapiens
aaaggcaaaggcaaaggcggctcgggagattcagccgtgaagcaagtgcagatagatggccttgattataatgatgagatcaggcaagcacagctccagg

SEQ ID NO: 837171 - DNA, 99 bp, Homo sapiens
tgacccagaacagatgcgacagagtttgctgactgcaatccgttcgggagaggctgctgccaaattgaaaagggaggcaaaaccttcaactgaggactt

SEQ ID NO: 837172 - DNA, 100 bp, Homo sapiens
aagacaccccttgaccagcacacactgcaaggagatcagctctccttaaggcggcagcaaataggtgaaagattgaatgaatgggcagtcttcagtgaaa

SEQ ID NO: 837173 - DNA, 98 bp, Homo sapiens
cccacatcttccggccaacttccattgaacttcccagcactcgaaagggaccgaaatggagagcaaagcaagaaggacctcaccagatgctgcccctc

SEQ ID NO: 837174 - DNA, 98 bp, Homo sapiens
agcacgatgtctgaagaagaggcggctcagatccccagatccagtgtgtgggagcaggaccagcagacctgcaatgcttcttttgccacccgagaccg

SEQ ID NO: 837175 - DNA, 100 bp, Homo sapiens
cactgctgcataatggagaacctctctacattccagtaacccagaagaagctcattcacacagaagacccatttaatgatgaacatcaggagaggcaaga

SEQ ID NO: 837176 - DNA, 100 bp, Homo sapiens
ctggtcaccgacagggatcacttcatccgaaccctcagcctcaagccgctgctcttcgtgatcgtaaacttgttgataaagaagatatcgacactagcag

SEQ ID NO: 837177 - DNA, 100 bp, Homo sapiens
ccccagcaatcataaagtcatccctgtgtatgtaggagtgaatataaaaggacttcatctcctcaacatggaaactaagcatttgcaagtgaggaagcag

SEQ ID NO: 837178 - DNA, 98 bp, Homo sapiens
cctccggtcactttcacaggcatcccagagtcagaaataccatcagaggaggggtactgtgactttaatagtaggccaaatgagaactcttattgcta

SEQ ID NO: 837179 - DNA, 100 bp, Homo sapiens
cttacacatgaacaacagctgattctgaatcacaagatggaacctctccaggtggtgaaaattatggcctttgccgccgttcatttggagggagagaagg

SEQ ID NO: 837180 - DNA, 98 bp, Homo sapiens
tctccagatgccaacattgacctcacaaccgagcaaattgaagagacgttaaaatacttccgtatcattaatgggattggaaattttaagtgcctttg

SEQ ID NO: 837181 - DNA, 98 bp, Homo sapiens
cagcatgattttcgaaccccggagtttgttcttgattattacagacctctttctgaaaagcccggaattggtacaagccatgtttcccaaactgaaca

SEQ ID NO: 837182 - DNA, 98 bp, Homo sapiens
ccggcccctgcagtccggatactcacgccagaaggtgggaagaagagcgctatcctgaaggcatcaagtggaaattcctagaacataaaggtccagta

SEQ ID NO: 837183 - DNA, 100 bp, Homo sapiens
gacactgagctttgtggaagcatttggcggcataccaccctgcactgtgagactgtgatcaaccactctatgattgtcctatgtgtgggctcatatgtac

SEQ ID NO: 837184 - DNA, 100 bp, Homo sapiens
gagtcagtcctttacctgttgagcagaggatggacatcaatactctggatgaatattttgaatatgatgcagaggagttcttggtctctttggccttgct

SEQ ID NO: 837185 - DNA, 100 bp, Homo sapiens
aaatttggccagttatccaattgatgaactagtagatagagccaaacaatcttttcaagggctccaaggtcctggccaagaaagagctggcctatgtccc

SEQ ID NO: 837186 - DNA, 98 bp, Homo sapiens
ggaaattcaggaaacatccaagaaaattgctgtcaaagccattgaagactctgatatgttacaggagatgacctcaagcagtttggcctaacaaccag

SEQ ID NO: 837187 - DNA, 100 bp, Homo sapiens
caagatggtgctgtcccagagacaacgagatgaactagaacactgctccctagaccatcggaaaaccagtcccacaacgtttgttccttctccatcctgt

SEQ ID NO: 837188 - DNA, 98 bp, Homo sapiens
tggtcgtttgtttctccaaggtttgaaaagcagctggcctgcaagctttctcatcattcattgagagcaggaccagatctcacagaatctgaaaagag

SEQ ID NO: 837189 - DNA, 99 bp, Homo sapiens
acaaactgggctgctgtgtggtagagaaaccccagccgagagatcgatgtcttattgtgatgagtctcgactgtcatatcttcttcggaggatcacccg

SEQ ID NO: 837190 - DNA, 100 bp, Homo sapiens
cgtgcagctcttggcaggagtagctgatcaaaccaaggatgggcctgtgatacttgggctgtgatcctctagagccagcttggactcacatcattctatg

SEQ ID NO: 837191 - DNA, 100 bp, Homo sapiens
agtccttcctttccgacttagtcctcgggaagaagtttcagactacaagagctcagagttctacagagtcaccactgaacaatatcagaaagctgctgaa

SEQ ID NO: 837192 - DNA, 98 bp, Homo sapiens
taggtgcagttggtccccctggcttcgctggtgagaagggtccctctggagaggctggtactgctgtgcgcttcccttcccacttcagctctgacttg

SEQ ID NO: 837193 - DNA, 99 bp, Homo sapiens
tgacctgtaaatcatcctttaggacagctcctctggcaatgtatctgaaggggaaagccctcctgacagccaggaggactctttccagggaagacagaa

SEQ ID NO: 837194 - DNA, 99 bp, Homo sapiens
gcgggagcggagacctcgctgcgctcatggcgtcgcccgggatgtctccccgttcaatgttgtggcctggcacgggaattatacaccctacaagtacaa

SEQ ID NO: 837195 - DNA, 98 bp, Homo sapiens
aatattagaccatcaacagtttgactacataataaggatgatgaattgtactctacagggggcagctggcattttatgctatgtgggagcctatgtct

SEQ ID NO: 837196 - DNA, 98 bp, Homo sapiens
ggggaacccgttcagcacaccagtggggcagtgcctcgagcaggaggaggcagcggaagaggatgctgaagcagaggctgagaccgaggagaccaggg

SEQ ID NO: 837197 - DNA, 100 bp, Homo sapiens
gggtcagagtgatagatcattcacaatatctgtgtcgttcttggcagaaattatattttccagcccgtgtctgcagattccaacaatgtctcacccatct

SEQ ID NO: 837198 - DNA, 100 bp, Homo sapiens
agctctcagaggctaagaaggtggagaccggagaagctgtgaggttgttctgagagctgtgttgtctgcgtgcacatgggtgagccggaaaggagacctg

SEQ ID NO: 837199 - DNA, 100 bp, Homo sapiens
ccagacatcaacatgcatcccttcttctttgccttggggaagatcctctctgtggaggaagatgatttgaatgggatccacattgtggcctttgcagaga

SEQ ID NO: 837200 - DNA, 100 bp, Homo sapiens
ctgagctctgaagtcagtcggaaggcagcctcagcctacgattatggctcctcccatggaaaccaatagagccatggcgactccctctgctgccttcgag

SEQ ID NO: 837201 - DNA, 98 bp, Homo sapiens
ggtggcttccgtttgttggtggaggaggtggcaggcctcggcgtactatactggcaattgctggagaagattttgcaattgttgcttctgatactcga

SEQ ID NO: 837202 - DNA, 100 bp, Homo sapiens
tcttaatcccaatgttgccctgaaatttatgtccaggattcaaaaagtttaggactgctaaggaagaaggtagataatgactataatgcccttcgagaaa

SEQ ID NO: 837203 - DNA, 98 bp, Homo sapiens
agaaaaccaagcaaaggatgtgcagaaagagggtatatttacttctggcacatgggaagagaaatcagatgaaatttcctttgctgacttcaagttct

SEQ ID NO: 837204 - DNA, 75 bp, Homo sapiens
acatcctggaacctgggaaaggctaaaaatgaagctgatcgtcaggcagaaaaacgagaaattaaacgtcggctc

SEQ ID NO: 837205 - DNA, 100 bp, Homo sapiens
gccgaagagaacaagacgtgtgaagactcaggacccagatgatgtggtaccagttggccaaagaagagcctggtgttggtgcatgtgctttggactagca

SEQ ID NO: 837206 - DNA, 100 bp, Homo sapiens
ttcaaaaattaccattttatgatttactggatgaactgataaaacccaccagtctaggttgtctgcagagtgagattatggcgaagcattttattctttt

SEQ ID NO: 837207 - DNA, 100 bp, Homo sapiens
ctggttagtgtgctctgagggagggtccgagccagccgctgttttgccggaggagcccctcaggccaattcagcttagagaactatcaacacaggacaat

SEQ ID NO: 837208 - DNA, 98 bp, Homo sapiens
tgtgtatgatggcctggcgacccattcaggcacttatggccatttcagccagtagagatcttttcctagcaagctgttcacaagattgcctgataaga

SEQ ID NO: 837209 - DNA, 100 bp, Homo sapiens
ttgggaagaaaaggctagagaagtcaccctccttcgcctcggagtgggatgagtgagatggaagattttcgaggtatagcagaagaatcatttccaagct

SEQ ID NO: 837210 - DNA, 100 bp, Homo sapiens
aggtgactctatgctttggagaggagtttccagaccctcagaggcaaagaaagctcatcacagctcacgtcgggaactacaagcggactgtgaagcggat

SEQ ID NO: 837211 - DNA, 98 bp, Homo sapiens
ctgtagaaattgtgacaaacgtggtcatttatcaaaaaactgccccttaccacgaactgcttttcaggaagccttggacgctgcaggtgataaacttg

SEQ ID NO: 837212 - DNA, 100 bp, Homo sapiens
ttggatgttggatctacactttctcaagcactgtgatcttcaaatgtattgcactatgtggagaaacccagcacatttatcagtgacatcatcaactgcg

SEQ ID NO: 837213 - DNA, 100 bp, Homo sapiens
gagttcactcatgtttgcacccgcggtgatgcgtgcttttcgcaagaacaagactctcggctatggagtccccatgttgaaccacaatggacactgccag

SEQ ID NO: 837214 - DNA, 100 bp, Homo sapiens
cacgcagcctggggactctgcctcgtgccgctgagcctggcgcagatcggcctcatgcattgtgcgtcagcagcaatgtttatggtgaaaaatggcaacg

SEQ ID NO: 837215 - DNA, 98 bp, Homo sapiens
ccacgcacatctacggcgcctcggccggggcgctcacggccacggcgctggtcaccggggtctgcctgggcggacgccgcgggcatggactattcgta

SEQ ID NO: 837216 - DNA, 100 bp, Homo sapiens
aggcgaggagctcagcatggtcatcctgctgccggatgacattgaggacgagtccacgggcctgaagaaggaaaatcctgccttgcttcgttgggcctat

SEQ ID NO: 837217 - DNA, 100 bp, Homo sapiens
tttttttgcggaacctgaaaaattcaagaagttgaaaaacgcttttcacgtcacctggagagatgcacagagttgatctctctaatgtattagatcttca

SEQ ID NO: 837218 - DNA, 100 bp, Homo sapiens
gagagattggctgcccgtttggagggtcacaaagaagggattgtacagactgaacagattagatatgatcattctgtttcaaatgacaaagccctgatgg

SEQ ID NO: 837219 - DNA, 98 bp, Homo sapiens
accagcagctgtcgccgccgctctcagattattcagctgattgaaggcaaagcctctgcttatgtatttgcaagtcctggttgtaagaagtgggatac

SEQ ID NO: 837220 - DNA, 99 bp, Homo sapiens
gaagatccttcaggtgctggaaaggaatgaggagttacagagggccgagaaggacaggatcaggaagatgaagtcctcagtacattctgaagaagatga

SEQ ID NO: 837221 - DNA, 100 bp, Homo sapiens
caggaaaatactggagttcctgagatctcaagaaacttgtggtggagaatgttgatgtgttaacacaaatgaggaccagctttgacaaaccagaccagat

SEQ ID NO: 837222 - DNA, 100 bp, Homo sapiens
gagtgatgaagatcccgaggatgaagacgccttgccagccagcttcctgcctgacacagctcacttcaagaagtgcacaatgtcagaacgtggaattaag

SEQ ID NO: 837223 - DNA, 100 bp, Homo sapiens
aagaactgttgagttttatcattttcgttaagtgaccgtgcgcagcgctgtaactgcctgtcccaggctctctatcttctctgctacatctccacaacag

SEQ ID NO: 837224 - DNA, 99 bp, Homo sapiens
cctgataacatggccagcaagaaagtaattacagtgtttggagcaacagcgatgtgcattttgtaagcactttggagccactatcaaatgctgtgaaga

SEQ ID NO: 837225 - DNA, 100 bp, Homo sapiens
ggagattgacaatcaatgggccatcttggacgattacaggagcttattaatcataagaaggctgaggacacagagaagaaagatgagcccagcaaatata

SEQ ID NO: 837226 - DNA, 98 bp, Homo sapiens
tccgcttagtcatcacatcatttcactgtggaagttggtgaaccatctaaagaagagaaggctgtggccaagtatcttcgattcaactgtccaacaaa

SEQ ID NO: 837227 - DNA, 98 bp, Homo sapiens
tttactaggtcatgaagggaagatggctgtggaaggtgttttaaaggtcactctgactgctgagacctcatgtagctacatttcctggccccggaaaa

SEQ ID NO: 837228 - DNA, 98 bp, Homo sapiens
tccattgtgatcccaccttctgggcaaagaatgtagtcaatttagatatttgaatggtggtacttccataagcatggcacatcttttattgagcaagt

SEQ ID NO: 837229 - DNA, 118 bp, Homo sapiens
ttggattgatctgtgatggatgccctgtcgggtacacaggaccacgctgtgagaggatggctggctgtggtgaaattgatcattcaataaacatgcttcctacaaacaggaaagcgaa

SEQ ID NO: 837230 - DNA, 98 bp, Homo sapiens
tacatccatgtaccagaagtgtaccactgtggatgaagcagatacaaagccagcctgcgtatttaacaatgtggaatattatgatggagacatgtttc

SEQ ID NO: 837231 - DNA, 100 bp, Homo sapiens
tgaaagctagaagaaaaggtgtacttgcaagaaacctcaggacttgagtaacagcaacatgggtgtcgtagtcattcttcagcacaattcttaattggag

SEQ ID NO: 837232 - DNA, 100 bp, Homo sapiens
catttcagatcctatggacccgaacccttgtagtgcaacatacagcaacttagaacggaaagatgctgaaggatgggagaccgttcagagaggaaggcct

SEQ ID NO: 837233 - DNA, 100 bp, Homo sapiens
actacagaacagcacgtaccagaggtggaagtccaagtcaaacgcagaaggactgcctcactgagcaaccaagaggaggtatatcatacaaagagaatgc

SEQ ID NO: 837234 - DNA, 100 bp, Homo sapiens
accgagagcgtgaccgagagcgcgaatatcgtcatcgttagaaggatccatgctgcagaatggtgtctctgattttgagaccaagtctttgactatgcac

SEQ ID NO: 837235 - DNA, 98 bp, Homo sapiens
aaaaattaatcaacagagtgggacctaatggtgagaggaggttgtgcccagacatttccttcttccagagggccactgactacccttgcctcctcatc

SEQ ID NO: 837236 - DNA, 98 bp, Homo sapiens
ccctggaccaaaacgctggagaacaaacactcgccctctaccaggtggtacccctgggatggcgtgagcactcccccagcgatggacccatctgtgac

SEQ ID NO: 837237 - DNA, 100 bp, Homo sapiens
tacacctgaaaatcttcgcctgaagcagcaaagtgaattgcagagtcagttcccagaaatgaatgctatgatcatgcgacggttcagtttgcctggagat

SEQ ID NO: 837238 - DNA, 98 bp, Homo sapiens
aaagtattgtaacagctgaagtgtcttcaatgcctgcttaattcagcaactgtttgaagaaatcctgagtaatagtaggcaactgaaatggctgtcct

SEQ ID NO: 837239 - DNA, 98 bp, Homo sapiens
gaacttctcaggaagcagtactattcaagagagaattcggtcaacagtggatgaaaaagaacaaaaacaacttcttatggatttggatgtagtaatgc

SEQ ID NO: 837240 - DNA, 142 bp, Homo sapiens
caggagctgggccgtgactacaggacctgtctgacgatagtccaaaaactgaagaagatggtggataagcccacccagaccaccatcatggcagtggagtttgacgggggcgttgtgatgggttctgattcccgagtgtctg

SEQ ID NO: 837241 - DNA, 98 bp, Homo sapiens
aaaggcagaactgcctgattacaggagctttaacagtgcactcactcttgaggatgagaaaagaatgctgtcatatttgattaatggatttataaaaa

SEQ ID NO: 837242 - DNA, 98 bp, Homo sapiens
gaagacgagatccagttcctgcgaactatcttaccaatatatttgagtccttcctgcctcagttattggcctatcctaaccccatagatcctctcaat

SEQ ID NO: 837243 - DNA, 100 bp, Homo sapiens
gtacagccacactaactgtgacaggtcctcgatgggcttcctggaatattggtgtgtttatttgcatcagatgtgctggaattcatagaaatcttggggt

SEQ ID NO: 837244 - DNA, 100 bp, Homo sapiens
ccgatttcaaggaagccaaggggtttattacagaggtcagctgggaagagctaccactttaagtgtaactcctgaaatggaaagagtgaagaagaatcaa

SEQ ID NO: 837245 - DNA, 100 bp, Homo sapiens
tgagacactttgcaaaaaaacttgatcctcgaagagaaggtggtgatcaaagggttgtttgcattcgctccacttggaatgctctctctccaaagctgag

SEQ ID NO: 837246 - DNA, 100 bp, Homo sapiens
tctccgccgctgcgggcccgctccgacgcggaaggtatgcatcttctattgatgatattttggaagatgaagaacattatgcagatcagttaaaagagta

SEQ ID NO: 837247 - DNA, 100 bp, Homo sapiens
gaagaccattcagatgggatctttccggatcaatccagatggcagccagtcagtggtggagcttcgaagttccttcaacaaagcgttcagtataaaaaag

SEQ ID NO: 837248 - DNA, 98 bp, Homo sapiens
agaacctggaatttatgcaggatattttgattggaaggactgcctgcctccaacagatgcttgggatttgctttacattctaagtggatttggagaag

SEQ ID NO: 837249 - DNA, 100 bp, Homo sapiens
agttcgaagagcagcattggaaactctgtttacgttattatcaacacaggaccagcgccagccagcctttgacacctttgatgggtccctgtttgctgtt

SEQ ID NO: 837250 - DNA, 141 bp, Homo sapiens
ggagcgatttagggctgttacacggagctactacagaggagctgcgggagctcttatggtctatgatatcactaggctttcagtccagtgtaaagctgttggagcgcgggagcaaaggtaaagaatgatgtaatgcgctgg

SEQ ID NO: 837251 - DNA, 100 bp, Homo sapiens
caaatcagatgcagctgttttaactatccctgcctgtgactttcaaggccttggacaagattcgctatgagagcctgacagacccttcgaagttggacag

SEQ ID NO: 837252 - DNA, 108 bp, Homo sapiens
gttatggtgggaggagccgatactgagcttcttcctatttgccatggacatatctgaagagatggattaagaatgctttggattaaggattgtggagcacatttcaat

SEQ ID NO: 837253 - DNA, 100 bp, Homo sapiens
cacaaggattctcgctgtgacagagacaacaccgagtatgagaagcactacaaatactgtggcagcatataatttaacttggaaatcaactaatttcaag

SEQ ID NO: 837254 - DNA, 100 bp, Homo sapiens
gggcagtcccgggagaacctgcggcggccggagcgagaagatggcgaattagaagatggtgaaatagacgatgcaggatttgaagaaatacaagaaaaag

SEQ ID NO: 837255 - DNA, 101 bp, Homo sapiens
caggagagctgcgccggcgagaagcggccgagccagcagcagaacccctgaacagtgcccaagtgttgtctctttgttgtcagagagttacaaccctcatg

SEQ ID NO: 837256 - DNA, 100 bp, Homo sapiens
gaaggccgggacccggttccccggcccacagtgggggtgtgcaaacccgagagaactggggagaagctgtgtacactgtccccagctcaatgctgtgcat

SEQ ID NO: 837257 - DNA, 99 bp, Homo sapiens
ccacggccgcctccggagcccgacgcgggactttgaatccaaagcaaaccatcttggtgattctggtgggactcctgtgaagacccggaggcattcctg

SEQ ID NO: 837258 - DNA, 105 bp, Homo sapiens
ggatacatcagagtcagctggaggtggtcagaattatttgcaatgtttggaagagcgtgttgtgaatcacatggcagcaaaaattattgaaaatgtctgtaccac

SEQ ID NO: 837259 - DNA, 98 bp, Homo sapiens
tgtgatcgttggcggacattttggaagggaaaaggccgaggcatcagcgtgtgaagaccgcaaagacgatcccgagtacagttgtgaacagcattgct

SEQ ID NO: 837260 - DNA, 99 bp, Homo sapiens
ttaaagtaactgtagaagaccctgctctacaaataccccctttcagaaatactcagcagatcattacacacctttcccttctgacctgggtttcctctc

SEQ ID NO: 837261 - DNA, 135 bp, Homo sapiens
gtttctctgttgtctcggtagaaggccagagtcacacacggtcctaagagctgggcaccaggaagcgaaggctgaacaaaactattgtgagtcgaggtatcattttctgcactcagcggacggggagggctgtgc

SEQ ID NO: 837262 - DNA, 98 bp, Homo sapiens
gataaactgcgaggacagagccactggacattggaagagcatgaggcagagacaggaatgaagtctaaagaagccagaaaatacattttcaacagtct

SEQ ID NO: 837263 - DNA, 100 bp, Homo sapiens
accatgccgtttgaggatgacaaccgtacccggctgtaccggcagatcctcaggggcaagtacagttactctggggaggaatcagtgacattcaaagatg

SEQ ID NO: 837264 - DNA, 100 bp, Homo sapiens
tctgatatcatccctcagcactgatgttctcatgggagcagtgccgtgtctgcatgttacacaacagccaatgcggagtctgacaatgagcgggactctg

SEQ ID NO: 837265 - DNA, 100 bp, Homo sapiens
agctggtagatgggctggcttactgaaggacatgattcagactgtcccggacccagcagctcatatcaaggaccccagccaggccacggggacaacaggc

SEQ ID NO: 837266 - DNA, 100 bp, Homo sapiens
ggcaaggggacgtctgcagctgagttgtctgcattcaaaagagcattctattaaagctaccttaatttggcgcttatttttcttaatcatgtttctgaca

SEQ ID NO: 837267 - DNA, 99 bp, Homo sapiens
tttgatcatgcttatggtaactatatggaagctgcagtaaaggaagatgaagaagaagtttcagataagggcagtgattctgaagaagaagaaaccaat

SEQ ID NO: 837268 - DNA, 98 bp, Homo sapiens
gggactggaggtggctggatgggtctcctgtgacattaagagtcactgaaaactaagctgcgctttcctaaagtcctgcgaactgaagccagacaact

SEQ ID NO: 837269 - DNA, 99 bp, Homo sapiens
gggactgggcatccacccggccaggttcccaggaagttcccagtgacctgacagcagaggagcgtcaagaactggagaacatccgacggagaaaacagg

SEQ ID NO: 837270 - DNA, 100 bp, Homo sapiens
cgaccgtggggaggtgccgccggggtcgcagttcctctgtgacgagggtgcaggtatctctggggactacatcgatcgcgtggacgagcccttgtcctgc

SEQ ID NO: 837271 - DNA, 98 bp, Homo sapiens
tgctctggaggacatgcttccaacaaagagaaagaaatggtgactagtccaaagcagcatatgtactcttctaccagagacaagacactttcagtgga

SEQ ID NO: 837272 - DNA, 99 bp, Homo sapiens
gtagcgaggaggaacgcgctaaggcaaagcacctgttggagtcattcgttgcccagtttgcagccaagaatgtgcagagagacacatcatagataactt

SEQ ID NO: 837273 - DNA, 100 bp, Homo sapiens
cctccagaggcaggagcggcatcttttcctattcaatgatctgtttgttgtggccaaaatcaagaaaatgtctaatcaacaggagaagtatgaagctcag

SEQ ID NO: 837274 - DNA, 101 bp, Homo sapiens
agaaggtggcgatgttggtccaagggaactgggtggtgaagaggctgctttgctggctctgcaagaaaatggactagacgcaactacagtgaaacaagagc

SEQ ID NO: 837275 - DNA, 100 bp, Homo sapiens
taccattgagcttttctttctgaacgcgaagtcctgcatctacaagacggacatctgagtaactggggaattggcctgccttgcatgtgagcttgatgga

SEQ ID NO: 837276 - DNA, 98 bp, Homo sapiens
ggaaaaacaaaaatgaatgaatcaagagtgatttgttaatgttacaggaggttccagtggcatcgggaagtgcattgctatcgagtgctataaacaag

SEQ ID NO: 837277 - DNA, 100 bp, Homo sapiens
tgcctcagcaacactggtccctgttgccccaccaatatgccagataaagaggattgatgtcttcacatgttgactcttcatgtctggatatggtttggat

SEQ ID NO: 837278 - DNA, 98 bp, Homo sapiens
cttgcgactcgtggccacgggagccactcgagctggaaagaccacagcaagattctttcattcgtctcctcctagcctgggggaccaggctcgaactg

SEQ ID NO: 837279 - DNA, 98 bp, Homo sapiens
gctctacccaggagccttggagtatgatcagaatcttcagctacttggagcaacagccattgaggataaattacaagatcaagtgcctgaaaccatag

SEQ ID NO: 837280 - DNA, 100 bp, Homo sapiens
tccgagaagagcagagcggagggagccccagacacgagacgagttgtactgctgtcacaggaaatggacgctggattacaagcatggcagctcaggcagc

SEQ ID NO: 837281 - DNA, 100 bp, Homo sapiens
tatgtggtcactccacacaccatgaatctactaaagcagcacctggagattactggtgggcaggtgtattccacgtggagaaaaatggtcgctacagcat

SEQ ID NO: 837282 - DNA, 100 bp, Homo sapiens
cagaacacaagattaatcaatgtcaactgacagccctaaccggcagccatttgttctctttggtaatcactccacacgagaaaacctgaatgctggcaac

SEQ ID NO: 837283 - DNA, 100 bp, Homo sapiens
gaagaaccacctagcatagaggaagttgaagaggtggcaccacctagagatcatggaagggaagtggttgctgtgtatgttactggtgcttggaactgct

SEQ ID NO: 837284 - DNA, 100 bp, Homo sapiens
tggaagttccaaagttgcaacgatttctagctggactggccattatggaggaggagctgcagcattcccattgtgtgaattgtgtcagtagacggtgcat

SEQ ID NO: 837285 - DNA, 100 bp, Homo sapiens
gatggcttcagacagcatatttgagtcatttccttcgtacccacagtgcttcatgagaggcaccttcagtgccccgtgggctgccctggcccacagccgt

SEQ ID NO: 837286 - DNA, 100 bp, Homo sapiens
gtgtatcccaagaagatcagacctcttgagaagcagggacccatggagtccaggtggaatgaatcttacttgttgaatatcttctggttactagttggat

SEQ ID NO: 837287 - DNA, 100 bp, Homo sapiens
cagtgctgttaccactctgggtgatccagccaaagtaactctcaggagccttctccgcagttggcttcctcggtagcttccacacggagcatgcccgaga

SEQ ID NO: 837288 - DNA, 99 bp, Homo sapiens
cgcaggaggacttcgagctgattcagcgcatcggcagcggcacctacggcgacgtctacaaggtccaggggcaagttcatcctactctcgagtctaatg

SEQ ID NO: 837289 - DNA, 100 bp, Homo sapiens
gtcccatgtttttgagtatatccgttctgagacatacaaataatcaatgaactgagccatgttcaaatccctgttatgttgatgccagatgacttcaaag

SEQ ID NO: 837290 - DNA, 99 bp, Homo sapiens
aataccatctcaacttcctgaagaaaagatgtacagtgggagaaatcacagatgccctgaaaaaggtatttggtgaacataaagcgaatgatcgaatgg

SEQ ID NO: 837291 - DNA, 100 bp, Homo sapiens
aacagaaaacttgaagagtctggtcttgcacttcctgcaacactactgtgtgaagacattcacaggacacagagaatgggtacgtatggtacggccaaat

SEQ ID NO: 837292 - DNA, 98 bp, Homo sapiens
aaccctgaagtcggtgtctgctgcgttcacggcaggattcggttagatgtccaacatcacagtcacatacagagatggccgagtggcacagctggagc

SEQ ID NO: 837293 - DNA, 99 bp, Homo sapiens
caacaactggtactacatttccccgaggctcaccttccagtgcctggaggacctggtgaaccactattctggatcttctccatactgtcttcaagaatg

SEQ ID NO: 837294 - DNA, 98 bp, Homo sapiens
ggcgagccggagcgcggagcccggctcccgcaccatggaggaggacgacagctacggcagagatcctacaagaatccaggatgatgatcccagattgc

SEQ ID NO: 837295 - DNA, 100 bp, Homo sapiens
gcagaaggggctggagcgtcgggccaggaagacggagaactggtgtgatgccattagtgtattggagaaagaacatgactacagagatgaacattttgat

SEQ ID NO: 837296 - DNA, 99 bp, Homo sapiens
acacatttgtatgtctgtgggagtggcgctttcagtcctgtctgtacttacttgaacagagggaggagatcagaggaatcactagatttgatctacttg

SEQ ID NO: 837297 - DNA, 99 bp, Homo sapiens
aaggttgcgggtcatggagtcccgaaccctcctcctgctgttctcgggagccgtggccctgatccagacctgggcagagaaccatggagtctggcagta

SEQ ID NO: 837298 - DNA, 120 bp, Homo sapiens
gccttctgccgtgattgtcagtttcttgagggctccccagccatgcttcctgtacagcctgcaaaactgttttgaagccgcttctctggccgagttaggtttcgcccagcgcaatttctt

SEQ ID NO: 837299 - DNA, 100 bp, Homo sapiens
gaactgcatcatgcctacaagaagagctcttcctgccatgatgcagtgggtccgcacgcagaagccaggagagagtggcatcaatattgtcactgccgat

SEQ ID NO: 837300 - DNA, 98 bp, Homo sapiens
acaatgtagaggatgacttctctaatcagttacgatggaggaggagcacctctatgccttgaggtggaaagaactggaaatgcacagcctggctttgc

SEQ ID NO: 837301 - DNA, 100 bp, Homo sapiens
gatatcatcttcaagttggaacaaggagaagagctgtgtatggtgcaggcccaagttccaaatcagacctgtccaagtgcggtctgcctgcagcctttct

SEQ ID NO: 837302 - DNA, 116 bp, Homo sapiens
tgaaattagccgactggatggcaactctgccggagagcatgcacagcatccccctcaccaatttagccattccagctttccagaacatgaattccaaaaggaaagcagaaacctgg

SEQ ID NO: 837303 - DNA, 100 bp, Homo sapiens
ggagagcacaaccatcgcagttggaagcccatggggcaggtaaagatgtctttgaagcattttataaaaaagatttggcaaaaagactccttgttgggaa

SEQ ID NO: 837304 - DNA, 100 bp, Homo sapiens
atgcgattttagtggaggactacagagccggtgatatgatctgtcctgaatgtggcttggttgtaggaatctggtggacagtaacaaactttggtgaaat

SEQ ID NO: 837305 - DNA, 100 bp, Homo sapiens
gcgggactcttggcctgtccctcacatccgatgcaccctttttgtcagattatcaggatgaggaaagccaaacttggccctgctggcaacaaagtcatca

SEQ ID NO: 837306 - DNA, 99 bp, Homo sapiens
tgaagttgccaggcttcccaacattcttgtctgtggagcttcagaaatacgagcagttcatctttgcagatcataccaatatgattcacgttgaaaatg

SEQ ID NO: 837307 - DNA, 100 bp, Homo sapiens
atgatgtcaggagggcagcagtagaatcacttgggttcattctattcaggacactgcccatctctaagataagaacctggaaaggggactctgttggcca

SEQ ID NO: 837308 - DNA, 100 bp, Homo sapiens
aggggctgtgccaccctcgggtgaaagtgggcaatgagtacgtcaccaaggggcagaatgtccagcaggcaggtaaaaatcaaggtgaccccaagaaaat

SEQ ID NO: 837309 - DNA, 100 bp, Homo sapiens
ttaattaaccctcaaactgcccagtgaggtagtttcatgatcaacatgggagactcccacgtggacaccagctccaccgtgtccgaggcggtggccgaag

SEQ ID NO: 837310 - DNA, 98 bp, Homo sapiens
gatgtggaggaaaacaacttcgagggcagaatagccatgtgtgagcctgaatttggcaatgacaaggccagggagccgagcgtgggtggcaggtggcg

SEQ ID NO: 837311 - DNA, 99 bp, Homo sapiens
tttccgccctaatggaggtctccagtttcggaaagcaagtcttgctctaattcgaaaaatgattcatttttgctctgaagcactgttaaaagaagtttg

SEQ ID NO: 837312 - DNA, 100 bp, Homo sapiens
ggacctgctttcggagtacatgggcaattaccatgcggagaccatcaagaatgtgcgcacagccacggaaagctttgcttctgaccccatcctctaccgg

SEQ ID NO: 837313 - DNA, 100 bp, Homo sapiens
ggggaatgttaatattgatattattcaccggattgatagaactgcaagctatgaggagccctgtatgatgagattcgtcagtttcgcaaggcctgtgggg

SEQ ID NO: 837314 - DNA, 98 bp, Homo sapiens
atgctgcaacgcttaaaacgatgaagatttctcgtttcgaaaggcaggatgaagttaaaggaagtagatcgtacagccatgcaggcatggagccctgc

SEQ ID NO: 837315 - DNA, 100 bp, Homo sapiens
caggcacagagactgactgaatggctccaattatcaggatttgaaaacccagtatcagaatctaccactttgtcattggattaaattgtgctttgggtgc

SEQ ID NO: 837316 - DNA, 126 bp, Homo sapiens
atgccaacccacctaactacggaaaacctgatcccaaaattattgaaaacactcgaaggagcctggcccaactagagaatctgtgcaaacagctgtatgaaaccacagacacaaccactcgactcc

SEQ ID NO: 837317 - DNA, 98 bp, Homo sapiens
atgggtcaggtcacagagaagctgcagctgacttacatggaggagacgtgtcgtcactatgtggcccatgtgaagatcccttcccactggaggcatgt

SEQ ID NO: 837318 - DNA, 100 bp, Homo sapiens
gtgcagattttaatttcagtgactgaattaaaaggtgtcaagaagctcagaatggactacttccagcaacccagtctcctgccatgtccgaccccatcac

SEQ ID NO: 837319 - DNA, 100 bp, Homo sapiens
tttcagagcgcagccatcggtgcgctgcagcattttgaaagcgaagcagaagccgtagaatcagcggcgagcctgttgaaagaacccacaggtgcatttc

SEQ ID NO: 837320 - DNA, 99 bp, Homo sapiens
tcatattccttggtcttatgaagattcactaaccattgcacaggagtatgcggttaatgaagttgtggcagggataaaagaatacttcaacgtaatgtt

SEQ ID NO: 837321 - DNA, 98 bp, Homo sapiens
atatcatgcaagtgtggcaaatggagtagcactgtagatgggttaaggaaaagacccctcatcgtatttgatggaagttcaacaagtacaagcataaa

SEQ ID NO: 837322 - DNA, 99 bp, Homo sapiens
ccgctgctaactcggctacaacatttggcagaggaaggaacaccagccagccgtggaacctcaggtgcaacagagacgccaggagatactagtgcccag

SEQ ID NO: 837323 - DNA, 100 bp, Homo sapiens
gggagctgtggccacctgagaaggacgtgagcctgcacttcgtgctctggggctgcctgcacgtgtaccagcgcatgatcgacaaggcggaggacgtgtg

SEQ ID NO: 837324 - DNA, 98 bp, Homo sapiens
ccccatggacatctttgatatgttttttggaggaggaggaaggatgcagagagaaaggagaggtaagccaagatgggtgcatacaagtacatccagga

SEQ ID NO: 837325 - DNA, 100 bp, Homo sapiens
ggcagcgcgggatcccagcctcaggcgtgcgcggacggtgtgcgggtaaaaagatggcctatcagaaggtccatgcagatcaaagagctccaggacactc

SEQ ID NO: 837326 - DNA, 98 bp, Homo sapiens
ctggctcaggaaccacgagagatgactgcagatgtaatcgagcttaaagggaaattcctcatcaacttagaaggtggattttcaagacacgaatgctc

SEQ ID NO: 837327 - DNA, 100 bp, Homo sapiens
ttctgtgctccagtttcttggtttataaaagttcaagctgaagaagatgtggaaaagtcccaatggaactatccggaacatcctgggggggactgtcttc

SEQ ID NO: 837328 - DNA, 100 bp, Homo sapiens
gacagcctttccgcgcgggactccggggcgccacgggggccatgtaagcaggcagttgcagtggtgcagaatggctgacctcagtcttgcagatgcatta

SEQ ID NO: 837329 - DNA, 100 bp, Homo sapiens
ggtccggctgctggatggaggggattttgtcagcttgtcgtcaaggaatttgagagcgtattttgcggtaaaactggccgaaggctaaagctgaccagac

SEQ ID NO: 837330 - DNA, 98 bp, Homo sapiens
acaatggacaggcaccttttaccatcactcctgtgttttcagtaggagagaagtttgctgaggaatgccttcaagcacaaagtgatgaatgactgcct

SEQ ID NO: 837331 - DNA, 100 bp, Homo sapiens
gccctctgcagctgaataacccttttaacgagtattccaaatttgatggcaaggcagctatcaatggtgtaataccacaggaaaatggcattctacaaag

SEQ ID NO: 837332 - DNA, 116 bp, Homo sapiens
ggggtggctggcccccctggaattacgggattcccaggattcataggaagccggggaagcagctcgagagtgtcgtagaaagaagaaagaatatgtgaaatgtttagaaaacagag

SEQ ID NO: 837333 - DNA, 98 bp, Homo sapiens
ctacccgcttctcgtagtcctgggagcacagcagaagtgtactaggttttgacaagcttgcatcatgcgtgagtataagctagtcgttcttggctcag

SEQ ID NO: 837334 - DNA, 98 bp, Homo sapiens
gcgccccgccatgccgctctactccggtctttgatttgcgtcagtgtcatcgacagatgcagcagcaggcggctactgcacaagctgcagcagctgcc

SEQ ID NO: 837335 - DNA, 100 bp, Homo sapiens
tcatttcacatcgaagccatgatttaaatatcggcgttaagtaacggcacagccaacaagatgaacggagctttggatcactcagaccaaccagacccag

SEQ ID NO: 837336 - DNA, 100 bp, Homo sapiens
gtcagccccggcccccgatcttgggctatggaggtgaggcatgaaattcaagatggaaccatacatctttatatttattctatacacagtattccaaagg

SEQ ID NO: 837337 - DNA, 100 bp, Homo sapiens
attttataggtcattatacccaaagattatccaggatatagagggaaatccctaagtcagccaacccctcctcccatgccaatcctttcacagtctgaag

SEQ ID NO: 837338 - DNA, 100 bp, Homo sapiens
gactggtgatgacaggctcttcagctccctgcaagtgaccgggcctggggaacagtttgtcccatgaggagcacccccatagccatcctctctatggaca

SEQ ID NO: 837339 - DNA, 100 bp, Homo sapiens
ctcgaccatgggcagaatcccagctgcccctcccagaacactccatgccactggaactcaggagcgcagattattcactgaccagcgctgacctgtcagc

SEQ ID NO: 837340 - DNA, 100 bp, Homo sapiens
aagtggagggacaccagcaccacctaggagaaaacgaaggcagactggacagacctttgatgaatgtgtagcagaaggtggctcagactgtgctccagag

SEQ ID NO: 837341 - DNA, 124 bp, Homo sapiens
agaggagcagcgcacccgcacgagccttggaccctttggaaccgaaaggttctagtaaataccgcttgctgtgttttgatgttggtggctaagctcatccagtgtattgtgtttggccctcttc

SEQ ID NO: 837342 - DNA, 100 bp, Homo sapiens
cccttcgccaaggagatcgtctctctcatcgaggcccaaaccgccaagccctttctaaggcacaaaatgatgtgatggaaatgaagatgcagtcagagag

SEQ ID NO: 837343 - DNA, 98 bp, Homo sapiens
gcagctccaagagctgtggcccgggggcctcttctggaccaggaaactctccactctccggagtagagatgaagagagaatttctaaacctggggctg

SEQ ID NO: 837344 - DNA, 100 bp, Homo sapiens
gcccctgggcgtctcctacatcgacgaccacgtgcggaggaaggactcctcgctctatatagatgcaacaaggagacgcgcctttgccctggtctctcaa

SEQ ID NO: 837345 - DNA, 99 bp, Homo sapiens
aagccttcagttacatactgattctttaagaaaatcagataacttgtactggagagaaatcctacaagtgtgaaaccgaaacttcattgccccttcaat

SEQ ID NO: 837346 - DNA, 100 bp, Homo sapiens
acgaggagctgcagcagtcgcgcatccgcatcgacagcctctctgcccagctcagccagctccagaagcaggggatgaacgtagggcacttagcttcttc

SEQ ID NO: 837347 - DNA, 100 bp, Homo sapiens
agaatctgaacttaggacagtattgagcttcctacaagctgttctggccagaatcaggatgacagtgatgggattccgtggtcagaagaacgggtggtac

SEQ ID NO: 837348 - DNA, 100 bp, Homo sapiens
cgcctccttcccagccgcgcggcttcctccagacctctcggcgcgggggatcccaacaagccctcaggattcagaagtgttaaagctcctgtcactaaag

SEQ ID NO: 837349 - DNA, 100 bp, Homo sapiens
tggccaaggagcagcatttgcagatttaagtgccctgtatgctcaaaatttgtatcctcagatgaaatggatttgcatcttgtaatgtgtttaacaaagc

SEQ ID NO: 837350 - DNA, 101 bp, Homo sapiens
gcgccgcagcccgggcccaggccccggcagcgcctgggacaaggcttaatgccagaccgggagttggaggtgtccgatctcgagttgggatccagcaaggc

SEQ ID NO: 837351 - DNA, 100 bp, Homo sapiens
ctgcctgagagatctccaagaattacaggtcggtgagctggtaaaggttacgaagattaatgtgagtggtcagtgggaaggggagtgtaatggcaaacga

SEQ ID NO: 837352 - DNA, 98 bp, Homo sapiens
aaacaagggaggagaagacaagctaaaaatgattcgggaatatcggcaaatgctcttctgggagaagaagctgagcggcctgaacgccttcgacattg

SEQ ID NO: 837353 - DNA, 98 bp, Homo sapiens
gggcctggaatccctacgcgtccctttgggtttagcacgatgagctcaatcggcactgggatgaactgaggaagtgtagctggccaggggttcccagg

SEQ ID NO: 837354 - DNA, 98 bp, Homo sapiens
agattccaagttcaggagaactcgaccgacattccattattgttccattgacctttccctcatcactgagtcctttggagctgagttatgtcaacagc

SEQ ID NO: 837355 - DNA, 100 bp, Homo sapiens
cggtcttcaccgtccacagaccactacaagcagttcccatcaccagaatgggacacggtaactcctgaagccaagaacttgatcaaccagatgctgacca

SEQ ID NO: 837356 - DNA, 99 bp, Homo sapiens
ggagcccggccccggggaactagggagcgtctccggctgcacagcgctcaggtgaaagaactcttttcttctttgggagtcgaatgtaatgtcttggaa

SEQ ID NO: 837357 - DNA, 100 bp, Homo sapiens
agccggcgtgggcggcggcaacggggcactgacctgggtgtggacagtttgcggttgtgaagaaatgccgtgagaaaagcaccggcctccagtatgccgc

SEQ ID NO: 837358 - DNA, 100 bp, Homo sapiens
agtttggaaggtcagacctttttctccaagaaggacaagcccctgtagcaagctaggaattgtttcccttctactgggcacaatacacgcattgattttt

SEQ ID NO: 837359 - DNA, 99 bp, Homo sapiens
gcagttccagtccgttgctttactttttgcttcaccgacatagtcattatgccgaagagaaagaaatgcactcggtgatggaaagagagccactattct

SEQ ID NO: 837360 - DNA, 100 bp, Homo sapiens
acaggggtaacacccttccagatgatttttgagatctctccagcgaacactgaatgagttaaaagagtatcaaaagcagcatgaccactacctgagacag

SEQ ID NO: 837361 - DNA, 100 bp, Homo sapiens
ggagcaagagcaagatcaccgtgacatccgaggtgcctttctccaaaaggccagatcagaaaagggagctcaggtaccttccagagagtgagacccagcg

SEQ ID NO: 837362 - DNA, 100 bp, Homo sapiens
cccgtaaattggaaggatgcacaagttccaaggttacgtttcagtctattattagcagaagatttttctgcatagttggcacgctgtacctgtatcggtg

SEQ ID NO: 837363 - DNA, 100 bp, Homo sapiens
tgttgtcgggtacattgatatatgtaaattacggaagatcatttatatacacatgttgacgaaggatcagagattggtgtattcgggcagactgcttccc

SEQ ID NO: 837364 - DNA, 100 bp, Homo sapiens
aatgctagaaaaattgactgtatcctatgatgaagcaggtcttctctgttggttgaaatgtctatgattttatctgcctcagtcattcgtgtcagagatg

SEQ ID NO: 837365 - DNA, 121 bp, Homo sapiens
cagcacttcctggcaatgatagatacatcagtgtgggaagccaagcagatacaagctgacttatccttgtataatgaattccgattgtggaaggatgagcccacaatggacaggacgtgtc

SEQ ID NO: 837366 - DNA, 100 bp, Homo sapiens
cggctcagcggtctgatgcctggagcaccactgcagccagaaagcgaggtcccgcagcccccggaagccaatagactccctcagggactctcggtccctc

SEQ ID NO: 837367 - DNA, 100 bp, Homo sapiens
tgagaagtataatgatttatataagttccagcaggatgagaaggcgcgcattgaagcattgggtggctttgtgtctcacatggactgctggagagtcaac

SEQ ID NO: 837368 - DNA, 98 bp, Homo sapiens
cgatctgaagaggcagaaggagcaggctctgcgggaggtggagcacctgaagagatgccagcaggtgtcgtgaaaactacccctaaaagccaaaatgg

SEQ ID NO: 837369 - DNA, 100 bp, Homo sapiens
gtgcctcgtggtctaaagcttcggcacaagggcccaactggaattccacttacgggaaagagccagacttctcagaggtcagtctgttcaacaagtggga

SEQ ID NO: 837370 - DNA, 98 bp, Homo sapiens
cctttgatccagaacttgcagcaacaataggcactcaaggagttgcccctggtcctgtaattggacttcaggcaccatctactggtcttcttggcgcc

SEQ ID NO: 837371 - DNA, 100 bp, Homo sapiens
gacgcacagagaccgtgaagattccaagttcaggagaactcgaccgacacagagattgactggaaggcctacatggccgaggtagaaggcgtcatcaatg

SEQ ID NO: 837372 - DNA, 98 bp, Homo sapiens
ctggtcttatttatagaatggtaaaaccacgaattgtgttgcttatctttgtatctggaaaagttgtgttgacaggtttatcgacaagaaggaaaggt

SEQ ID NO: 837373 - DNA, 100 bp, Homo sapiens
gaagaaaaatcagcagaatattagttcagttgttagcgacatgagtacagggtctggatcttacccattcaagagtgtattctcagcacccaatgcctgg

SEQ ID NO: 837374 - DNA, 100 bp, Homo sapiens
ggattcgctcccagagcagctgcggccagattcccaggactccggctctctctgcttctgtttccggtggctgctcatctggttcaagagggaattcccc

SEQ ID NO: 837375 - DNA, 100 bp, Homo sapiens
gaaagggagacggcgagacgcgcagcgccggcgcccgggagacccaggaggagcccgcaggaggaggcaaaacagattcagaatctgcagaaagcaggca

SEQ ID NO: 837376 - DNA, 99 bp, Homo sapiens
acctgtaaagctgccatgaggactatgattcaacaacagggagggtctattgttaatgtagacatgggaaagcggaaccaccaaaaggagtgatgatca

SEQ ID NO: 837377 - DNA, 98 bp, Homo sapiens
tgcttcagcttccatggcaaacacgttccaggagagattgatgtcatcgcaacagataaagaagacgttgccttcaaagacctggatgtggccattct

SEQ ID NO: 837378 - DNA, 99 bp, Homo sapiens
atcaccagccttgggcacagctccacccatcaccccagaacaccccgcagaaagtgcctgtgcatcagaaggctgaggagaatgcagagggtggggagt

SEQ ID NO: 837379 - DNA, 100 bp, Homo sapiens
aaacaaaagttcacctctgcgaagggcagctgcaatgactctccgcacggtattattgtcattgcaagcactattggcagctgcagagccagatgatcca

SEQ ID NO: 837380 - DNA, 100 bp, Homo sapiens
caggactgctctcctactacacgtgtgtggattctcatgccatataacttgtgtaaacaaagctccaaccacttgtccagttcctcctgaacagacaaaa

SEQ ID NO: 837381 - DNA, 100 bp, Homo sapiens
acaagccactgggttcttcaaaggataaactacctacatagaggacatacctttggttaaaggagctgccgtcagaattgaccttgctgttctgctgggg

SEQ ID NO: 837382 - DNA, 98 bp, Homo sapiens
cggccgtggttgtggggaccataactgatgatgtgcgggttcaggaggtacccaaactgaaggcctgctctccctcctgtacctgccaacaggatttt

SEQ ID NO: 837383 - DNA, 100 bp, Homo sapiens
gatgcccctgaggggggctttgatgcagtactccaggcagccgtctgcaaggaagctgccctctgtcgacagctccccatggaagctgagactcttgccc

SEQ ID NO: 837384 - DNA, 100 bp, Homo sapiens
tcggcgccgttacagacgtggctactatggaaggcgccgtggccctccccggaatgacacattcagctaacgtattttagcaggtggagtgaggttgaag

SEQ ID NO: 837385 - DNA, 98 bp, Homo sapiens
gcgctcggctgcgctgggcgggccccagagatggcatagaatttgcttttaaagagcctaatccgcaaggggagagccatccacctttaaatttggca

SEQ ID NO: 837386 - DNA, 124 bp, Homo sapiens
gctggaccctgcccaaaggacactgtacagggatgtgatgctggagaactgcaggaacctggcctcactagagactaaggtgtcagtatgttcttcaagctgctctgctcctgggcccaagcta

SEQ ID NO: 837387 - DNA, 100 bp, Homo sapiens
caacaagaggaaagacacacctaccaagaagccagtcaagcggccaggcctccggtgtggctgtctctgatggtgtcatcaaggtgttcaacgacatgaa

SEQ ID NO: 837388 - DNA, 98 bp, Homo sapiens
gaagcccaccttagaaccatgctccaaggcagctaagaatagactgcatatatattgggattttaaaccggtgactgaaaactcctgaggcatttcct

SEQ ID NO: 837389 - DNA, 100 bp, Homo sapiens
tttgaaagtatttattcaaattatctgcagtccatagaagacatcaagttaaaacttactcatcggatatgttgcggtcactatctaacacaaaacctac

SEQ ID NO: 837390 - DNA, 100 bp, Homo sapiens
gaattcaagagctgaaggacaaacactggttcagcctaccaggacatcctcggaaagtatttattctaggccaggctccagtattcctggctcaccaggt

SEQ ID NO: 837391 - DNA, 98 bp, Homo sapiens
gacttagagagtggggacgtccggcttcggagcgggagtgttcgttgtgccagcgactaaaaagagactttgtgtggacagtaatgacctcacgtttc

SEQ ID NO: 837392 - DNA, 108 bp, Homo sapiens
ggagcaggagcaattccggggtccgcttggacgggtacgcgcggctggtgcagcaaaccatcctgtgttaccaggaaacacatgaaattgtggcgatcaagaaattca

SEQ ID NO: 837393 - DNA, 98 bp, Homo sapiens
cgctgaagctagctaaagaagttgatcctcaagagatctcagggaacacagaggatatccctttggtgcgctggaggcagcagtggctggagaatggc

SEQ ID NO: 837394 - DNA, 98 bp, Homo sapiens
ttccaccagcaaccatgagtggttccatgatgggaagtgacatgcccagaagaatcagtgcggtttctgtggcagagcgagttgcatttgaaagagga

SEQ ID NO: 837395 - DNA, 100 bp, Homo sapiens
atgccaacgagctatcggtgctcaaggatgaggtcctagagatgcctggctgcgctgggtgctggctggggcgctgtgtgccggtggctgggcagtgaac

SEQ ID NO: 837396 - DNA, 100 bp, Homo sapiens
ctagatccaggttggaatcctcaggtatttaaaccatgtcagagctgcctcaccacaggaccttgctggaggctatacttcttctcttgcttgtcacaga

SEQ ID NO: 837397 - DNA, 100 bp, Homo sapiens
gaagacgagatccagttcctgcgaactcctcccagtgcaacgtcagcttaaagaagcagaggagccgcagcatccttagctccttcttctgctgcttccg

SEQ ID NO: 837398 - DNA, 120 bp, Homo sapiens
actccttcctgcctttaacacacctactgggattccttgggcaatggtgaatttgaaaagatgctctacccatggtaccccaggaccagaaggcaaccatatttcagatttaccacttct

SEQ ID NO: 837399 - DNA, 100 bp, Homo sapiens
gtaggagaagaaatccgcagaagcttattaaagttaaggattaaagcaaggagagccaatcatgactggcaaaacacagaccagcaacgtcaccaataag

SEQ ID NO: 837400 - DNA, 121 bp, Homo sapiens
aaggattcagagcagatgtgatctgcgctaggtggcatctcctctcacggatgcctcgcacctgttcttcccggagcctatcagcaaagccattcccaaggctatggctacatgcaccaga

SEQ ID NO: 837401 - DNA, 98 bp, Homo sapiens
ttataccttaaatgggtcttctgttgactcacaaccacaatccaaatcaaaaaatacatggtacattgatgaagaggaagtatcattctgcaaaggag

SEQ ID NO: 837402 - DNA, 100 bp, Homo sapiens
agcttaggaccacccaccatgcctatccagatgcatcaatctcaaataattctacaagtaaaaggaaatctgagtctgccacttgcaacttagtcagaga

SEQ ID NO: 837403 - DNA, 134 bp, Homo sapiens
ctctttttgaaatgtttcttgcccttcctggagcagaggagccattatttatgcaggtggtttcctagaaacatgattgtttattggcattgatctcacagtctggtgaggacttctttactgataatgtcaag

SEQ ID NO: 837404 - DNA, 98 bp, Homo sapiens
gaccttctcttgccaggccctgccctccgagggcttcagtctggagccgcccagagctaatcttccagtaccaacaattgcagcaatagatggactcg

SEQ ID NO: 837405 - DNA, 98 bp, Homo sapiens
tgaggagtctcagccagagccagggggaccctctgccgccagcacacaccggcacctaccgcacgagcacaggagagggctgctcacaatttatatgg

SEQ ID NO: 837406 - DNA, 99 bp, Homo sapiens
gcctccgtctggatttccaaggaagaatttcctctgaagcaccgacccaacatgagtgaagtttcctgcaagaaacgggacgactatttggaatggcca

SEQ ID NO: 837407 - DNA, 98 bp, Homo sapiens
tccatttggggaccagagatggacggtcactcagcctatggaggcacttcgtcttagtaacatggccatggggaagacaaccacaggccagatagtca

SEQ ID NO: 837408 - DNA, 101 bp, Homo sapiens
aatagaagataatggttgccaaatgtcagatgcagttactgtagaagtcactcaatataatccaccttttcaggtttgtgattcagacactatgcttgacc

SEQ ID NO: 837409 - DNA, 100 bp, Homo sapiens
agacagtcctcgtcagcactgactttcagctatggaatcgataggaatgatgtcacaggtggaagaagagacccaaatcattctgaaggctcaactactt

SEQ ID NO: 837410 - DNA, 100 bp, Homo sapiens
atatagctgccctcagctgcactgtggcaaggcttttgcttccaaatacaagctgtatagtcataccctaatgatcccagcaagataatgtcctgtcttc

SEQ ID NO: 837411 - DNA, 100 bp, Homo sapiens
ctgtgcattaccccctggaagctcggaaggatctgaggcttccagttgtgcagctctggaaatgccaatacattctgatatattaaaagttattttggac

SEQ ID NO: 837412 - DNA, 98 bp, Homo sapiens
aagaagccctcaggggcaattctgacccatggagccccggagctatgtggagtctgtggcacggacagcggtggctggaccccgagctcaggactctg

SEQ ID NO: 837413 - DNA, 120 bp, Homo sapiens
aaatgtggtttgtaaaataggagaagatgctgaagtcctcatgtctctatatgaccctgtggagtccaaattcatcagggagcaatggaccacagaaattctgcattgaaaaagttggga

SEQ ID NO: 837414 - DNA, 100 bp, Homo sapiens
tccagcttctgagggagaagtctggtccatgcctgtacctgttgaacgaaggcatacccagagtatcttatcacttaccagatcatgaagccagaagccc

SEQ ID NO: 837415 - DNA, 98 bp, Homo sapiens
aagaatgatcatgattttcttgaaaaggaccttgtagaacctctttgcagagccttgcttcctgttttacatcacaaatctaaaaaaggacccccccg

SEQ ID NO: 837416 - DNA, 100 bp, Homo sapiens
tggagatgaaattggatactggcattgataggcatttccggagagttcttttgaagtcacttcagaaggatctacatgaggaaatgaactacatcactgc

SEQ ID NO: 837417 - DNA, 100 bp, Homo sapiens
ggttatggtgggaggagccgatactgagcttcttcctatttgccatggtgacttttttgaacgaaccattctgtgcaacagccttgtgtggagttgtgct

SEQ ID NO: 837418 - DNA, 100 bp, Homo sapiens
gggtccctcatggagggagcaccccagggccctgtggcatgaggaagctgggggcatcttctccccagctatgtgggccggaagcggatgcaggtggagc

SEQ ID NO: 837419 - DNA, 98 bp, Homo sapiens
ccatggccgccgccgatgccgagataacgaaggaggcccaacttcattcaataaggagcctgacggatttatcccagacggtagaacaaaaggaagaa

SEQ ID NO: 837420 - DNA, 98 bp, Homo sapiens
tttggaggccaccctggcagagcagcgggatgagttggaaggcttccaggatgacgccggtggaagaactggccagagagtctggaagtttgggttct

SEQ ID NO: 837421 - DNA, 100 bp, Homo sapiens
acggtcttgctgaaagccagggaaggtggtgtttccctacacaagcaagagctgcatgcgggccgtgctggaatacctctacaccggcatgttcacctcc

SEQ ID NO: 837422 - DNA, 100 bp, Homo sapiens
ggcggccctgggacccgcggaagccggcatgctggagaagctggagttcgaggacgaagcgacagcgatgaggaaaagaaagcgagaagaggcagatctc

SEQ ID NO: 837423 - DNA, 100 bp, Homo sapiens
agaggccaagactgcgttcctgctcaacatccaggatgtagatgctgcctacatgaacaaggtggagctggaggccaaggttgatgcactgatggatgag

SEQ ID NO: 837424 - DNA, 99 bp, Homo sapiens
agcactttttattaatttgatcagtgatccttcacgttggaccccaggcaggcacagtcttccccgccgtggtcctatgaccagtcttacccctcctac

SEQ ID NO: 837425 - DNA, 100 bp, Homo sapiens
tgtgttatttccaagatggtgacttctacgaaaaagccctggtggagctgaaggttgcagaaaccagggtggttatgaccgctactcaggaggaaattac

SEQ ID NO: 837426 - DNA, 100 bp, Homo sapiens
tggccttgcactgtcaggagtttggagggaagaactacgaggcctccatgtcccacgtggacaagttcgtcaaaaatggtggagtcaatgaagaaagtag

SEQ ID NO: 837427 - DNA, 100 bp, Homo sapiens
acagttattagaaatttttaattctggaattctagagcctaaagagcaggaatcatggactgtgtcatgatttcattggagaatttacaacaagctatag

SEQ ID NO: 837428 - DNA, 100 bp, Homo sapiens
tccttgcggtcaagatgctgcaaaacgtgactccccacaataattacagaatgtctgaaggggacagtgtgggagaatccgtccatgggaaaccttcggt

SEQ ID NO: 837429 - DNA, 98 bp, Homo sapiens
ccacacgccatggagcccgactcccttctggaccaagacgactcctacggcatcatggccatccttttctcaggcatcgtgatgtcccactacacgca

SEQ ID NO: 837430 - DNA, 100 bp, Homo sapiens
gtgaaacatgtgaacactcaagtgaagcaaaagccttccatgattacagagtgaatctgtccttcgattttccattttatggccacttcctacgtgaaat

SEQ ID NO: 837431 - DNA, 100 bp, Homo sapiens
cgaatgaataatcaaaagtttccttgtgtggattctttaaacgctctaggtacgatgacagtgttccccgataccatgctgtaaggatccggaaagaaga

SEQ ID NO: 837432 - DNA, 99 bp, Homo sapiens
gaagagggtctggaggagccttctcaagaacagaggtatgattttgtagaagttgaggaacccagtgatggaactatattagggcgctggtgtggttct

SEQ ID NO: 837433 - DNA, 98 bp, Homo sapiens
gttatccaccccaagaatcctcatgctcctactatccatttcaactacagatactttgaagtagaagaagctgatggctttacaggaagtatggtgct

SEQ ID NO: 837434 - DNA, 100 bp, Homo sapiens
cggacactttgttattggagaaacatgcagattatatcgcatcctatggctcaaagaaagatgattattgattcgcctttgccagtctcatctcgtgtct

SEQ ID NO: 837435 - DNA, 99 bp, Homo sapiens
tacgctaggccgcggccttcgttcctcccagaaaggaggcaagatccaaatggagatggagactgtttcagaatcaggaacacatgaaggcttgttcag

SEQ ID NO: 837436 - DNA, 98 bp, Homo sapiens
ttgtgaagctgatataactccagaagacttgtttaatatattttttgggggtggatttccttcagaaagtgactgagaccgaagatgatagtgatagt

SEQ ID NO: 837437 - DNA, 50 bp, Homo sapiens
gaaaggattcgttacagccagagattgagttgatctctctaatgtattag

SEQ ID NO: 837438 - DNA, 98 bp, Homo sapiens
ttaaagaggaggacaaaactctgccaaagcctggctctcctggcaaggaggaaggggctatggcctgatatgaaggagtcacgcctcccgcctcccgg

SEQ ID NO: 837439 - DNA, 98 bp, Homo sapiens
tttaactttgctggccccagccgctggagacacaatcatatctttagattttggcagcaacggtgacttcatggtcatgacgattttcttcaatgtga

SEQ ID NO: 837440 - DNA, 100 bp, Homo sapiens
cgttacaatgcctatccttcagagcaagaaaaagcgttgctgtcccagcaaacacacctgtctacgctacaggatttttagactctgaggagcagttgga

SEQ ID NO: 837441 - DNA, 98 bp, Homo sapiens
aaaatcttccccaaaataaaaaaattgcaagagagagactattttcgttattacaaggattatagctggacagacatccgctgcccctttgaaaaacg

SEQ ID NO: 837442 - DNA, 100 bp, Homo sapiens
cacctttacttttacctacgttggcggccccagaaggtggtatcacggaaaacttgacagaacgatagcagaagaacgcctcaggcaggcagggaagtct

SEQ ID NO: 837443 - DNA, 100 bp, Homo sapiens
ccggcgtttgggctacggttgttgttggcgactgtgcttcaagcgttggtgacaaagttcctgctgatataaggttaacttccatcaaatctaccacact

SEQ ID NO: 837444 - DNA, 98 bp, Homo sapiens
ggatgagaaagcagacatcgcactcatcaaaattgaccaccagaattgtattcccattggagagcagcttcagtcggtgttgggcaattctggataca

SEQ ID NO: 837445 - DNA, 98 bp, Homo sapiens
cggactggatcaacaccggggagtctgcgggactatgatgatggatatggcactgcttatgatgaacagagttatgattcctatgataacagctatag

SEQ ID NO: 837446 - DNA, 121 bp, Homo sapiens
acgtgtttggagggaaatgggaatgtacacgataattaaagagtaaagttgtgctcaacggtggatgctctccgattgcgtttggaagagaaggaaaccatgttgaataaaaagacaaaac

SEQ ID NO: 837447 - DNA, 99 bp, Homo sapiens
aagagaaagcacaaagcatggagaccctccctccaggtataccatacttttcacgatgaggtggatgagtatcggcgacactggtggcgctgcaatggg

SEQ ID NO: 837448 - DNA, 100 bp, Homo sapiens
tgtcttcacctgtaaaggccgaatactggtgcttgcctcccacggcggggtgaggcctagaggagcagtatcctggtgtgaaccagctatcctccagtat

SEQ ID NO: 837449 - DNA, 100 bp, Homo sapiens
aaccacccggtgcactttgtcttccatgacaccaagttggatgccatgctggaggagttcaagaaggatgcctgtcttagatgtcaagctgaaaacaaac

SEQ ID NO: 837450 - DNA, 98 bp, Homo sapiens
tcaccgggcagcgtgggtgagcggcgcagcggcggcagcggagagcgagagaggggagcagagcctgccttctggtacaagatgcctgtggaatgttc

SEQ ID NO: 837451 - DNA, 100 bp, Homo sapiens
ttacaacgggcattgtcgtgtcagcttttggactccctattgtatttgccagagcacatctgaaaaattggaagctccaccacccaccccaggacagctg

SEQ ID NO: 837452 - DNA, 131 bp, Homo sapiens
cagaattgagcaggatatgttagaaaagaggaaaatacagcgtgaattagcaaaaagggctgaacaggaatgcaactcccatgtaaatcgagggaagattgtgctttgtttgtttcggaactttatcaaga

SEQ ID NO: 837453 - DNA, 100 bp, Homo sapiens
aaacccagtcttcatccacagatgaacttgctagccttggagaatacagagatacccccctcgtttgacagcaagtttgtttaccagcaaataggactcg

SEQ ID NO: 837454 - DNA, 98 bp, Homo sapiens
aagactgctgaaccggatgtttgaccgaaccttcactgcctggtgtaactcccacctaaggaaagccggcacccagattgagaacatcgaggaagact

SEQ ID NO: 837455 - DNA, 98 bp, Homo sapiens
gggcccggggctgtcgtgggctcccctcgtcttcggctacgtcactgaggatggggacacgagaccagccactaactggggcgtacacagtgaccctg

SEQ ID NO: 837456 - DNA, 100 bp, Homo sapiens
atgtctgtgggtaccctctatgaaaaacagaatggaaaagagtcttctgctcttgaaagaggcctaaccaaggctctaaagaaattggatgactacctga

SEQ ID NO: 837457 - DNA, 100 bp, Homo sapiens
aacctgtgtggtctttgtgggaggaataacccagactaggaatgccagcatctgccaagcaggaagacccgaattttctgaagttgtcatgaagttagaa

SEQ ID NO: 837458 - DNA, 100 bp, Homo sapiens
tttgcaaggttttgtgcccatgaaaattgttctgctgatttacaggtttctgcaaagattgggtttttgaaatgcagttcgaacattaagcaatgccgag

SEQ ID NO: 837459 - DNA, 98 bp, Homo sapiens
ctgaactgaatgagtttcttactcgggagctggctgaagatggctactctggagttgagggatccaggtccggcacgatcaagacccaggctacatgc

SEQ ID NO: 837460 - DNA, 117 bp, Homo sapiens
tggagatcacaataaggaactccccgtatagaagagaagactcaatggaagacaggcaatactgaacactgcgcagcttgcagaggtctcctggcagccctcattaggaattctgtc

SEQ ID NO: 837461 - DNA, 110 bp, Homo sapiens
gcagagattgcagaatctgtccaagcatttgtggtttactttgacagcacacaagagtggaaacaaaatgtcagtcagtgtgcatgagaaccgcaagtccagggccagca

SEQ ID NO: 837462 - DNA, 100 bp, Homo sapiens
ttataatgtggaacctggatgaatgtagagagaaagtacttcaaggtgtacagagccagtgggccggatggagccactggcagaggccagagaatccacc

SEQ ID NO: 837463 - DNA, 99 bp, Homo sapiens
tctggataaggaccagtacctgcccaggaaactggcccagttggaagcaaggcgagatgacttttgtaagcagaattccaaagcatcatcagattgttg

SEQ ID NO: 837464 - DNA, 100 bp, Homo sapiens
gattcaaacgtcagccttaaattttcttactcctttaagaaactttatagaaggagattacaaaacaattgctggtggaaaaatggcatactacgaaatg

SEQ ID NO: 837465 - DNA, 100 bp, Homo sapiens
agcacgagaatgtccacatcctagacactctcacgagtcgaatcaacaccccgtttcggtgtttgacaagtacatgactatatcaggatttcaaattgag

SEQ ID NO: 837466 - DNA, 144 bp, Homo sapiens
gttcactcagtacaacatccagaaaaaagcgatgactgtgaaggagttcaggcagctggccaacagtggcaaagaccatcatgcagacatcagagactgggtcggacacaggctcgacagtgaccttacaaacatctgtggcta

SEQ ID NO: 837467 - DNA, 98 bp, Homo sapiens
tcagccacaccaaagtgcaacatcccaccagcaccaagacatgcttttgagatattcagaagaagtccatataatgcttgatggcctgttacctcctg

SEQ ID NO: 837468 - DNA, 98 bp, Homo sapiens
tgactcccgcagtcaggcagagggtgatagaagaggccaagactgcgttcctgctcaacatccaggttatcaatactctggctgaccatcatcatcgt

SEQ ID NO: 837469 - DNA, 98 bp, Homo sapiens
cggcggcaccatgcaggtcaccctgaagaccctccagcagcagaccttcaagatagacattgaccccgaggagacggagtacaagcgcaagctagcca

SEQ ID NO: 837470 - DNA, 100 bp, Homo sapiens
caggaggaagcgatggcttcagacagcatatttgagtcatttccttcgtacccacagtgcttcatgagaggtaccaaccaagaagctgaagaaatatgag

SEQ ID NO: 837471 - DNA, 100 bp, Homo sapiens
ggagaacccaccaagccccgctaggagccacctagactggatgcagagcatgggccacccgttcatcgtgcagttcaatgatggaaatgccgccgtggtg

SEQ ID NO: 837472 - DNA, 98 bp, Homo sapiens
aggatctcatgagcaggatgaattgcatcatagagacaccgaggtgttgacttcaaaatcaaaactgtagagctaagaggaaagaaaattagattaca

SEQ ID NO: 837473 - DNA, 100 bp, Homo sapiens
gaagaggagatctcatagtagcacacaagagaacaggcattgtaaaccacatcaccagtttaaagaatctgattggttgaaggggcccggccaggactcg

SEQ ID NO: 837474 - DNA, 100 bp, Homo sapiens
gggctttcctgaaatcatactgccagtgtgcgaatctccagggagtcaagatgctctgttctaatgcagaaggagcatccctgaaactgtgtaattttga

SEQ ID NO: 837475 - DNA, 100 bp, Homo sapiens
ttctcctcacaggatgggccttgacggcatgaaaatgcagttccagatttcggaaggttcacgagtgttgccgacacgccctcccaactgcagacatcct

SEQ ID NO: 837476 - DNA, 100 bp, Homo sapiens
cgcaaagcggggacccagaccctggagcctcagttggaagcagccgatccagcctgcggagcctgtggggcagggtccccgcactcccggtgaagaactt

SEQ ID NO: 837477 - DNA, 100 bp, Homo sapiens
cgctcgcgctcgcgctggtggcggtcgcctgggtccgcgccgagtctcacagaaagttctccgctcccagacatgggtccctcggcttcctgcctcggaa

SEQ ID NO: 837478 - DNA, 98 bp, Homo sapiens
tggagtccgagctgagatccatctgcaccacggtgctggactcccaaattcgtcagagcacagcttatagcttacatcagcctcagggaaacaaggaa

SEQ ID NO: 837479 - DNA, 100 bp, Homo sapiens
tgctgacgacctgctacaacagaaggaacatccttctgtatcagaaattcccatgtttccatatccagatttcttcaccaaggcagataaagagttggca

SEQ ID NO: 837480 - DNA, 100 bp, Homo sapiens
ggtgttactcggggtgcgccagtggaagcgggaggcagttgcagctttcagacattcactactttcactgcctaagaatcctggaccttctcaaaggcac

SEQ ID NO: 837481 - DNA, 50 bp, Homo sapiens
tttccatcaaatatgcttatatgagtttaggtagaagcttaggctattga

SEQ ID NO: 837482 - DNA, 100 bp, Homo sapiens
cctctaaattcatctgtcttctagcaaagcccaactgcagctctctagaacaggaggatttcatccctctacttcagatgcctgtcttagatgtcaagct

SEQ ID NO: 837483 - DNA, 100 bp, Homo sapiens
gccaaggccaaatatgaatttttatttggcagatctgaagggaaagctccagatactactgccttcctatttcaaggaaagacgccaaggtaattttgac

SEQ ID NO: 837484 - DNA, 98 bp, Homo sapiens
agctggctttaatcctgaaagccatgcagcggcatccgtacccttccgaagagcagaagaaacagttagcgcaagacacaggacttacaattctccaa

SEQ ID NO: 837485 - DNA, 100 bp, Homo sapiens
gcaagaaagtgtccttcgaggccagcgtggccctgctggaggcctcgctgaggaacgacgccgaggaagcatgattccacctttccactgatagactcaa

SEQ ID NO: 837486 - DNA, 100 bp, Homo sapiens
tcaacagggccctcagatggagcagcgtggagccaacttctctttgcctgaaaaatgcgactatatggatgaggtgacatatggggagctggagaaggag

SEQ ID NO: 837487 - DNA, 99 bp, Homo sapiens
tcctgttggtgataaagccaaagatactacttcagcagttttgattcagcagactccagaggtgatcaaggacaaatgttgcctttcactttactgcca

SEQ ID NO: 837488 - DNA, 98 bp, Homo sapiens
aggaggttgtattggaaagcagtagtgtggacgaattgcgagagaaggcccagcatgaaattggtaaaattcagaaaaggagatagtgtgggtttgcg

SEQ ID NO: 837489 - DNA, 98 bp, Homo sapiens
cgggcagcatcccggccaccaaggtggagatcaccgtgtcctgcaggtgtcccctgaagaccttgcaaaagtgtgagatcgccctggagaaactcaag

SEQ ID NO: 837490 - DNA, 98 bp, Homo sapiens
caatttatcatccaaacattgattctgctggaaggatttgtctggatgttctcaaattgccaccaaaagtaaaatctgtaaaaactgggtcagttttt

SEQ ID NO: 837491 - DNA, 98 bp, Homo sapiens
tagtagcaggcggcggcggcggaacgccaggcagcgctccctatggaaagtccgtggacatgtggtcggtgggctgtattcttggggagcttagcgat

SEQ ID NO: 837492 - DNA, 100 bp, Homo sapiens
ctgggggcccacacgccatggagcccgactcccttctggaccaagacgactcctacgtaccttccactggaagaatctcaaacagcgctacttactcagg

SEQ ID NO: 837493 - DNA, 98 bp, Homo sapiens
ctgggctgtgctggtcacagccacactctgcaccgctaggccgtccccgaccttgcctgaacaagtctgcagatctccaggggagcccaccagcctag

SEQ ID NO: 837494 - DNA, 98 bp, Homo sapiens
atgcctggggttacacctaaacagtttcaccagtgatcattaaagaatgggcagcttacaaaggaaagtctcctcaaaccccggaactggttgaagct

SEQ ID NO: 837495 - DNA, 100 bp, Homo sapiens
cttcaccacttacgaaatcagggtcaagggagactcatgcatctgtatgccgtgtgcgtggactgcctggaaggggttcacaagatcatctgcatcaagt

SEQ ID NO: 837496 - DNA, 100 bp, Homo sapiens
ggcctgaccaaggacctccaagtggaagacctggagcggaacaacggctccctggaccggccctactacatgtccaagagccttctaaagattctgggca

SEQ ID NO: 837497 - DNA, 99 bp, Homo sapiens
taagattgtcttggaaatactaagttggagtattgggaaagggtcgttgtggtgcatagacccagagtatagacaaaatctaattcaggctttgaaaaa

SEQ ID NO: 837498 - DNA, 98 bp, Homo sapiens
acagactgttgaaaacaatcggcaaggggaattttgcaaaagtaaaattggcaagacatatccttacaggcagagagtactatactggcaattgctgg

SEQ ID NO: 837499 - DNA, 100 bp, Homo sapiens
aaaatgcagtgggattggagataacccaggcagtgtgggttgctgaccgaggaaataaaagaatccaagtatttgataaagacactggggagtggttagg

SEQ ID NO: 837500 - DNA, 100 bp, Homo sapiens
tgcgagcgagccgcgaaccgagcgggcggcgggcgcgcgcaccatgggggagaaacccgggaccagatcaggatcctcatgaccagccaaagagaagaag

SEQ ID NO: 837501 - DNA, 100 bp, Homo sapiens
aaaggataaactacctacatagaggacatacctttggttaaaggagctgccgtcaggttggcgtgcagtggtgtgatctcagctcattgcaacctctgcc

SEQ ID NO: 837502 - DNA, 98 bp, Homo sapiens
agcagatggcggatgccctgcagtacctgcagaaggtctctggagacatcttcagcagctcctgcccctcctaaagctgaagccaaagcgaaggcttt

SEQ ID NO: 837503 - DNA, 100 bp, Homo sapiens
actgccggggagaactgattgccctttaacagtcaatatgttggaggcatgctaaggtgctgttgctgtgtttgcagttggttatataaaaatatcctgg

SEQ ID NO: 837504 - DNA, 100 bp, Homo sapiens
cccaatgttccgaggctatgcccagcagtgaacacctacctcttcatgatgcaagcccaaggcattctgatccgggacaacgtgagaacaatcggtgctc

SEQ ID NO: 837505 - DNA, 100 bp, Homo sapiens
tgtctggaggtggcagcagaaatcctactccacccataggaagacccacgtccacacctactcctcctcagactggattatggacagaacttggaaatat

SEQ ID NO: 837506 - DNA, 152 bp, Homo sapiens
ccaggaatgtcgctgccgccgccaccgccggggccgctgccgttgaggaggagacggaggagaccgacgttgttaggaacttaagagatttgagaacttcataaaatctcgtcctccttttgatgttgtcattgatggtctcaatgttgcca

SEQ ID NO: 837507 - DNA, 100 bp, Homo sapiens
tgaagatggcagatcgtgggacttctcagcctccataattgagtgagccaattccctgtatgtccgtggttcagaccctgtattaaagcttttggacgac

SEQ ID NO: 837508 - DNA, 98 bp, Homo sapiens
attataccctccgttatgcagatggtcctcagctgtacatcaccgaacaggtgttatgtctggctgtagctgttggtcacgtgaagatgacagacgat

SEQ ID NO: 837509 - DNA, 99 bp, Homo sapiens
agctactgggacaccggggtcctgctgtgcgcgctgctcagctgtctgcttctcacaggagcagtgaggagaatgaataccttccaagaccagagtggc

SEQ ID NO: 837510 - DNA, 100 bp, Homo sapiens
cttcaactcctggcctcaagggatcctcccgcttcagcctcccaaagcattgggcttacaggaaagaccggcagagaccaatgccaatgtggacaactcg

SEQ ID NO: 837511 - DNA, 98 bp, Homo sapiens
gggtttggggcgccgcagtcccgggaacggagtgcaaaatggcaactcttaaggaaaaactcattgcaccagttgcggaagaagaggcaacagttcca

SEQ ID NO: 837512 - DNA, 100 bp, Homo sapiens
gggacggctgccggcctgtgtggtggactgtggcacggggtcgtccctgatggcccctggaggcgaagctcatcacaggatgaggaaaggacagaggcac

SEQ ID NO: 837513 - DNA, 98 bp, Homo sapiens
tgaagcaggagaagcaacaactgcagcgggagctggaagacctcaagtactcgggggaggccacgctggtgagaaaatgatgcatcctgttgccagca

SEQ ID NO: 837514 - DNA, 100 bp, Homo sapiens
ttatggcggcgctggagagggggcgctgagctgttgggctgtctgtggaagcccgtaaagagatgactagaaaggctattaagacagtcaaacattttat

SEQ ID NO: 837515 - DNA, 100 bp, Homo sapiens
gccagcgagctggtgattggagccctgcggagcggggatctgatgagcttctttcttctggcatcattaacggaccttttaccatgaatagttctactcc

SEQ ID NO: 837516 - DNA, 100 bp, Homo sapiens
gctgcctataatcaagtaaaaacaatagctcaaggaaacctttccaacacagatgtccaagctgccaagtctgtctctcctgccagagtgtatacaccag

SEQ ID NO: 837517 - DNA, 100 bp, Homo sapiens
gaacaaatactactacatcccgcagtacaagaactggagagatctttctctggaatcaaaggactccagctgaaagttaacctccaacccaatgataact

SEQ ID NO: 837518 - DNA, 100 bp, Homo sapiens
aatgtctgcaagagcacgctatgagagatacagtggcaatcaggttctcttttgatttgactttatctacgatctttttgaacatgtttcaagccgcaac

SEQ ID NO: 837519 - DNA, 98 bp, Homo sapiens
ctggtgcatctgtttgccggaggggaacctcagaacctgttctggatccacagcaaatccaagcatttgatcagctttgccgtctctaccgaggaagc

SEQ ID NO: 837520 - DNA, 100 bp, Homo sapiens
aaagcgcctcaatgaccggattgagatgtggagttacgcagcaaagctgacacttcctccatggcccatctatcgccggcatcctctcaagtggttacct

SEQ ID NO: 837521 - DNA, 98 bp, Homo sapiens
gggggacaagtcggcgccccagagcggacgaggatgttgccttatggctgtttagcaacaggagatcgctctggcctcattgaagttgtgagcacctc

SEQ ID NO: 837522 - DNA, 98 bp, Homo sapiens
gacgcggagtcctgaagccggcggacggttttcgtacgggcggccgtgcgcgaggcgagagctccacctggaggggaacttcctacaccgcctcccca

SEQ ID NO: 837523 - DNA, 100 bp, Homo sapiens
tcaggcagtacgggaagaacttcttcagaattagaaaggagctgcttcccaataaggaaacagaagccagcagacctgcagaacttggctcccgggaccc

SEQ ID NO: 837524 - DNA, 98 bp, Homo sapiens
acaagatccaggagcagctctgcctggtccaggactccaacgtccaggtcagtaacagatccaagagatggaaagagagtagcgctcaaaaagatgcc

SEQ ID NO: 837525 - DNA, 98 bp, Homo sapiens
ggactgcatcttctcccacgcacaggtggccaagaagaaccagctggtgatcatgttgatccttaagtgagagctttttcatggtgaaaggcgcagcc

SEQ ID NO: 837526 - DNA, 100 bp, Homo sapiens
cgcctcgtcgacatgagtgatgtggaggaaaacaacttcgagggcagaagtgaagatagtccaagtcctaagagacagcgcctctctcattcagtctttg

SEQ ID NO: 837527 - DNA, 99 bp, Homo sapiens
gcctgaacggagtgtgcgacggattgggaggctggtccagggaccctcatcatggccacaggagtccaggactttaaccggacagagtttgatcgactg

SEQ ID NO: 837528 - DNA, 100 bp, Homo sapiens
gaactcagacatctgcaaatcatggtcaccctgctgattgccttcatctgtgtgcggagctccctgtggaccaactacagcgcctacagctactttgaag

SEQ ID NO: 837529 - DNA, 100 bp, Homo sapiens
tcctcctccactgccactacagggaagtgcatcacatgtcagaaaagagtctcatcgtggaaggcaagagggaaaagaaaaaagtagagaggttgacaat

SEQ ID NO: 837530 - DNA, 100 bp, Homo sapiens
gtattagtgatagaacagaaaaatgaagatggaacatggccaaggggtccttctactcctaagtttaaaaacctcacagcttgtataatgtaaccatttg

SEQ ID NO: 837531 - DNA, 100 bp, Homo sapiens
gttcaagttcacttattgcctatgctgtattccataatatacagaaatctccagagaaacatgccaagggacaagtgttatttgacaaagtgtgtgaaca

SEQ ID NO: 837532 - DNA, 98 bp, Homo sapiens
cctctacaagcaaatggagaagttcaggaagttctggacttcagtgaccccttcagcactgaagtgaagccgagaatcctgctcatgggcctgaggag

SEQ ID NO: 837533 - DNA, 98 bp, Homo sapiens
gagcttcttcagcaaatggagagaggcctgaaatcagcagaccctcgggatggcaccggttacactggctgggcagaaaacatgtctcaacttagcga

SEQ ID NO: 837534 - DNA, 100 bp, Homo sapiens
ggggccaacctctcccaggacgaatatgccgagtttctacattgcaaaggaaagaaatttacagattttgatgaagttcgccttgagattgaagcagaaa

SEQ ID NO: 837535 - DNA, 100 bp, Homo sapiens
agaagatatctgttcaagattccttaattagaactgcttctcaagcccacactaaaccagctcattgctatggacagtgctatcaccctgtggcagttcc

SEQ ID NO: 837536 - DNA, 100 bp, Homo sapiens
cccaggggaggcagcctcagtgagcacacaacttcctcttctgcagaacaggggtgaggacagcaccttccaggtaaaaagcctcacccagatgaccccc

SEQ ID NO: 837537 - DNA, 135 bp, Homo sapiens
ccccgacgtacagcgggccgggaaaagtggcactgaggctctggaacttctgcccagctctccttgccctcttggaacagagatcatgatgacacggcatctactcgttcaggaggaaccccaggcccttccagc

SEQ ID NO: 837538 - DNA, 100 bp, Homo sapiens
gagcgattcccagccagcagccggactccactctgcggtcactgcaacaatgtcatccgccaagttctatagaaattttagagtattcatcagatagtga

SEQ ID NO: 837539 - DNA, 98 bp, Homo sapiens
cttactccaatcataaaagatgctgctgctaaaggtatccaggaaattgctgactctgtaaaggattggattcagcatcaaaatacatctactcatat

SEQ ID NO: 837540 - DNA, 100 bp, Homo sapiens
cctgcgggctgtgtggcaactttaacatctttgctgaagatgactttatgacccaagaaggtgcccaggaaaagacgaacttggaaatcattattctagt

SEQ ID NO: 837541 - DNA, 98 bp, Homo sapiens
tagctgccctcagctgcactgtggcaaggcttttgcttccaaatacaagctgtatagagagattctccctgagaaacaagcagaattttttgaaccat

SEQ ID NO: 837542 - DNA, 100 bp, Homo sapiens
caacagaacgggagggctgtacagctgcgacatcaccgcccgggggccatgcacgcggatcgagtttgataacgatggatgattacatggaagccctggc

SEQ ID NO: 837543 - DNA, 100 bp, Homo sapiens
agatccagccaccattcaagcccaaagtgcaactggcgcagatcgagatggacctgaagtcccgaacggccgcctacaacactctgaagacaaacctgga

SEQ ID NO: 837544 - DNA, 100 bp, Homo sapiens
gccgcagatgcccaccggaatggagaaggaagaggagtcggtatcaaattgtagtggaaataatccaggcgactacaattagcagctttccccaactgaa

SEQ ID NO: 837545 - DNA, 100 bp, Homo sapiens
ctattcgcggagctggaatgactggcaacccaggaatcccttggcaccatgtcctgtgtgcattataaattttcctctaaactcaactatgataccgtca

SEQ ID NO: 837546 - DNA, 100 bp, Homo sapiens
aattgacgacatggaagcctatactaagctgacaggcatgatcaagcagttcctccgagatgtggactggggagaggtcgactacctcattgtggacacc

SEQ ID NO: 837547 - DNA, 99 bp, Homo sapiens
tgaaagtgtccaatgtctcctgccaggcctctgtctccagaatgcacgcggccttcgggggaaccttcaagaaagatatgatccgccaaatgatgatta

SEQ ID NO: 837548 - DNA, 100 bp, Homo sapiens
ggagatccgtatcagatccgccgacgactgcaagcagtttcgggaggagttcaacctctcttggcctcctagtttctacctaatcatgtccctggtggag

SEQ ID NO: 837549 - DNA, 100 bp, Homo sapiens
aagcaacagccatcatgaaggaagtccatggaaatgtgaccagattacgacaagcaacctaaataaagaacgtggggactgtacctcccttcagagccaa

SEQ ID NO: 837550 - DNA, 98 bp, Homo sapiens
acattggctgttttcctcacattcctcaagcaggctttcagtccagtgtaaagctgttggagcgcgggagcaaaggtaaagaatgatgtaatgcgctg

SEQ ID NO: 837551 - DNA, 98 bp, Homo sapiens
taggcacgggcggctccgcagtgaccggactcgggggagcgagcccacagcctcggtgccccccgagtcggacgtgtaccggatgctccacgacaatc

SEQ ID NO: 837552 - DNA, 100 bp, Homo sapiens
tgcattgagcttgggtcaggacaattccatttggggaccagagatggacggtcactcagcctatggagaatcaaccttgtcctatgttaggcagctggag

SEQ ID NO: 837553 - DNA, 100 bp, Homo sapiens
acacaagagcaagcccgcacgtgtgaaggcatccactgatgtttccattcctgaaaaacccaagcttagatttattgaaagggcaccacttgtgccaaaa

SEQ ID NO: 837554 - DNA, 51 bp, Homo sapiens
ctgtgattttcagaggggaatgctaagagattcacagtctgagaatgaggc

SEQ ID NO: 837555 - DNA, 100 bp, Homo sapiens
agctcttccttggaacatcacagtacattttaagccgtgcagtcggaggtccttgtgcatgaagacagatttgttctatggcctcggagttgggtgccag

SEQ ID NO: 837556 - DNA, 98 bp, Homo sapiens
aggccggcaggctgagaaaagcgagaccgcgtgcgaggaccgagagggatgagtgccgagctcacccgtgcagaaatggagggtcctgcaggaacctc

SEQ ID NO: 837557 - DNA, 100 bp, Homo sapiens
ttgctgtagatgagtggattgtatttcagtctccagcaagaattgcccatcttgttaagtctggcaagttctccggcagttctccggcgcccccaagcca

SEQ ID NO: 837558 - DNA, 101 bp, Homo sapiens
gtgggagcagtgaacggagtcacaaaagaaatttttcaggtggggtggaagacaacccgtgagtattacaccttcatgtgggttactttgcccattgacct

SEQ ID NO: 837559 - DNA, 50 bp, Homo sapiens
tttcaccacaagaagggctgccaggttctgtacagagtaatgagatgtgt

SEQ ID NO: 837560 - DNA, 100 bp, Homo sapiens
caacgccattatgggcagtgggattttgggactcgcctttgccctggcaaacactggaatcctactttttctagcaacttgtgattggatcatatagtca

SEQ ID NO: 837561 - DNA, 99 bp, Homo sapiens
aatttcaggatcaccggtttctcctgcttcatgtcagatgtaccaacagtaccagcaacaggccggctatggtgcacagcagccgcaggctccacctca

SEQ ID NO: 837562 - DNA, 100 bp, Homo sapiens
ggaaggctgcccacaacttattcttcaactctacattcttctggagcatggacaagcgaatttcagtcagtgcagccttaagtgccttgaaacaattttc

SEQ ID NO: 837563 - DNA, 98 bp, Homo sapiens
accttcgacctggagaaggagacgccggatgaggtggcccaagagatggtttggtgcacctcgatttggaggaagtagggcagggcccttatctggaa

SEQ ID NO: 837564 - DNA, 99 bp, Homo sapiens
ttcaaggctatgccctgcaactgcaccagttacaggagatcatgaatcagacagataaaaatcaacaagaaatcccatcataccttaatgatgaaccac

SEQ ID NO: 837565 - DNA, 100 bp, Homo sapiens
gtccagggaaaatcctgaggaagatgaagaccagagaaaccctgcaaaggagtccctagagacacctagtaatggcacgattctgggtacaggtgatgag

SEQ ID NO: 837566 - DNA, 50 bp, Homo sapiens
gaatacttcagggatttgaatatggcccactgcgtgaccttggttcagct

SEQ ID NO: 837567 - DNA, 100 bp, Homo sapiens
ggccaacaagacgcacccgtccatcttcgggatcttcgacgggcacgggggagaggtttattacccagaactctttgtctgggtcagtcaagaaccattt

SEQ ID NO: 837568 - DNA, 100 bp, Homo sapiens
ggctgcaacacgaggctgccgttcagcacccgtcgagctgagtgatagttgcttcaggaatcttgcagaagaccgcagtgggataaatctcaaagatctc

SEQ ID NO: 837569 - DNA, 99 bp, Homo sapiens
aatgatgtaccaatccaatgtgaaatctctcctcttatctcctatgctggagaagagtgtatctcgcagtcagcagtgaaaacaaagttcgaacagcac

SEQ ID NO: 837570 - DNA, 99 bp, Homo sapiens
ggacttccaggccatgctatcaggaagacaatttagcatagacccagatctcctggttgataaggccaatgatgaggccaatcagagtgatacaagtgt

SEQ ID NO: 837571 - DNA, 100 bp, Homo sapiens
agcagatgaaatacatgaaggagacctagtggaagtggttctttcaggaagctgccctctgtcgacagctccccatggaagctgagactcttgccccagt

SEQ ID NO: 837572 - DNA, 100 bp, Homo sapiens
aggcgtcgcgcgcgcctgtagctcgcgggcctcgcagcgccacgatcatgtctctcgaagactttgagcagcgcttgaatcaggccatcgaaagaaatgc

SEQ ID NO: 837573 - DNA, 98 bp, Homo sapiens
aagaaccattgttagtgaacgtggacaaagctgttgtctcagggagcacagaagtgtctttcctgaagactatcttcccgtctcaaaatggacatgat

SEQ ID NO: 837574 - DNA, 100 bp, Homo sapiens
ttgagaggagcaaatgagaagctagctgtcgcagaatcataccctaatgatcccagcaagataatgtcctgtcttctaagatgtgcatcaagcctggtac

SEQ ID NO: 837575 - DNA, 100 bp, Homo sapiens
ttaagataaacagattgcctcctccctggaaaatctaggctcttgtgaaattcgtaaggacaccttgaaggccattctgttggagttagaatgtcatttt

SEQ ID NO: 837576 - DNA, 100 bp, Homo sapiens
ccagcgccttcccacggagcagcactcttcaccctgcacagccttgttaggattaacacagattcctcagatccagaagactgaaatttcctttcgtcct

SEQ ID NO: 837577 - DNA, 99 bp, Homo sapiens
aggaaataaattagtggcagagtaagggtgacttgatatgaatatcgtgtagagatggttcaccagtcctgtaatgatcctacaaaaaatatcattcga

SEQ ID NO: 837578 - DNA, 100 bp, Homo sapiens
gaccacggcggctgcagggagcaggcacagccccgcaggatcccaagccctgcagactaccgcagccagcgacatcttcatttgattgtacaccatctcc

SEQ ID NO: 837579 - DNA, 98 bp, Homo sapiens
ctctctgatttggggatctctagcctacaggatggcttggccttgcacataagaaatctcctgcaaagaagctgagccatgcaattagtaaatctttg

SEQ ID NO: 837580 - DNA, 100 bp, Homo sapiens
cgcagatcagaggtagtcggacctttcccgctggcgcgcagcctcagctaggtaaagaacaagcacctttggagatgagtatgcatccagcggcaagcgc

SEQ ID NO: 837581 - DNA, 98 bp, Homo sapiens
gccccgtggccacggccccaatcctggccaggcggagattctgcggacattcaggttatgaagacagtatggagtttccagaccatagtagacatttg

SEQ ID NO: 837582 - DNA, 75 bp, Homo sapiens
gaagtcaccattggagctcatcagactgaccgtgtcttacatcagttcagagagtctggctcttgctgattgaat

SEQ ID NO: 837583 - DNA, 112 bp, Homo sapiens
gggtccccaaagtcttggaacagcgacgacaaggcttggaaacatacttacaggttttgatgatgatggttcagaatttcatgaacatatatttctggagaaacacctggag

SEQ ID NO: 837584 - DNA, 100 bp, Homo sapiens
ctggttccggctgcagcccgaccagtccaagagccggcggcatgacgagatgctttcattggatttggaggaaatgtgatcaggcaacaagtcaaggata

SEQ ID NO: 837585 - DNA, 99 bp, Homo sapiens
tcggacctcagtatgggctggaacctgacacttggcatgacagtgggctggttgatatgtgaagagccaacctgtcgcaatcgaactcgtcaccttccc

SEQ ID NO: 837586 - DNA, 100 bp, Homo sapiens
tacagcgcttctgggagtccaactcggctgcccacaaggagatcaccggcgtaatcaacccagcgttggacaaatactttccgtcagactctggagtgag

SEQ ID NO: 837587 - DNA, 100 bp, Homo sapiens
cccaggatgttcctcagctggtgaaggccaaaaccaatgccaaactcttcagtgagcagcccatgacccatcgagaaactgcacctgtttcccagcctga

SEQ ID NO: 837588 - DNA, 100 bp, Homo sapiens
aaggctgcgagggactaagagcagacttattccactaagctcaacaaatttcctgtatttaatattaatgatgacttgaatgatctgtgtaccagtgcag

SEQ ID NO: 837589 - DNA, 100 bp, Homo sapiens
aactatgctcatcattgttcttgtcaatgcctttgtgtctatcacagtggaggacaaaggccatgatggggtcaaggagctggacagcctaaacagtgac

SEQ ID NO: 837590 - DNA, 98 bp, Homo sapiens
atggcctgttatttgtctcaacaaaagaggtgttggaactcgccataaggcattgatcaggattatggtttcccgttctgaaattgacatgaatgata

SEQ ID NO: 837591 - DNA, 100 bp, Homo sapiens
acggattgctttgaaagccttgatcaggggaaagattatggatgattggccagggtatgacttgaatttattcacgtacccacagcactattatggagac

SEQ ID NO: 837592 - DNA, 98 bp, Homo sapiens
tgtgtccgagcccgaggccagcgccgcggagccatgtgttcacatgtcatgtggaccagtatttaactgtggaaaccgcgggtggcatggagaaggag

SEQ ID NO: 837593 - DNA, 100 bp, Homo sapiens
gggaaccagtctttcaaaatgtactgaacgacacctgggtctccttcccttcctggtctgaggactccacgttcgtcagctccaagaagacaccgtacga

SEQ ID NO: 837594 - DNA, 100 bp, Homo sapiens
gatttcaaaaccgacctgaggtttcagagcgcagccatcggtgcgctgcagaacaagttgaaatcatcgcagaaggataaagttcgtcagtttatgatct

SEQ ID NO: 837595 - DNA, 98 bp, Homo sapiens
gagacaacaccgagtatgagaacttaaaactagagatcgatacatcagtagtctgaaaaagaaatgccagaaggaatctgaacaaaacaaagaaaagc

SEQ ID NO: 837596 - DNA, 100 bp, Homo sapiens
cacatggattgttttaaagcaacctataaacatcagctctcaacaggtagctacagcaagctgggtagcaggcagatccaaaggatatcatgaagtttcc

SEQ ID NO: 837597 - DNA, 98 bp, Homo sapiens
gacttatgaacgccttgttgcccagttccccagttctggcagattctggaaactgtacattgaagcagagaacgctcactctggggaagctggttgcc

SEQ ID NO: 837598 - DNA, 100 bp, Homo sapiens
ttcagctctgccatcactccctgccgggtcagggtgtgaagatgccttaagaaaaaataagagcttaattgggccggatcaaaaggagtatcaaagggaa

SEQ ID NO: 837599 - DNA, 99 bp, Homo sapiens
agcgaccgagggactgggagtcgttagtgaggtattgctgtctctaagcctcacctgataacctgtttggagcaaggaaaagagccctggaataggaag

SEQ ID NO: 837600 - DNA, 100 bp, Homo sapiens
cccaccaagcagtggtgggaccagcagctcacctattaaagcaattttccccagcccaacttcactggaaactgaaaacacacctgcagcatctccggtg

SEQ ID NO: 837601 - DNA, 100 bp, Homo sapiens
aggcttgtccggggagcagtatgccggaagctggttttcaggccacaaatgctttcacagctcagatttcttttatccaagatattggaaggctccctct

SEQ ID NO: 837602 - DNA, 100 bp, Homo sapiens
gtcccctttgcaccctcccccagtaatatcaggtgtcatggagaaactccagctgggcccagagattctgcagcgggaaaatccaaggcttatttatgcc

SEQ ID NO: 837603 - DNA, 99 bp, Homo sapiens
atttcgccacctactgaagacatcatttgggaccaagctgatgagcccttgaagcacagcagataatgagtgtgtatatggcaactaccctgaaatacc

SEQ ID NO: 837604 - DNA, 106 bp, Homo sapiens
agaactggttatacttgaaaccataatgctacaaactctaggtgggccatgcacagacacagctcatgtctcattaatcacaccaacaaaaagatcctgtggtaca

SEQ ID NO: 837605 - DNA, 100 bp, Homo sapiens
tgacgcagagccgagtgcagaagatctgggtgcccgtggaccacaggccctcgttgcccagatgtatgatgaaatgagtattctcttcacagttttggtt

SEQ ID NO: 837606 - DNA, 98 bp, Homo sapiens
gtccagcgctgccggagccgcctgagggcaccagtgtcttgtcacctggactccacataggactaattattatactggcaataatgatctataaaaag

SEQ ID NO: 837607 - DNA, 98 bp, Homo sapiens
aacagttctttacttgcaaaagcttacgaggaaatatttcagtaaaagcagttaaaaaagaagtagaaaagaaactccgatgtcttcttgctgattta

SEQ ID NO: 837608 - DNA, 98 bp, Homo sapiens
gccagaggtaatcgcgcagttggagctagaggaagaatgggtgatagaaagagacagcctgctggatactcatccagagatgccctgcccagagagga

SEQ ID NO: 837609 - DNA, 100 bp, Homo sapiens
ttgagaagtttattcagaaacctgtgcctactacactggcacaagtggatagagaaaagatctatcagtggatcaatgagctgtccagtcctgagactag

SEQ ID NO: 837610 - DNA, 100 bp, Homo sapiens
gggagactctggctctggcccctgagccagagcccctggagaaggaagcttgtgagaagtggaagaggcccttcagggccttcgcatccccatcagtaaa

SEQ ID NO: 837611 - DNA, 99 bp, Homo sapiens
ttaccaactgctttcctttccctcagcacacagaggatgatgctgactttgatgaagatatttggtttccaggcaggactgacgtctttggattgcagt

SEQ ID NO: 837612 - DNA, 99 bp, Homo sapiens
ggacttcttgacctccataattattgtcatggagactggcaataccaagaactctgcactgatggctaaaaaagcccctacaatgccaaaaccccagtg

SEQ ID NO: 837613 - DNA, 75 bp, Homo sapiens
ggatgggggtcaccgtccagagccaaggtccagggggcaaggtcgtgaatgcaatgagagccactatggaacacc

SEQ ID NO: 837614 - DNA, 100 bp, Homo sapiens
gattccaagtaactcttatttggttgtggcagcactgcctgaaggtatgagaccagattctaatctttatggttttccatgggaattggtgatatgtgca

SEQ ID NO: 837615 - DNA, 100 bp, Homo sapiens
gggatcttttttcacatccagcccatgcggactgagcagccaaagcttgacagagtgatcgtaaacttgttgataaagaagatatcgacactagcagcaa

SEQ ID NO: 837616 - DNA, 98 bp, Homo sapiens
gagccctcacgttctttcgcttttttacctgccaatcaaactgctacaagacaacaccctgatctggcatggacatggatttatcaaagatgttcatg

SEQ ID NO: 837617 - DNA, 100 bp, Homo sapiens
gcagcagtagtaccagcagtgacagcaactttttaaatattgacccgataaccatggcctacagtctgaactcttctgctcaggagcgcctaataccact

SEQ ID NO: 837618 - DNA, 98 bp, Homo sapiens
tcgcattttggcattgacatttaattttagggtcctttatatagaagggagagtaggattatgatccaaactcagctgggcctcccctacctgcccca

SEQ ID NO: 837619 - DNA, 100 bp, Homo sapiens
ctttctcctgtcctcaatctctggaagaaactaaaccagattgtttccaagttgaaggatgaaataatcctaatagagaaagaacgcacagaccttcagc

SEQ ID NO: 837620 - DNA, 98 bp, Homo sapiens
aggacgacgcgctcaaccagatcgcgcgggagctctccactgtggtttgaatccacggggtattgatcaccctgcccatgctgaaggtattaaactgc

SEQ ID NO: 837621 - DNA, 100 bp, Homo sapiens
ttctgttgtcctgacttctttccaggtgatgtcaagagtttttctaatatgggcagtaacacatagcgtcaaagagctgcaggacaagttcgagcatctt

SEQ ID NO: 837622 - DNA, 100 bp, Homo sapiens
agattttggtgtggctgacctgctgcctcctgatgataagcagctgctatacagtgaggccaaggttggatggcaagcatgtggtgtttggcaaagtgaa

SEQ ID NO: 837623 - DNA, 99 bp, Homo sapiens
gccctcccagccacttcacatagtcctcgagtccctgaagagagaaggcaaagaacctctggtgttgaaagacctacaacaagaaaggggcctcccgaa

SEQ ID NO: 837624 - DNA, 99 bp, Homo sapiens
tgcctgaacaacggattgagctatatcagaaaatgtgccagaggaacttcaagaaccattttacacagatcagtatgaccaggaacacatcaaaccacc

SEQ ID NO: 837625 - DNA, 98 bp, Homo sapiens
atccatgcctacgtgggcttcaccatggacaagctggtgcagaacattgcgcggcagtctcagaggagcagtgcctgtaccagatctacattgatgag

SEQ ID NO: 837626 - DNA, 99 bp, Homo sapiens
ctggagaaagctcacccagttagaagagatgaatccacatgtgaagatcattcaccgatgaagacagacccagttggatcccctttgtctgaattcagg

SEQ ID NO: 837627 - DNA, 100 bp, Homo sapiens
gtgtttctttcataccttcctgaagctggacagtattcaagtttttttctctatctcaggcagatgcatatgaaacagccaagatgctgtgtgaacagta

SEQ ID NO: 837628 - DNA, 104 bp, Homo sapiens
aaaaggctcagaaagatggatttttgcatgagacgcttctggacaggaaatcttactgatgaggggcagcagtattgttgtagattagtggaaatggattcaaa

SEQ ID NO: 837629 - DNA, 98 bp, Homo sapiens
tatattccctttccagaagatgattccaacgccaccaattccaacctggcccttgatgagcctccctatttgacagtgggcactgatgtgagtgctaa

SEQ ID NO: 837630 - DNA, 101 bp, Homo sapiens
cacagccatctcacatttccaagtacattctcaggtggagacctaatgagtccctggaacgccagatgcgtgaaatggaagagaactttgccgttgaagct

SEQ ID NO: 837631 - DNA, 98 bp, Homo sapiens
ggaagtatgtcatggagctctttgatggcaaaactggacatcagaagacagtggatctctctggacaagataaccaattcaggagaatttgtgttccc

SEQ ID NO: 837632 - DNA, 98 bp, Homo sapiens
tgccttgttggacagaatggagatcattcaggttccaggctacccacctttctgttctgagacccctcaagagacatataagaaggtgatgaactgga

SEQ ID NO: 837633 - DNA, 100 bp, Homo sapiens
caagcgtctggtgacaggacagcattgtgaccagtgcctgctttccccagacatggccaacaagggtccttcctatggcatgagccgcgaagtgcagtcc

SEQ ID NO: 837634 - DNA, 98 bp, Homo sapiens
aagttatggcagagttagctaaagaactccctcaagtttcatttgtgaaggaacagcgacatctcactcatgaaaatgtacagcgcaagcaagccagg

SEQ ID NO: 837635 - DNA, 122 bp, Homo sapiens
ctgtgacgcgcgcgccggagcggggtccgatggttctcgaaggcccgcggcgccccgtgctgcaggtgtcagaaactatttaaaagaagcactggtgaatataattgccgtgcatgcagagg

SEQ ID NO: 837636 - DNA, 100 bp, Homo sapiens
actattccattgtctagactttgtgttccaagatcagagaatcaaactgatggctgaaggcgagttgaaggatatggaacagttttttgatgacctttca

SEQ ID NO: 837637 - DNA, 98 bp, Homo sapiens
tccaactttccagagaccacttctccacatgaatattctgttttgctgcccgaagcttgtgaaacaaagagtcctcttcgtggaaaagaaaaaaatac

SEQ ID NO: 837638 - DNA, 100 bp, Homo sapiens
cctacgtgaacaacctgaacgtcaccgaggagaagtaccaggaggcgttggccaaggtgggccccatgctgattgagtttaacatgcctgtggacctgga

SEQ ID NO: 837639 - DNA, 100 bp, Homo sapiens
ctgcagatattgggagatccacagctaagacgccgggactccctggaaacctagaaatggtattagaaaactactcggatgctccaatgacaccaaaaca

SEQ ID NO: 837640 - DNA, 98 bp, Homo sapiens
gcaggactcgggccggagcgtggccggacccccacccgccgaggggcccagggaggacgcggagatcaatgatctgttggttaaggaaaagattatgc

SEQ ID NO: 837641 - DNA, 100 bp, Homo sapiens
aatcatttcatcaatgtaatgttgtctcatcccaatcacacaggttgtctgcattcaaaagagcattctattaaagctaccttaatttggcgcttatttt

SEQ ID NO: 837642 - DNA, 100 bp, Homo sapiens
ggcagtcaccagcattgcctcgaccacactcacctctctctgctcatgcaggtagctgtagccatacctaatagacctcctgatgctgtacttacagata

SEQ ID NO: 837643 - DNA, 99 bp, Homo sapiens
caagcttagagcgtctggccaagaatcagaggaagtggcaacatgaaccgtgaagaccggaatgtgctgcgtatgaaagaacgggaaaggcggaatcag

SEQ ID NO: 837644 - DNA, 98 bp, Homo sapiens
cgtggtgtgctttgagaccctgttcgccaacacctgcgaggagtgtgggaagcccatcggctgtgactgcaaggatgttgcttcagagtgtgaagtca

SEQ ID NO: 837645 - DNA, 100 bp, Homo sapiens
tttagaacctctctctatgaatcggtttaccacagccttaataggtgaaggtgataaagtaaagtgctttcactgtggaggagggctaactgattggaag

SEQ ID NO: 837646 - DNA, 98 bp, Homo sapiens
cgccgagcctgcagcctgccccgcggccaacatgagcttcttgttattttaggtgatgggcaagtcagaaagtcagatggatataactgatatcaaca

SEQ ID NO: 837647 - DNA, 100 bp, Homo sapiens
gaacccgtggtatcagacgccatctatgacagtacaagacactaagggcgactaccagaaagcgctgctgtacctgtgtggtggagatgactgaagcccg

SEQ ID NO: 837648 - DNA, 101 bp, Homo sapiens
ggagccgcagcggttccgagcggggcccaacatggcggagagagaggtggagtccggcccccgaaagaggattcattccacttaaaacctgaaaacattgg

SEQ ID NO: 837649 - DNA, 100 bp, Homo sapiens
ccctgcactctcatcgctctcggcctcggcctcggcctccgacacggcagttgtgaaaaacttcaggacaaaaatgtttcatttaaggacttgtgctgct

SEQ ID NO: 837650 - DNA, 99 bp, Homo sapiens
ctacatctatgacctgtatgctgtgtgcaatcaccatggcaccatgcaaggggggcactacacaggagcctgatgcccaggaccctcgagagccagatc

SEQ ID NO: 837651 - DNA, 98 bp, Homo sapiens
gagcatcagggaaatggaaggcaccaagccacaccagcagctgaaggaagtttccgtggaagaaagagtgtcaatccatatctacaaggacagagact

SEQ ID NO: 837652 - DNA, 146 bp, Homo sapiens
cgaaggaagtggtcccagaaaagaaagtaccggtgcctcctgccaaaaagccagaagctccacctcctaaagagcattggctgtgatgactacttaggctccgacaaagtcgtggacaaatgtggggtgtgtggaggagacaacac

SEQ ID NO: 837653 - DNA, 98 bp, Homo sapiens
agcacacaacagacttctattttaatattgcaggccaccaagccatgcattattcaagaaacgaggatgcagtcaatcagatggccgttactcccttt

SEQ ID NO: 837654 - DNA, 101 bp, Homo sapiens
ttgctgtgtttccgacctcatctccaggacagtgggaagagtggctggaggaattcagtttcttggggaaactatgttccaacttcctgtcaacaatcttg

SEQ ID NO: 837655 - DNA, 98 bp, Homo sapiens
aagtgatgggacttctctctatgcaaccaggactcattctgaccagtttctggtggcattcaaagaagtgggaagaaagccccccacttttggagatg

SEQ ID NO: 837656 - DNA, 99 bp, Homo sapiens
ctgagcggggctcacattaaagaagagcattgtatcttccggagtgagagaagcaacagcggggaaggattcactccttctccagttgcacagccacac

SEQ ID NO: 837657 - DNA, 100 bp, Homo sapiens
tagtctctgcggccacctccggaagggtccgccggctgtgctggtgagacttctgcctggtgtcgaaggtggtgggcagatgccgggcctccatgcctag

SEQ ID NO: 837658 - DNA, 115 bp, Homo sapiens
attattttgccttaattgatcaactaattgaaggacatcagtggctggaaaataatatagacttcacagagaatgcagttgtcttgacttcaggtctgtctgttctgttggcaag

SEQ ID NO: 837659 - DNA, 100 bp, Homo sapiens
atatgtaacaaaatactatgggtcatatttaaagccccgccggctgctgtgggagcggcggccgtccctctcctggaggtcgtctcctggcatcctcggg

SEQ ID NO: 837660 - DNA, 100 bp, Homo sapiens
tatttggagttcttacaacatggcagacattgacaaaagacctatggagcattcatgatctagaagcaagataccaggaaagccaagctggaaattcaag

SEQ ID NO: 837661 - DNA, 100 bp, Homo sapiens
aggactgtgatggtacaggaagggaacgtggaaagcgcatacaggaccctaaacaggcctgtcatctttacttcagagtgttactgggaacccagttcca

SEQ ID NO: 837662 - DNA, 98 bp, Homo sapiens
ccggatctgctcggccgcccgggaccgccagctctgtccgctgcccacagcctagcagtcgggaccgtactgaggagtgagctgttgccgcagaatgg

SEQ ID NO: 837663 - DNA, 100 bp, Homo sapiens
agccgagcaagtgagtagtcacatcacctccagccctctgcattcacgtagcattgctgcgagattgccttgcaacaggtttccatgttcttccgatcag

SEQ ID NO: 837664 - DNA, 100 bp, Homo sapiens
gataatgaaggcattgctatttttgcacttcagttcacatactatttatggctgaccctctggtgggcagcatcgccacacagtacatgaccaacagagc

SEQ ID NO: 837665 - DNA, 98 bp, Homo sapiens
agtggactagggtcgccggggaagcgggtgaatctggattgggaaagtcgacattaatcaactcattattcctcacagatttgtattctccagagtat

SEQ ID NO: 837666 - DNA, 120 bp, Homo sapiens
cggcgcccagcaatcacagaagccgacaaggcgttcaagcgaaaacatgaccgctgagcccatgaggtggtggcggtggcggcccgcgatctgagccgtgcgaaggagtttgcacagaaa

SEQ ID NO: 837667 - DNA, 101 bp, Homo sapiens
ccgagactgcccccgaagcccctggggccggagcaactgtgaccacagcgaggatgcggggctggtctgcaccgtcatcccagatcccgaagaggaaccag

SEQ ID NO: 837668 - DNA, 100 bp, Homo sapiens
gtaaactttggacggcaaggtttaaaccttgcagctactgctgctgttactgcagcagtaaagctttacattcagcccatgatgggggccggcctgaatt

SEQ ID NO: 837669 - DNA, 100 bp, Homo sapiens
caaaggcaccacaccccgcacccgcaagatcctggagcagcagcaggctgcaaaaggtgaatacatcaagacctggaggccacggtacttcctgctgaag

SEQ ID NO: 837670 - DNA, 100 bp, Homo sapiens
gcttgacacacatcataaactctgcacattcattctcaaaaacccacctggttttcctttggaatatggataaatacaccatgatacggaaactagaagg

SEQ ID NO: 837671 - DNA, 100 bp, Homo sapiens
acacctcccacctgtcctcaggcatatcaaagggaagccctatggggcggatgacttcctgcctgtgctcatgtatgtgctggcccgcagcaacctcacg

SEQ ID NO: 837672 - DNA, 98 bp, Homo sapiens
tcaggtctggagctcgaccgggccagatgaagacactgaggctcagagaggttaagtgactcagccaaggtcaaacagctagtaagtggtggagccag

SEQ ID NO: 837673 - DNA, 99 bp, Homo sapiens
ttctgcttaaaatgcccagaatacttggacattgcctaagatactgagccatatcgccccagcattttgcatgagcagctgtagcttcgtagtggaaaa

SEQ ID NO: 837674 - DNA, 99 bp, Homo sapiens
tgagatacaaggctacacagagacagatcaaagcagctcatgagactgatcgtggggttgaccaacaagatggaaagaaccacgcaggatcccctgggt

SEQ ID NO: 837675 - DNA, 100 bp, Homo sapiens
actcgggaggaccagggaagcagtgaaaatgatgagagatagagaactcgatgccaccgcaacggtattggcgaaccggcaggatgaaagtgagcagtcc

SEQ ID NO: 837676 - DNA, 100 bp, Homo sapiens
ttcttaatgaggctcagggatgcctgtaccatgatgtgatgctggagaccttgacacttatatcctccctggctttgtgacaacaaactgtgctctgcag

SEQ ID NO: 837677 - DNA, 100 bp, Homo sapiens
agcgccaccacagtgctgcccttccacaccagcaccgagatgttccagggcatgagagtcaggttaatgactccagagagtaagatcagattcgtccaca

SEQ ID NO: 837678 - DNA, 98 bp, Homo sapiens
gtgaagcacctttgaacatttcacgtgatactttgtgttcagggatttgtcttggctgttactatgacacgggaagcaattgatgaatttcggcgttt

SEQ ID NO: 837679 - DNA, 100 bp, Homo sapiens
ctacgccgaagcactcgttccgggggtgaagcctcctgcgccggccttgcctcgggtccaggggcaagttcatcctactctcgagtctaatgatgatgct

SEQ ID NO: 837680 - DNA, 99 bp, Homo sapiens
atgaatgtctggtcaagtctgggtggcaaatatgttcctcgtgccatcctggtggatctagaacctgggaccatggactctgttcgctcaggtcctttt

SEQ ID NO: 837681 - DNA, 98 bp, Homo sapiens
ggttatggatttttctaccatatcagagatgacagtttgctgatggtcgccaaagttggagttagtatgttcaacagaccccattagcagaagtcatg

SEQ ID NO: 837682 - DNA, 100 bp, Homo sapiens
ggcggcgaaggagccgaagccattctccaatgtctaaccggagaagacatactggcagcagggtgcagattcactttataggaacagcttcagcttcagt

SEQ ID NO: 837683 - DNA, 100 bp, Homo sapiens
ccagacctatggcaatgggtccaagtgcgaccttaatgggaggccccgggaggccgaggttcggataaagtcagacctaaagccaaaaggaaagaagaac

SEQ ID NO: 837684 - DNA, 100 bp, Homo sapiens
agtcatgagcgacagcggcgagcagaactacggcgagcggtaaaggcatgacttcctggcaccacagggaaaatcgggtgcaagcccagaaactatttcc

SEQ ID NO: 837685 - DNA, 100 bp, Homo sapiens
cttcgggaagaggaaaggaacctcagaccttccagatcgcttcctctcgcaacaaactatttgtcgcagcggagcgtgctttggacaccatgaattttga

SEQ ID NO: 837686 - DNA, 98 bp, Homo sapiens
aaggacctgtgtaactttaacgaacagcttgaaaatggtgagctgtcccggcagctggatgagaaggaggcactgatctcccagctgacccgaggcaa

SEQ ID NO: 837687 - DNA, 99 bp, Homo sapiens
catcttctaagtttttggcaccatatactactttttccagaattcatacaaagagtatcccaagcagtattgaagatatatttaatgatgatcgctgca

SEQ ID NO: 837688 - DNA, 99 bp, Homo sapiens
attcgcagtggtcgcttcttctccttgggtgcagtactagccgctgtgtcaagtcacaaattcaactcattctatggggatccccctgaagagttacca

SEQ ID NO: 837689 - DNA, 98 bp, Homo sapiens
gttcgaagtggctgtgggtattgctgcggctggtgcgtcgtcgctctagccacagcgtcctgtgtttactcatgaaaatattcaaggtgggggggaac

SEQ ID NO: 837690 - DNA, 100 bp, Homo sapiens
acagagttcagaagactttaacatgggctcttcctctagcagccagtatactttctgtcagccagaaactggctcactcagtaacttgatggattttgtg

SEQ ID NO: 837691 - DNA, 98 bp, Homo sapiens
gcaacctggagttgagacagacgactgggatggaccaggattaaagcaaggagagccaatcatgactggcaaaacacagaccagcaacgtcaccaata

SEQ ID NO: 837692 - DNA, 98 bp, Homo sapiens
gctgcgtgttgtccacccaagatggagttcctcctggggaacccgttcagcacaccagtggggcagtgcctcgatgtgtcttgctgaatcagggctct

SEQ ID NO: 837693 - DNA, 98 bp, Homo sapiens
ctgtccagacagttcttgaaggtgacaacttagagaccttcagtatcagacacagcacagcagccatctgaagagcaaagcaagtctcttgaaaaacc

SEQ ID NO: 837694 - DNA, 100 bp, Homo sapiens
ctgcagacagatgaagatgaacacagtattgaaatgcatttgccttatacagctaaagccatggaaaggaaataatgaagatgtttcattttcaagacca

SEQ ID NO: 837695 - DNA, 98 bp, Homo sapiens
atgccatatgtgttaattccacccacatttttactgcagctgagccgcattgacaggaagattgagttccccctgcctgatgaaaagacgaagaagcg

SEQ ID NO: 837696 - DNA, 100 bp, Homo sapiens
gaagaaaaggagaaggcagagaaaaagaaacgaggaccaaagccttcagcctccccatggccacccatggaccagtcggcattcacttcctcccttctgc

SEQ ID NO: 837697 - DNA, 100 bp, Homo sapiens
ttccccagagccaggcacaaggatgaacattctgccgaagagaacaagacgtgtgaagactcagggggccccaggagatgttgacccagcagggcatggc

SEQ ID NO: 837698 - DNA, 99 bp, Homo sapiens
actgatgggagaatcacacctgagccagcagtcagtaatacagaagagttcattgtcgaaatgctggacctgtagctgtagctgagaagagcattaccc

SEQ ID NO: 837699 - DNA, 100 bp, Homo sapiens
tgggagacatggacccccacatctttgctgtggcagaagaagcctacaagcagatggccaggaaataatgcaaaaggtgtcccaaggctcctgaccagtg

SEQ ID NO: 837700 - DNA, 98 bp, Homo sapiens
ttctccaagaaggacaagcccctgtcaacaaaggagagagcgggaagctagaaggcagcaggaacgtgaacagcgaaggagagaacaagaagaaaaga

SEQ ID NO: 837701 - DNA, 98 bp, Homo sapiens
cagacagcatatttgagtcatttccttcgtacccacagtgcttcatgagaggacttgaagagttgcatgcctcccacatcccaactgccaaccctgga

SEQ ID NO: 837702 - DNA, 98 bp, Homo sapiens
agggcggtaaggatttcaacatgcctctgacaatctctagtaaacggccatcattcaagcaaatcatttcaatcctggagtccatgtcaaatgacacg

SEQ ID NO: 837703 - DNA, 100 bp, Homo sapiens
gtgatgtttggcagggagttctgttacgccatggaaaccgctctggtcacaccaatactgttgcagattgtcaggtcaattcagtgaagatatgataccc

SEQ ID NO: 837704 - DNA, 100 bp, Homo sapiens
cgcgcgctgttcccgcgaagcgagtcgccgtctcgtaggcatccgcttcgatcctgaaattccgcaaacactacgactagagtttgctaaggcaaacacg

SEQ ID NO: 837705 - DNA, 100 bp, Homo sapiens
cccccacggcctgcaggtcacctacctgaaggacaacagcacccgtaacatcttcatctaccatgaggacgggaagcgcccgggggctggagaaggccag

SEQ ID NO: 837706 - DNA, 98 bp, Homo sapiens
agcatttaaccagcatggctacttcatattttggaaagcagtttttaagacaattggatgaaaaatctgacaaacagtatgctgaaaattatacaaga

SEQ ID NO: 837707 - DNA, 100 bp, Homo sapiens
gcccctggatgcacagccccggcgctggtcccaggtgtgtgatggcggctgcaatctgtcttgtgggtattaatgcaatcttcagtggtggctactgttc

SEQ ID NO: 837708 - DNA, 100 bp, Homo sapiens
gtttctggaagactcatgggctctcctccaggaggagatgttaaagtaacccatcttgcaggacgacattgaagattggtcttctgttgatctaagatga

SEQ ID NO: 837709 - DNA, 134 bp, Homo sapiens
cctctccgtgtggatctggcagtcggtcatccacctgctgcagatggggcaggtgtggaggtcggcggaagcagaagtgggctgtggatcctcagaacactgcctggagtaatgacgattccaagtttggccag

SEQ ID NO: 837710 - DNA, 108 bp, Homo sapiens
atccggtgtaaaaaaagctatatttgatcgactgtgtaaacaactagagaagattggacagcaggtcgacatgatgctattgctgagattagagccatttgtattgaa

SEQ ID NO: 837711 - DNA, 100 bp, Homo sapiens
agaaaaccagttaaaaatgttgcctaaccataaggatgagtttaccattattcctgtactggttggagctctgagtgagtcaaaagaacaggaattcgga

SEQ ID NO: 837712 - DNA, 100 bp, Homo sapiens
agattccagatgttcctgtggaccccagtccaggagatacaactcgtcaacgaatcaaattcagtgatgacagagtatgcaagagtcaccttctcaactg

SEQ ID NO: 837713 - DNA, 100 bp, Homo sapiens
gcagagcgagtacttcgttccaacatggacatcctgaagccaatcctggcaatggtggcttgctatccgggaaatggaacaggttatgttcgccacgtgg

SEQ ID NO: 837714 - DNA, 100 bp, Homo sapiens
gattttcttgccaccactccagggggattttgggcaattctgtggtgttcttggtcacacatttatggagtttctgaagggcagtggagattactgccag

SEQ ID NO: 837715 - DNA, 100 bp, Homo sapiens
tcattgatgaaatttatggcattcagaacacggccctccaggcactgaagcgtaagaagaggtatgagaagcagctggcgcagatcgacggcacattatc

SEQ ID NO: 837716 - DNA, 99 bp, Homo sapiens
aatcgcttgggagagctcctgggccacccctcctttcaggtcaaggtaccgctagagcgacatgatggtggaatctgcctcggagacaatcaggtcggc

SEQ ID NO: 837717 - DNA, 98 bp, Homo sapiens
ttcagaagaaggacttcggaatgcactacaacaggaaaatcatattatagatggagtaaaggaccgtataatagacgctggccccaaaggaaactact

SEQ ID NO: 837718 - DNA, 98 bp, Homo sapiens
tcatgctgtcccttcattgaattttaggtacctgtataagaatgaaatccatgcactagataagcaaacatttaaaggactcatatctttggaacatc

SEQ ID NO: 837719 - DNA, 100 bp, Homo sapiens
taactcacaggagagagagcttgttggtctgagtttaagctatgaagaaggacatccctcacactctgaaacagatctccttcagagacagagttttgca

SEQ ID NO: 837720 - DNA, 99 bp, Homo sapiens
gacaatttgtagctaagactcccggataccctgaagtcgggaaatgactgggagactagacctgaaatgaaagagttggatccaaagaatgacatttcg

SEQ ID NO: 837721 - DNA, 100 bp, Homo sapiens
aggtgttcattccatctctcttcctttctcatgttttggctttggggctagggctgtcctttggaggtataaattctctcagcttaaaggttcttcagat

SEQ ID NO: 837722 - DNA, 98 bp, Homo sapiens
tatgatattcttctcctggttaatcaagaattctctatttctgctccgtcatccatgccactctgcagaagaaagatcagcaactggagcctaaaaaa

SEQ ID NO: 837723 - DNA, 98 bp, Homo sapiens
ctgatagactccttccagaataactcaaaggagaaaaggttctgcaggacgatgagttcacctgtgacctcttccgattcctgcaactactctgtgag

SEQ ID NO: 837724 - DNA, 100 bp, Homo sapiens
cactgcagtagaattccttgtagataagcaactggattttttaactgaagatagtgcctttcagccctaccagcttttagtttggatgctgaacagcctg

SEQ ID NO: 837725 - DNA, 99 bp, Homo sapiens
cgagcaggacaggacgaagccggagtgtaggcggcagaggattcgctcccagagcagctgcggccaggtggcagagcgagctctctattactggaataa

SEQ ID NO: 837726 - DNA, 100 bp, Homo sapiens
gcagctcacaaacggccacggctctgcacactggatcgtcggaaactggagcgaggcaatgaatcgctccctggctaatgtgattcttggaggctatggc

SEQ ID NO: 837727 - DNA, 98 bp, Homo sapiens
tgctctgaagcgcacgacctccgactactttctccttcaagacaaagatcattccactcagcctgggacgatggggaggaaaaaaatccagatctccc

SEQ ID NO: 837728 - DNA, 98 bp, Homo sapiens
taccgtcgccttccccgagaaggaagaggatgaggaggaagaagaggagggtgtggagtggggctacgaggaaggtgtgatgaatgcagactctgcta

SEQ ID NO: 837729 - DNA, 99 bp, Homo sapiens
gaaagactcctgctgaaagaagacagcactctgaaagcagctggaatcgagaaccatggagtctggcagtaccgccgccagtgaggaggcacgcagcct

SEQ ID NO: 837730 - DNA, 98 bp, Homo sapiens
acaccaagatggcggacggcccggatgagtacgataccgaagcgggctgtgtgccccttctccacccagagattgccaacactcctgatagctgaatg

SEQ ID NO: 837731 - DNA, 98 bp, Homo sapiens
tttgccaggcggctgaaccgggaaagtacaggattgagagcaactatggcgtacacacactggagatcaacagtgatgtggagccaactgcaccgatg

SEQ ID NO: 837732 - DNA, 100 bp, Homo sapiens
gcagcgccaagcaggagctgaaggacttcagcaaagccttctagacaagctcagtggaatctgaagggcccaccccatggaggaatgctgggtgacagag

SEQ ID NO: 837733 - DNA, 100 bp, Homo sapiens
aacagactttgtttcttggagtccacttccaattccaaggcatttgatgtacttggaagagttgaagcttaccttaagctccttaaatcagagggtttaa

SEQ ID NO: 837734 - DNA, 109 bp, Homo sapiens
gcaggtgactgcttggatgagaagcagtgtaagcagtgtgcaaacaagatccacagaccagcatggctgccactgctgctgtgagtcccagtgactacctgcagcctgc

SEQ ID NO: 837735 - DNA, 100 bp, Homo sapiens
cttcgaatgcaatcagatgctagaggcgcaggaggagcacctggaggcctggtggctgcagctattctgtatgccaatgaaggagaaagtaagaaggaac

SEQ ID NO: 837736 - DNA, 100 bp, Homo sapiens
agacaagtggctcagtgcaaatgtgcaaaaaggtttcaggtggagcagatcggagagaataaataccggtcggtggtggggagcggcagctggcagagag

SEQ ID NO: 837737 - DNA, 100 bp, Homo sapiens
ggtggacctgtttgtgcgcacagtgctggtctgcctgacataaatatcgacagtatatggcaggacttctggctcctccttatggtgttatggaaacggg

SEQ ID NO: 837738 - DNA, 108 bp, Homo sapiens
tctttgtctgggtcagtcaagaaccatttccaaacaaggacatggagggaaggcttcctaagaacatcgggtcagaagttgagatttccactatcgagaaacaacgga

SEQ ID NO: 837739 - DNA, 100 bp, Homo sapiens
ttgtggaagagacaagccattttgtgcgcaccacttttgtgtccaggcataagaaatttgacggacacattcagctaacgtattttagcaggtggagtga

SEQ ID NO: 837740 - DNA, 99 bp, Homo sapiens
ggtggttctcttcccaaagtggaagccaaattcatcaattatgtgaagaattgcttccggatgactgaccaagaggtcctaggcctacttacaagcctc

SEQ ID NO: 837741 - DNA, 100 bp, Homo sapiens
gttagaacttagtattttttccactgccggtcaccaggacttctcacagacatctgaagagctgccatgtctggggcatcttcctcagaacagaacaaca

SEQ ID NO: 837742 - DNA, 98 bp, Homo sapiens
acgagtatgagcctgcagcagacagcacggacgtcaccctggtcgctcagctgtccatggacagatttgcttgtaaatgcatcacgaagaggcagccc

SEQ ID NO: 837743 - DNA, 99 bp, Homo sapiens
acgccttcaggtttgctcagggattacaccaggaagcaaggcggcagctgccaacctgtgtcctggagatgtcatcctggctattgacggctttgggac

SEQ ID NO: 837744 - DNA, 100 bp, Homo sapiens
ggaagaagaaggtaaagttacattcttacactggaaaggaattacctccgacaaaagagccagagcccagaggtggagcagttagggagggttgtggaac

SEQ ID NO: 837745 - DNA, 98 bp, Homo sapiens
tggtgatgctattgttttgccagcgggagcacttcatcaggttgttgatcattatgaaaatcctagaaacgtggggtcccttgacaagacatctaaaa

SEQ ID NO: 837746 - DNA, 100 bp, Homo sapiens
agatctcccccgtgtcttcctatgcaggtctctaattaacagaagatggcaaagcccagccacagcagctatgtccttcagcagctaaacaaccaaagag

SEQ ID NO: 837747 - DNA, 99 bp, Homo sapiens
tctgtccagttttcaaaccacacaggttctcagaggcactgtgactgacttccctggatttgatgagcgggctgatgcagaaactcttcggaaggctat

SEQ ID NO: 837748 - DNA, 100 bp, Homo sapiens
cgtgccctacttcaaggataagggtgacagcaacagctcggcgggctggaaggtattgttgcagcatctggcagtgagactgaggatgaggacagcatgg

SEQ ID NO: 837749 - DNA, 98 bp, Homo sapiens
gtggccatcttgagtctactctgtcgctcttgtgccctagcaccccgagaaccgtcagtttgagccagatggtctcggcgcggaagatggccggcggc

SEQ ID NO: 837750 - DNA, 99 bp, Homo sapiens
gaaaccataatgctacaaactctagggtaaaccagacttgaatacaacattgccaattagacaaacagcatcaattttcaaacaaccggtaaccaaagt

SEQ ID NO: 837751 - DNA, 100 bp, Homo sapiens
ggcccgaggcccctatggcagatttgaaaattcacccttgtagagtcattcctgcctttgagcggactcccttttaaggattggaggctgttgtcattgg

SEQ ID NO: 837752 - DNA, 99 bp, Homo sapiens
gaaaattaaaaagcttaaagaagacatttcacagggggtacacatatctgtatatagcccgtgctttgaagaagaggagcacttcaaggtgctggtgaa

SEQ ID NO: 837753 - DNA, 99 bp, Homo sapiens
tctgtgtttgaagtcaacattcgatttattggaggcctacttgcagcatattacctatcaggagaggagataacaacgaacttgatgcaagtgataggt

SEQ ID NO: 837754 - DNA, 98 bp, Homo sapiens
atttaaaggagcagccctggtgtcacctatcagtaaaagggagttcccattagacttgaagttgggccacgtgatatgaagagctgtcagtttgtagc

SEQ ID NO: 837755 - DNA, 98 bp, Homo sapiens
ctgatcccatgttctcctgccctgaagcaggctccgagctctgtccagtggtgggagtattacatcccctcctctttctccagcattgccgaagtata

SEQ ID NO: 837756 - DNA, 100 bp, Homo sapiens
ggaatatgaagagacacagtatggtagccacacccccagtgtcttttgaaccaccagagtttgagattgttggttttaccaaccacattaatgtgatggt

SEQ ID NO: 837757 - DNA, 100 bp, Homo sapiens
aagaaaaaacgcttcactgtcaagaacattcagaagattctcggccttgccccttcacgagccgccaccaagcaggcaggtggatttcttggcccaccac

SEQ ID NO: 837758 - DNA, 100 bp, Homo sapiens
ttggtgcccctgggcatcaccaacatagccatcgacttcggggagcagatccagaatgaagagagtgtggtgctttttctggtcgcgtggactgtgacag

SEQ ID NO: 837759 - DNA, 100 bp, Homo sapiens
gctgcagcaacgcgagtgggagcaccaggatctcgggctcggaacgagactgcacgtctttctgcccccgataacagaaaatctctttttcgtcttaaaa

SEQ ID NO: 837760 - DNA, 100 bp, Homo sapiens
ttggaacttcctgttctgatagcgtggaaggctgttgtacagtggcctgattatagctcactgtagcctcgaaattctgggccgaaatgatccgcctgcc

SEQ ID NO: 837761 - DNA, 100 bp, Homo sapiens
tctacagatgaaggcagaagactatgatgttgtaaaagttattggaagaggtgcttttggtgaagtgcagttgatcacccggaagttcaggctgaattct

SEQ ID NO: 837762 - DNA, 100 bp, Homo sapiens
gcctggggatcttcactttcgcagtctacgactgcctgtgactccagaaagacaaactgcagattggccaaggctgtgtttgatgtggacaagaagaaag

SEQ ID NO: 837763 - DNA, 100 bp, Homo sapiens
acaagaggccccagagggaaaagaagcccaaagttttaaaggatattttggaactcttagaaaaaagagtgaagtcaagattttctcaccggcagataca

SEQ ID NO: 837764 - DNA, 100 bp, Homo sapiens
cagctgctcccttcgccttcgccctttccacctcgcggcagttcgataatcacagctggcttatcaatattgctgtttgatgcgatcctgaccagtgcaa

SEQ ID NO: 837765 - DNA, 100 bp, Homo sapiens
tttgccgcagttcatcttcctccctgtgtactttccatttgccttcctggggtaaaggagctggaagtgcgaaaattgatgcatgtgagaggagatggac

SEQ ID NO: 837766 - DNA, 100 bp, Homo sapiens
tatattgttcaaatgatcttctaggagatttgtttggcgtgccaagcttctctgtgaaagagcacagtgctactatatttcatgaactggtatataaaca

SEQ ID NO: 837767 - DNA, 98 bp, Homo sapiens
ggggcccccgggctccttcttcggattctcagtggagttttaccggccgggaacagacggaaccgggctgtgggtcggcccaaggggaagctgggccc

SEQ ID NO: 837768 - DNA, 99 bp, Homo sapiens
cctagcagatgtagttggacacctaagagcaggtgctaaaatgatgtattttctggacaagtcaaggcaggagaaagcaattgctatagccactagact

SEQ ID NO: 837769 - DNA, 100 bp, Homo sapiens
aacttttcaagcctgaaggaaaggcagaactgcctgattacaggagctttaacagccacagcgtcctgtgtttactcatgaaaatattcaaggtgggggg

SEQ ID NO: 837770 - DNA, 98 bp, Homo sapiens
tcaatatgaacttcagtcattgggggaatccaatgcacaaatgctgtgtgactggctacgtgttaatgaaagctattttaagccatcccctacgtgta

SEQ ID NO: 837771 - DNA, 100 bp, Homo sapiens
ccaaccagagctgggaagattcgaacaccgacctcgtcccggcccctgcagtccggatactcacgccagaaggaggataagatcaatgccctcattaaag

SEQ ID NO: 837772 - DNA, 100 bp, Homo sapiens
agcctaactttgcaaccattggtctgcaggacatcactttagatgatgtggtgaagcagcgcttgcagatgtacaactcgcagcaccggtcagcaatcag

SEQ ID NO: 837773 - DNA, 100 bp, Homo sapiens
tcagatgtggtggaatatgccaaggaaaaactggagagcttcatcaaaaatagtgatagctttgataattgctgatatgtgttcaagatgagtgggatgg

SEQ ID NO: 837774 - DNA, 100 bp, Homo sapiens
aagatgcctcgaactaaacaaattcatcccagaaatctaagaggacactgtcttcagccttttcttcaagtttttgaccgtggattgtgttgtgtcaaac

SEQ ID NO: 837775 - DNA, 110 bp, Homo sapiens
ggatcgatgctacgctaacctatcgggttctctctccgcgcgttcaggactatgctgagaaggaaaataccatagcaaaagctctggaagatctgaaggcaaatttttac

SEQ ID NO: 837776 - DNA, 98 bp, Homo sapiens
cgggtgtctcgtgtgtgaacatcacagggagaaacaaaggcagcgctgccctcgggggagcattggccctggcggaacgcagcagccgcgaaggatcc

SEQ ID NO: 837777 - DNA, 100 bp, Homo sapiens
cctgaaggaggggaagggacgtgggggcggccacggcagtgtgccggtccaacaaaagcccttgggtctgtttgacttgttcaagtgtccactgtggaag

SEQ ID NO: 837778 - DNA, 98 bp, Homo sapiens
aagatcaagatgcgctgtaactgagaagcccccaaggcggaggctgagaatcagagacatttcagcagactttccgcttggccctcatccagcttcag

SEQ ID NO: 837779 - DNA, 98 bp, Homo sapiens
gagacgcgctgccgaggagaacccagcggaccatggtagcatttgacatggacggcaaagtacgtaaaccgaagtttgagcttgatagtgaacaagtt

SEQ ID NO: 837780 - DNA, 98 bp, Homo sapiens
gaggaccacattacccagcttcacgagtacaatgacatcaaggatgtggggcagatgctgatgggcaaactagtagagacgaggtttcgccatgttgg

SEQ ID NO: 837781 - DNA, 100 bp, Homo sapiens
cgagcaggaagctgcggctgagtcgttgatacaccaaaatcggcaagctatcttaaaccagtttgcagcaactgctcctgttggcatcaatatgagatca

SEQ ID NO: 837782 - DNA, 129 bp, Homo sapiens
gatgtatggggacccttctgaaatgggtgctggaatttgcctgctaatcaccattcagaaattacagaagacatccccgtgaagactttgaatatgaagactgtgtatgtttctgtgttaccaacaaca

SEQ ID NO: 837783 - DNA, 100 bp, Homo sapiens
tcccagtggaagctgacttcctcttcgcctattccacggttccagcaacccgatagcagaagggtcaactcttctgttggattttctgttttgcagcata

SEQ ID NO: 837784 - DNA, 113 bp, Homo sapiens
caggaaggaggaggaataatatttatggagcatatattatggaacacatttcaccagtgatcattaaagaatgggcagcttacaaaggaaagtctcctcaaaccccggaactg

SEQ ID NO: 837785 - DNA, 98 bp, Homo sapiens
ggaaactcggagggaccctggcccggaggaagaaagccaaggagggagtggacgcttctcttgtgagccagctggaggtcttacctctttgactgaac

SEQ ID NO: 837786 - DNA, 99 bp, Homo sapiens
aagtaccaagtgaagactttgaacgcactcctcagagtccgactctcccacctgctaaggtaagagcttctgttcgtgtgcagggaaagcagctcacag

SEQ ID NO: 837787 - DNA, 100 bp, Homo sapiens
gaccaattacctcttttttgctctccctcgagaagctccagatggcgtcttccgtgggcaacgtggccgacagcacagttgctgatcatctgggctgtga

SEQ ID NO: 837788 - DNA, 98 bp, Homo sapiens
caggtaccacagcagaccacagttctaaaagactttgagctgaatgctctcaacgcaaggattgaggatgaacaggccctcggcagccagctgcagaa

SEQ ID NO: 837789 - DNA, 98 bp, Homo sapiens
gccttcccagtagctggaactacaggacctgcttcacaccaccaagcatcaggatgtgttgctcagtgagcagacccgactccagaaggacatcagtg

SEQ ID NO: 837790 - DNA, 100 bp, Homo sapiens
tgtgatgggagattcaaagtccagcatggaggatgcaaagccggaatacgagcagtaatcgctacgcctgacaaacctgctgctgtgcacatctgtactc

SEQ ID NO: 837791 - DNA, 100 bp, Homo sapiens
tgcagcggcggcgagcgctcgcgagcggctgcgggacgcgaggtttccgggtacactgaggaggggacggctccgtcttcacattgtgcacagatctgag

SEQ ID NO: 837792 - DNA, 101 bp, Homo sapiens
cgggacaagaaaattcatgcgatggtaaggttgaagttacaaaagaaggtgtgaagttgtgtaccatgggtccaggaaaagtgtttggggaattggctatt

SEQ ID NO: 837793 - DNA, 99 bp, Homo sapiens
gaatggcatgctggtgacggacagtgcagggaagcaactgcagagaatttctacaagtgtgaaagaattagaaaacttcaggaacttgttacagaatat

SEQ ID NO: 837794 - DNA, 100 bp, Homo sapiens
ggtgctgaaaacagactcctgtgatgtaaatgactgtgtccagcaagttgtggaacttctacaggaacggatattgatgatgttaagaagttcaaaccgg

SEQ ID NO: 837795 - DNA, 100 bp, Homo sapiens
gcagcatggcggtggaggacgaggggctccgggtcttccagagcgtgaagatcaagatcgcggagctggagtttgttcagatcatcatcatcgtggtggt

SEQ ID NO: 837796 - DNA, 101 bp, Homo sapiens
taaggattccaagtaactcttatttgaccagtgctgttgcagaagctcaaaaattgatggttcaagcagcagatcttctttctgccattcataattcattg

SEQ ID NO: 837797 - DNA, 100 bp, Homo sapiens
catactcacagagttagagagagggatggtggtgttgaagcacaacgggtcatccgagattctcaacaaactgtatgacacggccatggacaagttggag

SEQ ID NO: 837798 - DNA, 98 bp, Homo sapiens
cagaagacattttataatgaaaaatggctatcatgctttatggagcgttacctgggtggcatcaaaaagcggcgccgaacgagacatctcaatgaccg

SEQ ID NO: 837799 - DNA, 100 bp, Homo sapiens
tggaaagatatgccaaatttgttaaagagaggatagaaattgaacagaactatgcgaaacaattgaggtaagaatgattgatgttggctgatattggagt

SEQ ID NO: 837800 - DNA, 98 bp, Homo sapiens
cccgtctcgtactgtcgccgtcaccgccgcggctccggccctggccccgatggctctgtgcaacggagactccaaggccatttcataattctgaatca

SEQ ID NO: 837801 - DNA, 100 bp, Homo sapiens
gcttgatttgtaaagctccttgtcgtacagttttgctttcaaagcatattgactatccaccatttgaaaaaaacttttacaatgagcatgaagagataac

SEQ ID NO: 837802 - DNA, 98 bp, Homo sapiens
ggaagcagaggagaaccgggagccattcagaaaaggtacctttaaaacagggcagaagccttatggattggattcgactgaccaaaagtggaaaggat

SEQ ID NO: 837803 - DNA, 100 bp, Homo sapiens
cttgtgatccgcctgcctccgcctcccagtgttgggattataggtgtgagccaccacacccagccactaagagccactggtggccgcagaagacagtcca

SEQ ID NO: 837804 - DNA, 100 bp, Homo sapiens
ttttacatcaccaacaggtgaagaaaacctcatgaatagcaatcacagagactcggagagcatcactggtccagcctgatgagtgaagaggctaagcgag

SEQ ID NO: 837805 - DNA, 100 bp, Homo sapiens
tcagctcctgtggatgttgactgaagtttctatgtttgcaagctaatcctcagcagtttctttgtgtaaagatttctctctgtgttactggaatccctat

SEQ ID NO: 837806 - DNA, 98 bp, Homo sapiens
tgtgaggaaaggcacctccaccagtctcgctctgtcgtccaggctggagtccaatgctgcgatcttggatcactgcaacctctgcctgctgggtttaa

SEQ ID NO: 837807 - DNA, 99 bp, Homo sapiens
tttggggagaccatggagatgatggacaggatgaaaggtctgaggaaaaaaaacctgtcccctggtgcggtggaatcggatgtgagaggaataactggg

SEQ ID NO: 837808 - DNA, 99 bp, Homo sapiens
ctttacagatgtgggcccagaaaacaagccagtcaggtgtagcccatcagtgttatcatggtttcatgaaggctgtccaggaaggaaacattcagtggg

SEQ ID NO: 837809 - DNA, 99 bp, Homo sapiens
tgaaggtactggtgttgggagactcagacagttcggcatggttttcctcatcagcccacagcattagcctttgatccagttcagaaaatcttggctatt

SEQ ID NO: 837810 - DNA, 100 bp, Homo sapiens
ccgtggtgacggagaagcagcagatgctggagcagcaccttcaggatgtccggaagagagtgcagggtctatgacaatcgactgcttaggaattctaaat

SEQ ID NO: 837811 - DNA, 99 bp, Homo sapiens
ttaattaccattaccacgaagttatggaagaaattgctgacaccatggtacaaatattcaaaggacttcaagaaagtgctccttggcttaaagggcaag

SEQ ID NO: 837812 - DNA, 99 bp, Homo sapiens
caaaagtgaaattttacgaactcagactgctgcactggccgttgtggagtccactcacccttcgagcccaggatttgaagactgcagctccagtgaggc

SEQ ID NO: 837813 - DNA, 100 bp, Homo sapiens
tcttggcagccttcctgatttctgcagctctgtgtgaaggtgaaatgacaatggatgctctgttggctcgattgaaacttctgaatccagatgaccttag

SEQ ID NO: 837814 - DNA, 100 bp, Homo sapiens
ggaaacaaagttattttgctcggaaatggaagttccagtattaccgaaaatctctctaccgatcaccagttcttcactgcctacctttaattttagttcc

SEQ ID NO: 837815 - DNA, 98 bp, Homo sapiens
agggttcatagcatgcggtggtgaagatggattactgaaagttttgaaattagagacgcagacaggttgaaaggattgttgacaaaaggaaaaataaa

SEQ ID NO: 837816 - DNA, 99 bp, Homo sapiens
ggggccagaggcttgaagtgtggggagaacttggtatcaatgtccgagttaccaccatggatgcagagctggagtttgcaatccagccaaatacaactg

SEQ ID NO: 837817 - DNA, 99 bp, Homo sapiens
ccagcaccgcagatgttgtcaaggtggcctaccaggaggccaggggtgtcgccatgactgcttttcaggaagccttggacgctgcaggtgataaacttg

SEQ ID NO: 837818 - DNA, 100 bp, Homo sapiens
ccagaacatcaagcgagccaaggacgacgggacccagtcggtggtggggagcggcagctggcagagagtcaacgcccagacggctgtgagatccccgaga

SEQ ID NO: 837819 - DNA, 100 bp, Homo sapiens
tcaacgtggagtttgatgactctcaggacaaagcaggtgattgtagagaaggctccaaaagccagggtgcctgatctggacaagaggaagtacctagtgc

SEQ ID NO: 837820 - DNA, 99 bp, Homo sapiens
agaggagctgtggataacgggaggtgaatttccatgtcaacatagtcctgacatatctgaagagatggattaagaatgctttggattaaggattgtgga

SEQ ID NO: 837821 - DNA, 100 bp, Homo sapiens
tgtcatctcctacctggtggatttggacatggtcctcaaatgtctccgcggaaagtgaccagaagaggtgtgcagtttccaggcctggcccatacagacc

SEQ ID NO: 837822 - DNA, 98 bp, Homo sapiens
aggacctgcccagcgccaccatcgcctgtcacctggacccgcgcgtgttcgtggacggcctgtgccggagccagcccctgggcaacaaagtggaaatg

SEQ ID NO: 837823 - DNA, 100 bp, Homo sapiens
tatcgtctccaagaggagtttgaagctacccttggggcatctgatcctaattcccttgctgatgatattggcatgcgaggctgccaagaaaacaaaagca

SEQ ID NO: 837824 - DNA, 99 bp, Homo sapiens
gaaccggaaacgggatggggagctggaccaggagtaaactacaaattcttgtgagtcctaattcctccttatccacaaaacagtcaatgttcccgtgga

SEQ ID NO: 837825 - DNA, 99 bp, Homo sapiens
ttactgaaaaattgagtgggctcagtttctgcagcgctttcttccactgcaagatggacctgtttggagacgaccacaataagaacgggttcaaaatgt

SEQ ID NO: 837826 - DNA, 99 bp, Homo sapiens
caggagacccggggacagcatcgcccaggcccctggtgggcagatggaaaaggacccctggcagctgcgttctcttccagtgaagtaaaagctttaatt

SEQ ID NO: 837827 - DNA, 126 bp, Homo sapiens
agaaccactgattgagcccctgatggagccagaaggggagagttatgaggacccaccccaggtcatttggccaatttaatgccgacagaagaggccaccatctgaatgtaatttatctcctctttc

SEQ ID NO: 837828 - DNA, 104 bp, Homo sapiens
ggaaaaagcaagctgaagacatcaagaagatcttcgagttcaaagagaccctcggaacggggaagcgagtagcattatctgatgatgagacaaaggaaactgaa

SEQ ID NO: 837829 - DNA, 100 bp, Homo sapiens
catgcatgcaccaaaacgaggacaggctgtccagtgaatacagagccatctggcccaacctgtgagaagaaaacatactctgtgcctgcccaccaggaac

SEQ ID NO: 837830 - DNA, 100 bp, Homo sapiens
tctgccactgcacaagaaatgtgtccccacagggatagaagatgaagatgctctcattgctgatgtaaagataccccatgtttccccatcactcgaggag

SEQ ID NO: 837831 - DNA, 100 bp, Homo sapiens
ttcaaagccaagtcaaaatattctccagaattactcaaataccggaagcctgatgttactttggattttatgcttccaagaaaaacaagtttgtcatctg

SEQ ID NO: 837832 - DNA, 100 bp, Homo sapiens
catgctcacggtgttccagtgcatcaccatggagggctggacggacgtgctgtactgggaattgagtgatctacagcgcgatccacctgctcactgttca

SEQ ID NO: 837833 - DNA, 99 bp, Homo sapiens
tgttactccactgactctctcttttcctgataacatggccagcaagaaagtaattacagtgtttggagcaacaggtcgtggagtcagatttgagtgatg

SEQ ID NO: 837834 - DNA, 100 bp, Homo sapiens
gagaatacaaacctgacaagggtaaagagagacctctctccccaaaagccgtcaaaggatttgaaactgctccacttaccaagaattattatactgtggt

SEQ ID NO: 837835 - DNA, 98 bp, Homo sapiens
taaactggttaatagtggcatggaagatccatttgttggtgacaaagttcctgctgatataaggttaacttccatcaaatctaccacactaagagttg

SEQ ID NO: 837836 - DNA, 100 bp, Homo sapiens
gagaggctcaaggagtattcagagactgagaaggaggtgtctttcctgaagactatcttcccgtctcaaaatggacatgatggatccacggatgtacagc

SEQ ID NO: 837837 - DNA, 100 bp, Homo sapiens
gggaggacccgggacaccgcacagccgggaaatgatatccctcctaaatgtacaatcaaggatttgctaccaaaagagaagagcagtacagaagcagtat

SEQ ID NO: 837838 - DNA, 99 bp, Homo sapiens
tgcgaaatggagatgaggagaatcccctcaaaattatttgtccagatgaagagggcactgaaggaaccatttctttgtggagtatcatctcaaaagtta

SEQ ID NO: 837839 - DNA, 100 bp, Homo sapiens
tacagacaaagaaagttcgaaaagttcctccaggtttgccatcttcactttcccatggtttggcatggacattgggggaactctagtaaagctctcgtac

SEQ ID NO: 837840 - DNA, 102 bp, Homo sapiens
ctggagttcatcaaatacgtgtgcaagtgtaaacaggaacatcgataagtagtgtaaaaacttgcacaatgaaatccgaagccaaggatggagaggaggaga

SEQ ID NO: 837841 - DNA, 98 bp, Homo sapiens
aataaatgaatcctgcagtgctgtctttgagaacttcattcaagagaaggagctgtttgagatggagaacgtttttactgtgtcatcagatcctcatc

SEQ ID NO: 837842 - DNA, 100 bp, Homo sapiens
cagaagttcatggatgctgtcaacaagaagagcagttcccaggatctgcataaaggtaattttaaccaatcagatgacaacaaagattgatagaaatcag

SEQ ID NO: 837843 - DNA, 100 bp, Homo sapiens
cggagattgacaatcaatgggccatcttggacgaatgacagcccatatcaaggcggtgtattctttttgacaattcattttcctacagactaccccttca

SEQ ID NO: 837844 - DNA, 100 bp, Homo sapiens
actggaagctctacgctactgccatgataataacataattcacagggatgtgaaggtctatcaatgagaagaaagtgccaactgaaaacttttagaaaat

SEQ ID NO: 837845 - DNA, 99 bp, Homo sapiens
agaaaccatgtgctgaaatgtttgacgacactgatggtttgatggacaatctaaaatatgtaaatcagttgaagaaggaaaatgaacgtgcccagggga

SEQ ID NO: 837846 - DNA, 100 bp, Homo sapiens
agccaccatgcacatcctcgtggtccatgccatggtgatcctgctgacgctgggcccgcctcgagtgtactaatggtcacttgatgtgcgctggctgttt

SEQ ID NO: 837847 - DNA, 100 bp, Homo sapiens
gcttatccactcactcacccttccgaactcttaacatcaatgggcaaatccccacaggagaaggaataggaaccaaggctttagccttctcaactcattg

SEQ ID NO: 837848 - DNA, 98 bp, Homo sapiens
tcagttacaagagaaactttatgtgcctgtaaaagaatacccagatgaggagatgttaaagtaacccatcttgcaggacgacattgaagattggtctt

SEQ ID NO: 837849 - DNA, 100 bp, Homo sapiens
tacacactgcagcccaagcttcccatcacaggtgcattggatcgttgtgtgatggggataacagcagttgagattctaaacgcttgtgatgaagctgttc

SEQ ID NO: 837850 - DNA, 98 bp, Homo sapiens
cgaaagcaagctcttctagaagttgacaagttggatggcttgaggactggtactaaaaggaaacgtgactgggaggccattgccagcagaatggagga

SEQ ID NO: 837851 - DNA, 99 bp, Homo sapiens
gaaaaatgcagacaaaattgcttccaaagccaagatgatttattctgaattcattgaagctgatgcacctaaagagggtctaaaattcccaggactcca

SEQ ID NO: 837852 - DNA, 100 bp, Homo sapiens
agaagttcgtcttcccctccaacatggagtatctgcggggactgtgtccaggggcagagggcccacccagggtacctcgtggagaagggagagaagggag

SEQ ID NO: 837853 - DNA, 100 bp, Homo sapiens
gcgctcgtcgtcctctgcgcttttcagctgtgtctttggtgcaacactaacaaggcttgtctggactacccagttacaagcgtcttgccaccggcttccc

SEQ ID NO: 837854 - DNA, 99 bp, Homo sapiens
ttcagattcacttccttctcatccttttccaccagctaaagtgccgcagaatggaattcggcattgttcctacacagcttctcggcaacatctctatgt

SEQ ID NO: 837855 - DNA, 100 bp, Homo sapiens
tacatggcttgcaaaaagtaaaccacgatcgttatgctgaatggccctgctgtggcaccagtgaccaacgggaacacaacggtgccacccctgaacgatg

SEQ ID NO: 837856 - DNA, 100 bp, Homo sapiens
catgttttacgcctctactcagaaaatgaccgactgagaatcagtttctcaagtcaaagaaggccctgtcctagcaactagttcaggagctggtgttttt

SEQ ID NO: 837857 - DNA, 153 bp, Homo sapiens
gaaaggagcaaaaggaagagcaggcttccctgggcttcccggctcccctggagcccgcggaccaaaggggtggaaagaagggctttcgaggaggaagaagacgtcgctctggtttgtggggtctctgctgctggtgtccgtcctcatagtcac

SEQ ID NO: 837858 - DNA, 100 bp, Homo sapiens
cctctatgagtactgtcagcaaaagggaatttcctacaagcagtgtggcaagtttcagtcattcagtcagtaccgctgtaagactgccaagaagtcagag

SEQ ID NO: 837859 - DNA, 99 bp, Homo sapiens
ggcgacccggaaaggccggaagcggccgggctggatcaggatgagaagccgctggagttctggagtgggtggaagtggtggaggatcctctggtaggtc

SEQ ID NO: 837860 - DNA, 100 bp, Homo sapiens
aaattataggaaatggagagcaacaatatgtttatctgaaagatggagatgtgattaagactgagggagccactctaagaaactatgttccaacttcctg

SEQ ID NO: 837861 - DNA, 98 bp, Homo sapiens
tacatcaaaaataccaagcagcagaacaatgctgttcacttagcagccatggaaggccaccttcactgtttcaaattcctagtcagtagaatgagcag

SEQ ID NO: 837862 - DNA, 98 bp, Homo sapiens
taccagtagaggcaaccggcagtaactgtcctccacatattgagaatgtgtggcagagaagacacagcttctgaaattgagtgtacctgctactttta

SEQ ID NO: 837863 - DNA, 100 bp, Homo sapiens
ggagacggtgattttgggcctattgaagacacctgctcagtatgacgcttctgagctaaaagcttccatgaaggacattggctccctggattatcaagag

SEQ ID NO: 837864 - DNA, 100 bp, Homo sapiens
cgaagaagcatcgttaaagtctctcttcaccctgccgtcatgtctaagtcagaggatttggtgctatggagaaatttttggtagaatataagagtgcagt

SEQ ID NO: 837865 - DNA, 100 bp, Homo sapiens
gagaagacactgcgtcaagcaggtgccccgaataactgggaatttcagattggaccttgtgaaggaatcagcatgggagatcatctctgggtggcccgtt

SEQ ID NO: 837866 - DNA, 98 bp, Homo sapiens
ggttaaagttacacagcttaagacgagttgtactgctgtcacaggaaatggacgctggattacaagcatggcagctcaggcagcagaagttgcaggaa

SEQ ID NO: 837867 - DNA, 100 bp, Homo sapiens
ttgaagttattggaagataaaaatggagaggtacagaatttagctgtcaaatgttttaaccgtgattggagataccacaaagaagaacgagtatggatta

SEQ ID NO: 837868 - DNA, 99 bp, Homo sapiens
tcggactggcagcagtatttgtgggagtctcaatacgaaagtgtgctgtgttgtcattcaaggacttcctctcctgcaggccaactgaaataccagaaa

SEQ ID NO: 837869 - DNA, 100 bp, Homo sapiens
tcaccagaatgaatgaagtgcttcagatttaaatatttcaccagtgatcattaaagaatgggcagcttacaaaggaaagtctcctcaaaccccggaactg

SEQ ID NO: 837870 - DNA, 99 bp, Homo sapiens
gagagtgttctaatggtcagcatcgatcaattattgcagagagactttcaagcagctggctggatgttcgtcatattgaaaagtatgtagaccaaggta

SEQ ID NO: 837871 - DNA, 100 bp, Homo sapiens
tgcctaccaagaagtctcagatcttttctacagcttctgataatcaaccaactgttacaatcaaggtctatgaagagtatgaagagtgtaaagacctcat

SEQ ID NO: 837872 - DNA, 100 bp, Homo sapiens
ctgtgtgcattcctgcctggtccttgagagttaagtgggcagaccaacatccacctcagcaaaaacttcttcctgacgaatcgcgccagggagcgctcag

SEQ ID NO: 837873 - DNA, 100 bp, Homo sapiens
acgaggagacggctggcatggtgcgccacatctaccgcgacctggaggcggccgacgccgctgcgctgcaagtcgtgagatggagaataaagaaactctc

SEQ ID NO: 837874 - DNA, 100 bp, Homo sapiens
gccactggctttgaagagacagatctcacctaccaggtgtcggagtctgacagcagtggggagaccaagcacacttttgttgcacagccaggtctctcta

SEQ ID NO: 837875 - DNA, 100 bp, Homo sapiens
atcagcattgacccagagagggacacaaaagaagccatcgcaaattatgtgaaagatcgatctctttgggctgcctgacctccttgggtgcttgctatta

SEQ ID NO: 837876 - DNA, 100 bp, Homo sapiens
ttattcatttctgtgcaaaacaggactggctgatactacgtattccagatggttctgcttggattctgctagacagacccgacaaagactgtctatcaac

SEQ ID NO: 837877 - DNA, 100 bp, Homo sapiens
gtgggttagacatccctgaggttgatttggttatacaaagctctccaccaaagcaatctgaagaggatgtaagtcagtttgattccaagtttacacgtca

SEQ ID NO: 837878 - DNA, 101 bp, Homo sapiens
gtgggtgatatttgcctttagtgcactcttctccttcacagtaaagtggctgacttaattcagtgcacaaatgagatgaatgtgaacatcccacagttggc

SEQ ID NO: 837879 - DNA, 99 bp, Homo sapiens
ccctttgaggagcactggaggaagcacaccctgtcctatgtggacgttggcactgggaagaaagaagcttccggttctgaggtcctggaggtgccattt

SEQ ID NO: 837880 - DNA, 100 bp, Homo sapiens
cggagacccgggagcaggagctgggcctaggtctgcgccctggtgacagagctgaatgaacctctctccaatgaagatcgaaatctcctctctgtggcct

SEQ ID NO: 837881 - DNA, 100 bp, Homo sapiens
gtcagactcccaggtcagagcttttaggcatacaagtaccctggctgatggcagaagattttttcatttaatgtctggggtaaaattgcaactttttgga

SEQ ID NO: 837882 - DNA, 136 bp, Homo sapiens
agaccgcatggaggggtggtgtcaacagatggagcgggaagaacgggaaaacaacctgcccgaagacagatgatcctagtgctccccacaaaatccaggaggttctcaagtcctgcctgaaagaggaggagtcatt

SEQ ID NO: 837883 - DNA, 99 bp, Homo sapiens
gctatttcacacttcagatgctgaagcgagtccctgagctcccgagcctggcccaactagagaatctgtgcaaacagctgtatgaaaccacagacacaa

SEQ ID NO: 837884 - DNA, 99 bp, Homo sapiens
agggcatcctgggcaccatcaactccatcgtgatggcctttttaggagttcaggttcctaaaagtaaagctttagaggccaccaaattggcaattgaag

SEQ ID NO: 837885 - DNA, 100 bp, Homo sapiens
gggactacgtgggcaccttgcgcttcttgcagtcgcggcccttctcagcattcctggctttgttgagcggctttgcaaactggcgactcgaaaggtgtca

SEQ ID NO: 837886 - DNA, 98 bp, Homo sapiens
cacagtttgctctgctcttccaacaccagtggaagatgatcacatcccaggcaaccggtgaccaaaaacactttcaggcagtatcgagtgctaggaaa

SEQ ID NO: 837887 - DNA, 100 bp, Homo sapiens
tgttgcagtgctttcattgaagtgttcttcgttccctcagcaatatgatttctcttcaagaaaatgaggaggaggagattgggaacctagagcttgcctg

SEQ ID NO: 837888 - DNA, 100 bp, Homo sapiens
ttttcttgggttggatgatgtgttcccgcgtctactacatgggcaagaggattatgacagattacgaccgctgagttatccacaaacagatgtatttcta

SEQ ID NO: 837889 - DNA, 98 bp, Homo sapiens
ggagggaggacctggtccagcttcccttcctcaaataaggaaattgacacctggcgtgtctccagcttgtacctcatatcagatgactccgcaagggc

SEQ ID NO: 837890 - DNA, 98 bp, Homo sapiens
cggaaggcggctaagtcccggcagcgggaacacagagagcgaagccagcccgagggcaacatccttcgagaccggttcaagagcttccagaggaggaa

SEQ ID NO: 837891 - DNA, 98 bp, Homo sapiens
cggagctgggcgcggattcgccgaggcaccgaggcactcagaggaggtcaccctgctttcctttgctgtggagtcagagtgcaccttccttgactaca

SEQ ID NO: 837892 - DNA, 100 bp, Homo sapiens
cgcacagccaggacatcctggaacctgggaaagggacacaactcagatgggaagttcatcgcccgggcacagcggatagagtacgactgtgaactagttc

SEQ ID NO: 837893 - DNA, 98 bp, Homo sapiens
cggccattgagaaattgttgaggcagagcgaaaagctgttgctatatgatacagtccagagtgaactagaggagaagataagaaggcttgaagaggat

SEQ ID NO: 837894 - DNA, 100 bp, Homo sapiens
tctgctgcctgttgctgtgaagctcttccccaacatgttgccatccacatttgagactcagtcactcaaggttgtggcagcactgcctgaaggtatgaga

SEQ ID NO: 837895 - DNA, 100 bp, Homo sapiens
atgcaacgctctgggctgcggcggtgtattctggggccactgtgtctgccatctgcaggattgtgcacctgtgcctgcgaaaggctgaccagaagctggt

SEQ ID NO: 837896 - DNA, 100 bp, Homo sapiens
cacgtgaagatgctgcggctgtattctgacaagtccctgtacacccagctgtgcttttaccggtacatttttgatgcggagtgtgcactggagaaactta

SEQ ID NO: 837897 - DNA, 99 bp, Homo sapiens
tccagaatgagctggagagactgaaagagccctggactttgtctcacaagatgaaatgttgacgcccctggggagattggacaagtatgctgcaagtga

SEQ ID NO: 837898 - DNA, 98 bp, Homo sapiens
cgcatgagagccggacaaactcagacatcgtggaggaaataaagtctttgcttttgctttttggaggtcagtttgccagcagtcaagaaacttatgga

SEQ ID NO: 837899 - DNA, 100 bp, Homo sapiens
gagcccaccccagaggctggtacagggctatgagggcctcgtggagggaggtgagaacatcaagcaggccaactggctgagcgtctccaacatcatccag

SEQ ID NO: 837900 - DNA, 100 bp, Homo sapiens
tcagggaaactgagcatctgggcgattccatctctgaagcaacaaggggaatggggtcaaaatgagcaggccaagtgcaggaacatggagcatgcactgc

SEQ ID NO: 837901 - DNA, 99 bp, Homo sapiens
tgggagctgaggaaccagatatcttgaaaagctgccagaaagctatcatggtgaacttacttcagattgtgcgggaccactgggttcatgttcttgtcc

SEQ ID NO: 837902 - DNA, 100 bp, Homo sapiens
ttgccctcttgaacatttaccgtaaccctcaaaactcttcccagtctgctgacggtttgcgctggaatcccgctggctccgtggtgatggaacgcatccg

SEQ ID NO: 837903 - DNA, 99 bp, Homo sapiens
tcagacccatttccagtcatgagtggccttggagatgctctttactggtgagcccatttctgcccaggaggccctgctccacgggctgcttagcaaggt

SEQ ID NO: 837904 - DNA, 98 bp, Homo sapiens
cagccccgggccaggccgcggccggggcaggagcgcaggctgaagccgacgtagcttctctgaacagacgcatccagctggttgaggaagagttggat

SEQ ID NO: 837905 - DNA, 100 bp, Homo sapiens
ttcgtgcggctgggctgtgtgtagaccagtctatgcatggaacattgaaaagtattgaagggcctccaaacttgggtataaacttgcctttgagcattaa

SEQ ID NO: 837906 - DNA, 100 bp, Homo sapiens
tactcggaacttggagaacgaacagccagtgcatttggttcccgatggccctgtgggagaacaggttaaatgggccagggaaaactatcaccataacatt

SEQ ID NO: 837907 - DNA, 100 bp, Homo sapiens
cttcctcagcctgctcaacgtgaagatgatgaggatgaagacctttatgatgatccacttctacttattaaatagccgtggggacccgagaccaggcgag

SEQ ID NO: 837908 - DNA, 100 bp, Homo sapiens
tgggagtcgaagcgagggtctgaagttcacgactactagaaggggaggggagtggaaaggctctcagtgaaaaaggtgaagctttgttctaagaatattt

SEQ ID NO: 837909 - DNA, 98 bp, Homo sapiens
tacatcaagatacatgcatagatggagagatggctggctacctcatgaatgctgtgctgcatttgatacagttcttgggataaatgttgcagtcaaga

SEQ ID NO: 837910 - DNA, 98 bp, Homo sapiens
cagttcaggggaaacacagcaaggaaatgtgagccccaggctgcagaagcaatctgcacatcgtgctgccacacgaggcttcattcgttatggctggc

SEQ ID NO: 837911 - DNA, 98 bp, Homo sapiens
attttatacaagaaaagctgcacttgaggcccagaatgcactgcacaatattaaaactttacctgggcttattcagctgattctgaatcatcttacac

SEQ ID NO: 837912 - DNA, 98 bp, Homo sapiens
cccagtatctatgcctatgataactttggcgtgctgggcctggacctctggcagaaccccgagatgcccctgtccttcacaataagccgaggattctg

SEQ ID NO: 837913 - DNA, 98 bp, Homo sapiens
cggaatctaaaaagccctcagtaccagagacagaagcagatggattcgtccttttagatataatgaagatctggaacttgaagatgccattcatacag

SEQ ID NO: 837914 - DNA, 99 bp, Homo sapiens
aaacatgacgtctccagccaaattcaaaaaggataaggagatcatagcagagtacgatactcaggtcaaagcaatggtcgaattggatggagatgatgt

SEQ ID NO: 837915 - DNA, 99 bp, Homo sapiens
aagcacccgagcacggaaccacagccaccttccaccgctgcgccaagatcaagcttcaggagtctccggaagacatgcctgcagggcagacaccacaca

SEQ ID NO: 837916 - DNA, 100 bp, Homo sapiens
agttcatgcttgtgaaggatgcaagtttctagagttgtgaatacatacggaccacagactagacctgaaggaattccagggtcaggtcataaacctaaca

SEQ ID NO: 837917 - DNA, 100 bp, Homo sapiens
gagaaagaagttaaggagtatgcccaagttttccgtgaacatgccaacaaattgattgaggtatttttagaaagccaaggaattgagttaaatccaccag

SEQ ID NO: 837918 - DNA, 100 bp, Homo sapiens
gccaccgtgcacatccgaatgggcgatttcacctaaacctcaaagtcagaaaaaaaatgaagctgacattagcagttctgccaacactcagaaacctgca

SEQ ID NO: 837919 - DNA, 100 bp, Homo sapiens
ctgttacttccaagaaggcaggtcctacgatgaggccatcctgcacctcgtagtggcagatgatgaggagtctgatgaggaagctgtgaagaaaaccaac

SEQ ID NO: 837920 - DNA, 98 bp, Homo sapiens
cctgcctcagcctcccgggtagctgggactacaggcttcagtgtcatttgaggacgtgactgtggacttcagcaaggaggagtggcagcacttggacc

SEQ ID NO: 837921 - DNA, 99 bp, Homo sapiens
ggctcacctgtgcgggatggaacaaaagataacgaaggaggcccaacttcattcaataaggagcctgacggatttatcccagacggtagaacaaaagga

SEQ ID NO: 837922 - DNA, 98 bp, Homo sapiens
tgcagaagatggaatcaaggggtgtggaattaccttcactctgggaaaaggcactgaagttggacacattcagctaacgtattttagcaggtggagtg

SEQ ID NO: 837923 - DNA, 100 bp, Homo sapiens
atttactatataaaccataagaacaagaccacctcttggctagacccaaggcttgaccctcgttttggttcgctttgtgaacagcacatggatatttggg

SEQ ID NO: 837924 - DNA, 100 bp, Homo sapiens
ttacgaggtctccaggttgtagcagtgaagaagctgacgaggactcagtgccggtggtggtgtgcacattgagccccggtatagacagttcccccagctg

SEQ ID NO: 837925 - DNA, 100 bp, Homo sapiens
aaaatcttagctctctcaatctctgtctgaactggatcataaatgacagatgctgtgccacttttcctgaggcttctccattcaccccatcagaatgtct

SEQ ID NO: 837926 - DNA, 100 bp, Homo sapiens
ctccctgagtgtgagcagagctctgccaggcagaaggcctctctcctgatacagcaggcgctcaccatgttccctggagcttcggaaggagtatggggcc

SEQ ID NO: 837927 - DNA, 98 bp, Homo sapiens
ccatctgaagggaggaaatagtggcaggtgacagtctgcatgtgcagttttcaggtggagttggcatgaacttaacagcagcagatactgtgattttt

SEQ ID NO: 837928 - DNA, 100 bp, Homo sapiens
ctgatccgggagagtgagagctccccaggggagttctctgtgtctgtgaactgtaacatcttatgaagatcttggactctttgcatttggattacctgga

SEQ ID NO: 837929 - DNA, 98 bp, Homo sapiens
agatgccaggaccacctggaagcctagaaatgattcctcctgcatggaaaaactactttcaaaagattggaaggaaaaaatggaaagactaaatacca

SEQ ID NO: 837930 - DNA, 98 bp, Homo sapiens
tcagacgcctcacttaggacaagtggtactgtgaaggcaaggagcttgaaaattccccagatattcacatcgtccaggcaggaaatctgcactcactg

SEQ ID NO: 837931 - DNA, 100 bp, Homo sapiens
tgcatttcacagcactctgggcgaaaattggatgtgaaaatgaagccagaccgagtttgtggggacattcatggacaattctttgatttgatgaagctct

SEQ ID NO: 837932 - DNA, 99 bp, Homo sapiens
ttcatcttaagaatgtcaacgattagtcatgcaataaatgttctggttttaaaaaatacatatctggttttggagaggaaggcaagcctgagattaatc

SEQ ID NO: 837933 - DNA, 98 bp, Homo sapiens
agtacgaagcgggcgtttgcgaagctccaaaaggaattcttcatttgtctcctgatgtttatcaagagatggaagccagccgccacaaagtaatctct

SEQ ID NO: 837934 - DNA, 110 bp, Homo sapiens
ttcgaatgtatgttgatgagaaccgcagggattcctgggaagaaatacagcagagacttttaacatttgctcccattcatgctgaggctccagagttcatggaaatgagt

SEQ ID NO: 837935 - DNA, 99 bp, Homo sapiens
agctcacctgtgacgatgagccagagacctacgtggcagctgtgaaaaaagccatttccgaaggctctctatgagaacatgctggtggagctgcccttt

SEQ ID NO: 837936 - DNA, 100 bp, Homo sapiens
cattaatggtttcaaacgcgatcacaatggttgtcggacctgtcagtgcataaacaatggctacgaattcctggagatcctgaaacaggttgcccgggac

SEQ ID NO: 837937 - DNA, 100 bp, Homo sapiens
gaaaagacattaagttcctaactgccttcagagacctgcttttcaccactctggcttttcctgtatccacgaaatcttacaggctggtgttaaaggaact

SEQ ID NO: 837938 - DNA, 100 bp, Homo sapiens
gctcatgcagtggtacaaggaccagaagaaactgcaccggaaatgtgcctaccaggtttatttatgaaacagagcatcataatggcatagcagagttact

SEQ ID NO: 837939 - DNA, 100 bp, Homo sapiens
cagctgcgcaaccctaggaactctcgggtgttacagttcgagtgcctcaaacaaccacatatgttgtaaacaatggactaaccctgggatcaacaggacc

SEQ ID NO: 837940 - DNA, 99 bp, Homo sapiens
ttggatggatgcacaatcggagacaaagcatcccagccatcactcttccacctgctccttagagaagggaagatgagtgagtcgagctcgaagtccagc

SEQ ID NO: 837941 - DNA, 100 bp, Homo sapiens
ttcatccagcccttatacaaagacctttcggcacgttcacgtccatgttcttcccaggaaggctggagactttcacaggaatgacagcatctatgaggag

SEQ ID NO: 837942 - DNA, 146 bp, Homo sapiens
tcttcggctagcaagttcaccagcatccctgcagccttctggtataccatcgtcaccatgacaacactaggattcatgatgttgctatcaaaagttgagaaattgtcagaagaaatcatggagataatgcaaaatttaagtagtat

SEQ ID NO: 837943 - DNA, 98 bp, Homo sapiens
agctcaccgcccagcccaaaccaggagattgcgagggagcgatgcggtgcagcgcgtaatccagtccctcatagcactggtgaatgacccccagcctg

SEQ ID NO: 837944 - DNA, 99 bp, Homo sapiens
ttcttcgaaggtacttcatactggataccagagaagatagtttcgtgtggtacatggataatccacagatgttccatttaagcagacctcttccatagc

SEQ ID NO: 837945 - DNA, 99 bp, Homo sapiens
aacaattggataatatcttggctgctgtacatgacgtgcttaatgaaagtacgctggggaggaggaggaggaagggagcggcagcagtgaaggatttga

SEQ ID NO: 837946 - DNA, 100 bp, Homo sapiens
cttgtaaatatgcagattatatttctagggacaaacctatcacatttactcaggcgcagttgtgtagcagttgagtaatgctggttagctgttaaggtgg

SEQ ID NO: 837947 - DNA, 98 bp, Homo sapiens
ttcggtgaaattggtcttctggatcctggcatggatgtatacggaggagaaaatattgaactgggaatcaagggtgatgaagaggccagccttggatt

SEQ ID NO: 837948 - DNA, 98 bp, Homo sapiens
tgagagggacaatctggcacaggacctggccactgtgaggcagaaatctgtgacttcctccgcggagccacagtccatagaatcctcggccagcaggt

SEQ ID NO: 837949 - DNA, 100 bp, Homo sapiens
acttttctctggacttccccagaagaagattgtggttgaattcaggcaaaatacatatctcagtgcattgatgagatcaagcaggagctgaagcaggaca

SEQ ID NO: 837950 - DNA, 98 bp, Homo sapiens
tttggaggccccctggaaggctttaggatccagctgagctcctgtgacggccacgacgggctgcggaggcaggactccagccgcaagccccgcgcctt

SEQ ID NO: 837951 - DNA, 100 bp, Homo sapiens
accagggactctttggggtgaaatgtgaggcgtgtcaccagtttatcacagggaaagtcctggagaccactctggctcacatcatagccagcaacagcaa

SEQ ID NO: 837952 - DNA, 100 bp, Homo sapiens
gcagtggcgcctaaagtctgagagagggaagtcgcctctgtgctcgatctatcttgggatcccatggctttctttactgggctctggggccccttcacct

SEQ ID NO: 837953 - DNA, 98 bp, Homo sapiens
acgcaggccgcagcgagggcccgggccctggggatcccagagagacaactttgggtggatccatgaactctgtgtctaaactgatccactatgtaggg

SEQ ID NO: 837954 - DNA, 100 bp, Homo sapiens
tgaaggagtttggaattgaccctcaaaacatgttcgagttctgggatgacgagaagctcactgtgacccaggacctccctgtgaatgatggaaaacctca

SEQ ID NO: 837955 - DNA, 99 bp, Homo sapiens
agacccaagcagctggaggctctgtgtgtgggcactggcttactcgggtgctcttaccttctagtcacttgccccatgggaatggaatgagctgggagc

SEQ ID NO: 837956 - DNA, 100 bp, Homo sapiens
cacaactcgcccgggccgggagctgtcccgggccgaggctcattaggaccaaactcttacccaggatctactggagcagctgttggagcccatgacgcct

SEQ ID NO: 837957 - DNA, 100 bp, Homo sapiens
ggcccatcgacatcctggagatgctgagcagagccaaggatgagtatgagagggtgaagcagactgtggtgaatttagcaacacttatgaagtttcttaa

SEQ ID NO: 837958 - DNA, 98 bp, Homo sapiens
tgcctttgacaggagaggctgcttcttgtagagccctgccaaggtaaccctgctggggtcagttatcttcacattccagcacacccagcatctggcaa

SEQ ID NO: 837959 - DNA, 100 bp, Homo sapiens
tccttgtattctgtttatggagagtaccttctctgcagcggacaatgatcagatatttcacatcgaatccagcctcaaggagaaactgcctacatccggg

SEQ ID NO: 837960 - DNA, 100 bp, Homo sapiens
ccactgaaaaagatgagtatgcctgccgtgtgaaccatgtgactttgtcacagcccaagatagttaagtgggcggtgcagaggggcaggatgccgccgac

SEQ ID NO: 837961 - DNA, 98 bp, Homo sapiens
attttaaacttctgcaagcatcatttaagcgaatgaacgttgataaggtctcagatgatgataaagaaaagggagagggagctcttccaactgggaaa

SEQ ID NO: 837962 - DNA, 100 bp, Homo sapiens
cagttgtgagctgagcccagtatgggaaagatctaccttctggaagctactactacgtggtgcttggaaagagcagcccgacggccatggaggctgaaga

SEQ ID NO: 837963 - DNA, 74 bp, Homo sapiens
aaactgctagttaccaagctgaagcacttccagctccgagctgacttttttgaagatgaggcgattgaacagat

SEQ ID NO: 837964 - DNA, 100 bp, Homo sapiens
ctgggagagaggtacctctccttttccctctccctttccctaagatgtgtgcaacagcaccgatcttccggaagtcgagatcattagcctgctggaggag

SEQ ID NO: 837965 - DNA, 100 bp, Homo sapiens
caccaattaatgctaatgaggcaaggatccggatcacctgtttgaaaccatctcccaagccatgctgaatgctgtggaccgggatgcagtgtcaggcatg

SEQ ID NO: 837966 - DNA, 50 bp, Homo sapiens
ttctgcatgaacatctccagccaggacttaattcagtgcacaaatgagat

SEQ ID NO: 837967 - DNA, 98 bp, Homo sapiens
gggctgaagcgactgagtccgcgatggagatcgctgccgttttgcccttgggagtaggatgtggtgaaaggatggggcttctcccttacggggctcac

SEQ ID NO: 837968 - DNA, 100 bp, Homo sapiens
tggaactgacgcagagccgagtgcagaagatctgggtgcccgtggaccacaggccctcgttgcccagatgttgacatcatggacatatgtgagtccatcc

SEQ ID NO: 837969 - DNA, 100 bp, Homo sapiens
cacttttcttcagaagctggtcgccgccggcaggctgggatatgaagaacaacagcctgaggttccaattctttatcatgatgtaacatcccttttgctc

SEQ ID NO: 837970 - DNA, 99 bp, Homo sapiens
ggtgaagaggccttccagatgagtgaagccaatggagatcttcgtggatgatgagacgaagttgacgctgcatgggttgcagcagtactacgtgaaact

SEQ ID NO: 837971 - DNA, 98 bp, Homo sapiens
aatctgcaaggggtaaatgagggtgttgatttctccaaggatctgctgaaagatggcactggatctttaaaacgcagtggttcctttagcaaactccg

SEQ ID NO: 837972 - DNA, 100 bp, Homo sapiens
attctcaaattccacgtcactatttctcattgggagagagaggggataacatcccaaagatattagtgttcacagaggatggatatttcctacgagcctg

SEQ ID NO: 837973 - DNA, 100 bp, Homo sapiens
tgtactctggcgtgcaacctggaattggaacggagaatccacattcatctcaatggaaggatcctgccttaagtcaacttatttgtttttgccgggaaag

SEQ ID NO: 837974 - DNA, 99 bp, Homo sapiens
gtgacttcacttttgagtgcaactgccttccagattctgaaaaagagttccacgtcctcccttatcgagtctttgttccccttcctggatccactgtaa

SEQ ID NO: 837975 - DNA, 100 bp, Homo sapiens
ctggcagtcggtcatccacctgctgcagatggggcaggtgtggagccaccctgaagggtcccttcccaagcccttagggaccgcagaggacttggggacc

SEQ ID NO: 837976 - DNA, 100 bp, Homo sapiens
attcaccaacttggattcatccacagagacatcaaaccagacaaccttcttttggacagcaaggcaatccacatggagactgatccccagaccatcagcg

SEQ ID NO: 837977 - DNA, 99 bp, Homo sapiens
cttccctgacatcatccatctacaaaaaggtttgaaaagttcacagtctgtgcagtctattcgtcctccatataaccgagcagtgtctctggatagccc

SEQ ID NO: 837978 - DNA, 99 bp, Homo sapiens
tttccgtagatggtggctttctttggacccttgacatcaaccagttactatttgatgtcagtattgaatatggtggtgaggcgtgaccctggcaacact

SEQ ID NO: 837979 - DNA, 100 bp, Homo sapiens
cggctcgtcgccgttcgccacccaaggaatacggttggacagaatgaactgaagattacaagtgatcaagtgataaattcaggattgatttttgaagata

SEQ ID NO: 837980 - DNA, 98 bp, Homo sapiens
tgaagtgctccgtcgcccttgcctccagggctgatcccttatccaacatggttctaaccttcagtactaaagaagatgcagtttcctttgcagaaaaa

SEQ ID NO: 837981 - DNA, 98 bp, Homo sapiens
cgagccgagggcctgcgcgcggccgacagtgtaaatgagcaaagatggatcaggaaggtgggggagatgggcagaaggccccgagcttccagtggcgg

SEQ ID NO: 837982 - DNA, 100 bp, Homo sapiens
agctacagactccagtggagagctcatgttcctgatgaaatggtggtatggtcaggaaaaagactacaatgtactagtcatggatcttctgggacctagc

SEQ ID NO: 837983 - DNA, 98 bp, Homo sapiens
caggcccaaatggaatgtggaaatggagtcatccaggcttccagctgatcttaccaagatgcatctcacagaaaaccctcatccacaggtgactcatg

SEQ ID NO: 837984 - DNA, 113 bp, Homo sapiens
ggaagcagatctgaggacatctctgtgccaggccagaaaccgcccacctgcaggctgcccggcagctctgacagactcagaggacgagtccccagaagacatgaggctcccac

SEQ ID NO: 837985 - DNA, 100 bp, Homo sapiens
tgaacagacacgggtgaatgctgctaaaaacaagactggggctgctcccatcattgatgtggtgcgatcggatcatccagcagctcgtcaacggcatcat

SEQ ID NO: 837986 - DNA, 100 bp, Homo sapiens
agatatgaaatgtgacgatatgctaacagtaccaggaggactttaacccgctggtgagaggatgttcctgttactgctgtaagaatcacactcgggcata

SEQ ID NO: 837987 - DNA, 100 bp, Homo sapiens
gagaggctgcggctgaaacagcaagaactgcttcggcaggaagatgatccctatgatcttgaagatgtttctgcacagaaatgagggaaatacaaagaac

SEQ ID NO: 837988 - DNA, 100 bp, Homo sapiens
gcttacagacctgacactggagaccgtctggaatgtctatgacacactcttctgtgagggtgtgaacaaagactcctatctgatcctggagacgctgccc

SEQ ID NO: 837989 - DNA, 100 bp, Homo sapiens
gttactgctgctacttcctcgtttgacaccttcctggggtcatcgagcagctcggtgggaagcagctggtcatgaaccacatgcatcatgaagaccagca

SEQ ID NO: 837990 - DNA, 100 bp, Homo sapiens
agccaggacgagaggatgcggagcccgcagaacctccacagtcaagaggacgacacgaatgcagagtttgagtccagatcccaaagcccagtacacaagt

SEQ ID NO: 837991 - DNA, 100 bp, Homo sapiens
cctaccaagggagaaactggctgcagcagagcgagtacttcgttccaacatggacatcctgaagccaatcctggtgagaattatgaagatgatgacctag

SEQ ID NO: 837992 - DNA, 98 bp, Homo sapiens
gttcttggtctcactgacttcaagaatgaagctgcggaccctcgcttgaaatatgaggagttatactgcttttcattcaaccccatgctggataaaga

SEQ ID NO: 837993 - DNA, 99 bp, Homo sapiens
ggagttgagtgatattgaccatgatggaatgcttgacagagatgagtttgcagttgtgattgatatgcccgagcacaaccctggcaatttgggaggaac

SEQ ID NO: 837994 - DNA, 100 bp, Homo sapiens
ctgctacaaacacttctattactttgtcacagagatgaacctcatagaccgcaaggagctagagcctttggcaatggtggcttgctatccgggaaatgga

SEQ ID NO: 837995 - DNA, 100 bp, Homo sapiens
ggctggttgttccgttgcgagctgcagctgcgatctctgtggtaggcccagattcacttgtcatggattagtgactggtcagagttatattttccgggtc

SEQ ID NO: 837996 - DNA, 100 bp, Homo sapiens
tcctccggcccgagatgaatcctgcggcagaagccgagttcaacatcctcctggccaccgactcctacaagctgagccgagctacagtacatgaccctga

SEQ ID NO: 837997 - DNA, 100 bp, Homo sapiens
atttgcaagtcatcagactgcataaaatcaggccaaaagtgtgatccaagctgtcccaatgggagctgctggggtgcaggagaggagaactgccagaaac

SEQ ID NO: 837998 - DNA, 98 bp, Homo sapiens
tgagaaggacgcgcagtccatctctctcagactctggccatctatgaccggtttggccggttgatgtatggacaggaagatgtacccaaggatgtcct

SEQ ID NO: 837999 - DNA, 100 bp, Homo sapiens
ggaagcgtcaggacaatcatgcccataagaactctaaactgttcagctttagcgtcacctccctcactgggcagcatgggggagaagtcagagaactgtg

SEQ ID NO: 838000 - DNA, 100 bp, Homo sapiens
gctggagaaggacttcagcagcatgaagaagtactgccaagtcatccgtgtcattgcccacacccagctggttatattctgggcactaaatgaaggcgtt

SEQ ID NO: 838001 - DNA, 99 bp, Homo sapiens
aaaaatgaagatgatgtagacactggactattaggttttgctgttactgctcagtgtagtcacaccttgaataagaaatggaaaaccttgggatgttga

SEQ ID NO: 838002 - DNA, 100 bp, Homo sapiens
gtcatctattgtaagagacagtttatggagaagaaacccagctcctccttgaagctgcccttgaagacttcccgactctacaataacttggagacagaga

SEQ ID NO: 838003 - DNA, 100 bp, Homo sapiens
tgggatcccccagttccaaagtgtcttaaaggcagcactaacaccagaataacactgatgttgccatcagcagtcacacgactgaaacatgaggactgcc

SEQ ID NO: 838004 - DNA, 100 bp, Homo sapiens
agaaaattgagacggagctaagagatatctgcaatgatgtactggtaaagaggatgaatatccaaagaagcccttggggcagcttccacctgaacttcag

SEQ ID NO: 838005 - DNA, 100 bp, Homo sapiens
ctgtgaagggggtcatcaaggctgtgctggatggagtgaagttaattggccttggtcctcacagctccaaaaagaaacaggatctcgataagctctatga

SEQ ID NO: 838006 - DNA, 100 bp, Homo sapiens
ggaaacaccatggctgcggcggcccagctctctctgacacaggcaaggggagagccagttgcgcagagccctgcaaccagcagtccagggagaagtggtg

SEQ ID NO: 838007 - DNA, 98 bp, Homo sapiens
taaaccagtcatatggcatggacaatcacagtggtggtggtgggggtagcaggaaccagggaaaatgtgtagagggcatggtggagatcttcgacatg

SEQ ID NO: 838008 - DNA, 100 bp, Homo sapiens
gtctggagaccatggagaccctcacggagctgggcgacgagctgaccctgggagacatcgacggagcagtgaggagaatgaataccttccaagaccagag

SEQ ID NO: 838009 - DNA, 98 bp, Homo sapiens
ttcctgctgctctgcctgctccacaagcggcgccgcgccctcggcctgcacggatccaaaggggctattctgaacatttcatctggcagtggcatgct

SEQ ID NO: 838010 - DNA, 100 bp, Homo sapiens
gggcggtggcttcctttccgccactgcccaaactgctgaagcagctcccgcgaggaccacccgacaccttcagcagtaaacaagataaaacaacttctta

SEQ ID NO: 838011 - DNA, 98 bp, Homo sapiens
gccatggagcgagcctagggcccgacaggtcatcaccgagtggtcttctcacatcatccttcaggcagcaccaagagtcactggcagcagagagagag

SEQ ID NO: 838012 - DNA, 98 bp, Homo sapiens
ggtggtctcagcttatctacaatcatatcacactatggaagtgataaacaagtccagtgttaagtattcagtacaacttgaagacaggaagactcaat

SEQ ID NO: 838013 - DNA, 124 bp, Homo sapiens
gattatttgagagatgtatcagtttcttctgaagtacaatcaactgtagaagcctttgtagcaggctcactcagtaacttgatggattttgtgaagaaaacaggcatttgcgcttcaaagtggg

SEQ ID NO: 838014 - DNA, 98 bp, Homo sapiens
gaggttgagcgtctgatccaccatgtaaaggtggaatatgtgatcaagtgtgacatgtcagctctgcagaagattctgtatcgccatatgcaagccaa

SEQ ID NO: 838015 - DNA, 100 bp, Homo sapiens
acttatgtctgttgcttatacgtatgataatctggctcctagatcccaagtgtccttcaagatatcactgtactcatgaagctggtgtacatagtgttgg

SEQ ID NO: 838016 - DNA, 99 bp, Homo sapiens
ttgggatcccccagttccaaagtgtcttaaaggtggcaatttgtaccatacggatgtctcactctttggagaacctaccgaatttgagtatttgcgaaa

SEQ ID NO: 838017 - DNA, 99 bp, Homo sapiens
cagggaatggctcatggggatatccgcttgtacctccttttaaacctcaagtaacatctgagacagatactagatattttgatgaagaatttacagctc

SEQ ID NO: 838018 - DNA, 100 bp, Homo sapiens
tcagaagccgacgttcgagaggaagattcttacctctttgatctcgacaataaggcaatggtggcttgctatccgggaaatggaacaggttatgttcgcc

SEQ ID NO: 838019 - DNA, 100 bp, Homo sapiens
gccaccgaggccccctcttcgcctcctccagtggtgaagcagcgcttgcagatgtacaactcgcagcaccggtcagcaatcagctgcatccggacggtgt

SEQ ID NO: 838020 - DNA, 100 bp, Homo sapiens
gtcgcgccggtctccgcggaaatgttgtccaaagttcttccagtcctcctaggcatcttattgatcctccagtcgagatctgccttctggagactgcgcc

SEQ ID NO: 838021 - DNA, 98 bp, Homo sapiens
gcagatgttgtcaaggtggcctaccaggaggccaggggtgtcgccatgggtttgtaccagttgctggagccccgaatgattgttcgttgcaggaaaca

SEQ ID NO: 838022 - DNA, 98 bp, Homo sapiens
atgacctggagccaggggggccttcggaacagatgcacacccttcctgggtgatggtcatcctgtacagttctacagcatgaataggcctgcctctcg

SEQ ID NO: 838023 - DNA, 100 bp, Homo sapiens
ttgtttcatcaacgtctaagaaacttggagaactccagggcaaatttattcggatcaactttgatgtaactggctatatcgttggggccaacattgaaac

SEQ ID NO: 838024 - DNA, 99 bp, Homo sapiens
gggaggggggagcggcgttggaggccaccgtttccaggagaaaatgcagaagtctccatggacgtttccctggcttaccgtgatgacgcgtttgctgag

SEQ ID NO: 838025 - DNA, 100 bp, Homo sapiens
gctgaaggccgggccccgcgagtgccatggcggccgccctgggagcgagcggaggagcaggcgccggagatcgtcagtatttaaacagatcacatcatgc

SEQ ID NO: 838026 - DNA, 100 bp, Homo sapiens
cagagatgacgtggagtttatcagtgacctgattgcctgcctgcttcagggctgctatcaacgaagagatatcacgagccaagttacaccctgtttaacc

SEQ ID NO: 838027 - DNA, 100 bp, Homo sapiens
acctgcaagattttccggccccctcgcgcctcccattgcagcctttgtgataactgcgtagattcaaggcctcttccagatgtagccctgactgggaagt

SEQ ID NO: 838028 - DNA, 98 bp, Homo sapiens
ccggtgctgcagaaccagatccgggagcacgtcatcgccatcgaaggtatggtgacatggtgccaaaaaccatagcagggaagatttttggttctatc

SEQ ID NO: 838029 - DNA, 100 bp, Homo sapiens
tgctgtagtcatctacaataataaatccaaagaggagccagttaccatgactcatccagcaaggaattagggctggagatcttcttctgaggcattcagc

SEQ ID NO: 838030 - DNA, 100 bp, Homo sapiens
cttgtctcttatttagttctggggagcgcctcgtcgacatgagtgatgtggaggaaaacaacttcgagggcagagttccagatgtggaatctcgtgaaga

SEQ ID NO: 838031 - DNA, 100 bp, Homo sapiens
tctgaaagctagaagaaaaggtgtacttgcaagaaacctcaggacttgagtaacagcaacatgccctggactttgtctcacaagatgaaatgttgacgcc

SEQ ID NO: 838032 - DNA, 100 bp, Homo sapiens
aagaaatctttgatgatgatgacttttaccaccagacaagttggatggcttgaggactggtactaaaaggaaacgtgactgggaggccattgccagcaga

SEQ ID NO: 838033 - DNA, 100 bp, Homo sapiens
gaaagaagccatattgaaagaagctgagagagagaaagagctgggaacctttgctcaaagctccatcgcccttcaccatcagtacaaccccaagtttcag

SEQ ID NO: 838034 - DNA, 98 bp, Homo sapiens
ggcggccaatgtgggatcgatgtttcaatattggaagcgctttgatttacagcagctgcagaaacatgatcaggggcaagtcttgttggatgtcgtct

SEQ ID NO: 838035 - DNA, 98 bp, Homo sapiens
aagagttaaatgccctcaagtcgacaggggatgggaccctaggccctgggaggagcggggacactgaggacctctctccaaattggcctctcaactca

SEQ ID NO: 838036 - DNA, 100 bp, Homo sapiens
agcggtcagagccttctgatcattccaggcactcgccgcagcagccaagcaatggcaggttttcctttggaatatggataaatacaccatgatacggaaa

SEQ ID NO: 838037 - DNA, 100 bp, Homo sapiens
agaagtccagagctgaggactgcctgtttgcagggtttcatcaccttaaatggttttgaaccaatgaaggtgtattcccttaaaaagacggacagcccat

SEQ ID NO: 838038 - DNA, 100 bp, Homo sapiens
tatgcacctaaggattttcttgaggcactactgcagtcttcagttaagcaacaagtagaagctattgaaaaacagtacatttctgcaattgagaaacagg

SEQ ID NO: 838039 - DNA, 100 bp, Homo sapiens
agagattcagtatcactcgctcccttgatgatcttgagccaagaaggatcaagaaggtggagaagaaaagaaatctgtgcaaaagaaaaaagtaaaagag

SEQ ID NO: 838040 - DNA, 98 bp, Homo sapiens
ggactacttcttgcggcgcctcggctcctcccaggtggcctcccgcgtgctggccatgaaggctggtgggcttaaactggatggccggcagctcaagg

SEQ ID NO: 838041 - DNA, 100 bp, Homo sapiens
tcggagcagcggctgtggcgcggcggccgcgaggttataaacaacttgtgaaatgagtgatttggaagatgatgagacaccccagctttctgcccatgcc

SEQ ID NO: 838042 - DNA, 100 bp, Homo sapiens
agagaagtggatccatgccttagaagaaacaattcttcgacatactctccagcttcaaattgagaacctagatccccgaggaattcagctatcagctctc

SEQ ID NO: 838043 - DNA, 100 bp, Homo sapiens
ctacaacatacgtagctgacacagaatcagagcaagcagatacatgctatctcagctcagttcagaacccttgctggagaggtggtgcagtcatttggag

SEQ ID NO: 838044 - DNA, 98 bp, Homo sapiens
gcagaagcagaatttaattacctaaacacagcacgtaccttagaactctatggagttgaattccactatgcaaggcagacactcgcctatggggacat

SEQ ID NO: 838045 - DNA, 99 bp, Homo sapiens
cctcaacatcccggagcagctgccacaatgggacatgtgcaaatcaatgagctgagcaatgttcctgttcctgtcatgctaatgccagatgacttcaaa

SEQ ID NO: 838046 - DNA, 100 bp, Homo sapiens
tctagctttatatttgctccataatgacatgtaccagccagagcagcctaacctggtataccagatggccagtacttccgacgagttagatccagcagac

SEQ ID NO: 838047 - DNA, 100 bp, Homo sapiens
ctgcttctgataccccagttatcttttccatttctgcagcaccaatgccttcagactgtggggatatcattttcaatgcccaatacccagaactgcctcc

SEQ ID NO: 838048 - DNA, 98 bp, Homo sapiens
gcccctgcagccagcccttcggcccaaccccaccgccatcctggatgagaatggaatgactcctctaatgcatgcagcatataaaggaaaactcgata

SEQ ID NO: 838049 - DNA, 100 bp, Homo sapiens
tgttatcctgctttgttccagatttttgctgagaagtagttactgtgcacatgtgtagatttgcagatcacaaaatttgtccaggatagacatagagcta

SEQ ID NO: 838050 - DNA, 100 bp, Homo sapiens
attctgttgatcttcaaaatgctgcagaaatgctcactgcaaaagtgaaagaaaacccatatagacagctgccttgtaactgtcatggaagcatgcctgg

SEQ ID NO: 838051 - DNA, 100 bp, Homo sapiens
tgaggccagccgggaggacatctacaagcgggaaaaatttgagggactgtttcggacttatgatgactgtgtgacgttccagctatttaagagtttcaga

SEQ ID NO: 838052 - DNA, 134 bp, Homo sapiens
gagaattggagatggggaccgccctggacatcaagattaaaagagcgaataaagtttatcacgccgggctgtccctttccccccaacacatcgcttgacatctgaagaagtatttgatttggatgggataccca

SEQ ID NO: 838053 - DNA, 100 bp, Homo sapiens
agatttttgcaagaaaaggggccttctgtggattggggaaaaatccagagaccccctgaagattcgttgatgcggatgaaattaaaaggctaggaaagag

SEQ ID NO: 838054 - DNA, 98 bp, Homo sapiens
cgctgcagagaccccgctatggctaatgccgggtctaagttgtagattttatcaacacaaatttcctgaggtggaagatgtagtgatggtgaatgtca

SEQ ID NO: 838055 - DNA, 100 bp, Homo sapiens
aagttcaccttcgtctgcatggctctgtcactcacgatctttctcctggcctgccctccatgtcggggagctatcgtcgtcttcaagtaagagaaaattg

SEQ ID NO: 838056 - DNA, 100 bp, Homo sapiens
tctctgctgcaccgacctcgacgtcttgcctgtgtcccacttgttcgcggcctatagggcgccctgcgtccggcagaggaggcgagcatcccgctcaggt

SEQ ID NO: 838057 - DNA, 100 bp, Homo sapiens
gacacggttcaggctgtccagaagtaaaaggctgagcgggctttggacaccatgaactttgatgtgattaagggaaagccaatccgcatcatgtggtctc

SEQ ID NO: 838058 - DNA, 100 bp, Homo sapiens
ccacaatctggcagtgcaccggatgattcacactggcgagaagccattacaatcagtgctgctctggcaaaggggacatgagcgatgaagatgatgagaa

SEQ ID NO: 838059 - DNA, 99 bp, Homo sapiens
tcaagatggcgtgcttgttggagaccccaatccgcatgagcgtcctttcggagaaattgtcgtaaatgaagtcaattttgtgagaaaatgcattgcaac

SEQ ID NO: 838060 - DNA, 99 bp, Homo sapiens
ctgggggaccgcttgcagcggggacgcgaggacccgggctgggctttcctcacccggtttggcctgtcactgctcctcatcctcctgagccgtggtgaa

SEQ ID NO: 838061 - DNA, 98 bp, Homo sapiens
ttgaatgaaaattctcaacttcaggaaagccagaaacaggacgcggattctgatagcggggacgattctgacaagaggtcgtgtgaagagagctggaa

SEQ ID NO: 838062 - DNA, 98 bp, Homo sapiens
acagagtcagctacagaaagagaatgtggtccagaaggtcctgtctctccctcaccgtcgactggtttgctgctgccagctctacgaggtgccagatc

SEQ ID NO: 838063 - DNA, 98 bp, Homo sapiens
gtgaaattgccggcaagagggagttaaggacattccaggcagaggcaagtcctggtatctgggatagcaaaggtcttcttccctcgccccttctccat

SEQ ID NO: 838064 - DNA, 100 bp, Homo sapiens
atccaggggagccgaggcgctcctcttgtcatcccactcagcgccatgtcctggatgttcaagaggtgctggagaatctggtaaaagcaccattgtgaag

SEQ ID NO: 838065 - DNA, 98 bp, Homo sapiens
ctgatcaagatgagcccccttttaaatcagcttatagttcttttgtaaatctctttcgttttaacaaaggtctgctttgtgaatcttgatgtgaacaa

SEQ ID NO: 838066 - DNA, 142 bp, Homo sapiens
gaaatgcatctactgccccatcgacacccggctgaacttcatccaggtgtcaaagctgcttaaagaagtgcaggtcaattttgataaagatccaatggaaatgcgcctccctattcgtagccctattaaacgagacttttta

SEQ ID NO: 838067 - DNA, 98 bp, Homo sapiens
acaaagggttccactgatgccgactctaagaagaaagttttcaaggacttggtggctttcgaggatgtggctgtgaacttcacccaggaggagtggtc

SEQ ID NO: 838068 - DNA, 98 bp, Homo sapiens
cgagggcctggcgcctctgcacctctgccgcacggccgcctcgctcggatggcaccaaaagcgaaggaagctcctgctcatcctaaagccgaagccaa

SEQ ID NO: 838069 - DNA, 98 bp, Homo sapiens
gggaacccttcggccgctgagattctgtcgtgtcgtcgctgctggcacttcaggctctgtttggtgaggattcatcaacctccagtatgatgtctgtg

SEQ ID NO: 838070 - DNA, 98 bp, Homo sapiens
aagtggaaggcgcttttcaccgcggccatcctgcaggcacagttgccgattacagaacagctttgctgagccatcaaggtctaatggaagcatggttc

SEQ ID NO: 838071 - DNA, 98 bp, Homo sapiens
aaccaagttccaacaaaagaatgctgccgcagggtctgaatccagggaaagctattgcagagatcaagaaaatgatggcaacctataaggagaagaaa

SEQ ID NO: 838072 - DNA, 98 bp, Homo sapiens
gaaggatgtgcatgaaggacagcctcttctcaatggtccctccagctacaaggtgggcaccatggcggagaagtttgactgccactactgcagggatc

SEQ ID NO: 838073 - DNA, 134 bp, Homo sapiens
tgtgcaggagactgtaagagtgagaaaagttgatgtttcaagtgtacctgaccatctcaaaggctagtgatacagagcgagatggactagccccagaaaagacatcaccagatagagataagaaaaaagagcag

SEQ ID NO: 838074 - DNA, 98 bp, Homo sapiens
ggtcggctgcggtggcggcgtttggatgattgtctctcggcggcggagtcggttccgccacacttcaccactggcagcagttggcccaacctcacctt

SEQ ID NO: 838075 - DNA, 98 bp, Homo sapiens
acagccccgacctttgatgagaactcagctgtccagggttcttgatggtgctagacattccccaggagcgggggctcagctctctggaccggaaatac

SEQ ID NO: 838076 - DNA, 100 bp, Homo sapiens
cggatgagcagaaggtgtttgccctctgggagtctggagacatgagtgatcagtgggctcgggatgagtttgaaggcctcttcaagcagccagcagaaaa

SEQ ID NO: 838077 - DNA, 100 bp, Homo sapiens
cttttctgttgtgacagacacttcacatactgctggtctgccatgtgaatctggaggggcagccgttctactccaagaaggacagacccctgtgcaagaa

SEQ ID NO: 838078 - DNA, 100 bp, Homo sapiens
tggaggccaaggttgatgcactgatggatgagattaacttcatgaagatgttctttgatgcggcgcattctacattctaaaggggagctcagtgaagata

SEQ ID NO: 838079 - DNA, 98 bp, Homo sapiens
cgaccgagggaatgatccttactaaccacgaccatcaaatccgtgtcggagtccttacagggcctgctttcttccccgggcgatgtgcagagatcttt

SEQ ID NO: 838080 - DNA, 100 bp, Homo sapiens
tgattcttattccctgctggtgttctctagtttgcctaagtagaatttacatgggaatgcactctattctgttttgaaacctttgatgtgaacagctttg

SEQ ID NO: 838081 - DNA, 98 bp, Homo sapiens
cgccaccatccacgccagccgcaccatgccgctcctaagcctgcacagccgcggcggcagcagcagtgagaggtcatagacatgaatgactaccagag

SEQ ID NO: 838082 - DNA, 98 bp, Homo sapiens
ctcatctgaaattcatcacctctctggagtcttcaaactgaccaagcattgaaaagaataactgaagtgaagtgatggactccgatttggagagtagt

SEQ ID NO: 838083 - DNA, 113 bp, Homo sapiens
attgactttggttctgctagtcacgtttccaaagctgtgtgctcaacctacttacagtcacgttactacagagctgtacagccatcagaattagttggaagtgtgtggacaaa

SEQ ID NO: 838084 - DNA, 98 bp, Homo sapiens
ccagagaggggagccggcgaggatcaaaatcttcgaaggaggtttcagctcctggcatcagctctattcaaatctggttcagattttacagctctggg

SEQ ID NO: 838085 - DNA, 100 bp, Homo sapiens
gacattcacactgatgccacccagaggatgttctaccggccctccagttaccagccccctctgcagaatgccaagacccttatagttgcctggatcaaag

SEQ ID NO: 838086 - DNA, 100 bp, Homo sapiens
taggcaagtcatttatgaaggagattatcaagaatgatctgtgggttaaccctctacgctactacctgagagaaaggggctccaggataaagagaaagaa

SEQ ID NO: 838087 - DNA, 99 bp, Homo sapiens
aagactacagagaagcttcttcttgtgccgtgaacctcgttttgagattaaggatggataatgcatctgtaaacctgaaacgtacccattctccttgaa

SEQ ID NO: 838088 - DNA, 99 bp, Homo sapiens
tgctggcctggatcaatgagtctctgcagttgaatctgacaaagatcgaacagttgtgctcagaggggaacgacgggctctgccagaaactgtcggtgc

SEQ ID NO: 838089 - DNA, 100 bp, Homo sapiens
gataacttggatgaagaatgggccacagaacatgcctgccagggatcagagaaggctgaagaaggtggagaaactgaggcacaaaaagagggcagtgaag

SEQ ID NO: 838090 - DNA, 100 bp, Homo sapiens
gggatggccatgctactgatgaggagaaactggcatccacgtcatgtggtcagaaatcagctggtgccgaggtgaaaggaaggatcagaatgttctctct

SEQ ID NO: 838091 - DNA, 98 bp, Homo sapiens
gggcctgctgtggaagaccagccccaaagtgattcgcctttgccagtctcatctcgtgtctgctttgttaagttccatgatccagactcagcagttgt

SEQ ID NO: 838092 - DNA, 100 bp, Homo sapiens
ccagaaaggagcaaatcatactctttccatcagtctcaacatagaaattctggaacttttcaaagcctgactctcttcttgaaacagtggagcatcatac

SEQ ID NO: 838093 - DNA, 100 bp, Homo sapiens
gtctcctcctcggcgggagccctcgcgacgcgcccggcccggagcccccagcgcagcggccgcgcgatgaagaacgatacagatacagggaatatgcaga

SEQ ID NO: 838094 - DNA, 98 bp, Homo sapiens
cttcgttaagggactcaggcagtacgggaagaacttcttcagaattagaaaggagctgcttcccaataaggaaacagaatgcaactcccatgtaaatc

SEQ ID NO: 838095 - DNA, 99 bp, Homo sapiens
atcaacccgagtgcagtttcgatggaaaatgaagtgccggtggtggtgtgcacattgagccccggtatagacagttcccccagctgaccagatcccagg

SEQ ID NO: 838096 - DNA, 101 bp, Homo sapiens
ctttttggaaacgggtcaggattggcctggaggatatttggaatagcctctcttcagtgttcacagagatgcaaccaatcggacagctggcttttaaagga

SEQ ID NO: 838097 - DNA, 98 bp, Homo sapiens
cggaagtcaccattggagctcatcagactgaccgtgtcttacatcagttcagagagttacctagaaaagtacgagaaagttcatcattttggggagga

SEQ ID NO: 838098 - DNA, 98 bp, Homo sapiens
catgggcagcgctcgcgccccgccgctgagccgccggggagccgtccagtcttcgaatcccaagatgctaagatctcatccagtgagcatatgagaat

SEQ ID NO: 838099 - DNA, 100 bp, Homo sapiens
gctgaatgtcgtaacctgaatggctgtgatactggacatgcaaaaatcacatgtggctatgaccttcctgcaaaatagtggcagaatttagtgacatttg

SEQ ID NO: 838100 - DNA, 100 bp, Homo sapiens
ggaatttataccagctgtagcaaaagtgggaagccaagcctttcctcccgtgaaactggaacgccaagctgaagaagaacgaatacggaagcacaaagca

SEQ ID NO: 838101 - DNA, 100 bp, Homo sapiens
gcctcagcctcccaagaagctggaattacagctacgtacaagccagagcttccaggaaagcagtccttcctctacaacgaggacaagaaatggatcccgg

SEQ ID NO: 838102 - DNA, 98 bp, Homo sapiens
cttacttgatcccagcgatgtgactgctcaatggagagaaggaaagtcaatcgtaggaagaacacagtacaggtgtgtgcagtggcctcagggatccg

SEQ ID NO: 838103 - DNA, 100 bp, Homo sapiens
acgtctacaaaagaagatgggaaaggaatctaccttcactgcctggtgtaactcccacctaaggaaagccggcacccagattgagaacatcgaggaagac

SEQ ID NO: 838104 - DNA, 100 bp, Homo sapiens
ctcccaagtagctgggagtacagatgaagtggccattctgcctgcccctcagaacctctctgtactctcaaccaacatgaagcatctcttgatgtggagc

SEQ ID NO: 838105 - DNA, 100 bp, Homo sapiens
ccggaagctgcgcatcgagaagcgccagcaggaggtggtccaggccacgctggtggtcctggccttggccatggtgcccatcctgctgcttggcacaccc

SEQ ID NO: 838106 - DNA, 98 bp, Homo sapiens
agattgtgaagaagaatttcgatctccgccctggggtcattgtcagagttttccgtctgatgaaggttggccatttgcaaagtatcttggagcttgtg

SEQ ID NO: 838107 - DNA, 100 bp, Homo sapiens
tggctgcacaatggtgtgaaactggccctgcacgtggagaagcctacaacacagcagtcccctcaggatgagcaggaaaagctcttggatgaagccatac

SEQ ID NO: 838108 - DNA, 100 bp, Homo sapiens
gccaggcggctgaaccgggaaagtacaggattgagagcaactatggcgtacacacactggagatcaacaggtgcaaactgaacaatgaggacgcatggac

SEQ ID NO: 838109 - DNA, 100 bp, Homo sapiens
gaccacctgagtcaccagttaactatggtagcccacccagcattgttgatgcggatgaaattaaaaggctaggaaagagatttaagaagcttgatttgga

SEQ ID NO: 838110 - DNA, 99 bp, Homo sapiens
tatgtttagcaagcactgctatgaagactgagaattgtgtggccaaattgaaacattgtagtcggtatatacatgacttatttccttcactcatcaaga

SEQ ID NO: 838111 - DNA, 98 bp, Homo sapiens
aattcggggaagcagcataaaacagctaaagcgggtcttctagagtgcactaaagcagaagataacgtaacatttttatcttaccatgaaagtattat

SEQ ID NO: 838112 - DNA, 100 bp, Homo sapiens
cagactttgaaaattgggcatggagggactctagacagcgcagcccgaggagttctggtgttcctctgaacaacagggagaatatctctgatcccacctc

SEQ ID NO: 838113 - DNA, 117 bp, Homo sapiens
gggagtctgactccaatgaattttctgtaattgctgacccaagaggaaacactctaggacggggaacgacaattacggtgaaaatgtttgccattaaactcacatgaagtaggaaat

SEQ ID NO: 838114 - DNA, 100 bp, Homo sapiens
cacactgtacagttcctcaaccgcttttctacagtttgtgaggagtcgtgcattgaggcccatgagaaggacatggagctctcatttgccgtgcagcgca

SEQ ID NO: 838115 - DNA, 100 bp, Homo sapiens
ccggccctctcgcgctgcactgtctctccgacgcaagactgtcccggcccggatcatcaatgctgtggtactgttgattttattgagtgccctggctgat

SEQ ID NO: 838116 - DNA, 99 bp, Homo sapiens
gcaccaggttccaaatcatcaatgaagcaagtaagcaaagttctcatatagatgtggttcgttttccatgtgtggtttatatcaatgaagtccgagtca

SEQ ID NO: 838117 - DNA, 51 bp, Homo sapiens
ccaaaattgtggaaaagtcactctggggtctgggaggacagctcatgagac

SEQ ID NO: 838118 - DNA, 109 bp, Homo sapiens
gccatgtgattccaagtccatcaacagatagaataaatgtaacatcaaatgctcgacgaagcttaaattttggagtgctgcagcagctcccagtccagtgctaggaaac

SEQ ID NO: 838119 - DNA, 100 bp, Homo sapiens
ccgggcatgggaagtatgagaaggtgcttgtggaagggggcccggctccctaggcgtcccatctcgctatcagttgagggatttgcagttgataaaatgg

SEQ ID NO: 838120 - DNA, 129 bp, Homo sapiens
gactgcctaggtgccgcagcacccacaccgtcctcttgcccccccgtcactgggaccccagagctggattattaagtgactctccatcttgtagagaaactgattccatacaatcaaggaaaaatgaag

SEQ ID NO: 838121 - DNA, 101 bp, Homo sapiens
gcagccgaggtcttcgggaattccagcgaggactgccttttcaaggtgtgccctatgaacagatattctgcccagaagcaatattggaaagcaaagcaagc

SEQ ID NO: 838122 - DNA, 98 bp, Homo sapiens
tcctacagagtatctgaggatcttgtaagcatacatctgccactctctaggacccttgctgttggtgacaaagttcctgctgatataaggttaacttc

SEQ ID NO: 838123 - DNA, 100 bp, Homo sapiens
cctgcttcccaatcccactgatgaggatcagcccatggtggctttttcaccaaaagaatataattcaccatctttcagaccagaatatatagaattcaaa

SEQ ID NO: 838124 - DNA, 100 bp, Homo sapiens
acagtgtcagaattacaaggtgagatcagccgcccggccaagctatcttctcgctagcagacaaatttacatgtattggagaccagaccagaagcccttc

SEQ ID NO: 838125 - DNA, 98 bp, Homo sapiens
ccagccatatcgcgctgggtgccgcttcgccagcgcccgagtgaaatccggcccaactccaccgtgcagtgggaagaagtgtgccggccctgggtctc

SEQ ID NO: 838126 - DNA, 100 bp, Homo sapiens
gatgaaagcaaacagaaatttgtgctcaaaacccccaagacgctgcatccaggtagtacacaaactgctctgctaccagaagaagtgtcgggtacgcctg

SEQ ID NO: 838127 - DNA, 99 bp, Homo sapiens
tttaacatttgggagaaacacagccagaaggggtaccaaagtctgatctcttgcacaccaaatcattaaggggccataaagactgctttgaaaaatacc

SEQ ID NO: 838128 - DNA, 98 bp, Homo sapiens
ggtgcgccgccccgggtgggcctgggggcgcgccctgcctgcactgcccaaagtcttggaaacttgctggatatgatgtaccgggagccagcacgatg

SEQ ID NO: 838129 - DNA, 100 bp, Homo sapiens
ttccacgtgttcactaaaccctattgaggatgaagcagtcatagcatctttactggaaaaaagtgaaggacagatgaccgtgagagagggctgctacaga

SEQ ID NO: 838130 - DNA, 99 bp, Homo sapiens
gcaggccgaactagatgagaccaaaatcattctggacatggatttgattgacatactttggaggcaagatatagatcttggagtaagtcgagaagtatt

SEQ ID NO: 838131 - DNA, 99 bp, Homo sapiens
gcaatcaggggacaatgtagtaaagtgaagaaagttacaacgtcaatgattattccttaagagatcagctattggtggaatcttgtgacaatgaagagc

SEQ ID NO: 838132 - DNA, 100 bp, Homo sapiens
gagcagtggatccgggccaagtacgagcgacaggagttcatctacccggagaagcaggagccctactcggcaggcatcgactacaagacgaccaccatcc

SEQ ID NO: 838133 - DNA, 98 bp, Homo sapiens
aaaataaaaaatggcagtaaccctgagacaaccacttctggtggttgccactcacctgaggatacaaaaaacttggactttcgccgaaagtgggacaa

SEQ ID NO: 838134 - DNA, 98 bp, Homo sapiens
aacacatcatgaaggctagtttggatgtggaggggaatagactccatctatccatatgaggtctctgaagcaaaactgagggcagatgaggcaaaaca

SEQ ID NO: 838135 - DNA, 100 bp, Homo sapiens
cttcagcacaagaacgctaccttttcttacctgcctagggtagttaaaagacgagtgaatgctctcaaaaacctgcaagttaaatgtgcacagatagaag

SEQ ID NO: 838136 - DNA, 99 bp, Homo sapiens
ttttggtggttggatcatttgaagtggtgtctacacttataaaagtgttggtgtctgtccagtcccttatattagtagctgagccttattttaatgaac

SEQ ID NO: 838137 - DNA, 98 bp, Homo sapiens
tcggagaagccgctggcggcagtcacttgtacagcgccggtcaacatcgcggtcatcaagtactgttaatttggagtggcccctggagtcagtttcct

SEQ ID NO: 838138 - DNA, 100 bp, Homo sapiens
tgactttgaccagtttgataagcctggcgcggaacggtcgtggagaagaagagctgctgatgaggactgggacagggtgctggtcaagataaactaggaa

SEQ ID NO: 838139 - DNA, 100 bp, Homo sapiens
aaggtgcgccatgtccactggaagacctggctggccatcaagtgctcgcccagcctgcacgtcgacgacaggttgtttttcaccattcagaacattgcct

SEQ ID NO: 838140 - DNA, 98 bp, Homo sapiens
tgacagccacctggtactactatgacagtatcctcccatccttcagatcgccatgaggttatctccaaagaaatattggaactggacccatgggaaaa

SEQ ID NO: 838141 - DNA, 74 bp, Homo sapiens
ccggccgggggacgagctcggagcagcagccagcggagcgggcactggacacaatgaactttgagatgctcaaa

SEQ ID NO: 838142 - DNA, 100 bp, Homo sapiens
tcctggtattgctgtggagacggtgacagattctagccgctactttgtaatccggatccaggatggtactggctcttactctctgtcagtccgcctcagc

SEQ ID NO: 838143 - DNA, 98 bp, Homo sapiens
aagaagagaccatccatatttccagacaacagcagttctgtagagagtttaaatatgaaggaatggcaggacgggctaagggcacttctacccaacat

SEQ ID NO: 838144 - DNA, 98 bp, Homo sapiens
gggcggcgcggcccagctcgttccaggggttcggtccgagcccggtgggaggctcccggagcgcagcctgggcccagcccaccccgcgccggcggcca

SEQ ID NO: 838145 - DNA, 100 bp, Homo sapiens
gcgcaccatctgaaaacaacatcatgcagtggaatgcagttatatttgggcatccgtgtcattctggaccttactcccaactaccggggtgagaactcgt

SEQ ID NO: 838146 - DNA, 99 bp, Homo sapiens
aggtgacagggagaagccattgccattccctgtcctggcccccttcagcaaccctggtggaggaaggagaggccagtctaccctcccctgccatgaccc

SEQ ID NO: 838147 - DNA, 130 bp, Homo sapiens
tgatctcctgtttgttatgtttgccgtggtttttatcaccacacgactgggtatatttcctctctggaacatcatttacagcgagcaatttcagcacagcaagtgtttagagaaaaaaaagagagtatgg

SEQ ID NO: 838148 - DNA, 100 bp, Homo sapiens
agaaatagcaaacttcatgcagctggtggaactagatgtgtctcgaaatggtggaatgaatcttacttgttgaatatcttctggttactagttggattca

SEQ ID NO: 838149 - DNA, 98 bp, Homo sapiens
agatccaatttgtagccgaaaatgcagaatcgcgagcccagctccgagtgaagggagcatttcatactactgaagctgaagctagttctcagagtttg

SEQ ID NO: 838150 - DNA, 99 bp, Homo sapiens
caagcttggaatgatcatcaaacagctatggtgatgattagagacatactaatgtacatggaagctattgaatccttcaaagaagctttgaagcagaaa

SEQ ID NO: 838151 - DNA, 98 bp, Homo sapiens
ccgatgtccctgatccctggagcgacgacggccgctgcctaagctggaaagtcaaagaatcaatggagacacactttggcagccatggccgaagggcc

SEQ ID NO: 838152 - DNA, 100 bp, Homo sapiens
ctgcgcacctacttggagctggtgctttgcgtgctggtcagcatccggaacaacaggctcacgaggcccagggaatcctctggaccatcagattaccaat

SEQ ID NO: 838153 - DNA, 100 bp, Homo sapiens
gcgggccgcgcgcgggtctccgtggaagtccgtttcgtgagcagcgccaagctgtgcagcaagatcttggagaagacggccaaccctcagtggaaccaga

SEQ ID NO: 838154 - DNA, 100 bp, Homo sapiens
gctggctcacgcgcgtcgcgcgggccgggatgagggactgtggcggcgcggcccgcgcgcagccggccgggggtcctggtcttcatgatccttgtgagcg

SEQ ID NO: 838155 - DNA, 100 bp, Homo sapiens
tcttgtccctacatcttctcttctgactttggctacatctcatagaagctcttactcctcagaaatgtattcctcacatcatcgtccggggtctcgtgcg

SEQ ID NO: 838156 - DNA, 100 bp, Homo sapiens
ggaggaggcggcgcccgcggacgcaggggcgttcaatgggttggggtgctggaggactgcttcaccttcctgggcatcttcctggccatcatcctcttcc

SEQ ID NO: 838157 - DNA, 98 bp, Homo sapiens
ctgaccctgccctccctgcgagaactccagtccgggctccacaaagggcgcgattgcagatctgactcagaagatctttgaccttcgaggcaagttta

SEQ ID NO: 838158 - DNA, 100 bp, Homo sapiens
gagttacaccaaccaggacagaaatcattatcttagccaccaggcaggaaactgcatatcttctggtttacatgaagatggagtgctaatggaaatgccc

SEQ ID NO: 838159 - DNA, 100 bp, Homo sapiens
cctcctatctgatagctttggccatcggagatctggtttcggctgaagttggacccagttggctgattgcaattctggcccaactcaaccctctctttgg

SEQ ID NO: 838160 - DNA, 99 bp, Homo sapiens
cccacctctctaagcctatggaaaagcttctgggctaccggctctctgaccagttccacgacatcctcattcgaaagtttgacaggcagggacgggggc

SEQ ID NO: 838161 - DNA, 98 bp, Homo sapiens
cactctcacgccttcctatcaaacagctatgaaactggtgcccttgaaagatggaggcttgtggatcagaatctgaacaaaattgggaaagatgaaat

SEQ ID NO: 838162 - DNA, 126 bp, Homo sapiens
tccgcctcaggggccatggcgaagcacgagcagatcctggtcctcgatccgcccacagacctcaaattcaaaggtttttcttcccccagtccctcagctgctgctgctgctcaggaggtcagatct

SEQ ID NO: 838163 - DNA, 99 bp, Homo sapiens
tcaagcctttgattttgaagatgaccactttggaaatgagttttgccgaattgacaagcccctgtgtcacagtgaggatgagaaactcagcttcgaggc

SEQ ID NO: 838164 - DNA, 100 bp, Homo sapiens
ttccccagctctgcagccacatactatccgtttgttcaggaaccaccagtgacagagtcttggcatggtcacacctatcaatgaccttcctggtgcagat

SEQ ID NO: 838165 - DNA, 100 bp, Homo sapiens
gcggggccgaggccgcctccgagcgccaggtatgtccagagcctcctggacatcatggagttcctggacaaggatcccgaggaccatcgcaccctgagcc

SEQ ID NO: 838166 - DNA, 100 bp, Homo sapiens
agcttcagcagctgcgggacagtctggacgagaatgaggctaccatgtgccaggcacaattcagattcagaagcgtcaacagttagtcagaaagatacat

SEQ ID NO: 838167 - DNA, 100 bp, Homo sapiens
agaacagttgacaggtgtgcctttagatgactctgcaatcacaccaatgtgtgaagtgacaggcgatgcagagacactcacctacataactacaatccag

SEQ ID NO: 838168 - DNA, 100 bp, Homo sapiens
ttgccaggccttcaaccactatctcagtgcaatggatatcaacctgaattctcctaacaaaggtctgctgtctgactccatgacggatgttcctgtcgac

SEQ ID NO: 838169 - DNA, 146 bp, Homo sapiens
ctctgtgcttcgtgaagctaatcaagcaattaatcccaagttgcttcagttggtcgaagacagaggttcagacttcacagagaatgcagttgtcttgacttcaggtctgtctgttctgttggcaagtaaatgcagtactgttctga

SEQ ID NO: 838170 - DNA, 100 bp, Homo sapiens
ctggccccgcgcgggcggacggcggaggcgcctcccaggcctcaggagtgcaagtagctgatgaagtatgtcgcattttttatgacatgaaagttcgtaa

SEQ ID NO: 838171 - DNA, 100 bp, Homo sapiens
acagcttggaggagggtcactatgtcattgggccaaagatagagattccggtacattatgcagactctccagaaagagcaacagtaatggagtacatgag

SEQ ID NO: 838172 - DNA, 99 bp, Homo sapiens
aaagaaattcgagaagctgcaaatgccagcaatggcgaactgagcaataaggaatttgtttccatcatgaagcaacggctgatgagaggcctggaaaag

SEQ ID NO: 838173 - DNA, 98 bp, Homo sapiens
ctcgagattattttccaccaggggatttcccaggtccaccacctgctccatttgcaaaacagctttgctgagccatcaaggtctaatggaagcatggt

SEQ ID NO: 838174 - DNA, 98 bp, Homo sapiens
aggatggtggtggatgcggccaactccaatgggcctttccagcccgtggtccttctccatattcgagggtgcaaatagctatgggcaacttggcctcg

SEQ ID NO: 838175 - DNA, 100 bp, Homo sapiens
tttgtgcagtgggcaggaagaacccatcgggcagctacacatcttgaaagagaagctcttcctgtgaggtggtgatggcacttctcaaatactggccaaa

SEQ ID NO: 838176 - DNA, 98 bp, Homo sapiens
atatcctaaacttttcaagcctgaaggaaaggcagaactgcctgattacaggagctttaacagaatgcctgttattaaaccagacatagccaactggg

SEQ ID NO: 838177 - DNA, 98 bp, Homo sapiens
gggcacctgtctagatcttgtcctgataatcccaaaggactctatgctgatgactctcaaagatgaagacttttgtaaacgtgtatctttggctactg

SEQ ID NO: 838178 - DNA, 100 bp, Homo sapiens
tttacttttaattttgcaaagaatccaggacaaaaaggattagcttctcctcttccttaaagccttttccgaaacagagcagacaaagttggcgatgctg

SEQ ID NO: 838179 - DNA, 98 bp, Homo sapiens
agggctgtggctaccatgttctctcgcgcgggtgtcgctgggctgtcggcctggaccttgcagccgcaatggtatgcagggagttccagcgaggaaac

SEQ ID NO: 838180 - DNA, 99 bp, Homo sapiens
aaaaagtcaaaacgggcaataagactctttaaagaaggcaaggagagaatgtatgaagaacagtcacaggacagatttggagcaagaggtggtggtggc

SEQ ID NO: 838181 - DNA, 98 bp, Homo sapiens
gaagatttcctctggaagctaccacatgcaaacatacaagcagtctcacctcaggatcagtacaagttctgctacgaggtggccctggaatacttgaa

SEQ ID NO: 838182 - DNA, 100 bp, Homo sapiens
atcgagagcacagagacttcttgccatggctgccgtaagaatgccttcactatcatggaccagaacagggatggcttcattgacaagaacgatctgagag

SEQ ID NO: 838183 - DNA, 100 bp, Homo sapiens
tgaggactccttctcgacagtcagccaccagcagccgcatcctcagccccaggagagaagccatatgaatgcccaaactgcaagaaacgcttttcccatt

SEQ ID NO: 838184 - DNA, 100 bp, Homo sapiens
agttaaggatcttgagatgagatcatcctagattatccaggtcacttttacaaagagaaagtttggattaatgaagaaagcctatgaacttagtgtgctc

SEQ ID NO: 838185 - DNA, 98 bp, Homo sapiens
atggcatcggagacgcctgcgatccggatgccgacggggacggggtccccaatgaaaagatcgaagaggttcctggtgagctcatgcaggaagacctg

SEQ ID NO: 838186 - DNA, 98 bp, Homo sapiens
cacatcagcgaccgggagaacatagacggtatttataacagcaatgatgtagcagtatcgtttccaaatgtagtatctggctcgggatctagtactcc

SEQ ID NO: 838187 - DNA, 100 bp, Homo sapiens
cagtattatgatgctcaatgtcaagtcatctttggctcaagcattatcctgcactgaaaactctggaacatctagagcatacctacctgcctcaagtaag

SEQ ID NO: 838188 - DNA, 100 bp, Homo sapiens
tccaggacacctgccatcatggagggttatccagcacctggaggatacctgctacctgttcctaaatatttgtcacagcaatgggctaaagcctctggaa

SEQ ID NO: 838189 - DNA, 100 bp, Homo sapiens
aacaacaatgaattggagaccattccaaatctgggaccagtctcggcaaatattacacttctctccttcgtggggtagagcagcggctgccatgctcttc

SEQ ID NO: 838190 - DNA, 50 bp, Homo sapiens
ctagcccaacagcaactgacagtgagaaagatcagtctaaagaaaaggag

SEQ ID NO: 838191 - DNA, 101 bp, Homo sapiens
agcgattggaagagctccagctgttcaaaaataaggaaaccagtgttgccattgagagtcacaatggcttcagcctttcgcctttctttgaaaccaaaggt

SEQ ID NO: 838192 - DNA, 100 bp, Homo sapiens
cctgtcggtggtgaatgcccccaccccggtgaagctttgttctaagaatatttgtttcatctagtttatgagtccaaatgatatagactgtaaatgtcac

SEQ ID NO: 838193 - DNA, 98 bp, Homo sapiens
gggacccctggccccccgagcgccgggaccatgtcccagctgcagctgtggctgcagtttgaggctctgaacaagtctctgctttctatccgtcaaga

SEQ ID NO: 838194 - DNA, 100 bp, Homo sapiens
ttgtttcttatatgtgatgccattccagcactggactcatggaggctgagcatttattcaggtctggagcccggcactgtggtcataacagagcaggcag

SEQ ID NO: 838195 - DNA, 99 bp, Homo sapiens
tcagccccccgagtagctgggactacaacctactcatgaaggttacttctcttgtttggatatctggacgctgtttttggactatctgacaagtaaaat

SEQ ID NO: 838196 - DNA, 99 bp, Homo sapiens
ttttaccactgcctggttgcagaagtgccgaaagagcactggactccggaagaaaaccgtgaggacatactgaatgccggtgacaaattaacagaggtc

SEQ ID NO: 838197 - DNA, 100 bp, Homo sapiens
ctacatcccacagagatacccagacaacaggatcgtctcgtccaaggggccagcagcctcccccgatgggtcgtcagcaacgagggtgcctcaggatgtg

SEQ ID NO: 838198 - DNA, 99 bp, Homo sapiens
acccttccagctcgatctgctcttcgtctgcttcttcctcttcagtcaagatcatggaagggaagtggttgctgtgtatgttactggtgcttggaactg

SEQ ID NO: 838199 - DNA, 98 bp, Homo sapiens
ggaaatctaaagcatgaacaggcatctaatgttcttagtgacattagtgagacggtggctcagggagtaaaggaaggccagttgagcaaacagaagtg

SEQ ID NO: 838200 - DNA, 100 bp, Homo sapiens
agaggagcgggctgcccgcctccgcacaggttgaatcctgttccctgaaaaagacgtattcggatcctaacccccaggacctgtggctgtgaccttattt

SEQ ID NO: 838201 - DNA, 100 bp, Homo sapiens
aaattattcttgatgatgatgagtgtcctttacaaatcttcagggaatggccaagtgacaaaggtaattctgttccacaggatatctgctgtatggcagc

SEQ ID NO: 838202 - DNA, 100 bp, Homo sapiens
gccctcatccacgatggcctagcacgtggaattcgcgaagctgccaaagccttagacaagttcctttggcttgagtgacgagcgcattagtttgggtcag

SEQ ID NO: 838203 - DNA, 100 bp, Homo sapiens
cgccaagcaccgagtgtccttccagcccaaggttacggcctccgctgccacagggccatcatcaccatctgccggctcattggcatcaaagacatgtatg

SEQ ID NO: 838204 - DNA, 98 bp, Homo sapiens
tgctgaagcctttaaatgcagcatctgcgatgtgaggaaaggcacctccaccaggaatatattattcgagtgcaaagaggaatttctgtggaaaacag

SEQ ID NO: 838205 - DNA, 100 bp, Homo sapiens
agatgatgataatactcagaatcaggagaaggaaatgctgcttagattaaatgcgttgttggctgggccagtaataaaggtgaaaattccaaaagataag

SEQ ID NO: 838206 - DNA, 100 bp, Homo sapiens
gggccgacttggtcatctgtaagaccaggaggaattcggtcttccagcaggggatgaaccagttcacgtgagcgtgtccagcggctacgggagcctgggg

SEQ ID NO: 838207 - DNA, 98 bp, Homo sapiens
gacagcctcatcacccggctgctggaggtctaacaaagtgccagtggtgcagcaccctcaccatgtccaccccctcacgcctcttatcacgtacagca

SEQ ID NO: 838208 - DNA, 98 bp, Homo sapiens
gaatctgcagggagaggtcgggaggtgacaacgccagcatgccagtgctatcggaggactctggttctaaatggcttctaagaagttgggtgcagatt

SEQ ID NO: 838209 - DNA, 50 bp, Homo sapiens
tctgaccctccgccaggcaaaaggaaggaagatgagaatgtgcctactgc

SEQ ID NO: 838210 - DNA, 98 bp, Homo sapiens
gaaaatggagagctccagcagcgatgatgaggacaaggaagaagaaatgaacagcaaggctgaagacagagactggctctcttgcccaagctggagtg

SEQ ID NO: 838211 - DNA, 50 bp, Homo sapiens
acaggatccggaggcgccagctcaaccgcataattcttgggtcatcattt

SEQ ID NO: 838212 - DNA, 98 bp, Homo sapiens
gagcaagagaatgggctgggcagcctgagtcccagtgatatttacacacggtctgtaattgaccctgttcctgcaccagttggtgattcacatgttga

SEQ ID NO: 838213 - DNA, 100 bp, Homo sapiens
gagtgaattacaagtttgaaagtggaacttgatgtggacgagtgctcactagcagaaaaaacctgtgtgaggaaaaacgaaaactgctacaatactccag

SEQ ID NO: 838214 - DNA, 98 bp, Homo sapiens
ttcacttttgagtgcaactgccttccaggtatggcctcacaagtcttggtctacccaccatatgtttatcaaactcagtcaagtgccttttgtagtgt

SEQ ID NO: 838215 - DNA, 100 bp, Homo sapiens
atggatgtcctagaagtcagtctcagatgttcatcagagaagatatgaaatataaagatgctactaataaacacagccatctgcacagagaagataaaca

SEQ ID NO: 838216 - DNA, 100 bp, Homo sapiens
taccaaacacgattgttgtttcttggactgcagaaattggaagaattcaaccctatgaaaagataaaggccaggggcttgcctgataatatatcttccgt

SEQ ID NO: 838217 - DNA, 99 bp, Homo sapiens
tgatttcctcataatagaagatgatccttactattttctccagtttaacaaggcattttggagatcaaagatgggtagaaaagatgctgctactataaa

SEQ ID NO: 838218 - DNA, 100 bp, Homo sapiens
atgcttgtccacacgacgctgcatggagtactggcccttggagctcgtacgagctcaactggaggcagtcctgtgcggaaatctgaagaaaaaacagata

SEQ ID NO: 838219 - DNA, 50 bp, Homo sapiens
cttcactttttaacggaccagttcagtcattcgggctaaagttaaagaga

SEQ ID NO: 838220 - DNA, 98 bp, Homo sapiens
gggcctccgcagcgacaacatggaggccgtgaagaccttcaatagcgaggaggaggagggactaagggctcaggtgcgggacctggaggagaaactag

SEQ ID NO: 838221 - DNA, 99 bp, Homo sapiens
tggatatctccatgctcagctctctggtgtcctggtgaagacctagttcttgccggagacaattccactgcagaagcactttacttaaaaggacttgcc

SEQ ID NO: 838222 - DNA, 98 bp, Homo sapiens
tacaaactctgtgcctcaacaaccatttctaagtggccaagctataacatcagaaatggtgaatgaatacaagaaaattcttttgctgaaaggatttg

SEQ ID NO: 838223 - DNA, 100 bp, Homo sapiens
gccacaggttttggagctgtctttcctagacatccaccggattggagcaaaatatttgctcacaccccccaatgcctcacctggctatgtgggaagacac

SEQ ID NO: 838224 - DNA, 100 bp, Homo sapiens
ccaacatggcagccttttccttagaacaccaaagattgtctctggcaaaggcattcccatcaagagcaccatggacaaccccaccaccacccagtatgcc

SEQ ID NO: 838225 - DNA, 100 bp, Homo sapiens
tgtgttcttctctggactccttagatgactctgtggtgggtccctcagcccttctgagctctgtgctgaacaagatggaattggctgctctagaaaaaat

SEQ ID NO: 838226 - DNA, 100 bp, Homo sapiens
gtctccgagctcgcctgcatctactcggccctcattctgcacgacgatgaggtgacagtcacgacagcatcgcacagaattattttaaaaaaaagcagtg

SEQ ID NO: 838227 - DNA, 100 bp, Homo sapiens
ctccagtttaggggctcacctgccttgcatcgttccgagtcctgtactggactgcatcaggccgcgtctcctcaggtttaaaaggatgcttaatcgggag

SEQ ID NO: 838228 - DNA, 102 bp, Homo sapiens
attactttgttatgcagaaagtgggaaggtgtggctcattgactttaatccatttggtgaagtcacagattcactgctgttcacctgggaagaactgatatc

SEQ ID NO: 838229 - DNA, 136 bp, Homo sapiens
gcccaagaatgtgtaaacttccttaaaagacaaaatattggagttgcaacctttataggtttagataaggttaatttggagtggcccctggagtcagtttcctacaccatccgaggccccacccagcacgagctac

SEQ ID NO: 838230 - DNA, 98 bp, Homo sapiens
cgccgtgtgccttgaggtgttacaccagcctgtccggacccgctgtggccacgtatgatgattattccccaccttctaagagacaaagaccaacgagc

SEQ ID NO: 838231 - DNA, 100 bp, Homo sapiens
gattaaaatctgatggcacaccttggccagcagtggggattgcaaagcgaactacatatggaggagtgtctggttttagctaaagaagatactgaggcag

SEQ ID NO: 838232 - DNA, 100 bp, Homo sapiens
tgttcccggagatgcggcgcgcaggcaaatgaagaggattcttccagttctctagtgaaggatcacctttttcagcaagagacagttgttaccagtgagc

SEQ ID NO: 838233 - DNA, 100 bp, Homo sapiens
ggatcccggagagccccggagtgagcggagtagcgagtcggcaacccggaggtctgccatcatggatgttctcgcagaagcaaatggcacctttgcctta

SEQ ID NO: 838234 - DNA, 146 bp, Homo sapiens
atttgctgagaatgcagccgtgtgacagtaactgaacattggtctaaagtctttccaaaaggtcaaggttcacaagactccagggattagagctcgatctgcaaggcttcagtggttttgtgacagatgtgttgcaaataatcagg

SEQ ID NO: 838235 - DNA, 100 bp, Homo sapiens
ggattttagccgaatcccttaaaggtttaactatagatcaacacatcatcttgcatctcatgggttctatgaatttttaaattggtttgatgaaagagca

SEQ ID NO: 838236 - DNA, 98 bp, Homo sapiens
tttgctacagcatcccacattaagtcaacgagtggaagaggaagctgcccagaagaacatggccctcaagaagatccgggagctggaatctcagatct

SEQ ID NO: 838237 - DNA, 100 bp, Homo sapiens
agcctccagctctgagctttccaatccccagagtagcaaatgttgaaagaagttgcacagcacggctgtgggaactttgtccgtgtaattcagactttca

SEQ ID NO: 838238 - DNA, 100 bp, Homo sapiens
aaggtgtacttgcaagaaacctcaggacttgagtaacagcaacatggtttacacagtaaacaatgtgaatgtgatcaccaaaatacgcacagaacatctg

SEQ ID NO: 838239 - DNA, 100 bp, Homo sapiens
ctgcctgatggccaagtcatcactattggcaatgagcgcttccgctgtcctgagacactcttccagccctccttcattgccttggcacaagacctgtttc

SEQ ID NO: 838240 - DNA, 100 bp, Homo sapiens
ttattgttactggcttacaggatattgacaagtgcagacagcagcttcatgatattactgtaccgttagaagtttttgacctgagaaatgccagtggcct

SEQ ID NO: 838241 - DNA, 98 bp, Homo sapiens
aaacgggtccatctgatgaatcctatggttccaggattaacaggcagcaaaatgagctcttcagaagaggtggtgttggaattacctgttggatttta

SEQ ID NO: 838242 - DNA, 100 bp, Homo sapiens
cagcaccagcttccagttagtggatatagcacaccatccccagccaatttaatccagagactgacttcactatagaacccacagttgtatcaatggttgg

SEQ ID NO: 838243 - DNA, 100 bp, Homo sapiens
aggagacatcgtagtgggacgaatcacagagatcaccggcgtaatcaacccagcgttggacaaatactttccgtcagactctggagtgagaatcatagct

SEQ ID NO: 838244 - DNA, 98 bp, Homo sapiens
tgcagagagagagcgcgagagatggagatgggcagacggattcatttagagctgcggaacaggacgccctctgatcatcaagatggtgctcatgtgga

SEQ ID NO: 838245 - DNA, 100 bp, Homo sapiens
aactggtgccggagggacaaaaagcaatgcaagagtcgctttgttacacctttcaagtgtctcgagccaaggattgtcaccagtgaagaggtcattattc

SEQ ID NO: 838246 - DNA, 100 bp, Homo sapiens
gctgatgccagccacttctggaaatggagtgaatggagtggtcagaacttcaccacacttgaagctgtctgcagatctccaggggagcccaccagcctag

SEQ ID NO: 838247 - DNA, 100 bp, Homo sapiens
caagcctccaccacctcgcagccggggaggcaactggagcgaaaccagcgacaggctgaagccgacgtagcttctctgaacagacgcatccagctggttg

SEQ ID NO: 838248 - DNA, 100 bp, Homo sapiens
ggagtacctggaggctcaacggcagaagcttcaccacaaaagcgaaatgggcacaccacagggttttttacacacattctattagatgaagctgcccagg

SEQ ID NO: 838249 - DNA, 98 bp, Homo sapiens
ttggacagtctgcaccttctcttactgctggcctggacttgtcttacaaggaccggcactggcatgaagcctgtttccactgctcgcagtgcagaaac

SEQ ID NO: 838250 - DNA, 115 bp, Homo sapiens
aaaagaagtgttaagaattgcctttgggactctgaaggctgaaggtagtggctctttatgactacacagcgaatcgatcagatgaactaaccatccatcgcggagacattatccg

SEQ ID NO: 838251 - DNA, 98 bp, Homo sapiens
ggcagagaagttccggcagaaggcctccatccacgaggcctggactgacgactactccaaaggattcggcgggaagtatggggtgcagaaggatcgga

SEQ ID NO: 838252 - DNA, 100 bp, Homo sapiens
ccttgcagccagtgacctcaaaggatttcagccacaggaagcgttgttgacgaccatggacatcatccacgatggatttggattcatgctggcttttgga

SEQ ID NO: 838253 - DNA, 100 bp, Homo sapiens
taatcgactctcatctggtggtgcagagatgtttcatgtccaggaaatggtgttaagttgcttttacagagttaacaggtctccaagaaattttaaaaaa

SEQ ID NO: 838254 - DNA, 100 bp, Homo sapiens
atcttgcaatccactattatcagaaggccctggagctccctccacttgtggtagaggtcccgcctgactccgctctggaaagtccttttgaagaaatggc

SEQ ID NO: 838255 - DNA, 98 bp, Homo sapiens
atggtgcagaagaagaacgcgatgccttcaattaagttgcagagttctgatggagagatatttgaagttgatgtggaaattgccaaacaatctgtgac

SEQ ID NO: 838256 - DNA, 98 bp, Homo sapiens
cgatgaagcagctgcagccgcagccgcctccgaagatgggggatttctacgacccggagcacccgacccctgagctcttgtcaggatggtgaagctgt

SEQ ID NO: 838257 - DNA, 100 bp, Homo sapiens
cggcaatccgcttacttgcaatcaagggttcaggtgcaagcagatgctgactcagcctgttccattaaggtgcaagctggcccaggccaatggttggggc

SEQ ID NO: 838258 - DNA, 98 bp, Homo sapiens
gcgttcctgctgctctgcctgctccacaagcggcgccgcgccctcggcctgcacggagtggccaaatcaatgaaggtccctgtatatgagaccccagc

SEQ ID NO: 838259 - DNA, 99 bp, Homo sapiens
ttttttctgatgaagatgataggcaaataaatacaaggtcacctaaaagaaaccagagggttgcaatggttccacagattccagcagagggaacgctat

SEQ ID NO: 838260 - DNA, 100 bp, Homo sapiens
tttccgcttcttgaatttctctctgtaaaggaggtacagcagggaagaactggaaactcagagaaagaaactgcccttccatctacaaaagctgagttta

SEQ ID NO: 838261 - DNA, 99 bp, Homo sapiens
catgacacatgcttcacctgtgcagcttgcacttcaggatgagttagagaaaggtgaacgggacaatgcagaactgcaggagtttgccaacgccattct

SEQ ID NO: 838262 - DNA, 100 bp, Homo sapiens
ccatcgctgccccagtaacagtgccagtggttggaaagaaagcaggtttgttgataagccggggcccttcgtgggaccctgcggtcactggatcaggccc

SEQ ID NO: 838263 - DNA, 98 bp, Homo sapiens
ttttccccaaccataagccaatgtattctgacaagtccctgtacacccagctgtgcttttaccggtacatttttgatgcggagtgtgcactggagaaa

SEQ ID NO: 838264 - DNA, 98 bp, Homo sapiens
accatgactgtattcaggaaggcacatgaactgaagcttctgtcagaatgccaatacaagcagttggatgatgactttgagttcactggcagccacct

SEQ ID NO: 838265 - DNA, 100 bp, Homo sapiens
ttcatgtcgcgggagaccaccgacacggacacggctgaccaggtcatcgcttccttcaaggtcttagcaggggacaaggaccccactggaaatcggactg

SEQ ID NO: 838266 - DNA, 100 bp, Homo sapiens
tgacgtcacctccaacatggagcagatcatcaaggccaaggccaaggccaaggatcaaaccaaggcccaggctgcagccccagcttcagttccagctcag

SEQ ID NO: 838267 - DNA, 100 bp, Homo sapiens
cagcatttttggtgtctcccagtgatcaaaaagagagtggttgtgctgtcaggaatgacaggaacaagaaaaagaaggagacttcgaagcaagaatgcac

SEQ ID NO: 838268 - DNA, 100 bp, Homo sapiens
ctgaaggtgctgaagaagtctgcctacctgtcagccgtgggcaccttcacctgggtctgcacgccctttctggccataggaaaaggatacagagtagagt

SEQ ID NO: 838269 - DNA, 100 bp, Homo sapiens
gaagatgatacaaatgaatttgttagtgctgtgtgctggagggcactaccagatggggattcagtgtcatttgaagatgtggctgtggcctttactcagg

SEQ ID NO: 838270 - DNA, 100 bp, Homo sapiens
ggccgatgggggcgagggcgaagacgagatccagttcctgcgaactaccccagaggaactggaggatgtttctgaccttgaagaggaacacgaggtccgc

SEQ ID NO: 838271 - DNA, 129 bp, Homo sapiens
ggaggacctccgcagagtctcggagcctgacctcacgggagctgtttcgagtaccattatgtttgagaccttcaacaccccggccatgtacgtggccatccaggccgtgctgtccctctacgcctctgg

SEQ ID NO: 838272 - DNA, 100 bp, Homo sapiens
ccagctacagagggtaccgggatgcctgcaccattactgcaacatgaaccgtgaagaccggaatgtgctgcgtatgaaagaacgggaaaggcggaatcag

SEQ ID NO: 838273 - DNA, 98 bp, Homo sapiens
gatgaagttacagaattagacctttcacatgggaaaaaagatgcttttgttttggaggcattttctctgtatgaagatgaaatcagcgattccaaagc

SEQ ID NO: 838274 - DNA, 100 bp, Homo sapiens
gaagttagagaaaagggctatgaacgattaaaagaagaactcgcaaaagctcagagggtgctgactgggttacttttttaaacactaggaatggtaattt

SEQ ID NO: 838275 - DNA, 99 bp, Homo sapiens
ccagcgcgagggccctgggcaaggcccgacagatgaccacctaagaaaggaggaacagaaaagtactaacattgaagatcttcatgtttctcaggcagt

SEQ ID NO: 838276 - DNA, 100 bp, Homo sapiens
aagagaagatctattaagtgcaaaagtttgtgacttgaagtggatacatagttttgctgttactgctcagtgtagtcacaccttgaataagaaatggaaa

SEQ ID NO: 838277 - DNA, 99 bp, Homo sapiens
ctgggcctgcaggaagcccttccgcggaccgaaagatgccagaggaacaagcattctgtgttttggtgaaaatcatgtacgactatggtttgagagacc

SEQ ID NO: 838278 - DNA, 100 bp, Homo sapiens
tttgactccagtgttaagagaagaaatgaggacatatcagtatcggcccaacatgcagcagaaataggagctgatggcatcgctgtcattgcaccgttct

SEQ ID NO: 838279 - DNA, 100 bp, Homo sapiens
cccggcgtggggcgggacagcggccccctggagggggcagtcccgggagaacctgcggcggccggagcggttttgtagtgcatccctgagcatgagcaca

SEQ ID NO: 838280 - DNA, 98 bp, Homo sapiens
gaactccacagccttgatgacttctacataggaaagtattttggaggagtgtgtgctggaattgatgttcgtctgtgtgatgttggtgaggccatcca

SEQ ID NO: 838281 - DNA, 98 bp, Homo sapiens
ggaaacctatggttatctgcagagggagtcatgctttcaaggacctcatagtaattcttcaatccagtgttcagagctgtaaaacatctgaacctaac

SEQ ID NO: 838282 - DNA, 99 bp, Homo sapiens
ttgtgctgtgaggaactttcttccaagataatgtccagtttggaagatgaaggcttttctttcactgattaccaaagctatgtcatccatggctgcctg

SEQ ID NO: 838283 - DNA, 100 bp, Homo sapiens
tagtcaactaaatggagattctagtgctttgcttgaagcccagaacctcatggccctcaccaatgtggacaccccattgaaaggtggacttaatacccca

SEQ ID NO: 838284 - DNA, 100 bp, Homo sapiens
ttgataaataatccagccttcattagtatggcagagaaagctgatggatttgtcaacctgcctgatttcactgtggaaagagcatctgaatgcaagaaaa

SEQ ID NO: 838285 - DNA, 100 bp, Homo sapiens
cggcgccatgggccagtgcggcatcacctcctccaagaccgtgctggtctttctcaacctcatcttctggcacgaaagcaagagattatcaaagtcactg

SEQ ID NO: 838286 - DNA, 100 bp, Homo sapiens
cgcgttggtgcggaaagcggcggactatgtccgaagcaaggatttccgggactacctcatgagatagcaaaattactcagtgggaagacccaagactgca

SEQ ID NO: 838287 - DNA, 100 bp, Homo sapiens
caactgcccagcgtgaccagtggccacctctgcagtgtcttccacaacctggcatttagcagaagagaaacctgatggccttatcaatgaagctactagg

SEQ ID NO: 838288 - DNA, 100 bp, Homo sapiens
ttggagcaaagagaagccctgtggatagaggaaaaaggaactcctcaagcctcctgttcaggtatcacctcttctgggctcaagatggacaacaagaagc

SEQ ID NO: 838289 - DNA, 101 bp, Homo sapiens
cggagcttggctacgccaaggagtctagcagtgagcagtacgtgcctgatgtgttttataaggtatcatgatattagctggtttgacatcaagtcatttgt

SEQ ID NO: 838290 - DNA, 99 bp, Homo sapiens
ttgccagcattgttttctcttataattggctttgcttttggagccttatactggaagtatggactccaattgccttgacagtgtttttagtggctgttg

SEQ ID NO: 838291 - DNA, 98 bp, Homo sapiens
tcagcttcctgatcaggaaggaagtagcaaaactccagcgccagccagcctttgacacctttgatgggtccctgtttgctgtttttccttctctaaat

SEQ ID NO: 838292 - DNA, 100 bp, Homo sapiens
cagcactccgagtggcacctggacaggccatggcccttccatggaggattcctctgctgtcctcatggaaagcctaaagagggtgttcagagctctgccg

SEQ ID NO: 838293 - DNA, 100 bp, Homo sapiens
gggggcctatgtcatcgccagcggcttcttcagcgttttcggcatgtgtgtggacacgctcttcctctgcttccctttggacatcagacagtgcaggaga

SEQ ID NO: 838294 - DNA, 98 bp, Homo sapiens
gacagttagaaagaagtggaagatttggtggtaatccagacctagtgaaaccagtgtgtctgcccaacccaggcatgatgctgcagccagaacagctc

SEQ ID NO: 838295 - DNA, 98 bp, Homo sapiens
cagtgtcacgcaggacagaaatgaccaacagataactgaggacaatggacctgcctgggcatagacttccttaaggcagttgcagtggtgcagaatgg

SEQ ID NO: 838296 - DNA, 98 bp, Homo sapiens
aacagggacagcacctcatcccctggatgggggaccacaagatcctcatcgacaggtggatcatccatgccatggagtatgaacttcagatccgtggc

SEQ ID NO: 838297 - DNA, 98 bp, Homo sapiens
cctttccagagagccagaaagaagtgaggagctcatctacctggacccccacaccacgcagccagccgtggagcccactgatggctgcttcatcccgg

SEQ ID NO: 838298 - DNA, 99 bp, Homo sapiens
agagttcctaagcttcatgaatacagaactagctgccttcacaaaggtggccccagaagaatttaaaaccagcattggccgtgtgaatgcatgtttgaa

SEQ ID NO: 838299 - DNA, 100 bp, Homo sapiens
agaaagaaacaagttcttggcaagagaggcatcctccttgaagtatttggctgaggagttttcaatcccaacacctagctgttgggcagaagagggtgca

SEQ ID NO: 838300 - DNA, 137 bp, Homo sapiens
tccaatgatgtccccaaatggttctgtgcctcctatctatgtgcctcctggatatgccccacagatcaggatcctcatgaccagccaaagagaagaagaattaggaagcataaatcaaagaaaaaatttaaaaatcc

SEQ ID NO: 838301 - DNA, 51 bp, Homo sapiens
gccaggcttggccaataacaccatccaggcctccccaaagccagtcctgtg

SEQ ID NO: 838302 - DNA, 98 bp, Homo sapiens
caacactacttagctttccaagacatatctgaagagatggattaagaatgctttggattaaggattgtggagcacatttcaatcattttaggattgtc

SEQ ID NO: 838303 - DNA, 100 bp, Homo sapiens
aatggagcagtatctgcaactatggaagtttgagcaggattttcaacaggcaattttcgttctgctctcaatgatgtgacagctgccagaaagctaaaac

SEQ ID NO: 838304 - DNA, 98 bp, Homo sapiens
ggaggtacaagaaagatccacaaaccagagaaagctttccagcagtcagttgaacaagacaacttatttgattgctaatgaaggcacgggacatttta

SEQ ID NO: 838305 - DNA, 100 bp, Homo sapiens
cagagcgtcacggcgtacgccctcatggggaaaatctccccggtgactttcaggttggagtaatagatttttccctctaccttaaggatgtgcaggatct

SEQ ID NO: 838306 - DNA, 100 bp, Homo sapiens
aaacagcatgacgtgaggccgtggatgcaggcattaagattgcttccaagtatgatcatcaggcagaagaagatcttcgcaattggatagaagaggtgac

SEQ ID NO: 838307 - DNA, 51 bp, Homo sapiens
aatcctacttataaagaagtctgctcaggaagagtctgccgaaggtgaagg

SEQ ID NO: 838308 - DNA, 99 bp, Homo sapiens
acaggaccagtttgccatcccaaggccgaaggaaacatttactagggacaacttttgagtgtcagaccctgtggacacaaagaaaaagcttgggttcct

SEQ ID NO: 838309 - DNA, 100 bp, Homo sapiens
gacgttctcaaggagaaggcagacctgggtggctctcgggggctggtccatgggcggctgtggcgtcaggatggagtcctagctgtgacctgtgcccagg

SEQ ID NO: 838310 - DNA, 98 bp, Homo sapiens
tgttgtaccttgtgacagaatatgccaaaaatggagaaatttttgaatgcaaagtatggcgaaatccactaaatttatttaggggtgctgaatacaat

SEQ ID NO: 838311 - DNA, 100 bp, Homo sapiens
gttaaaacatttcagggcaagccaattatgcaagatggattctggatatactctgagtattgtaacaaccacctggatgcttgcatggagctctccaaac

SEQ ID NO: 838312 - DNA, 98 bp, Homo sapiens
aagtacgtgttcctgaagagcccagagttccaccaactaaagctatatgttctcctttcagccaagacctttcaccagtgcaggggatagaagattca

SEQ ID NO: 838313 - DNA, 99 bp, Homo sapiens
aaaaaacaaatcagagagccagtagacttacagaaaaagaagaagcggaaacaacgttctcccgcaaaaggaatctggaaacatcaaagctggattaga

SEQ ID NO: 838314 - DNA, 100 bp, Homo sapiens
ggacaagtacctttatgaaccagtgtatcccaaccctggactttgtctcacaagatgaaatgttgacgcccctggggagattggacaagtatgctgcaag

SEQ ID NO: 838315 - DNA, 100 bp, Homo sapiens
atgctgcagctgtatgccagtatgctgcatgaaaggcgcatcgtgattatctcgagcaaattaagcactggtccttgcactgggaatcaacagagtttgg

SEQ ID NO: 838316 - DNA, 98 bp, Homo sapiens
gtccgatgaaaggaatgggtctgggaccttaacagggagccatggatggtgattgctcacaccaaagccttggacccctcccagcctgtgacctttgt

SEQ ID NO: 838317 - DNA, 99 bp, Homo sapiens
tcaactaaaagcattgtttctagaacatgaggaaactaaatatattttgccaactttggaaaaagaattattcttggcagagcacagtgaccttgaaga

SEQ ID NO: 838318 - DNA, 99 bp, Homo sapiens
caacaccctcatgtcccatggtgtgccacaagacactaagggcgactaccagaaagcgctgctgtacctgtgtggtggagatgactgaagcccgacacg

SEQ ID NO: 838319 - DNA, 100 bp, Homo sapiens
catccgctcggagatgatccagcgcaaaggtttgccatgcagaacttgaattggggacttgttttcaagcagtaaatagcagaattcagttacaaattct

SEQ ID NO: 838320 - DNA, 100 bp, Homo sapiens
ggcagtggtgccaggcgttgctcttacctgtaccataaccaggaggctgatggttatcaatactctggctgaccatcatcatcgtgggactgactttggt

SEQ ID NO: 838321 - DNA, 98 bp, Homo sapiens
gaggatcacctagtaacacacgctacctctttctgggtgactatgtggacagaggctatttcagtatagagttgccagaggttccaccctctgaggag

SEQ ID NO: 838322 - DNA, 99 bp, Homo sapiens
accaacaatgcttcatcttcatgccagtcgacccccaggaaaggaaaaacccacaaacatgttcacaacgggcatggaaatgttgggtgaactcttcac

SEQ ID NO: 838323 - DNA, 100 bp, Homo sapiens
gccaaaccaggttgcatttcctgaaggggaagagcaagatgcagtcagtggaggcccctccagccagcgtcaggtgcagaatggcccctctcctgatgag

SEQ ID NO: 838324 - DNA, 100 bp, Homo sapiens
gtccctgagatcttgctggagacagggctactcagtccctctttgccaggtggataatattaatgcagctgtgatggatttgaaaaaaaagaagatccgc

SEQ ID NO: 838325 - DNA, 99 bp, Homo sapiens
aggcagtacggcatggtgctcgatcagacactcctctaatttacaaagcagtgcccagctggtttgtgcgagtggagaacatggtggaccagctcctaa

SEQ ID NO: 838326 - DNA, 98 bp, Homo sapiens
gaagcacctggatattcctaaaatgttggatgctgaagcaattaatggatgcctcgaagttgacgtacatatatattcagaaatgttttgccacctga

SEQ ID NO: 838327 - DNA, 99 bp, Homo sapiens
ttctttgggattgggacttaaaacaatggtataagcctcattatcaaaatgcctaccgcaggaatgggatggcttttctagcctgctgatgtgacaact

SEQ ID NO: 838328 - DNA, 101 bp, Homo sapiens
ctacaatcaacccagaatgtgactgtaaatgcgcgcaactcagaaggggaggtcacaggcaggttaaaagtcgataagtatgctgtgcgcttcatccctcg

SEQ ID NO: 838329 - DNA, 98 bp, Homo sapiens
gcgccggctccctatctgggaaacaaagtaatgctggaggatggaagaagcaaagggtttggcttcgtctgcttctcatctcctgaagaagcaaccaa

SEQ ID NO: 838330 - DNA, 100 bp, Homo sapiens
caagtgttgaaaatgttaaaggctgtgctgaagaagagccgagagggaggaaagggaggcaagaaggaagcagaatcagcatgattcttcagaggctctt

SEQ ID NO: 838331 - DNA, 100 bp, Homo sapiens
agtggcaatcaaacggataaaccttgagaaatgtcaaactagcatggatgaactcctgattcatgttacatgtaaagctgtcctcatttgtgactatgga

SEQ ID NO: 838332 - DNA, 100 bp, Homo sapiens
tgtttcttctatcattccaaactttcagatctctcaagattcagtagggaacagtgtaaacaggaacatcgataagtagtgtaaaaacttgcacaatgaa

SEQ ID NO: 838333 - DNA, 100 bp, Homo sapiens
cgcctcacctggggtatggagaggaaggaagaggttttctgtctcaactggtctctgacaagcctctgactgaatgtatccgtgctggccactatgcagc

SEQ ID NO: 838334 - DNA, 100 bp, Homo sapiens
catcgatttagtaaagcagggcaggttgatgtccgaaaatccgccccctctatggttgatcggcttcagaggcagataatcatagctgactgccaggttt

SEQ ID NO: 838335 - DNA, 99 bp, Homo sapiens
ggacactgaaattcagagaggggaagtgatttgcctcagcttgtactgtgtcaactctgcccgctcagttcctccttcctacccaccaccgcaggaccc

SEQ ID NO: 838336 - DNA, 100 bp, Homo sapiens
tgaagatgcaaaaccagcgtggcggccgcgctctcttccaggacatcaaggtttgaggaactactggccaacctactaaatgaacaacatcagatagcga

SEQ ID NO: 838337 - DNA, 98 bp, Homo sapiens
gcggaggggtggccgccgccgacctgcaccaattccagctggacatcactgtgaaaatgggacgggataaagtccgagaaatgtttatgaagaatgcc

SEQ ID NO: 838338 - DNA, 99 bp, Homo sapiens
ctgctcagagttcctgcctccagctgccaggggggacagccagccagcagcaggaggatgagtttgatgcctacatcattgtgtctttcgtgaatgcca

SEQ ID NO: 838339 - DNA, 107 bp, Homo sapiens
tgatacccaaacttccccagagccaggcacaaggatgaacattctgccgaagagaacaagacgtgtgaagactcaggaactgacccaggagtgtgatgaaaagaaat

SEQ ID NO: 838340 - DNA, 100 bp, Homo sapiens
tcacatccccaccccacaggatctgccccagagaaagtcctcgctcgtcaccagcaagcttgcggggtgagacctggaaccccttcaaattacagtacca

SEQ ID NO: 838341 - DNA, 100 bp, Homo sapiens
cacatggactgcccagtgcccacacctggctttggcaatgtggaagagattcctgagaatgacaggtcatcaccgagtggtcttctcacatcatccttca

SEQ ID NO: 838342 - DNA, 100 bp, Homo sapiens
acagagtctcactctgttgcccagaaaatattttcagaacctggaagcttatccatggccaccgtcgccaagctccgcgagagctgcagggcccggctgc

SEQ ID NO: 838343 - DNA, 100 bp, Homo sapiens
ggaaggcggaggaggacccggaggccgcggatagcggggatgaaggatttgggggcagagcacttggcaggtcatgaaggggtccaacttctcgggttgt

SEQ ID NO: 838344 - DNA, 100 bp, Homo sapiens
gccctatcaggacatggagtatgaaagacggatgggtttgtggagttcttccatgtagaggacctagaaggtggcatcaggaatgtgctgctggcttttg

SEQ ID NO: 838345 - DNA, 100 bp, Homo sapiens
attccaaaaagaaacctagcaacaaaaagaaagctgcgttaatgtttgcaaatgcagaggaagaatttttctatgagactatgtcttcagcagtggtgca

SEQ ID NO: 838346 - DNA, 99 bp, Homo sapiens
ctcaatgagcacatgaccagcttagcttctgtcctaaagcatttaaatcaaacggtattgagatggattgggttatgaaacataatggtccaaatgacg

SEQ ID NO: 838347 - DNA, 147 bp, Homo sapiens
ttttgggaacttcaaggatctactctgaagatccctgtggtagagagaaaaatcctggatctgtatgctttgagcaaggaaggatttgatgccctggatccctttattcccatcctggtttccaactataacccaaaggaatttgaa

SEQ ID NO: 838348 - DNA, 100 bp, Homo sapiens
agaaaccattacaatagatcgagcctgcagacaagaaacattcgtttatgagatgatttttaaagagcgagaagaagatttgaggcgtttgtctcgccca

SEQ ID NO: 838349 - DNA, 114 bp, Homo sapiens
gccacacaacgactggaacatgcattcaacatcgccagatatcaattaggcatagagaaactactcgatcctgaaggtgatttgatgaaggctgctgcaggagagttcgcagat

SEQ ID NO: 838350 - DNA, 98 bp, Homo sapiens
gcggctcagttgtccatgaccctgaaggtccaggagtacccgaccctcaagatcactttgccagctgtgtggaggatggatttgagggagacaagact

SEQ ID NO: 838351 - DNA, 99 bp, Homo sapiens
ggtgctgtttgtagagatgacaacactgataaaatccactcattgctgactgggctggcttagatgaagatgaagatgcacatgtctgggaggataatt

SEQ ID NO: 838352 - DNA, 99 bp, Homo sapiens
agctgtgcaacttggagcattttagcttggtaacactgatcccctttcaggtcccacgtacctcggagatttatgtccaccgaagtggtcgaactgctc

SEQ ID NO: 838353 - DNA, 100 bp, Homo sapiens
agcaaagaaggtggccacgggagagggagagatgacatgctggacgtggagaccgatgcctacatccactgcgtcagtgccttcgtcaagctggcgcaga

SEQ ID NO: 838354 - DNA, 98 bp, Homo sapiens
gacttcagtatctggagcatcctcagaaaatgtattggaatgaatgtgacagtgatgataacatgggtgccaaaaatacttcaataggagaagaattt

SEQ ID NO: 838355 - DNA, 100 bp, Homo sapiens
ttcgcagtggtcgcttcttctccttgcagccttcgacgacgcagtggaagaacgagtgatcaacgaggaatacaaaatatggaaaaagaacacccctttt

SEQ ID NO: 838356 - DNA, 100 bp, Homo sapiens
tccgagccagccgctgttttgccggaggagcccctcaggccatgaccgcacctcgagcaggagtggggatgccacgtctgcccccagcgcccggccctct

SEQ ID NO: 838357 - DNA, 98 bp, Homo sapiens
tacagcagagacgtcatacttggaaatggctgcaggttcagaaattcaattcgtcataatctgtccctacacagcaagttcattcgtgtgcagaatga

SEQ ID NO: 838358 - DNA, 100 bp, Homo sapiens
tgattttaaagttatgggactacaacagcagccacaggaaccttgagaattacatgaacgacagccttcgcaccgacgtcttcgtgcggttccagccaga

SEQ ID NO: 838359 - DNA, 100 bp, Homo sapiens
ggaggtatcaactgtaagaagaggaaagacttgtctcagggttcagtttggcaaagacttggtgcagatgtgacagcagttgaatttttaggtcatgtag

SEQ ID NO: 838360 - DNA, 99 bp, Homo sapiens
aaaacagtacatttctgcaattgagaaacaggcacacaagtgtgaggagttgctaaatgctcaggtttaccgacaagactgtgaaactttcgggatggt

SEQ ID NO: 838361 - DNA, 101 bp, Homo sapiens
taactggcatagacaactatgggcaggtgccagcgagatttcagattcctgtaaacctctaaagaaaaggagtcgcgcctcaactgatgtagaaatgacta

SEQ ID NO: 838362 - DNA, 100 bp, Homo sapiens
gtggctgcactcactctacgtggagttgggccctgcaggaaggacggacttcaggggcagctttggtccacttttcatcgaccagagttggtccgaccag

SEQ ID NO: 838363 - DNA, 98 bp, Homo sapiens
aaagaaacccggatttgtgaggtgcggccttgtggacagccagtgtacagcagcctgaaaatttaggaccaataagtcttaattggtttgaagaactt

SEQ ID NO: 838364 - DNA, 100 bp, Homo sapiens
gccctgttaaaggatggctttggctttgcagacagcacagtcttacagcattcagcaactagttcctgaatataaggaaaaacagacacctgaaagtctt

SEQ ID NO: 838365 - DNA, 98 bp, Homo sapiens
gcacctgaaaagacatgtgcgagaggagttgatccccctcatattgtgtacagcatgtctacatcctgagcctaaagagcgagatcagcttctccaca

SEQ ID NO: 838366 - DNA, 100 bp, Homo sapiens
cattaatggaagagattgggttcttggtgcttggcatgaggtttctccagcatttggctctaggtgccaagggcacatgtgacaagaaggtgccagcttt

SEQ ID NO: 838367 - DNA, 99 bp, Homo sapiens
cgcctgaagtgcgggcgcagctggcggagctggagctggagctctcggaggacttggagatcacggtcccaattcggcactcacagcacctgcctgcaa

SEQ ID NO: 838368 - DNA, 98 bp, Homo sapiens
tgtacgacagcttcgacaacacataccaggttgaatataagctgggattccaagtggacaatgttttggcaatggatatgccccaggtcaacatttct

SEQ ID NO: 838369 - DNA, 98 bp, Homo sapiens
acgggcaataagactctttaaagaaggcaaggagagaatgtatgaagaacagtcacaggacagaatatttctcttagaagatgacatccatgtttcct

SEQ ID NO: 838370 - DNA, 100 bp, Homo sapiens
aaaggcgcggaggaagcggagcggcgcgcgcgggacaagcaggttctccagaagctggggaaggcagatgagaccaaggatgagcagtttgagcagtgcg

SEQ ID NO: 838371 - DNA, 99 bp, Homo sapiens
aggaggaaaggccagactcacagaaggttccagaagctacacctggcctgtggctcagagcgcttaaccctacgctcccctctccagccactgatctcc

SEQ ID NO: 838372 - DNA, 98 bp, Homo sapiens
gaaacagcagcaacatttttgaaaaagattgttttcagagggaggcaacttttctcctaaagaaatcaattcactgtgttcccgactggagaaggaag

SEQ ID NO: 838373 - DNA, 98 bp, Homo sapiens
tgaaacatgtgaacactcaagtgaagcaaaagccttccatgattacctgagatctgtatctgtggacctgaatgttgatccctcgcttcagattgaca

SEQ ID NO: 838374 - DNA, 98 bp, Homo sapiens
cgcgctgcccgcactcctggtcctgctcggggctctgttcccaggatccccctctgtgtgcctgagcgaagcttgtgtctcagtgaccagctccatct

SEQ ID NO: 838375 - DNA, 98 bp, Homo sapiens
aagaactgacagaactaaggaatatatttggccgccaccggcaactaacctatgaccttctgacctctgaactcttcacccaatgatgacctgaccat

SEQ ID NO: 838376 - DNA, 99 bp, Homo sapiens
ttgaagggaattattttcatgcagacagcttgtcaagctgtgcagcatcaaagaggcaggaggaattacatgaacgacagccttcgcaccgacgtcttc

SEQ ID NO: 838377 - DNA, 99 bp, Homo sapiens
ccctttctcctcggcactgtattctttacctgcttcccaatcccactgatgaggatcagcccatgggaaaggcaggatcctggtttcaaaatctcagaa

SEQ ID NO: 838378 - DNA, 98 bp, Homo sapiens
gcagaatttctgaaggtgttcattccatctctcttcctttctcatgttttggctttggggctagggttggtgttcgaggaagagacattgttgttctt

SEQ ID NO: 838379 - DNA, 98 bp, Homo sapiens
tgtacattctttgctgtctattcttcgctatggtgccttatgcaatgaacggaaaacagttcttccttcaaagcatgcagtacctgaagtaatagaag

SEQ ID NO: 838380 - DNA, 100 bp, Homo sapiens
ccacaggacagaggaagtatggtggtcctccaccagacagtgtgtactctggcgtgcaacctggaattggaacggagagcacgaacttccaggagccggt

SEQ ID NO: 838381 - DNA, 98 bp, Homo sapiens
tatctcagcccttcgtactgggacgttggggagggggctgtgccgggcggagagaactcagcgaggattctgagttggtgcttcccgtgctgctgttg

SEQ ID NO: 838382 - DNA, 98 bp, Homo sapiens
gaggagccacaatggagacgccgccgctgcctcccgcgatagcactataatatgcagaaatctacaaattctgatacttccgtggaaacactgaattc

SEQ ID NO: 838383 - DNA, 100 bp, Homo sapiens
agacttccatggactcttaccgaagggttatccccatctgtgctctatatgtgatttgccagttcattctaataagatgatgataattccgaagaaggct

SEQ ID NO: 838384 - DNA, 98 bp, Homo sapiens
aagacctgggcccctgctcagtgcctttgctctatcagccagtagacatgatgagcatcaaagcctttacgcttgtctctgctgtggagcgggagctg

SEQ ID NO: 838385 - DNA, 100 bp, Homo sapiens
cttctgagacggcggcagcagcggcattcaggttcctaaagagaaagatgaaatggtagagcaagagtttaaccggttgctagaagctacatcttacctt

SEQ ID NO: 838386 - DNA, 124 bp, Homo sapiens
cagcgagaggatggtcatccgcgtgttcatcgcctcttcctcgggcttcgtggcgtgtggtcccggaacagcaagcccgtgcacaccaccatcctgaatccccacatccacctgatgggcgacg

SEQ ID NO: 838387 - DNA, 99 bp, Homo sapiens
ctcacgctgggagctgtagaccggagctgttcctattgggccatcttggctccaccaccctgttgcatgatatctcagaatcggaatttctaactgaag

SEQ ID NO: 838388 - DNA, 100 bp, Homo sapiens
cactcacttacacagtattgggaaatctgtgaaagatgcttttactgactctgctatcagtgctaaagtgaatggcgaacacaaagagaaggacctggag

SEQ ID NO: 838389 - DNA, 100 bp, Homo sapiens
tccaggctctcctggatccgtacctaaaaatacatctcagacggcagctattactacaaagcttaccaataaaactttaagcaatagcagtcagtctgag

SEQ ID NO: 838390 - DNA, 51 bp, Homo sapiens
cctctgctgccgccgcccccacgtgaatggctatgtggtgaaccttttctg

SEQ ID NO: 838391 - DNA, 100 bp, Homo sapiens
atcgtgacctggaagccgcccaacaccaccactgagagccccgtcatgggctattttgtggaccgaccagaagctttgtatgcagctgtaaataagaaac

SEQ ID NO: 838392 - DNA, 100 bp, Homo sapiens
ccgggagcagagcgcccgtgagggctacgtgctgcagattatgtttgagaccttcaacaccccggccatgtacgtggccatccaggccgtgctgtccctc

SEQ ID NO: 838393 - DNA, 99 bp, Homo sapiens
ctcaaaacctcgctccggaaaggggacacctggctgacttatccttgtataatgaattccgattgtggaaggatgagcccacaatggacaggacgtgtc

SEQ ID NO: 838394 - DNA, 100 bp, Homo sapiens
ctggaagcagagtaaataaagctcatggcccaccagctagaaagtaaacctatgatggacttgttgatattcctttgtgcacagtatcacttaaatccat

SEQ ID NO: 838395 - DNA, 98 bp, Homo sapiens
ctcatgcagtggtacaaggaccagaagaaactgcaccggaaatgtgcctaccaggccaacatagccgaggtagaggtctccatccctgccaagctgca

SEQ ID NO: 838396 - DNA, 98 bp, Homo sapiens
atggtggactcagagaccaataaaaataaactgcttgaacatcctttgactggttagccagtcactggaggaggatccatggccaagggtgaattcta

SEQ ID NO: 838397 - DNA, 98 bp, Homo sapiens
tcaggtcatctgaaccttctgagaaaacatggtcaacgtcttgaaaggagtgcttatagaatgaggtcctgctgtactagccaccaaagcagctgctg

SEQ ID NO: 838398 - DNA, 129 bp, Homo sapiens
acacatccaggtcctgggccgcaggatcagtgcccgcggcgaggatggggacaagtatgaaactatgttccaacttcctgtcaacaatcttggcagtttaagaaaagcccggaaaactgtgaaaaaaat

SEQ ID NO: 838399 - DNA, 98 bp, Homo sapiens
tctggcagaaacagaggactaattttggcagttctaaatttgaatttgaggcttctcatcagttgaaattggaactcaattcaatgcaggaacaactt

SEQ ID NO: 838400 - DNA, 100 bp, Homo sapiens
ttgcttagagacaacctaacatttaagtgctgtggggctgctaactacacagattgggagaaaatcccttccatgtcgaagaaccgagtccccgactcct

SEQ ID NO: 838401 - DNA, 100 bp, Homo sapiens
acagagcagaaatcaaattgaagagagcagttgaagaagtgaagaaattattggtacctgcacagaagatggctgtgccacccacgtatgccgatcttgg

SEQ ID NO: 838402 - DNA, 100 bp, Homo sapiens
tcttgtggatcctcagtggcggaggctcggtcacccggatacatccagaaagtgcccagaagaaacttcctgctggaaaaaatgaaaaagcagtatttat

SEQ ID NO: 838403 - DNA, 100 bp, Homo sapiens
gagaaaccgcctcgaaaacggagaagcagatttatcagtcctggctagacaagtccacaccctacacggctgtgcgatgggtcgtgacactgggcctgag

SEQ ID NO: 838404 - DNA, 100 bp, Homo sapiens
accagcaccccagatgggtgagagatgtgatcactggtttcgtggcctgaccaaggacctccaagagtgtgtcctgcccagagctcttggaccagcatta

SEQ ID NO: 838405 - DNA, 100 bp, Homo sapiens
ctgactagaggcctgtgttcaggttcttgggtgtctctggggagtccctgggccagaccttcctccagactccagcccacctcttcggagcagctctgct

SEQ ID NO: 838406 - DNA, 100 bp, Homo sapiens
ggagctaatacaggtatcgggaaggagacagccaaagagctggctcagagaggttacaattcaacaaacatggtgtgttgcgggtagaaggcttcttaac

SEQ ID NO: 838407 - DNA, 98 bp, Homo sapiens
ttcctgtgacctctgcctaccatccataaaatactcattcccctctcagtttctcaagtcaaagaaggccctgtcctagcaactagttcaggagctgg

SEQ ID NO: 838408 - DNA, 99 bp, Homo sapiens
gaccgggctcggggagccggtctatggactttccgaagacgagggagagcctggggatgtacaggagatgcctgctccagaatctcctcctggaaggga

SEQ ID NO: 838409 - DNA, 100 bp, Homo sapiens
ccggacctacagctgcattcactgcagagctcacttggccaatcatgatgaactaatttccaagagcagtgtgacctttgaagacgtggctgtaaacttt

SEQ ID NO: 838410 - DNA, 100 bp, Homo sapiens
acagtgccaagttagatgccgattacccacttcgagtcctttattgtggaggtactggttttggattaggaattgttttctcacttaccttctttaaaag

SEQ ID NO: 838411 - DNA, 98 bp, Homo sapiens
cagtggacacctttatatgtacaatttggatcctcaggatggaggagagtgtgtcttaatcaaaacccacagggggacaattcccggaagtggaatta

SEQ ID NO: 838412 - DNA, 98 bp, Homo sapiens
cgaagctatggcctgaagacgggattctttaggttgtgggactggaaaatatcttaaagtgaacagccaggtacataccgtgggctgtgactactgtg

SEQ ID NO: 838413 - DNA, 100 bp, Homo sapiens
gagaaccaggaccttccaccaatattcctgaaaatggcactgaagtggcagcagcatcagggattgcttcctcctggtatgaccatagatttgtttcgag

SEQ ID NO: 838414 - DNA, 98 bp, Homo sapiens
gaaccggcacctgcacacctggatccaggataacggaggctgggttgatgccgtcagaattgttcacattcattctgtcatcatcttacgacgttctg

SEQ ID NO: 838415 - DNA, 100 bp, Homo sapiens
cttccagctatacaagttcctgtgggttggcagcgtcgtgtggatcaaaatggagtgctttatgtcaggcttcttagtgttgaagaaaagaagaaaatag

SEQ ID NO: 838416 - DNA, 98 bp, Homo sapiens
aagtcccatcggaggacctccctgccctgtataccgagggaacaggtgctgctacccccgtatgatgatgccactgtgaatggtgctgccaaggagcc

SEQ ID NO: 838417 - DNA, 98 bp, Homo sapiens
atcccttcccagaaagaagaggaaatgactgagtcccagttgaccactgaaaaacacacatactatctgactgcagattctcccaatatattggaaga

SEQ ID NO: 838418 - DNA, 100 bp, Homo sapiens
aggtggcccccgccccgtcgggcctcacgagatgttttactgtgcctggctaactatagtcgagggggtgatggtcctatgtgtcgcccagtaattctgt

SEQ ID NO: 838419 - DNA, 98 bp, Homo sapiens
tgcatcacagggaacttgagaacctcaagggcaggtgtggccgacgacgatgccctcgctgaggagcgcatgcggagaggccagaacgccctgccagc

SEQ ID NO: 838420 - DNA, 100 bp, Homo sapiens
tttgctcctggatgaatccaagttaacccttaccacccagcagcagggcatcaaggtacaccaggggttggaaaaaccacactaggcaaagaacttgcgt

SEQ ID NO: 838421 - DNA, 102 bp, Homo sapiens
cgggaggaaggaacgaggcaaggagctaaagcagcgtgcgttcagccctgggaatgacagcccatatcaaggcggtgtattctttttgacaattcattttcc

SEQ ID NO: 838422 - DNA, 98 bp, Homo sapiens
tctaagtgccttaagagaggatcgcccaatccacatgcttttccaggtccctccagctacaaggtgggcaccatggcggagaagtttgactgccacta

SEQ ID NO: 838423 - DNA, 100 bp, Homo sapiens
agctttcgaccagctactctcacagtgacaaatttttttaagcaggcacgtgtggttctcaaatataggcattctgatgggaacttgtgtgttaaagtaa

SEQ ID NO: 838424 - DNA, 129 bp, Homo sapiens
ttttgtcaagaccatcttcccaaatggatcagctgcagaggacggaagacttaaagaagattccactgtgtaaagtaattagattcaacatagactacacgattcatttcattgaagagatgatgccgg

SEQ ID NO: 838425 - DNA, 100 bp, Homo sapiens
cacattcccgtcagctggctgatccgcgctgcctttccacagaagaaaacctgtctgcctccatcaccaaacaacctattcatcaaaaggaaaatatcat

SEQ ID NO: 838426 - DNA, 100 bp, Homo sapiens
gccggacttgcctccttcccgcagcgccgtagagatcgctcccactcaggtcacagactggggcagcacctactccgtgtcagtggtggagaccgactac

SEQ ID NO: 838427 - DNA, 99 bp, Homo sapiens
gcgccggccagctgctcttcgccaacttcaaccaggacaacacctaaaccatttacacagctggtgaaagaaatgcagcttcatcgagaagactttgaa

SEQ ID NO: 838428 - DNA, 100 bp, Homo sapiens
cccatgcagccccctctcagctccatgagctccatgaaacccactctgtcgcacagttcagaatgaccgaagaagcatgccgaacacggagtcagaaacg

SEQ ID NO: 838429 - DNA, 100 bp, Homo sapiens
gggctgaattctctctccactcttcgagattggcacacccaggtgcctcgagtctttattggtaaagattgtataggcggatgcagtgatctagtctctt

SEQ ID NO: 838430 - DNA, 98 bp, Homo sapiens
atggcctgctacaatgaactgctccagctggagtttggagaggtgcgatcacaactgaaactcagaaatgccagacgtgaaagctgaagatgaagtgg

SEQ ID NO: 838431 - DNA, 100 bp, Homo sapiens
cctactcagaagaacttgtacagagatgtgatgttggagaactatagcaatctggttttcttggggtacactcaactctgtgactggtggagtgttggag

SEQ ID NO: 838432 - DNA, 100 bp, Homo sapiens
taatcgcctatttgcagtaaatcagaaaaacatgactgcattggagtaagcactatcctttgtactccctcaacgtggcctccatgtggttgaagctagg

SEQ ID NO: 838433 - DNA, 98 bp, Homo sapiens
tcagactcggcatctgattcccaggagattaaaattcagcagccttcgaaagaactttatattgctgttggaatatctggagccatccaacatttagc

SEQ ID NO: 838434 - DNA, 99 bp, Homo sapiens
ggagggaatgatattcagtggtgtttttctcaggtgaaaggagcagtagatgatgatgtagcagaaggagtacaagcgcaagctagccagagtttccct

SEQ ID NO: 838435 - DNA, 98 bp, Homo sapiens
aactccagagcgacaacagagttagcctgggtctgcaggtctttcactaccattcctacagtgattggcaagataccgtttctacctcactctccatg

SEQ ID NO: 838436 - DNA, 100 bp, Homo sapiens
gcgcctcggggaggggaccgcgcccgcctcatttgcgccttgcagcactgctggaccaggctgctgagcttcgtgcttatctgaaatctaaaggagctga

SEQ ID NO: 838437 - DNA, 100 bp, Homo sapiens
tggagccagcattaatgaacttgatgttctccataagtttacccctttacattgggcagcacattctggaagtttggagatggaccacacatccccgacc

SEQ ID NO: 838438 - DNA, 100 bp, Homo sapiens
ttggattttggtggggatgagaagaaggaattaccaggtgtgatcaacacctgcacggtacctgcacgggttgaagctttgagagaagcagcaactgctg

SEQ ID NO: 838439 - DNA, 100 bp, Homo sapiens
aaggacgctttcgccgacgccgtgcagcgggcccgccagatcctgaggaagtatggcgtgccaaagcccaagtttgacaagagcaagtacagcaaggccg

SEQ ID NO: 838440 - DNA, 100 bp, Homo sapiens
cggagagcagtgcagcgtgtgtggggtcgagcttcctgataacgaggctgtggagcagcacaggtcccccacggcccttcaggatgaaagctgcggtgct

SEQ ID NO: 838441 - DNA, 100 bp, Homo sapiens
ctactcctgtgctctccattactggaacagattcctctgtggaagccagggagaagaggagtgtttgcagaagccaaacctgaccacagacactaaggac

SEQ ID NO: 838442 - DNA, 100 bp, Homo sapiens
acgggctacacgtatgcgctcagtcccacaggatcacatgttgaatggtgtaaacagcttatagctgctacaatttctagtcagatttcaggttcagtga

SEQ ID NO: 838443 - DNA, 100 bp, Homo sapiens
cgtacctgtggtccctggatccagtgctactgctacaaataagattattgctcagttgtaactattgtggaccagacaaatgtaaaactaacttgcctgc

SEQ ID NO: 838444 - DNA, 100 bp, Homo sapiens
ggaatctgccttctactccatcgtgggactcagcagccttggtgctcaggtgccagatgcaaagctttccagagtgttgaatcttccaccagaaaacttg

SEQ ID NO: 838445 - DNA, 100 bp, Homo sapiens
gatacttcttagcgctggtgtgcaggagaactacgatgacccgcacaaaacccctgcctccccagttgtccacatcaggggcctgattgacggtgtggtg

SEQ ID NO: 838446 - DNA, 100 bp, Homo sapiens
aaaagatccaagaccattcttcaagtttgcaaagctgaagaaatcaggggagaaacccctgcttggtggaagcctgatggaatatgcaatcttgtctgcc

SEQ ID NO: 838447 - DNA, 99 bp, Homo sapiens
gcagagcggtttcgaagacttggcacaaccagtgtctctgaagaagatgtctcaagtagatattctcgaacagatagaagtgggttccctagatataac

SEQ ID NO: 838448 - DNA, 113 bp, Homo sapiens
agagctccccagtcccccgagaagtttactgggaaaactgccagctgctcagatggaagataaaaagccctttatcctgtcttccatgaggcttcctctcctggacaccaaca

SEQ ID NO: 838449 - DNA, 100 bp, Homo sapiens
accagagataattgataacaccctgtaacagctgagaagatgaagatcctgccaaaggtgatcagagtcgatcagttgaccttggggaagataatgtgac

SEQ ID NO: 838450 - DNA, 100 bp, Homo sapiens
cgggggtcgctggctctgctgctgccgccggcgaaggaggaggcgttgccggtaccttccactggaagaatctcaaacagcgctacttactcaggatcag

SEQ ID NO: 838451 - DNA, 98 bp, Homo sapiens
tttcacgtgccagtgcaaacctggttatcagggagacggcttccgttgcgtgcccggaggatgttttcactccagaatgcaaattcaaggaatctgtg

SEQ ID NO: 838452 - DNA, 100 bp, Homo sapiens
aaaagatgctgttgatttgatgaaggtgttggagagcacaatggctgaacaagtccttcctcaggctttgtatttgagcaatatgcggaaagctgtgaag

SEQ ID NO: 838453 - DNA, 100 bp, Homo sapiens
ggaaaaactggagagcttcatcaaaaatagtgatagctttgataatctcggaagggtgctgacctggaccgggagaagaaggctgccgagtgcaaggtgg

SEQ ID NO: 838454 - DNA, 98 bp, Homo sapiens
ggcacaagaaactttaattgtatggctgaagaatgcgtcactgaccagaagacttgggaagatccccatgaaaaagataagagcacgaactgctttgg

SEQ ID NO: 838455 - DNA, 100 bp, Homo sapiens
aagatttcgactatactaatgagtacagagctaaagttgcagacaagatccagctcatcaataatatgctggacaaagtcaatgagatgattattggtgg

SEQ ID NO: 838456 - DNA, 98 bp, Homo sapiens
atacctccttcccaatgacctccaggaggcctctaacttacagctgcgagttttcaagttggcaaaatcttggccaacgttaaatatgctaataaaga

SEQ ID NO: 838457 - DNA, 98 bp, Homo sapiens
cctcgctgtctacatggggacaggctctggattactgccacagcaagggaatcatgcacagggatgtgaaacctcacaatgtcatgatagatcaccaa

SEQ ID NO: 838458 - DNA, 100 bp, Homo sapiens
cagcccggggtaaaccgctgcaaactcatcaccaggaaagacttcgaaactttgttcaccgattgcaccaatgccagcactcctgtaggaggcctgctga

SEQ ID NO: 838459 - DNA, 100 bp, Homo sapiens
atcagcactttttattaatttgatcagtgatccttcacgttggatccaggatgagaagactgataaaagaagaagctagctgaacagctgtaaaatgccc

SEQ ID NO: 838460 - DNA, 100 bp, Homo sapiens
aagatgccaaaaaagttgttgcaaagcccaaagagatgacaccacgtgaagttccaggaaggatgttacctttgacgatgacagtgttaatcctgctgct

SEQ ID NO: 838461 - DNA, 100 bp, Homo sapiens
atgcccgccacggtataataaaaatattcaatgcactgcaagaaacaagagccaacaagcatctgttatatgaggcatgtgagcgcagcctggcagagat

SEQ ID NO: 838462 - DNA, 98 bp, Homo sapiens
ctacgagaaatctagggccatttatgaaagtaggcggtcttactgaagtaacacaaagcttaaaaatggaaaatgaagagtttaagaagaggttcagt

SEQ ID NO: 838463 - DNA, 100 bp, Homo sapiens
gggagctgtagaccggagctgttcctattcggccatctttgctcctccctgcaactaactccattcttaattggtatccacaaattacccattatcaaaa

SEQ ID NO: 838464 - DNA, 100 bp, Homo sapiens
gtatcagtcctatgaacgggcccgggacatccagtgctgaagctgctgaaagatggcagaagaagtggtggtagtagccaaatttgattatgtggcccaa

SEQ ID NO: 838465 - DNA, 100 bp, Homo sapiens
cactacctcctggctgccgtgaataggcagcctaaaggctgaaaagtcttccactaagaaggcagtaattgaatgctgccctggctcgtcctagaatcat

SEQ ID NO: 838466 - DNA, 100 bp, Homo sapiens
tccccggtggctgctaccccagccagtgtcaacacgacaccggataaaccaaagacagcatctgagcacagaaaggtcaagtactgatttgtgcaagtga

SEQ ID NO: 838467 - DNA, 100 bp, Homo sapiens
gtgtctgaggataacatcatgcagatatggcaaatgtcagagagttcagattcttcagattctgaaagcgactcagagagtgaaccacaacaagtttctg

SEQ ID NO: 838468 - DNA, 100 bp, Homo sapiens
agtcgctgctcattggagtctttaaacatgctgctcactcccaaagcctgacaagttgatgccactgctgtctgagggctcctctggctcaacaatcagc

SEQ ID NO: 838469 - DNA, 99 bp, Homo sapiens
tcaaagaagacaagtttgagaatccagatctctttgccaaattggcattgaattttgctactcagataaaagctgtttggggcaacttcgttaatatga

SEQ ID NO: 838470 - DNA, 100 bp, Homo sapiens
ctcaagtgggtggcctacggcttcaagaagtacttcaccaatgcctggtgctggctcgacttcctcatcgtagacgtcctggaatgccagacaaccacgg

SEQ ID NO: 838471 - DNA, 100 bp, Homo sapiens
tacggcttagaggacttccctttggatgtagcaaggaagaaattgttcagttcttctcaggtcatttcattagagaaattgaaggattttggtgagtgtg

SEQ ID NO: 838472 - DNA, 100 bp, Homo sapiens
gggaagagccggggccgtggctgacatggagcagtgtgaccagtaccgcaaggggatcatctcgggctccgtctgccaggacctgtgtgagctgcatatg

SEQ ID NO: 838473 - DNA, 100 bp, Homo sapiens
gtatgtccaccacagttactttatcccttcatctgtggatgggcagaatgaaactagtgatcgagaagatggcctccccaaaggacatcatgtgacagac

SEQ ID NO: 838474 - DNA, 98 bp, Homo sapiens
ccgccgccgcctcgggaggtgaggacgaggaggaagcgagcagcccagacagcggccacctcaaggccgacggtcgcaaggtcctacggtcaagcatc

SEQ ID NO: 838475 - DNA, 50 bp, Homo sapiens
gccgagcaggctgagcgatacgacggtgtacatcggtgagctcccgcagg

SEQ ID NO: 838476 - DNA, 100 bp, Homo sapiens
ggagcacgagttcaggaaggctcaggaagaggagagcagcaagcgggatatagcagatccattctttgcttattgtaagcaacatgcagataggttagac

SEQ ID NO: 838477 - DNA, 100 bp, Homo sapiens
accccgagtacctgcagcccctgccttccacgccggtcagccccatcgaggtaatatctcagtaagctcaagcacttcagatggaagcacatttacaagt

SEQ ID NO: 838478 - DNA, 100 bp, Homo sapiens
gagctctcctccttcttcctcaactatctcgctgacacgcagatgttcattctggacagagtggaaggtgatacttgttcccttaatgagtttaccataa

SEQ ID NO: 838479 - DNA, 100 bp, Homo sapiens
gacagcacagacagaatccctgctaccagtgaatctggattgggaaagtcgacattaatcaactcattattcctcacagatttgtattctccagagtatc

SEQ ID NO: 838480 - DNA, 100 bp, Homo sapiens
agagtgtgctggtgcctgtcggagaacatcgccaagcagcaacagctggcagcatcacccccggacagcaaggagtacaaaatttcaagctttgagcaga

SEQ ID NO: 838481 - DNA, 98 bp, Homo sapiens
tgggagcagcttcatgactacgcggagcgggagagcggccacaccatgcgagcagcgatggattttgggtggggaagtcctccttgcggagttggcgc

SEQ ID NO: 838482 - DNA, 100 bp, Homo sapiens
cggcggggaaatggggctctgtcactttaagtacagctggagccccgaccgctgtaaggaggtacagcagatccgcgaccagcaccccagcaaaatcccg

SEQ ID NO: 838483 - DNA, 99 bp, Homo sapiens
atccacagccggaccgtcacccgctatcctgccaactctatcgtggtcgtaggaggctgtcctgtctgcagagcaaaatatgctgtgaattccatcaag

SEQ ID NO: 838484 - DNA, 98 bp, Homo sapiens
tgtgagaaaagcgagcctcttctgataactcaggatttacttgaaacaaaaggagaccctaatcttcagatattgatgatgttaagaagttcaaaccg

SEQ ID NO: 838485 - DNA, 100 bp, Homo sapiens
acttcccgggctcaagtgattctcacacctcagcctcctgagtagctgagaccacagctcctctggtgcaagtgtggtagctattgacaacaaaatcgag

SEQ ID NO: 838486 - DNA, 100 bp, Homo sapiens
cagtgtcagctgtacagccacactaactgtgacagggagaaccttgctagtgacatgtatcttatatcacagatggatagtgaccagtatgtgccaatca

SEQ ID NO: 838487 - DNA, 100 bp, Homo sapiens
taatcaactgggagaatgtaactgaaagatacatggcttgcaaaaagtaaaccacgatcgttatgctgagtagctacagcaagctgggtagcaggcagat

SEQ ID NO: 838488 - DNA, 100 bp, Homo sapiens
ccgccatgagctggggcacggagctgtggccttgcccctcttgctcgccttgaaaatggaaaagatgctcgcaggctgctttctgctgatcctcggacag

SEQ ID NO: 838489 - DNA, 98 bp, Homo sapiens
agctgcttctgtccaatcaggctttgcatcccgggacgcttccggttatggcgtcattatgcagccagggcatgggcaagaaggacgaccccaagctg

SEQ ID NO: 838490 - DNA, 100 bp, Homo sapiens
acggttgatcggtgatgccgcaaagaatcaagttgcaatgaaccccaccaacacagtttttggatgactcactggttgtgtggaaggaagtcgatttgac

SEQ ID NO: 838491 - DNA, 98 bp, Homo sapiens
cccacaggaggccaggttggaaagatcgaaagctgctttgcgtcgcagttggagcagcacccccaccgcaggtggcattgaagggagcgtgaagctgc

SEQ ID NO: 838492 - DNA, 100 bp, Homo sapiens
gctggtttggattggatgcagaagaagtatcaaatccgctgctaaattacattggagctgggctatcagtagtaagtacaagccagctgccatgttgtga

SEQ ID NO: 838493 - DNA, 100 bp, Homo sapiens
tctgggggagtacaagaggatgccctgatggcagttagcacactggtggaagaataactgaagtgaagtgatggactccgatttggagagtagtaagacg

SEQ ID NO: 838494 - DNA, 100 bp, Homo sapiens
gaacaaatacagccagagcagtgcacgaaaagcagaaatttgatatgatcaaggatcaatttttaaagcattactctactgactggcagagacaggagag

SEQ ID NO: 838495 - DNA, 101 bp, Homo sapiens
ctcatattgagagctgtcgacagttacgtcaacagaacacatcatccatgtttgggaggagacaggctctcggttccacaactgcctgatccagctatact

SEQ ID NO: 838496 - DNA, 98 bp, Homo sapiens
caatgatgagacagggctgtggcagtgccccttctgtcagcaggacaatttccctgaactaagcgagcttaatcttctccatacagagctggctaaac

SEQ ID NO: 838497 - DNA, 98 bp, Homo sapiens
ttgaggattcattatgaacaaagaagtctcccagagctgaagaagcaggtggagagtgccgagctgaagaaccagcggctcaaggaggttttccagac

SEQ ID NO: 838498 - DNA, 99 bp, Homo sapiens
ggacctgtgaagcaactgaagaaaatgtttgaagcaacaagattgcttgcaacaattgttatgcttattctgaaaaagagttccacgtcctcccttatc

SEQ ID NO: 838499 - DNA, 100 bp, Homo sapiens
gtgctcttgcagttctttctcacatgctgcttagctttcagcattctccagaggcgttccatttgcttgtacctccttttaaacctcaagtaacatctga

SEQ ID NO: 838500 - DNA, 100 bp, Homo sapiens
cataggagaagtgattcttgtgggtggcatgactaggatgcccaagggtcatgtaaaagttgttcaatatttggtaaaggaagtaaatcagttcccttct

SEQ ID NO: 838501 - DNA, 99 bp, Homo sapiens
ttcacggagctgaaggatgaccaggtcaaaaagctctgtggctgtgggctgctgggagtgggcatctggctctccgtgtcccaaggcaactttgccacc

SEQ ID NO: 838502 - DNA, 100 bp, Homo sapiens
agctccccagcagagagcggccccacaacaaaagaggtccagcccctcagagggattgtgtccacctgatctaaatcggaaggtagcacacagacatatg

SEQ ID NO: 838503 - DNA, 100 bp, Homo sapiens
ccaatacactgaggccctggcccagagggacaacgagcccacagcctcggtgccccccgagtcggacgtgtaccggatgctccacgacaatcggaatgag

SEQ ID NO: 838504 - DNA, 98 bp, Homo sapiens
agcgcccagccccctgctatgacccttgcgactctggattaatcgaattacagctgctagccaggaacatggactgaagtatccagcgctcattggga

SEQ ID NO: 838505 - DNA, 101 bp, Homo sapiens
tcaattagaagaggtgattcttcaggtgttgacagagtggcctcagacaaaactgtgaagtagagtttgcatatggtgttgcttaccttctggaaagtgag

SEQ ID NO: 838506 - DNA, 101 bp, Homo sapiens
cctccacctcccacctccctgcgccccgccccgaggttggggctttgaagaatgcagccgggtggattctccacagttttcctcgtgcgtactcacggtgg

SEQ ID NO: 838507 - DNA, 99 bp, Homo sapiens
gggaagagtgtgactgtggtactccaaagtgtttgaaagatgtatggtgatcttgaaacctccagacacaagaaaacttctagcaaattcaggggaagt

SEQ ID NO: 838508 - DNA, 100 bp, Homo sapiens
tcatgccagggagccaagcgtcctgcccggccgactttctgcagggcgactgcaccaaagcgaaacagaagctgaactggaagccccgggtcgctttcga

SEQ ID NO: 838509 - DNA, 99 bp, Homo sapiens
ggccatggccgccgccgatgccgagatgcagaatcctgatacactatcagcaatgtcaaaccctagagcaatgcaggccttgttacagattcagcaggg

SEQ ID NO: 838510 - DNA, 99 bp, Homo sapiens
aagttcttggcaagagaggcatcctccttgaagtatttggctgaggagttttcaatcccactcatgtgctcctcggtgcagaaggccttgtttgaggag

SEQ ID NO: 838511 - DNA, 100 bp, Homo sapiens
tccctggagcggccgccttccagcttacctggctgagcagtgctggaatggcggctttatctacctgatcatgctgcgtcgctttaagcacaaagcccac

SEQ ID NO: 838512 - DNA, 98 bp, Homo sapiens
caaagatgcccaggagaagctggagctggcagagaaaaaggccaccgatgttttccgctgccccatgagtttctttgacaccatcccaataggccggc

SEQ ID NO: 838513 - DNA, 98 bp, Homo sapiens
gggcatgcgaagccgtccctccccgggttgacatcatggacatatgtgagtccatcctggagaggaagcggcatgacagcgaaaggtctacttgcagc

SEQ ID NO: 838514 - DNA, 100 bp, Homo sapiens
aattatccctactacaggactgcggacaagggctggcaggtttgctggttggctcccgagcagacagcaggaaagaagaagcccttcgtgtacacccagg

SEQ ID NO: 838515 - DNA, 100 bp, Homo sapiens
cagatatatctggcctaccatccttctgctgctgaaccaatgccaacagggaactctaatgatccaggacaaagaagttaccctggagtatgtatcaagc

SEQ ID NO: 838516 - DNA, 98 bp, Homo sapiens
ccaattccaacatggtcattatgcttattggaaataaaagatttgtgaagctgggaatcatttcatcaatgtaatgttgtctcatcccaatcacacag

SEQ ID NO: 838517 - DNA, 98 bp, Homo sapiens
cggtgctgtcatggctggagtaaggcccctggctcccagaggtgcaccaaacgacagcccatgtactctcgtgaacatggtgctgctgcatctgagcg

SEQ ID NO: 838518 - DNA, 100 bp, Homo sapiens
tgaggatgacaaactctggagtaattggagccaagaaatgagtatagaacttccagaaagtatgtgtcttaagtttgactgtggtgttcagattcaatta

SEQ ID NO: 838519 - DNA, 123 bp, Homo sapiens
tactccagtagagggttctgattctgtttcttcagtaagccaggaatcccaaaacattcgcagatatggccagtacactatgaaccaggaaagcaccaccatcaaagttatggagaagcctcc

SEQ ID NO: 838520 - DNA, 100 bp, Homo sapiens
cgccgctagacctggacaagtatgtggaaatagcgcggctgtgcaagtacctgccagagaacgacctgaagggattttgcttatgtagcaagagataaag

SEQ ID NO: 838521 - DNA, 98 bp, Homo sapiens
ggagaccgaaaagtggatggaggaggcgatgcacatgattcaaccctatgaaaagataaaggccaggggcttgcctgataatatatcttccgtgttga

SEQ ID NO: 838522 - DNA, 100 bp, Homo sapiens
cacctgttatgagaaagcaggggacatcgcactcctgtatctccaagagatagaaaggcttctgaaagaccatgcctcatccatgcctaacgcagagtcc

SEQ ID NO: 838523 - DNA, 100 bp, Homo sapiens
ccaggtgacagcaatcagctggcctggtttgatactgacctgtaaatcatcctttaggggccgttgcatcctccattgccccctccgcatcagcctcagc

SEQ ID NO: 838524 - DNA, 100 bp, Homo sapiens
gttcaaggaggagaagcttgcagagcagctgaagcaagctgaggagctcaggtgctccatctcgaaaagcgagaaaggcctccagaccaccaacactcag

SEQ ID NO: 838525 - DNA, 100 bp, Homo sapiens
ttgaatgaacagtcccctaccagatgtaccttggaagcaggagccatgacttttcatgagaaagatcagtctaaagaaaaggagaagaaagtgaaaaaaa

SEQ ID NO: 838526 - DNA, 100 bp, Homo sapiens
gcaccatgtggagcgggtggagatcatcatgaaagagaccgtggatgctgaagggttatgtaccgaaggactctaccgtgtcagcgggaataaaactgac

SEQ ID NO: 838527 - DNA, 98 bp, Homo sapiens
ccaaaaggagcggcgcggtcttcgtggtgttcgtggcagggaaacagtgcttcttagtcctacgtcagcagcagtttaatgtccaggctcttgtggcg

SEQ ID NO: 838528 - DNA, 98 bp, Homo sapiens
gagggacacgctggtgcatctgtttgccggaggcgggtcacagaaagtcgagagagccaaatgacgattgaggagaggaagcagctcatcactgtgag

SEQ ID NO: 838529 - DNA, 100 bp, Homo sapiens
ttccagttagtggatatagcacaccatccccagccagaatactcccccagttgcaagaggcgcaggaccgtggaagacttcaacaaattctgcacctttg

SEQ ID NO: 838530 - DNA, 100 bp, Homo sapiens
gtgttgtgagagatttctgcagtgaagattgctgtaaaaaatttcaggattggtactacaaggtttgcctgcaatgagatttcattctctacatttaaag

SEQ ID NO: 838531 - DNA, 123 bp, Homo sapiens
tcgaggctttttttctccagccgagaggacgcggctgtgatatacgaaggcgcatattaaatttcctattgactacccctattcaccacctaccttcagattcttgaccaaaatgtggcaccc

SEQ ID NO: 838532 - DNA, 100 bp, Homo sapiens
tgctgtgtggatgacttcacagcgagggccctgggagctgacttcttggtgcactacggccacagttgcctgagtttgtttctgcgtcacatgatcttgg

SEQ ID NO: 838533 - DNA, 98 bp, Homo sapiens
ggaagacgaggccacagacacttctgatagtgaaggtgcttacactccagagcccctcagcagtttccggtgggctcttctctcaactggcctcatgt

SEQ ID NO: 838534 - DNA, 98 bp, Homo sapiens
ggaaggtggcaagatggtgttggaaagcactatggtgtgggatggaaaccctattttcttttctccaagaccatggttggtctgcttccctcactcgg

SEQ ID NO: 838535 - DNA, 100 bp, Homo sapiens
cagaaaaaacttcagcatgtgccaggaacacaacctcaccttgatcaggcacaacagcaacgccatgaaagagacttggccctcttgaaactaaaggctg

SEQ ID NO: 838536 - DNA, 101 bp, Homo sapiens
cggttgcacaataaaccgacgtttagccaggtccagcccagaatcaaatgcaggttccatctggatatggattgcatcatcaaaactatattgctccctca

SEQ ID NO: 838537 - DNA, 98 bp, Homo sapiens
gtgaactgccttctcttcatcccaacattcctgatgttgctgtgtctcagtttacagatgttaagtccctctgtcgtgaaatcaagcaacgacgtcga

SEQ ID NO: 838538 - DNA, 100 bp, Homo sapiens
ggaccttccggagcttctcagaagacagagggttttcttttgaggttgtgatcaattattcaatcgtgaaagggctgaagtacaatcaggccacgccaac

SEQ ID NO: 838539 - DNA, 100 bp, Homo sapiens
ggaagaagtcaccaaaatgcatctgccattattaagactgccccatcaaaggtcaagctggttttcatcaggtttctggtcctcataccgtgtggttgag

SEQ ID NO: 838540 - DNA, 100 bp, Homo sapiens
ccactacaacgtggctatcccctctgacgtctcccacttccgcttccatgtgttggagcgggccggagagaagtagagtgggctgcgaggagaaggaaac

SEQ ID NO: 838541 - DNA, 100 bp, Homo sapiens
agttcaaagttatatgaagaagtagactctgagctgtttcattaaagatggattttcatccctgacagttggaaatttggtgagcggcctccacctaaac

SEQ ID NO: 838542 - DNA, 100 bp, Homo sapiens
gaacgtgcaaggatgcgaattgtgaatcgcttctccaaacagcgcgggtttaagtggacgccaggtgcaccggacacaggctgtgtttaaccacaccgag

SEQ ID NO: 838543 - DNA, 100 bp, Homo sapiens
gtctccccacatccctggttgttttgcttcagcctcaggttcaaaaaggcatttgaatctgagccaacactacagtcaggaattaattatgcggtcctcc

SEQ ID NO: 838544 - DNA, 100 bp, Homo sapiens
ccgcagccgcgagggcggctacacctgcgagtgcttcgaggacttcactggccttcccttcttcttggtggtgttcttgagtaagataatctggactggc

SEQ ID NO: 838545 - DNA, 51 bp, Homo sapiens
cttcaatatcttcacccagcatgggtgcaacatagaaaatgcctgctaccc

SEQ ID NO: 838546 - DNA, 98 bp, Homo sapiens
cccttacgtcagttgtaaattacagagaacctaagtctgtttgcaaagcacctgaactggatattgattgggtacagacagagaagcatgtgtttgag

SEQ ID NO: 838547 - DNA, 99 bp, Homo sapiens
ccggaaccgcgattcggcgtgtcagaagaaaaagtcagcactttttgaagtgtctgaggttataccagtcatgacaaataattatgaagaaaatatcct

SEQ ID NO: 838548 - DNA, 98 bp, Homo sapiens
atcactcaagagactcttcatttagattggattctgaatatcaggcttgtaatgaacttggacaaacatggatggaatctggggtcagtgaaaatgca

SEQ ID NO: 838549 - DNA, 100 bp, Homo sapiens
gagtgcattccatcctgaagaaatccgtccactccgtggctgtgataggagccccgttctcacaagggcagattctggacaatcaggaagtccaagccac

SEQ ID NO: 838550 - DNA, 100 bp, Homo sapiens
tgtgagacatgtctgagactcctgctcagtgtagcattaaggcaaaaactgattattccaagtggaagttgccctgttattctgaatacttacttttgtg

SEQ ID NO: 838551 - DNA, 100 bp, Homo sapiens
gaccgggctggagccggacgagctgtcggacttcccaagtaagaagcggaagaggagccgctggaaccaagacacaatggaacagaagacagtgattcca

SEQ ID NO: 838552 - DNA, 103 bp, Homo sapiens
ctagggttctagcccacataagagatgatgatgttataatcagaatcaacacagatggggccgaatataacatagagggtgagagtatggacaatttcaactg

SEQ ID NO: 838553 - DNA, 100 bp, Homo sapiens
ttttccttgagctgaacgtcttgcaacagtggccgcacgcataggtgaagctttgttctaagaatatttgtttcatctagtttatgagtccaaatgatat

SEQ ID NO: 838554 - DNA, 100 bp, Homo sapiens
ggacatgggggaggcccactcactctgcttcctcggaccaacagcaaagccttctagacaagctcagtggaatctgaagggcccaccccatggaggaatg

SEQ ID NO: 838555 - DNA, 100 bp, Homo sapiens
gttaatcgagccccatctattcattttctgagagtgttaatctgtctgaggctactaatgagggatccatgttatcagattttaccaaatgttgcaagaa

SEQ ID NO: 838556 - DNA, 98 bp, Homo sapiens
actcctggcagtgcgtcaatcagagcgtcctgtgcgtccacaggtcctggctaccctgggaagagacaagaagtaaatgaagaaagaggaagattcca

SEQ ID NO: 838557 - DNA, 98 bp, Homo sapiens
gatttataccgctgcgctcaatgacagggaccaggggggcggcagcgctggacacccagcctccagataagtgccatagagttcatttccatttgccg

SEQ ID NO: 838558 - DNA, 100 bp, Homo sapiens
tgcgcctcagtcagttggaaggtgtaaatgtggaacgttacaaacagacagggatgacgttgaatgagcggtttgggatcctgaaggaacaaagagccac

SEQ ID NO: 838559 - DNA, 100 bp, Homo sapiens
aatagaagacatgggatttgatgctaccttgtcagttggtggattcaaagtgggattggaccttcttgtagaatttgaattccgcacaactacaacgact

SEQ ID NO: 838560 - DNA, 100 bp, Homo sapiens
tttctcaatacgaggcgcaaggtggactggctgactgagaagatgcatgccagagacttcacagtttctgctctgggggacttgatctcatcttcatgcc

SEQ ID NO: 838561 - DNA, 100 bp, Homo sapiens
cgagatccagttcctgcgaactctgggatctagcaattgggaggcagcagacttgggtaatgaagagagaaaacaaaagttcttgagacttatgggtgca

SEQ ID NO: 838562 - DNA, 100 bp, Homo sapiens
atccggcccctcccctcgcctcctctcctaggtgccggccgggagggcggccgcagcagcattatctgcataccagaggtactacagtttacagtctgac

SEQ ID NO: 838563 - DNA, 99 bp, Homo sapiens
cttctactcaacctactcattcatggaaagtaggagacaagtgtatggcagtctggagtgaagatggacagctgtcctggaggaccacagtcagatgag

SEQ ID NO: 838564 - DNA, 101 bp, Homo sapiens
ggagtgcatcaagtgccacatcaacgtgtatccacacaagcaggtgggaatggaagtggccccacatctcaaagaaaccctaaataagaacttttttgact

SEQ ID NO: 838565 - DNA, 98 bp, Homo sapiens
tcaaaatgaagaggaagcccagaaagggaaaaactaccagaacggagatgtgtttggcgttttattagctctctgggagtgagctacatgatgttgtg

SEQ ID NO: 838566 - DNA, 100 bp, Homo sapiens
ggacagtactttttgagattgccaaaccttgcgtttcagttgctttgaattacggaatttataagcaggatctcccaagcctggatgagaaacctcggat

SEQ ID NO: 838567 - DNA, 98 bp, Homo sapiens
ggtcttcaatgccagaatggtgtttgaaaaggagcagtttttgcaagaaaggatcaaagtgaacggaaaagctgggaaccttggtggaggggtggtga

SEQ ID NO: 838568 - DNA, 100 bp, Homo sapiens
cctctgcttgccactccttaattgctcaagagtgaagacatttccacctggacacctgaccatgtgcctgccctgagcagcgaggcccaccaggcatctc

SEQ ID NO: 838569 - DNA, 100 bp, Homo sapiens
aacttgctcctttcacagcgcctcacaaggacaagtcattttctgatcaaagaaggtgcttgtgaatgacttcttcttggtggcttgtcttgaggatttc

SEQ ID NO: 838570 - DNA, 100 bp, Homo sapiens
caacatgctgggcttgtccaacacagtgatgcggctcatcgagaagcgggctttccaggacaagtactttatgatagtgcagtgtgccctgaaccgccct

SEQ ID NO: 838571 - DNA, 99 bp, Homo sapiens
ggggattctcgacctgctaacagaactggaccttttcgggcatggtgctgatgtgaaatgtgtagactggcatccaaccaaagggttagttgtttcagg

SEQ ID NO: 838572 - DNA, 99 bp, Homo sapiens
ggtgacctgcctcattcccaacctgcctctccaggttggaaccagaaaagcctccctaaagatggaccaagaaagagagatgctgaggaaagagacctc

SEQ ID NO: 838573 - DNA, 99 bp, Homo sapiens
cattatccaacggctgctggaagtgtttaactgctgaagagatcttttcccttcatggcttttcaaatgctacccaaataaccagctccaaattctctg

SEQ ID NO: 838574 - DNA, 100 bp, Homo sapiens
cggcagcgggacccggcgaagacgcgaccgcggcgcgagtcaccatggtgaccattgtgaggtagatattttgttctaattttccagatgaggaagctga

SEQ ID NO: 838575 - DNA, 98 bp, Homo sapiens
aaaagatccctggaatatgaagagacacagtatggtagccacacccccagatatgcacccaatgtccagggagcgtgcaaaatttgtcaaaagtggcc

SEQ ID NO: 838576 - DNA, 100 bp, Homo sapiens
tatcggataatgcaacagcttttagcaacagatccaaacaacttcgaaggcaaatgtggtggcgtggatgcaaaagtgttgcggagataggaacatggga

SEQ ID NO: 838577 - DNA, 98 bp, Homo sapiens
ggagcgcatgcaacagaagtatgaggccagccgggaggacatctacaagcggctctacattaatcatactcctccaccactgtccaagagtaaggaga

SEQ ID NO: 838578 - DNA, 99 bp, Homo sapiens
tgggattcacaccaggaaagaacgccacgaagaaggaatgccaccattggttcaggcaatcttcagcggtgatccagaggagatccggatgctcatcca

SEQ ID NO: 838579 - DNA, 100 bp, Homo sapiens
acatggagaaccacagttgctttgagcacatgcaccacatacctgcggcaccagttagaagacaaatgaaagctaagcaactcagtgcacaatcttacgg

SEQ ID NO: 838580 - DNA, 51 bp, Homo sapiens
gagtgcggatttctgctatgatgacaggttgactttggcagaatatcatga

SEQ ID NO: 838581 - DNA, 98 bp, Homo sapiens
ggagccatagtacctacagcagcactccaggaggaggcaaaacagattcagaatctgcagaaagcaggcactcgtacagactcaagggaggatgagat

SEQ ID NO: 838582 - DNA, 99 bp, Homo sapiens
ttgcttcaatacccaagggtccttcaagtgtaaatgcaagcagggatataaaggcaatggacttcggtgttctgttctttattggtgaaaacatgaatc

SEQ ID NO: 838583 - DNA, 100 bp, Homo sapiens
aaaaagaagccgaagaaagaagaggaacagaagtggaaatgtgccagaacagataaagcccagtgtaagccagcctcagcctgccaactctaataacggc

SEQ ID NO: 838584 - DNA, 98 bp, Homo sapiens
cggctgtggatatgctacacaccgtgacggaaccaattcaggcattggaaaccctaattgttgatctcgtgagctgcgggaaggagcactccctggct

SEQ ID NO: 838585 - DNA, 110 bp, Homo sapiens
gaaattcttatgccggtctagatccaagcaaccagcacctcaatgacctgaagaaggagaacttcagcctcaagctgcgcatctacttcctggaggagcgcatgcaacag

SEQ ID NO: 838586 - DNA, 100 bp, Homo sapiens
ggacaagtgttttgtacattgggagagatcgttggttcacagggaagtcgcctggaaaaaccaatagtgttcttttgaagtaaccagtgatcttttttgc

SEQ ID NO: 838587 - DNA, 98 bp, Homo sapiens
ttccctgtcccatcgcaaacccaaagatccccgttcctggagattctgattgagaatggtgcccagaagtcctgggacttcatgaagacgcatgacag

SEQ ID NO: 838588 - DNA, 100 bp, Homo sapiens
caagaggaggacagttcgctacacagcaatgcatcgagaacgctcactctggggaagctggttgccatgtaaaagtactactgccctgagaccaccatgc

SEQ ID NO: 838589 - DNA, 100 bp, Homo sapiens
ctggacatcagatcagagtataagcggatgtacggcaagtcgctgtaccacgacatctcggtggcgttcaagatgtacttgggcatcactccaagcatta

SEQ ID NO: 838590 - DNA, 100 bp, Homo sapiens
agccccgacgaacatttctgggtgacactcaacaggattcccggtttttcacgactgaaaacaacatagcaaaataagccaagatgtctgtggatccaat

SEQ ID NO: 838591 - DNA, 99 bp, Homo sapiens
ctccgtcaatgggtccctgttcacatcctccagaatcgccctgaagtctggctatggaaaatatcttggtataaattcagatggacttgttgttgggcg

SEQ ID NO: 838592 - DNA, 99 bp, Homo sapiens
aaaaggagagcgttcttccatgcggttagcatggcctcattgaaagaactagatcaaagactctttgaaaattacatcgagttgaaagcagatcccatc

SEQ ID NO: 838593 - DNA, 100 bp, Homo sapiens
ctagtatgccacaaaacagcacccagagtgctgcagtaactacattcactcaggacaggcagataaggaggagatgttaaagtaacccatcttgcaggac

SEQ ID NO: 838594 - DNA, 100 bp, Homo sapiens
ggcagtcacaggcacatcagcaaagagcaagctctattgccaagattggctcagatcctttaaaactggtacgtgatgctatggaggaaaccacggactg

SEQ ID NO: 838595 - DNA, 100 bp, Homo sapiens
ctacagagactgaagaggactcaggagcaaatcagtaatgctttgctctctgtacatgatactgtggctcagaagaattacgacccagtgttgcctccta

SEQ ID NO: 838596 - DNA, 99 bp, Homo sapiens
agaatttgatgctgtggttggatatttagaggacattatcatgggaggaattttgttgtcagagaataaaaggaggttgtccataattgactttaagca

SEQ ID NO: 838597 - DNA, 98 bp, Homo sapiens
gcctttgctggtgcagtgagagcagcttcaggaaagcagatggtggagctgaatatgccacttaccagactaaatcaaccactccagcagagcagaga

SEQ ID NO: 838598 - DNA, 99 bp, Homo sapiens
tggcattggcgaggcccaagagcagtgataatgtgaaggctgtgtctgagactcctgcagtgccaccagtttcagaagatgaggatgatgatgatgatg

SEQ ID NO: 838599 - DNA, 99 bp, Homo sapiens
gaagaggcgttgcggcgaaaggaacggctgaaggccctacgggagaaaaccgggcgcaagttaagccttcaggtgcgagatgttacgttgatggatctg

SEQ ID NO: 838600 - DNA, 100 bp, Homo sapiens
tggatgaaaattgggaaggttccctcaagtccaagttttcatggagtgataatgaaaggagcagcagccgcattaatatcccagagagagcaagtggacc

SEQ ID NO: 838601 - DNA, 100 bp, Homo sapiens
aaaagaaataatagaacaagggatagatttgttggattcagatgccgaggacacagtacttcctcagaaagaagacagaatttgcaaaagagaccagata

SEQ ID NO: 838602 - DNA, 113 bp, Homo sapiens
ttcaacccggaccgggagggctggctcctgaagctggtctgatgaccgggattccaagcgggattcccttgaggagggggagctgagagatcactgcatggagatcacaataa

SEQ ID NO: 838603 - DNA, 100 bp, Homo sapiens
ggaacatgtctgagtcggagctcggcaggaagtgggaccggtgtctggcggatgcggtcgtgaagatagtttttccagaggcctcaaatacagcctccta

SEQ ID NO: 838604 - DNA, 98 bp, Homo sapiens
tgacctggagacccttcaagctctctatgagaataagacctatttggagactgcttcctgtcaccataaaatcctgaacatttgtcttgaacatgaac

SEQ ID NO: 838605 - DNA, 99 bp, Homo sapiens
aaaatgcaggaacaacagatgcagattattcagagctgggagagcttcccccacgatctcctttagaaccagtttgtgaagatgggccctttggccccc

SEQ ID NO: 838606 - DNA, 98 bp, Homo sapiens
tggaaaagcaagcaaaggagtttaaggaccgagaagatctggtcccctacacaggggaaaaacgaggtacccgcaagatggagtacaagggcagcagc

SEQ ID NO: 838607 - DNA, 98 bp, Homo sapiens
ccgcttctctcctcctcctctccacgctggggggatcctggggtcagtatagaccttctgatttgctgtgccctgagacatatgtttgggtacccatt

SEQ ID NO: 838608 - DNA, 98 bp, Homo sapiens
gcctggggaatgaagcagaagaaaaacatagttcagaagctactgaggtgaaccctgagagcctggagctaagtccagtagtagcaaagccccaaatc
